United States Patent Application Publication US 2018/0305689 A1 - sequence listing, part 33

SEQ ID NO: 443579 - RNA, 19 nt, Artificial Sequence
  Description of Artificial Sequence: Synthetic oligonucleotide
  Sense strand starting at position 3077 of SEQ ID NO: 316829
uuccauuucuccuacgaag

SEQ ID NO: 443580 - RNA, 19 nt, Artificial Sequence
  Description of Artificial Sequence: Synthetic oligonucleotide
  Antisense Strand to SEQ ID NO: 443579
cuucguaggagaaauggaa

SEQ ID NO: 443581 - RNA, 19 nt, Artificial Sequence
  Description of Artificial Sequence: Synthetic oligonucleotide
  Sense strand starting at position 3141 of SEQ ID NO: 316829
cgcauacuuguuucgcaga

SEQ ID NO: 443582 - RNA, 19 nt, Artificial Sequence
  Description of Artificial Sequence: Synthetic oligonucleotide
  Antisense Strand to SEQ ID NO: 443581
ucugcgaaacaaguaugcg

SEQ ID NO: 443583 - RNA, 19 nt, Artificial Sequence
  Description of Artificial Sequence: Synthetic oligonucleotide
  Sense strand starting at position 3143 of SEQ ID NO: 316829
cauacuuguuucgcagagu

SEQ ID NO: 443584 - RNA, 19 nt, Artificial Sequence
  Description of Artificial Sequence: Synthetic oligonucleotide
  Antisense Strand to SEQ ID NO: 443583
acucugcgaaacaaguaug

SEQ ID NO: 443585 - RNA, 19 nt, Artificial Sequence
  Description of Artificial Sequence: Synthetic oligonucleotide
  Sense strand starting at position 3181 of SEQ ID NO: 316829
agucacuaaugucuguuaa

SEQ ID NO: 443586 - RNA, 19 nt, Artificial Sequence
  Description of Artificial Sequence: Synthetic oligonucleotide
  Antisense Strand to SEQ ID NO: 443585
uuaacagacauuagugacu

SEQ ID NO: 443587 - RNA, 19 nt, Artificial Sequence
  Description of Artificial Sequence: Synthetic oligonucleotide
  Sense strand starting at position 3182 of SEQ ID NO: 316829
gucacuaaugucuguuaaa

SEQ ID NO: 443588 - RNA, 19 nt, Artificial Sequence
  Description of Artificial Sequence: Synthetic oligonucleotide
  Antisense Strand to SEQ ID NO: 443587
uuuaacagacauuagugac

SEQ ID NO: 443589 - RNA, 19 nt, Artificial Sequence
  Description of Artificial Sequence: Synthetic oligonucleotide
  Sense strand starting at position 3183 of SEQ ID NO: 316829
ucacuaaugucuguuaaag

SEQ ID NO: 443590 - RNA, 19 nt, Artificial Sequence
  Description of Artificial Sequence: Synthetic oligonucleotide
  Antisense Strand to SEQ ID NO: 443589
cuuuaacagacauuaguga

SEQ ID NO: 443591 - RNA, 19 nt, Artificial Sequence
  Description of Artificial Sequence: Synthetic oligonucleotide
  Sense strand starting at position 3205 of SEQ ID NO: 316829
cuucgaaugccacgagcau

SEQ ID NO: 443592 - RNA, 19 nt, Artificial Sequence
  Description of Artificial Sequence: Synthetic oligonucleotide
  Antisense Strand to SEQ ID NO: 443591
augcucguggcauucgaag

SEQ ID NO: 443593 - RNA, 19 nt, Artificial Sequence
  Description of Artificial Sequence: Synthetic oligonucleotide
  Sense strand starting at position 3206 of SEQ ID NO: 316829
uucgaaugccacgagcauu

SEQ ID NO: 443594 - RNA, 19 nt, Artificial Sequence
  Description of Artificial Sequence: Synthetic oligonucleotide
  Antisense Strand to SEQ ID NO: 443593
aaugcucguggcauucgaa

SEQ ID NO: 443595 - RNA, 19 nt, Artificial Sequence
  Description of Artificial Sequence: Synthetic oligonucleotide
  Sense strand starting at position 3398 of SEQ ID NO: 316829
aauugaaacuggcuguuau

SEQ ID NO: 443596 - RNA, 19 nt, Artificial Sequence
  Description of Artificial Sequence: Synthetic oligonucleotide
  Antisense Strand to SEQ ID NO: 443595
auaacagccaguuucaauu

SEQ ID NO: 443597 - RNA, 19 nt, Artificial Sequence
  Description of Artificial Sequence: Synthetic oligonucleotide
  Sense strand starting at position 3399 of SEQ ID NO: 316829
auugaaacuggcuguuauu

SEQ ID NO: 443598 - RNA, 19 nt, Artificial Sequence
  Description of Artificial Sequence: Synthetic oligonucleotide
  Antisense Strand to SEQ ID NO: 443597
aauaacagccaguuucaau

SEQ ID NO: 443599 - RNA, 19 nt, Artificial Sequence
  Description of Artificial Sequence: Synthetic oligonucleotide
  Sense strand starting at position 3406 of SEQ ID NO: 316829
cuggcuguuauuuggcaga

SEQ ID NO: 443600 - RNA, 19 nt, Artificial Sequence
  Description of Artificial Sequence: Synthetic oligonucleotide
  Antisense Strand to SEQ ID NO: 443599
ucugccaaauaacagccag

SEQ ID NO: 443601 - RNA, 19 nt, Artificial Sequence
  Description of Artificial Sequence: Synthetic oligonucleotide
  Sense strand starting at position 3419 of SEQ ID NO: 316829
ggcagagggagacguuaau

SEQ ID NO: 443602 - RNA, 19 nt, Artificial Sequence
  Description of Artificial Sequence: Synthetic oligonucleotide
  Antisense Strand to SEQ ID NO: 443601
auuaacgucucccucugcc

SEQ ID NO: 443603 - RNA, 19 nt, Artificial Sequence
  Description of Artificial Sequence: Synthetic oligonucleotide
  Sense strand starting at position 3461 of SEQ ID NO: 316829
agucaagaauucgcaccau

SEQ ID NO: 443604 - RNA, 19 nt, Artificial Sequence
  Description of Artificial Sequence: Synthetic oligonucleotide
  Antisense Strand to SEQ ID NO: 443603
auggugcgaauucuugacu

SEQ ID NO: 443605 - RNA, 19 nt, Artificial Sequence
  Description of Artificial Sequence: Synthetic oligonucleotide
  Sense strand starting at position 3545 of SEQ ID NO: 316829
agaacaauauuucgagaua

SEQ ID NO: 443606 - RNA, 19 nt, Artificial Sequence
  Description of Artificial Sequence: Synthetic oligonucleotide
  Antisense Strand to SEQ ID NO: 443605
uaucucgaaauauuguucu

SEQ ID NO: 443607 - RNA, 19 nt, Artificial Sequence
  Description of Artificial Sequence: Synthetic oligonucleotide
  Sense strand starting at position 3557 of SEQ ID NO: 316829
cgagauauuaacggaggau

SEQ ID NO: 443608 - RNA, 19 nt, Artificial Sequence
  Description of Artificial Sequence: Synthetic oligonucleotide
  Antisense Strand to SEQ ID NO: 443607
auccuccguuaauaucucg

SEQ ID NO: 443609 - RNA, 19 nt, Artificial Sequence
  Description of Artificial Sequence: Synthetic oligonucleotide
  Sense strand starting at position 3782 of SEQ ID NO: 316829
guuuccaggcucugaaauu

SEQ ID NO: 443610 - RNA, 19 nt, Artificial Sequence
  Description of Artificial Sequence: Synthetic oligonucleotide
  Antisense Strand to SEQ ID NO: 443609
aauuucagagccuggaaac

SEQ ID NO: 443611 - RNA, 19 nt, Artificial Sequence
  Description of Artificial Sequence: Synthetic oligonucleotide
  Sense strand starting at position 3871 of SEQ ID NO: 316829
acagcacucccaugguaaa

SEQ ID NO: 443612 - RNA, 19 nt, Artificial Sequence
  Description of Artificial Sequence: Synthetic oligonucleotide
  Antisense Strand to SEQ ID NO: 443611
uuuaccaugggagugcugu

SEQ ID NO: 443613 - RNA, 19 nt, Artificial Sequence
  Description of Artificial Sequence: Synthetic oligonucleotide
  Sense strand starting at position 178 of SEQ ID NO: 316830
uacuauuauguuugaagag

SEQ ID NO: 443614 - RNA, 19 nt, Artificial Sequence
  Description of Artificial Sequence: Synthetic oligonucleotide
  Antisense Strand to SEQ ID NO: 443613
cucuucaaacauaauagua

SEQ ID NO: 443615 - RNA, 19 nt, Artificial Sequence
  Description of Artificial Sequence: Synthetic oligonucleotide
  Sense strand starting at position 199 of SEQ ID NO: 316830
guauuaaagcuuuaagagu

SEQ ID NO: 443616 - RNA, 19 nt, Artificial Sequence
  Description of Artificial Sequence: Synthetic oligonucleotide
  Antisense Strand to SEQ ID NO: 443615
acucuuaaagcuuuaauac

SEQ ID NO: 443617 - RNA, 19 nt, Artificial Sequence
  Description of Artificial Sequence: Synthetic oligonucleotide
  Sense strand starting at position 244 of SEQ ID NO: 316830
ucuuuaagucuuuacugga

SEQ ID NO: 443618 - RNA, 19 nt, Artificial Sequence
  Description of Artificial Sequence: Synthetic oligonucleotide
  Antisense Strand to SEQ ID NO: 443617
uccaguaaagacuuaaaga

SEQ ID NO: 443619 - RNA, 19 nt, Artificial Sequence
  Description of Artificial Sequence: Synthetic oligonucleotide
  Sense strand starting at position 435 of SEQ ID NO: 316830
cucugcauuuggucaccua

SEQ ID NO: 443620 - RNA, 19 nt, Artificial Sequence
  Description of Artificial Sequence: Synthetic oligonucleotide
  Antisense Strand to SEQ ID NO: 443619
uaggugaccaaaugcagag

SEQ ID NO: 443621 - RNA, 19 nt, Artificial Sequence
  Description of Artificial Sequence: Synthetic oligonucleotide
  Sense strand starting at position 606 of SEQ ID NO: 316830
aguucuggccuguaaauua

SEQ ID NO: 443622 - RNA, 19 nt, Artificial Sequence
  Description of Artificial Sequence: Synthetic oligonucleotide
  Antisense Strand to SEQ ID NO: 443621
uaauuuacaggccagaacu

SEQ ID NO: 443623 - RNA, 19 nt, Artificial Sequence
  Description of Artificial Sequence: Synthetic oligonucleotide
  Sense strand starting at position 614 of SEQ ID NO: 316830
ccuguaaauuaggucauca

SEQ ID NO: 443624 - RNA, 19 nt, Artificial Sequence
  Description of Artificial Sequence: Synthetic oligonucleotide
  Antisense Strand to SEQ ID NO: 443623
ugaugaccuaauuuacagg

SEQ ID NO: 443625 - RNA, 19 nt, Artificial Sequence
  Description of Artificial Sequence: Synthetic oligonucleotide
  Sense strand starting at position 616 of SEQ ID NO: 316830
uguaaauuaggucaucaac

SEQ ID NO: 443626 - RNA, 19 nt, Artificial Sequence
  Description of Artificial Sequence: Synthetic oligonucleotide
  Antisense Strand to SEQ ID NO: 443625
guugaugaccuaauuuaca

SEQ ID NO: 443627 - RNA, 19 nt, Artificial Sequence
  Description of Artificial Sequence: Synthetic oligonucleotide
  Sense strand starting at position 667 of SEQ ID NO: 316830
gcuuaagcaguuuaucuau

SEQ ID NO: 443628 - RNA, 19 nt, Artificial Sequence
  Description of Artificial Sequence: Synthetic oligonucleotide
  Antisense Strand to SEQ ID NO: 443627
auagauaaacugcuuaagc

SEQ ID NO: 443629 - RNA, 19 nt, Artificial Sequence
  Description of Artificial Sequence: Synthetic oligonucleotide
  Sense strand starting at position 812 of SEQ ID NO: 316830
uggauauauccacgacuga

SEQ ID NO: 443630 - RNA, 19 nt, Artificial Sequence
  Description of Artificial Sequence: Synthetic oligonucleotide
  Antisense Strand to SEQ ID NO: 443629
ucagucguggauauaucca

SEQ ID NO: 443631 - RNA, 19 nt, Artificial Sequence
  Description of Artificial Sequence: Synthetic oligonucleotide
  Sense strand starting at position 902 of SEQ ID NO: 316830
aacauuaggcugcgggaaa

SEQ ID NO: 443632 - RNA, 19 nt, Artificial Sequence
  Description of Artificial Sequence: Synthetic oligonucleotide
  Antisense Strand to SEQ ID NO: 443631
uuucccgcagccuaauguu

SEQ ID NO: 443633 - RNA, 19 nt, Artificial Sequence
  Description of Artificial Sequence: Synthetic oligonucleotide
  Sense strand starting at position 1029 of SEQ ID NO: 316830
ugaggaauaccuggcaaau

SEQ ID NO: 443634 - RNA, 19 nt, Artificial Sequence
  Description of Artificial Sequence: Synthetic oligonucleotide
  Antisense Strand to SEQ ID NO: 443633
auuugccagguauuccuca

SEQ ID NO: 443635 - RNA, 19 nt, Artificial Sequence
  Description of Artificial Sequence: Synthetic oligonucleotide
  Sense strand starting at position 1072 of SEQ ID NO: 316830
gggcgauauugauuacagg

SEQ ID NO: 443636 - RNA, 19 nt, Artificial Sequence
  Description of Artificial Sequence: Synthetic oligonucleotide
  Antisense Strand to SEQ ID NO: 443635
ccuguaaucaauaucgccc

SEQ ID NO: 443637 - RNA, 19 nt, Artificial Sequence
  Description of Artificial Sequence: Synthetic oligonucleotide
  Sense strand starting at position 1078 of SEQ ID NO: 316830
uauugauuacaggguaaau

SEQ ID NO: 443638 - RNA, 19 nt, Artificial Sequence
  Description of Artificial Sequence: Synthetic oligonucleotide
  Antisense Strand to SEQ ID NO: 443637
auuuacccuguaaucaaua

SEQ ID NO: 443639 - RNA, 19 nt, Artificial Sequence
  Description of Artificial Sequence: Synthetic oligonucleotide
  Sense strand starting at position 1223 of SEQ ID NO: 316830
uguuucuaucauggagaga

SEQ ID NO: 443640 - RNA, 19 nt, Artificial Sequence
  Description of Artificial Sequence: Synthetic oligonucleotide
  Antisense Strand to SEQ ID NO: 443639
ucucuccaugauagaaaca

SEQ ID NO: 443641 - RNA, 19 nt, Artificial Sequence
  Description of Artificial Sequence: Synthetic oligonucleotide
  Sense strand starting at position 1260 of SEQ ID NO: 316830
aaaggagucuccucagaug

SEQ ID NO: 443642 - RNA, 19 nt, Artificial Sequence
  Description of Artificial Sequence: Synthetic oligonucleotide
  Antisense Strand to SEQ ID NO: 443641
caucugaggagacuccuuu

SEQ ID NO: 443643 - RNA, 19 nt, Artificial Sequence
  Description of Artificial Sequence: Synthetic oligonucleotide
  Sense strand starting at position 1412 of SEQ ID NO: 316830
gggugauagccacagucca

SEQ ID NO: 443644 - RNA, 19 nt, Artificial Sequence
  Description of Artificial Sequence: Synthetic oligonucleotide
  Antisense Strand to SEQ ID NO: 443643
uggacuguggcuaucaccc

SEQ ID NO: 443645 - RNA, 19 nt, Artificial Sequence
  Description of Artificial Sequence: Synthetic oligonucleotide
  Sense strand starting at position 1984 of SEQ ID NO: 316830
cagcgagaacuuuauaggu

SEQ ID NO: 443646 - RNA, 19 nt, Artificial Sequence
  Description of Artificial Sequence: Synthetic oligonucleotide
  Antisense Strand to SEQ ID NO: 443645
accuauaaaguucucgcug

SEQ ID NO: 443647 - RNA, 19 nt, Artificial Sequence
  Description of Artificial Sequence: Synthetic oligonucleotide
  Sense strand starting at position 2136 of SEQ ID NO: 316830
ugaggauaagccuguggua

SEQ ID NO: 443648 - RNA, 19 nt, Artificial Sequence
  Description of Artificial Sequence: Synthetic oligonucleotide
  Antisense Strand to SEQ ID NO: 443647
uaccacaggcuuauccuca

SEQ ID NO: 443649 - RNA, 19 nt, Artificial Sequence
  Description of Artificial Sequence: Synthetic oligonucleotide
  Sense strand starting at position 2138 of SEQ ID NO: 316830
aggauaagccugugguaga

SEQ ID NO: 443650 - RNA, 19 nt, Artificial Sequence
  Description of Artificial Sequence: Synthetic oligonucleotide
  Antisense Strand to SEQ ID NO: 443649
ucuaccacaggcuuauccu

SEQ ID NO: 443651 - RNA, 19 nt, Artificial Sequence
  Description of Artificial Sequence: Synthetic oligonucleotide
  Sense strand starting at position 2307 of SEQ ID NO: 316830
gcuuuaagcgaucugugca

SEQ ID NO: 443652 - RNA, 19 nt, Artificial Sequence
  Description of Artificial Sequence: Synthetic oligonucleotide
  Antisense Strand to SEQ ID NO: 443651
ugcacagaucgcuuaaagc

SEQ ID NO: 443653 - RNA, 19 nt, Artificial Sequence
  Description of Artificial Sequence: Synthetic oligonucleotide
  Sense strand starting at position 2310 of SEQ ID NO: 316830
uuaagcgaucugugcauuu

SEQ ID NO: 443654 - RNA, 19 nt, Artificial Sequence
  Description of Artificial Sequence: Synthetic oligonucleotide
  Antisense Strand to SEQ ID NO: 443653
aaaugcacagaucgcuuaa

SEQ ID NO: 443655 - RNA, 19 nt, Artificial Sequence
  Description of Artificial Sequence: Synthetic oligonucleotide
  Sense strand starting at position 2347 of SEQ ID NO: 316830
cugugucauccugaacacu

SEQ ID NO: 443656 - RNA, 19 nt, Artificial Sequence
  Description of Artificial Sequence: Synthetic oligonucleotide
  Antisense Strand to SEQ ID NO: 443655
aguguucaggaugacacag

SEQ ID NO: 443657 - RNA, 19 nt, Artificial Sequence
  Description of Artificial Sequence: Synthetic oligonucleotide
  Sense strand starting at position 2355 of SEQ ID NO: 316830
uccugaacacuuggcuuaa

SEQ ID NO: 443658 - RNA, 19 nt, Artificial Sequence
  Description of Artificial Sequence: Synthetic oligonucleotide
  Antisense Strand to SEQ ID NO: 443657
uuaagccaaguguucagga

SEQ ID NO: 443659 - RNA, 19 nt, Artificial Sequence
  Description of Artificial Sequence: Synthetic oligonucleotide
  Sense strand starting at position 2357 of SEQ ID NO: 316830
cugaacacuuggcuuaaau

SEQ ID NO: 443660 - RNA, 19 nt, Artificial Sequence
  Description of Artificial Sequence: Synthetic oligonucleotide
  Antisense Strand to SEQ ID NO: 443659
auuuaagccaaguguucag

SEQ ID NO: 443661 - RNA, 19 nt, Artificial Sequence
  Description of Artificial Sequence: Synthetic oligonucleotide
  Sense strand starting at position 2570 of SEQ ID NO: 316830
ggcauucuucgugcacuua

SEQ ID NO: 443662 - RNA, 19 nt, Artificial Sequence
  Description of Artificial Sequence: Synthetic oligonucleotide
  Antisense Strand to SEQ ID NO: 443661
uaagugcacgaagaaugcc

SEQ ID NO: 443663 - RNA, 19 nt, Artificial Sequence
  Description of Artificial Sequence: Synthetic oligonucleotide
  Sense strand starting at position 2671 of SEQ ID NO: 316830
cuugaauugagcgggaguu

SEQ ID NO: 443664 - RNA, 19 nt, Artificial Sequence
  Description of Artificial Sequence: Synthetic oligonucleotide
  Antisense Strand to SEQ ID NO: 443663
aacucccgcucaauucaag

SEQ ID NO: 443665 - RNA, 19 nt, Artificial Sequence
  Description of Artificial Sequence: Synthetic oligonucleotide
  Sense strand starting at position 2706 of SEQ ID NO: 316830
auaccauuaguaggaucuu

SEQ ID NO: 443666 - RNA, 19 nt, Artificial Sequence
  Description of Artificial Sequence: Synthetic oligonucleotide
  Antisense Strand to SEQ ID NO: 443665
aagauccuacuaaugguau

SEQ ID NO: 443667 - RNA, 19 nt, Artificial Sequence
  Description of Artificial Sequence: Synthetic oligonucleotide
  Sense strand starting at position 2794 of SEQ ID NO: 316830
uugggaggaucuuugguuu

SEQ ID NO: 443668 - RNA, 19 nt, Artificial Sequence
  Description of Artificial Sequence: Synthetic oligonucleotide
  Antisense Strand to SEQ ID NO: 443667
aaaccaaagauccucccaa

SEQ ID NO: 443669 - RNA, 19 nt, Artificial Sequence
  Description of Artificial Sequence: Synthetic oligonucleotide
  Sense strand starting at position 2798 of SEQ ID NO: 316830
gaggaucuuugguuuggga

SEQ ID NO: 443670 - RNA, 19 nt, Artificial Sequence
  Description of Artificial Sequence: Synthetic oligonucleotide
  Antisense Strand to SEQ ID NO: 443669
ucccaaaccaaagauccuc

SEQ ID NO: 443671 - RNA, 19 nt, Artificial Sequence
  Description of Artificial Sequence: Synthetic oligonucleotide
  Sense strand starting at position 2800 of SEQ ID NO: 316830
ggaucuuugguuugggaua

SEQ ID NO: 443672 - RNA, 19 nt, Artificial Sequence
  Description of Artificial Sequence: Synthetic oligonucleotide
  Antisense Strand to SEQ ID NO: 443671
uaucccaaaccaaagaucc

SEQ ID NO: 443673 - RNA, 19 nt, Artificial Sequence
  Description of Artificial Sequence: Synthetic oligonucleotide
  Sense strand starting at position 2875 of SEQ ID NO: 316830
gcagauaaucccugugagg

SEQ ID NO: 443674 - RNA, 19 nt, Artificial Sequence
  Description of Artificial Sequence: Synthetic oligonucleotide
  Antisense Strand to SEQ ID NO: 443673
ccucacagggauuaucugc

SEQ ID NO: 443675 - RNA, 19 nt, Artificial Sequence
  Description of Artificial Sequence: Synthetic oligonucleotide
  Sense strand starting at position 3099 of SEQ ID NO: 316830
ggagaagguuguuccuaca

SEQ ID NO: 443676 - RNA, 19 nt, Artificial Sequence
  Description of Artificial Sequence: Synthetic oligonucleotide
  Antisense Strand to SEQ ID NO: 443675
uguaggaacaaccuucucc

SEQ ID NO: 443677 - RNA, 19 nt, Artificial Sequence
  Description of Artificial Sequence: Synthetic oligonucleotide
  Sense strand starting at position 3107 of SEQ ID NO: 316830
uuguuccuacaguagagau

SEQ ID NO: 443678 - RNA, 19 nt, Artificial Sequence
  Description of Artificial Sequence: Synthetic oligonucleotide
  Antisense Strand to SEQ ID NO: 443677
aucucuacuguaggaacaa

SEQ ID NO: 443679 - RNA, 19 nt, Artificial Sequence
  Description of Artificial Sequence: Synthetic oligonucleotide
  Sense strand starting at position 3149 of SEQ ID NO: 316830
cuaggauuauguguagaag

SEQ ID NO: 443680 - RNA, 19 nt, Artificial Sequence
  Description of Artificial Sequence: Synthetic oligonucleotide
  Antisense Strand to SEQ ID NO: 443679
cuucuacacauaauccuag

SEQ ID NO: 443681 - RNA, 19 nt, Artificial Sequence
  Description of Artificial Sequence: Synthetic oligonucleotide
  Sense strand starting at position 3243 of SEQ ID NO: 316830
ggguauagagggugugaua

SEQ ID NO: 443682 - RNA, 19 nt, Artificial Sequence
  Description of Artificial Sequence: Synthetic oligonucleotide
  Antisense Strand to SEQ ID NO: 443681
uaucacacccucuauaccc

SEQ ID NO: 443683 - RNA, 19 nt, Artificial Sequence
  Description of Artificial Sequence: Synthetic oligonucleotide
  Sense strand starting at position 3254 of SEQ ID NO: 316830
gugugauaaacagaucagu

SEQ ID NO: 443684 - RNA, 19 nt, Artificial Sequence
  Description of Artificial Sequence: Synthetic oligonucleotide
  Antisense Strand to SEQ ID NO: 443683
acugaucuguuuaucacac

SEQ ID NO: 443685 - RNA, 19 nt, Artificial Sequence
  Description of Artificial Sequence: Synthetic oligonucleotide
  Sense strand starting at position 3288 of SEQ ID NO: 316830
cgcagagcagcagaaauua

SEQ ID NO: 443686 - RNA, 19 nt, Artificial Sequence
  Description of Artificial Sequence: Synthetic oligonucleotide
  Antisense Strand to SEQ ID NO: 443685
uaauuucugcugcucugcg

SEQ ID NO: 443687 - RNA, 19 nt, Artificial Sequence
  Description of Artificial Sequence: Synthetic oligonucleotide
  Sense strand starting at position 3387 of SEQ ID NO: 316830
cugauagacuggucuuuga

SEQ ID NO: 443688 - RNA, 19 nt, Artificial Sequence
  Description of Artificial Sequence: Synthetic oligonucleotide
  Antisense Strand to SEQ ID NO: 443687
ucaaagaccagucuaucag

SEQ ID NO: 443689 - RNA, 19 nt, Artificial Sequence
  Description of Artificial Sequence: Synthetic oligonucleotide
  Sense strand starting at position 3656 of SEQ ID NO: 316830
uauaaugaguggucugaac

SEQ ID NO: 443690 - RNA, 19 nt, Artificial Sequence
  Description of Artificial Sequence: Synthetic oligonucleotide
  Antisense Strand to SEQ ID NO: 443689
guucagaccacucauuaua

SEQ ID NO: 443691 - RNA, 19 nt, Artificial Sequence
  Description of Artificial Sequence: Synthetic oligonucleotide
  Sense strand starting at position 3658 of SEQ ID NO: 316830
uaaugaguggucugaacca

SEQ ID NO: 443692 - RNA, 19 nt, Artificial Sequence
  Description of Artificial Sequence: Synthetic oligonucleotide
  Antisense Strand to SEQ ID NO: 443691
ugguucagaccacucauua

SEQ ID NO: 443693 - RNA, 19 nt, Artificial Sequence
  Description of Artificial Sequence: Synthetic oligonucleotide
  Sense strand starting at position 540 of SEQ ID NO: 316831
gugucagaaccauauucug

SEQ ID NO: 443694 - RNA, 19 nt, Artificial Sequence
  Description of Artificial Sequence: Synthetic oligonucleotide
  Antisense Strand to SEQ ID NO: 443693
cagaauaugguucugacac

SEQ ID NO: 443695 - RNA, 19 nt, Artificial Sequence
  Description of Artificial Sequence: Synthetic oligonucleotide
  Sense strand starting at position 722 of SEQ ID NO: 316831
gguggagcuacuugaugaa

SEQ ID NO: 443696 - RNA, 19 nt, Artificial Sequence
  Description of Artificial Sequence: Synthetic oligonucleotide
  Antisense Strand to SEQ ID NO: 443695
uucaucaaguagcuccacc

SEQ ID NO: 443697 - RNA, 19 nt, Artificial Sequence
  Description of Artificial Sequence: Synthetic oligonucleotide
  Sense strand starting at position 853 of SEQ ID NO: 316831
ggcauagucucuuuaauga

SEQ ID NO: 443698 - RNA, 19 nt, Artificial Sequence
  Description of Artificial Sequence: Synthetic oligonucleotide
  Antisense Strand to SEQ ID NO: 443697
ucauuaaagagacuaugcc

SEQ ID NO: 443699 - RNA, 19 nt, Artificial Sequence
  Description of Artificial Sequence: Synthetic oligonucleotide
  Sense strand starting at position 874 of SEQ ID NO: 316831
cgguuauauuauguaagac

SEQ ID NO: 443700 - RNA, 19 nt, Artificial Sequence
  Description of Artificial Sequence: Synthetic oligonucleotide
  Antisense Strand to SEQ ID NO: 443699
gucuuacauaauauaaccg

SEQ ID NO: 443701 - RNA, 19 nt, Artificial Sequence
  Description of Artificial Sequence: Synthetic oligonucleotide
  Sense strand starting at position 898 of SEQ ID NO: 316831
cauaguagacucgggagau

SEQ ID NO: 443702 - RNA, 19 nt, Artificial Sequence
  Description of Artificial Sequence: Synthetic oligonucleotide
  Antisense Strand to SEQ ID NO: 443701
aucucccgagucuacuaug

SEQ ID NO: 443703 - RNA, 19 nt, Artificial Sequence
  Description of Artificial Sequence: Synthetic oligonucleotide
  Sense strand starting at position 1078 of SEQ ID NO: 316831
guccuuuagcugcaagaaa

SEQ ID NO: 443704 - RNA, 19 nt, Artificial Sequence
  Description of Artificial Sequence: Synthetic oligonucleotide
  Antisense Strand to SEQ ID NO: 443703
uuucuugcagcuaaaggac

SEQ ID NO: 443705 - RNA, 19 nt, Artificial Sequence
  Description of Artificial Sequence: Synthetic oligonucleotide
  Sense strand starting at position 1215 of SEQ ID NO: 316831
gcuucugauccacagcaau

SEQ ID NO: 443706 - RNA, 19 nt, Artificial Sequence
  Description of Artificial Sequence: Synthetic oligonucleotide
  Antisense Strand to SEQ ID NO: 443705
auugcuguggaucagaagc

SEQ ID NO: 443707 - RNA, 19 nt, Artificial Sequence
  Description of Artificial Sequence: Synthetic oligonucleotide
  Sense strand starting at position 1299 of SEQ ID NO: 316831
guuacuggaguaggaaaua

SEQ ID NO: 443708 - RNA, 19 nt, Artificial Sequence
  Description of Artificial Sequence: Synthetic oligonucleotide
  Antisense Strand to SEQ ID NO: 443707
uauuuccuacuccaguaac

SEQ ID NO: 443709 - RNA, 19 nt, Artificial Sequence
  Description of Artificial Sequence: Synthetic oligonucleotide
  Sense strand starting at position 1328 of SEQ ID NO: 316831
gucuuaagccacugaaauu

SEQ ID NO: 443710 - RNA, 19 nt, Artificial Sequence
  Description of Artificial Sequence: Synthetic oligonucleotide
  Antisense Strand to SEQ ID NO: 443709
aauuucaguggcuuaagac

SEQ ID NO: 443711 - RNA, 19 nt, Artificial Sequence
  Description of Artificial Sequence: Synthetic oligonucleotide
  Sense strand starting at position 1782 of SEQ ID NO: 316831
ggcucuucccaagggacau

SEQ ID NO: 443712 - RNA, 19 nt, Artificial Sequence
  Description of Artificial Sequence: Synthetic oligonucleotide
  Antisense Strand to SEQ ID NO: 443711
augucccuugggaagagcc

SEQ ID NO: 443713 - RNA, 19 nt, Artificial Sequence
  Description of Artificial Sequence: Synthetic oligonucleotide
  Sense strand starting at position 2115 of SEQ ID NO: 316831
uggcgagacguuaguuaaa

SEQ ID NO: 443714 - RNA, 19 nt, Artificial Sequence
  Description of Artificial Sequence: Synthetic oligonucleotide
  Antisense Strand to SEQ ID NO: 443713
uuuaacuaacgucucgcca

SEQ ID NO: 443715 - RNA, 19 nt, Artificial Sequence
  Description of Artificial Sequence: Synthetic oligonucleotide
  Sense strand starting at position 2279 of SEQ ID NO: 316831
ugagguaauagaugggcua

SEQ ID NO: 443716 - RNA, 19 nt, Artificial Sequence
  Description of Artificial Sequence: Synthetic oligonucleotide
  Antisense Strand to SEQ ID NO: 443715
uagcccaucuauuaccuca

SEQ ID NO: 443717 - RNA, 19 nt, Artificial Sequence
  Description of Artificial Sequence: Synthetic oligonucleotide
  Sense strand starting at position 2280 of SEQ ID NO: 316831
gagguaauagaugggcuaa

SEQ ID NO: 443718 - RNA, 19 nt, Artificial Sequence
  Description of Artificial Sequence: Synthetic oligonucleotide
  Antisense Strand to SEQ ID NO: 443717
uuagcccaucuauuaccuc

SEQ ID NO: 443719 - RNA, 19 nt, Artificial Sequence
  Description of Artificial Sequence: Synthetic oligonucleotide
  Sense strand starting at position 2281 of SEQ ID NO: 316831
agguaauagaugggcuaau

SEQ ID NO: 443720 - RNA, 19 nt, Artificial Sequence
  Description of Artificial Sequence: Synthetic oligonucleotide
  Antisense Strand to SEQ ID NO: 443719
auuagcccaucuauuaccu

SEQ ID NO: 443721 - RNA, 19 nt, Artificial Sequence
  Description of Artificial Sequence: Synthetic oligonucleotide
  Sense strand starting at position 2282 of SEQ ID NO: 316831
gguaauagaugggcuaauu

SEQ ID NO: 443722 - RNA, 19 nt, Artificial Sequence
  Description of Artificial Sequence: Synthetic oligonucleotide
  Antisense Strand to SEQ ID NO: 443721
aauuagcccaucuauuacc

SEQ ID NO: 443723 - RNA, 19 nt, Artificial Sequence
  Description of Artificial Sequence: Synthetic oligonucleotide
  Sense strand starting at position 2646 of SEQ ID NO: 316831
auacaugaacuuugaguuu

SEQ ID NO: 443724 - RNA, 19 nt, Artificial Sequence
  Description of Artificial Sequence: Synthetic oligonucleotide
  Antisense Strand to SEQ ID NO: 443723
aaacucaaaguucauguau

SEQ ID NO: 443725 - RNA, 19 nt, Artificial Sequence
  Description of Artificial Sequence: Synthetic oligonucleotide
  Sense strand starting at position 2680 of SEQ ID NO: 316831
gaugauuacuguucuguau

SEQ ID NO: 443726 - RNA, 19 nt, Artificial Sequence
  Description of Artificial Sequence: Synthetic oligonucleotide
  Antisense Strand to SEQ ID NO: 443725
auacagaacaguaaucauc

SEQ ID NO: 443727 - RNA, 19 nt, Artificial Sequence
  Description of Artificial Sequence: Synthetic oligonucleotide
  Sense strand starting at position 2754 of SEQ ID NO: 316831
aaugcagaauggucacauu

SEQ ID NO: 443728 - RNA, 19 nt, Artificial Sequence
  Description of Artificial Sequence: Synthetic oligonucleotide
  Antisense Strand to SEQ ID NO: 443727
aaugugaccauucugcauu

SEQ ID NO: 443729 - RNA, 19 nt, Artificial Sequence
  Description of Artificial Sequence: Synthetic oligonucleotide
  Sense strand starting at position 2955 of SEQ ID NO: 316831
uuggguaaucagcaugaua

SEQ ID NO: 443730 - RNA, 19 nt, Artificial Sequence
  Description of Artificial Sequence: Synthetic oligonucleotide
  Antisense Strand to SEQ ID NO: 443729
uaucaugcugauuacccaa

SEQ ID NO: 443731 - RNA, 19 nt, Artificial Sequence
  Description of Artificial Sequence: Synthetic oligonucleotide
  Sense strand starting at position 2957 of SEQ ID NO: 316831
ggguaaucagcaugauaag

SEQ ID NO: 443732 - RNA, 19 nt, Artificial Sequence
  Description of Artificial Sequence: Synthetic oligonucleotide
  Antisense Strand to SEQ ID NO: 443731
cuuaucaugcugauuaccc

SEQ ID NO: 443733 - RNA, 19 nt, Artificial Sequence
  Description of Artificial Sequence: Synthetic oligonucleotide
  Sense strand starting at position 2986 of SEQ ID NO: 316831
cugcuuugucuacaaggaa

SEQ ID NO: 443734 - RNA, 19 nt, Artificial Sequence
  Description of Artificial Sequence: Synthetic oligonucleotide
  Antisense Strand to SEQ ID NO: 443733
uuccuuguagacaaagcag

SEQ ID NO: 443735 - RNA, 19 nt, Artificial Sequence
  Description of Artificial Sequence: Synthetic oligonucleotide
  Sense strand starting at position 3054 of SEQ ID NO: 316831
gagaguagugaaugauacu

SEQ ID NO: 443736 - RNA, 19 nt, Artificial Sequence
  Description of Artificial Sequence: Synthetic oligonucleotide
  Antisense Strand to SEQ ID NO: 443735
aguaucauucacuacucuc

SEQ ID NO: 443737 - RNA, 19 nt, Artificial Sequence
  Description of Artificial Sequence: Synthetic oligonucleotide
  Sense strand starting at position 3060 of SEQ ID NO: 316831
agugaaugauacuuugucu

SEQ ID NO: 443738 - RNA, 19 nt, Artificial Sequence
  Description of Artificial Sequence: Synthetic oligonucleotide
  Antisense Strand to SEQ ID NO: 443737
agacaaaguaucauucacu

SEQ ID NO: 443739 - RNA, 19 nt, Artificial Sequence
  Description of Artificial Sequence: Synthetic oligonucleotide
  Sense strand starting at position 3063 of SEQ ID NO: 316831
gaaugauacuuugucuugu

SEQ ID NO: 443740 - RNA, 19 nt, Artificial Sequence
  Description of Artificial Sequence: Synthetic oligonucleotide
  Antisense Strand to SEQ ID NO: 443739
acaagacaaaguaucauuc

SEQ ID NO: 443741 - RNA, 19 nt, Artificial Sequence
  Description of Artificial Sequence: Synthetic oligonucleotide
  Sense strand starting at position 3065 of SEQ ID NO: 316831
augauacuuugucuuguga

SEQ ID NO: 443742 - RNA, 19 nt, Artificial Sequence
  Description of Artificial Sequence: Synthetic oligonucleotide
  Antisense Strand to SEQ ID NO: 443741
ucacaagacaaaguaucau

SEQ ID NO: 443743 - RNA, 19 nt, Artificial Sequence
  Description of Artificial Sequence: Synthetic oligonucleotide
  Sense strand starting at position 3188 of SEQ ID NO: 316831
guguuuguuagugaugaga

SEQ ID NO: 443744 - RNA, 19 nt, Artificial Sequence
  Description of Artificial Sequence: Synthetic oligonucleotide
  Antisense Strand to SEQ ID NO: 443743
ucucaucacuaacaaacac

SEQ ID NO: 443745 - RNA, 19 nt, Artificial Sequence
  Description of Artificial Sequence: Synthetic oligonucleotide
  Sense strand starting at position 3191 of SEQ ID NO: 316831
uuuguuagugaugagauua

SEQ ID NO: 443746 - RNA, 19 nt, Artificial Sequence
  Description of Artificial Sequence: Synthetic oligonucleotide
  Antisense Strand to SEQ ID NO: 443745
uaaucucaucacuaacaaa

SEQ ID NO: 443747 - RNA, 19 nt, Artificial Sequence
  Description of Artificial Sequence: Synthetic oligonucleotide
  Sense strand starting at position 3199 of SEQ ID NO: 316831
ugaugagauuaagaaagaa

SEQ ID NO: 443748 - RNA, 19 nt, Artificial Sequence
  Description of Artificial Sequence: Synthetic oligonucleotide
  Antisense Strand to SEQ ID NO: 443747
uucuuucuuaaucucauca

SEQ ID NO: 443749 - RNA, 19 nt, Artificial Sequence
  Description of Artificial Sequence: Synthetic oligonucleotide
  Sense strand starting at position 3239 of SEQ ID NO: 316831
acacaugauuggucuuaaa

SEQ ID NO: 443750 - RNA, 19 nt, Artificial Sequence
  Description of Artificial Sequence: Synthetic oligonucleotide
  Antisense Strand to SEQ ID NO: 443749
uuuaagaccaaucaugugu

SEQ ID NO: 443751 - RNA, 19 nt, Artificial Sequence
  Description of Artificial Sequence: Synthetic oligonucleotide
  Sense strand starting at position 3249 of SEQ ID NO: 316831
ggucuuaaaucagccaaua

SEQ ID NO: 443752 - RNA, 19 nt, Artificial Sequence
  Description of Artificial Sequence: Synthetic oligonucleotide
  Antisense Strand to SEQ ID NO: 443751
uauuggcugauuuaagacc

SEQ ID NO: 443753 - RNA, 19 nt, Artificial Sequence
  Description of Artificial Sequence: Synthetic oligonucleotide
  Sense strand starting at position 3618 of SEQ ID NO: 316831
ucugguggucucuagaaac

SEQ ID NO: 443754 - RNA, 19 nt, Artificial Sequence
  Description of Artificial Sequence: Synthetic oligonucleotide
  Antisense Strand to SEQ ID NO: 443753
guuucuagagaccaccaga

SEQ ID NO: 443755 - RNA, 19 nt, Artificial Sequence
  Description of Artificial Sequence: Synthetic oligonucleotide
  Sense strand starting at position 3734 of SEQ ID NO: 316831
ugagcucagaacuguaaga

SEQ ID NO: 443756 - RNA, 19 nt, Artificial Sequence
  Description of Artificial Sequence: Synthetic oligonucleotide
  Antisense Strand to SEQ ID NO: 443755
ucuuacaguucugagcuca

SEQ ID NO: 443757 - RNA, 19 nt, Artificial Sequence
  Description of Artificial Sequence: Synthetic oligonucleotide
  Sense strand starting at position 3753 of SEQ ID NO: 316831
gaacaaacuugugugguau

SEQ ID NO: 443758 - RNA, 19 nt, Artificial Sequence
  Description of Artificial Sequence: Synthetic oligonucleotide
  Antisense Strand to SEQ ID NO: 443757
auaccacacaaguuuguuc

SEQ ID NO: 443759 - RNA, 19 nt, Artificial Sequence
  Description of Artificial Sequence: Synthetic oligonucleotide
  Sense strand starting at position 3754 of SEQ ID NO: 316831
aacaaacuugugugguauu

SEQ ID NO: 443760 - RNA, 19 nt, Artificial Sequence
  Description of Artificial Sequence: Synthetic oligonucleotide
  Antisense Strand to SEQ ID NO: 443759
aauaccacacaaguuuguu

SEQ ID NO: 443761 - RNA, 19 nt, Artificial Sequence
  Description of Artificial Sequence: Synthetic oligonucleotide
  Sense strand starting at position 3833 of SEQ ID NO: 316831
aacuguauuguaggaaaug

SEQ ID NO: 443762 - RNA, 19 nt, Artificial Sequence
  Description of Artificial Sequence: Synthetic oligonucleotide
  Antisense Strand to SEQ ID NO: 443761
cauuuccuacaauacaguu

SEQ ID NO: 443763 - RNA, 19 nt, Artificial Sequence
  Description of Artificial Sequence: Synthetic oligonucleotide
  Sense strand starting at position 3870 of SEQ ID NO: 316831
agcagaaauaauggauugu

SEQ ID NO: 443764 - RNA, 19 nt, Artificial Sequence
  Description of Artificial Sequence: Synthetic oligonucleotide
  Antisense Strand to SEQ ID NO: 443763
acaauccauuauuucugcu

SEQ ID NO: 443765 - RNA, 19 nt, Artificial Sequence
  Description of Artificial Sequence: Synthetic oligonucleotide
  Sense strand starting at position 3874 of SEQ ID NO: 316831
gaaauaauggauuguguua

SEQ ID NO: 443766 - RNA, 19 nt, Artificial Sequence
  Description of Artificial Sequence: Synthetic oligonucleotide
  Antisense Strand to SEQ ID NO: 443765
uaacacaauccauuauuuc

SEQ ID NO: 443767 - RNA, 19 nt, Artificial Sequence
  Description of Artificial Sequence: Synthetic oligonucleotide
  Sense strand starting at position 3887 of SEQ ID NO: 316831
guguuauaacaagagguag

SEQ ID NO: 443768 - RNA, 19 nt, Artificial Sequence
  Description of Artificial Sequence: Synthetic oligonucleotide
  Antisense Strand to SEQ ID NO: 443767
cuaccucuuguuauaacac

SEQ ID NO: 443769 - RNA, 19 nt, Artificial Sequence
  Description of Artificial Sequence: Synthetic oligonucleotide
  Sense strand starting at position 3972 of SEQ ID NO: 316831
ucaugagguguguacuaug

SEQ ID NO: 443770 - RNA, 19 nt, Artificial Sequence
  Description of Artificial Sequence: Synthetic oligonucleotide
  Antisense Strand to SEQ ID NO: 443769
cauaguacacaccucauga

SEQ ID NO: 443771 - RNA, 19 nt, Artificial Sequence
  Description of Artificial Sequence: Synthetic oligonucleotide
  Sense strand starting at position 3977 of SEQ ID NO: 316831
agguguguacuaugauuuc

SEQ ID NO: 443772 - RNA, 19 nt, Artificial Sequence
  Description of Artificial Sequence: Synthetic oligonucleotide
  Antisense Strand to SEQ ID NO: 443771
gaaaucauaguacacaccu

SEQ ID NO: 443773 - RNA, 19 nt, Artificial Sequence
  Description of Artificial Sequence: Synthetic oligonucleotide
  Sense strand starting at position 25 of SEQ ID NO: 316832
ccagcaggucuccauacuu

SEQ ID NO: 443774 - RNA, 19 nt, Artificial Sequence
  Description of Artificial Sequence: Synthetic oligonucleotide
  Antisense Strand to SEQ ID NO: 443773
aaguauggagaccugcugg

SEQ ID NO: 443775 - RNA, 19 nt, Artificial Sequence
  Description of Artificial Sequence: Synthetic oligonucleotide
  Sense strand starting at position 100 of SEQ ID NO: 316832
aacauagccguggaugaua

SEQ ID NO: 443776 - RNA, 19 nt, Artificial Sequence
  Description of Artificial Sequence: Synthetic oligonucleotide
  Antisense Strand to SEQ ID NO: 443775
uaucauccacggcuauguu

SEQ ID NO: 443777 - RNA, 19 nt, Artificial Sequence
  Description of Artificial Sequence: Synthetic oligonucleotide
  Sense strand starting at position 108 of SEQ ID NO: 316832
cguggaugauaauuaacau

SEQ ID NO: 443778 - RNA, 19 nt, Artificial Sequence
  Description of Artificial Sequence: Synthetic oligonucleotide
  Antisense Strand to SEQ ID NO: 443777
auguuaauuaucauccacg

SEQ ID NO: 443779 - RNA, 19 nt, Artificial Sequence
  Description of Artificial Sequence: Synthetic oligonucleotide
  Sense strand starting at position 115 of SEQ ID NO: 316832
gauaauuaacauggguauu

SEQ ID NO: 443780 - RNA, 19 nt, Artificial Sequence
  Description of Artificial Sequence: Synthetic oligonucleotide
  Antisense Strand to SEQ ID NO: 443779
aauacccauguuaauuauc

SEQ ID NO: 443781 - RNA, 19 nt, Artificial Sequence
  Description of Artificial Sequence: Synthetic oligonucleotide
  Sense strand starting at position 211 of SEQ ID NO: 316832
gggagucgucggagucugu

SEQ ID NO: 443782 - RNA, 19 nt, Artificial Sequence
  Description of Artificial Sequence: Synthetic oligonucleotide
  Antisense Strand to SEQ ID NO: 443781
acagacuccgacgacuccc

SEQ ID NO: 443783 - RNA, 19 nt, Artificial Sequence
  Description of Artificial Sequence: Synthetic oligonucleotide
  Sense strand starting at position 291 of SEQ ID NO: 316832
aaauguauaucuuuggagu

SEQ ID NO: 443784 - RNA, 19 nt, Artificial Sequence
  Description of Artificial Sequence: Synthetic oligonucleotide
  Antisense Strand to SEQ ID NO: 443783
acuccaaagauauacauuu

SEQ ID NO: 443785 - RNA, 19 nt, Artificial Sequence
  Description of Artificial Sequence: Synthetic oligonucleotide
  Sense strand starting at position 292 of SEQ ID NO: 316832
aauguauaucuuuggagug

SEQ ID NO: 443786 - RNA, 19 nt, Artificial Sequence
  Description of Artificial Sequence: Synthetic oligonucleotide
  Antisense Strand to SEQ ID NO: 443785
cacuccaaagauauacauu

SEQ ID NO: 443787 - RNA, 19 nt, Artificial Sequence
  Description of Artificial Sequence: Synthetic oligonucleotide
  Sense strand starting at position 297 of SEQ ID NO: 316832
auaucuuuggagugguaac

SEQ ID NO: 443788 - RNA, 19 nt, Artificial Sequence
  Description of Artificial Sequence: Synthetic oligonucleotide
  Antisense Strand to SEQ ID NO: 443787
guuaccacuccaaagauau

SEQ ID NO: 443789 - RNA, 19 nt, Artificial Sequence
  Description of Artificial Sequence: Synthetic oligonucleotide
  Sense strand starting at position 308 of SEQ ID NO: 316832
gugguaacgccucaggaga

SEQ ID NO: 443790 - RNA, 19 nt, Artificial Sequence
  Description of Artificial Sequence: Synthetic oligonucleotide
  Antisense Strand to SEQ ID NO: 443789
ucuccugaggcguuaccac

SEQ ID NO: 443791 - RNA, 19 nt, Artificial Sequence
  Description of Artificial Sequence: Synthetic oligonucleotide
  Sense strand starting at position 334 of SEQ ID NO: 316832
cugugagacuaaguaugaa

SEQ ID NO: 443792 - RNA, 19 nt, Artificial Sequence
  Description of Artificial Sequence: Synthetic oligonucleotide
  Antisense Strand to SEQ ID NO: 443791
uucauacuuagucucacag

SEQ ID NO: 443793 - RNA, 19 nt, Artificial Sequence
  Description of Artificial Sequence: Synthetic oligonucleotide
  Sense strand starting at position 836 of SEQ ID NO: 316832
cuuagauugaaugguaugu

SEQ ID NO: 443794 - RNA, 19 nt, Artificial Sequence
  Description of Artificial Sequence: Synthetic oligonucleotide
  Antisense Strand to SEQ ID NO: 443793
acauaccauucaaucuaag

SEQ ID NO: 443795 - RNA, 19 nt, Artificial Sequence
  Description of Artificial Sequence: Synthetic oligonucleotide
  Sense strand starting at position 840 of SEQ ID NO: 316832
gauugaaugguauguuacu

SEQ ID NO: 443796 - RNA, 19 nt, Artificial Sequence
  Description of Artificial Sequence: Synthetic oligonucleotide
  Antisense Strand to SEQ ID NO: 443795
aguaacauaccauucaauc

SEQ ID NO: 443797 - RNA, 19 nt, Artificial Sequence
  Description of Artificial Sequence: Synthetic oligonucleotide
  Sense strand starting at position 903 of SEQ ID NO: 316832
gauguuaugguuuggacuu

SEQ ID NO: 443798 - RNA, 19 nt, Artificial Sequence
  Description of Artificial Sequence: Synthetic oligonucleotide
  Antisense Strand to SEQ ID NO: 443797
aaguccaaaccauaacauc

SEQ ID NO: 443799 - RNA, 19 nt, Artificial Sequence
  Description of Artificial Sequence: Synthetic oligonucleotide
  Sense strand starting at position 1025 of SEQ ID NO: 316832
cagcuucuuugauuaugga

SEQ ID NO: 443800 - RNA, 19 nt, Artificial Sequence
  Description of Artificial Sequence: Synthetic oligonucleotide
  Antisense Strand to SEQ ID NO: 443799
uccauaaucaaagaagcug

SEQ ID NO: 443801 - RNA, 19 nt, Artificial Sequence
  Description of Artificial Sequence: Synthetic oligonucleotide
  Sense strand starting at position 1026 of SEQ ID NO: 316832
agcuucuuugauuauggaa

SEQ ID NO: 443802 - RNA, 19 nt, Artificial Sequence
  Description of Artificial Sequence: Synthetic oligonucleotide
  Antisense Strand to SEQ ID NO: 443801
uuccauaaucaaagaagcu

SEQ ID NO: 443803 - RNA, 19 nt, Artificial Sequence
  Description of Artificial Sequence: Synthetic oligonucleotide
  Sense strand starting at position 1520 of SEQ ID NO: 316832
gcuugcugccugucaaugu

SEQ ID NO: 443804 - RNA, 19 nt, Artificial Sequence
  Description of Artificial Sequence: Synthetic oligonucleotide
  Antisense Strand to SEQ ID NO: 443803
acauugacaggcagcaagc

SEQ ID NO: 443805 - RNA, 19 nt, Artificial Sequence
  Description of Artificial Sequence: Synthetic oligonucleotide
  Sense strand starting at position 1543 of SEQ ID NO: 316832
guucgaauggcugugcuca

SEQ ID NO: 443806 - RNA, 19 nt, Artificial Sequence
  Description of Artificial Sequence: Synthetic oligonucleotide
  Antisense Strand to SEQ ID NO: 443805
ugagcacagccauucgaac

SEQ ID NO: 443807 - RNA, 19 nt, Artificial Sequence
  Description of Artificial Sequence: Synthetic oligonucleotide
  Sense strand starting at position 1769 of SEQ ID NO: 316832
gguccaucuggauguugaa

SEQ ID NO: 443808 - RNA, 19 nt, Artificial Sequence
  Description of Artificial Sequence: Synthetic oligonucleotide
  Antisense Strand to SEQ ID NO: 443807
uucaacauccagauggacc

SEQ ID NO: 443809 - RNA, 19 nt, Artificial Sequence
  Description of Artificial Sequence: Synthetic oligonucleotide
  Sense strand starting at position 2073 of SEQ ID NO: 316832
gguagaauauaggucugca

SEQ ID NO: 443810 - RNA, 19 nt, Artificial Sequence
  Description of Artificial Sequence: Synthetic oligonucleotide
  Antisense Strand to SEQ ID NO: 443809
ugcagaccuauauucuacc

SEQ ID NO: 443811 - RNA, 19 nt, Artificial Sequence
  Description of Artificial Sequence: Synthetic oligonucleotide
  Sense strand starting at position 2076 of SEQ ID NO: 316832
agaauauaggucugcauug

SEQ ID NO: 443812 - RNA, 19 nt, Artificial Sequence
  Description of Artificial Sequence: Synthetic oligonucleotide
  Antisense Strand to SEQ ID NO: 443811
caaugcagaccuauauucu

SEQ ID NO: 443813 - RNA, 19 nt, Artificial Sequence
  Description of Artificial Sequence: Synthetic oligonucleotide
  Sense strand starting at position 2135 of SEQ ID NO: 316832
ugauaugcuaucugggaca

SEQ ID NO: 443814 - RNA, 19 nt, Artificial Sequence
  Description of Artificial Sequence: Synthetic oligonucleotide
  Antisense Strand to SEQ ID NO: 443813
ugucccagauagcauauca

SEQ ID NO: 443815 - RNA, 19 nt, Artificial Sequence
  Description of Artificial Sequence: Synthetic oligonucleotide
  Sense strand starting at position 2146 of SEQ ID NO: 316832
cugggacaugcauguaauu

SEQ ID NO: 443816 - RNA, 19 nt, Artificial Sequence
  Description of Artificial Sequence: Synthetic oligonucleotide
  Antisense Strand to SEQ ID NO: 443815
aauuacaugcaugucccag

SEQ ID NO: 443817 - RNA, 19 nt, Artificial Sequence
  Description of Artificial Sequence: Synthetic oligonucleotide
  Sense strand starting at position 2148 of SEQ ID NO: 316832
gggacaugcauguaauugu

SEQ ID NO: 443818 - RNA, 19 nt, Artificial Sequence
  Description of Artificial Sequence: Synthetic oligonucleotide
  Antisense Strand to SEQ ID NO: 443817
acaauuacaugcauguccc

SEQ ID NO: 443819 - RNA, 19 nt, Artificial Sequence
  Description of Artificial Sequence: Synthetic oligonucleotide
  Sense strand starting at position 2151 of SEQ ID NO: 316832
acaugcauguaauuguaaa

SEQ ID NO: 443820 - RNA, 19 nt, Artificial Sequence
  Description of Artificial Sequence: Synthetic oligonucleotide
  Antisense Strand to SEQ ID NO: 443819
uuuacaauuacaugcaugu

SEQ ID NO: 443821 - RNA, 19 nt, Artificial Sequence
  Description of Artificial Sequence: Synthetic oligonucleotide
  Sense strand starting at position 2390 of SEQ ID NO: 316832
gugugaacauuugaaagac

SEQ ID NO: 443822 - RNA, 19 nt, Artificial Sequence
  Description of Artificial Sequence: Synthetic oligonucleotide
  Antisense Strand to SEQ ID NO: 443821
gucuuucaaauguucacac

SEQ ID NO: 443823 - RNA, 19 nt, Artificial Sequence
  Description of Artificial Sequence: Synthetic oligonucleotide
  Sense strand starting at position 2439 of SEQ ID NO: 316832
gaagaagaaugcucuuuag

SEQ ID NO: 443824 - RNA, 19 nt, Artificial Sequence
  Description of Artificial Sequence: Synthetic oligonucleotide
  Antisense Strand to SEQ ID NO: 443823
cuaaagagcauucuucuuc

SEQ ID NO: 443825 - RNA, 19 nt, Artificial Sequence
  Description of Artificial Sequence: Synthetic oligonucleotide
  Sense strand starting at position 2442 of SEQ ID NO: 316832
gaagaaugcucuuuaguuu

SEQ ID NO: 443826 - RNA, 19 nt, Artificial Sequence
  Description of Artificial Sequence: Synthetic oligonucleotide
  Antisense Strand to SEQ ID NO: 443825
aaacuaaagagcauucuuc

SEQ ID NO: 443827 - RNA, 19 nt, Artificial Sequence
  Description of Artificial Sequence: Synthetic oligonucleotide
  Sense strand starting at position 2470 of SEQ ID NO: 316832
gcucauuaauguuugaaau

SEQ ID NO: 443828 - RNA, 19 nt, Artificial Sequence
  Description of Artificial Sequence: Synthetic oligonucleotide
  Antisense Strand to SEQ ID NO: 443827
auuucaaacauuaaugagc

SEQ ID NO: 443829 - RNA, 19 nt, Artificial Sequence
  Description of Artificial Sequence: Synthetic oligonucleotide
  Sense strand starting at position 2538 of SEQ ID NO: 316832
auuccaugacguuaugcau

SEQ ID NO: 443830 - RNA, 19 nt, Artificial Sequence
  Description of Artificial Sequence: Synthetic oligonucleotide
  Antisense Strand to SEQ ID NO: 443829
augcauaacgucauggaau

SEQ ID NO: 443831 - RNA, 19 nt, Artificial Sequence
  Description of Artificial Sequence: Synthetic oligonucleotide
  Sense strand starting at position 2550 of SEQ ID NO: 316832
uaugcaugugcagaauaua

SEQ ID NO: 443832 - RNA, 19 nt, Artificial Sequence
  Description of Artificial Sequence: Synthetic oligonucleotide
  Antisense Strand to SEQ ID NO: 443831
uauauucugcacaugcaua

SEQ ID NO: 443833 - RNA, 19 nt, Artificial Sequence
  Description of Artificial Sequence: Synthetic oligonucleotide
  Sense strand starting at position 2717 of SEQ ID NO: 316832
uuucucagacucuggaaua

SEQ ID NO: 443834 - RNA, 19 nt, Artificial Sequence
  Description of Artificial Sequence: Synthetic oligonucleotide
  Antisense Strand to SEQ ID NO: 443833
uauuccagagucugagaaa

SEQ ID NO: 443835 - RNA, 19 nt, Artificial Sequence
  Description of Artificial Sequence: Synthetic oligonucleotide
  Sense strand starting at position 2732 of SEQ ID NO: 316832
aauauaaaguggcuucgaa

SEQ ID NO: 443836 - RNA, 19 nt, Artificial Sequence
  Description of Artificial Sequence: Synthetic oligonucleotide
  Antisense Strand to SEQ ID NO: 443835
uucgaagccacuuuauauu

SEQ ID NO: 443837 - RNA, 19 nt, Artificial Sequence
  Description of Artificial Sequence: Synthetic oligonucleotide
  Sense strand starting at position 2825 of SEQ ID NO: 316832
ucucuuucucaaugaggau

SEQ ID NO: 443838 - RNA, 19 nt, Artificial Sequence
  Description of Artificial Sequence: Synthetic oligonucleotide
  Antisense Strand to SEQ ID NO: 443837
auccucauugagaaagaga

SEQ ID NO: 443839 - RNA, 19 nt, Artificial Sequence
  Description of Artificial Sequence: Synthetic oligonucleotide
  Sense strand starting at position 2840 of SEQ ID NO: 316832
ggaugacauugagaaagaa

SEQ ID NO: 443840 - RNA, 19 nt, Artificial Sequence
  Description of Artificial Sequence: Synthetic oligonucleotide
  Antisense Strand to SEQ ID NO: 443839
uucuuucucaaugucaucc

SEQ ID NO: 443841 - RNA, 19 nt, Artificial Sequence
  Description of Artificial Sequence: Synthetic oligonucleotide
  Sense strand starting at position 3125 of SEQ ID NO: 316832
uuacuugucgaugacccua

SEQ ID NO: 443842 - RNA, 19 nt, Artificial Sequence
  Description of Artificial Sequence: Synthetic oligonucleotide
  Antisense Strand to SEQ ID NO: 443841
uagggucaucgacaaguaa

SEQ ID NO: 443843 - RNA, 19 nt, Artificial Sequence
  Description of Artificial Sequence: Synthetic oligonucleotide
  Sense strand starting at position 3150 of SEQ ID NO: 316832
guuaaugguagccaagacu

SEQ ID NO: 443844 - RNA, 19 nt, Artificial Sequence
  Description of Artificial Sequence: Synthetic oligonucleotide
  Antisense Strand to SEQ ID NO: 443843
agucuuggcuaccauuaac

SEQ ID NO: 443845 - RNA, 19 nt, Artificial Sequence
  Description of Artificial Sequence: Synthetic oligonucleotide
  Sense strand starting at position 3634 of SEQ ID NO: 316832
caggaucaacucugugaac

SEQ ID NO: 443846 - RNA, 19 nt, Artificial Sequence
  Description of Artificial Sequence: Synthetic oligonucleotide
  Antisense Strand to SEQ ID NO: 443845
guucacagaguugauccug

SEQ ID NO: 443847 - RNA, 19 nt, Artificial Sequence
  Description of Artificial Sequence: Synthetic oligonucleotide
  Sense strand starting at position 3635 of SEQ ID NO: 316832
aggaucaacucugugaaca

SEQ ID NO: 443848 - RNA, 19 nt, Artificial Sequence
  Description of Artificial Sequence: Synthetic oligonucleotide
  Antisense Strand to SEQ ID NO: 443847
uguucacagaguugauccu

SEQ ID NO: 443849 - RNA, 19 nt, Artificial Sequence
  Description of Artificial Sequence: Synthetic oligonucleotide
  Sense strand starting at position 3636 of SEQ ID NO: 316832
ggaucaacucugugaacag

SEQ ID NO: 443850 - RNA, 19 nt, Artificial Sequence
  Description of Artificial Sequence: Synthetic oligonucleotide
  Antisense Strand to SEQ ID NO: 443849
cuguucacagaguugaucc

SEQ ID NO: 443851 - RNA, 19 nt, Artificial Sequence
  Description of Artificial Sequence: Synthetic oligonucleotide
  Sense strand starting at position 3820 of SEQ ID NO: 316832
gacuauagguuccugaucu

SEQ ID NO: 443852 - RNA, 19 nt, Artificial Sequence
  Description of Artificial Sequence: Synthetic oligonucleotide
  Antisense Strand to SEQ ID NO: 443851
agaucaggaaccuauaguc

SEQ ID NO: 443853 - RNA, 19 nt, Artificial Sequence
  Description of Artificial Sequence: Synthetic oligonucleotide
  Sense strand starting at position 124 of SEQ ID NO: 316833
auggaucauuagucuguua

SEQ ID NO: 443854 - RNA, 19 nt, Artificial Sequence
  Description of Artificial Sequence: Synthetic oligonucleotide
  Antisense Strand to SEQ ID NO: 443853
uaacagacuaaugauccau

SEQ ID NO: 443855 - RNA, 19 nt, Artificial Sequence
  Description of Artificial Sequence: Synthetic oligonucleotide
  Sense strand starting at position 126 of SEQ ID NO: 316833
ggaucauuagucuguuaua

SEQ ID NO: 443856 - RNA, 19 nt, Artificial Sequence
  Description of Artificial Sequence: Synthetic oligonucleotide
  Antisense Strand to SEQ ID NO: 443855
uauaacagacuaaugaucc

SEQ ID NO: 443857 - RNA, 19 nt, Artificial Sequence
  Description of Artificial Sequence: Synthetic oligonucleotide
  Sense strand starting at position 484 of SEQ ID NO: 316833
aucaguggauucuuagagu

SEQ ID NO: 443858 - RNA, 19 nt, Artificial Sequence
  Description of Artificial Sequence: Synthetic oligonucleotide
  Antisense Strand to SEQ ID NO: 443857
acucuaagaauccacugau

SEQ ID NO: 443859 - RNA, 19 nt, Artificial Sequence
  Description of Artificial Sequence: Synthetic oligonucleotide
  Sense strand starting at position 488 of SEQ ID NO: 316833
guggauucuuagaguggga

SEQ ID NO: 443860 - RNA, 19 nt, Artificial Sequence
  Description of Artificial Sequence: Synthetic oligonucleotide
  Antisense Strand to SEQ ID NO: 443859
ucccacucuaagaauccac

SEQ ID NO: 443861 - RNA, 19 nt, Artificial Sequence
  Description of Artificial Sequence: Synthetic oligonucleotide
  Sense strand starting at position 490 of SEQ ID NO: 316833
ggauucuuagagugggaua

SEQ ID NO: 443862 - RNA, 19 nt, Artificial Sequence
  Description of Artificial Sequence: Synthetic oligonucleotide
  Antisense Strand to SEQ ID NO: 443861
uaucccacucuaagaaucc

SEQ ID NO: 443863 - RNA, 19 nt, Artificial Sequence
  Description of Artificial Sequence: Synthetic oligonucleotide
  Sense strand starting at position 492 of SEQ ID NO: 316833
auucuuagagugggauaua

SEQ ID NO: 443864 - RNA, 19 nt, Artificial Sequence
  Description of Artificial Sequence: Synthetic oligonucleotide
  Antisense Strand to SEQ ID NO: 443863
uauaucccacucuaagaau

SEQ ID NO: 443865 - RNA, 19 nt, Artificial Sequence
  Description of Artificial Sequence: Synthetic oligonucleotide
  Sense strand starting at position 707 of SEQ ID NO: 316833
agagauuucuucuugcggu

SEQ ID NO: 443866 - RNA, 19 nt, Artificial Sequence
  Description of Artificial Sequence: Synthetic oligonucleotide
  Antisense Strand to SEQ ID NO: 443865
accgcaagaagaaaucucu

SEQ ID NO: 443867 - RNA, 19 nt, Artificial Sequence
  Description of Artificial Sequence: Synthetic oligonucleotide
  Sense strand starting at position 714 of SEQ ID NO: 316833
ucuucuugcgguuauaaac

SEQ ID NO: 443868 - RNA, 19 nt, Artificial Sequence
  Description of Artificial Sequence: Synthetic oligonucleotide
  Antisense Strand to SEQ ID NO: 443867
guuuauaaccgcaagaaga

SEQ ID NO: 443869 - RNA, 19 nt, Artificial Sequence
  Description of Artificial Sequence: Synthetic oligonucleotide
  Sense strand starting at position 825 of SEQ ID NO: 316833
gguaaauuguaucucauaa

SEQ ID NO: 443870 - RNA, 19 nt, Artificial Sequence
  Description of Artificial Sequence: Synthetic oligonucleotide
  Antisense Strand to SEQ ID NO: 443869
uuaugagauacaauuuacc

SEQ ID NO: 443871 - RNA, 19 nt, Artificial Sequence
  Description of Artificial Sequence: Synthetic oligonucleotide
  Sense strand starting at position 943 of SEQ ID NO: 316833
ggaaucuugaauuguuaag

SEQ ID NO: 443872 - RNA, 19 nt, Artificial Sequence
  Description of Artificial Sequence: Synthetic oligonucleotide
  Antisense Strand to SEQ ID NO: 443871
cuuaacaauucaagauucc

SEQ ID NO: 443873 - RNA, 19 nt, Artificial Sequence
  Description of Artificial Sequence: Synthetic oligonucleotide
  Sense strand starting at position 1015 of SEQ ID NO: 316833
agguaugaaccgcaguuua

SEQ ID NO: 443874 - RNA, 19 nt, Artificial Sequence
  Description of Artificial Sequence: Synthetic oligonucleotide
  Antisense Strand to SEQ ID NO: 443873
uaaacugcgguucauaccu

SEQ ID NO: 443875 - RNA, 19 nt, Artificial Sequence
  Description of Artificial Sequence: Synthetic oligonucleotide
  Sense strand starting at position 1285 of SEQ ID NO: 316833
aaggauuaugguggaguau

SEQ ID NO: 443876 - RNA, 19 nt, Artificial Sequence
  Description of Artificial Sequence: Synthetic oligonucleotide
  Antisense Strand to SEQ ID NO: 443875
auacuccaccauaauccuu

SEQ ID NO: 443877 - RNA, 19 nt, Artificial Sequence
  Description of Artificial Sequence: Synthetic oligonucleotide
  Sense strand starting at position 1582 of SEQ ID NO: 316833
gcgccacuauaccugauua

SEQ ID NO: 443878 - RNA, 19 nt, Artificial Sequence
  Description of Artificial Sequence: Synthetic oligonucleotide
  Antisense Strand to SEQ ID NO: 443877
uaaucagguauaguggcgc

SEQ ID NO: 443879 - RNA, 19 nt, Artificial Sequence
  Description of Artificial Sequence: Synthetic oligonucleotide
  Sense strand starting at position 1933 of SEQ ID NO: 316833
uucugucuuaccuggagga

SEQ ID NO: 443880 - RNA, 19 nt, Artificial Sequence
  Description of Artificial Sequence: Synthetic oligonucleotide
  Antisense Strand to SEQ ID NO: 443879
uccuccagguaagacagaa

SEQ ID NO: 443881 - RNA, 19 nt, Artificial Sequence
  Description of Artificial Sequence: Synthetic oligonucleotide
  Sense strand starting at position 1934 of SEQ ID NO: 316833
ucugucuuaccuggaggaa

SEQ ID NO: 443882 - RNA, 19 nt, Artificial Sequence
  Description of Artificial Sequence: Synthetic oligonucleotide
  Antisense Strand to SEQ ID NO: 443881
uuccuccagguaagacaga

SEQ ID NO: 443883 - RNA, 19 nt, Artificial Sequence
  Description of Artificial Sequence: Synthetic oligonucleotide
  Sense strand starting at position 2027 of SEQ ID NO: 316833
gagaaucaguagcugagau

SEQ ID NO: 443884 - RNA, 19 nt, Artificial Sequence
  Description of Artificial Sequence: Synthetic oligonucleotide
  Antisense Strand to SEQ ID NO: 443883
aucucagcuacugauucuc

SEQ ID NO: 443885 - RNA, 19 nt, Artificial Sequence
  Description of Artificial Sequence: Synthetic oligonucleotide
  Sense strand starting at position 2068 of SEQ ID NO: 316833
caguucucugaagagguga

SEQ ID NO: 443886 - RNA, 19 nt, Artificial Sequence
  Description of Artificial Sequence: Synthetic oligonucleotide
  Antisense Strand to SEQ ID NO: 443885
ucaccucuucagagaacug

SEQ ID NO: 443887 - RNA, 19 nt, Artificial Sequence
  Description of Artificial Sequence: Synthetic oligonucleotide
  Sense strand starting at position 2081 of SEQ ID NO: 316833
aggugaguuguugagugau

SEQ ID NO: 443888 - RNA, 19 nt, Artificial Sequence
  Description of Artificial Sequence: Synthetic oligonucleotide
  Antisense Strand to SEQ ID NO: 443887
aucacucaacaacucaccu

SEQ ID NO: 443889 - RNA, 19 nt, Artificial Sequence
  Description of Artificial Sequence: Synthetic oligonucleotide
  Sense strand starting at position 2083 of SEQ ID NO: 316833
gugaguuguugagugauua

SEQ ID NO: 443890 - RNA, 19 nt, Artificial Sequence
  Description of Artificial Sequence: Synthetic oligonucleotide
  Antisense Strand to SEQ ID NO: 443889
uaaucacucaacaacucac

SEQ ID NO: 443891 - RNA, 19 nt, Artificial Sequence
  Description of Artificial Sequence: Synthetic oligonucleotide
  Sense strand starting at position 2084 of SEQ ID NO: 316833
ugaguuguugagugauuau

SEQ ID NO: 443892 - RNA, 19 nt, Artificial Sequence
  Description of Artificial Sequence: Synthetic oligonucleotide
  Antisense Strand to SEQ ID NO: 443891
auaaucacucaacaacuca

SEQ ID NO: 443893 - RNA, 19 nt, Artificial Sequence
  Description of Artificial Sequence: Synthetic oligonucleotide
  Sense strand starting at position 2087 of SEQ ID NO: 316833
guuguugagugauuauuga

SEQ ID NO: 443894 - RNA, 19 nt, Artificial Sequence
  Description of Artificial Sequence: Synthetic oligonucleotide
  Antisense Strand to SEQ ID NO: 443893
ucaauaaucacucaacaac

SEQ ID NO: 443895 - RNA, 19 nt, Artificial Sequence
  Description of Artificial Sequence: Synthetic oligonucleotide
  Sense strand starting at position 2117 of SEQ ID NO: 316833
gcaagaacauuucuguguu

SEQ ID NO: 443896 - RNA, 19 nt, Artificial Sequence
  Description of Artificial Sequence: Synthetic oligonucleotide
  Antisense Strand to SEQ ID NO: 443895
aacacagaaauguucuugc

SEQ ID NO: 443897 - RNA, 19 nt, Artificial Sequence
  Description of Artificial Sequence: Synthetic oligonucleotide
  Sense strand starting at position 2215 of SEQ ID NO: 316833
gagggugugugcaaaggua

SEQ ID NO: 443898 - RNA, 19 nt, Artificial Sequence
  Description of Artificial Sequence: Synthetic oligonucleotide
  Antisense Strand to SEQ ID NO: 443897
uaccuuugcacacacccuc

SEQ ID NO: 443899 - RNA, 19 nt, Artificial Sequence
  Description of Artificial Sequence: Synthetic oligonucleotide
  Sense strand starting at position 2366 of SEQ ID NO: 316833
uaggaagaagcacguaaua

SEQ ID NO: 443900 - RNA, 19 nt, Artificial Sequence
  Description of Artificial Sequence: Synthetic oligonucleotide
  Antisense Strand to SEQ ID NO: 443899
uauuacgugcuucuuccua

SEQ ID NO: 443901 - RNA, 19 nt, Artificial Sequence
  Description of Artificial Sequence: Synthetic oligonucleotide
  Sense strand starting at position 2464 of SEQ ID NO: 316833
acagauuagugagauacag

SEQ ID NO: 443902 - RNA, 19 nt, Artificial Sequence
  Description of Artificial Sequence: Synthetic oligonucleotide
  Antisense Strand to SEQ ID NO: 443901
cuguaucucacuaaucugu

SEQ ID NO: 443903 - RNA, 19 nt, Artificial Sequence
  Description of Artificial Sequence: Synthetic oligonucleotide
  Sense strand starting at position 2508 of SEQ ID NO: 316833
uguccaaucgaucaaauga

SEQ ID NO: 443904 - RNA, 19 nt, Artificial Sequence
  Description of Artificial Sequence: Synthetic oligonucleotide
  Antisense Strand to SEQ ID NO: 443903
ucauuugaucgauuggaca

SEQ ID NO: 443905 - RNA, 19 nt, Artificial Sequence
  Description of Artificial Sequence: Synthetic oligonucleotide
  Sense strand starting at position 2567 of SEQ ID NO: 316833
uuguuugcacaucaguuau

SEQ ID NO: 443906 - RNA, 19 nt, Artificial Sequence
  Description of Artificial Sequence: Synthetic oligonucleotide
  Antisense Strand to SEQ ID NO: 443905
auaacugaugugcaaacaa

SEQ ID NO: 443907 - RNA, 19 nt, Artificial Sequence
  Description of Artificial Sequence: Synthetic oligonucleotide
  Sense strand starting at position 2577 of SEQ ID NO: 316833
aucaguuauguguaauaug

SEQ ID NO: 443908 - RNA, 19 nt, Artificial Sequence
  Description of Artificial Sequence: Synthetic oligonucleotide
  Antisense Strand to SEQ ID NO: 443907
cauauuacacauaacugau

SEQ ID NO: 443909 - RNA, 19 nt, Artificial Sequence
  Description of Artificial Sequence: Synthetic oligonucleotide
  Sense strand starting at position 2645 of SEQ ID NO: 316833
ucggaaagcaaguaauaua

SEQ ID NO: 443910 - RNA, 19 nt, Artificial Sequence
  Description of Artificial Sequence: Synthetic oligonucleotide
  Antisense Strand to SEQ ID NO: 443909
uauauuacuugcuuuccga

SEQ ID NO: 443911 - RNA, 19 nt, Artificial Sequence
  Description of Artificial Sequence: Synthetic oligonucleotide
  Sense strand starting at position 2686 of SEQ ID NO: 316833
acgagcauauuucuggcaa

SEQ ID NO: 443912 - RNA, 19 nt, Artificial Sequence
  Description of Artificial Sequence: Synthetic oligonucleotide
  Antisense Strand to SEQ ID NO: 443911
uugccagaaauaugcucgu

SEQ ID NO: 443913 - RNA, 19 nt, Artificial Sequence
  Description of Artificial Sequence: Synthetic oligonucleotide
  Sense strand starting at position 2690 of SEQ ID NO: 316833
gcauauuucuggcaaagag

SEQ ID NO: 443914 - RNA, 19 nt, Artificial Sequence
  Description of Artificial Sequence: Synthetic oligonucleotide
  Antisense Strand to SEQ ID NO: 443913
cucuuugccagaaauaugc

SEQ ID NO: 443915 - RNA, 19 nt, Artificial Sequence
  Description of Artificial Sequence: Synthetic oligonucleotide
  Sense strand starting at position 3186 of SEQ ID NO: 316833
ugucacuacaggugaagua

SEQ ID NO: 443916 - RNA, 19 nt, Artificial Sequence
  Description of Artificial Sequence: Synthetic oligonucleotide
  Antisense Strand to SEQ ID NO: 443915
uacuucaccuguagugaca

SEQ ID NO: 443917 - RNA, 19 nt, Artificial Sequence
  Description of Artificial Sequence: Synthetic oligonucleotide
  Sense strand starting at position 3187 of SEQ ID NO: 316833
gucacuacaggugaaguaa

SEQ ID NO: 443918 - RNA, 19 nt, Artificial Sequence
  Description of Artificial Sequence: Synthetic oligonucleotide
  Antisense Strand to SEQ ID NO: 443917
uuacuucaccuguagugac

SEQ ID NO: 443919 - RNA, 19 nt, Artificial Sequence
  Description of Artificial Sequence: Synthetic oligonucleotide
  Sense strand starting at position 3222 of SEQ ID NO: 316833
gaaggaaguucucuuucuu

SEQ ID NO: 443920 - RNA, 19 nt, Artificial Sequence
  Description of Artificial Sequence: Synthetic oligonucleotide
  Antisense Strand to SEQ ID NO: 443919
aagaaagagaacuuccuuc

SEQ ID NO: 443921 - RNA, 19 nt, Artificial Sequence
  Description of Artificial Sequence: Synthetic oligonucleotide
  Sense strand starting at position 3290 of SEQ ID NO: 316833
aauggaacacuugguuaca

SEQ ID NO: 443922 - RNA, 19 nt, Artificial Sequence
  Description of Artificial Sequence: Synthetic oligonucleotide
  Antisense Strand to SEQ ID NO: 443921
uguaaccaaguguuccauu

SEQ ID NO: 443923 - RNA, 19 nt, Artificial Sequence
  Description of Artificial Sequence: Synthetic oligonucleotide
  Sense strand starting at position 3291 of SEQ ID NO: 316833
auggaacacuugguuacau

SEQ ID NO: 443924 - RNA, 19 nt, Artificial Sequence
  Description of Artificial Sequence: Synthetic oligonucleotide
  Antisense Strand to SEQ ID NO: 443923
auguaaccaaguguuccau

SEQ ID NO: 443925 - RNA, 19 nt, Artificial Sequence
  Description of Artificial Sequence: Synthetic oligonucleotide
  Sense strand starting at position 3292 of SEQ ID NO: 316833
uggaacacuugguuacauu

SEQ ID NO: 443926 - RNA, 19 nt, Artificial Sequence
  Description of Artificial Sequence: Synthetic oligonucleotide
  Antisense Strand to SEQ ID NO: 443925
aauguaaccaaguguucca

SEQ ID NO: 443927 - RNA, 19 nt, Artificial Sequence
  Description of Artificial Sequence: Synthetic oligonucleotide
  Sense strand starting at position 3320 of SEQ ID NO: 316833
ggucuucccugccuuuaga

SEQ ID NO: 443928 - RNA, 19 nt, Artificial Sequence
  Description of Artificial Sequence: Synthetic oligonucleotide
  Antisense Strand to SEQ ID NO: 443927
ucuaaaggcagggaagacc

SEQ ID NO: 443929 - RNA, 19 nt, Artificial Sequence
  Description of Artificial Sequence: Synthetic oligonucleotide
  Sense strand starting at position 3654 of SEQ ID NO: 316833
uucucaccucucugggaau

SEQ ID NO: 443930 - RNA, 19 nt, Artificial Sequence
  Description of Artificial Sequence: Synthetic oligonucleotide
  Antisense Strand to SEQ ID NO: 443929
auucccagagaggugagaa

SEQ ID NO: 443931 - RNA, 19 nt, Artificial Sequence
  Description of Artificial Sequence: Synthetic oligonucleotide
  Sense strand starting at position 3656 of SEQ ID NO: 316833
cucaccucucugggaauua

SEQ ID NO: 443932 - RNA, 19 nt, Artificial Sequence
  Description of Artificial Sequence: Synthetic oligonucleotide
  Antisense Strand to SEQ ID NO: 443931
uaauucccagagaggugag

SEQ ID NO: 443933 - RNA, 19 nt, Artificial Sequence
  Description of Artificial Sequence: Synthetic oligonucleotide
  Sense strand starting at position 731 of SEQ ID NO: 316834
gugccaugcucugacguga

SEQ ID NO: 443934 - RNA, 19 nt, Artificial Sequence
  Description of Artificial Sequence: Synthetic oligonucleotide
  Antisense Strand to SEQ ID NO: 443933
ucacgucagagcauggcac

SEQ ID NO: 443935 - RNA, 19 nt, Artificial Sequence
  Description of Artificial Sequence: Synthetic oligonucleotide
  Sense strand starting at position 940 of SEQ ID NO: 316834
ggacacaguaagugucaaa

SEQ ID NO: 443936 - RNA, 19 nt, Artificial Sequence
  Description of Artificial Sequence: Synthetic oligonucleotide
  Antisense Strand to SEQ ID NO: 443935
uuugacacuuacugugucc

SEQ ID NO: 443937 - RNA, 19 nt, Artificial Sequence
  Description of Artificial Sequence: Synthetic oligonucleotide
  Sense strand starting at position 943 of SEQ ID NO: 316834
cacaguaagugucaaacgu

SEQ ID NO: 443938 - RNA, 19 nt, Artificial Sequence
  Description of Artificial Sequence: Synthetic oligonucleotide
  Antisense Strand to SEQ ID NO: 443937
acguuugacacuuacugug

SEQ ID NO: 443939 - RNA, 19 nt, Artificial Sequence
  Description of Artificial Sequence: Synthetic oligonucleotide
  Sense strand starting at position 951 of SEQ ID NO: 316834
gugucaaacguccagaacu

SEQ ID NO: 443940 - RNA, 19 nt, Artificial Sequence
  Description of Artificial Sequence: Synthetic oligonucleotide
  Antisense Strand to SEQ ID NO: 443939
aguucuggacguuugacac

SEQ ID NO: 443941 - RNA, 19 nt, Artificial Sequence
  Description of Artificial Sequence: Synthetic oligonucleotide
  Sense strand starting at position 2653 of SEQ ID NO: 316834
gcugguguccuuugagagc

SEQ ID NO: 443942 - RNA, 19 nt, Artificial Sequence
  Description of Artificial Sequence: Synthetic oligonucleotide
  Antisense Strand to SEQ ID NO: 443941
gcucucaaaggacaccagc

SEQ ID NO: 443943 - RNA, 19 nt, Artificial Sequence
  Description of Artificial Sequence: Synthetic oligonucleotide
  Sense strand starting at position 2732 of SEQ ID NO: 316834
ggccuaacuguggauagga

SEQ ID NO: 443944 - RNA, 19 nt, Artificial Sequence
  Description of Artificial Sequence: Synthetic oligonucleotide
  Antisense Strand to SEQ ID NO: 443943
uccuauccacaguuaggcc

SEQ ID NO: 443945 - RNA, 19 nt, Artificial Sequence
  Description of Artificial Sequence: Synthetic oligonucleotide
  Sense strand starting at position 3061 of SEQ ID NO: 316834
cagggaggauucuguuugu

SEQ ID NO: 443946 - RNA, 19 nt, Artificial Sequence
  Description of Artificial Sequence: Synthetic oligonucleotide
  Antisense Strand to SEQ ID NO: 443945
acaaacagaauccucccug

SEQ ID NO: 443947 - RNA, 19 nt, Artificial Sequence
  Description of Artificial Sequence: Synthetic oligonucleotide
  Sense strand starting at position 3064 of SEQ ID NO: 316834
ggaggauucuguuugucca

SEQ ID NO: 443948 - RNA, 19 nt, Artificial Sequence
  Description of Artificial Sequence: Synthetic oligonucleotide
  Antisense Strand to SEQ ID NO: 443947
uggacaaacagaauccucc

SEQ ID NO: 443949 - RNA, 19 nt, Artificial Sequence
  Description of Artificial Sequence: Synthetic oligonucleotide
  Sense strand starting at position 3065 of SEQ ID NO: 316834
gaggauucuguuuguccag

SEQ ID NO: 443950 - RNA, 19 nt, Artificial Sequence
  Description of Artificial Sequence: Synthetic oligonucleotide
  Antisense Strand to SEQ ID NO: 443949
cuggacaaacagaauccuc

SEQ ID NO: 443951 - RNA, 19 nt, Artificial Sequence
  Description of Artificial Sequence: Synthetic oligonucleotide
  Sense strand starting at position 3066 of SEQ ID NO: 316834
aggauucuguuuguccaga

SEQ ID NO: 443952 - RNA, 19 nt, Artificial Sequence
  Description of Artificial Sequence: Synthetic oligonucleotide
  Antisense Strand to SEQ ID NO: 443951
ucuggacaaacagaauccu

SEQ ID NO: 443953 - RNA, 19 nt, Artificial Sequence
  Description of Artificial Sequence: Synthetic oligonucleotide
  Sense strand starting at position 3067 of SEQ ID NO: 316834
ggauucuguuuguccagaa

SEQ ID NO: 443954 - RNA, 19 nt, Artificial Sequence
  Description of Artificial Sequence: Synthetic oligonucleotide
  Antisense Strand to SEQ ID NO: 443953
uucuggacaaacagaaucc

SEQ ID NO: 443955 - RNA, 19 nt, Artificial Sequence
  Description of Artificial Sequence: Synthetic oligonucleotide
  Sense strand starting at position 3068 of SEQ ID NO: 316834
gauucuguuuguccagaag

SEQ ID NO: 443956 - RNA, 19 nt, Artificial Sequence
  Description of Artificial Sequence: Synthetic oligonucleotide
  Antisense Strand to SEQ ID NO: 443955
cuucuggacaaacagaauc

SEQ ID NO: 443957 - RNA, 19 nt, Artificial Sequence
  Description of Artificial Sequence: Synthetic oligonucleotide
  Sense strand starting at position 3274 of SEQ ID NO: 316834
cagggugcuccgcagaaau

SEQ ID NO: 443958 - RNA, 19 nt, Artificial Sequence
  Description of Artificial Sequence: Synthetic oligonucleotide
  Antisense Strand to SEQ ID NO: 443957
auuucugcggagcacccug

SEQ ID NO: 443959 - RNA, 19 nt, Artificial Sequence
  Description of Artificial Sequence: Synthetic oligonucleotide
  Sense strand starting at position 3346 of SEQ ID NO: 316834
cccugucuccugugccaga

SEQ ID NO: 443960 - RNA, 19 nt, Artificial Sequence
  Description of Artificial Sequence: Synthetic oligonucleotide
  Antisense Strand to SEQ ID NO: 443959
ucuggcacaggagacaggg

SEQ ID NO: 443961 - RNA, 19 nt, Artificial Sequence
  Description of Artificial Sequence: Synthetic oligonucleotide
  Sense strand starting at position 3510 of SEQ ID NO: 316834
gcagcuggcuucugaggaa

SEQ ID NO: 443962 - RNA, 19 nt, Artificial Sequence
  Description of Artificial Sequence: Synthetic oligonucleotide
  Antisense Strand to SEQ ID NO: 443961
uuccucagaagccagcugc

SEQ ID NO: 443963 - RNA, 19 nt, Artificial Sequence
  Description of Artificial Sequence: Synthetic oligonucleotide
  Sense strand starting at position 3620 of SEQ ID NO: 316834
gccagaacuuucugcuuuc

SEQ ID NO: 443964 - RNA, 19 nt, Artificial Sequence
  Description of Artificial Sequence: Synthetic oligonucleotide
  Antisense Strand to SEQ ID NO: 443963
gaaagcagaaaguucuggc

SEQ ID NO: 443965 - RNA, 19 nt, Artificial Sequence
  Description of Artificial Sequence: Synthetic oligonucleotide
  Sense strand starting at position 3623 of SEQ ID NO: 316834
agaacuuucugcuuucuga

SEQ ID NO: 443966 - RNA, 19 nt, Artificial Sequence
  Description of Artificial Sequence: Synthetic oligonucleotide
  Antisense Strand to SEQ ID NO: 443965
ucagaaagcagaaaguucu

SEQ ID NO: 443967 - RNA, 19 nt, Artificial Sequence
  Description of Artificial Sequence: Synthetic oligonucleotide
  Sense strand starting at position 3636 of SEQ ID NO: 316834
uucugacgcacacguuaau

SEQ ID NO: 443968 - RNA, 19 nt, Artificial Sequence
  Description of Artificial Sequence: Synthetic oligonucleotide
  Antisense Strand to SEQ ID NO: 443967
auuaacgugugcgucagaa

SEQ ID NO: 443969 - RNA, 19 nt, Artificial Sequence
  Description of Artificial Sequence: Synthetic oligonucleotide
  Sense strand starting at position 3639 of SEQ ID NO: 316834
ugacgcacacguuaauuaa

SEQ ID NO: 443970 - RNA, 19 nt, Artificial Sequence
  Description of Artificial Sequence: Synthetic oligonucleotide
  Antisense Strand to SEQ ID NO: 443969
uuaauuaacgugugcguca

SEQ ID NO: 443971 - RNA, 19 nt, Artificial Sequence
  Description of Artificial Sequence: Synthetic oligonucleotide
  Sense strand starting at position 17 of SEQ ID NO: 316835
cuaaguguucccuacuuua

SEQ ID NO: 443972 - RNA, 19 nt, Artificial Sequence
  Description of Artificial Sequence: Synthetic oligonucleotide
  Antisense Strand to SEQ ID NO: 443971
uaaaguagggaacacuuag

SEQ ID NO: 443973 - RNA, 19 nt, Artificial Sequence
  Description of Artificial Sequence: Synthetic oligonucleotide
  Sense strand starting at position 181 of SEQ ID NO: 316835
uucucauuccuugauugga

SEQ ID NO: 443974 - RNA, 19 nt, Artificial Sequence
  Description of Artificial Sequence: Synthetic oligonucleotide
  Antisense Strand to SEQ ID NO: 443973
uccaaucaaggaaugagaa

SEQ ID NO: 443975 - RNA, 19 nt, Artificial Sequence
  Description of Artificial Sequence: Synthetic oligonucleotide
  Sense strand starting at position 221 of SEQ ID NO: 316835
guugcuuccagcucugagu

SEQ ID NO: 443976 - RNA, 19 nt, Artificial Sequence
  Description of Artificial Sequence: Synthetic oligonucleotide
  Antisense Strand to SEQ ID NO: 443975
acucagagcuggaagcaac

SEQ ID NO: 443977 - RNA, 19 nt, Artificial Sequence
  Description of Artificial Sequence: Synthetic oligonucleotide
  Sense strand starting at position 230 of SEQ ID NO: 316835
agcucugagucugugacau

SEQ ID NO: 443978 - RNA, 19 nt, Artificial Sequence
  Description of Artificial Sequence: Synthetic oligonucleotide
  Antisense Strand to SEQ ID NO: 443977
augucacagacucagagcu

SEQ ID NO: 443979 - RNA, 19 nt, Artificial Sequence
  Description of Artificial Sequence: Synthetic oligonucleotide
  Sense strand starting at position 307 of SEQ ID NO: 316835
aagagagucugucuuacaa

SEQ ID NO: 443980 - RNA, 19 nt, Artificial Sequence
  Description of Artificial Sequence: Synthetic oligonucleotide
  Antisense Strand to SEQ ID NO: 443979
uuguaagacagacucucuu

SEQ ID NO: 443981 - RNA, 19 nt, Artificial Sequence
  Description of Artificial Sequence: Synthetic oligonucleotide
  Sense strand starting at position 319 of SEQ ID NO: 316835
cuuacaaugucauugucuu

SEQ ID NO: 443982 - RNA, 19 nt, Artificial Sequence
  Description of Artificial Sequence: Synthetic oligonucleotide
  Antisense Strand to SEQ ID NO: 443981
aagacaaugacauuguaag

SEQ ID NO: 443983 - RNA, 19 nt, Artificial Sequence
  Description of Artificial Sequence: Synthetic oligonucleotide
  Sense strand starting at position 320 of SEQ ID NO: 316835
uuacaaugucauugucuuu

SEQ ID NO: 443984 - RNA, 19 nt, Artificial Sequence
  Description of Artificial Sequence: Synthetic oligonucleotide
  Antisense Strand to SEQ ID NO: 443983
aaagacaaugacauuguaa

SEQ ID NO: 443985 - RNA, 19 nt, Artificial Sequence
  Description of Artificial Sequence: Synthetic oligonucleotide
  Sense strand starting at position 454 of SEQ ID NO: 316835
uggcuuauacucuacaaug

SEQ ID NO: 443986 - RNA, 19 nt, Artificial Sequence
  Description of Artificial Sequence: Synthetic oligonucleotide
  Antisense Strand to SEQ ID NO: 443985
cauuguagaguauaagcca

SEQ ID NO: 443987 - RNA, 19 nt, Artificial Sequence
  Description of Artificial Sequence: Synthetic oligonucleotide
  Sense strand starting at position 543 of SEQ ID NO: 316835
ggugacuugacacagugau

SEQ ID NO: 443988 - RNA, 19 nt, Artificial Sequence
  Description of Artificial Sequence: Synthetic oligonucleotide
  Antisense Strand to SEQ ID NO: 443987
aucacugugucaagucacc

SEQ ID NO: 443989 - RNA, 19 nt, Artificial Sequence
  Description of Artificial Sequence: Synthetic oligonucleotide
  Sense strand starting at position 549 of SEQ ID NO: 316835
uugacacagugauucugua

SEQ ID NO: 443990 - RNA, 19 nt, Artificial Sequence
  Description of Artificial Sequence: Synthetic oligonucleotide
  Antisense Strand to SEQ ID NO: 443989
uacagaaucacugugucaa

SEQ ID NO: 443991 - RNA, 19 nt, Artificial Sequence
  Description of Artificial Sequence: Synthetic oligonucleotide
  Sense strand starting at position 587 of SEQ ID NO: 316835
ugauacaauuaugcaaagu

SEQ ID NO: 443992 - RNA, 19 nt, Artificial Sequence
  Description of Artificial Sequence: Synthetic oligonucleotide
  Antisense Strand to SEQ ID NO: 443991
acuuugcauaauuguauca

SEQ ID NO: 443993 - RNA, 19 nt, Artificial Sequence
  Description of Artificial Sequence: Synthetic oligonucleotide
  Sense strand starting at position 702 of SEQ ID NO: 316835
ucacgaaauugcuuaaauu

SEQ ID NO: 443994 - RNA, 19 nt, Artificial Sequence
  Description of Artificial Sequence: Synthetic oligonucleotide
  Antisense Strand to SEQ ID NO: 443993
aauuuaagcaauuucguga

SEQ ID NO: 443995 - RNA, 19 nt, Artificial Sequence
  Description of Artificial Sequence: Synthetic oligonucleotide
  Sense strand starting at position 763 of SEQ ID NO: 316835
acaccaagaguuuguguaa

SEQ ID NO: 443996 - RNA, 19 nt, Artificial Sequence
  Description of Artificial Sequence: Synthetic oligonucleotide
  Antisense Strand to SEQ ID NO: 443995
uuacacaaacucuuggugu

SEQ ID NO: 443997 - RNA, 19 nt, Artificial Sequence
  Description of Artificial Sequence: Synthetic oligonucleotide
  Sense strand starting at position 764 of SEQ ID NO: 316835
caccaagaguuuguguaag

SEQ ID NO: 443998 - RNA, 19 nt, Artificial Sequence
  Description of Artificial Sequence: Synthetic oligonucleotide
  Antisense Strand to SEQ ID NO: 443997
cuuacacaaacucuuggug

SEQ ID NO: 443999 - RNA, 19 nt, Artificial Sequence
  Description of Artificial Sequence: Synthetic oligonucleotide
  Sense strand starting at position 766 of SEQ ID NO: 316835
ccaagaguuuguguaagua

SEQ ID NO: 444000 - RNA, 19 nt, Artificial Sequence
  Description of Artificial Sequence: Synthetic oligonucleotide
  Antisense Strand to SEQ ID NO: 443999
uacuuacacaaacucuugg

SEQ ID NO: 444001 - RNA, 19 nt, Artificial Sequence
  Description of Artificial Sequence: Synthetic oligonucleotide
  Sense strand starting at position 770 of SEQ ID NO: 316835
gaguuuguguaaguauuuc

SEQ ID NO: 444002 - RNA, 19 nt, Artificial Sequence
  Description of Artificial Sequence: Synthetic oligonucleotide
  Antisense Strand to SEQ ID NO: 444001
gaaauacuuacacaaacuc

SEQ ID NO: 444003 - RNA, 19 nt, Artificial Sequence
  Description of Artificial Sequence: Synthetic oligonucleotide
  Sense strand starting at position 811 of SEQ ID NO: 316835
gguguuucgccauaaauac

SEQ ID NO: 444004 - RNA, 19 nt, Artificial Sequence
  Description of Artificial Sequence: Synthetic oligonucleotide
  Antisense Strand to SEQ ID NO: 444003
guauuuauggcgaaacacc

SEQ ID NO: 444005 - RNA, 19 nt, Artificial Sequence
  Description of Artificial Sequence: Synthetic oligonucleotide
  Sense strand starting at position 843 of SEQ ID NO: 316835
ugaacaugaucccuguauu

SEQ ID NO: 444006 - RNA, 19 nt, Artificial Sequence
  Description of Artificial Sequence: Synthetic oligonucleotide
  Antisense Strand to SEQ ID NO: 444005
aauacagggaucauguuca

SEQ ID NO: 444007 - RNA, 19 nt, Artificial Sequence
  Description of Artificial Sequence: Synthetic oligonucleotide
  Sense strand starting at position 946 of SEQ ID NO: 316835
augggacgauguucaguaa

SEQ ID NO: 444008 - RNA, 19 nt, Artificial Sequence
  Description of Artificial Sequence: Synthetic oligonucleotide
  Antisense Strand to SEQ ID NO: 444007
uuacugaacaucgucccau

SEQ ID NO: 444009 - RNA, 19 nt, Artificial Sequence
  Description of Artificial Sequence: Synthetic oligonucleotide
  Sense strand starting at position 949 of SEQ ID NO: 316835
ggacgauguucaguaacca

SEQ ID NO: 444010 - RNA, 19 nt, Artificial Sequence
  Description of Artificial Sequence: Synthetic oligonucleotide
  Antisense Strand to SEQ ID NO: 444009
ugguuacugaacaucgucc

SEQ ID NO: 444011 - RNA, 19 nt, Artificial Sequence
  Description of Artificial Sequence: Synthetic oligonucleotide
  Sense strand starting at position 1028 of SEQ ID NO: 316835
gcuaguaucuacuuugaag

SEQ ID NO: 444012 - RNA, 19 nt, Artificial Sequence
  Description of Artificial Sequence: Synthetic oligonucleotide
  Antisense Strand to SEQ ID NO: 444011
cuucaaaguagauacuagc

SEQ ID NO: 444013 - RNA, 19 nt, Artificial Sequence
  Description of Artificial Sequence: Synthetic oligonucleotide
  Sense strand starting at position 1120 of SEQ ID NO: 316835
gcccaucagguauauuacu

SEQ ID NO: 444014 - RNA, 19 nt, Artificial Sequence
  Description of Artificial Sequence: Synthetic oligonucleotide
  Antisense Strand to SEQ ID NO: 444013
aguaauauaccugaugggc

SEQ ID NO: 444015 - RNA, 19 nt, Artificial Sequence
  Description of Artificial Sequence: Synthetic oligonucleotide
  Sense strand starting at position 1128 of SEQ ID NO: 316835
gguauauuacuccacguuu

SEQ ID NO: 444016 - RNA, 19 nt, Artificial Sequence
  Description of Artificial Sequence: Synthetic oligonucleotide
  Antisense Strand to SEQ ID NO: 444015
aaacguggaguaauauacc

SEQ ID NO: 444017 - RNA, 19 nt, Artificial Sequence
  Description of Artificial Sequence: Synthetic oligonucleotide
  Sense strand starting at position 1902 of SEQ ID NO: 316835
gccacuuaacucuggagga

SEQ ID NO: 444018 - RNA, 19 nt, Artificial Sequence
  Description of Artificial Sequence: Synthetic oligonucleotide
  Antisense Strand to SEQ ID NO: 444017
uccuccagaguuaaguggc

SEQ ID NO: 444019 - RNA, 19 nt, Artificial Sequence
  Description of Artificial Sequence: Synthetic oligonucleotide
  Sense strand starting at position 2241 of SEQ ID NO: 316835
gagaaagucuaguccuagu

SEQ ID NO: 444020 - RNA, 19 nt, Artificial Sequence
  Description of Artificial Sequence: Synthetic oligonucleotide
  Antisense Strand to SEQ ID NO: 444019
acuaggacuagacuuucuc

SEQ ID NO: 444021 - RNA, 19 nt, Artificial Sequence
  Description of Artificial Sequence: Synthetic oligonucleotide
  Sense strand starting at position 2731 of SEQ ID NO: 316835
aaucaauugcagugaggaa

SEQ ID NO: 444022 - RNA, 19 nt, Artificial Sequence
  Description of Artificial Sequence: Synthetic oligonucleotide
  Antisense Strand to SEQ ID NO: 444021
uuccucacugcaauugauu

SEQ ID NO: 444023 - RNA, 19 nt, Artificial Sequence
  Description of Artificial Sequence: Synthetic oligonucleotide
  Sense strand starting at position 2763 of SEQ ID NO: 316835
aauguuaaggcuugucaug

SEQ ID NO: 444024 - RNA, 19 nt, Artificial Sequence
  Description of Artificial Sequence: Synthetic oligonucleotide
  Antisense Strand to SEQ ID NO: 444023
caugacaagccuuaacauu

SEQ ID NO: 444025 - RNA, 19 nt, Artificial Sequence
  Description of Artificial Sequence: Synthetic oligonucleotide
  Sense strand starting at position 2765 of SEQ ID NO: 316835
uguuaaggcuugucaugau

SEQ ID NO: 444026 - RNA, 19 nt, Artificial Sequence
  Description of Artificial Sequence: Synthetic oligonucleotide
  Antisense Strand to SEQ ID NO: 444025
aucaugacaagccuuaaca

SEQ ID NO: 444027 - RNA, 19 nt, Artificial Sequence
  Description of Artificial Sequence: Synthetic oligonucleotide
  Sense strand starting at position 2769 of SEQ ID NO: 316835
aaggcuugucaugaucuau

SEQ ID NO: 444028 - RNA, 19 nt, Artificial Sequence
  Description of Artificial Sequence: Synthetic oligonucleotide
  Antisense Strand to SEQ ID NO: 444027
auagaucaugacaagccuu

SEQ ID NO: 444029 - RNA, 19 nt, Artificial Sequence
  Description of Artificial Sequence: Synthetic oligonucleotide
  Sense strand starting at position 2851 of SEQ ID NO: 316835
uacagagaauucgcaguga

SEQ ID NO: 444030 - RNA, 19 nt, Artificial Sequence
  Description of Artificial Sequence: Synthetic oligonucleotide
  Antisense Strand to SEQ ID NO: 444029
ucacugcgaauucucugua

SEQ ID NO: 444031 - RNA, 19 nt, Artificial Sequence
  Description of Artificial Sequence: Synthetic oligonucleotide
  Sense strand starting at position 2915 of SEQ ID NO: 316835
ugcacuuucgcaguguuaa

SEQ ID NO: 444032 - RNA, 19 nt, Artificial Sequence
  Description of Artificial Sequence: Synthetic oligonucleotide
  Antisense Strand to SEQ ID NO: 444031
uuaacacugcgaaagugca

SEQ ID NO: 444033 - RNA, 19 nt, Artificial Sequence
  Description of Artificial Sequence: Synthetic oligonucleotide
  Sense strand starting at position 3102 of SEQ ID NO: 316835
aguugcauuuguucccaga

SEQ ID NO: 444034 - RNA, 19 nt, Artificial Sequence
  Description of Artificial Sequence: Synthetic oligonucleotide
  Antisense Strand to SEQ ID NO: 444033
ucugggaacaaaugcaacu

SEQ ID NO: 444035 - RNA, 19 nt, Artificial Sequence
  Description of Artificial Sequence: Synthetic oligonucleotide
  Sense strand starting at position 3209 of SEQ ID NO: 316835
accauacucugguucuuau

SEQ ID NO: 444036 - RNA, 19 nt, Artificial Sequence
  Description of Artificial Sequence: Synthetic oligonucleotide
  Antisense Strand to SEQ ID NO: 444035
auaagaaccagaguauggu

SEQ ID NO: 444037 - RNA, 19 nt, Artificial Sequence
  Description of Artificial Sequence: Synthetic oligonucleotide
  Sense strand starting at position 3241 of SEQ ID NO: 316835
cugcaauugcuaggauuaa

SEQ ID NO: 444038 - RNA, 19 nt, Artificial Sequence
  Description of Artificial Sequence: Synthetic oligonucleotide
  Antisense Strand to SEQ ID NO: 444037
uuaauccuagcaauugcag

SEQ ID NO: 444039 - RNA, 19 nt, Artificial Sequence
  Description of Artificial Sequence: Synthetic oligonucleotide
  Sense strand starting at position 3409 of SEQ ID NO: 316835
cccuccuagcugggauuau

SEQ ID NO: 444040 - RNA, 19 nt, Artificial Sequence
  Description of Artificial Sequence: Synthetic oligonucleotide
  Antisense Strand to SEQ ID NO: 444039
auaaucccagcuaggaggg

SEQ ID NO: 444041 - RNA, 19 nt, Artificial Sequence
  Description of Artificial Sequence: Synthetic oligonucleotide
  Sense strand starting at position 3727 of SEQ ID NO: 316835
guaccauagucccuacuuu

SEQ ID NO: 444042 - RNA, 19 nt, Artificial Sequence
  Description of Artificial Sequence: Synthetic oligonucleotide
  Antisense Strand to SEQ ID NO: 444041
aaaguagggacuaugguac

SEQ ID NO: 444043 - RNA, 19 nt, Artificial Sequence
  Description of Artificial Sequence: Synthetic oligonucleotide
  Sense strand starting at position 3774 of SEQ ID NO: 316835
aagauauucugagagaaag

SEQ ID NO: 444044 - RNA, 19 nt, Artificial Sequence
  Description of Artificial Sequence: Synthetic oligonucleotide
  Antisense Strand to SEQ ID NO: 444043
cuuucucucagaauaucuu

SEQ ID NO: 444045 - RNA, 19 nt, Artificial Sequence
  Description of Artificial Sequence: Synthetic oligonucleotide
  Sense strand starting at position 3912 of SEQ ID NO: 316835
cgauaaacccaucgugaag

SEQ ID NO: 444046 - RNA, 19 nt, Artificial Sequence
  Description of Artificial Sequence: Synthetic oligonucleotide
  Antisense Strand to SEQ ID NO: 444045
cuucacgauggguuuaucg

SEQ ID NO: 444047 - RNA, 19 nt, Artificial Sequence
  Description of Artificial Sequence: Synthetic oligonucleotide
  Sense strand starting at position 3957 of SEQ ID NO: 316835
agucaagacugucuguaug

SEQ ID NO: 444048 - RNA, 19 nt, Artificial Sequence
  Description of Artificial Sequence: Synthetic oligonucleotide
  Antisense Strand to SEQ ID NO: 444047
cauacagacagucuugacu

SEQ ID NO: 444049 - RNA, 19 nt, Artificial Sequence
  Description of Artificial Sequence: Synthetic oligonucleotide
  Sense strand starting at position 3959 of SEQ ID NO: 316835
ucaagacugucuguauguu

SEQ ID NO: 444050 - RNA, 19 nt, Artificial Sequence
  Description of Artificial Sequence: Synthetic oligonucleotide
  Antisense Strand to SEQ ID NO: 444049
aacauacagacagucuuga

SEQ ID NO: 444051 - RNA, 19 nt, Artificial Sequence
  Description of Artificial Sequence: Synthetic oligonucleotide
  Sense strand starting at position 33 of SEQ ID NO: 316836
gugcgugugccauugguaa

SEQ ID NO: 444052 - RNA, 19 nt, Artificial Sequence
  Description of Artificial Sequence: Synthetic oligonucleotide
  Antisense Strand to SEQ ID NO: 444051
uuaccaauggcacacgcac

SEQ ID NO: 444053 - RNA, 19 nt, Artificial Sequence
  Description of Artificial Sequence: Synthetic oligonucleotide
  Sense strand starting at position 182 of SEQ ID NO: 316836
gucucugugcgugucuauu

SEQ ID NO: 444054 - RNA, 19 nt, Artificial Sequence
  Description of Artificial Sequence: Synthetic oligonucleotide
  Antisense Strand to SEQ ID NO: 444053
aauagacacgcacagagac

SEQ ID NO: 444055 - RNA, 19 nt, Artificial Sequence
  Description of Artificial Sequence: Synthetic oligonucleotide
  Sense strand starting at position 229 of SEQ ID NO: 316836
ucuaucugucuguaugaca

SEQ ID NO: 444056 - RNA, 19 nt, Artificial Sequence
  Description of Artificial Sequence: Synthetic oligonucleotide
  Antisense Strand to SEQ ID NO: 444055
ugucauacagacagauaga

SEQ ID NO: 444057 - RNA, 19 nt, Artificial Sequence
  Description of Artificial Sequence: Synthetic oligonucleotide
  Sense strand starting at position 351 of SEQ ID NO: 316836
cuuccuuccgggugauuua

SEQ ID NO: 444058 - RNA, 19 nt, Artificial Sequence
  Description of Artificial Sequence: Synthetic oligonucleotide
  Antisense Strand to SEQ ID NO: 444057
uaaaucacccggaaggaag

SEQ ID NO: 444059 - RNA, 19 nt, Artificial Sequence
  Description of Artificial Sequence: Synthetic oligonucleotide
  Sense strand starting at position 377 of SEQ ID NO: 316836
uucugcgugagugagaaau

SEQ ID NO: 444060 - RNA, 19 nt, Artificial Sequence
  Description of Artificial Sequence: Synthetic oligonucleotide
  Antisense Strand to SEQ ID NO: 444059
auuucucacucacgcagaa

SEQ ID NO: 444061 - RNA, 19 nt, Artificial Sequence
  Description of Artificial Sequence: Synthetic oligonucleotide
  Sense strand starting at position 398 of SEQ ID NO: 316836
gcgucuacuggaguuguuu

SEQ ID NO: 444062 - RNA, 19 nt, Artificial Sequence
  Description of Artificial Sequence: Synthetic oligonucleotide
  Antisense Strand to SEQ ID NO: 444061
aaacaacuccaguagacgc

SEQ ID NO: 444063 - RNA, 19 nt, Artificial Sequence
  Description of Artificial Sequence: Synthetic oligonucleotide
  Sense strand starting at position 423 of SEQ ID NO: 316836
ugaccuuacuucuuugaag

SEQ ID NO: 444064 - RNA, 19 nt, Artificial Sequence
  Description of Artificial Sequence: Synthetic oligonucleotide
  Antisense Strand to SEQ ID NO: 444063
cuucaaagaaguaagguca

SEQ ID NO: 444065 - RNA, 19 nt, Artificial Sequence
  Description of Artificial Sequence: Synthetic oligonucleotide
  Sense strand starting at position 425 of SEQ ID NO: 316836
accuuacuucuuugaagag

SEQ ID NO: 444066 - RNA, 19 nt, Artificial Sequence
  Description of Artificial Sequence: Synthetic oligonucleotide
  Antisense Strand to SEQ ID NO: 444065
cucuucaaagaaguaaggu

SEQ ID NO: 444067 - RNA, 19 nt, Artificial Sequence
  Description of Artificial Sequence: Synthetic oligonucleotide
  Sense strand starting at position 441 of SEQ ID NO: 316836
gagaguaagugguuggaag

SEQ ID NO: 444068 - RNA, 19 nt, Artificial Sequence
  Description of Artificial Sequence: Synthetic oligonucleotide
  Antisense Strand to SEQ ID NO: 444067
cuuccaaccacuuacucuc

SEQ ID NO: 444069 - RNA, 19 nt, Artificial Sequence
  Description of Artificial Sequence: Synthetic oligonucleotide
  Sense strand starting at position 445 of SEQ ID NO: 316836
guaagugguuggaagggaa

SEQ ID NO: 444070 - RNA, 19 nt, Artificial Sequence
  Description of Artificial Sequence: Synthetic oligonucleotide
  Antisense Strand to SEQ ID NO: 444069
uucccuuccaaccacuuac

SEQ ID NO: 444071 - RNA, 19 nt, Artificial Sequence
  Description of Artificial Sequence: Synthetic oligonucleotide
  Sense strand starting at position 522 of SEQ ID NO: 316836
ccaguaucucaaugucuag

SEQ ID NO: 444072 - RNA, 19 nt, Artificial Sequence
  Description of Artificial Sequence: Synthetic oligonucleotide
  Antisense Strand to SEQ ID NO: 444071
cuagacauugagauacugg

SEQ ID NO: 444073 - RNA, 19 nt, Artificial Sequence
  Description of Artificial Sequence: Synthetic oligonucleotide
  Sense strand starting at position 525 of SEQ ID NO: 316836
guaucucaaugucuagacu

SEQ ID NO: 444074 - RNA, 19 nt, Artificial Sequence
  Description of Artificial Sequence: Synthetic oligonucleotide
  Antisense Strand to SEQ ID NO: 444073
agucuagacauugagauac

SEQ ID NO: 444075 - RNA, 19 nt, Artificial Sequence
  Description of Artificial Sequence: Synthetic oligonucleotide
  Sense strand starting at position 581 of SEQ ID NO: 316836
ugggcaaaucguuaaucaa

SEQ ID NO: 444076 - RNA, 19 nt, Artificial Sequence
  Description of Artificial Sequence: Synthetic oligonucleotide
  Antisense Strand to SEQ ID NO: 444075
uugauuaacgauuugccca

SEQ ID NO: 444077 - RNA, 19 nt, Artificial Sequence
  Description of Artificial Sequence: Synthetic oligonucleotide
  Sense strand starting at position 648 of SEQ ID NO: 316836
agcucacagaguugugaag

SEQ ID NO: 444078 - RNA, 19 nt, Artificial Sequence
  Description of Artificial Sequence: Synthetic oligonucleotide
  Antisense Strand to SEQ ID NO: 444077
cuucacaacucugugagcu

SEQ ID NO: 444079 - RNA, 19 nt, Artificial Sequence
  Description of Artificial Sequence: Synthetic oligonucleotide
  Sense strand starting at position 810 of SEQ ID NO: 316836
gcacuagaucuugauaugu

SEQ ID NO: 444080 - RNA, 19 nt, Artificial Sequence
  Description of Artificial Sequence: Synthetic oligonucleotide
  Antisense Strand to SEQ ID NO: 444079
acauaucaagaucuagugc

SEQ ID NO: 444081 - RNA, 19 nt, Artificial Sequence
  Description of Artificial Sequence: Synthetic oligonucleotide
  Sense strand starting at position 1178 of SEQ ID NO: 316836
acuugauggaguugaguuu

SEQ ID NO: 444082 - RNA, 19 nt, Artificial Sequence
  Description of Artificial Sequence: Synthetic oligonucleotide
  Antisense Strand to SEQ ID NO: 444081
aaacucaacuccaucaagu

SEQ ID NO: 444083 - RNA, 19 nt, Artificial Sequence
  Description of Artificial Sequence: Synthetic oligonucleotide
  Sense strand starting at position 1188 of SEQ ID NO: 316836
guugaguuuggcccgcgaa

SEQ ID NO: 444084 - RNA, 19 nt, Artificial Sequence
  Description of Artificial Sequence: Synthetic oligonucleotide
  Antisense Strand to SEQ ID NO: 444083
uucgcgggccaaacucaac

SEQ ID NO: 444085 - RNA, 19 nt, Artificial Sequence
  Description of Artificial Sequence: Synthetic oligonucleotide
  Sense strand starting at position 1190 of SEQ ID NO: 316836
ugaguuuggcccgcgaacu

SEQ ID NO: 444086 - RNA, 19 nt, Artificial Sequence
  Description of Artificial Sequence: Synthetic oligonucleotide
  Antisense Strand to SEQ ID NO: 444085
aguucgcgggccaaacuca

SEQ ID NO: 444087 - RNA, 19 nt, Artificial Sequence
  Description of Artificial Sequence: Synthetic oligonucleotide
  Sense strand starting at position 1464 of SEQ ID NO: 316836
cgccucaggacagaaauua

SEQ ID NO: 444088 - RNA, 19 nt, Artificial Sequence
  Description of Artificial Sequence: Synthetic oligonucleotide
  Antisense Strand to SEQ ID NO: 444087
uaauuucuguccugaggcg

SEQ ID NO: 444089 - RNA, 19 nt, Artificial Sequence
  Description of Artificial Sequence: Synthetic oligonucleotide
  Sense strand starting at position 1517 of SEQ ID NO: 316836
acaggaaguucugcaauaa

SEQ ID NO: 444090 - RNA, 19 nt, Artificial Sequence
  Description of Artificial Sequence: Synthetic oligonucleotide
  Antisense Strand to SEQ ID NO: 444089
uuauugcagaacuuccugu

SEQ ID NO: 444091 - RNA, 19 nt, Artificial Sequence
  Description of Artificial Sequence: Synthetic oligonucleotide
  Sense strand starting at position 1527 of SEQ ID NO: 316836
cugcaauaacuggaagcaa

SEQ ID NO: 444092 - RNA, 19 nt, Artificial Sequence
  Description of Artificial Sequence: Synthetic oligonucleotide
  Antisense Strand to SEQ ID NO: 444091
uugcuuccaguuauugcag

SEQ ID NO: 444093 - RNA, 19 nt, Artificial Sequence
  Description of Artificial Sequence: Synthetic oligonucleotide
  Sense strand starting at position 1803 of SEQ ID NO: 316836
guuagcaggcgcuuuagua

SEQ ID NO: 444094 - RNA, 19 nt, Artificial Sequence
  Description of Artificial Sequence: Synthetic oligonucleotide
  Antisense Strand to SEQ ID NO: 444093
uacuaaagcgccugcuaac

SEQ ID NO: 444095 - RNA, 19 nt, Artificial Sequence
  Description of Artificial Sequence: Synthetic oligonucleotide
  Sense strand starting at position 1843 of SEQ ID NO: 316836
gaccgaauccucgagaucu

SEQ ID NO: 444096 - RNA, 19 nt, Artificial Sequence
  Description of Artificial Sequence: Synthetic oligonucleotide
  Antisense Strand to SEQ ID NO: 444095
agaucucgaggauucgguc

SEQ ID NO: 444097 - RNA, 19 nt, Artificial Sequence
  Description of Artificial Sequence: Synthetic oligonucleotide
  Sense strand starting at position 1845 of SEQ ID NO: 316836
ccgaauccucgagaucuga

SEQ ID NO: 444098 - RNA, 19 nt, Artificial Sequence
  Description of Artificial Sequence: Synthetic oligonucleotide
  Antisense Strand to SEQ ID NO: 444097
ucagaucucgaggauucgg

SEQ ID NO: 444099 - RNA, 19 nt, Artificial Sequence
  Description of Artificial Sequence: Synthetic oligonucleotide
  Sense strand starting at position 2285 of SEQ ID NO: 316836
ggcuccuaauuccugacaa

SEQ ID NO: 444100 - RNA, 19 nt, Artificial Sequence
  Description of Artificial Sequence: Synthetic oligonucleotide
  Antisense Strand to SEQ ID NO: 444099
uugucaggaauuaggagcc

SEQ ID NO: 444101 - RNA, 19 nt, Artificial Sequence
  Description of Artificial Sequence: Synthetic oligonucleotide
  Sense strand starting at position 2511 of SEQ ID NO: 316836
uucuuugugagcucacguu

SEQ ID NO: 444102 - RNA, 19 nt, Artificial Sequence
  Description of Artificial Sequence: Synthetic oligonucleotide
  Antisense Strand to SEQ ID NO: 444101
aacgugagcucacaaagaa

SEQ ID NO: 444103 - RNA, 19 nt, Artificial Sequence
  Description of Artificial Sequence: Synthetic oligonucleotide
  Sense strand starting at position 2517 of SEQ ID NO: 316836
gugagcucacguuugguuu

SEQ ID NO: 444104 - RNA, 19 nt, Artificial Sequence
  Description of Artificial Sequence: Synthetic oligonucleotide
  Antisense Strand to SEQ ID NO: 444103
aaaccaaacgugagcucac

SEQ ID NO: 444105 - RNA, 19 nt, Artificial Sequence
  Description of Artificial Sequence: Synthetic oligonucleotide
  Sense strand starting at position 2650 of SEQ ID NO: 316836
agaugagccuguucgauuu

SEQ ID NO: 444106 - RNA, 19 nt, Artificial Sequence
  Description of Artificial Sequence: Synthetic oligonucleotide
  Antisense Strand to SEQ ID NO: 444105
aaaucgaacaggcucaucu

SEQ ID NO: 444107 - RNA, 19 nt, Artificial Sequence
  Description of Artificial Sequence: Synthetic oligonucleotide
  Sense strand starting at position 2716 of SEQ ID NO: 316836
guagaauaugucuaugucu

SEQ ID NO: 444108 - RNA, 19 nt, Artificial Sequence
  Description of Artificial Sequence: Synthetic oligonucleotide
  Antisense Strand to SEQ ID NO: 444107
agacauagacauauucuac

SEQ ID NO: 444109 - RNA, 19 nt, Artificial Sequence
  Description of Artificial Sequence: Synthetic oligonucleotide
  Sense strand starting at position 2718 of SEQ ID NO: 316836
agaauaugucuaugucucu

SEQ ID NO: 444110 - RNA, 19 nt, Artificial Sequence
  Description of Artificial Sequence: Synthetic oligonucleotide
  Antisense Strand to SEQ ID NO: 444109
agagacauagacauauucu

SEQ ID NO: 444111 - RNA, 19 nt, Artificial Sequence
  Description of Artificial Sequence: Synthetic oligonucleotide
  Sense strand starting at position 2724 of SEQ ID NO: 316836
ugucuaugucucugaggga

SEQ ID NO: 444112 - RNA, 19 nt, Artificial Sequence
  Description of Artificial Sequence: Synthetic oligonucleotide
  Antisense Strand to SEQ ID NO: 444111
ucccucagagacauagaca

SEQ ID NO: 444113 - RNA, 19 nt, Artificial Sequence
  Description of Artificial Sequence: Synthetic oligonucleotide
  Sense strand starting at position 3064 of SEQ ID NO: 316836
acggaauugcugcaggaga

SEQ ID NO: 444114 - RNA, 19 nt, Artificial Sequence
  Description of Artificial Sequence: Synthetic oligonucleotide
  Antisense Strand to SEQ ID NO: 444113
ucuccugcagcaauuccgu

SEQ ID NO: 444115 - RNA, 19 nt, Artificial Sequence
  Description of Artificial Sequence: Synthetic oligonucleotide
  Sense strand starting at position 3066 of SEQ ID NO: 316836
ggaauugcugcaggagaca

SEQ ID NO: 444116 - RNA, 19 nt, Artificial Sequence
  Description of Artificial Sequence: Synthetic oligonucleotide
  Antisense Strand to SEQ ID NO: 444115
ugucuccugcagcaauucc

SEQ ID NO: 444117 - RNA, 19 nt, Artificial Sequence
  Description of Artificial Sequence: Synthetic oligonucleotide
  Sense strand starting at position 3162 of SEQ ID NO: 316836
cauuucugcuucgcagaca

SEQ ID NO: 444118 - RNA, 19 nt, Artificial Sequence
  Description of Artificial Sequence: Synthetic oligonucleotide
  Antisense Strand to SEQ ID NO: 444117
ugucugcgaagcagaaaug

SEQ ID NO: 444119 - RNA, 19 nt, Artificial Sequence
  Description of Artificial Sequence: Synthetic oligonucleotide
  Sense strand starting at position 3213 of SEQ ID NO: 316836
gagccacaacuugaaguua

SEQ ID NO: 444120 - RNA, 19 nt, Artificial Sequence
  Description of Artificial Sequence: Synthetic oligonucleotide
  Antisense Strand to SEQ ID NO: 444119
uaacuucaaguuguggcuc

SEQ ID NO: 444121 - RNA, 19 nt, Artificial Sequence
  Description of Artificial Sequence: Synthetic oligonucleotide
  Sense strand starting at position 3324 of SEQ ID NO: 316836
cauguccaugaguacgaau

SEQ ID NO: 444122 - RNA, 19 nt, Artificial Sequence
  Description of Artificial Sequence: Synthetic oligonucleotide
  Antisense Strand to SEQ ID NO: 444121
auucguacucauggacaug

SEQ ID NO: 444123 - RNA, 19 nt, Artificial Sequence
  Description of Artificial Sequence: Synthetic oligonucleotide
  Sense strand starting at position 3399 of SEQ ID NO: 316836
agaguucuaaaguguggau

SEQ ID NO: 444124 - RNA, 19 nt, Artificial Sequence
  Description of Artificial Sequence: Synthetic oligonucleotide
  Antisense Strand to SEQ ID NO: 444123
auccacacuuuagaacucu

SEQ ID NO: 444125 - RNA, 19 nt, Artificial Sequence
  Description of Artificial Sequence: Synthetic oligonucleotide
  Sense strand starting at position 3457 of SEQ ID NO: 316836
uuucucaguccugaccuau

SEQ ID NO: 444126 - RNA, 19 nt, Artificial Sequence
  Description of Artificial Sequence: Synthetic oligonucleotide
  Antisense Strand to SEQ ID NO: 444125
auaggucaggacugagaaa

SEQ ID NO: 444127 - RNA, 19 nt, Artificial Sequence
  Description of Artificial Sequence: Synthetic oligonucleotide
  Sense strand starting at position 3693 of SEQ ID NO: 316836
cuaagugaacucgaccaau

SEQ ID NO: 444128 - RNA, 19 nt, Artificial Sequence
  Description of Artificial Sequence: Synthetic oligonucleotide
  Antisense Strand to SEQ ID NO: 444127
auuggucgaguucacuuag

SEQ ID NO: 444129 - RNA, 19 nt, Artificial Sequence
  Description of Artificial Sequence: Synthetic oligonucleotide
  Sense strand starting at position 3871 of SEQ ID NO: 316836
agagauuugucauauggua

SEQ ID NO: 444130 - RNA, 19 nt, Artificial Sequence
  Description of Artificial Sequence: Synthetic oligonucleotide
  Antisense Strand to SEQ ID NO: 444129
uaccauaugacaaaucucu

SEQ ID NO: 444131 - RNA, 19 nt, Artificial Sequence
  Description of Artificial Sequence: Synthetic oligonucleotide
  Sense strand starting at position 251 of SEQ ID NO: 316837
agagccaaauguuuagaau

SEQ ID NO: 444132 - RNA, 19 nt, Artificial Sequence
  Description of Artificial Sequence: Synthetic oligonucleotide
  Antisense Strand to SEQ ID NO: 444131
auucuaaacauuuggcucu

SEQ ID NO: 444133 - RNA, 19 nt, Artificial Sequence
  Description of Artificial Sequence: Synthetic oligonucleotide
  Sense strand starting at position 321 of SEQ ID NO: 316837
ucggcucuuaaguaaggaa

SEQ ID NO: 444134 - RNA, 19 nt, Artificial Sequence
  Description of Artificial Sequence: Synthetic oligonucleotide
  Antisense Strand to SEQ ID NO: 444133
uuccuuacuuaagagccga

SEQ ID NO: 444135 - RNA, 19 nt, Artificial Sequence
  Description of Artificial Sequence: Synthetic oligonucleotide
  Sense strand starting at position 498 of SEQ ID NO: 316837
ugcuuuauuugucuuagua

SEQ ID NO: 444136 - RNA, 19 nt, Artificial Sequence
  Description of Artificial Sequence: Synthetic oligonucleotide
  Antisense Strand to SEQ ID NO: 444135
uacuaagacaaauaaagca

SEQ ID NO: 444137 - RNA, 19 nt, Artificial Sequence
  Description of Artificial Sequence: Synthetic oligonucleotide
  Sense strand starting at position 557 of SEQ ID NO: 316837
auuagcagucaguaaauau

SEQ ID NO: 444138 - RNA, 19 nt, Artificial Sequence
  Description of Artificial Sequence: Synthetic oligonucleotide
  Antisense Strand to SEQ ID NO: 444137
auauuuacugacugcuaau

SEQ ID NO: 444139 - RNA, 19 nt, Artificial Sequence
  Description of Artificial Sequence: Synthetic oligonucleotide
  Sense strand starting at position 666 of SEQ ID NO: 316837
auguacaaccuguaaaugu

SEQ ID NO: 444140 - RNA, 19 nt, Artificial Sequence
  Description of Artificial Sequence: Synthetic oligonucleotide
  Antisense Strand to SEQ ID NO: 444139
acauuuacagguuguacau

SEQ ID NO: 444141 - RNA, 19 nt, Artificial Sequence
  Description of Artificial Sequence: Synthetic oligonucleotide
  Sense strand starting at position 682 of SEQ ID NO: 316837
uguacauuagcaggaaacu

SEQ ID NO: 444142 - RNA, 19 nt, Artificial Sequence
  Description of Artificial Sequence: Synthetic oligonucleotide
  Antisense Strand to SEQ ID NO: 444141
aguuuccugcuaauguaca

SEQ ID NO: 444143 - RNA, 19 nt, Artificial Sequence
  Description of Artificial Sequence: Synthetic oligonucleotide
  Sense strand starting at position 683 of SEQ ID NO: 316837
guacauuagcaggaaacuu

SEQ ID NO: 444144 - RNA, 19 nt, Artificial Sequence
  Description of Artificial Sequence: Synthetic oligonucleotide
  Antisense Strand to SEQ ID NO: 444143
aaguuuccugcuaauguac

SEQ ID NO: 444145 - RNA, 19 nt, Artificial Sequence
  Description of Artificial Sequence: Synthetic oligonucleotide
  Sense strand starting at position 820 of SEQ ID NO: 316837
caaacuuggccaggauaug

SEQ ID NO: 444146 - RNA, 19 nt, Artificial Sequence
  Description of Artificial Sequence: Synthetic oligonucleotide
  Antisense Strand to SEQ ID NO: 444145
cauauccuggccaaguuug

SEQ ID NO: 444147 - RNA, 19 nt, Artificial Sequence
  Description of Artificial Sequence: Synthetic oligonucleotide
  Sense strand starting at position 912 of SEQ ID NO: 316837
gucaauuacgaugaaucca

SEQ ID NO: 444148 - RNA, 19 nt, Artificial Sequence
  Description of Artificial Sequence: Synthetic oligonucleotide
  Antisense Strand to SEQ ID NO: 444147
uggauucaucguaauugac

SEQ ID NO: 444149 - RNA, 19 nt, Artificial Sequence
  Description of Artificial Sequence: Synthetic oligonucleotide
  Sense strand starting at position 953 of SEQ ID NO: 316837
ggaauauaccucugaggug

SEQ ID NO: 444150 - RNA, 19 nt, Artificial Sequence
  Description of Artificial Sequence: Synthetic oligonucleotide
  Antisense Strand to SEQ ID NO: 444149
caccucagagguauauucc

SEQ ID NO: 444151 - RNA, 19 nt, Artificial Sequence
  Description of Artificial Sequence: Synthetic oligonucleotide
  Sense strand starting at position 993 of SEQ ID NO: 316837
uuggaaggccucuaagcau

SEQ ID NO: 444152 - RNA, 19 nt, Artificial Sequence
  Description of Artificial Sequence: Synthetic oligonucleotide
  Antisense Strand to SEQ ID NO: 444151
augcuuagaggccuuccaa

SEQ ID NO: 444153 - RNA, 19 nt, Artificial Sequence
  Description of Artificial Sequence: Synthetic oligonucleotide
  Sense strand starting at position 1115 of SEQ ID NO: 316837
auagucaagccucaguuaa

SEQ ID NO: 444154 - RNA, 19 nt, Artificial Sequence
  Description of Artificial Sequence: Synthetic oligonucleotide
  Antisense Strand to SEQ ID NO: 444153
uuaacugaggcuugacuau

SEQ ID NO: 444155 - RNA, 19 nt, Artificial Sequence
  Description of Artificial Sequence: Synthetic oligonucleotide
  Sense strand starting at position 1135 of SEQ ID NO: 316837
cagaaaguaugguuaacca

SEQ ID NO: 444156 - RNA, 19 nt, Artificial Sequence
  Description of Artificial Sequence: Synthetic oligonucleotide
  Antisense Strand to SEQ ID NO: 444155
ugguuaaccauacuuucug

SEQ ID NO: 444157 - RNA, 19 nt, Artificial Sequence
  Description of Artificial Sequence: Synthetic oligonucleotide
  Sense strand starting at position 1207 of SEQ ID NO: 316837
acgucacacagaugaagaa

SEQ ID NO: 444158 - RNA, 19 nt, Artificial Sequence
  Description of Artificial Sequence: Synthetic oligonucleotide
  Antisense Strand to SEQ ID NO: 444157
uucuucaucugugugacgu

SEQ ID NO: 444159 - RNA, 19 nt, Artificial Sequence
  Description of Artificial Sequence: Synthetic oligonucleotide
  Sense strand starting at position 1445 of SEQ ID NO: 316837
acuagaugcucucuagaug

SEQ ID NO: 444160 - RNA, 19 nt, Artificial Sequence
  Description of Artificial Sequence: Synthetic oligonucleotide
  Antisense Strand to SEQ ID NO: 444159
caucuagagagcaucuagu

SEQ ID NO: 444161 - RNA, 19 nt, Artificial Sequence
  Description of Artificial Sequence: Synthetic oligonucleotide
  Sense strand starting at position 1446 of SEQ ID NO: 316837
cuagaugcucucuagauga

SEQ ID NO: 444162 - RNA, 19 nt, Artificial Sequence
  Description of Artificial Sequence: Synthetic oligonucleotide
  Antisense Strand to SEQ ID NO: 444161
ucaucuagagagcaucuag

SEQ ID NO: 444163 - RNA, 19 nt, Artificial Sequence
  Description of Artificial Sequence: Synthetic oligonucleotide
  Sense strand starting at position 1451 of SEQ ID NO: 316837
ugcucucuagaugaauaac

SEQ ID NO: 444164 - RNA, 19 nt, Artificial Sequence
  Description of Artificial Sequence: Synthetic oligonucleotide
  Antisense Strand to SEQ ID NO: 444163
guuauucaucuagagagca

SEQ ID NO: 444165 - RNA, 19 nt, Artificial Sequence
  Description of Artificial Sequence: Synthetic oligonucleotide
  Sense strand starting at position 1662 of SEQ ID NO: 316837
agaagugucaugcagagau

SEQ ID NO: 444166 - RNA, 19 nt, Artificial Sequence
  Description of Artificial Sequence: Synthetic oligonucleotide
  Antisense Strand to SEQ ID NO: 444165
aucucugcaugacacuucu

SEQ ID NO: 444167 - RNA, 19 nt, Artificial Sequence
  Description of Artificial Sequence: Synthetic oligonucleotide
  Sense strand starting at position 1664 of SEQ ID NO: 316837
aagugucaugcagagaucu

SEQ ID NO: 444168 - RNA, 19 nt, Artificial Sequence
  Description of Artificial Sequence: Synthetic oligonucleotide
  Antisense Strand to SEQ ID NO: 444167
agaucucugcaugacacuu

SEQ ID NO: 444169 - RNA, 19 nt, Artificial Sequence
  Description of Artificial Sequence: Synthetic oligonucleotide
  Sense strand starting at position 1666 of SEQ ID NO: 316837
gugucaugcagagaucuaa

SEQ ID NO: 444170 - RNA, 19 nt, Artificial Sequence
  Description of Artificial Sequence: Synthetic oligonucleotide
  Antisense Strand to SEQ ID NO: 444169
uuagaucucugcaugacac

SEQ ID NO: 444171 - RNA, 19 nt, Artificial Sequence
  Description of Artificial Sequence: Synthetic oligonucleotide
  Sense strand starting at position 1748 of SEQ ID NO: 316837
uuuacuguggcauaaacaa

SEQ ID NO: 444172 - RNA, 19 nt, Artificial Sequence
  Description of Artificial Sequence: Synthetic oligonucleotide
  Antisense Strand to SEQ ID NO: 444171
uuguuuaugccacaguaaa

SEQ ID NO: 444173 - RNA, 19 nt, Artificial Sequence
  Description of Artificial Sequence: Synthetic oligonucleotide
  Sense strand starting at position 1827 of SEQ ID NO: 316837
gguauaaugccucaaacau

SEQ ID NO: 444174 - RNA, 19 nt, Artificial Sequence
  Description of Artificial Sequence: Synthetic oligonucleotide
  Antisense Strand to SEQ ID NO: 444173
auguuugaggcauuauacc

SEQ ID NO: 444175 - RNA, 19 nt, Artificial Sequence
  Description of Artificial Sequence: Synthetic oligonucleotide
  Sense strand starting at position 2013 of SEQ ID NO: 316837
guugauauucuggacacuu

SEQ ID NO: 444176 - RNA, 19 nt, Artificial Sequence
  Description of Artificial Sequence: Synthetic oligonucleotide
  Antisense Strand to SEQ ID NO: 444175
aaguguccagaauaucaac

SEQ ID NO: 444177 - RNA, 19 nt, Artificial Sequence
  Description of Artificial Sequence: Synthetic oligonucleotide
  Sense strand starting at position 2197 of SEQ ID NO: 316837
ugacuagacuaguuuccau

SEQ ID NO: 444178 - RNA, 19 nt, Artificial Sequence
  Description of Artificial Sequence: Synthetic oligonucleotide
  Antisense Strand to SEQ ID NO: 444177
auggaaacuagucuaguca

SEQ ID NO: 444179 - RNA, 19 nt, Artificial Sequence
  Description of Artificial Sequence: Synthetic oligonucleotide
  Sense strand starting at position 2381 of SEQ ID NO: 316837
uguacauuuccagguugua

SEQ ID NO: 444180 - RNA, 19 nt, Artificial Sequence
  Description of Artificial Sequence: Synthetic oligonucleotide
  Antisense Strand to SEQ ID NO: 444179
uacaaccuggaaauguaca

SEQ ID NO: 444181 - RNA, 19 nt, Artificial Sequence
  Description of Artificial Sequence: Synthetic oligonucleotide
  Sense strand starting at position 2390 of SEQ ID NO: 316837
ccagguuguacauggagaa

SEQ ID NO: 444182 - RNA, 19 nt, Artificial Sequence
  Description of Artificial Sequence: Synthetic oligonucleotide
  Antisense Strand to SEQ ID NO: 444181
uucuccauguacaaccugg

SEQ ID NO: 444183 - RNA, 19 nt, Artificial Sequence
  Description of Artificial Sequence: Synthetic oligonucleotide
  Sense strand starting at position 2391 of SEQ ID NO: 316837
cagguuguacauggagaaa

SEQ ID NO: 444184 - RNA, 19 nt, Artificial Sequence
  Description of Artificial Sequence: Synthetic oligonucleotide
  Antisense Strand to SEQ ID NO: 444183
uuucuccauguacaaccug

SEQ ID NO: 444185 - RNA, 19 nt, Artificial Sequence
  Description of Artificial Sequence: Synthetic oligonucleotide
  Sense strand starting at position 2716 of SEQ ID NO: 316837
gguagcauccaaggaaacu

SEQ ID NO: 444186 - RNA, 19 nt, Artificial Sequence
  Description of Artificial Sequence: Synthetic oligonucleotide
  Antisense Strand to SEQ ID NO: 444185
aguuuccuuggaugcuacc

SEQ ID NO: 444187 - RNA, 19 nt, Artificial Sequence
  Description of Artificial Sequence: Synthetic oligonucleotide
  Sense strand starting at position 2838 of SEQ ID NO: 316837
uggaaauggguuuggcaau

SEQ ID NO: 444188 - RNA, 19 nt, Artificial Sequence
  Description of Artificial Sequence: Synthetic oligonucleotide
  Antisense Strand to SEQ ID NO: 444187
auugccaaacccauuucca

SEQ ID NO: 444189 - RNA, 19 nt, Artificial Sequence
  Description of Artificial Sequence: Synthetic oligonucleotide
  Sense strand starting at position 2851 of SEQ ID NO: 316837
ggcaauuucccaggagcgu

SEQ ID NO: 444190 - RNA, 19 nt, Artificial Sequence
  Description of Artificial Sequence: Synthetic oligonucleotide
  Antisense Strand to SEQ ID NO: 444189
acgcuccugggaaauugcc

SEQ ID NO: 444191 - RNA, 19 nt, Artificial Sequence
  Description of Artificial Sequence: Synthetic oligonucleotide
  Sense strand starting at position 3014 of SEQ ID NO: 316837
cucaguacucuuugaauga

SEQ ID NO: 444192 - RNA, 19 nt, Artificial Sequence
  Description of Artificial Sequence: Synthetic oligonucleotide
  Antisense Strand to SEQ ID NO: 444191
ucauucaaagaguacugag

SEQ ID NO: 444193 - RNA, 19 nt, Artificial Sequence
  Description of Artificial Sequence: Synthetic oligonucleotide
  Sense strand starting at position 3018 of SEQ ID NO: 316837
guacucuuugaaugacuga

SEQ ID NO: 444194 - RNA, 19 nt, Artificial Sequence
  Description of Artificial Sequence: Synthetic oligonucleotide
  Antisense Strand to SEQ ID NO: 444193
ucagucauucaaagaguac

SEQ ID NO: 444195 - RNA, 19 nt, Artificial Sequence
  Description of Artificial Sequence: Synthetic oligonucleotide
  Sense strand starting at position 3025 of SEQ ID NO: 316837
uugaaugacugaguggauu

SEQ ID NO: 444196 - RNA, 19 nt, Artificial Sequence
  Description of Artificial Sequence: Synthetic oligonucleotide
  Antisense Strand to SEQ ID NO: 444195
aauccacucagucauucaa

SEQ ID NO: 444197 - RNA, 19 nt, Artificial Sequence
  Description of Artificial Sequence: Synthetic oligonucleotide
  Sense strand starting at position 3386 of SEQ ID NO: 316837
augggucuuaacugagauc

SEQ ID NO: 444198 - RNA, 19 nt, Artificial Sequence
  Description of Artificial Sequence: Synthetic oligonucleotide
  Antisense Strand to SEQ ID NO: 444197
gaucucaguuaagacccau

SEQ ID NO: 444199 - RNA, 19 nt, Artificial Sequence
  Description of Artificial Sequence: Synthetic oligonucleotide
  Sense strand starting at position 3438 of SEQ ID NO: 316837
auuggauucugggcagauu

SEQ ID NO: 444200 - RNA, 19 nt, Artificial Sequence
  Description of Artificial Sequence: Synthetic oligonucleotide
  Antisense Strand to SEQ ID NO: 444199
aaucugcccagaauccaau

SEQ ID NO: 444201 - RNA, 19 nt, Artificial Sequence
  Description of Artificial Sequence: Synthetic oligonucleotide
  Sense strand starting at position 3459 of SEQ ID NO: 316837
ggcagauugcauuacaaga

SEQ ID NO: 444202 - RNA, 19 nt, Artificial Sequence
  Description of Artificial Sequence: Synthetic oligonucleotide
  Antisense Strand to SEQ ID NO: 444201
ucuuguaaugcaaucugcc

SEQ ID NO: 444203 - RNA, 19 nt, Artificial Sequence
  Description of Artificial Sequence: Synthetic oligonucleotide
  Sense strand starting at position 3715 of SEQ ID NO: 316837
cauaguuguuaccugagag

SEQ ID NO: 444204 - RNA, 19 nt, Artificial Sequence
  Description of Artificial Sequence: Synthetic oligonucleotide
  Antisense Strand to SEQ ID NO: 444203
cucucagguaacaacuaug

SEQ ID NO: 444205 - RNA, 19 nt, Artificial Sequence
  Description of Artificial Sequence: Synthetic oligonucleotide
  Sense strand starting at position 3746 of SEQ ID NO: 316837
uguaauucugagcacuuua

SEQ ID NO: 444206 - RNA, 19 nt, Artificial Sequence
  Description of Artificial Sequence: Synthetic oligonucleotide
  Antisense Strand to SEQ ID NO: 444205
uaaagugcucagaauuaca

SEQ ID NO: 444207 - RNA, 19 nt, Artificial Sequence
  Description of Artificial Sequence: Synthetic oligonucleotide
  Sense strand starting at position 3818 of SEQ ID NO: 316837
ggccaagaguuccuagaau

SEQ ID NO: 444208 - RNA, 19 nt, Artificial Sequence
  Description of Artificial Sequence: Synthetic oligonucleotide
  Antisense Strand to SEQ ID NO: 444207
auucuaggaacucuuggcc

SEQ ID NO: 444209 - RNA, 19 nt, Artificial Sequence
  Description of Artificial Sequence: Synthetic oligonucleotide
  Sense strand starting at position 3918 of SEQ ID NO: 316837
gucagaucaggaugcacau

SEQ ID NO: 444210 - RNA, 19 nt, Artificial Sequence
  Description of Artificial Sequence: Synthetic oligonucleotide
  Antisense Strand to SEQ ID NO: 444209
augugcauccugaucugac

SEQ ID NO: 444211 - RNA, 19 nt, Artificial Sequence
  Description of Artificial Sequence: Synthetic oligonucleotide
  Sense strand starting at position 250 of SEQ ID NO: 316838
gcaugaaucuaccuaucug

SEQ ID NO: 444212 - RNA, 19 nt, Artificial Sequence
  Description of Artificial Sequence: Synthetic oligonucleotide
  Antisense Strand to SEQ ID NO: 444211
cagauagguagauucaugc

SEQ ID NO: 444213 - RNA, 19 nt, Artificial Sequence
  Description of Artificial Sequence: Synthetic oligonucleotide
  Sense strand starting at position 254 of SEQ ID NO: 316838
gaaucuaccuaucugaggu

SEQ ID NO: 444214 - RNA, 19 nt, Artificial Sequence
  Description of Artificial Sequence: Synthetic oligonucleotide
  Antisense Strand to SEQ ID NO: 444213
accucagauagguagauuc

SEQ ID NO: 444215 - RNA, 19 nt, Artificial Sequence
  Description of Artificial Sequence: Synthetic oligonucleotide
  Sense strand starting at position 344 of SEQ ID NO: 316838
uagggagcugucugauuag

SEQ ID NO: 444216 - RNA, 19 nt, Artificial Sequence
  Description of Artificial Sequence: Synthetic oligonucleotide
  Antisense Strand to SEQ ID NO: 444215
cuaaucagacagcucccua

SEQ ID NO: 444217 - RNA, 19 nt, Artificial Sequence
  Description of Artificial Sequence: Synthetic oligonucleotide
  Sense strand starting at position 353 of SEQ ID NO: 316838
gucugauuaguacacaguu

SEQ ID NO: 444218 - RNA, 19 nt, Artificial Sequence
  Description of Artificial Sequence: Synthetic oligonucleotide
  Antisense Strand to SEQ ID NO: 444217
aacuguguacuaaucagac

SEQ ID NO: 444219 - RNA, 19 nt, Artificial Sequence
  Description of Artificial Sequence: Synthetic oligonucleotide
  Sense strand starting at position 397 of SEQ ID NO: 316838
agaguccuugcacaacaau

SEQ ID NO: 444220 - RNA, 19 nt, Artificial Sequence
  Description of Artificial Sequence: Synthetic oligonucleotide
  Antisense Strand to SEQ ID NO: 444219
auuguugugcaaggacucu

SEQ ID NO: 444221 - RNA, 19 nt, Artificial Sequence
  Description of Artificial Sequence: Synthetic oligonucleotide
  Sense strand starting at position 451 of SEQ ID NO: 316838
aauaguuaagaccguaaau

SEQ ID NO: 444222 - RNA, 19 nt, Artificial Sequence
  Description of Artificial Sequence: Synthetic oligonucleotide
  Antisense Strand to SEQ ID NO: 444221
auuuacggucuuaacuauu

SEQ ID NO: 444223 - RNA, 19 nt, Artificial Sequence
  Description of Artificial Sequence: Synthetic oligonucleotide
  Sense strand starting at position 547 of SEQ ID NO: 316838
aguguuagaaggcaaugua

SEQ ID NO: 444224 - RNA, 19 nt, Artificial Sequence
  Description of Artificial Sequence: Synthetic oligonucleotide
  Antisense Strand to SEQ ID NO: 444223
uacauugccuucuaacacu

SEQ ID NO: 444225 - RNA, 19 nt, Artificial Sequence
  Description of Artificial Sequence: Synthetic oligonucleotide
  Sense strand starting at position 550 of SEQ ID NO: 316838
guuagaaggcaauguaaug

SEQ ID NO: 444226 - RNA, 19 nt, Artificial Sequence
  Description of Artificial Sequence: Synthetic oligonucleotide
  Antisense Strand to SEQ ID NO: 444225
cauuacauugccuucuaac

SEQ ID NO: 444227 - RNA, 19 nt, Artificial Sequence
  Description of Artificial Sequence: Synthetic oligonucleotide
  Sense strand starting at position 858 of SEQ ID NO: 316838
aucagaaagucuguuucca

SEQ ID NO: 444228 - RNA, 19 nt, Artificial Sequence
  Description of Artificial Sequence: Synthetic oligonucleotide
  Antisense Strand to SEQ ID NO: 444227
uggaaacagacuuucugau

SEQ ID NO: 444229 - RNA, 19 nt, Artificial Sequence
  Description of Artificial Sequence: Synthetic oligonucleotide
  Sense strand starting at position 866 of SEQ ID NO: 316838
gucuguuuccacgugggua

SEQ ID NO: 444230 - RNA, 19 nt, Artificial Sequence
  Description of Artificial Sequence: Synthetic oligonucleotide
  Antisense Strand to SEQ ID NO: 444229
uacccacguggaaacagac

SEQ ID NO: 444231 - RNA, 19 nt, Artificial Sequence
  Description of Artificial Sequence: Synthetic oligonucleotide
  Sense strand starting at position 878 of SEQ ID NO: 316838
guggguaaaccuggucaaa

SEQ ID NO: 444232 - RNA, 19 nt, Artificial Sequence
  Description of Artificial Sequence: Synthetic oligonucleotide
  Antisense Strand to SEQ ID NO: 444231
uuugaccagguuuacccac

SEQ ID NO: 444233 - RNA, 19 nt, Artificial Sequence
  Description of Artificial Sequence: Synthetic oligonucleotide
  Sense strand starting at position 880 of SEQ ID NO: 316838
ggguaaaccuggucaaaug

SEQ ID NO: 444234 - RNA, 19 nt, Artificial Sequence
  Description of Artificial Sequence: Synthetic oligonucleotide
  Antisense Strand to SEQ ID NO: 444233
cauuugaccagguuuaccc

SEQ ID NO: 444235 - RNA, 19 nt, Artificial Sequence
  Description of Artificial Sequence: Synthetic oligonucleotide
  Sense strand starting at position 954 of SEQ ID NO: 316838
aaauguugggcacaacuau

SEQ ID NO: 444236 - RNA, 19 nt, Artificial Sequence
  Description of Artificial Sequence: Synthetic oligonucleotide
  Antisense Strand to SEQ ID NO: 444235
auaguugugcccaacauuu

SEQ ID NO: 444237 - RNA, 19 nt, Artificial Sequence
  Description of Artificial Sequence: Synthetic oligonucleotide
  Sense strand starting at position 975 of SEQ ID NO: 316838
gcacuuugugcucaauaaa

SEQ ID NO: 444238 - RNA, 19 nt, Artificial Sequence
  Description of Artificial Sequence: Synthetic oligonucleotide
  Antisense Strand to SEQ ID NO: 444237
uuuauugagcacaaagugc

SEQ ID NO: 444239 - RNA, 19 nt, Artificial Sequence
  Description of Artificial Sequence: Synthetic oligonucleotide
  Sense strand starting at position 1014 of SEQ ID NO: 316838
aagccuaucgaguaggaaa

SEQ ID NO: 444240 - RNA, 19 nt, Artificial Sequence
  Description of Artificial Sequence: Synthetic oligonucleotide
  Antisense Strand to SEQ ID NO: 444239
uuuccuacucgauaggcuu

SEQ ID NO: 444241 - RNA, 19 nt, Artificial Sequence
  Description of Artificial Sequence: Synthetic oligonucleotide
  Sense strand starting at position 1066 of SEQ ID NO: 316838
guaccauauuccucagaga

SEQ ID NO: 444242 - RNA, 19 nt, Artificial Sequence
  Description of Artificial Sequence: Synthetic oligonucleotide
  Antisense Strand to SEQ ID NO: 444241
ucucugaggaauaugguac

SEQ ID NO: 444243 - RNA, 19 nt, Artificial Sequence
  Description of Artificial Sequence: Synthetic oligonucleotide
  Sense strand starting at position 1080 of SEQ ID NO: 316838
agagauuugguucgucgau

SEQ ID NO: 444244 - RNA, 19 nt, Artificial Sequence
  Description of Artificial Sequence: Synthetic oligonucleotide
  Antisense Strand to SEQ ID NO: 444243
aucgacgaaccaaaucucu

SEQ ID NO: 444245 - RNA, 19 nt, Artificial Sequence
  Description of Artificial Sequence: Synthetic oligonucleotide
  Sense strand starting at position 1081 of SEQ ID NO: 316838
gagauuugguucgucgaua

SEQ ID NO: 444246 - RNA, 19 nt, Artificial Sequence
  Description of Artificial Sequence: Synthetic oligonucleotide
  Antisense Strand to SEQ ID NO: 444245
uaucgacgaaccaaaucuc

SEQ ID NO: 444247 - RNA, 19 nt, Artificial Sequence
  Description of Artificial Sequence: Synthetic oligonucleotide
  Sense strand starting at position 1082 of SEQ ID NO: 316838
agauuugguucgucgauaa

SEQ ID NO: 444248 - RNA, 19 nt, Artificial Sequence
  Description of Artificial Sequence: Synthetic oligonucleotide
  Antisense Strand to SEQ ID NO: 444247
uuaucgacgaaccaaaucu

SEQ ID NO: 444249 - RNA, 19 nt, Artificial Sequence
  Description of Artificial Sequence: Synthetic oligonucleotide
  Sense strand starting at position 1160 of SEQ ID NO: 316838
gccgaaagugugcucuucu

SEQ ID NO: 444250 - RNA, 19 nt, Artificial Sequence
  Description of Artificial Sequence: Synthetic oligonucleotide
  Antisense Strand to SEQ ID NO: 444249
agaagagcacacuuucggc

SEQ ID NO: 444251 - RNA, 19 nt, Artificial Sequence
  Description of Artificial Sequence: Synthetic oligonucleotide
  Sense strand starting at position 1212 of SEQ ID NO: 316838
ugucaucucagguauucga

SEQ ID NO: 444252 - RNA, 19 nt, Artificial Sequence
  Description of Artificial Sequence: Synthetic oligonucleotide
  Antisense Strand to SEQ ID NO: 444251
ucgaauaccugagaugaca

SEQ ID NO: 444253 - RNA, 19 nt, Artificial Sequence
  Description of Artificial Sequence: Synthetic oligonucleotide
  Sense strand starting at position 1420 of SEQ ID NO: 316838
aagucuccuccagggagaa

SEQ ID NO: 444254 - RNA, 19 nt, Artificial Sequence
  Description of Artificial Sequence: Synthetic oligonucleotide
  Antisense Strand to SEQ ID NO: 444253
uucucccuggaggagacuu

SEQ ID NO: 444255 - RNA, 19 nt, Artificial Sequence
  Description of Artificial Sequence: Synthetic oligonucleotide
  Sense strand starting at position 1421 of SEQ ID NO: 316838
agucuccuccagggagaau

SEQ ID NO: 444256 - RNA, 19 nt, Artificial Sequence
  Description of Artificial Sequence: Synthetic oligonucleotide
  Antisense Strand to SEQ ID NO: 444255
auucucccuggaggagacu

SEQ ID NO: 444257 - RNA, 19 nt, Artificial Sequence
  Description of Artificial Sequence: Synthetic oligonucleotide
  Sense strand starting at position 2435 of SEQ ID NO: 316838
cguuagagcgucguuugaa

SEQ ID NO: 444258 - RNA, 19 nt, Artificial Sequence
  Description of Artificial Sequence: Synthetic oligonucleotide
  Antisense Strand to SEQ ID NO: 444257
uucaaacgacgcucuaacg

SEQ ID NO: 444259 - RNA, 19 nt, Artificial Sequence
  Description of Artificial Sequence: Synthetic oligonucleotide
  Sense strand starting at position 2466 of SEQ ID NO: 316838
gcuuguauggcagccuuau

SEQ ID NO: 444260 - RNA, 19 nt, Artificial Sequence
  Description of Artificial Sequence: Synthetic oligonucleotide
  Antisense Strand to SEQ ID NO: 444259
auaaggcugccauacaagc

SEQ ID NO: 444261 - RNA, 19 nt, Artificial Sequence
  Description of Artificial Sequence: Synthetic oligonucleotide
  Sense strand starting at position 2538 of SEQ ID NO: 316838
uuuaauuuguagcuugcaa

SEQ ID NO: 444262 - RNA, 19 nt, Artificial Sequence
  Description of Artificial Sequence: Synthetic oligonucleotide
  Antisense Strand to SEQ ID NO: 444261
uugcaagcuacaaauuaaa

SEQ ID NO: 444263 - RNA, 19 nt, Artificial Sequence
  Description of Artificial Sequence: Synthetic oligonucleotide
  Sense strand starting at position 2675 of SEQ ID NO: 316838
acauuaccacuuggaagua

SEQ ID NO: 444264 - RNA, 19 nt, Artificial Sequence
  Description of Artificial Sequence: Synthetic oligonucleotide
  Antisense Strand to SEQ ID NO: 444263
uacuuccaagugguaaugu

SEQ ID NO: 444265 - RNA, 19 nt, Artificial Sequence
  Description of Artificial Sequence: Synthetic oligonucleotide
  Sense strand starting at position 2733 of SEQ ID NO: 316838
guuugcuaugugcaaauuu

SEQ ID NO: 444266 - RNA, 19 nt, Artificial Sequence
  Description of Artificial Sequence: Synthetic oligonucleotide
  Antisense Strand to SEQ ID NO: 444265
aaauuugcacauagcaaac

SEQ ID NO: 444267 - RNA, 19 nt, Artificial Sequence
  Description of Artificial Sequence: Synthetic oligonucleotide
  Sense strand starting at position 2926 of SEQ ID NO: 316838
ugauguuacugaguacuua

SEQ ID NO: 444268 - RNA, 19 nt, Artificial Sequence
  Description of Artificial Sequence: Synthetic oligonucleotide
  Antisense Strand to SEQ ID NO: 444267
uaaguacucaguaacauca

SEQ ID NO: 444269 - RNA, 19 nt, Artificial Sequence
  Description of Artificial Sequence: Synthetic oligonucleotide
  Sense strand starting at position 2927 of SEQ ID NO: 316838
gauguuacugaguacuuaa

SEQ ID NO: 444270 - RNA, 19 nt, Artificial Sequence
  Description of Artificial Sequence: Synthetic oligonucleotide
  Antisense Strand to SEQ ID NO: 444269
uuaaguacucaguaacauc

SEQ ID NO: 444271 - RNA, 19 nt, Artificial Sequence
  Description of Artificial Sequence: Synthetic oligonucleotide
  Sense strand starting at position 2930 of SEQ ID NO: 316838
guuacugaguacuuaacaa

SEQ ID NO: 444272 - RNA, 19 nt, Artificial Sequence
  Description of Artificial Sequence: Synthetic oligonucleotide
  Antisense Strand to SEQ ID NO: 444271
uuguuaaguacucaguaac

SEQ ID NO: 444273 - RNA, 19 nt, Artificial Sequence
  Description of Artificial Sequence: Synthetic oligonucleotide
  Sense strand starting at position 3007 of SEQ ID NO: 316838
ggaguucauucuguggaua

SEQ ID NO: 444274 - RNA, 19 nt, Artificial Sequence
  Description of Artificial Sequence: Synthetic oligonucleotide
  Antisense Strand to SEQ ID NO: 444273
uauccacagaaugaacucc

SEQ ID NO: 444275 - RNA, 19 nt, Artificial Sequence
  Description of Artificial Sequence: Synthetic oligonucleotide
  Sense strand starting at position 3018 of SEQ ID NO: 316838
uguggauauacaggacauu

SEQ ID NO: 444276 - RNA, 19 nt, Artificial Sequence
  Description of Artificial Sequence: Synthetic oligonucleotide
  Antisense Strand to SEQ ID NO: 444275
aauguccuguauauccaca

SEQ ID NO: 444277 - RNA, 19 nt, Artificial Sequence
  Description of Artificial Sequence: Synthetic oligonucleotide
  Sense strand starting at position 3224 of SEQ ID NO: 316838
auauacuugggcuaucuca

SEQ ID NO: 444278 - RNA, 19 nt, Artificial Sequence
  Description of Artificial Sequence: Synthetic oligonucleotide
  Antisense Strand to SEQ ID NO: 444277
ugagauagcccaaguauau

SEQ ID NO: 444279 - RNA, 19 nt, Artificial Sequence
  Description of Artificial Sequence: Synthetic oligonucleotide
  Sense strand starting at position 3277 of SEQ ID NO: 316838
aaagaaaugugcuuaguua

SEQ ID NO: 444280 - RNA, 19 nt, Artificial Sequence
  Description of Artificial Sequence: Synthetic oligonucleotide
  Antisense Strand to SEQ ID NO: 444279
uaacuaagcacauuucuuu

SEQ ID NO: 444281 - RNA, 19 nt, Artificial Sequence
  Description of Artificial Sequence: Synthetic oligonucleotide
  Sense strand starting at position 3278 of SEQ ID NO: 316838
aagaaaugugcuuaguuau

SEQ ID NO: 444282 - RNA, 19 nt, Artificial Sequence
  Description of Artificial Sequence: Synthetic oligonucleotide
  Antisense Strand to SEQ ID NO: 444281
auaacuaagcacauuucuu

SEQ ID NO: 444283 - RNA, 19 nt, Artificial Sequence
  Description of Artificial Sequence: Synthetic oligonucleotide
  Sense strand starting at position 3295 of SEQ ID NO: 316838
auugcugcuagaugagaua

SEQ ID NO: 444284 - RNA, 19 nt, Artificial Sequence
  Description of Artificial Sequence: Synthetic oligonucleotide
  Antisense Strand to SEQ ID NO: 444283
uaucucaucuagcagcaau

SEQ ID NO: 444285 - RNA, 19 nt, Artificial Sequence
  Description of Artificial Sequence: Synthetic oligonucleotide
  Sense strand starting at position 3352 of SEQ ID NO: 316838
acacaacuaguuugggaua

SEQ ID NO: 444286 - RNA, 19 nt, Artificial Sequence
  Description of Artificial Sequence: Synthetic oligonucleotide
  Antisense Strand to SEQ ID NO: 444285
uaucccaaacuaguugugu

SEQ ID NO: 444287 - RNA, 19 nt, Artificial Sequence
  Description of Artificial Sequence: Synthetic oligonucleotide
  Sense strand starting at position 3554 of SEQ ID NO: 316838
uuaagacucgaaugcagaa

SEQ ID NO: 444288 - RNA, 19 nt, Artificial Sequence
  Description of Artificial Sequence: Synthetic oligonucleotide
  Antisense Strand to SEQ ID NO: 444287
uucugcauucgagucuuaa

SEQ ID NO: 444289 - RNA, 19 nt, Artificial Sequence
  Description of Artificial Sequence: Synthetic oligonucleotide
  Sense strand starting at position 3860 of SEQ ID NO: 316838
caagaaaguguauacuguu

SEQ ID NO: 444290 - RNA, 19 nt, Artificial Sequence
  Description of Artificial Sequence: Synthetic oligonucleotide
  Antisense Strand to SEQ ID NO: 444289
aacaguauacacuuucuug

SEQ ID NO: 444291 - RNA, 19 nt, Artificial Sequence
  Description of Artificial Sequence: Synthetic oligonucleotide
  Sense strand starting at position 239 of SEQ ID NO: 316839
gccucaaggcuuggaauga

SEQ ID NO: 444292 - RNA, 19 nt, Artificial Sequence
  Description of Artificial Sequence: Synthetic oligonucleotide
  Antisense Strand to SEQ ID NO: 444291
ucauuccaagccuugaggc

SEQ ID NO: 444293 - RNA, 19 nt, Artificial Sequence
  Description of Artificial Sequence: Synthetic oligonucleotide
  Sense strand starting at position 240 of SEQ ID NO: 316839
ccucaaggcuuggaaugaa

SEQ ID NO: 444294 - RNA, 19 nt, Artificial Sequence
  Description of Artificial Sequence: Synthetic oligonucleotide
  Antisense Strand to SEQ ID NO: 444293
uucauuccaagccuugagg

SEQ ID NO: 444295 - RNA, 19 nt, Artificial Sequence
  Description of Artificial Sequence: Synthetic oligonucleotide
  Sense strand starting at position 243 of SEQ ID NO: 316839
caaggcuuggaaugaacau

SEQ ID NO: 444296 - RNA, 19 nt, Artificial Sequence
  Description of Artificial Sequence: Synthetic oligonucleotide
  Antisense Strand to SEQ ID NO: 444295
auguucauuccaagccuug

SEQ ID NO: 444297 - RNA, 19 nt, Artificial Sequence
  Description of Artificial Sequence: Synthetic oligonucleotide
  Sense strand starting at position 507 of SEQ ID NO: 316839
gggacugucugaugcagaa

SEQ ID NO: 444298 - RNA, 19 nt, Artificial Sequence
  Description of Artificial Sequence: Synthetic oligonucleotide
  Antisense Strand to SEQ ID NO: 444297
uucugcaucagacaguccc

SEQ ID NO: 444299 - RNA, 19 nt, Artificial Sequence
  Description of Artificial Sequence: Synthetic oligonucleotide
  Sense strand starting at position 1404 of SEQ ID NO: 316839
ugcucugagcguuuccaca

SEQ ID NO: 444300 - RNA, 19 nt, Artificial Sequence
  Description of Artificial Sequence: Synthetic oligonucleotide
  Antisense Strand to SEQ ID NO: 444299
uguggaaacgcucagagca

SEQ ID NO: 444301 - RNA, 19 nt, Artificial Sequence
  Description of Artificial Sequence: Synthetic oligonucleotide
  Sense strand starting at position 2671 of SEQ ID NO: 316839
ggagcugccugcuuuguaa

SEQ ID NO: 444302 - RNA, 19 nt, Artificial Sequence
  Description of Artificial Sequence: Synthetic oligonucleotide
  Antisense Strand to SEQ ID NO: 444301
uuacaaagcaggcagcucc

SEQ ID NO: 444303 - RNA, 19 nt, Artificial Sequence
  Description of Artificial Sequence: Synthetic oligonucleotide
  Sense strand starting at position 2675 of SEQ ID NO: 316839
cugccugcuuuguaaagga

SEQ ID NO: 444304 - RNA, 19 nt, Artificial Sequence
  Description of Artificial Sequence: Synthetic oligonucleotide
  Antisense Strand to SEQ ID NO: 444303
uccuuuacaaagcaggcag

SEQ ID NO: 444305 - RNA, 19 nt, Artificial Sequence
  Description of Artificial Sequence: Synthetic oligonucleotide
  Sense strand starting at position 2789 of SEQ ID NO: 316839
cugggcauuagaugucaca

SEQ ID NO: 444306 - RNA, 19 nt, Artificial Sequence
  Description of Artificial Sequence: Synthetic oligonucleotide
  Antisense Strand to SEQ ID NO: 444305
ugugacaucuaaugcccag

SEQ ID NO: 444307 - RNA, 19 nt, Artificial Sequence
  Description of Artificial Sequence: Synthetic oligonucleotide
  Sense strand starting at position 2809 of SEQ ID NO: 316839
ccagguucuucugcagaga

SEQ ID NO: 444308 - RNA, 19 nt, Artificial Sequence
  Description of Artificial Sequence: Synthetic oligonucleotide
  Antisense Strand to SEQ ID NO: 444307
ucucugcagaagaaccugg

SEQ ID NO: 444309 - RNA, 19 nt, Artificial Sequence
  Description of Artificial Sequence: Synthetic oligonucleotide
  Sense strand starting at position 3758 of SEQ ID NO: 316839
gaggaagcuuccugcagga

SEQ ID NO: 444310 - RNA, 19 nt, Artificial Sequence
  Description of Artificial Sequence: Synthetic oligonucleotide
  Antisense Strand to SEQ ID NO: 444309
uccugcaggaagcuuccuc

SEQ ID NO: 444311 - RNA, 19 nt, Artificial Sequence
  Description of Artificial Sequence: Synthetic oligonucleotide
  Sense strand starting at position 3848 of SEQ ID NO: 316839
cuccgugccucagaaguua

SEQ ID NO: 444312 - RNA, 19 nt, Artificial Sequence
  Description of Artificial Sequence: Synthetic oligonucleotide
  Antisense Strand to SEQ ID NO: 444311
uaacuucugaggcacggag

SEQ ID NO: 444313 - RNA, 19 nt, Artificial Sequence
  Description of Artificial Sequence: Synthetic oligonucleotide
  Sense strand starting at position 3859 of SEQ ID NO: 316839
agaaguuauagccagaagu

SEQ ID NO: 444314 - RNA, 19 nt, Artificial Sequence
  Description of Artificial Sequence: Synthetic oligonucleotide
  Antisense Strand to SEQ ID NO: 444313
acuucuggcuauaacuucu

SEQ ID NO: 444315 - RNA, 19 nt, Artificial Sequence
  Description of Artificial Sequence: Synthetic oligonucleotide
  Sense strand starting at position 3861 of SEQ ID NO: 316839
aaguuauagccagaaguuu

SEQ ID NO: 444316 - RNA, 19 nt, Artificial Sequence
  Description of Artificial Sequence: Synthetic oligonucleotide
  Antisense Strand to SEQ ID NO: 444315
aaacuucuggcuauaacuu

SEQ ID NO: 444317 - RNA, 19 nt, Artificial Sequence
  Description of Artificial Sequence: Synthetic oligonucleotide
  Sense strand starting at position 3884 of SEQ ID NO: 316839
agaaguuauagccaggguu

SEQ ID NO: 444318 - RNA, 19 nt, Artificial Sequence
  Description of Artificial Sequence: Synthetic oligonucleotide
  Antisense Strand to SEQ ID NO: 444317
aacccuggcuauaacuucu

SEQ ID NO: 444319 - RNA, 19 nt, Artificial Sequence
  Description of Artificial Sequence: Synthetic oligonucleotide
  Sense strand starting at position 3896 of SEQ ID NO: 316839
caggguugcugguugcaaa

SEQ ID NO: 444320 - RNA, 19 nt, Artificial Sequence
  Description of Artificial Sequence: Synthetic oligonucleotide
  Antisense Strand to SEQ ID NO: 444319
uuugcaaccagcaacccug

SEQ ID NO: 444321 - RNA, 19 nt, Artificial Sequence
  Description of Artificial Sequence: Synthetic oligonucleotide
  Sense strand starting at position 3897 of SEQ ID NO: 316839
aggguugcugguugcaaau

SEQ ID NO: 444322 - RNA, 19 nt, Artificial Sequence
  Description of Artificial Sequence: Synthetic oligonucleotide
  Antisense Strand to SEQ ID NO: 444321
auuugcaaccagcaacccu

SEQ ID NO: 444323 - RNA, 19 nt, Artificial Sequence
  Description of Artificial Sequence: Synthetic oligonucleotide
  Sense strand starting at position 3903 of SEQ ID NO: 316839
gcugguugcaaauggagaa

SEQ ID NO: 444324 - RNA, 19 nt, Artificial Sequence
  Description of Artificial Sequence: Synthetic oligonucleotide
  Antisense Strand to SEQ ID NO: 444323
uucuccauuugcaaccagc

SEQ ID NO: 444325 - RNA, 19 nt, Artificial Sequence
  Description of Artificial Sequence: Synthetic oligonucleotide
  Sense strand starting at position 3917 of SEQ ID NO: 316839
gagaaauaggcuggccacu

SEQ ID NO: 444326 - RNA, 19 nt, Artificial Sequence
  Description of Artificial Sequence: Synthetic oligonucleotide
  Antisense Strand to SEQ ID NO: 444325
aguggccagccuauuucuc

SEQ ID NO: 444327 - RNA, 19 nt, Artificial Sequence
  Description of Artificial Sequence: Synthetic oligonucleotide
  Sense strand starting at position 350 of SEQ ID NO: 316840
aggaagugugggugagaca

SEQ ID NO: 444328 - RNA, 19 nt, Artificial Sequence
  Description of Artificial Sequence: Synthetic oligonucleotide
  Antisense Strand to SEQ ID NO: 444327
ugucucacccacacuuccu

SEQ ID NO: 444329 - RNA, 19 nt, Artificial Sequence
  Description of Artificial Sequence: Synthetic oligonucleotide
  Sense strand starting at position 568 of SEQ ID NO: 316840
gagggucucuuacugcaca

SEQ ID NO: 444330 - RNA, 19 nt, Artificial Sequence
  Description of Artificial Sequence: Synthetic oligonucleotide
  Antisense Strand to SEQ ID NO: 444329
ugugcaguaagagacccuc

SEQ ID NO: 444331 - RNA, 19 nt, Artificial Sequence
  Description of Artificial Sequence: Synthetic oligonucleotide
  Sense strand starting at position 731 of SEQ ID NO: 316840
cugcaauccuggccuggaa

SEQ ID NO: 444332 - RNA, 19 nt, Artificial Sequence
  Description of Artificial Sequence: Synthetic oligonucleotide
  Antisense Strand to SEQ ID NO: 444331
uuccaggccaggauugcag

SEQ ID NO: 444333 - RNA, 19 nt, Artificial Sequence
  Description of Artificial Sequence: Synthetic oligonucleotide
  Sense strand starting at position 1495 of SEQ ID NO: 316840
agccgucuugagggcaaau

SEQ ID NO: 444334 - RNA, 19 nt, Artificial Sequence
  Description of Artificial Sequence: Synthetic oligonucleotide
  Antisense Strand to SEQ ID NO: 444333
auuugcccucaagacggcu

SEQ ID NO: 444335 - RNA, 19 nt, Artificial Sequence
  Description of Artificial Sequence: Synthetic oligonucleotide
  Sense strand starting at position 1497 of SEQ ID NO: 316840
ccgucuugagggcaaauga

SEQ ID NO: 444336 - RNA, 19 nt, Artificial Sequence
  Description of Artificial Sequence: Synthetic oligonucleotide
  Antisense Strand to SEQ ID NO: 444335
ucauuugcccucaagacgg

SEQ ID NO: 444337 - RNA, 19 nt, Artificial Sequence
  Description of Artificial Sequence: Synthetic oligonucleotide
  Sense strand starting at position 2042 of SEQ ID NO: 316840
ggcgucaccucacaggaau

SEQ ID NO: 444338 - RNA, 19 nt, Artificial Sequence
  Description of Artificial Sequence: Synthetic oligonucleotide
  Antisense Strand to SEQ ID NO: 444337
auuccugugaggugacgcc

SEQ ID NO: 444339 - RNA, 19 nt, Artificial Sequence
  Description of Artificial Sequence: Synthetic oligonucleotide
  Sense strand starting at position 2144 of SEQ ID NO: 316840
aagggaaaucucggcauua

SEQ ID NO: 444340 - RNA, 19 nt, Artificial Sequence
  Description of Artificial Sequence: Synthetic oligonucleotide
  Antisense Strand to SEQ ID NO: 444339
uaaugccgagauuucccuu

SEQ ID NO: 444341 - RNA, 19 nt, Artificial Sequence
  Description of Artificial Sequence: Synthetic oligonucleotide
  Sense strand starting at position 2145 of SEQ ID NO: 316840
agggaaaucucggcauuag

SEQ ID NO: 444342 - RNA, 19 nt, Artificial Sequence
  Description of Artificial Sequence: Synthetic oligonucleotide
  Antisense Strand to SEQ ID NO: 444341
cuaaugccgagauuucccu

SEQ ID NO: 444343 - RNA, 19 nt, Artificial Sequence
  Description of Artificial Sequence: Synthetic oligonucleotide
  Sense strand starting at position 2369 of SEQ ID NO: 316840
cgccauuccuacuuuagca

SEQ ID NO: 444344 - RNA, 19 nt, Artificial Sequence
  Description of Artificial Sequence: Synthetic oligonucleotide
  Antisense Strand to SEQ ID NO: 444343
ugcuaaaguaggaauggcg

SEQ ID NO: 444345 - RNA, 19 nt, Artificial Sequence
  Description of Artificial Sequence: Synthetic oligonucleotide
  Sense strand starting at position 2481 of SEQ ID NO: 316840
caccuucuggcccgauaga

SEQ ID NO: 444346 - RNA, 19 nt, Artificial Sequence
  Description of Artificial Sequence: Synthetic oligonucleotide
  Antisense Strand to SEQ ID NO: 444345
ucuaucgggccagaaggug

SEQ ID NO: 444347 - RNA, 19 nt, Artificial Sequence
  Description of Artificial Sequence: Synthetic oligonucleotide
  Sense strand starting at position 2524 of SEQ ID NO: 316840
gggugcuccugaucagaau

SEQ ID NO: 444348 - RNA, 19 nt, Artificial Sequence
  Description of Artificial Sequence: Synthetic oligonucleotide
  Antisense Strand to SEQ ID NO: 444347
auucugaucaggagcaccc

SEQ ID NO: 444349 - RNA, 19 nt, Artificial Sequence
  Description of Artificial Sequence: Synthetic oligonucleotide
  Sense strand starting at position 2525 of SEQ ID NO: 316840
ggugcuccugaucagaauu

SEQ ID NO: 444350 - RNA, 19 nt, Artificial Sequence
  Description of Artificial Sequence: Synthetic oligonucleotide
  Antisense Strand to SEQ ID NO: 444349
aauucugaucaggagcacc

SEQ ID NO: 444351 - RNA, 19 nt, Artificial Sequence
  Description of Artificial Sequence: Synthetic oligonucleotide
  Sense strand starting at position 2821 of SEQ ID NO: 316840
gcucucuaauccugagcuu

SEQ ID NO: 444352 - RNA, 19 nt, Artificial Sequence
  Description of Artificial Sequence: Synthetic oligonucleotide
  Antisense Strand to SEQ ID NO: 444351
aagcucaggauuagagagc

SEQ ID NO: 444353 - RNA, 19 nt, Artificial Sequence
  Description of Artificial Sequence: Synthetic oligonucleotide
  Sense strand starting at position 3219 of SEQ ID NO: 316840
cggucuugggaaugcucaa

SEQ ID NO: 444354 - RNA, 19 nt, Artificial Sequence
  Description of Artificial Sequence: Synthetic oligonucleotide
  Antisense Strand to SEQ ID NO: 444353
uugagcauucccaagaccg

SEQ ID NO: 444355 - RNA, 19 nt, Artificial Sequence
  Description of Artificial Sequence: Synthetic oligonucleotide
  Sense strand starting at position 3819 of SEQ ID NO: 316840
gcauguuuccuguuugccu

SEQ ID NO: 444356 - RNA, 19 nt, Artificial Sequence
  Description of Artificial Sequence: Synthetic oligonucleotide
  Antisense Strand to SEQ ID NO: 444355
aggcaaacaggaaacaugc

SEQ ID NO: 444357 - RNA, 19 nt, Artificial Sequence
  Description of Artificial Sequence: Synthetic oligonucleotide
  Sense strand starting at position 3827 of SEQ ID NO: 316840
ccuguuugccuguguguuu

SEQ ID NO: 444358 - RNA, 19 nt, Artificial Sequence
  Description of Artificial Sequence: Synthetic oligonucleotide
  Antisense Strand to SEQ ID NO: 444357
aaacacacaggcaaacagg

SEQ ID NO: 444359 - RNA, 19 nt, Artificial Sequence
  Description of Artificial Sequence: Synthetic oligonucleotide
  Sense strand starting at position 2391 of SEQ ID NO: 316841
cuuuaagggcccuacauaa

SEQ ID NO: 444360 - RNA, 19 nt, Artificial Sequence
  Description of Artificial Sequence: Synthetic oligonucleotide
  Antisense Strand to SEQ ID NO: 444359
uuauguagggcccuuaaag

SEQ ID NO: 444361 - RNA, 19 nt, Artificial Sequence
  Description of Artificial Sequence: Synthetic oligonucleotide
  Sense strand starting at position 2452 of SEQ ID NO: 316841
gauuccuacuccugggaca

SEQ ID NO: 444362 - RNA, 19 nt, Artificial Sequence
  Description of Artificial Sequence: Synthetic oligonucleotide
  Antisense Strand to SEQ ID NO: 444361
ugucccaggaguaggaauc

SEQ ID NO: 444363 - RNA, 19 nt, Artificial Sequence
  Description of Artificial Sequence: Synthetic oligonucleotide
  Sense strand starting at position 2454 of SEQ ID NO: 316841
uuccuacuccugggacagu

SEQ ID NO: 444364 - RNA, 19 nt, Artificial Sequence
  Description of Artificial Sequence: Synthetic oligonucleotide
  Antisense Strand to SEQ ID NO: 444363
acugucccaggaguaggaa

SEQ ID NO: 444365 - RNA, 19 nt, Artificial Sequence
  Description of Artificial Sequence: Synthetic oligonucleotide
  Sense strand starting at position 2465 of SEQ ID NO: 316841
gggacagugucagaacuca

SEQ ID NO: 444366 - RNA, 19 nt, Artificial Sequence
  Description of Artificial Sequence: Synthetic oligonucleotide
  Antisense Strand to SEQ ID NO: 444365
ugaguucugacacuguccc

SEQ ID NO: 444367 - RNA, 19 nt, Artificial Sequence
  Description of Artificial Sequence: Synthetic oligonucleotide
  Sense strand starting at position 2584 of SEQ ID NO: 316841
agcugaccucuugggagau

SEQ ID NO: 444368 - RNA, 19 nt, Artificial Sequence
  Description of Artificial Sequence: Synthetic oligonucleotide
  Antisense Strand to SEQ ID NO: 444367
aucucccaagaggucagcu

SEQ ID NO: 444369 - RNA, 19 nt, Artificial Sequence
  Description of Artificial Sequence: Synthetic oligonucleotide
  Sense strand starting at position 2585 of SEQ ID NO: 316841
gcugaccucuugggagauu

SEQ ID NO: 444370 - RNA, 19 nt, Artificial Sequence
  Description of Artificial Sequence: Synthetic oligonucleotide
  Antisense Strand to SEQ ID NO: 444369
aaucucccaagaggucagc

SEQ ID NO: 444371 - RNA, 19 nt, Artificial Sequence
  Description of Artificial Sequence: Synthetic oligonucleotide
  Sense strand starting at position 2652 of SEQ ID NO: 316841
gggaauaauucggaaugaa

SEQ ID NO: 444372 - RNA, 19 nt, Artificial Sequence
  Description of Artificial Sequence: Synthetic oligonucleotide
  Antisense Strand to SEQ ID NO: 444371
uucauuccgaauuauuccc

SEQ ID NO: 444373 - RNA, 19 nt, Artificial Sequence
  Description of Artificial Sequence: Synthetic oligonucleotide
  Sense strand starting at position 2778 of SEQ ID NO: 316841
ggauaaauagcucaguguu

SEQ ID NO: 444374 - RNA, 19 nt, Artificial Sequence
  Description of Artificial Sequence: Synthetic oligonucleotide
  Antisense Strand to SEQ ID NO: 444373
aacacugagcuauuuaucc

SEQ ID NO: 444375 - RNA, 19 nt, Artificial Sequence
  Description of Artificial Sequence: Synthetic oligonucleotide
  Sense strand starting at position 2780 of SEQ ID NO: 316841
auaaauagcucaguguuua

SEQ ID NO: 444376 - RNA, 19 nt, Artificial Sequence
  Description of Artificial Sequence: Synthetic oligonucleotide
  Antisense Strand to SEQ ID NO: 444375
uaaacacugagcuauuuau

SEQ ID NO: 444377 - RNA, 19 nt, Artificial Sequence
  Description of Artificial Sequence: Synthetic oligonucleotide
  Sense strand starting at position 2785 of SEQ ID NO: 316841
uagcucaguguuuaacaga

SEQ ID NO: 444378 - RNA, 19 nt, Artificial Sequence
  Description of Artificial Sequence: Synthetic oligonucleotide
  Antisense Strand to SEQ ID NO: 444377
ucuguuaaacacugagcua

SEQ ID NO: 444379 - RNA, 19 nt, Artificial Sequence
  Description of Artificial Sequence: Synthetic oligonucleotide
  Sense strand starting at position 2922 of SEQ ID NO: 316841
ugaaguguuucggccucua

SEQ ID NO: 444380 - RNA, 19 nt, Artificial Sequence
  Description of Artificial Sequence: Synthetic oligonucleotide
  Antisense Strand to SEQ ID NO: 444379
uagaggccgaaacacuuca

SEQ ID NO: 444381 - RNA, 19 nt, Artificial Sequence
  Description of Artificial Sequence: Synthetic oligonucleotide
  Sense strand starting at position 3433 of SEQ ID NO: 316841
uccugaaugugacuauguu

SEQ ID NO: 444382 - RNA, 19 nt, Artificial Sequence
  Description of Artificial Sequence: Synthetic oligonucleotide
  Antisense Strand to SEQ ID NO: 444381
aacauagucacauucagga

SEQ ID NO: 444383 - RNA, 19 nt, Artificial Sequence
  Description of Artificial Sequence: Synthetic oligonucleotide
  Sense strand starting at position 3475 of SEQ ID NO: 316841
ccgucaguguguuucauga

SEQ ID NO: 444384 - RNA, 19 nt, Artificial Sequence
  Description of Artificial Sequence: Synthetic oligonucleotide
  Antisense Strand to SEQ ID NO: 444383
ucaugaaacacacugacgg

SEQ ID NO: 444385 - RNA, 19 nt, Artificial Sequence
  Description of Artificial Sequence: Synthetic oligonucleotide
  Sense strand starting at position 3477 of SEQ ID NO: 316841
gucaguguguuucaugauc

SEQ ID NO: 444386 - RNA, 19 nt, Artificial Sequence
  Description of Artificial Sequence: Synthetic oligonucleotide
  Antisense Strand to SEQ ID NO: 444385
gaucaugaaacacacugac

SEQ ID NO: 444387 - RNA, 19 nt, Artificial Sequence
  Description of Artificial Sequence: Synthetic oligonucleotide
  Sense strand starting at position 3543 of SEQ ID NO: 316841
ucauauugcccuugucuuu

SEQ ID NO: 444388 - RNA, 19 nt, Artificial Sequence
  Description of Artificial Sequence: Synthetic oligonucleotide
  Antisense Strand to SEQ ID NO: 444387
aaagacaagggcaauauga

SEQ ID NO: 444389 - RNA, 19 nt, Artificial Sequence
  Description of Artificial Sequence: Synthetic oligonucleotide
  Sense strand starting at position 3657 of SEQ ID NO: 316841
uguaaacggucauguggua

SEQ ID NO: 444390 - RNA, 19 nt, Artificial Sequence
  Description of Artificial Sequence: Synthetic oligonucleotide
  Antisense Strand to SEQ ID NO: 444389
uaccacaugaccguuuaca

SEQ ID NO: 444391 - RNA, 19 nt, Artificial Sequence
  Description of Artificial Sequence: Synthetic oligonucleotide
  Sense strand starting at position 3669 of SEQ ID NO: 316841
ugugguauuuccucaaccu

SEQ ID NO: 444392 - RNA, 19 nt, Artificial Sequence
  Description of Artificial Sequence: Synthetic oligonucleotide
  Antisense Strand to SEQ ID NO: 444391
agguugaggaaauaccaca

SEQ ID NO: 444393 - RNA, 19 nt, Artificial Sequence
  Description of Artificial Sequence: Synthetic oligonucleotide
  Sense strand starting at position 3756 of SEQ ID NO: 316841
uuuggagacauggguuuga

SEQ ID NO: 444394 - RNA, 19 nt, Artificial Sequence
  Description of Artificial Sequence: Synthetic oligonucleotide
  Antisense Strand to SEQ ID NO: 444393
ucaaacccaugucuccaaa

SEQ ID NO: 444395 - RNA, 19 nt, Artificial Sequence
  Description of Artificial Sequence: Synthetic oligonucleotide
  Sense strand starting at position 3767 of SEQ ID NO: 316841
ggguuugaauuccagucau

SEQ ID NO: 444396 - RNA, 19 nt, Artificial Sequence
  Description of Artificial Sequence: Synthetic oligonucleotide
  Antisense Strand to SEQ ID NO: 444395
augacuggaauucaaaccc

SEQ ID NO: 444397 - RNA, 19 nt, Artificial Sequence
  Description of Artificial Sequence: Synthetic oligonucleotide
  Sense strand starting at position 3818 of SEQ ID NO: 316841
acugacaugucccauaugu

SEQ ID NO: 444398 - RNA, 19 nt, Artificial Sequence
  Description of Artificial Sequence: Synthetic oligonucleotide
  Antisense Strand to SEQ ID NO: 444397
acauaugggacaugucagu

SEQ ID NO: 444399 - RNA, 19 nt, Artificial Sequence
  Description of Artificial Sequence: Synthetic oligonucleotide
  Sense strand starting at position 3820 of SEQ ID NO: 316841
ugacaugucccauauguug

SEQ ID NO: 444400 - RNA, 19 nt, Artificial Sequence
  Description of Artificial Sequence: Synthetic oligonucleotide
  Antisense Strand to SEQ ID NO: 444399
caacauaugggacauguca

SEQ ID NO: 444401 - RNA, 19 nt, Artificial Sequence
  Description of Artificial Sequence: Synthetic oligonucleotide
  Sense strand starting at position 50 of SEQ ID NO: 316842
ugagcuauaccagacuuua

SEQ ID NO: 444402 - RNA, 19 nt, Artificial Sequence
  Description of Artificial Sequence: Synthetic oligonucleotide
  Antisense Strand to SEQ ID NO: 444401
uaaagucugguauagcuca

SEQ ID NO: 444403 - RNA, 19 nt, Artificial Sequence
  Description of Artificial Sequence: Synthetic oligonucleotide
  Sense strand starting at position 167 of SEQ ID NO: 316842
cuguguaagcuugagaaau

SEQ ID NO: 444404 - RNA, 19 nt, Artificial Sequence
  Description of Artificial Sequence: Synthetic oligonucleotide
  Antisense Strand to SEQ ID NO: 444403
auuucucaagcuuacacag

SEQ ID NO: 444405 - RNA, 19 nt, Artificial Sequence
  Description of Artificial Sequence: Synthetic oligonucleotide
  Sense strand starting at position 254 of SEQ ID NO: 316842
uugguagaauuaucucuga

SEQ ID NO: 444406 - RNA, 19 nt, Artificial Sequence
  Description of Artificial Sequence: Synthetic oligonucleotide
  Antisense Strand to SEQ ID NO: 444405
ucagagauaauucuaccaa

SEQ ID NO: 444407 - RNA, 19 nt, Artificial Sequence
  Description of Artificial Sequence: Synthetic oligonucleotide
  Sense strand starting at position 257 of SEQ ID NO: 316842
guagaauuaucucugagaa

SEQ ID NO: 444408 - RNA, 19 nt, Artificial Sequence
  Description of Artificial Sequence: Synthetic oligonucleotide
  Antisense Strand to SEQ ID NO: 444407
uucucagagauaauucuac

SEQ ID NO: 444409 - RNA, 19 nt, Artificial Sequence
  Description of Artificial Sequence: Synthetic oligonucleotide
  Sense strand starting at position 395 of SEQ ID NO: 316842
uugcccugauuuccuguaa

SEQ ID NO: 444410 - RNA, 19 nt, Artificial Sequence
  Description of Artificial Sequence: Synthetic oligonucleotide
  Antisense Strand to SEQ ID NO: 444409
uuacaggaaaucagggcaa

SEQ ID NO: 444411 - RNA, 19 nt, Artificial Sequence
  Description of Artificial Sequence: Synthetic oligonucleotide
  Sense strand starting at position 442 of SEQ ID NO: 316842
ugauuauuguauuccaaug

SEQ ID NO: 444412 - RNA, 19 nt, Artificial Sequence
  Description of Artificial Sequence: Synthetic oligonucleotide
  Antisense Strand to SEQ ID NO: 444411
cauuggaauacaauaauca

SEQ ID NO: 444413 - RNA, 19 nt, Artificial Sequence
  Description of Artificial Sequence: Synthetic oligonucleotide
  Sense strand starting at position 484 of SEQ ID NO: 316842
cugaauguuguugauaaau

SEQ ID NO: 444414 - RNA, 19 nt, Artificial Sequence
  Description of Artificial Sequence: Synthetic oligonucleotide
  Antisense Strand to SEQ ID NO: 444413
auuuaucaacaacauucag

SEQ ID NO: 444415 - RNA, 19 nt, Artificial Sequence
  Description of Artificial Sequence: Synthetic oligonucleotide
  Sense strand starting at position 647 of SEQ ID NO: 316842
uucugauaaguuggaauag

SEQ ID NO: 444416 - RNA, 19 nt, Artificial Sequence
  Description of Artificial Sequence: Synthetic oligonucleotide
  Antisense Strand to SEQ ID NO: 444415
cuauuccaacuuaucagaa

SEQ ID NO: 444417 - RNA, 19 nt, Artificial Sequence
  Description of Artificial Sequence: Synthetic oligonucleotide
  Sense strand starting at position 991 of SEQ ID NO: 316842
ucugaaaugccauagauuc

SEQ ID NO: 444418 - RNA, 19 nt, Artificial Sequence
  Description of Artificial Sequence: Synthetic oligonucleotide
  Antisense Strand to SEQ ID NO: 444417
gaaucuauggcauuucaga

SEQ ID NO: 444419 - RNA, 19 nt, Artificial Sequence
  Description of Artificial Sequence: Synthetic oligonucleotide
  Sense strand starting at position 1166 of SEQ ID NO: 316842
uuggaagagccucagcaua

SEQ ID NO: 444420 - RNA, 19 nt, Artificial Sequence
  Description of Artificial Sequence: Synthetic oligonucleotide
  Antisense Strand to SEQ ID NO: 444419
uaugcugaggcucuuccaa

SEQ ID NO: 444421 - RNA, 19 nt, Artificial Sequence
  Description of Artificial Sequence: Synthetic oligonucleotide
  Sense strand starting at position 1212 of SEQ ID NO: 316842
gagugaugcguguccaguu

SEQ ID NO: 444422 - RNA, 19 nt, Artificial Sequence
  Description of Artificial Sequence: Synthetic oligonucleotide
  Antisense Strand to SEQ ID NO: 444421
aacuggacacgcaucacuc

SEQ ID NO: 444423 - RNA, 19 nt, Artificial Sequence
  Description of Artificial Sequence: Synthetic oligonucleotide
  Sense strand starting at position 1217 of SEQ ID NO: 316842
augcguguccaguuucuga

SEQ ID NO: 444424 - RNA, 19 nt, Artificial Sequence
  Description of Artificial Sequence: Synthetic oligonucleotide
  Antisense Strand to SEQ ID NO: 444423
ucagaaacuggacacgcau

SEQ ID NO: 444425 - RNA, 19 nt, Artificial Sequence
  Description of Artificial Sequence: Synthetic oligonucleotide
  Sense strand starting at position 1285 of SEQ ID NO: 316842
ugaacaauuccaugauggu

SEQ ID NO: 444426 - RNA, 19 nt, Artificial Sequence
  Description of Artificial Sequence: Synthetic oligonucleotide
  Antisense Strand to SEQ ID NO: 444425
accaucauggaauuguuca

SEQ ID NO: 444427 - RNA, 19 nt, Artificial Sequence
  Description of Artificial Sequence: Synthetic oligonucleotide
  Sense strand starting at position 1323 of SEQ ID NO: 316842
ggugaaugacuucgaagac

SEQ ID NO: 444428 - RNA, 19 nt, Artificial Sequence
  Description of Artificial Sequence: Synthetic oligonucleotide
  Antisense Strand to SEQ ID NO: 444427
gucuucgaagucauucacc

SEQ ID NO: 444429 - RNA, 19 nt, Artificial Sequence
  Description of Artificial Sequence: Synthetic oligonucleotide
  Sense strand starting at position 1361 of SEQ ID NO: 316842
gugaucucagcaugaaaca

SEQ ID NO: 444430 - RNA, 19 nt, Artificial Sequence
  Description of Artificial Sequence: Synthetic oligonucleotide
  Antisense Strand to SEQ ID NO: 444429
uguuucaugcugagaucac

SEQ ID NO: 444431 - RNA, 19 nt, Artificial Sequence
  Description of Artificial Sequence: Synthetic oligonucleotide
  Sense strand starting at position 1597 of SEQ ID NO: 316842
uuugaaaucugaguuaucu

SEQ ID NO: 444432 - RNA, 19 nt, Artificial Sequence
  Description of Artificial Sequence: Synthetic oligonucleotide
  Antisense Strand to SEQ ID NO: 444431
agauaacucagauuucaaa

SEQ ID NO: 444433 - RNA, 19 nt, Artificial Sequence
  Description of Artificial Sequence: Synthetic oligonucleotide
  Sense strand starting at position 1644 of SEQ ID NO: 316842
ccagauaguuaauugucaa

SEQ ID NO: 444434 - RNA, 19 nt, Artificial Sequence
  Description of Artificial Sequence: Synthetic oligonucleotide
  Antisense Strand to SEQ ID NO: 444433
uugacaauuaacuaucugg

SEQ ID NO: 444435 - RNA, 19 nt, Artificial Sequence
  Description of Artificial Sequence: Synthetic oligonucleotide
  Sense strand starting at position 1733 of SEQ ID NO: 316842
cguaauuguccguuaucuu

SEQ ID NO: 444436 - RNA, 19 nt, Artificial Sequence
  Description of Artificial Sequence: Synthetic oligonucleotide
  Antisense Strand to SEQ ID NO: 444435
aagauaacggacaauuacg

SEQ ID NO: 444437 - RNA, 19 nt, Artificial Sequence
  Description of Artificial Sequence: Synthetic oligonucleotide
  Sense strand starting at position 1864 of SEQ ID NO: 316842
cuaaaugaaucaguugguu

SEQ ID NO: 444438 - RNA, 19 nt, Artificial Sequence
  Description of Artificial Sequence: Synthetic oligonucleotide
  Antisense Strand to SEQ ID NO: 444437
aaccaacugauucauuuag

SEQ ID NO: 444439 - RNA, 19 nt, Artificial Sequence
  Description of Artificial Sequence: Synthetic oligonucleotide
  Sense strand starting at position 2051 of SEQ ID NO: 316842
accaaucacuguuuaggau

SEQ ID NO: 444440 - RNA, 19 nt, Artificial Sequence
  Description of Artificial Sequence: Synthetic oligonucleotide
  Antisense Strand to SEQ ID NO: 444439
auccuaaacagugauuggu

SEQ ID NO: 444441 - RNA, 19 nt, Artificial Sequence
  Description of Artificial Sequence: Synthetic oligonucleotide
  Sense strand starting at position 2060 of SEQ ID NO: 316842
uguuuaggaucccugauau

SEQ ID NO: 444442 - RNA, 19 nt, Artificial Sequence
  Description of Artificial Sequence: Synthetic oligonucleotide
  Antisense Strand to SEQ ID NO: 444441
auaucagggauccuaaaca

SEQ ID NO: 444443 - RNA, 19 nt, Artificial Sequence
  Description of Artificial Sequence: Synthetic oligonucleotide
  Sense strand starting at position 2091 of SEQ ID NO: 316842
ugucaucgagucuaugaag

SEQ ID NO: 444444 - RNA, 19 nt, Artificial Sequence
  Description of Artificial Sequence: Synthetic oligonucleotide
  Antisense Strand to SEQ ID NO: 444443
cuucauagacucgaugaca

SEQ ID NO: 444445 - RNA, 19 nt, Artificial Sequence
  Description of Artificial Sequence: Synthetic oligonucleotide
  Sense strand starting at position 2100 of SEQ ID NO: 316842
gucuaugaagcacauaaua

SEQ ID NO: 444446 - RNA, 19 nt, Artificial Sequence
  Description of Artificial Sequence: Synthetic oligonucleotide
  Antisense Strand to SEQ ID NO: 444445
uauuaugugcuucauagac

SEQ ID NO: 444447 - RNA, 19 nt, Artificial Sequence
  Description of Artificial Sequence: Synthetic oligonucleotide
  Sense strand starting at position 2140 of SEQ ID NO: 316842
ggugauauguauuugcuca

SEQ ID NO: 444448 - RNA, 19 nt, Artificial Sequence
  Description of Artificial Sequence: Synthetic oligonucleotide
  Antisense Strand to SEQ ID NO: 444447
ugagcaaauacauaucacc

SEQ ID NO: 444449 - RNA, 19 nt, Artificial Sequence
  Description of Artificial Sequence: Synthetic oligonucleotide
  Sense strand starting at position 2142 of SEQ ID NO: 316842
ugauauguauuugcucacu

SEQ ID NO: 444450 - RNA, 19 nt, Artificial Sequence
  Description of Artificial Sequence: Synthetic oligonucleotide
  Antisense Strand to SEQ ID NO: 444449
agugagcaaauacauauca

SEQ ID NO: 444451 - RNA, 19 nt, Artificial Sequence
  Description of Artificial Sequence: Synthetic oligonucleotide
  Sense strand starting at position 2239 of SEQ ID NO: 316842
uauagagaaucaguguaag

SEQ ID NO: 444452 - RNA, 19 nt, Artificial Sequence
  Description of Artificial Sequence: Synthetic oligonucleotide
  Antisense Strand to SEQ ID NO: 444451
cuuacacugauucucuaua

SEQ ID NO: 444453 - RNA, 19 nt, Artificial Sequence
  Description of Artificial Sequence: Synthetic oligonucleotide
  Sense strand starting at position 2377 of SEQ ID NO: 316842
ucauucuugagguagguau

SEQ ID NO: 444454 - RNA, 19 nt, Artificial Sequence
  Description of Artificial Sequence: Synthetic oligonucleotide
  Antisense Strand to SEQ ID NO: 444453
auaccuaccucaagaauga

SEQ ID NO: 444455 - RNA, 19 nt, Artificial Sequence
  Description of Artificial Sequence: Synthetic oligonucleotide
  Sense strand starting at position 2416 of SEQ ID NO: 316842
ucaagaaacuguccacaug

SEQ ID NO: 444456 - RNA, 19 nt, Artificial Sequence
  Description of Artificial Sequence: Synthetic oligonucleotide
  Antisense Strand to SEQ ID NO: 444455
cauguggacaguuucuuga

SEQ ID NO: 444457 - RNA, 19 nt, Artificial Sequence
  Description of Artificial Sequence: Synthetic oligonucleotide
  Sense strand starting at position 2511 of SEQ ID NO: 316842
ugaaauaagcagugacaua

SEQ ID NO: 444458 - RNA, 19 nt, Artificial Sequence
  Description of Artificial Sequence: Synthetic oligonucleotide
  Antisense Strand to SEQ ID NO: 444457
uaugucacugcuuauuuca

SEQ ID NO: 444459 - RNA, 19 nt, Artificial Sequence
  Description of Artificial Sequence: Synthetic oligonucleotide
  Sense strand starting at position 2599 of SEQ ID NO: 316842
uagcaagauguccaaaggu

SEQ ID NO: 444460 - RNA, 19 nt, Artificial Sequence
  Description of Artificial Sequence: Synthetic oligonucleotide
  Antisense Strand to SEQ ID NO: 444459
accuuuggacaucuugcua

SEQ ID NO: 444461 - RNA, 19 nt, Artificial Sequence
  Description of Artificial Sequence: Synthetic oligonucleotide
  Sense strand starting at position 2735 of SEQ ID NO: 316842
ucucuugaacccuagaugu

SEQ ID NO: 444462 - RNA, 19 nt, Artificial Sequence
  Description of Artificial Sequence: Synthetic oligonucleotide
  Antisense Strand to SEQ ID NO: 444461
acaucuaggguucaagaga

SEQ ID NO: 444463 - RNA, 19 nt, Artificial Sequence
  Description of Artificial Sequence: Synthetic oligonucleotide
  Sense strand starting at position 2746 of SEQ ID NO: 316842
cuagauguacuauaaugca

SEQ ID NO: 444464 - RNA, 19 nt, Artificial Sequence
  Description of Artificial Sequence: Synthetic oligonucleotide
  Antisense Strand to SEQ ID NO: 444463
ugcauuauaguacaucuag

SEQ ID NO: 444465 - RNA, 19 nt, Artificial Sequence
  Description of Artificial Sequence: Synthetic oligonucleotide
  Sense strand starting at position 2762 of SEQ ID NO: 316842
gcagguaaucccuaaacua

SEQ ID NO: 444466 - RNA, 19 nt, Artificial Sequence
  Description of Artificial Sequence: Synthetic oligonucleotide
  Antisense Strand to SEQ ID NO: 444465
uaguuuagggauuaccugc

SEQ ID NO: 444467 - RNA, 19 nt, Artificial Sequence
  Description of Artificial Sequence: Synthetic oligonucleotide
  Sense strand starting at position 2924 of SEQ ID NO: 316842
gugguaucuccagaaacua

SEQ ID NO: 444468 - RNA, 19 nt, Artificial Sequence
  Description of Artificial Sequence: Synthetic oligonucleotide
  Antisense Strand to SEQ ID NO: 444467
uaguuucuggagauaccac

SEQ ID NO: 444469 - RNA, 19 nt, Artificial Sequence
  Description of Artificial Sequence: Synthetic oligonucleotide
  Sense strand starting at position 3089 of SEQ ID NO: 316842
uguuuacuugggcagauua

SEQ ID NO: 444470 - RNA, 19 nt, Artificial Sequence
  Description of Artificial Sequence: Synthetic oligonucleotide
  Antisense Strand to SEQ ID NO: 444469
uaaucugcccaaguaaaca

SEQ ID NO: 444471 - RNA, 19 nt, Artificial Sequence
  Description of Artificial Sequence: Synthetic oligonucleotide
  Sense strand starting at position 3136 of SEQ ID NO: 316842
gagucacuuaugggaguga

SEQ ID NO: 444472 - RNA, 19 nt, Artificial Sequence
  Description of Artificial Sequence: Synthetic oligonucleotide
  Antisense Strand to SEQ ID NO: 444471
ucacucccauaagugacuc

SEQ ID NO: 444473 - RNA, 19 nt, Artificial Sequence
  Description of Artificial Sequence: Synthetic oligonucleotide
  Sense strand starting at position 3235 of SEQ ID NO: 316842
gaauuaugguuagagauuu

SEQ ID NO: 444474 - RNA, 19 nt, Artificial Sequence
  Description of Artificial Sequence: Synthetic oligonucleotide
  Antisense Strand to SEQ ID NO: 444473
aaaucucuaaccauaauuc

SEQ ID NO: 444475 - RNA, 19 nt, Artificial Sequence
  Description of Artificial Sequence: Synthetic oligonucleotide
  Sense strand starting at position 3570 of SEQ ID NO: 316842
auaaauagucaauggguga

SEQ ID NO: 444476 - RNA, 19 nt, Artificial Sequence
  Description of Artificial Sequence: Synthetic oligonucleotide
  Antisense Strand to SEQ ID NO: 444475
ucacccauugacuauuuau

SEQ ID NO: 444477 - RNA, 19 nt, Artificial Sequence
  Description of Artificial Sequence: Synthetic oligonucleotide
  Sense strand starting at position 3901 of SEQ ID NO: 316842
uuaggagauucuuuccaga

SEQ ID NO: 444478 - RNA, 19 nt, Artificial Sequence
  Description of Artificial Sequence: Synthetic oligonucleotide
  Antisense Strand to SEQ ID NO: 444477
ucuggaaagaaucuccuaa

SEQ ID NO: 444479 - RNA, 19 nt, Artificial Sequence
  Description of Artificial Sequence: Synthetic oligonucleotide
  Sense strand starting at position 3903 of SEQ ID NO: 316842
aggagauucuuuccagacu

SEQ ID NO: 444480 - RNA, 19 nt, Artificial Sequence
  Description of Artificial Sequence: Synthetic oligonucleotide
  Antisense Strand to SEQ ID NO: 444479
agucuggaaagaaucuccu

SEQ ID NO: 444481 - RNA, 19 nt, Artificial Sequence
  Description of Artificial Sequence: Synthetic oligonucleotide
  Sense strand starting at position 11 of SEQ ID NO: 316843
cuggauguacaauaguuua

SEQ ID NO: 444482 - RNA, 19 nt, Artificial Sequence
  Description of Artificial Sequence: Synthetic oligonucleotide
  Antisense Strand to SEQ ID NO: 444481
uaaacuauuguacauccag

SEQ ID NO: 444483 - RNA, 19 nt, Artificial Sequence
  Description of Artificial Sequence: Synthetic oligonucleotide
  Sense strand starting at position 150 of SEQ ID NO: 316843
aguuuacugcuauaagaau

SEQ ID NO: 444484 - RNA, 19 nt, Artificial Sequence
  Description of Artificial Sequence: Synthetic oligonucleotide
  Antisense Strand to SEQ ID NO: 444483
auucuuauagcaguaaacu

SEQ ID NO: 444485 - RNA, 19 nt, Artificial Sequence
  Description of Artificial Sequence: Synthetic oligonucleotide
  Sense strand starting at position 236 of SEQ ID NO: 316843
agagaauagcucugaccau

SEQ ID NO: 444486 - RNA, 19 nt, Artificial Sequence
  Description of Artificial Sequence: Synthetic oligonucleotide
  Antisense Strand to SEQ ID NO: 444485
auggucagagcuauucucu

SEQ ID NO: 444487 - RNA, 19 nt, Artificial Sequence
  Description of Artificial Sequence: Synthetic oligonucleotide
  Sense strand starting at position 256 of SEQ ID NO: 316843
ccaauucucugauuggaac

SEQ ID NO: 444488 - RNA, 19 nt, Artificial Sequence
  Description of Artificial Sequence: Synthetic oligonucleotide
  Antisense Strand to SEQ ID NO: 444487
guuccaaucagagaauugg

SEQ ID NO: 444489 - RNA, 19 nt, Artificial Sequence
  Description of Artificial Sequence: Synthetic oligonucleotide
  Sense strand starting at position 327 of SEQ ID NO: 316843
aguaaacucuuagcaugau

SEQ ID NO: 444490 - RNA, 19 nt, Artificial Sequence
  Description of Artificial Sequence: Synthetic oligonucleotide
  Antisense Strand to SEQ ID NO: 444489
aucaugcuaagaguuuacu

SEQ ID NO: 444491 - RNA, 19 nt, Artificial Sequence
  Description of Artificial Sequence: Synthetic oligonucleotide
  Sense strand starting at position 614 of SEQ ID NO: 316843
uuugucuuauaccugagaa

SEQ ID NO: 444492 - RNA, 19 nt, Artificial Sequence
  Description of Artificial Sequence: Synthetic oligonucleotide
  Antisense Strand to SEQ ID NO: 444491
uucucagguauaagacaaa

SEQ ID NO: 444493 - RNA, 19 nt, Artificial Sequence
  Description of Artificial Sequence: Synthetic oligonucleotide
  Sense strand starting at position 616 of SEQ ID NO: 316843
ugucuuauaccugagaacu

SEQ ID NO: 444494 - RNA, 19 nt, Artificial Sequence
  Description of Artificial Sequence: Synthetic oligonucleotide
  Antisense Strand to SEQ ID NO: 444493
aguucucagguauaagaca

SEQ ID NO: 444495 - RNA, 19 nt, Artificial Sequence
  Description of Artificial Sequence: Synthetic oligonucleotide
  Sense strand starting at position 626 of SEQ ID NO: 316843
cugagaacuugucuuuauu

SEQ ID NO: 444496 - RNA, 19 nt, Artificial Sequence
  Description of Artificial Sequence: Synthetic oligonucleotide
  Antisense Strand to SEQ ID NO: 444495
aauaaagacaaguucucag

SEQ ID NO: 444497 - RNA, 19 nt, Artificial Sequence
  Description of Artificial Sequence: Synthetic oligonucleotide
  Sense strand starting at position 856 of SEQ ID NO: 316843
uggauuuccucauagaugg

SEQ ID NO: 444498 - RNA, 19 nt, Artificial Sequence
  Description of Artificial Sequence: Synthetic oligonucleotide
  Antisense Strand to SEQ ID NO: 444497
ccaucuaugaggaaaucca

SEQ ID NO: 444499 - RNA, 19 nt, Artificial Sequence
  Description of Artificial Sequence: Synthetic oligonucleotide
  Sense strand starting at position 934 of SEQ ID NO: 316843
uaugcuuaucuggaguaac

SEQ ID NO: 444500 - RNA, 19 nt, Artificial Sequence
  Description of Artificial Sequence: Synthetic oligonucleotide
  Antisense Strand to SEQ ID NO: 444499
guuacuccagauaagcaua

SEQ ID NO: 444501 - RNA, 19 nt, Artificial Sequence
  Description of Artificial Sequence: Synthetic oligonucleotide
  Sense strand starting at position 950 of SEQ ID NO: 316843
aacuguuguuaucuaggau

SEQ ID NO: 444502 - RNA, 19 nt, Artificial Sequence
  Description of Artificial Sequence: Synthetic oligonucleotide
  Antisense Strand to SEQ ID NO: 444501
auccuagauaacaacaguu

SEQ ID NO: 444503 - RNA, 19 nt, Artificial Sequence
  Description of Artificial Sequence: Synthetic oligonucleotide
  Sense strand starting at position 957 of SEQ ID NO: 316843
guuaucuaggauuauauuc

SEQ ID NO: 444504 - RNA, 19 nt, Artificial Sequence
  Description of Artificial Sequence: Synthetic oligonucleotide
  Antisense Strand to SEQ ID NO: 444503
gaauauaauccuagauaac

SEQ ID NO: 444505 - RNA, 19 nt, Artificial Sequence
  Description of Artificial Sequence: Synthetic oligonucleotide
  Sense strand starting at position 1338 of SEQ ID NO: 316843
cccuacagaugggauuuaa

SEQ ID NO: 444506 - RNA, 19 nt, Artificial Sequence
  Description of Artificial Sequence: Synthetic oligonucleotide
  Antisense Strand to SEQ ID NO: 444505
uuaaaucccaucuguaggg

SEQ ID NO: 444507 - RNA, 19 nt, Artificial Sequence
  Description of Artificial Sequence: Synthetic oligonucleotide
  Sense strand starting at position 1422 of SEQ ID NO: 316843
ggcauuauugugcauuugu

SEQ ID NO: 444508 - RNA, 19 nt, Artificial Sequence
  Description of Artificial Sequence: Synthetic oligonucleotide
  Antisense Strand to SEQ ID NO: 444507
acaaaugcacaauaaugcc

SEQ ID NO: 444509 - RNA, 19 nt, Artificial Sequence
  Description of Artificial Sequence: Synthetic oligonucleotide
  Sense strand starting at position 1429 of SEQ ID NO: 316843
uugugcauuugucucaacu

SEQ ID NO: 444510 - RNA, 19 nt, Artificial Sequence
  Description of Artificial Sequence: Synthetic oligonucleotide
  Antisense Strand to SEQ ID NO: 444509
aguugagacaaaugcacaa

SEQ ID NO: 444511 - RNA, 19 nt, Artificial Sequence
  Description of Artificial Sequence: Synthetic oligonucleotide
  Sense strand starting at position 1470 of SEQ ID NO: 316843
gucucuuguggacagaaac

SEQ ID NO: 444512 - RNA, 19 nt, Artificial Sequence
  Description of Artificial Sequence: Synthetic oligonucleotide
  Antisense Strand to SEQ ID NO: 444511
guuucuguccacaagagac

SEQ ID NO: 444513 - RNA, 19 nt, Artificial Sequence
  Description of Artificial Sequence: Synthetic oligonucleotide
  Sense strand starting at position 2008 of SEQ ID NO: 316843
uuugguguugacuagugaa

SEQ ID NO: 444514 - RNA, 19 nt, Artificial Sequence
  Description of Artificial Sequence: Synthetic oligonucleotide
  Antisense Strand to SEQ ID NO: 444513
uucacuagucaacaccaaa

SEQ ID NO: 444515 - RNA, 19 nt, Artificial Sequence
  Description of Artificial Sequence: Synthetic oligonucleotide
  Sense strand starting at position 2070 of SEQ ID NO: 316843
ugcuacuguguacagaaua

SEQ ID NO: 444516 - RNA, 19 nt, Artificial Sequence
  Description of Artificial Sequence: Synthetic oligonucleotide
  Antisense Strand to SEQ ID NO: 444515
uauucuguacacaguagca

SEQ ID NO: 444517 - RNA, 19 nt, Artificial Sequence
  Description of Artificial Sequence: Synthetic oligonucleotide
  Sense strand starting at position 2075 of SEQ ID NO: 316843
cuguguacagaauacauua

SEQ ID NO: 444518 - RNA, 19 nt, Artificial Sequence
  Description of Artificial Sequence: Synthetic oligonucleotide
  Antisense Strand to SEQ ID NO: 444517
uaauguauucuguacacag

SEQ ID NO: 444519 - RNA, 19 nt, Artificial Sequence
  Description of Artificial Sequence: Synthetic oligonucleotide
  Sense strand starting at position 2238 of SEQ ID NO: 316843
agguaaacuguaugaacaa

SEQ ID NO: 444520 - RNA, 19 nt, Artificial Sequence
  Description of Artificial Sequence: Synthetic oligonucleotide
  Antisense Strand to SEQ ID NO: 444519
uuguucauacaguuuaccu

SEQ ID NO: 444521 - RNA, 19 nt, Artificial Sequence
  Description of Artificial Sequence: Synthetic oligonucleotide
  Sense strand starting at position 2265 of SEQ ID NO: 316843
gcaggauuccuguaaacuu

SEQ ID NO: 444522 - RNA, 19 nt, Artificial Sequence
  Description of Artificial Sequence: Synthetic oligonucleotide
  Antisense Strand to SEQ ID NO: 444521
aaguuuacaggaauccugc

SEQ ID NO: 444523 - RNA, 19 nt, Artificial Sequence
  Description of Artificial Sequence: Synthetic oligonucleotide
  Sense strand starting at position 2323 of SEQ ID NO: 316843
gcuucuaaauaaucaggga

SEQ ID NO: 444524 - RNA, 19 nt, Artificial Sequence
  Description of Artificial Sequence: Synthetic oligonucleotide
  Antisense Strand to SEQ ID NO: 444523
ucccugauuauuuagaagc

SEQ ID NO: 444525 - RNA, 19 nt, Artificial Sequence
  Description of Artificial Sequence: Synthetic oligonucleotide
  Sense strand starting at position 2327 of SEQ ID NO: 316843
cuaaauaaucagggagcau

SEQ ID NO: 444526 - RNA, 19 nt, Artificial Sequence
  Description of Artificial Sequence: Synthetic oligonucleotide
  Antisense Strand to SEQ ID NO: 444525
augcucccugauuauuuag

SEQ ID NO: 444527 - RNA, 19 nt, Artificial Sequence
  Description of Artificial Sequence: Synthetic oligonucleotide
  Sense strand starting at position 2390 of SEQ ID NO: 316843
guugaagcuggauauguuu

SEQ ID NO: 444528 - RNA, 19 nt, Artificial Sequence
  Description of Artificial Sequence: Synthetic oligonucleotide
  Antisense Strand to SEQ ID NO: 444527
aaacauauccagcuucaac

SEQ ID NO: 444529 - RNA, 19 nt, Artificial Sequence
  Description of Artificial Sequence: Synthetic oligonucleotide
  Sense strand starting at position 2396 of SEQ ID NO: 316843
gcuggauauguuuacacau

SEQ ID NO: 444530 - RNA, 19 nt, Artificial Sequence
  Description of Artificial Sequence: Synthetic oligonucleotide
  Antisense Strand to SEQ ID NO: 444529
auguguaaacauauccagc

SEQ ID NO: 444531 - RNA, 19 nt, Artificial Sequence
  Description of Artificial Sequence: Synthetic oligonucleotide
  Sense strand starting at position 2546 of SEQ ID NO: 316843
gugguaaaucugcagagac

SEQ ID NO: 444532 - RNA, 19 nt, Artificial Sequence
  Description of Artificial Sequence: Synthetic oligonucleotide
  Antisense Strand to SEQ ID NO: 444531
gucucugcagauuuaccac

SEQ ID NO: 444533 - RNA, 19 nt, Artificial Sequence
  Description of Artificial Sequence: Synthetic oligonucleotide
  Sense strand starting at position 2569 of SEQ ID NO: 316843
auaagaacuuggccucuga

SEQ ID NO: 444534 - RNA, 19 nt, Artificial Sequence
  Description of Artificial Sequence: Synthetic oligonucleotide
  Antisense Strand to SEQ ID NO: 444533
ucagaggccaaguucuuau

SEQ ID NO: 444535 - RNA, 19 nt, Artificial Sequence
  Description of Artificial Sequence: Synthetic oligonucleotide
  Sense strand starting at position 2773 of SEQ ID NO: 316843
gcggguauuuggaggaaac

SEQ ID NO: 444536 - RNA, 19 nt, Artificial Sequence
  Description of Artificial Sequence: Synthetic oligonucleotide
  Antisense Strand to SEQ ID NO: 444535
guuuccuccaaauacccgc

SEQ ID NO: 444537 - RNA, 19 nt, Artificial Sequence
  Description of Artificial Sequence: Synthetic oligonucleotide
  Sense strand starting at position 3072 of SEQ ID NO: 316843
ugcccuaaagacugucaaa

SEQ ID NO: 444538 - RNA, 19 nt, Artificial Sequence
  Description of Artificial Sequence: Synthetic oligonucleotide
  Antisense Strand to SEQ ID NO: 444537
uuugacagucuuuagggca

SEQ ID NO: 444539 - RNA, 19 nt, Artificial Sequence
  Description of Artificial Sequence: Synthetic oligonucleotide
  Sense strand starting at position 3309 of SEQ ID NO: 316843
auggaugugucauucucaa

SEQ ID NO: 444540 - RNA, 19 nt, Artificial Sequence
  Description of Artificial Sequence: Synthetic oligonucleotide
  Antisense Strand to SEQ ID NO: 444539
uugagaaugacacauccau

SEQ ID NO: 444541 - RNA, 19 nt, Artificial Sequence
  Description of Artificial Sequence: Synthetic oligonucleotide
  Sense strand starting at position 3485 of SEQ ID NO: 316843
agagcuagagcagaaguau

SEQ ID NO: 444542 - RNA, 19 nt, Artificial Sequence
  Description of Artificial Sequence: Synthetic oligonucleotide
  Antisense Strand to SEQ ID NO: 444541
auacuucugcucuagcucu

SEQ ID NO: 444543 - RNA, 19 nt, Artificial Sequence
  Description of Artificial Sequence: Synthetic oligonucleotide
  Sense strand starting at position 3693 of SEQ ID NO: 316843
aaaguauggcuuuggagga

SEQ ID NO: 444544 - RNA, 19 nt, Artificial Sequence
  Description of Artificial Sequence: Synthetic oligonucleotide
  Antisense Strand to SEQ ID NO: 444543
uccuccaaagccauacuuu

SEQ ID NO: 444545 - RNA, 19 nt, Artificial Sequence
  Description of Artificial Sequence: Synthetic oligonucleotide
  Sense strand starting at position 3717 of SEQ ID NO: 316843
caguuaacgagucagaggu

SEQ ID NO: 444546 - RNA, 19 nt, Artificial Sequence
  Description of Artificial Sequence: Synthetic oligonucleotide
  Antisense Strand to SEQ ID NO: 444545
accucugacucguuaacug

SEQ ID NO: 444547 - RNA, 19 nt, Artificial Sequence
  Description of Artificial Sequence: Synthetic oligonucleotide
  Sense strand starting at position 3721 of SEQ ID NO: 316843
uaacgagucagaggugaca

SEQ ID NO: 444548 - RNA, 19 nt, Artificial Sequence
  Description of Artificial Sequence: Synthetic oligonucleotide
  Antisense Strand to SEQ ID NO: 444547
ugucaccucugacucguua

SEQ ID NO: 444549 - RNA, 19 nt, Artificial Sequence
  Description of Artificial Sequence: Synthetic oligonucleotide
  Sense strand starting at position 3723 of SEQ ID NO: 316843
acgagucagaggugacaaa

SEQ ID NO: 444550 - RNA, 19 nt, Artificial Sequence
  Description of Artificial Sequence: Synthetic oligonucleotide
  Antisense Strand to SEQ ID NO: 444549
uuugucaccucugacucgu

SEQ ID NO: 444551 - RNA, 19 nt, Artificial Sequence
  Description of Artificial Sequence: Synthetic oligonucleotide
  Sense strand starting at position 3724 of SEQ ID NO: 316843
cgagucagaggugacaaau

SEQ ID NO: 444552 - RNA, 19 nt, Artificial Sequence
  Description of Artificial Sequence: Synthetic oligonucleotide
  Antisense Strand to SEQ ID NO: 444551
auuugucaccucugacucg

SEQ ID NO: 444553 - RNA, 19 nt, Artificial Sequence
  Description of Artificial Sequence: Synthetic oligonucleotide
  Sense strand starting at position 3820 of SEQ ID NO: 316843
uuugaaucagacugcaaug

SEQ ID NO: 444554 - RNA, 19 nt, Artificial Sequence
  Description of Artificial Sequence: Synthetic oligonucleotide
  Antisense Strand to SEQ ID NO: 444553
cauugcagucugauucaaa

SEQ ID NO: 444555 - RNA, 19 nt, Artificial Sequence
  Description of Artificial Sequence: Synthetic oligonucleotide
  Sense strand starting at position 3831 of SEQ ID NO: 316843
cugcaaugugaugaaaucu

SEQ ID NO: 444556 - RNA, 19 nt, Artificial Sequence
  Description of Artificial Sequence: Synthetic oligonucleotide
  Antisense Strand to SEQ ID NO: 444555
agauuucaucacauugcag

SEQ ID NO: 444557 - RNA, 19 nt, Artificial Sequence
  Description of Artificial Sequence: Synthetic oligonucleotide
  Sense strand starting at position 3844 of SEQ ID NO: 316843
aaaucugugcuguagagau

SEQ ID NO: 444558 - RNA, 19 nt, Artificial Sequence
  Description of Artificial Sequence: Synthetic oligonucleotide
  Antisense Strand to SEQ ID NO: 444557
aucucuacagcacagauuu

SEQ ID NO: 444559 - RNA, 19 nt, Artificial Sequence
  Description of Artificial Sequence: Synthetic oligonucleotide
  Sense strand starting at position 3854 of SEQ ID NO: 316843
uguagagaugcagauguau

SEQ ID NO: 444560 - RNA, 19 nt, Artificial Sequence
  Description of Artificial Sequence: Synthetic oligonucleotide
  Antisense Strand to SEQ ID NO: 444559
auacaucugcaucucuaca

SEQ ID NO: 444561 - RNA, 19 nt, Artificial Sequence
  Description of Artificial Sequence: Synthetic oligonucleotide
  Sense strand starting at position 93 of SEQ ID NO: 316844
gugagugacaggugaagaa

SEQ ID NO: 444562 - RNA, 19 nt, Artificial Sequence
  Description of Artificial Sequence: Synthetic oligonucleotide
  Antisense Strand to SEQ ID NO: 444561
uucuucaccugucacucac

SEQ ID NO: 444563 - RNA, 19 nt, Artificial Sequence
  Description of Artificial Sequence: Synthetic oligonucleotide
  Sense strand starting at position 183 of SEQ ID NO: 316844
ccugguguuaggucguuua

SEQ ID NO: 444564 - RNA, 19 nt, Artificial Sequence
  Description of Artificial Sequence: Synthetic oligonucleotide
  Antisense Strand to SEQ ID NO: 444563
uaaacgaccuaacaccagg

SEQ ID NO: 444565 - RNA, 19 nt, Artificial Sequence
  Description of Artificial Sequence: Synthetic oligonucleotide
  Sense strand starting at position 187 of SEQ ID NO: 316844
guguuaggucguuuaagug

SEQ ID NO: 444566 - RNA, 19 nt, Artificial Sequence
  Description of Artificial Sequence: Synthetic oligonucleotide
  Antisense Strand to SEQ ID NO: 444565
cacuuaaacgaccuaacac

SEQ ID NO: 444567 - RNA, 19 nt, Artificial Sequence
  Description of Artificial Sequence: Synthetic oligonucleotide
  Sense strand starting at position 191 of SEQ ID NO: 316844
uaggucguuuaagugauuu

SEQ ID NO: 444568 - RNA, 19 nt, Artificial Sequence
  Description of Artificial Sequence: Synthetic oligonucleotide
  Antisense Strand to SEQ ID NO: 444567
aaaucacuuaaacgaccua

SEQ ID NO: 444569 - RNA, 19 nt, Artificial Sequence
  Description of Artificial Sequence: Synthetic oligonucleotide
  Sense strand starting at position 229 of SEQ ID NO: 316844
auaaucccaggauguauau

SEQ ID NO: 444570 - RNA, 19 nt, Artificial Sequence
  Description of Artificial Sequence: Synthetic oligonucleotide
  Antisense Strand to SEQ ID NO: 444569
auauacauccugggauuau

SEQ ID NO: 444571 - RNA, 19 nt, Artificial Sequence
  Description of Artificial Sequence: Synthetic oligonucleotide
  Sense strand starting at position 262 of SEQ ID NO: 316844
uaaguaaauuaggcugaga

SEQ ID NO: 444572 - RNA, 19 nt, Artificial Sequence
  Description of Artificial Sequence: Synthetic oligonucleotide
  Antisense Strand to SEQ ID NO: 444571
ucucagccuaauuuacuua

SEQ ID NO: 444573 - RNA, 19 nt, Artificial Sequence
  Description of Artificial Sequence: Synthetic oligonucleotide
  Sense strand starting at position 301 of SEQ ID NO: 316844
gucacagaauuaguaugua

SEQ ID NO: 444574 - RNA, 19 nt, Artificial Sequence
  Description of Artificial Sequence: Synthetic oligonucleotide
  Antisense Strand to SEQ ID NO: 444573
uacauacuaauucugugac

SEQ ID NO: 444575 - RNA, 19 nt, Artificial Sequence
  Description of Artificial Sequence: Synthetic oligonucleotide
  Sense strand starting at position 380 of SEQ ID NO: 316844
acuucuaagcguguuaugu

SEQ ID NO: 444576 - RNA, 19 nt, Artificial Sequence
  Description of Artificial Sequence: Synthetic oligonucleotide
  Antisense Strand to SEQ ID NO: 444575
acauaacacgcuuagaagu

SEQ ID NO: 444577 - RNA, 19 nt, Artificial Sequence
  Description of Artificial Sequence: Synthetic oligonucleotide
  Sense strand starting at position 381 of SEQ ID NO: 316844
cuucuaagcguguuauguu

SEQ ID NO: 444578 - RNA, 19 nt, Artificial Sequence
  Description of Artificial Sequence: Synthetic oligonucleotide
  Antisense Strand to SEQ ID NO: 444577
aacauaacacgcuuagaag

SEQ ID NO: 444579 - RNA, 19 nt, Artificial Sequence
  Description of Artificial Sequence: Synthetic oligonucleotide
  Sense strand starting at position 386 of SEQ ID NO: 316844
aagcguguuauguuugucu

SEQ ID NO: 444580 - RNA, 19 nt, Artificial Sequence
  Description of Artificial Sequence: Synthetic oligonucleotide
  Antisense Strand to SEQ ID NO: 444579
agacaaacauaacacgcuu

SEQ ID NO: 444581 - RNA, 19 nt, Artificial Sequence
  Description of Artificial Sequence: Synthetic oligonucleotide
  Sense strand starting at position 413 of SEQ ID NO: 316844
auggucugugaauaucuua

SEQ ID NO: 444582 - RNA, 19 nt, Artificial Sequence
  Description of Artificial Sequence: Synthetic oligonucleotide
  Antisense Strand to SEQ ID NO: 444581
uaagauauucacagaccau

SEQ ID NO: 444583 - RNA, 19 nt, Artificial Sequence
  Description of Artificial Sequence: Synthetic oligonucleotide
  Sense strand starting at position 460 of SEQ ID NO: 316844
ccucuuugcacaggagaga

SEQ ID NO: 444584 - RNA, 19 nt, Artificial Sequence
  Description of Artificial Sequence: Synthetic oligonucleotide
  Antisense Strand to SEQ ID NO: 444583
ucucuccugugcaaagagg

SEQ ID NO: 444585 - RNA, 19 nt, Artificial Sequence
  Description of Artificial Sequence: Synthetic oligonucleotide
  Sense strand starting at position 490 of SEQ ID NO: 316844
auagauuggucuuucucac

SEQ ID NO: 444586 - RNA, 19 nt, Artificial Sequence
  Description of Artificial Sequence: Synthetic oligonucleotide
  Antisense Strand to SEQ ID NO: 444585
gugagaaagaccaaucuau

SEQ ID NO: 444587 - RNA, 19 nt, Artificial Sequence
  Description of Artificial Sequence: Synthetic oligonucleotide
  Sense strand starting at position 516 of SEQ ID NO: 316844
aaguuauggucuccuagag

SEQ ID NO: 444588 - RNA, 19 nt, Artificial Sequence
  Description of Artificial Sequence: Synthetic oligonucleotide
  Antisense Strand to SEQ ID NO: 444587
cucuaggagaccauaacuu

SEQ ID NO: 444589 - RNA, 19 nt, Artificial Sequence
  Description of Artificial Sequence: Synthetic oligonucleotide
  Sense strand starting at position 770 of SEQ ID NO: 316844
cucguaguaauuugcaaag

SEQ ID NO: 444590 - RNA, 19 nt, Artificial Sequence
  Description of Artificial Sequence: Synthetic oligonucleotide
  Antisense Strand to SEQ ID NO: 444589
cuuugcaaauuacuacgag

SEQ ID NO: 444591 - RNA, 19 nt, Artificial Sequence
  Description of Artificial Sequence: Synthetic oligonucleotide
  Sense strand starting at position 962 of SEQ ID NO: 316844
auaucuuugggagguauga

SEQ ID NO: 444592 - RNA, 19 nt, Artificial Sequence
  Description of Artificial Sequence: Synthetic oligonucleotide
  Antisense Strand to SEQ ID NO: 444591
ucauaccucccaaagauau

SEQ ID NO: 444593 - RNA, 19 nt, Artificial Sequence
  Description of Artificial Sequence: Synthetic oligonucleotide
  Sense strand starting at position 982 of SEQ ID NO: 316844
auggaaauacuaugcaugu

SEQ ID NO: 444594 - RNA, 19 nt, Artificial Sequence
  Description of Artificial Sequence: Synthetic oligonucleotide
  Antisense Strand to SEQ ID NO: 444593
acaugcauaguauuuccau

SEQ ID NO: 444595 - RNA, 19 nt, Artificial Sequence
  Description of Artificial Sequence: Synthetic oligonucleotide
  Sense strand starting at position 983 of SEQ ID NO: 316844
uggaaauacuaugcauguu

SEQ ID NO: 444596 - RNA, 19 nt, Artificial Sequence
  Description of Artificial Sequence: Synthetic oligonucleotide
  Antisense Strand to SEQ ID NO: 444595
aacaugcauaguauuucca

SEQ ID NO: 444597 - RNA, 19 nt, Artificial Sequence
  Description of Artificial Sequence: Synthetic oligonucleotide
  Sense strand starting at position 1289 of SEQ ID NO: 316844
agagauaaauaucuguugu

SEQ ID NO: 444598 - RNA, 19 nt, Artificial Sequence
  Description of Artificial Sequence: Synthetic oligonucleotide
  Antisense Strand to SEQ ID NO: 444597
acaacagauauuuaucucu

SEQ ID NO: 444599 - RNA, 19 nt, Artificial Sequence
  Description of Artificial Sequence: Synthetic oligonucleotide
  Sense strand starting at position 2157 of SEQ ID NO: 316844
agaccuuuacugugcauuu

SEQ ID NO: 444600 - RNA, 19 nt, Artificial Sequence
  Description of Artificial Sequence: Synthetic oligonucleotide
  Antisense Strand to SEQ ID NO: 444599
aaaugcacaguaaaggucu

SEQ ID NO: 444601 - RNA, 19 nt, Artificial Sequence
  Description of Artificial Sequence: Synthetic oligonucleotide
  Sense strand starting at position 2195 of SEQ ID NO: 316844
gaaguaauuguauaacugu

SEQ ID NO: 444602 - RNA, 19 nt, Artificial Sequence
  Description of Artificial Sequence: Synthetic oligonucleotide
  Antisense Strand to SEQ ID NO: 444601
acaguuauacaauuacuuc

SEQ ID NO: 444603 - RNA, 19 nt, Artificial Sequence
  Description of Artificial Sequence: Synthetic oligonucleotide
  Sense strand starting at position 2221 of SEQ ID NO: 316844
uuaacaauuguaggauuga

SEQ ID NO: 444604 - RNA, 19 nt, Artificial Sequence
  Description of Artificial Sequence: Synthetic oligonucleotide
  Antisense Strand to SEQ ID NO: 444603
ucaauccuacaauuguuaa

SEQ ID NO: 444605 - RNA, 19 nt, Artificial Sequence
  Description of Artificial Sequence: Synthetic oligonucleotide
  Sense strand starting at position 2418 of SEQ ID NO: 316844
cuggauguacaauaguuua

SEQ ID NO: 444606 - RNA, 19 nt, Artificial Sequence
  Description of Artificial Sequence: Synthetic oligonucleotide
  Antisense Strand to SEQ ID NO: 444605
uaaacuauuguacauccag

SEQ ID NO: 444607 - RNA, 19 nt, Artificial Sequence
  Description of Artificial Sequence: Synthetic oligonucleotide
  Sense strand starting at position 2557 of SEQ ID NO: 316844
aguuuacugcuauaagaau

SEQ ID NO: 444608 - RNA, 19 nt, Artificial Sequence
  Description of Artificial Sequence: Synthetic oligonucleotide
  Antisense Strand to SEQ ID NO: 444607
auucuuauagcaguaaacu

SEQ ID NO: 444609 - RNA, 19 nt, Artificial Sequence
  Description of Artificial Sequence: Synthetic oligonucleotide
  Sense strand starting at position 2643 of SEQ ID NO: 316844
agagaauagcucugaccau

SEQ ID NO: 444610 - RNA, 19 nt, Artificial Sequence
  Description of Artificial Sequence: Synthetic oligonucleotide
  Antisense Strand to SEQ ID NO: 444609
auggucagagcuauucucu

SEQ ID NO: 444611 - RNA, 19 nt, Artificial Sequence
  Description of Artificial Sequence: Synthetic oligonucleotide
  Sense strand starting at position 2663 of SEQ ID NO: 316844
ccaauucucugauuggaac

SEQ ID NO: 444612 - RNA, 19 nt, Artificial Sequence
  Description of Artificial Sequence: Synthetic oligonucleotide
  Antisense Strand to SEQ ID NO: 444611
guuccaaucagagaauugg

SEQ ID NO: 444613 - RNA, 19 nt, Artificial Sequence
  Description of Artificial Sequence: Synthetic oligonucleotide
  Sense strand starting at position 2734 of SEQ ID NO: 316844
aguaaacucuuagcaugau

SEQ ID NO: 444614 - RNA, 19 nt, Artificial Sequence
  Description of Artificial Sequence: Synthetic oligonucleotide
  Antisense Strand to SEQ ID NO: 444613
aucaugcuaagaguuuacu

SEQ ID NO: 444615 - RNA, 19 nt, Artificial Sequence
  Description of Artificial Sequence: Synthetic oligonucleotide
  Sense strand starting at position 3021 of SEQ ID NO: 316844
uuugucuuauaccugagaa

SEQ ID NO: 444616 - RNA, 19 nt, Artificial Sequence
  Description of Artificial Sequence: Synthetic oligonucleotide
  Antisense Strand to SEQ ID NO: 444615
uucucagguauaagacaaa

SEQ ID NO: 444617 - RNA, 19 nt, Artificial Sequence
  Description of Artificial Sequence: Synthetic oligonucleotide
  Sense strand starting at position 3023 of SEQ ID NO: 316844
ugucuuauaccugagaacu

SEQ ID NO: 444618 - RNA, 19 nt, Artificial Sequence
  Description of Artificial Sequence: Synthetic oligonucleotide
  Antisense Strand to SEQ ID NO: 444617
aguucucagguauaagaca

SEQ ID NO: 444619 - RNA, 19 nt, Artificial Sequence
  Description of Artificial Sequence: Synthetic oligonucleotide
  Sense strand starting at position 3033 of SEQ ID NO: 316844
cugagaacuugucuuuauu

SEQ ID NO: 444620 - RNA, 19 nt, Artificial Sequence
  Description of Artificial Sequence: Synthetic oligonucleotide
  Antisense Strand to SEQ ID NO: 444619
aauaaagacaaguucucag

SEQ ID NO: 444621 - RNA, 19 nt, Artificial Sequence
  Description of Artificial Sequence: Synthetic oligonucleotide
  Sense strand starting at position 3105 of SEQ ID NO: 316844
cuuguuauauugccaaaga

SEQ ID NO: 444622 - RNA, 19 nt, Artificial Sequence
  Description of Artificial Sequence: Synthetic oligonucleotide
  Antisense Strand to SEQ ID NO: 444621
ucuuuggcaauauaacaag

SEQ ID NO: 444623 - RNA, 19 nt, Artificial Sequence
  Description of Artificial Sequence: Synthetic oligonucleotide
  Sense strand starting at position 3263 of SEQ ID NO: 316844
uggauuuccucauagaugg

SEQ ID NO: 444624 - RNA, 19 nt, Artificial Sequence
  Description of Artificial Sequence: Synthetic oligonucleotide
  Antisense Strand to SEQ ID NO: 444623
ccaucuaugaggaaaucca

SEQ ID NO: 444625 - RNA, 19 nt, Artificial Sequence
  Description of Artificial Sequence: Synthetic oligonucleotide
  Sense strand starting at position 3341 of SEQ ID NO: 316844
uaugcuuaucuggaguaac

SEQ ID NO: 444626 - RNA, 19 nt, Artificial Sequence
  Description of Artificial Sequence: Synthetic oligonucleotide
  Antisense Strand to SEQ ID NO: 444625
guuacuccagauaagcaua

SEQ ID NO: 444627 - RNA, 19 nt, Artificial Sequence
  Description of Artificial Sequence: Synthetic oligonucleotide
  Sense strand starting at position 3357 of SEQ ID NO: 316844
aacuguuguuaucuaggau

SEQ ID NO: 444628 - RNA, 19 nt, Artificial Sequence
  Description of Artificial Sequence: Synthetic oligonucleotide
  Antisense Strand to SEQ ID NO: 444627
auccuagauaacaacaguu

SEQ ID NO: 444629 - RNA, 19 nt, Artificial Sequence
  Description of Artificial Sequence: Synthetic oligonucleotide
  Sense strand starting at position 3364 of SEQ ID NO: 316844
guuaucuaggauuauauuc

SEQ ID NO: 444630 - RNA, 19 nt, Artificial Sequence
  Description of Artificial Sequence: Synthetic oligonucleotide
  Antisense Strand to SEQ ID NO: 444629
gaauauaauccuagauaac

SEQ ID NO: 444631 - RNA, 19 nt, Artificial Sequence
  Description of Artificial Sequence: Synthetic oligonucleotide
  Sense strand starting at position 3745 of SEQ ID NO: 316844
cccuacagaugggauuuaa

SEQ ID NO: 444632 - RNA, 19 nt, Artificial Sequence
  Description of Artificial Sequence: Synthetic oligonucleotide
  Antisense Strand to SEQ ID NO: 444631
uuaaaucccaucuguaggg

SEQ ID NO: 444633 - RNA, 19 nt, Artificial Sequence
  Description of Artificial Sequence: Synthetic oligonucleotide
  Sense strand starting at position 3829 of SEQ ID NO: 316844
ggcauuauugugcauuugu

SEQ ID NO: 444634 - RNA, 19 nt, Artificial Sequence
  Description of Artificial Sequence: Synthetic oligonucleotide
  Antisense Strand to SEQ ID NO: 444633
acaaaugcacaauaaugcc

SEQ ID NO: 444635 - RNA, 19 nt, Artificial Sequence
  Description of Artificial Sequence: Synthetic oligonucleotide
  Sense strand starting at position 3836 of SEQ ID NO: 316844
uugugcauuugucucaacu

SEQ ID NO: 444636 - RNA, 19 nt, Artificial Sequence
  Description of Artificial Sequence: Synthetic oligonucleotide
  Antisense Strand to SEQ ID NO: 444635
aguugagacaaaugcacaa

SEQ ID NO: 444637 - RNA, 19 nt, Artificial Sequence
  Description of Artificial Sequence: Synthetic oligonucleotide
  Sense strand starting at position 3877 of SEQ ID NO: 316844
gucucuuguggacagaaac

SEQ ID NO: 444638 - RNA, 19 nt, Artificial Sequence
  Description of Artificial Sequence: Synthetic oligonucleotide
  Antisense Strand to SEQ ID NO: 444637
guuucuguccacaagagac

SEQ ID NO: 444639 - RNA, 19 nt, Artificial Sequence
  Description of Artificial Sequence: Synthetic oligonucleotide
  Sense strand starting at position 3905 of SEQ ID NO: 316844
gccuaucugguauacucau

SEQ ID NO: 444640 - RNA, 19 nt, Artificial Sequence
  Description of Artificial Sequence: Synthetic oligonucleotide
  Antisense Strand to SEQ ID NO: 444639
augaguauaccagauaggc

SEQ ID NO: 444641 - RNA, 19 nt, Artificial Sequence
  Description of Artificial Sequence: Synthetic oligonucleotide
  Sense strand starting at position 1 of SEQ ID NO: 316846
gcucucugccgguuacagu

SEQ ID NO: 444642 - RNA, 19 nt, Artificial Sequence
  Description of Artificial Sequence: Synthetic oligonucleotide
  Antisense Strand to SEQ ID NO: 444641
acuguaaccggcagagagc

SEQ ID NO: 444643 - RNA, 19 nt, Artificial Sequence
  Description of Artificial Sequence: Synthetic oligonucleotide
  Sense strand starting at position 24 of SEQ ID NO: 316846
ugggaacugaccugugaac

SEQ ID NO: 444644 - RNA, 19 nt, Artificial Sequence
  Description of Artificial Sequence: Synthetic oligonucleotide
  Antisense Strand to SEQ ID NO: 444643
guucacaggucaguuccca

SEQ ID NO: 444645 - RNA, 19 nt, Artificial Sequence
  Description of Artificial Sequence: Synthetic oligonucleotide
  Sense strand starting at position 26 of SEQ ID NO: 316846
ggaacugaccugugaacug

SEQ ID NO: 444646 - RNA, 19 nt, Artificial Sequence
  Description of Artificial Sequence: Synthetic oligonucleotide
  Antisense Strand to SEQ ID NO: 444645
caguucacaggucaguucc

SEQ ID NO: 444647 - RNA, 19 nt, Artificial Sequence
  Description of Artificial Sequence: Synthetic oligonucleotide
  Sense strand starting at position 57 of SEQ ID NO: 316846
uggguacugcucuacucau

SEQ ID NO: 444648 - RNA, 19 nt, Artificial Sequence
  Description of Artificial Sequence: Synthetic oligonucleotide
  Antisense Strand to SEQ ID NO: 444647
augaguagagcaguaccca

SEQ ID NO: 444649 - RNA, 19 nt, Artificial Sequence
  Description of Artificial Sequence: Synthetic oligonucleotide
  Sense strand starting at position 64 of SEQ ID NO: 316846
ugcucuacucaucagaggu

SEQ ID NO: 444650 - RNA, 19 nt, Artificial Sequence
  Description of Artificial Sequence: Synthetic oligonucleotide
  Antisense Strand to SEQ ID NO: 444649
accucugaugaguagagca

SEQ ID NO: 444651 - RNA, 19 nt, Artificial Sequence
  Description of Artificial Sequence: Synthetic oligonucleotide
  Sense strand starting at position 89 of SEQ ID NO: 316846
gugcuuugaacguuagcau

SEQ ID NO: 444652 - RNA, 19 nt, Artificial Sequence
  Description of Artificial Sequence: Synthetic oligonucleotide
  Antisense Strand to SEQ ID NO: 444651
augcuaacguucaaagcac

SEQ ID NO: 444653 - RNA, 19 nt, Artificial Sequence
  Description of Artificial Sequence: Synthetic oligonucleotide
  Sense strand starting at position 126 of SEQ ID NO: 316846
cugauuaugccaggaggua

SEQ ID NO: 444654 - RNA, 19 nt, Artificial Sequence
  Description of Artificial Sequence: Synthetic oligonucleotide
  Antisense Strand to SEQ ID NO: 444653
uaccuccuggcauaaucag

SEQ ID NO: 444655 - RNA, 19 nt, Artificial Sequence
  Description of Artificial Sequence: Synthetic oligonucleotide
  Sense strand starting at position 158 of SEQ ID NO: 316846
ggguucuuaaggcaugaga

SEQ ID NO: 444656 - RNA, 19 nt, Artificial Sequence
  Description of Artificial Sequence: Synthetic oligonucleotide
  Antisense Strand to SEQ ID NO: 444655
ucucaugccuuaagaaccc

SEQ ID NO: 444657 - RNA, 19 nt, Artificial Sequence
  Description of Artificial Sequence: Synthetic oligonucleotide
  Sense strand starting at position 230 of SEQ ID NO: 316846
agaaaucauuucugaugac

SEQ ID NO: 444658 - RNA, 19 nt, Artificial Sequence
  Description of Artificial Sequence: Synthetic oligonucleotide
  Antisense Strand to SEQ ID NO: 444657
gucaucagaaaugauuucu

SEQ ID NO: 444659 - RNA, 19 nt, Artificial Sequence
  Description of Artificial Sequence: Synthetic oligonucleotide
  Sense strand starting at position 317 of SEQ ID NO: 316846
ucauauuaucauuggcuga

SEQ ID NO: 444660 - RNA, 19 nt, Artificial Sequence
  Description of Artificial Sequence: Synthetic oligonucleotide
  Antisense Strand to SEQ ID NO: 444659
ucagccaaugauaauauga

SEQ ID NO: 444661 - RNA, 19 nt, Artificial Sequence
  Description of Artificial Sequence: Synthetic oligonucleotide
  Sense strand starting at position 319 of SEQ ID NO: 316846
auauuaucauuggcugaaa

SEQ ID NO: 444662 - RNA, 19 nt, Artificial Sequence
  Description of Artificial Sequence: Synthetic oligonucleotide
  Antisense Strand to SEQ ID NO: 444661
uuucagccaaugauaauau

SEQ ID NO: 444663 - RNA, 19 nt, Artificial Sequence
  Description of Artificial Sequence: Synthetic oligonucleotide
  Sense strand starting at position 483 of SEQ ID NO: 316846
accugaaggacauggucua

SEQ ID NO: 444664 - RNA, 19 nt, Artificial Sequence
  Description of Artificial Sequence: Synthetic oligonucleotide
  Antisense Strand to SEQ ID NO: 444663
uagaccauguccuucaggu

SEQ ID NO: 444665 - RNA, 19 nt, Artificial Sequence
  Description of Artificial Sequence: Synthetic oligonucleotide
  Sense strand starting at position 519 of SEQ ID NO: 316846
cuguuuggaaucugagagu

SEQ ID NO: 444666 - RNA, 19 nt, Artificial Sequence
  Description of Artificial Sequence: Synthetic oligonucleotide
  Antisense Strand to SEQ ID NO: 444665
acucucagauuccaaacag

SEQ ID NO: 444667 - RNA, 19 nt, Artificial Sequence
  Description of Artificial Sequence: Synthetic oligonucleotide
  Sense strand starting at position 806 of SEQ ID NO: 316846
uugcucucugguuaagaaa

SEQ ID NO: 444668 - RNA, 19 nt, Artificial Sequence
  Description of Artificial Sequence: Synthetic oligonucleotide
  Antisense Strand to SEQ ID NO: 444667
uuucuuaaccagagagcaa

SEQ ID NO: 444669 - RNA, 19 nt, Artificial Sequence
  Description of Artificial Sequence: Synthetic oligonucleotide
  Sense strand starting at position 813 of SEQ ID NO: 316846
cugguuaagaaaugagcaa

SEQ ID NO: 444670 - RNA, 19 nt, Artificial Sequence
  Description of Artificial Sequence: Synthetic oligonucleotide
  Antisense Strand to SEQ ID NO: 444669
uugcucauuucuuaaccag

SEQ ID NO: 444671 - RNA, 19 nt, Artificial Sequence
  Description of Artificial Sequence: Synthetic oligonucleotide
  Sense strand starting at position 824 of SEQ ID NO: 316846
augagcaacucuccuuaga

SEQ ID NO: 444672 - RNA, 19 nt, Artificial Sequence
  Description of Artificial Sequence: Synthetic oligonucleotide
  Antisense Strand to SEQ ID NO: 444671
ucuaaggagaguugcucau

SEQ ID NO: 444673 - RNA, 19 nt, Artificial Sequence
  Description of Artificial Sequence: Synthetic oligonucleotide
  Sense strand starting at position 840 of SEQ ID NO: 316846
agagacaacgccugaguuu

SEQ ID NO: 444674 - RNA, 19 nt, Artificial Sequence
  Description of Artificial Sequence: Synthetic oligonucleotide
  Antisense Strand to SEQ ID NO: 444673
aaacucaggcguugucucu

SEQ ID NO: 444675 - RNA, 19 nt, Artificial Sequence
  Description of Artificial Sequence: Synthetic oligonucleotide
  Sense strand starting at position 841 of SEQ ID NO: 316846
gagacaacgccugaguuua

SEQ ID NO: 444676 - RNA, 19 nt, Artificial Sequence
  Description of Artificial Sequence: Synthetic oligonucleotide
  Antisense Strand to SEQ ID NO: 444675
uaaacucaggcguugucuc

SEQ ID NO: 444677 - RNA, 19 nt, Artificial Sequence
  Description of Artificial Sequence: Synthetic oligonucleotide
  Sense strand starting at position 892 of SEQ ID NO: 316846
aagccauuaggaugaugua

SEQ ID NO: 444678 - RNA, 19 nt, Artificial Sequence
  Description of Artificial Sequence: Synthetic oligonucleotide
  Antisense Strand to SEQ ID NO: 444677
uacaucauccuaauggcuu

SEQ ID NO: 444679 - RNA, 19 nt, Artificial Sequence
  Description of Artificial Sequence: Synthetic oligonucleotide
  Sense strand starting at position 908 of SEQ ID NO: 316846
guaaacagagggugauuau

SEQ ID NO: 444680 - RNA, 19 nt, Artificial Sequence
  Description of Artificial Sequence: Synthetic oligonucleotide
  Antisense Strand to SEQ ID NO: 444679
auaaucacccucuguuuac

SEQ ID NO: 444681 - RNA, 19 nt, Artificial Sequence
  Description of Artificial Sequence: Synthetic oligonucleotide
  Sense strand starting at position 959 of SEQ ID NO: 316846
agcaacaaguguccuuuaa

SEQ ID NO: 444682 - RNA, 19 nt, Artificial Sequence
  Description of Artificial Sequence: Synthetic oligonucleotide
  Antisense Strand to SEQ ID NO: 444681
uuaaaggacacuuguugcu

SEQ ID NO: 444683 - RNA, 19 nt, Artificial Sequence
  Description of Artificial Sequence: Synthetic oligonucleotide
  Sense strand starting at position 1250 of SEQ ID NO: 316846
ugggcuuccucuuccuaaa

SEQ ID NO: 444684 - RNA, 19 nt, Artificial Sequence
  Description of Artificial Sequence: Synthetic oligonucleotide
  Antisense Strand to SEQ ID NO: 444683
uuuaggaagaggaagccca

SEQ ID NO: 444685 - RNA, 19 nt, Artificial Sequence
  Description of Artificial Sequence: Synthetic oligonucleotide
  Sense strand starting at position 2077 of SEQ ID NO: 316846
gaggguagaguuugacaga

SEQ ID NO: 444686 - RNA, 19 nt, Artificial Sequence
  Description of Artificial Sequence: Synthetic oligonucleotide
  Antisense Strand to SEQ ID NO: 444685
ucugucaaacucuacccuc

SEQ ID NO: 444687 - RNA, 19 nt, Artificial Sequence
  Description of Artificial Sequence: Synthetic oligonucleotide
  Sense strand starting at position 2149 of SEQ ID NO: 316846
gcagauuugaucugugacg

SEQ ID NO: 444688 - RNA, 19 nt, Artificial Sequence
  Description of Artificial Sequence: Synthetic oligonucleotide
  Antisense Strand to SEQ ID NO: 444687
cgucacagaucaaaucugc

SEQ ID NO: 444689 - RNA, 19 nt, Artificial Sequence
  Description of Artificial Sequence: Synthetic oligonucleotide
  Sense strand starting at position 2155 of SEQ ID NO: 316846
uugaucugugacggaacaa

SEQ ID NO: 444690 - RNA, 19 nt, Artificial Sequence
  Description of Artificial Sequence: Synthetic oligonucleotide
  Antisense Strand to SEQ ID NO: 444689
uuguuccgucacagaucaa

SEQ ID NO: 444691 - RNA, 19 nt, Artificial Sequence
  Description of Artificial Sequence: Synthetic oligonucleotide
  Sense strand starting at position 2480 of SEQ ID NO: 316846
ucuuuaucacggcagauac

SEQ ID NO: 444692 - RNA, 19 nt, Artificial Sequence
  Description of Artificial Sequence: Synthetic oligonucleotide
  Antisense Strand to SEQ ID NO: 444691
guaucugccgugauaaaga

SEQ ID NO: 444693 - RNA, 19 nt, Artificial Sequence
  Description of Artificial Sequence: Synthetic oligonucleotide
  Sense strand starting at position 2630 of SEQ ID NO: 316846
augguagaagugugagguu

SEQ ID NO: 444694 - RNA, 19 nt, Artificial Sequence
  Description of Artificial Sequence: Synthetic oligonucleotide
  Antisense Strand to SEQ ID NO: 444693
aaccucacacuucuaccau

SEQ ID NO: 444695 - RNA, 19 nt, Artificial Sequence
  Description of Artificial Sequence: Synthetic oligonucleotide
  Sense strand starting at position 2648 of SEQ ID NO: 316846
uggagcacuggucauguua

SEQ ID NO: 444696 - RNA, 19 nt, Artificial Sequence
  Description of Artificial Sequence: Synthetic oligonucleotide
  Antisense Strand to SEQ ID NO: 444695
uaacaugaccagugcucca

SEQ ID NO: 444697 - RNA, 19 nt, Artificial Sequence
  Description of Artificial Sequence: Synthetic oligonucleotide
  Sense strand starting at position 3023 of SEQ ID NO: 316846
cgugucauuucugcuugau

SEQ ID NO: 444698 - RNA, 19 nt, Artificial Sequence
  Description of Artificial Sequence: Synthetic oligonucleotide
  Antisense Strand to SEQ ID NO: 444697
aucaagcagaaaugacacg

SEQ ID NO: 444699 - RNA, 19 nt, Artificial Sequence
  Description of Artificial Sequence: Synthetic oligonucleotide
  Sense strand starting at position 3025 of SEQ ID NO: 316846
ugucauuucugcuugauuc

SEQ ID NO: 444700 - RNA, 19 nt, Artificial Sequence
  Description of Artificial Sequence: Synthetic oligonucleotide
  Antisense Strand to SEQ ID NO: 444699
gaaucaagcagaaaugaca

SEQ ID NO: 444701 - RNA, 19 nt, Artificial Sequence
  Description of Artificial Sequence: Synthetic oligonucleotide
  Sense strand starting at position 3026 of SEQ ID NO: 316846
gucauuucugcuugauucu

SEQ ID NO: 444702 - RNA, 19 nt, Artificial Sequence
  Description of Artificial Sequence: Synthetic oligonucleotide
  Antisense Strand to SEQ ID NO: 444701
agaaucaagcagaaaugac

SEQ ID NO: 444703 - RNA, 19 nt, Artificial Sequence
  Description of Artificial Sequence: Synthetic oligonucleotide
  Sense strand starting at position 3038 of SEQ ID NO: 316846
ugauucuauuagucaagca

SEQ ID NO: 444704 - RNA, 19 nt, Artificial Sequence
  Description of Artificial Sequence: Synthetic oligonucleotide
  Antisense Strand to SEQ ID NO: 444703
ugcuugacuaauagaauca

SEQ ID NO: 444705 - RNA, 19 nt, Artificial Sequence
  Description of Artificial Sequence: Synthetic oligonucleotide
  Sense strand starting at position 3103 of SEQ ID NO: 316846
uagugugaggagugucaaa

SEQ ID NO: 444706 - RNA, 19 nt, Artificial Sequence
  Description of Artificial Sequence: Synthetic oligonucleotide
  Antisense Strand to SEQ ID NO: 444705
uuugacacuccucacacua

SEQ ID NO: 444707 - RNA, 19 nt, Artificial Sequence
  Description of Artificial Sequence: Synthetic oligonucleotide
  Sense strand starting at position 3182 of SEQ ID NO: 316846
aggccuuaauagucaucua

SEQ ID NO: 444708 - RNA, 19 nt, Artificial Sequence
  Description of Artificial Sequence: Synthetic oligonucleotide
  Antisense Strand to SEQ ID NO: 444707
uagaugacuauuaaggccu

SEQ ID NO: 444709 - RNA, 19 nt, Artificial Sequence
  Description of Artificial Sequence: Synthetic oligonucleotide
  Sense strand starting at position 3185 of SEQ ID NO: 316846
ccuuaauagucaucuagua

SEQ ID NO: 444710 - RNA, 19 nt, Artificial Sequence
  Description of Artificial Sequence: Synthetic oligonucleotide
  Antisense Strand to SEQ ID NO: 444709
uacuagaugacuauuaagg

SEQ ID NO: 444711 - RNA, 19 nt, Artificial Sequence
  Description of Artificial Sequence: Synthetic oligonucleotide
  Sense strand starting at position 3293 of SEQ ID NO: 316846
agugccauuguuuauauua

SEQ ID NO: 444712 - RNA, 19 nt, Artificial Sequence
  Description of Artificial Sequence: Synthetic oligonucleotide
  Antisense Strand to SEQ ID NO: 444711
uaauauaaacaauggcacu

SEQ ID NO: 444713 - RNA, 19 nt, Artificial Sequence
  Description of Artificial Sequence: Synthetic oligonucleotide
  Sense strand starting at position 3606 of SEQ ID NO: 316846
cuauuaggauagccauuau

SEQ ID NO: 444714 - RNA, 19 nt, Artificial Sequence
  Description of Artificial Sequence: Synthetic oligonucleotide
  Antisense Strand to SEQ ID NO: 444713
auaauggcuauccuaauag

SEQ ID NO: 444715 - RNA, 19 nt, Artificial Sequence
  Description of Artificial Sequence: Synthetic oligonucleotide
  Sense strand starting at position 3610 of SEQ ID NO: 316846
uaggauagccauuauagua

SEQ ID NO: 444716 - RNA, 19 nt, Artificial Sequence
  Description of Artificial Sequence: Synthetic oligonucleotide
  Antisense Strand to SEQ ID NO: 444715
uacuauaauggcuauccua

SEQ ID NO: 444717 - RNA, 19 nt, Artificial Sequence
  Description of Artificial Sequence: Synthetic oligonucleotide
  Sense strand starting at position 3655 of SEQ ID NO: 316846
aaguguuggcaagaauguu

SEQ ID NO: 444718 - RNA, 19 nt, Artificial Sequence
  Description of Artificial Sequence: Synthetic oligonucleotide
  Antisense Strand to SEQ ID NO: 444717
aacauucuugccaacacuu

SEQ ID NO: 444719 - RNA, 19 nt, Artificial Sequence
  Description of Artificial Sequence: Synthetic oligonucleotide
  Sense strand starting at position 3959 of SEQ ID NO: 316846
gguauauacauguauguau

SEQ ID NO: 444720 - RNA, 19 nt, Artificial Sequence
  Description of Artificial Sequence: Synthetic oligonucleotide
  Antisense Strand to SEQ ID NO: 444719
auacauacauguauauacc

SEQ ID NO: 444721 - RNA, 19 nt, Artificial Sequence
  Description of Artificial Sequence: Synthetic oligonucleotide
  Sense strand starting at position 161 of SEQ ID NO: 316847
aggacuaugucauuagcag

SEQ ID NO: 444722 - RNA, 19 nt, Artificial Sequence
  Description of Artificial Sequence: Synthetic oligonucleotide
  Antisense Strand to SEQ ID NO: 444721
cugcuaaugacauaguccu

SEQ ID NO: 444723 - RNA, 19 nt, Artificial Sequence
  Description of Artificial Sequence: Synthetic oligonucleotide
  Sense strand starting at position 162 of SEQ ID NO: 316847
ggacuaugucauuagcaga

SEQ ID NO: 444724 - RNA, 19 nt, Artificial Sequence
  Description of Artificial Sequence: Synthetic oligonucleotide
  Antisense Strand to SEQ ID NO: 444723
ucugcuaaugacauagucc

SEQ ID NO: 444725 - RNA, 19 nt, Artificial Sequence
  Description of Artificial Sequence: Synthetic oligonucleotide
  Sense strand starting at position 167 of SEQ ID NO: 316847
augucauuagcagaucaga

SEQ ID NO: 444726 - RNA, 19 nt, Artificial Sequence
  Description of Artificial Sequence: Synthetic oligonucleotide
  Antisense Strand to SEQ ID NO: 444725
ucugaucugcuaaugacau

SEQ ID NO: 444727 - RNA, 19 nt, Artificial Sequence
  Description of Artificial Sequence: Synthetic oligonucleotide
  Sense strand starting at position 324 of SEQ ID NO: 316847
aggagugcuaccugagaac

SEQ ID NO: 444728 - RNA, 19 nt, Artificial Sequence
  Description of Artificial Sequence: Synthetic oligonucleotide
  Antisense Strand to SEQ ID NO: 444727
guucucagguagcacuccu

SEQ ID NO: 444729 - RNA, 19 nt, Artificial Sequence
  Description of Artificial Sequence: Synthetic oligonucleotide
  Sense strand starting at position 493 of SEQ ID NO: 316847
gugucucuucuggaaacug

SEQ ID NO: 444730 - RNA, 19 nt, Artificial Sequence
  Description of Artificial Sequence: Synthetic oligonucleotide
  Antisense Strand to SEQ ID NO: 444729
caguuuccagaagagacac

SEQ ID NO: 444731 - RNA, 19 nt, Artificial Sequence
  Description of Artificial Sequence: Synthetic oligonucleotide
  Sense strand starting at position 652 of SEQ ID NO: 316847
aggcucacccaaggauuaa

SEQ ID NO: 444732 - RNA, 19 nt, Artificial Sequence
  Description of Artificial Sequence: Synthetic oligonucleotide
  Antisense Strand to SEQ ID NO: 444731
uuaauccuugggugagccu

SEQ ID NO: 444733 - RNA, 19 nt, Artificial Sequence
  Description of Artificial Sequence: Synthetic oligonucleotide
  Sense strand starting at position 714 of SEQ ID NO: 316847
auccuuuggcaggauugua

SEQ ID NO: 444734 - RNA, 19 nt, Artificial Sequence
  Description of Artificial Sequence: Synthetic oligonucleotide
  Antisense Strand to SEQ ID NO: 444733
uacaauccugccaaaggau

SEQ ID NO: 444735 - RNA, 19 nt, Artificial Sequence
  Description of Artificial Sequence: Synthetic oligonucleotide
  Sense strand starting at position 797 of SEQ ID NO: 316847
guggcuuauuuacccauua

SEQ ID NO: 444736 - RNA, 19 nt, Artificial Sequence
  Description of Artificial Sequence: Synthetic oligonucleotide
  Antisense Strand to SEQ ID NO: 444735
uaauggguaaauaagccac

SEQ ID NO: 444737 - RNA, 19 nt, Artificial Sequence
  Description of Artificial Sequence: Synthetic oligonucleotide
  Sense strand starting at position 864 of SEQ ID NO: 316847
cggaguugugucagagccu

SEQ ID NO: 444738 - RNA, 19 nt, Artificial Sequence
  Description of Artificial Sequence: Synthetic oligonucleotide
  Antisense Strand to SEQ ID NO: 444737
aggcucugacacaacuccg

SEQ ID NO: 444739 - RNA, 19 nt, Artificial Sequence
  Description of Artificial Sequence: Synthetic oligonucleotide
  Sense strand starting at position 907 of SEQ ID NO: 316847
agugaaggagguugaaauu

SEQ ID NO: 444740 - RNA, 19 nt, Artificial Sequence
  Description of Artificial Sequence: Synthetic oligonucleotide
  Antisense Strand to SEQ ID NO: 444739
aauuucaaccuccuucacu

SEQ ID NO: 444741 - RNA, 19 nt, Artificial Sequence
  Description of Artificial Sequence: Synthetic oligonucleotide
  Sense strand starting at position 1005 of SEQ ID NO: 316847
ucuuacaaguuaucagaag

SEQ ID NO: 444742 - RNA, 19 nt, Artificial Sequence
  Description of Artificial Sequence: Synthetic oligonucleotide
  Antisense Strand to SEQ ID NO: 444741
cuucugauaacuuguaaga

SEQ ID NO: 444743 - RNA, 19 nt, Artificial Sequence
  Description of Artificial Sequence: Synthetic oligonucleotide
  Sense strand starting at position 1146 of SEQ ID NO: 316847
ugaagcuuccaugaaaugu

SEQ ID NO: 444744 - RNA, 19 nt, Artificial Sequence
  Description of Artificial Sequence: Synthetic oligonucleotide
  Antisense Strand to SEQ ID NO: 444743
acauuucauggaagcuuca

SEQ ID NO: 444745 - RNA, 19 nt, Artificial Sequence
  Description of Artificial Sequence: Synthetic oligonucleotide
  Sense strand starting at position 1206 of SEQ ID NO: 316847
agaaguacaguuugagagu

SEQ ID NO: 444746 - RNA, 19 nt, Artificial Sequence
  Description of Artificial Sequence: Synthetic oligonucleotide
  Antisense Strand to SEQ ID NO: 444745
acucucaaacuguacuucu

SEQ ID NO: 444747 - RNA, 19 nt, Artificial Sequence
  Description of Artificial Sequence: Synthetic oligonucleotide
  Sense strand starting at position 1411 of SEQ ID NO: 316847
uggaguacuuacccacaca

SEQ ID NO: 444748 - RNA, 19 nt, Artificial Sequence
  Description of Artificial Sequence: Synthetic oligonucleotide
  Antisense Strand to SEQ ID NO: 444747
uguguggguaaguacucca

SEQ ID NO: 444749 - RNA, 19 nt, Artificial Sequence
  Description of Artificial Sequence: Synthetic oligonucleotide
  Sense strand starting at position 1414 of SEQ ID NO: 316847
aguacuuacccacacaagu

SEQ ID NO: 444750 - RNA, 19 nt, Artificial Sequence
  Description of Artificial Sequence: Synthetic oligonucleotide
  Antisense Strand to SEQ ID NO: 444749
acuuguguggguaaguacu

SEQ ID NO: 444751 - RNA, 19 nt, Artificial Sequence
  Description of Artificial Sequence: Synthetic oligonucleotide
  Sense strand starting at position 2006 of SEQ ID NO: 316847
aguggaaugacucagcuuu

SEQ ID NO: 444752 - RNA, 19 nt, Artificial Sequence
  Description of Artificial Sequence: Synthetic oligonucleotide
  Antisense Strand to SEQ ID NO: 444751
aaagcugagucauuccacu

SEQ ID NO: 444753 - RNA, 19 nt, Artificial Sequence
  Description of Artificial Sequence: Synthetic oligonucleotide
  Sense strand starting at position 2060 of SEQ ID NO: 316847
uuuagugacacuugaguga

SEQ ID NO: 444754 - RNA, 19 nt, Artificial Sequence
  Description of Artificial Sequence: Synthetic oligonucleotide
  Antisense Strand to SEQ ID NO: 444753
ucacucaagugucacuaaa

SEQ ID NO: 444755 - RNA, 19 nt, Artificial Sequence
  Description of Artificial Sequence: Synthetic oligonucleotide
  Sense strand starting at position 2105 of SEQ ID NO: 316847
gcaauuccuccacacagga

SEQ ID NO: 444756 - RNA, 19 nt, Artificial Sequence
  Description of Artificial Sequence: Synthetic oligonucleotide
  Antisense Strand to SEQ ID NO: 444755
uccuguguggaggaauugc

SEQ ID NO: 444757 - RNA, 19 nt, Artificial Sequence
  Description of Artificial Sequence: Synthetic oligonucleotide
  Sense strand starting at position 2167 of SEQ ID NO: 316847
auaaauauccugggcagaa

SEQ ID NO: 444758 - RNA, 19 nt, Artificial Sequence
  Description of Artificial Sequence: Synthetic oligonucleotide
  Antisense Strand to SEQ ID NO: 444757
uucugcccaggauauuuau

SEQ ID NO: 444759 - RNA, 19 nt, Artificial Sequence
  Description of Artificial Sequence: Synthetic oligonucleotide
  Sense strand starting at position 2241 of SEQ ID NO: 316847
cuaaauauuggcuauguuu

SEQ ID NO: 444760 - RNA, 19 nt, Artificial Sequence
  Description of Artificial Sequence: Synthetic oligonucleotide
  Antisense Strand to SEQ ID NO: 444759
aaacauagccaauauuuag

SEQ ID NO: 444761 - RNA, 19 nt, Artificial Sequence
  Description of Artificial Sequence: Synthetic oligonucleotide
  Sense strand starting at position 2326 of SEQ ID NO: 316847
gauaguuuggauugauaau

SEQ ID NO: 444762 - RNA, 19 nt, Artificial Sequence
  Description of Artificial Sequence: Synthetic oligonucleotide
  Antisense Strand to SEQ ID NO: 444761
auuaucaauccaaacuauc

SEQ ID NO: 444763 - RNA, 19 nt, Artificial Sequence
  Description of Artificial Sequence: Synthetic oligonucleotide
  Sense strand starting at position 2402 of SEQ ID NO: 316847
acgaaaugucaauaccagu

SEQ ID NO: 444764 - RNA, 19 nt, Artificial Sequence
  Description of Artificial Sequence: Synthetic oligonucleotide
  Antisense Strand to SEQ ID NO: 444763
acugguauugacauuucgu

SEQ ID NO: 444765 - RNA, 19 nt, Artificial Sequence
  Description of Artificial Sequence: Synthetic oligonucleotide
  Sense strand starting at position 2561 of SEQ ID NO: 316847
ucagcaugagcaugauaaa

SEQ ID NO: 444766 - RNA, 19 nt, Artificial Sequence
  Description of Artificial Sequence: Synthetic oligonucleotide
  Antisense Strand to SEQ ID NO: 444765
uuuaucaugcucaugcuga

SEQ ID NO: 444767 - RNA, 19 nt, Artificial Sequence
  Description of Artificial Sequence: Synthetic oligonucleotide
  Sense strand starting at position 2607 of SEQ ID NO: 316847
aaaggaguggauuguuauu

SEQ ID NO: 444768 - RNA, 19 nt, Artificial Sequence
  Description of Artificial Sequence: Synthetic oligonucleotide
  Antisense Strand to SEQ ID NO: 444767
aauaacaauccacuccuuu

SEQ ID NO: 444769 - RNA, 19 nt, Artificial Sequence
  Description of Artificial Sequence: Synthetic oligonucleotide
  Sense strand starting at position 2609 of SEQ ID NO: 316847
aggaguggauuguuauuau

SEQ ID NO: 444770 - RNA, 19 nt, Artificial Sequence
  Description of Artificial Sequence: Synthetic oligonucleotide
  Antisense Strand to SEQ ID NO: 444769
auaauaacaauccacuccu

SEQ ID NO: 444771 - RNA, 19 nt, Artificial Sequence
  Description of Artificial Sequence: Synthetic oligonucleotide
  Sense strand starting at position 2752 of SEQ ID NO: 316847
auaagaacuggacguaucu

SEQ ID NO: 444772 - RNA, 19 nt, Artificial Sequence
  Description of Artificial Sequence: Synthetic oligonucleotide
  Antisense Strand to SEQ ID NO: 444771
agauacguccaguucuuau

SEQ ID NO: 444773 - RNA, 19 nt, Artificial Sequence
  Description of Artificial Sequence: Synthetic oligonucleotide
  Sense strand starting at position 2877 of SEQ ID NO: 316847
uuugaugcacgauggaaau

SEQ ID NO: 444774 - RNA, 19 nt, Artificial Sequence
  Description of Artificial Sequence: Synthetic oligonucleotide
  Antisense Strand to SEQ ID NO: 444773
auuuccaucgugcaucaaa

SEQ ID NO: 444775 - RNA, 19 nt, Artificial Sequence
  Description of Artificial Sequence: Synthetic oligonucleotide
  Sense strand starting at position 2935 of SEQ ID NO: 316847
uuaaguuacccugagguag

SEQ ID NO: 444776 - RNA, 19 nt, Artificial Sequence
  Description of Artificial Sequence: Synthetic oligonucleotide
  Antisense Strand to SEQ ID NO: 444775
cuaccucaggguaacuuaa

SEQ ID NO: 444777 - RNA, 19 nt, Artificial Sequence
  Description of Artificial Sequence: Synthetic oligonucleotide
  Sense strand starting at position 2949 of SEQ ID NO: 316847
gguaguguuccaagugcug

SEQ ID NO: 444778 - RNA, 19 nt, Artificial Sequence
  Description of Artificial Sequence: Synthetic oligonucleotide
  Antisense Strand to SEQ ID NO: 444777
cagcacuuggaacacuacc

SEQ ID NO: 444779 - RNA, 19 nt, Artificial Sequence
  Description of Artificial Sequence: Synthetic oligonucleotide
  Sense strand starting at position 3100 of SEQ ID NO: 316847
cuggaucacuuuccugaaa

SEQ ID NO: 444780 - RNA, 19 nt, Artificial Sequence
  Description of Artificial Sequence: Synthetic oligonucleotide
  Antisense Strand to SEQ ID NO: 444779
uuucaggaaagugauccag

SEQ ID NO: 444781 - RNA, 19 nt, Artificial Sequence
  Description of Artificial Sequence: Synthetic oligonucleotide
  Sense strand starting at position 3112 of SEQ ID NO: 316847
ccugaaacagcuuaaguca

SEQ ID NO: 444782 - RNA, 19 nt, Artificial Sequence
  Description of Artificial Sequence: Synthetic oligonucleotide
  Antisense Strand to SEQ ID NO: 444781
ugacuuaagcuguuucagg

SEQ ID NO: 444783 - RNA, 19 nt, Artificial Sequence
  Description of Artificial Sequence: Synthetic oligonucleotide
  Sense strand starting at position 3227 of SEQ ID NO: 316847
gguuaugcggaauauucca

SEQ ID NO: 444784 - RNA, 19 nt, Artificial Sequence
  Description of Artificial Sequence: Synthetic oligonucleotide
  Antisense Strand to SEQ ID NO: 444783
uggaauauuccgcauaacc

SEQ ID NO: 444785 - RNA, 19 nt, Artificial Sequence
  Description of Artificial Sequence: Synthetic oligonucleotide
  Sense strand starting at position 3362 of SEQ ID NO: 316847
gccagcaucccagaugaca

SEQ ID NO: 444786 - RNA, 19 nt, Artificial Sequence
  Description of Artificial Sequence: Synthetic oligonucleotide
  Antisense Strand to SEQ ID NO: 444785
ugucaucugggaugcuggc

SEQ ID NO: 444787 - RNA, 19 nt, Artificial Sequence
  Description of Artificial Sequence: Synthetic oligonucleotide
  Sense strand starting at position 3463 of SEQ ID NO: 316847
ugaaaugauccacagcucu

SEQ ID NO: 444788 - RNA, 19 nt, Artificial Sequence
  Description of Artificial Sequence: Synthetic oligonucleotide
  Antisense Strand to SEQ ID NO: 444787
agagcuguggaucauuuca

SEQ ID NO: 444789 - RNA, 19 nt, Artificial Sequence
  Description of Artificial Sequence: Synthetic oligonucleotide
  Sense strand starting at position 3478 of SEQ ID NO: 316847
cucuguucuguuuggauuu

SEQ ID NO: 444790 - RNA, 19 nt, Artificial Sequence
  Description of Artificial Sequence: Synthetic oligonucleotide
  Antisense Strand to SEQ ID NO: 444789
aaauccaaacagaacagag

SEQ ID NO: 444791 - RNA, 19 nt, Artificial Sequence
  Description of Artificial Sequence: Synthetic oligonucleotide
  Sense strand starting at position 3568 of SEQ ID NO: 316847
gucauuaauguugaguaca

SEQ ID NO: 444792 - RNA, 19 nt, Artificial Sequence
  Description of Artificial Sequence: Synthetic oligonucleotide
  Antisense Strand to SEQ ID NO: 444791
uguacucaacauuaaugac

SEQ ID NO: 444793 - RNA, 19 nt, Artificial Sequence
  Description of Artificial Sequence: Synthetic oligonucleotide
  Sense strand starting at position 3570 of SEQ ID NO: 316847
cauuaauguugaguacaag

SEQ ID NO: 444794 - RNA, 19 nt, Artificial Sequence
  Description of Artificial Sequence: Synthetic oligonucleotide
  Antisense Strand to SEQ ID NO: 444793
cuuguacucaacauuaaug

SEQ ID NO: 444795 - RNA, 19 nt, Artificial Sequence
  Description of Artificial Sequence: Synthetic oligonucleotide
  Sense strand starting at position 3582 of SEQ ID NO: 316847
guacaagcucccuaggaga

SEQ ID NO: 444796 - RNA, 19 nt, Artificial Sequence
  Description of Artificial Sequence: Synthetic oligonucleotide
  Antisense Strand to SEQ ID NO: 444795
ucuccuagggagcuuguac

SEQ ID NO: 444797 - RNA, 19 nt, Artificial Sequence
  Description of Artificial Sequence: Synthetic oligonucleotide
  Sense strand starting at position 3614 of SEQ ID NO: 316847
agagguauagcagaugcua

SEQ ID NO: 444798 - RNA, 19 nt, Artificial Sequence
  Description of Artificial Sequence: Synthetic oligonucleotide
  Antisense Strand to SEQ ID NO: 444797
uagcaucugcuauaccucu

SEQ ID NO: 444799 - RNA, 19 nt, Artificial Sequence
  Description of Artificial Sequence: Synthetic oligonucleotide
  Sense strand starting at position 3626 of SEQ ID NO: 316847
gaugcuauggcugaugacu

SEQ ID NO: 444800 - RNA, 19 nt, Artificial Sequence
  Description of Artificial Sequence: Synthetic oligonucleotide
  Antisense Strand to SEQ ID NO: 444799
agucaucagccauagcauc

SEQ ID NO: 444801 - RNA, 19 nt, Artificial Sequence
  Description of Artificial Sequence: Synthetic oligonucleotide
  Sense strand starting at position 58 of SEQ ID NO: 316848
guccuaaagucaguuaacu

SEQ ID NO: 444802 - RNA, 19 nt, Artificial Sequence
  Description of Artificial Sequence: Synthetic oligonucleotide
  Antisense Strand to SEQ ID NO: 444801
aguuaacugacuuuaggac

SEQ ID NO: 444803 - RNA, 19 nt, Artificial Sequence
  Description of Artificial Sequence: Synthetic oligonucleotide
  Sense strand starting at position 66 of SEQ ID NO: 316848
gucaguuaacuguagcaac

SEQ ID NO: 444804 - RNA, 19 nt, Artificial Sequence
  Description of Artificial Sequence: Synthetic oligonucleotide
  Antisense Strand to SEQ ID NO: 444803
guugcuacaguuaacugac

SEQ ID NO: 444805 - RNA, 19 nt, Artificial Sequence
  Description of Artificial Sequence: Synthetic oligonucleotide
  Sense strand starting at position 197 of SEQ ID NO: 316848
gauaguuuacaccaacgca

SEQ ID NO: 444806 - RNA, 19 nt, Artificial Sequence
  Description of Artificial Sequence: Synthetic oligonucleotide
  Antisense Strand to SEQ ID NO: 444805
ugcguugguguaaacuauc

SEQ ID NO: 444807 - RNA, 19 nt, Artificial Sequence
  Description of Artificial Sequence: Synthetic oligonucleotide
  Sense strand starting at position 224 of SEQ ID NO: 316848
uaagccuuuguguagucua

SEQ ID NO: 444808 - RNA, 19 nt, Artificial Sequence
  Description of Artificial Sequence: Synthetic oligonucleotide
  Antisense Strand to SEQ ID NO: 444807
uagacuacacaaaggcuua

SEQ ID NO: 444809 - RNA, 19 nt, Artificial Sequence
  Description of Artificial Sequence: Synthetic oligonucleotide
  Sense strand starting at position 229 of SEQ ID NO: 316848
cuuuguguagucuauaaga

SEQ ID NO: 444810 - RNA, 19 nt, Artificial Sequence
  Description of Artificial Sequence: Synthetic oligonucleotide
  Antisense Strand to SEQ ID NO: 444809
ucuuauagacuacacaaag

SEQ ID NO: 444811 - RNA, 19 nt, Artificial Sequence
  Description of Artificial Sequence: Synthetic oligonucleotide
  Sense strand starting at position 231 of SEQ ID NO: 316848
uuguguagucuauaagagu

SEQ ID NO: 444812 - RNA, 19 nt, Artificial Sequence
  Description of Artificial Sequence: Synthetic oligonucleotide
  Antisense Strand to SEQ ID NO: 444811
acucuuauagacuacacaa

SEQ ID NO: 444813 - RNA, 19 nt, Artificial Sequence
  Description of Artificial Sequence: Synthetic oligonucleotide
  Sense strand starting at position 616 of SEQ ID NO: 316848
cugguaaaccauuagcaaa

SEQ ID NO: 444814 - RNA, 19 nt, Artificial Sequence
  Description of Artificial Sequence: Synthetic oligonucleotide
  Antisense Strand to SEQ ID NO: 444813
uuugcuaaugguuuaccag

SEQ ID NO: 444815 - RNA, 19 nt, Artificial Sequence
  Description of Artificial Sequence: Synthetic oligonucleotide
  Sense strand starting at position 690 of SEQ ID NO: 316848
cugguuccagagugugaaa

SEQ ID NO: 444816 - RNA, 19 nt, Artificial Sequence
  Description of Artificial Sequence: Synthetic oligonucleotide
  Antisense Strand to SEQ ID NO: 444815
uuucacacucuggaaccag

SEQ ID NO: 444817 - RNA, 19 nt, Artificial Sequence
  Description of Artificial Sequence: Synthetic oligonucleotide
  Sense strand starting at position 920 of SEQ ID NO: 316848
aaaugaaagucuguagcau

SEQ ID NO: 444818 - RNA, 19 nt, Artificial Sequence
  Description of Artificial Sequence: Synthetic oligonucleotide
  Antisense Strand to SEQ ID NO: 444817
augcuacagacuuucauuu

SEQ ID NO: 444819 - RNA, 19 nt, Artificial Sequence
  Description of Artificial Sequence: Synthetic oligonucleotide
  Sense strand starting at position 921 of SEQ ID NO: 316848
aaugaaagucuguagcaua

SEQ ID NO: 444820 - RNA, 19 nt, Artificial Sequence
  Description of Artificial Sequence: Synthetic oligonucleotide
  Antisense Strand to SEQ ID NO: 444819
uaugcuacagacuuucauu

SEQ ID NO: 444821 - RNA, 19 nt, Artificial Sequence
  Description of Artificial Sequence: Synthetic oligonucleotide
  Sense strand starting at position 926 of SEQ ID NO: 316848
aagucuguagcauagauaa

SEQ ID NO: 444822 - RNA, 19 nt, Artificial Sequence
  Description of Artificial Sequence: Synthetic oligonucleotide
  Antisense Strand to SEQ ID NO: 444821
uuaucuaugcuacagacuu

SEQ ID NO: 444823 - RNA, 19 nt, Artificial Sequence
  Description of Artificial Sequence: Synthetic oligonucleotide
  Sense strand starting at position 928 of SEQ ID NO: 316848
gucuguagcauagauaaag

SEQ ID NO: 444824 - RNA, 19 nt, Artificial Sequence
  Description of Artificial Sequence: Synthetic oligonucleotide
  Antisense Strand to SEQ ID NO: 444823
cuuuaucuaugcuacagac

SEQ ID NO: 444825 - RNA, 19 nt, Artificial Sequence
  Description of Artificial Sequence: Synthetic oligonucleotide
  Sense strand starting at position 1025 of SEQ ID NO: 316848
gauaaagacucggaagaac

SEQ ID NO: 444826 - RNA, 19 nt, Artificial Sequence
  Description of Artificial Sequence: Synthetic oligonucleotide
  Antisense Strand to SEQ ID NO: 444825
guucuuccgagucuuuauc

SEQ ID NO: 444827 - RNA, 19 nt, Artificial Sequence
  Description of Artificial Sequence: Synthetic oligonucleotide
  Sense strand starting at position 1228 of SEQ ID NO: 316848
gggcgaggacaaugugaua

SEQ ID NO: 444828 - RNA, 19 nt, Artificial Sequence
  Description of Artificial Sequence: Synthetic oligonucleotide
  Antisense Strand to SEQ ID NO: 444827
uaucacauuguccucgccc

SEQ ID NO: 444829 - RNA, 19 nt, Artificial Sequence
  Description of Artificial Sequence: Synthetic oligonucleotide
  Sense strand starting at position 1267 of SEQ ID NO: 316848
cccucauucuacuuggaga

SEQ ID NO: 444830 - RNA, 19 nt, Artificial Sequence
  Description of Artificial Sequence: Synthetic oligonucleotide
  Antisense Strand to SEQ ID NO: 444829
ucuccaaguagaaugaggg

SEQ ID NO: 444831 - RNA, 19 nt, Artificial Sequence
  Description of Artificial Sequence: Synthetic oligonucleotide
  Sense strand starting at position 2025 of SEQ ID NO: 316848
gaucgaucugaucgcacaa

SEQ ID NO: 444832 - RNA, 19 nt, Artificial Sequence
  Description of Artificial Sequence: Synthetic oligonucleotide
  Antisense Strand to SEQ ID NO: 444831
uugugcgaucagaucgauc

SEQ ID NO: 444833 - RNA, 19 nt, Artificial Sequence
  Description of Artificial Sequence: Synthetic oligonucleotide
  Sense strand starting at position 2493 of SEQ ID NO: 316848
uugccuguguguuuauuua

SEQ ID NO: 444834 - RNA, 19 nt, Artificial Sequence
  Description of Artificial Sequence: Synthetic oligonucleotide
  Antisense Strand to SEQ ID NO: 444833
uaaauaaacacacaggcaa

SEQ ID NO: 444835 - RNA, 19 nt, Artificial Sequence
  Description of Artificial Sequence: Synthetic oligonucleotide
  Sense strand starting at position 2497 of SEQ ID NO: 316848
cuguguguuuauuuaguuu

SEQ ID NO: 444836 - RNA, 19 nt, Artificial Sequence
  Description of Artificial Sequence: Synthetic oligonucleotide
  Antisense Strand to SEQ ID NO: 444835
aaacuaaauaaacacacag

SEQ ID NO: 444837 - RNA, 19 nt, Artificial Sequence
  Description of Artificial Sequence: Synthetic oligonucleotide
  Sense strand starting at position 2559 of SEQ ID NO: 316848
ggcgaugcagagucguuua

SEQ ID NO: 444838 - RNA, 19 nt, Artificial Sequence
  Description of Artificial Sequence: Synthetic oligonucleotide
  Antisense Strand to SEQ ID NO: 444837
uaaacgacucugcaucgcc

SEQ ID NO: 444839 - RNA, 19 nt, Artificial Sequence
  Description of Artificial Sequence: Synthetic oligonucleotide
  Sense strand starting at position 2567 of SEQ ID NO: 316848
agagucguuuaggcaauca

SEQ ID NO: 444840 - RNA, 19 nt, Artificial Sequence
  Description of Artificial Sequence: Synthetic oligonucleotide
  Antisense Strand to SEQ ID NO: 444839
ugauugccuaaacgacucu

SEQ ID NO: 444841 - RNA, 19 nt, Artificial Sequence
  Description of Artificial Sequence: Synthetic oligonucleotide
  Sense strand starting at position 2629 of SEQ ID NO: 316848
guugccauuucugcgaaag

SEQ ID NO: 444842 - RNA, 19 nt, Artificial Sequence
  Description of Artificial Sequence: Synthetic oligonucleotide
  Antisense Strand to SEQ ID NO: 444841
cuuucgcagaaauggcaac

SEQ ID NO: 444843 - RNA, 19 nt, Artificial Sequence
  Description of Artificial Sequence: Synthetic oligonucleotide
  Sense strand starting at position 2630 of SEQ ID NO: 316848
uugccauuucugcgaaagg

SEQ ID NO: 444844 - RNA, 19 nt, Artificial Sequence
  Description of Artificial Sequence: Synthetic oligonucleotide
  Antisense Strand to SEQ ID NO: 444843
ccuuucgcagaaauggcaa

SEQ ID NO: 444845 - RNA, 19 nt, Artificial Sequence
  Description of Artificial Sequence: Synthetic oligonucleotide
  Sense strand starting at position 2736 of SEQ ID NO: 316848
uuaagaccucagggcuaaa

SEQ ID NO: 444846 - RNA, 19 nt, Artificial Sequence
  Description of Artificial Sequence: Synthetic oligonucleotide
  Antisense Strand to SEQ ID NO: 444845
uuuagcccugaggucuuaa

SEQ ID NO: 444847 - RNA, 19 nt, Artificial Sequence
  Description of Artificial Sequence: Synthetic oligonucleotide
  Sense strand starting at position 2925 of SEQ ID NO: 316848
gacucuugacguugacuca

SEQ ID NO: 444848 - RNA, 19 nt, Artificial Sequence
  Description of Artificial Sequence: Synthetic oligonucleotide
  Antisense Strand to SEQ ID NO: 444847
ugagucaacgucaagaguc

SEQ ID NO: 444849 - RNA, 19 nt, Artificial Sequence
  Description of Artificial Sequence: Synthetic oligonucleotide
  Sense strand starting at position 2939 of SEQ ID NO: 316848
acucauucuccuuaggcga

SEQ ID NO: 444850 - RNA, 19 nt, Artificial Sequence
  Description of Artificial Sequence: Synthetic oligonucleotide
  Antisense Strand to SEQ ID NO: 444849
ucgccuaaggagaaugagu

SEQ ID NO: 444851 - RNA, 19 nt, Artificial Sequence
  Description of Artificial Sequence: Synthetic oligonucleotide
  Sense strand starting at position 2947 of SEQ ID NO: 316848
uccuuaggcgagugacuua

SEQ ID NO: 444852 - RNA, 19 nt, Artificial Sequence
  Description of Artificial Sequence: Synthetic oligonucleotide
  Antisense Strand to SEQ ID NO: 444851
uaagucacucgccuaagga

SEQ ID NO: 444853 - RNA, 19 nt, Artificial Sequence
  Description of Artificial Sequence: Synthetic oligonucleotide
  Sense strand starting at position 3065 of SEQ ID NO: 316848
ugcaucggacucuagaaau

SEQ ID NO: 444854 - RNA, 19 nt, Artificial Sequence
  Description of Artificial Sequence: Synthetic oligonucleotide
  Antisense Strand to SEQ ID NO: 444853
auuucuagaguccgaugca

SEQ ID NO: 444855 - RNA, 19 nt, Artificial Sequence
  Description of Artificial Sequence: Synthetic oligonucleotide
  Sense strand starting at position 3185 of SEQ ID NO: 316848
gauguacaccaguguaguu

SEQ ID NO: 444856 - RNA, 19 nt, Artificial Sequence
  Description of Artificial Sequence: Synthetic oligonucleotide
  Antisense Strand to SEQ ID NO: 444855
aacuacacugguguacauc

SEQ ID NO: 444857 - RNA, 19 nt, Artificial Sequence
  Description of Artificial Sequence: Synthetic oligonucleotide
  Sense strand starting at position 3239 of SEQ ID NO: 316848
ugcagcugcccucaauaga

SEQ ID NO: 444858 - RNA, 19 nt, Artificial Sequence
  Description of Artificial Sequence: Synthetic oligonucleotide
  Antisense Strand to SEQ ID NO: 444857
ucuauugagggcagcugca

SEQ ID NO: 444859 - RNA, 19 nt, Artificial Sequence
  Description of Artificial Sequence: Synthetic oligonucleotide
  Sense strand starting at position 3352 of SEQ ID NO: 316848
cuaagauacugugcuguca

SEQ ID NO: 444860 - RNA, 19 nt, Artificial Sequence
  Description of Artificial Sequence: Synthetic oligonucleotide
  Antisense Strand to SEQ ID NO: 444859
ugacagcacaguaucuuag

SEQ ID NO: 444861 - RNA, 19 nt, Artificial Sequence
  Description of Artificial Sequence: Synthetic oligonucleotide
  Sense strand starting at position 3391 of SEQ ID NO: 316848
ugcacaguuuggcuacuaa

SEQ ID NO: 444862 - RNA, 19 nt, Artificial Sequence
  Description of Artificial Sequence: Synthetic oligonucleotide
  Antisense Strand to SEQ ID NO: 444861
uuaguagccaaacugugca

SEQ ID NO: 444863 - RNA, 19 nt, Artificial Sequence
  Description of Artificial Sequence: Synthetic oligonucleotide
  Sense strand starting at position 3461 of SEQ ID NO: 316848
agaagacacugucucauua

SEQ ID NO: 444864 - RNA, 19 nt, Artificial Sequence
  Description of Artificial Sequence: Synthetic oligonucleotide
  Antisense Strand to SEQ ID NO: 444863
uaaugagacagugucuucu

SEQ ID NO: 444865 - RNA, 19 nt, Artificial Sequence
  Description of Artificial Sequence: Synthetic oligonucleotide
  Sense strand starting at position 3581 of SEQ ID NO: 316848
ucauaccuauuauugagua

SEQ ID NO: 444866 - RNA, 19 nt, Artificial Sequence
  Description of Artificial Sequence: Synthetic oligonucleotide
  Antisense Strand to SEQ ID NO: 444865
uacucaauaauagguauga

SEQ ID NO: 444867 - RNA, 19 nt, Artificial Sequence
  Description of Artificial Sequence: Synthetic oligonucleotide
  Sense strand starting at position 3585 of SEQ ID NO: 316848
accuauuauugaguacaua

SEQ ID NO: 444868 - RNA, 19 nt, Artificial Sequence
  Description of Artificial Sequence: Synthetic oligonucleotide
  Antisense Strand to SEQ ID NO: 444867
uauguacucaauaauaggu

SEQ ID NO: 444869 - RNA, 19 nt, Artificial Sequence
  Description of Artificial Sequence: Synthetic oligonucleotide
  Sense strand starting at position 3597 of SEQ ID NO: 316848
guacauaauggaugcuuga

SEQ ID NO: 444870 - RNA, 19 nt, Artificial Sequence
  Description of Artificial Sequence: Synthetic oligonucleotide
  Antisense Strand to SEQ ID NO: 444869
ucaagcauccauuauguac

SEQ ID NO: 444871 - RNA, 19 nt, Artificial Sequence
  Description of Artificial Sequence: Synthetic oligonucleotide
  Sense strand starting at position 3600 of SEQ ID NO: 316848
cauaauggaugcuugaguu

SEQ ID NO: 444872 - RNA, 19 nt, Artificial Sequence
  Description of Artificial Sequence: Synthetic oligonucleotide
  Antisense Strand to SEQ ID NO: 444871
aacucaagcauccauuaug

SEQ ID NO: 444873 - RNA, 19 nt, Artificial Sequence
  Description of Artificial Sequence: Synthetic oligonucleotide
  Sense strand starting at position 3606 of SEQ ID NO: 316848
ggaugcuugaguugacuaa

SEQ ID NO: 444874 - RNA, 19 nt, Artificial Sequence
  Description of Artificial Sequence: Synthetic oligonucleotide
  Antisense Strand to SEQ ID NO: 444873
uuagucaacucaagcaucc

SEQ ID NO: 444875 - RNA, 19 nt, Artificial Sequence
  Description of Artificial Sequence: Synthetic oligonucleotide
  Sense strand starting at position 3610 of SEQ ID NO: 316848
gcuugaguugacuaacaca

SEQ ID NO: 444876 - RNA, 19 nt, Artificial Sequence
  Description of Artificial Sequence: Synthetic oligonucleotide
  Antisense Strand to SEQ ID NO: 444875
uguguuagucaacucaagc

SEQ ID NO: 444877 - RNA, 19 nt, Artificial Sequence
  Description of Artificial Sequence: Synthetic oligonucleotide
  Sense strand starting at position 3627 of SEQ ID NO: 316848
cauaauugaggcuguauga

SEQ ID NO: 444878 - RNA, 19 nt, Artificial Sequence
  Description of Artificial Sequence: Synthetic oligonucleotide
  Antisense Strand to SEQ ID NO: 444877
ucauacagccucaauuaug

SEQ ID NO: 444879 - RNA, 19 nt, Artificial Sequence
  Description of Artificial Sequence: Synthetic oligonucleotide
  Sense strand starting at position 3675 of SEQ ID NO: 316848
uuugguuuaccugaauauc

SEQ ID NO: 444880 - RNA, 19 nt, Artificial Sequence
  Description of Artificial Sequence: Synthetic oligonucleotide
  Antisense Strand to SEQ ID NO: 444879
gauauucagguaaaccaaa

SEQ ID NO: 444881 - RNA, 19 nt, Artificial Sequence
  Description of Artificial Sequence: Synthetic oligonucleotide
  Sense strand starting at position 482 of SEQ ID NO: 316849
gaucgaucugaucgcacaa

SEQ ID NO: 444882 - RNA, 19 nt, Artificial Sequence
  Description of Artificial Sequence: Synthetic oligonucleotide
  Antisense Strand to SEQ ID NO: 444881
uugugcgaucagaucgauc

SEQ ID NO: 444883 - RNA, 19 nt, Artificial Sequence
  Description of Artificial Sequence: Synthetic oligonucleotide
  Sense strand starting at position 950 of SEQ ID NO: 316849
uugccuguguguuuauuua

SEQ ID NO: 444884 - RNA, 19 nt, Artificial Sequence
  Description of Artificial Sequence: Synthetic oligonucleotide
  Antisense Strand to SEQ ID NO: 444883
uaaauaaacacacaggcaa

SEQ ID NO: 444885 - RNA, 19 nt, Artificial Sequence
  Description of Artificial Sequence: Synthetic oligonucleotide
  Sense strand starting at position 954 of SEQ ID NO: 316849
cuguguguuuauuuaguuu

SEQ ID NO: 444886 - RNA, 19 nt, Artificial Sequence
  Description of Artificial Sequence: Synthetic oligonucleotide
  Antisense Strand to SEQ ID NO: 444885
aaacuaaauaaacacacag

SEQ ID NO: 444887 - RNA, 19 nt, Artificial Sequence
  Description of Artificial Sequence: Synthetic oligonucleotide
  Sense strand starting at position 1016 of SEQ ID NO: 316849
ggcgaugcagagucguuua

SEQ ID NO: 444888 - RNA, 19 nt, Artificial Sequence
  Description of Artificial Sequence: Synthetic oligonucleotide
  Antisense Strand to SEQ ID NO: 444887
uaaacgacucugcaucgcc

SEQ ID NO: 444889 - RNA, 19 nt, Artificial Sequence
  Description of Artificial Sequence: Synthetic oligonucleotide
  Sense strand starting at position 1021 of SEQ ID NO: 316849
ugcagagucguuuaggcaa

SEQ ID NO: 444890 - RNA, 19 nt, Artificial Sequence
  Description of Artificial Sequence: Synthetic oligonucleotide
  Antisense Strand to SEQ ID NO: 444889
uugccuaaacgacucugca

SEQ ID NO: 444891 - RNA, 19 nt, Artificial Sequence
  Description of Artificial Sequence: Synthetic oligonucleotide
  Sense strand starting at position 1024 of SEQ ID NO: 316849
agagucguuuaggcaauca

SEQ ID NO: 444892 - RNA, 19 nt, Artificial Sequence
  Description of Artificial Sequence: Synthetic oligonucleotide
  Antisense Strand to SEQ ID NO: 444891
ugauugccuaaacgacucu

SEQ ID NO: 444893 - RNA, 19 nt, Artificial Sequence
  Description of Artificial Sequence: Synthetic oligonucleotide
  Sense strand starting at position 1086 of SEQ ID NO: 316849
guugccauuucugcgaaag

SEQ ID NO: 444894 - RNA, 19 nt, Artificial Sequence
  Description of Artificial Sequence: Synthetic oligonucleotide
  Antisense Strand to SEQ ID NO: 444893
cuuucgcagaaauggcaac

SEQ ID NO: 444895 - RNA, 19 nt, Artificial Sequence
  Description of Artificial Sequence: Synthetic oligonucleotide
  Sense strand starting at position 1087 of SEQ ID NO: 316849
uugccauuucugcgaaagg

SEQ ID NO: 444896 - RNA, 19 nt, Artificial Sequence
  Description of Artificial Sequence: Synthetic oligonucleotide
  Antisense Strand to SEQ ID NO: 444895
ccuuucgcagaaauggcaa

SEQ ID NO: 444897 - RNA, 19 nt, Artificial Sequence
  Description of Artificial Sequence: Synthetic oligonucleotide
  Sense strand starting at position 1193 of SEQ ID NO: 316849
uuaagaccucagggcuaaa

SEQ ID NO: 444898 - RNA, 19 nt, Artificial Sequence
  Description of Artificial Sequence: Synthetic oligonucleotide
  Antisense Strand to SEQ ID NO: 444897
uuuagcccugaggucuuaa

SEQ ID NO: 444899 - RNA, 19 nt, Artificial Sequence
  Description of Artificial Sequence: Synthetic oligonucleotide
  Sense strand starting at position 1382 of SEQ ID NO: 316849
gacucuugacguugacuca

SEQ ID NO: 444900 - RNA, 19 nt, Artificial Sequence
  Description of Artificial Sequence: Synthetic oligonucleotide
  Antisense Strand to SEQ ID NO: 444899
ugagucaacgucaagaguc

SEQ ID NO: 444901 - RNA, 19 nt, Artificial Sequence
  Description of Artificial Sequence: Synthetic oligonucleotide
  Sense strand starting at position 1396 of SEQ ID NO: 316849
acucauucuccuuaggcga

SEQ ID NO: 444902 - RNA, 19 nt, Artificial Sequence
  Description of Artificial Sequence: Synthetic oligonucleotide
  Antisense Strand to SEQ ID NO: 444901
ucgccuaaggagaaugagu

SEQ ID NO: 444903 - RNA, 19 nt, Artificial Sequence
  Description of Artificial Sequence: Synthetic oligonucleotide
  Sense strand starting at position 1404 of SEQ ID NO: 316849
uccuuaggcgagugacuua

SEQ ID NO: 444904 - RNA, 19 nt, Artificial Sequence
  Description of Artificial Sequence: Synthetic oligonucleotide
  Antisense Strand to SEQ ID NO: 444903
uaagucacucgccuaagga

SEQ ID NO: 444905 - RNA, 19 nt, Artificial Sequence
  Description of Artificial Sequence: Synthetic oligonucleotide
  Sense strand starting at position 1522 of SEQ ID NO: 316849
ugcaucggacucuagaaau

SEQ ID NO: 444906 - RNA, 19 nt, Artificial Sequence
  Description of Artificial Sequence: Synthetic oligonucleotide
  Antisense Strand to SEQ ID NO: 444905
auuucuagaguccgaugca

SEQ ID NO: 444907 - RNA, 19 nt, Artificial Sequence
  Description of Artificial Sequence: Synthetic oligonucleotide
  Sense strand starting at position 1620 of SEQ ID NO: 316849
ucuguuuacuuuguuugau

SEQ ID NO: 444908 - RNA, 19 nt, Artificial Sequence
  Description of Artificial Sequence: Synthetic oligonucleotide
  Antisense Strand to SEQ ID NO: 444907
aucaaacaaaguaaacaga

SEQ ID NO: 444909 - RNA, 19 nt, Artificial Sequence
  Description of Artificial Sequence: Synthetic oligonucleotide
  Sense strand starting at position 1621 of SEQ ID NO: 316849
cuguuuacuuuguuugauu

SEQ ID NO: 444910 - RNA, 19 nt, Artificial Sequence
  Description of Artificial Sequence: Synthetic oligonucleotide
  Antisense Strand to SEQ ID NO: 444909
aaucaaacaaaguaaacag

SEQ ID NO: 444911 - RNA, 19 nt, Artificial Sequence
  Description of Artificial Sequence: Synthetic oligonucleotide
  Sense strand starting at position 1642 of SEQ ID NO: 316849
gauguacaccaguguaguu

SEQ ID NO: 444912 - RNA, 19 nt, Artificial Sequence
  Description of Artificial Sequence: Synthetic oligonucleotide
  Antisense Strand to SEQ ID NO: 444911
aacuacacugguguacauc

SEQ ID NO: 444913 - RNA, 19 nt, Artificial Sequence
  Description of Artificial Sequence: Synthetic oligonucleotide
  Sense strand starting at position 1696 of SEQ ID NO: 316849
ugcagcugcccucaauaga

SEQ ID NO: 444914 - RNA, 19 nt, Artificial Sequence
  Description of Artificial Sequence: Synthetic oligonucleotide
  Antisense Strand to SEQ ID NO: 444913
ucuauugagggcagcugca

SEQ ID NO: 444915 - RNA, 19 nt, Artificial Sequence
  Description of Artificial Sequence: Synthetic oligonucleotide
  Sense strand starting at position 1809 of SEQ ID NO: 316849
cuaagauacugugcuguca

SEQ ID NO: 444916 - RNA, 19 nt, Artificial Sequence
  Description of Artificial Sequence: Synthetic oligonucleotide
  Antisense Strand to SEQ ID NO: 444915
ugacagcacaguaucuuag

SEQ ID NO: 444917 - RNA, 19 nt, Artificial Sequence
  Description of Artificial Sequence: Synthetic oligonucleotide
  Sense strand starting at position 1848 of SEQ ID NO: 316849
ugcacaguuuggcuacuaa

SEQ ID NO: 444918 - RNA, 19 nt, Artificial Sequence
  Description of Artificial Sequence: Synthetic oligonucleotide
  Antisense Strand to SEQ ID NO: 444917
uuaguagccaaacugugca

SEQ ID NO: 444919 - RNA, 19 nt, Artificial Sequence
  Description of Artificial Sequence: Synthetic oligonucleotide
  Sense strand starting at position 1918 of SEQ ID NO: 316849
agaagacacugucucauua

SEQ ID NO: 444920 - RNA, 19 nt, Artificial Sequence
  Description of Artificial Sequence: Synthetic oligonucleotide
  Antisense Strand to SEQ ID NO: 444919
uaaugagacagugucuucu

SEQ ID NO: 444921 - RNA, 19 nt, Artificial Sequence
  Description of Artificial Sequence: Synthetic oligonucleotide
  Sense strand starting at position 2038 of SEQ ID NO: 316849
ucauaccuauuauugagua

SEQ ID NO: 444922 - RNA, 19 nt, Artificial Sequence
  Description of Artificial Sequence: Synthetic oligonucleotide
  Antisense Strand to SEQ ID NO: 444921
uacucaauaauagguauga

SEQ ID NO: 444923 - RNA, 19 nt, Artificial Sequence
  Description of Artificial Sequence: Synthetic oligonucleotide
  Sense strand starting at position 2042 of SEQ ID NO: 316849
accuauuauugaguacaua

SEQ ID NO: 444924 - RNA, 19 nt, Artificial Sequence
  Description of Artificial Sequence: Synthetic oligonucleotide
  Antisense Strand to SEQ ID NO: 444923
uauguacucaauaauaggu

SEQ ID NO: 444925 - RNA, 19 nt, Artificial Sequence
  Description of Artificial Sequence: Synthetic oligonucleotide
  Sense strand starting at position 2054 of SEQ ID NO: 316849
guacauaauggaugcuuga

SEQ ID NO: 444926 - RNA, 19 nt, Artificial Sequence
  Description of Artificial Sequence: Synthetic oligonucleotide
  Antisense Strand to SEQ ID NO: 444925
ucaagcauccauuauguac

SEQ ID NO: 444927 - RNA, 19 nt, Artificial Sequence
  Description of Artificial Sequence: Synthetic oligonucleotide
  Sense strand starting at position 2057 of SEQ ID NO: 316849
cauaauggaugcuugaguu

SEQ ID NO: 444928 - RNA, 19 nt, Artificial Sequence
  Description of Artificial Sequence: Synthetic oligonucleotide
  Antisense Strand to SEQ ID NO: 444927
aacucaagcauccauuaug

SEQ ID NO: 444929 - RNA, 19 nt, Artificial Sequence
  Description of Artificial Sequence: Synthetic oligonucleotide
  Sense strand starting at position 2063 of SEQ ID NO: 316849
ggaugcuugaguugacuaa

SEQ ID NO: 444930 - RNA, 19 nt, Artificial Sequence
  Description of Artificial Sequence: Synthetic oligonucleotide
  Antisense Strand to SEQ ID NO: 444929
uuagucaacucaagcaucc

SEQ ID NO: 444931 - RNA, 19 nt, Artificial Sequence
  Description of Artificial Sequence: Synthetic oligonucleotide
  Sense strand starting at position 2067 of SEQ ID NO: 316849
gcuugaguugacuaacaca

SEQ ID NO: 444932 - RNA, 19 nt, Artificial Sequence
  Description of Artificial Sequence: Synthetic oligonucleotide
  Antisense Strand to SEQ ID NO: 444931
uguguuagucaacucaagc

SEQ ID NO: 444933 - RNA, 19 nt, Artificial Sequence
  Description of Artificial Sequence: Synthetic oligonucleotide
  Sense strand starting at position 2084 of SEQ ID NO: 316849
cauaauugaggcuguauga

SEQ ID NO: 444934 - RNA, 19 nt, Artificial Sequence
  Description of Artificial Sequence: Synthetic oligonucleotide
  Antisense Strand to SEQ ID NO: 444933
ucauacagccucaauuaug

SEQ ID NO: 444935 - RNA, 19 nt, Artificial Sequence
  Description of Artificial Sequence: Synthetic oligonucleotide
  Sense strand starting at position 2132 of SEQ ID NO: 316849
uuugguuuaccugaauauc

SEQ ID NO: 444936 - RNA, 19 nt, Artificial Sequence
  Description of Artificial Sequence: Synthetic oligonucleotide
  Antisense Strand to SEQ ID NO: 444935
gauauucagguaaaccaaa

SEQ ID NO: 444937 - RNA, 19 nt, Artificial Sequence
  Description of Artificial Sequence: Synthetic oligonucleotide
  Sense strand starting at position 2592 of SEQ ID NO: 316849
ucuguugaccgcguuguua

SEQ ID NO: 444938 - RNA, 19 nt, Artificial Sequence
  Description of Artificial Sequence: Synthetic oligonucleotide
  Antisense Strand to SEQ ID NO: 444937
uaacaacgcggucaacaga

SEQ ID NO: 444939 - RNA, 19 nt, Artificial Sequence
  Description of Artificial Sequence: Synthetic oligonucleotide
  Sense strand starting at position 2618 of SEQ ID NO: 316849
cugguuagaagugguguca

SEQ ID NO: 444940 - RNA, 19 nt, Artificial Sequence
  Description of Artificial Sequence: Synthetic oligonucleotide
  Antisense Strand to SEQ ID NO: 444939
ugacaccacuucuaaccag

SEQ ID NO: 444941 - RNA, 19 nt, Artificial Sequence
  Description of Artificial Sequence: Synthetic oligonucleotide
  Sense strand starting at position 2635 of SEQ ID NO: 316849
cagguuaccuucuuugaag

SEQ ID NO: 444942 - RNA, 19 nt, Artificial Sequence
  Description of Artificial Sequence: Synthetic oligonucleotide
  Antisense Strand to SEQ ID NO: 444941
cuucaaagaagguaaccug

SEQ ID NO: 444943 - RNA, 19 nt, Artificial Sequence
  Description of Artificial Sequence: Synthetic oligonucleotide
  Sense strand starting at position 2636 of SEQ ID NO: 316849
agguuaccuucuuugaaga

SEQ ID NO: 444944 - RNA, 19 nt, Artificial Sequence
  Description of Artificial Sequence: Synthetic oligonucleotide
  Antisense Strand to SEQ ID NO: 444943
ucuucaaagaagguaaccu

SEQ ID NO: 444945 - RNA, 19 nt, Artificial Sequence
  Description of Artificial Sequence: Synthetic oligonucleotide
  Sense strand starting at position 2637 of SEQ ID NO: 316849
gguuaccuucuuugaagag

SEQ ID NO: 444946 - RNA, 19 nt, Artificial Sequence
  Description of Artificial Sequence: Synthetic oligonucleotide
  Antisense Strand to SEQ ID NO: 444945
cucuucaaagaagguaacc

SEQ ID NO: 444947 - RNA, 19 nt, Artificial Sequence
  Description of Artificial Sequence: Synthetic oligonucleotide
  Sense strand starting at position 3197 of SEQ ID NO: 316849
caaugagauuggcaagaaa

SEQ ID NO: 444948 - RNA, 19 nt, Artificial Sequence
  Description of Artificial Sequence: Synthetic oligonucleotide
  Antisense Strand to SEQ ID NO: 444947
uuucuugccaaucucauug

SEQ ID NO: 444949 - RNA, 19 nt, Artificial Sequence
  Description of Artificial Sequence: Synthetic oligonucleotide
  Sense strand starting at position 3227 of SEQ ID NO: 316849
acugaaagccagugauguu

SEQ ID NO: 444950 - RNA, 19 nt, Artificial Sequence
  Description of Artificial Sequence: Synthetic oligonucleotide
  Antisense Strand to SEQ ID NO: 444949
aacaucacuggcuuucagu

SEQ ID NO: 444951 - RNA, 19 nt, Artificial Sequence
  Description of Artificial Sequence: Synthetic oligonucleotide
  Sense strand starting at position 3636 of SEQ ID NO: 316849
ugcucuauucuuuaugguu

SEQ ID NO: 444952 - RNA, 19 nt, Artificial Sequence
  Description of Artificial Sequence: Synthetic oligonucleotide
  Antisense Strand to SEQ ID NO: 444951
aaccauaaagaauagagca

SEQ ID NO: 444953 - RNA, 19 nt, Artificial Sequence
  Description of Artificial Sequence: Synthetic oligonucleotide
  Sense strand starting at position 3651 of SEQ ID NO: 316849
gguuuaguuucuuuccauu

SEQ ID NO: 444954 - RNA, 19 nt, Artificial Sequence
  Description of Artificial Sequence: Synthetic oligonucleotide
  Antisense Strand to SEQ ID NO: 444953
aauggaaagaaacuaaacc

SEQ ID NO: 444955 - RNA, 19 nt, Artificial Sequence
  Description of Artificial Sequence: Synthetic oligonucleotide
  Sense strand starting at position 3776 of SEQ ID NO: 316849
ugugucuuugccuauuuga

SEQ ID NO: 444956 - RNA, 19 nt, Artificial Sequence
  Description of Artificial Sequence: Synthetic oligonucleotide
  Antisense Strand to SEQ ID NO: 444955
ucaaauaggcaaagacaca

SEQ ID NO: 444957 - RNA, 19 nt, Artificial Sequence
  Description of Artificial Sequence: Synthetic oligonucleotide
  Sense strand starting at position 3779 of SEQ ID NO: 316849
gucuuugccuauuugagau

SEQ ID NO: 444958 - RNA, 19 nt, Artificial Sequence
  Description of Artificial Sequence: Synthetic oligonucleotide
  Antisense Strand to SEQ ID NO: 444957
aucucaaauaggcaaagac

SEQ ID NO: 444959 - RNA, 19 nt, Artificial Sequence
  Description of Artificial Sequence: Synthetic oligonucleotide
  Sense strand starting at position 3783 of SEQ ID NO: 316849
uugccuauuugagauucua

SEQ ID NO: 444960 - RNA, 19 nt, Artificial Sequence
  Description of Artificial Sequence: Synthetic oligonucleotide
  Antisense Strand to SEQ ID NO: 444959
uagaaucucaaauaggcaa

SEQ ID NO: 444961 - RNA, 19 nt, Artificial Sequence
  Description of Artificial Sequence: Synthetic oligonucleotide
  Sense strand starting at position 17 of SEQ ID NO: 316850
cugucaaacagauguguuu

SEQ ID NO: 444962 - RNA, 19 nt, Artificial Sequence
  Description of Artificial Sequence: Synthetic oligonucleotide
  Antisense Strand to SEQ ID NO: 444961
aaacacaucuguuugacag

SEQ ID NO: 444963 - RNA, 19 nt, Artificial Sequence
  Description of Artificial Sequence: Synthetic oligonucleotide
  Sense strand starting at position 125 of SEQ ID NO: 316850
uguuguacucaauacauac

SEQ ID NO: 444964 - RNA, 19 nt, Artificial Sequence
  Description of Artificial Sequence: Synthetic oligonucleotide
  Antisense Strand to SEQ ID NO: 444963
guauguauugaguacaaca

SEQ ID NO: 444965 - RNA, 19 nt, Artificial Sequence
  Description of Artificial Sequence: Synthetic oligonucleotide
  Sense strand starting at position 164 of SEQ ID NO: 316850
ccuagagcgcuuccguuaa

SEQ ID NO: 444966 - RNA, 19 nt, Artificial Sequence
  Description of Artificial Sequence: Synthetic oligonucleotide
  Antisense Strand to SEQ ID NO: 444965
uuaacggaagcgcucuagg

SEQ ID NO: 444967 - RNA, 19 nt, Artificial Sequence
  Description of Artificial Sequence: Synthetic oligonucleotide
  Sense strand starting at position 168 of SEQ ID NO: 316850
gagcgcuuccguuaaauuu

SEQ ID NO: 444968 - RNA, 19 nt, Artificial Sequence
  Description of Artificial Sequence: Synthetic oligonucleotide
  Antisense Strand to SEQ ID NO: 444967
aaauuuaacggaagcgcuc

SEQ ID NO: 444969 - RNA, 19 nt, Artificial Sequence
  Description of Artificial Sequence: Synthetic oligonucleotide
  Sense strand starting at position 307 of SEQ ID NO: 316850
gaauuacuguucccugagu

SEQ ID NO: 444970 - RNA, 19 nt, Artificial Sequence
  Description of Artificial Sequence: Synthetic oligonucleotide
  Antisense Strand to SEQ ID NO: 444969
acucagggaacaguaauuc

SEQ ID NO: 444971 - RNA, 19 nt, Artificial Sequence
  Description of Artificial Sequence: Synthetic oligonucleotide
  Sense strand starting at position 309 of SEQ ID NO: 316850
auuacuguucccugaguau

SEQ ID NO: 444972 - RNA, 19 nt, Artificial Sequence
  Description of Artificial Sequence: Synthetic oligonucleotide
  Antisense Strand to SEQ ID NO: 444971
auacucagggaacaguaau

SEQ ID NO: 444973 - RNA, 19 nt, Artificial Sequence
  Description of Artificial Sequence: Synthetic oligonucleotide
  Sense strand starting at position 322 of SEQ ID NO: 316850
gaguauuucucaucgucca

SEQ ID NO: 444974 - RNA, 19 nt, Artificial Sequence
  Description of Artificial Sequence: Synthetic oligonucleotide
  Antisense Strand to SEQ ID NO: 444973
uggacgaugagaaauacuc

SEQ ID NO: 444975 - RNA, 19 nt, Artificial Sequence
  Description of Artificial Sequence: Synthetic oligonucleotide
  Sense strand starting at position 451 of SEQ ID NO: 316850
cugcgcugucugcuauuaa

SEQ ID NO: 444976 - RNA, 19 nt, Artificial Sequence
  Description of Artificial Sequence: Synthetic oligonucleotide
  Antisense Strand to SEQ ID NO: 444975
uuaauagcagacagcgcag

SEQ ID NO: 444977 - RNA, 19 nt, Artificial Sequence
  Description of Artificial Sequence: Synthetic oligonucleotide
  Sense strand starting at position 454 of SEQ ID NO: 316850
cgcugucugcuauuaagca

SEQ ID NO: 444978 - RNA, 19 nt, Artificial Sequence
  Description of Artificial Sequence: Synthetic oligonucleotide
  Antisense Strand to SEQ ID NO: 444977
ugcuuaauagcagacagcg

SEQ ID NO: 444979 - RNA, 19 nt, Artificial Sequence
  Description of Artificial Sequence: Synthetic oligonucleotide
  Sense strand starting at position 654 of SEQ ID NO: 316850
cccagaaaucaacguucua

SEQ ID NO: 444980 - RNA, 19 nt, Artificial Sequence
  Description of Artificial Sequence: Synthetic oligonucleotide
  Antisense Strand to SEQ ID NO: 444979
uagaacguugauuucuggg

SEQ ID NO: 444981 - RNA, 19 nt, Artificial Sequence
  Description of Artificial Sequence: Synthetic oligonucleotide
  Sense strand starting at position 700 of SEQ ID NO: 316850
gaaccagaggccugucaau

SEQ ID NO: 444982 - RNA, 19 nt, Artificial Sequence
  Description of Artificial Sequence: Synthetic oligonucleotide
  Antisense Strand to SEQ ID NO: 444981
auugacaggccucugguuc

SEQ ID NO: 444983 - RNA, 19 nt, Artificial Sequence
  Description of Artificial Sequence: Synthetic oligonucleotide
  Sense strand starting at position 804 of SEQ ID NO: 316850
gagacuucccuagggccaa

SEQ ID NO: 444984 - RNA, 19 nt, Artificial Sequence
  Description of Artificial Sequence: Synthetic oligonucleotide
  Antisense Strand to SEQ ID NO: 444983
uuggcccuagggaagucuc

SEQ ID NO: 444985 - RNA, 19 nt, Artificial Sequence
  Description of Artificial Sequence: Synthetic oligonucleotide
  Sense strand starting at position 996 of SEQ ID NO: 316850
gcagccacccguuaaauga

SEQ ID NO: 444986 - RNA, 19 nt, Artificial Sequence
  Description of Artificial Sequence: Synthetic oligonucleotide
  Antisense Strand to SEQ ID NO: 444985
ucauuuaacggguggcugc

SEQ ID NO: 444987 - RNA, 19 nt, Artificial Sequence
  Description of Artificial Sequence: Synthetic oligonucleotide
  Sense strand starting at position 1046 of SEQ ID NO: 316850
ccgguuacucaacauuauu

SEQ ID NO: 444988 - RNA, 19 nt, Artificial Sequence
  Description of Artificial Sequence: Synthetic oligonucleotide
  Antisense Strand to SEQ ID NO: 444987
aauaauguugaguaaccgg

SEQ ID NO: 444989 - RNA, 19 nt, Artificial Sequence
  Description of Artificial Sequence: Synthetic oligonucleotide
  Sense strand starting at position 1194 of SEQ ID NO: 316850
ugcggaagucauggaauug

SEQ ID NO: 444990 - RNA, 19 nt, Artificial Sequence
  Description of Artificial Sequence: Synthetic oligonucleotide
  Antisense Strand to SEQ ID NO: 444989
caauuccaugacuuccgca

SEQ ID NO: 444991 - RNA, 19 nt, Artificial Sequence
  Description of Artificial Sequence: Synthetic oligonucleotide
  Sense strand starting at position 1195 of SEQ ID NO: 316850
gcggaagucauggaauugu

SEQ ID NO: 444992 - RNA, 19 nt, Artificial Sequence
  Description of Artificial Sequence: Synthetic oligonucleotide
  Antisense Strand to SEQ ID NO: 444991
acaauuccaugacuuccgc

SEQ ID NO: 444993 - RNA, 19 nt, Artificial Sequence
  Description of Artificial Sequence: Synthetic oligonucleotide
  Sense strand starting at position 1505 of SEQ ID NO: 316850
ccggauucgaggcagguua

SEQ ID NO: 444994 - RNA, 19 nt, Artificial Sequence
  Description of Artificial Sequence: Synthetic oligonucleotide
  Antisense Strand to SEQ ID NO: 444993
uaaccugccucgaauccgg

SEQ ID NO: 444995 - RNA, 19 nt, Artificial Sequence
  Description of Artificial Sequence: Synthetic oligonucleotide
  Sense strand starting at position 1513 of SEQ ID NO: 316850
gaggcagguuacucuccaa

SEQ ID NO: 444996 - RNA, 19 nt, Artificial Sequence
  Description of Artificial Sequence: Synthetic oligonucleotide
  Antisense Strand to SEQ ID NO: 444995
uuggagaguaaccugccuc

SEQ ID NO: 444997 - RNA, 19 nt, Artificial Sequence
  Description of Artificial Sequence: Synthetic oligonucleotide
  Sense strand starting at position 1516 of SEQ ID NO: 316850
gcagguuacucuccaaggu

SEQ ID NO: 444998 - RNA, 19 nt, Artificial Sequence
  Description of Artificial Sequence: Synthetic oligonucleotide
  Antisense Strand to SEQ ID NO: 444997
accuuggagaguaaccugc

SEQ ID NO: 444999 - RNA, 19 nt, Artificial Sequence
  Description of Artificial Sequence: Synthetic oligonucleotide
  Sense strand starting at position 1520 of SEQ ID NO: 316850
guuacucuccaaggugauc

SEQ ID NO: 445000 - RNA, 19 nt, Artificial Sequence
  Description of Artificial Sequence: Synthetic oligonucleotide
  Antisense Strand to SEQ ID NO: 444999
gaucaccuuggagaguaac

SEQ ID NO: 445001 - RNA, 19 nt, Artificial Sequence
  Description of Artificial Sequence: Synthetic oligonucleotide
  Sense strand starting at position 1532 of SEQ ID NO: 316850
ggugaucacuuccugauuc

SEQ ID NO: 445002 - RNA, 19 nt, Artificial Sequence
  Description of Artificial Sequence: Synthetic oligonucleotide
  Antisense Strand to SEQ ID NO: 445001
gaaucaggaagugaucacc

SEQ ID NO: 445003 - RNA, 19 nt, Artificial Sequence
  Description of Artificial Sequence: Synthetic oligonucleotide
  Sense strand starting at position 1534 of SEQ ID NO: 316850
ugaucacuuccugauucgu

SEQ ID NO: 445004 - RNA, 19 nt, Artificial Sequence
  Description of Artificial Sequence: Synthetic oligonucleotide
  Antisense Strand to SEQ ID NO: 445003
acgaaucaggaagugauca

SEQ ID NO: 445005 - RNA, 19 nt, Artificial Sequence
  Description of Artificial Sequence: Synthetic oligonucleotide
  Sense strand starting at position 1544 of SEQ ID NO: 316850
cugauucgucgccuccauu

SEQ ID NO: 445006 - RNA, 19 nt, Artificial Sequence
  Description of Artificial Sequence: Synthetic oligonucleotide
  Antisense Strand to SEQ ID NO: 445005
aauggaggcgacgaaucag

SEQ ID NO: 445007 - RNA, 19 nt, Artificial Sequence
  Description of Artificial Sequence: Synthetic oligonucleotide
  Sense strand starting at position 1683 of SEQ ID NO: 316850
caccgaugcacgggagaaa

SEQ ID NO: 445008 - RNA, 19 nt, Artificial Sequence
  Description of Artificial Sequence: Synthetic oligonucleotide
  Antisense Strand to SEQ ID NO: 445007
uuucucccgugcaucggug

SEQ ID NO: 445009 - RNA, 19 nt, Artificial Sequence
  Description of Artificial Sequence: Synthetic oligonucleotide
  Sense strand starting at position 2227 of SEQ ID NO: 316850
ucacgcucugcggaagaaa

SEQ ID NO: 445010 - RNA, 19 nt, Artificial Sequence
  Description of Artificial Sequence: Synthetic oligonucleotide
  Antisense Strand to SEQ ID NO: 445009
uuucuuccgcagagcguga

SEQ ID NO: 445011 - RNA, 19 nt, Artificial Sequence
  Description of Artificial Sequence: Synthetic oligonucleotide
  Sense strand starting at position 2328 of SEQ ID NO: 316850
uguaaauaaagguggcuau

SEQ ID NO: 445012 - RNA, 19 nt, Artificial Sequence
  Description of Artificial Sequence: Synthetic oligonucleotide
  Antisense Strand to SEQ ID NO: 445011
auagccaccuuuauuuaca

SEQ ID NO: 445013 - RNA, 19 nt, Artificial Sequence
  Description of Artificial Sequence: Synthetic oligonucleotide
  Sense strand starting at position 2329 of SEQ ID NO: 316850
guaaauaaagguggcuauu

SEQ ID NO: 445014 - RNA, 19 nt, Artificial Sequence
  Description of Artificial Sequence: Synthetic oligonucleotide
  Antisense Strand to SEQ ID NO: 445013
aauagccaccuuuauuuac

SEQ ID NO: 445015 - RNA, 19 nt, Artificial Sequence
  Description of Artificial Sequence: Synthetic oligonucleotide
  Sense strand starting at position 2455 of SEQ ID NO: 316850
cugaaagcauuacuuggaa

SEQ ID NO: 445016 - RNA, 19 nt, Artificial Sequence
  Description of Artificial Sequence: Synthetic oligonucleotide
  Antisense Strand to SEQ ID NO: 445015
uuccaaguaaugcuuucag

SEQ ID NO: 445017 - RNA, 19 nt, Artificial Sequence
  Description of Artificial Sequence: Synthetic oligonucleotide
  Sense strand starting at position 2638 of SEQ ID NO: 316850
cuguuuggcucacuuggaa

SEQ ID NO: 445018 - RNA, 19 nt, Artificial Sequence
  Description of Artificial Sequence: Synthetic oligonucleotide
  Antisense Strand to SEQ ID NO: 445017
uuccaagugagccaaacag

SEQ ID NO: 445019 - RNA, 19 nt, Artificial Sequence
  Description of Artificial Sequence: Synthetic oligonucleotide
  Sense strand starting at position 2871 of SEQ ID NO: 316850
guuugaaacaaaggguuau

SEQ ID NO: 445020 - RNA, 19 nt, Artificial Sequence
  Description of Artificial Sequence: Synthetic oligonucleotide
  Antisense Strand to SEQ ID NO: 445019
auaacccuuuguuucaaac

SEQ ID NO: 445021 - RNA, 19 nt, Artificial Sequence
  Description of Artificial Sequence: Synthetic oligonucleotide
  Sense strand starting at position 3026 of SEQ ID NO: 316850
uccgaauugacugaacugu

SEQ ID NO: 445022 - RNA, 19 nt, Artificial Sequence
  Description of Artificial Sequence: Synthetic oligonucleotide
  Antisense Strand to SEQ ID NO: 445021
acaguucagucaauucgga

SEQ ID NO: 445023 - RNA, 19 nt, Artificial Sequence
  Description of Artificial Sequence: Synthetic oligonucleotide
  Sense strand starting at position 3072 of SEQ ID NO: 316850
auauuaaugcgauaucauc

SEQ ID NO: 445024 - RNA, 19 nt, Artificial Sequence
  Description of Artificial Sequence: Synthetic oligonucleotide
  Antisense Strand to SEQ ID NO: 445023
gaugauaucgcauuaauau

SEQ ID NO: 445025 - RNA, 19 nt, Artificial Sequence
  Description of Artificial Sequence: Synthetic oligonucleotide
  Sense strand starting at position 3108 of SEQ ID NO: 316850
acaugagugcagcaucaga

SEQ ID NO: 445026 - RNA, 19 nt, Artificial Sequence
  Description of Artificial Sequence: Synthetic oligonucleotide
  Antisense Strand to SEQ ID NO: 445025
ucugaugcugcacucaugu

SEQ ID NO: 445027 - RNA, 19 nt, Artificial Sequence
  Description of Artificial Sequence: Synthetic oligonucleotide
  Sense strand starting at position 3280 of SEQ ID NO: 316850
aggaucucuuucuugaauu

SEQ ID NO: 445028 - RNA, 19 nt, Artificial Sequence
  Description of Artificial Sequence: Synthetic oligonucleotide
  Antisense Strand to SEQ ID NO: 445027
aauucaagaaagagauccu

SEQ ID NO: 445029 - RNA, 19 nt, Artificial Sequence
  Description of Artificial Sequence: Synthetic oligonucleotide
  Sense strand starting at position 3310 of SEQ ID NO: 316850
ccauguaugggacauggua

SEQ ID NO: 445030 - RNA, 19 nt, Artificial Sequence
  Description of Artificial Sequence: Synthetic oligonucleotide
  Antisense Strand to SEQ ID NO: 445029
uaccaugucccauacaugg

SEQ ID NO: 445031 - RNA, 19 nt, Artificial Sequence
  Description of Artificial Sequence: Synthetic oligonucleotide
  Sense strand starting at position 3485 of SEQ ID NO: 316850
uccagcuaguuauuagaga

SEQ ID NO: 445032 - RNA, 19 nt, Artificial Sequence
  Description of Artificial Sequence: Synthetic oligonucleotide
  Antisense Strand to SEQ ID NO: 445031
ucucuaauaacuagcugga

SEQ ID NO: 445033 - RNA, 19 nt, Artificial Sequence
  Description of Artificial Sequence: Synthetic oligonucleotide
  Sense strand starting at position 3774 of SEQ ID NO: 316850
agaagugaaugagagaaua

SEQ ID NO: 445034 - RNA, 19 nt, Artificial Sequence
  Description of Artificial Sequence: Synthetic oligonucleotide
  Antisense Strand to SEQ ID NO: 445033
uauucucucauucacuucu

SEQ ID NO: 445035 - RNA, 19 nt, Artificial Sequence
  Description of Artificial Sequence: Synthetic oligonucleotide
  Sense strand starting at position 3955 of SEQ ID NO: 316850
uaaagcuuggucugucaac

SEQ ID NO: 445036 - RNA, 19 nt, Artificial Sequence
  Description of Artificial Sequence: Synthetic oligonucleotide
  Antisense Strand to SEQ ID NO: 445035
guugacagaccaagcuuua

SEQ ID NO: 445037 - RNA, 19 nt, Artificial Sequence
  Description of Artificial Sequence: Synthetic oligonucleotide
  Sense strand starting at position 3956 of SEQ ID NO: 316850
aaagcuuggucugucaaca

SEQ ID NO: 445038 - RNA, 19 nt, Artificial Sequence
  Description of Artificial Sequence: Synthetic oligonucleotide
  Antisense Strand to SEQ ID NO: 445037
uguugacagaccaagcuuu

SEQ ID NO: 445039 - RNA, 19 nt, Artificial Sequence
  Description of Artificial Sequence: Synthetic oligonucleotide
  Sense strand starting at position 3961 of SEQ ID NO: 316850
uuggucugucaacaucaga

SEQ ID NO: 445040 - RNA, 19 nt, Artificial Sequence
  Description of Artificial Sequence: Synthetic oligonucleotide
  Antisense Strand to SEQ ID NO: 445039
ucugauguugacagaccaa

SEQ ID NO: 445041 - RNA, 19 nt, Artificial Sequence
  Description of Artificial Sequence: Synthetic oligonucleotide
  Sense strand starting at position 17 of SEQ ID NO: 316851
ggauacacgacauguacau

SEQ ID NO: 445042 - RNA, 19 nt, Artificial Sequence
  Description of Artificial Sequence: Synthetic oligonucleotide
  Antisense Strand to SEQ ID NO: 445041
auguacaugucguguaucc

SEQ ID NO: 445043 - RNA, 19 nt, Artificial Sequence
  Description of Artificial Sequence: Synthetic oligonucleotide
  Sense strand starting at position 21 of SEQ ID NO: 316851
acacgacauguacauguau

SEQ ID NO: 445044 - RNA, 19 nt, Artificial Sequence
  Description of Artificial Sequence: Synthetic oligonucleotide
  Antisense Strand to SEQ ID NO: 445043
auacauguacaugucgugu

SEQ ID NO: 445045 - RNA, 19 nt, Artificial Sequence
  Description of Artificial Sequence: Synthetic oligonucleotide
  Sense strand starting at position 103 of SEQ ID NO: 316851
ugcacaaauuucuaugaag

SEQ ID NO: 445046 - RNA, 19 nt, Artificial Sequence
  Description of Artificial Sequence: Synthetic oligonucleotide
  Antisense Strand to SEQ ID NO: 445045
cuucauagaaauuugugca

SEQ ID NO: 445047 - RNA, 19 nt, Artificial Sequence
  Description of Artificial Sequence: Synthetic oligonucleotide
  Sense strand starting at position 164 of SEQ ID NO: 316851
ucuacuccauugcuggaaa

SEQ ID NO: 445048 - RNA, 19 nt, Artificial Sequence
  Description of Artificial Sequence: Synthetic oligonucleotide
  Antisense Strand to SEQ ID NO: 445047
uuuccagcaauggaguaga

SEQ ID NO: 445049 - RNA, 19 nt, Artificial Sequence
  Description of Artificial Sequence: Synthetic oligonucleotide
  Sense strand starting at position 167 of SEQ ID NO: 316851
acuccauugcuggaaagcu

SEQ ID NO: 445050 - RNA, 19 nt, Artificial Sequence
  Description of Artificial Sequence: Synthetic oligonucleotide
  Antisense Strand to SEQ ID NO: 445049
agcuuuccagcaauggagu

SEQ ID NO: 445051 - RNA, 19 nt, Artificial Sequence
  Description of Artificial Sequence: Synthetic oligonucleotide
  Sense strand starting at position 223 of SEQ ID NO: 316851
cauuguuauucccugagga

SEQ ID NO: 445052 - RNA, 19 nt, Artificial Sequence
  Description of Artificial Sequence: Synthetic oligonucleotide
  Antisense Strand to SEQ ID NO: 445051
uccucagggaauaacaaug

SEQ ID NO: 445053 - RNA, 19 nt, Artificial Sequence
  Description of Artificial Sequence: Synthetic oligonucleotide
  Sense strand starting at position 224 of SEQ ID NO: 316851
auuguuauucccugaggaa

SEQ ID NO: 445054 - RNA, 19 nt, Artificial Sequence
  Description of Artificial Sequence: Synthetic oligonucleotide
  Antisense Strand to SEQ ID NO: 445053
uuccucagggaauaacaau

SEQ ID NO: 445055 - RNA, 19 nt, Artificial Sequence
  Description of Artificial Sequence: Synthetic oligonucleotide
  Sense strand starting at position 294 of SEQ ID NO: 316851
uguuauagguuugcauuau

SEQ ID NO: 445056 - RNA, 19 nt, Artificial Sequence
  Description of Artificial Sequence: Synthetic oligonucleotide
  Antisense Strand to SEQ ID NO: 445055
auaaugcaaaccuauaaca

SEQ ID NO: 445057 - RNA, 19 nt, Artificial Sequence
  Description of Artificial Sequence: Synthetic oligonucleotide
  Sense strand starting at position 298 of SEQ ID NO: 316851
auagguuugcauuaucaug

SEQ ID NO: 445058 - RNA, 19 nt, Artificial Sequence
  Description of Artificial Sequence: Synthetic oligonucleotide
  Antisense Strand to SEQ ID NO: 445057
caugauaaugcaaaccuau

SEQ ID NO: 445059 - RNA, 19 nt, Artificial Sequence
  Description of Artificial Sequence: Synthetic oligonucleotide
  Sense strand starting at position 300 of SEQ ID NO: 316851
agguuugcauuaucauguu

SEQ ID NO: 445060 - RNA, 19 nt, Artificial Sequence
  Description of Artificial Sequence: Synthetic oligonucleotide
  Antisense Strand to SEQ ID NO: 445059
aacaugauaaugcaaaccu

SEQ ID NO: 445061 - RNA, 19 nt, Artificial Sequence
  Description of Artificial Sequence: Synthetic oligonucleotide
  Sense strand starting at position 541 of SEQ ID NO: 316851
acauucugcuucuuaagag

SEQ ID NO: 445062 - RNA, 19 nt, Artificial Sequence
  Description of Artificial Sequence: Synthetic oligonucleotide
  Antisense Strand to SEQ ID NO: 445061
cucuuaagaagcagaaugu

SEQ ID NO: 445063 - RNA, 19 nt, Artificial Sequence
  Description of Artificial Sequence: Synthetic oligonucleotide
  Sense strand starting at position 551 of SEQ ID NO: 316851
ucuuaagaguuaguaauca

SEQ ID NO: 445064 - RNA, 19 nt, Artificial Sequence
  Description of Artificial Sequence: Synthetic oligonucleotide
  Antisense Strand to SEQ ID NO: 445063
ugauuacuaacucuuaaga

SEQ ID NO: 445065 - RNA, 19 nt, Artificial Sequence
  Description of Artificial Sequence: Synthetic oligonucleotide
  Sense strand starting at position 555 of SEQ ID NO: 316851
aagaguuaguaaucaaguu

SEQ ID NO: 445066 - RNA, 19 nt, Artificial Sequence
  Description of Artificial Sequence: Synthetic oligonucleotide
  Antisense Strand to SEQ ID NO: 445065
aacuugauuacuaacucuu

SEQ ID NO: 445067 - RNA, 19 nt, Artificial Sequence
  Description of Artificial Sequence: Synthetic oligonucleotide
  Sense strand starting at position 672 of SEQ ID NO: 316851
uggcucacgccuguauauu

SEQ ID NO: 445068 - RNA, 19 nt, Artificial Sequence
  Description of Artificial Sequence: Synthetic oligonucleotide
  Antisense Strand to SEQ ID NO: 445067
aauauacaggcgugagcca

SEQ ID NO: 445069 - RNA, 19 nt, Artificial Sequence
  Description of Artificial Sequence: Synthetic oligonucleotide
  Sense strand starting at position 1219 of SEQ ID NO: 316851
acaggaacuguauguaaga

SEQ ID NO: 445070 - RNA, 19 nt, Artificial Sequence
  Description of Artificial Sequence: Synthetic oligonucleotide
  Antisense Strand to SEQ ID NO: 445069
ucuuacauacaguuccugu

SEQ ID NO: 445071 - RNA, 19 nt, Artificial Sequence
  Description of Artificial Sequence: Synthetic oligonucleotide
  Sense strand starting at position 1289 of SEQ ID NO: 316851
guaguuaccacuuggaaug

SEQ ID NO: 445072 - RNA, 19 nt, Artificial Sequence
  Description of Artificial Sequence: Synthetic oligonucleotide
  Antisense Strand to SEQ ID NO: 445071
cauuccaagugguaacuac

SEQ ID NO: 445073 - RNA, 19 nt, Artificial Sequence
  Description of Artificial Sequence: Synthetic oligonucleotide
  Sense strand starting at position 1611 of SEQ ID NO: 316851
aguauauaguucccauaaa

SEQ ID NO: 445074 - RNA, 19 nt, Artificial Sequence
  Description of Artificial Sequence: Synthetic oligonucleotide
  Antisense Strand to SEQ ID NO: 445073
uuuaugggaacuauauacu

SEQ ID NO: 445075 - RNA, 19 nt, Artificial Sequence
  Description of Artificial Sequence: Synthetic oligonucleotide
  Sense strand starting at position 1641 of SEQ ID NO: 316851
auauuaugcccuuguauua

SEQ ID NO: 445076 - RNA, 19 nt, Artificial Sequence
  Description of Artificial Sequence: Synthetic oligonucleotide
  Antisense Strand to SEQ ID NO: 445075
uaauacaagggcauaauau

SEQ ID NO: 445077 - RNA, 19 nt, Artificial Sequence
  Description of Artificial Sequence: Synthetic oligonucleotide
  Sense strand starting at position 1657 of SEQ ID NO: 316851
uuauguuugccugcuggca

SEQ ID NO: 445078 - RNA, 19 nt, Artificial Sequence
  Description of Artificial Sequence: Synthetic oligonucleotide
  Antisense Strand to SEQ ID NO: 445077
ugccagcaggcaaacauaa

SEQ ID NO: 445079 - RNA, 19 nt, Artificial Sequence
  Description of Artificial Sequence: Synthetic oligonucleotide
  Sense strand starting at position 1658 of SEQ ID NO: 316851
uauguuugccugcuggcaa

SEQ ID NO: 445080 - RNA, 19 nt, Artificial Sequence
  Description of Artificial Sequence: Synthetic oligonucleotide
  Antisense Strand to SEQ ID NO: 445079
uugccagcaggcaaacaua

SEQ ID NO: 445081 - RNA, 19 nt, Artificial Sequence
  Description of Artificial Sequence: Synthetic oligonucleotide
  Sense strand starting at position 1759 of SEQ ID NO: 316851
ucaucuuacugaucaguac

SEQ ID NO: 445082 - RNA, 19 nt, Artificial Sequence
  Description of Artificial Sequence: Synthetic oligonucleotide
  Antisense Strand to SEQ ID NO: 445081
guacugaucaguaagauga

SEQ ID NO: 445083 - RNA, 19 nt, Artificial Sequence
  Description of Artificial Sequence: Synthetic oligonucleotide
  Sense strand starting at position 1762 of SEQ ID NO: 316851
ucuuacugaucaguacuau

SEQ ID NO: 445084 - RNA, 19 nt, Artificial Sequence
  Description of Artificial Sequence: Synthetic oligonucleotide
  Antisense Strand to SEQ ID NO: 445083
auaguacugaucaguaaga

SEQ ID NO: 445085 - RNA, 19 nt, Artificial Sequence
  Description of Artificial Sequence: Synthetic oligonucleotide
  Sense strand starting at position 1763 of SEQ ID NO: 316851
cuuacugaucaguacuauu

SEQ ID NO: 445086 - RNA, 19 nt, Artificial Sequence
  Description of Artificial Sequence: Synthetic oligonucleotide
  Antisense Strand to SEQ ID NO: 445085
aauaguacugaucaguaag

SEQ ID NO: 445087 - RNA, 19 nt, Artificial Sequence
  Description of Artificial Sequence: Synthetic oligonucleotide
  Sense strand starting at position 1816 of SEQ ID NO: 316851
acagaaagucuuuguaucu

SEQ ID NO: 445088 - RNA, 19 nt, Artificial Sequence
  Description of Artificial Sequence: Synthetic oligonucleotide
  Antisense Strand to SEQ ID NO: 445087
agauacaaagacuuucugu

SEQ ID NO: 445089 - RNA, 19 nt, Artificial Sequence
  Description of Artificial Sequence: Synthetic oligonucleotide
  Sense strand starting at position 1940 of SEQ ID NO: 316851
uuguauguuaaguagucua

SEQ ID NO: 445090 - RNA, 19 nt, Artificial Sequence
  Description of Artificial Sequence: Synthetic oligonucleotide
  Antisense Strand to SEQ ID NO: 445089
uagacuacuuaacauacaa

SEQ ID NO: 445091 - RNA, 19 nt, Artificial Sequence
  Description of Artificial Sequence: Synthetic oligonucleotide
  Sense strand starting at position 1945 of SEQ ID NO: 316851
uguuaaguagucuaagcau

SEQ ID NO: 445092 - RNA, 19 nt, Artificial Sequence
  Description of Artificial Sequence: Synthetic oligonucleotide
  Antisense Strand to SEQ ID NO: 445091
augcuuagacuacuuaaca

SEQ ID NO: 445093 - RNA, 19 nt, Artificial Sequence
  Description of Artificial Sequence: Synthetic oligonucleotide
  Sense strand starting at position 2004 of SEQ ID NO: 316851
accaguaguucuuuggaac

SEQ ID NO: 445094 - RNA, 19 nt, Artificial Sequence
  Description of Artificial Sequence: Synthetic oligonucleotide
  Antisense Strand to SEQ ID NO: 445093
guuccaaagaacuacuggu

SEQ ID NO: 445095 - RNA, 19 nt, Artificial Sequence
  Description of Artificial Sequence: Synthetic oligonucleotide
  Sense strand starting at position 2005 of SEQ ID NO: 316851
ccaguaguucuuuggaacu

SEQ ID NO: 445096 - RNA, 19 nt, Artificial Sequence
  Description of Artificial Sequence: Synthetic oligonucleotide
  Antisense Strand to SEQ ID NO: 445095
aguuccaaagaacuacugg

SEQ ID NO: 445097 - RNA, 19 nt, Artificial Sequence
  Description of Artificial Sequence: Synthetic oligonucleotide
  Sense strand starting at position 2274 of SEQ ID NO: 316851
gccuaugcuccauauuaug

SEQ ID NO: 445098 - RNA, 19 nt, Artificial Sequence
  Description of Artificial Sequence: Synthetic oligonucleotide
  Antisense Strand to SEQ ID NO: 445097
cauaauauggagcauaggc

SEQ ID NO: 445099 - RNA, 19 nt, Artificial Sequence
  Description of Artificial Sequence: Synthetic oligonucleotide
  Sense strand starting at position 2284 of SEQ ID NO: 316851
cauauuaugggcugcauuu

SEQ ID NO: 445100 - RNA, 19 nt, Artificial Sequence
  Description of Artificial Sequence: Synthetic oligonucleotide
  Antisense Strand to SEQ ID NO: 445099
aaaugcagcccauaauaug

SEQ ID NO: 445101 - RNA, 19 nt, Artificial Sequence
  Description of Artificial Sequence: Synthetic oligonucleotide
  Sense strand starting at position 2607 of SEQ ID NO: 316851
ccaugcucaggucaguauu

SEQ ID NO: 445102 - RNA, 19 nt, Artificial Sequence
  Description of Artificial Sequence: Synthetic oligonucleotide
  Antisense Strand to SEQ ID NO: 445101
aauacugaccugagcaugg

SEQ ID NO: 445103 - RNA, 19 nt, Artificial Sequence
  Description of Artificial Sequence: Synthetic oligonucleotide
  Sense strand starting at position 2670 of SEQ ID NO: 316851
uacccagucugaucuggaa

SEQ ID NO: 445104 - RNA, 19 nt, Artificial Sequence
  Description of Artificial Sequence: Synthetic oligonucleotide
  Antisense Strand to SEQ ID NO: 445103
uuccagaucagacugggua

SEQ ID NO: 445105 - RNA, 19 nt, Artificial Sequence
  Description of Artificial Sequence: Synthetic oligonucleotide
  Sense strand starting at position 2735 of SEQ ID NO: 316851
uuagacauguuccugcuau

SEQ ID NO: 445106 - RNA, 19 nt, Artificial Sequence
  Description of Artificial Sequence: Synthetic oligonucleotide
  Antisense Strand to SEQ ID NO: 445105
auagcaggaacaugucuaa

SEQ ID NO: 445107 - RNA, 19 nt, Artificial Sequence
  Description of Artificial Sequence: Synthetic oligonucleotide
  Sense strand starting at position 3355 of SEQ ID NO: 316851
ucagguaaguuucuagaua

SEQ ID NO: 445108 - RNA, 19 nt, Artificial Sequence
  Description of Artificial Sequence: Synthetic oligonucleotide
  Antisense Strand to SEQ ID NO: 445107
uaucuagaaacuuaccuga

SEQ ID NO: 445109 - RNA, 19 nt, Artificial Sequence
  Description of Artificial Sequence: Synthetic oligonucleotide
  Sense strand starting at position 3477 of SEQ ID NO: 316851
acuaaauucugcuuguaga

SEQ ID NO: 445110 - RNA, 19 nt, Artificial Sequence
  Description of Artificial Sequence: Synthetic oligonucleotide
  Antisense Strand to SEQ ID NO: 445109
ucuacaagcagaauuuagu

SEQ ID NO: 445111 - RNA, 19 nt, Artificial Sequence
  Description of Artificial Sequence: Synthetic oligonucleotide
  Sense strand starting at position 3478 of SEQ ID NO: 316851
cuaaauucugcuuguagaa

SEQ ID NO: 445112 - RNA, 19 nt, Artificial Sequence
  Description of Artificial Sequence: Synthetic oligonucleotide
  Antisense Strand to SEQ ID NO: 445111
uucuacaagcagaauuuag

SEQ ID NO: 445113 - RNA, 19 nt, Artificial Sequence
  Description of Artificial Sequence: Synthetic oligonucleotide
  Sense strand starting at position 3487 of SEQ ID NO: 316851
gcuuguagaauccaaugga

SEQ ID NO: 445114 - RNA, 19 nt, Artificial Sequence
  Description of Artificial Sequence: Synthetic oligonucleotide
  Antisense Strand to SEQ ID NO: 445113
uccauuggauucuacaagc

SEQ ID NO: 445115 - RNA, 19 nt, Artificial Sequence
  Description of Artificial Sequence: Synthetic oligonucleotide
  Sense strand starting at position 3490 of SEQ ID NO: 316851
uguagaauccaauggauac

SEQ ID NO: 445116 - RNA, 19 nt, Artificial Sequence
  Description of Artificial Sequence: Synthetic oligonucleotide
  Antisense Strand to SEQ ID NO: 445115
guauccauuggauucuaca

SEQ ID NO: 445117 - RNA, 19 nt, Artificial Sequence
  Description of Artificial Sequence: Synthetic oligonucleotide
  Sense strand starting at position 3541 of SEQ ID NO: 316851
agcaucugacacuguuaau

SEQ ID NO: 445118 - RNA, 19 nt, Artificial Sequence
  Description of Artificial Sequence: Synthetic oligonucleotide
  Antisense Strand to SEQ ID NO: 445117
auuaacagugucagaugcu

SEQ ID NO: 445119 - RNA, 19 nt, Artificial Sequence
  Description of Artificial Sequence: Synthetic oligonucleotide
  Sense strand starting at position 3812 of SEQ ID NO: 316851
ucauguuacguagggacau

SEQ ID NO: 445120 - RNA, 19 nt, Artificial Sequence
  Description of Artificial Sequence: Synthetic oligonucleotide
  Antisense Strand to SEQ ID NO: 445119
augucccuacguaacauga

SEQ ID NO: 445121 - RNA, 19 nt, Artificial Sequence
  Description of Artificial Sequence: Synthetic oligonucleotide
  Sense strand starting at position 113 of SEQ ID NO: 316852
gguauuggacagugagaau

SEQ ID NO: 445122 - RNA, 19 nt, Artificial Sequence
  Description of Artificial Sequence: Synthetic oligonucleotide
  Antisense Strand to SEQ ID NO: 445121
auucucacuguccaauacc

SEQ ID NO: 445123 - RNA, 19 nt, Artificial Sequence
  Description of Artificial Sequence: Synthetic oligonucleotide
  Sense strand starting at position 122 of SEQ ID NO: 316852
cagugagaaugagucuaau

SEQ ID NO: 445124 - RNA, 19 nt, Artificial Sequence
  Description of Artificial Sequence: Synthetic oligonucleotide
  Antisense Strand to SEQ ID NO: 445123
auuagacucauucucacug

SEQ ID NO: 445125 - RNA, 19 nt, Artificial Sequence
  Description of Artificial Sequence: Synthetic oligonucleotide
  Sense strand starting at position 289 of SEQ ID NO: 316852
gggauuauguaaguauaga

SEQ ID NO: 445126 - RNA, 19 nt, Artificial Sequence
  Description of Artificial Sequence: Synthetic oligonucleotide
  Antisense Strand to SEQ ID NO: 445125
ucuauacuuacauaauccc

SEQ ID NO: 445127 - RNA, 19 nt, Artificial Sequence
  Description of Artificial Sequence: Synthetic oligonucleotide
  Sense strand starting at position 369 of SEQ ID NO: 316852
gccagagaauucuuuccac

SEQ ID NO: 445128 - RNA, 19 nt, Artificial Sequence
  Description of Artificial Sequence: Synthetic oligonucleotide
  Antisense Strand to SEQ ID NO: 445127
guggaaagaauucucuggc

SEQ ID NO: 445129 - RNA, 19 nt, Artificial Sequence
  Description of Artificial Sequence: Synthetic oligonucleotide
  Sense strand starting at position 482 of SEQ ID NO: 316852
uuaagugacuugucaggau

SEQ ID NO: 445130 - RNA, 19 nt, Artificial Sequence
  Description of Artificial Sequence: Synthetic oligonucleotide
  Antisense Strand to SEQ ID NO: 445129
auccugacaagucacuuaa

SEQ ID NO: 445131 - RNA, 19 nt, Artificial Sequence
  Description of Artificial Sequence: Synthetic oligonucleotide
  Sense strand starting at position 766 of SEQ ID NO: 316852
gcuuaaugaccuuaaacug

SEQ ID NO: 445132 - RNA, 19 nt, Artificial Sequence
  Description of Artificial Sequence: Synthetic oligonucleotide
  Antisense Strand to SEQ ID NO: 445131
caguuuaaggucauuaagc

SEQ ID NO: 445133 - RNA, 19 nt, Artificial Sequence
  Description of Artificial Sequence: Synthetic oligonucleotide
  Sense strand starting at position 1183 of SEQ ID NO: 316852
uggauaauucguuacaacu

SEQ ID NO: 445134 - RNA, 19 nt, Artificial Sequence
  Description of Artificial Sequence: Synthetic oligonucleotide
  Antisense Strand to SEQ ID NO: 445133
aguuguaacgaauuaucca

SEQ ID NO: 445135 - RNA, 19 nt, Artificial Sequence
  Description of Artificial Sequence: Synthetic oligonucleotide
  Sense strand starting at position 1211 of SEQ ID NO: 316852
aggugaugccagcaaauaa

SEQ ID NO: 445136 - RNA, 19 nt, Artificial Sequence
  Description of Artificial Sequence: Synthetic oligonucleotide
  Antisense Strand to SEQ ID NO: 445135
uuauuugcuggcaucaccu

SEQ ID NO: 445137 - RNA, 19 nt, Artificial Sequence
  Description of Artificial Sequence: Synthetic oligonucleotide
  Sense strand starting at position 1252 of SEQ ID NO: 316852
caaguugaacacugaguau

SEQ ID NO: 445138 - RNA, 19 nt, Artificial Sequence
  Description of Artificial Sequence: Synthetic oligonucleotide
  Antisense Strand to SEQ ID NO: 445137
auacucaguguucaacuug

SEQ ID NO: 445139 - RNA, 19 nt, Artificial Sequence
  Description of Artificial Sequence: Synthetic oligonucleotide
  Sense strand starting at position 1255 of SEQ ID NO: 316852
guugaacacugaguauaua

SEQ ID NO: 445140 - RNA, 19 nt, Artificial Sequence
  Description of Artificial Sequence: Synthetic oligonucleotide
  Antisense Strand to SEQ ID NO: 445139
uauauacucaguguucaac

SEQ ID NO: 445141 - RNA, 19 nt, Artificial Sequence
  Description of Artificial Sequence: Synthetic oligonucleotide
  Sense strand starting at position 1348 of SEQ ID NO: 316852
guacacacucgauacaacu

SEQ ID NO: 445142 - RNA, 19 nt, Artificial Sequence
  Description of Artificial Sequence: Synthetic oligonucleotide
  Antisense Strand to SEQ ID NO: 445141
aguuguaucgaguguguac

SEQ ID NO: 445143 - RNA, 19 nt, Artificial Sequence
  Description of Artificial Sequence: Synthetic oligonucleotide
  Sense strand starting at position 1576 of SEQ ID NO: 316852
cuggguugaucauuaucuu

SEQ ID NO: 445144 - RNA, 19 nt, Artificial Sequence
  Description of Artificial Sequence: Synthetic oligonucleotide
  Antisense Strand to SEQ ID NO: 445143
aagauaaugaucaacccag

SEQ ID NO: 445145 - RNA, 19 nt, Artificial Sequence
  Description of Artificial Sequence: Synthetic oligonucleotide
  Sense strand starting at position 1579 of SEQ ID NO: 316852
gguugaucauuaucuugaa

SEQ ID NO: 445146 - RNA, 19 nt, Artificial Sequence
  Description of Artificial Sequence: Synthetic oligonucleotide
  Antisense Strand to SEQ ID NO: 445145
uucaagauaaugaucaacc

SEQ ID NO: 445147 - RNA, 19 nt, Artificial Sequence
  Description of Artificial Sequence: Synthetic oligonucleotide
  Sense strand starting at position 1580 of SEQ ID NO: 316852
guugaucauuaucuugaaa

SEQ ID NO: 445148 - RNA, 19 nt, Artificial Sequence
  Description of Artificial Sequence: Synthetic oligonucleotide
  Antisense Strand to SEQ ID NO: 445147
uuucaagauaaugaucaac

SEQ ID NO: 445149 - RNA, 19 nt, Artificial Sequence
  Description of Artificial Sequence: Synthetic oligonucleotide
  Sense strand starting at position 1606 of SEQ ID NO: 316852
caucuaguccgcgcucauu

SEQ ID NO: 445150 - RNA, 19 nt, Artificial Sequence
  Description of Artificial Sequence: Synthetic oligonucleotide
  Antisense Strand to SEQ ID NO: 445149
aaugagcgcggacuagaug

SEQ ID NO: 445151 - RNA, 19 nt, Artificial Sequence
  Description of Artificial Sequence: Synthetic oligonucleotide
  Sense strand starting at position 2116 of SEQ ID NO: 316852
gcgcgagggcucagauacu

SEQ ID NO: 445152 - RNA, 19 nt, Artificial Sequence
  Description of Artificial Sequence: Synthetic oligonucleotide
  Antisense Strand to SEQ ID NO: 445151
aguaucugagcccucgcgc

SEQ ID NO: 445153 - RNA, 19 nt, Artificial Sequence
  Description of Artificial Sequence: Synthetic oligonucleotide
  Sense strand starting at position 2292 of SEQ ID NO: 316852
gaagaaacccugugcuuac

SEQ ID NO: 445154 - RNA, 19 nt, Artificial Sequence
  Description of Artificial Sequence: Synthetic oligonucleotide
  Antisense Strand to SEQ ID NO: 445153
guaagcacaggguuucuuc

SEQ ID NO: 445155 - RNA, 19 nt, Artificial Sequence
  Description of Artificial Sequence: Synthetic oligonucleotide
  Sense strand starting at position 2358 of SEQ ID NO: 316852
aucuuaauucugugaagua

SEQ ID NO: 445156 - RNA, 19 nt, Artificial Sequence
  Description of Artificial Sequence: Synthetic oligonucleotide
  Antisense Strand to SEQ ID NO: 445155
uacuucacagaauuaagau

SEQ ID NO: 445157 - RNA, 19 nt, Artificial Sequence
  Description of Artificial Sequence: Synthetic oligonucleotide
  Sense strand starting at position 2390 of SEQ ID NO: 316852
ccacuuuaugcacgagaaa

SEQ ID NO: 445158 - RNA, 19 nt, Artificial Sequence
  Description of Artificial Sequence: Synthetic oligonucleotide
  Antisense Strand to SEQ ID NO: 445157
uuucucgugcauaaagugg

SEQ ID NO: 445159 - RNA, 19 nt, Artificial Sequence
  Description of Artificial Sequence: Synthetic oligonucleotide
  Sense strand starting at position 2452 of SEQ ID NO: 316852
gaaaguccauguguugaga

SEQ ID NO: 445160 - RNA, 19 nt, Artificial Sequence
  Description of Artificial Sequence: Synthetic oligonucleotide
  Antisense Strand to SEQ ID NO: 445159
ucucaacacauggacuuuc

SEQ ID NO: 445161 - RNA, 19 nt, Artificial Sequence
  Description of Artificial Sequence: Synthetic oligonucleotide
  Sense strand starting at position 2455 of SEQ ID NO: 316852
aguccauguguugagaaac

SEQ ID NO: 445162 - RNA, 19 nt, Artificial Sequence
  Description of Artificial Sequence: Synthetic oligonucleotide
  Antisense Strand to SEQ ID NO: 445161
guuucucaacacauggacu

SEQ ID NO: 445163 - RNA, 19 nt, Artificial Sequence
  Description of Artificial Sequence: Synthetic oligonucleotide
  Sense strand starting at position 2562 of SEQ ID NO: 316852
guaauuucgugauuacuuu

SEQ ID NO: 445164 - RNA, 19 nt, Artificial Sequence
  Description of Artificial Sequence: Synthetic oligonucleotide
  Antisense Strand to SEQ ID NO: 445163
aaaguaaucacgaaauuac

SEQ ID NO: 445165 - RNA, 19 nt, Artificial Sequence
  Description of Artificial Sequence: Synthetic oligonucleotide
  Sense strand starting at position 2771 of SEQ ID NO: 316852
cauacaguguggucaagga

SEQ ID NO: 445166 - RNA, 19 nt, Artificial Sequence
  Description of Artificial Sequence: Synthetic oligonucleotide
  Antisense Strand to SEQ ID NO: 445165
uccuugaccacacuguaug

SEQ ID NO: 445167 - RNA, 19 nt, Artificial Sequence
  Description of Artificial Sequence: Synthetic oligonucleotide
  Sense strand starting at position 2795 of SEQ ID NO: 316852
cauuauuaacguggcauuu

SEQ ID NO: 445168 - RNA, 19 nt, Artificial Sequence
  Description of Artificial Sequence: Synthetic oligonucleotide
  Antisense Strand to SEQ ID NO: 445167
aaaugccacguuaauaaug

SEQ ID NO: 445169 - RNA, 19 nt, Artificial Sequence
  Description of Artificial Sequence: Synthetic oligonucleotide
  Sense strand starting at position 2816 of SEQ ID NO: 316852
gccucauugaacgaaguaa

SEQ ID NO: 445170 - RNA, 19 nt, Artificial Sequence
  Description of Artificial Sequence: Synthetic oligonucleotide
  Antisense Strand to SEQ ID NO: 445169
uuacuucguucaaugaggc

SEQ ID NO: 445171 - RNA, 19 nt, Artificial Sequence
  Description of Artificial Sequence: Synthetic oligonucleotide
  Sense strand starting at position 2824 of SEQ ID NO: 316852
gaacgaaguaagggaguuu

SEQ ID NO: 445172 - RNA, 19 nt, Artificial Sequence
  Description of Artificial Sequence: Synthetic oligonucleotide
  Antisense Strand to SEQ ID NO: 445171
aaacucccuuacuucguuc

SEQ ID NO: 445173 - RNA, 19 nt, Artificial Sequence
  Description of Artificial Sequence: Synthetic oligonucleotide
  Sense strand starting at position 2848 of SEQ ID NO: 316852
gggaguaucuggagggaga

SEQ ID NO: 445174 - RNA, 19 nt, Artificial Sequence
  Description of Artificial Sequence: Synthetic oligonucleotide
  Antisense Strand to SEQ ID NO: 445173
ucucccuccagauacuccc

SEQ ID NO: 445175 - RNA, 19 nt, Artificial Sequence
  Description of Artificial Sequence: Synthetic oligonucleotide
  Sense strand starting at position 2863 of SEQ ID NO: 316852
gagagugauccaggcacca

SEQ ID NO: 445176 - RNA, 19 nt, Artificial Sequence
  Description of Artificial Sequence: Synthetic oligonucleotide
  Antisense Strand to SEQ ID NO: 445175
uggugccuggaucacucuc

SEQ ID NO: 445177 - RNA, 19 nt, Artificial Sequence
  Description of Artificial Sequence: Synthetic oligonucleotide
  Sense strand starting at position 2891 of SEQ ID NO: 316852
gugcaaagaccuugaauug

SEQ ID NO: 445178 - RNA, 19 nt, Artificial Sequence
  Description of Artificial Sequence: Synthetic oligonucleotide
  Antisense Strand to SEQ ID NO: 445177
caauucaaggucuuugcac

SEQ ID NO: 445179 - RNA, 19 nt, Artificial Sequence
  Description of Artificial Sequence: Synthetic oligonucleotide
  Sense strand starting at position 3068 of SEQ ID NO: 316852
agaagcaaccaguauuacu

SEQ ID NO: 445180 - RNA, 19 nt, Artificial Sequence
  Description of Artificial Sequence: Synthetic oligonucleotide
  Antisense Strand to SEQ ID NO: 445179
aguaauacugguugcuucu

SEQ ID NO: 445181 - RNA, 19 nt, Artificial Sequence
  Description of Artificial Sequence: Synthetic oligonucleotide
  Sense strand starting at position 3163 of SEQ ID NO: 316852
agugauacauacuuuccca

SEQ ID NO: 445182 - RNA, 19 nt, Artificial Sequence
  Description of Artificial Sequence: Synthetic oligonucleotide
  Antisense Strand to SEQ ID NO: 445181
ugggaaaguauguaucacu

SEQ ID NO: 445183 - RNA, 19 nt, Artificial Sequence
  Description of Artificial Sequence: Synthetic oligonucleotide
  Sense strand starting at position 3280 of SEQ ID NO: 316852
gguaaugaagucuggauag

SEQ ID NO: 445184 - RNA, 19 nt, Artificial Sequence
  Description of Artificial Sequence: Synthetic oligonucleotide
  Antisense Strand to SEQ ID NO: 445183
cuauccagacuucauuacc

SEQ ID NO: 445185 - RNA, 19 nt, Artificial Sequence
  Description of Artificial Sequence: Synthetic oligonucleotide
  Sense strand starting at position 3417 of SEQ ID NO: 316852
uuggcaaauugaccuguaa

SEQ ID NO: 445186 - RNA, 19 nt, Artificial Sequence
  Description of Artificial Sequence: Synthetic oligonucleotide
  Antisense Strand to SEQ ID NO: 445185
uuacaggucaauuugccaa

SEQ ID NO: 445187 - RNA, 19 nt, Artificial Sequence
  Description of Artificial Sequence: Synthetic oligonucleotide
  Sense strand starting at position 3449 of SEQ ID NO: 316852
ucaggaggaucuccauuau

SEQ ID NO: 445188 - RNA, 19 nt, Artificial Sequence
  Description of Artificial Sequence: Synthetic oligonucleotide
  Antisense Strand to SEQ ID NO: 445187
auaauggagauccuccuga

SEQ ID NO: 445189 - RNA, 19 nt, Artificial Sequence
  Description of Artificial Sequence: Synthetic oligonucleotide
  Sense strand starting at position 3762 of SEQ ID NO: 316852
auguaacuggcagauacau

SEQ ID NO: 445190 - RNA, 19 nt, Artificial Sequence
  Description of Artificial Sequence: Synthetic oligonucleotide
  Antisense Strand to SEQ ID NO: 445189
auguaucugccaguuacau

SEQ ID NO: 445191 - RNA, 19 nt, Artificial Sequence
  Description of Artificial Sequence: Synthetic oligonucleotide
  Sense strand starting at position 3799 of SEQ ID NO: 316852
caggaaagauuguccaucu

SEQ ID NO: 445192 - RNA, 19 nt, Artificial Sequence
  Description of Artificial Sequence: Synthetic oligonucleotide
  Antisense Strand to SEQ ID NO: 445191
agauggacaaucuuuccug

SEQ ID NO: 445193 - RNA, 19 nt, Artificial Sequence
  Description of Artificial Sequence: Synthetic oligonucleotide
  Sense strand starting at position 3856 of SEQ ID NO: 316852
cuagcuaaagguuaauuau

SEQ ID NO: 445194 - RNA, 19 nt, Artificial Sequence
  Description of Artificial Sequence: Synthetic oligonucleotide
  Antisense Strand to SEQ ID NO: 445193
auaauuaaccuuuagcuag

SEQ ID NO: 445195 - RNA, 19 nt, Artificial Sequence
  Description of Artificial Sequence: Synthetic oligonucleotide
  Sense strand starting at position 3859 of SEQ ID NO: 316852
gcuaaagguuaauuauauc

SEQ ID NO: 445196 - RNA, 19 nt, Artificial Sequence
  Description of Artificial Sequence: Synthetic oligonucleotide
  Antisense Strand to SEQ ID NO: 445195
gauauaauuaaccuuuagc

SEQ ID NO: 445197 - RNA, 19 nt, Artificial Sequence
  Description of Artificial Sequence: Synthetic oligonucleotide
  Sense strand starting at position 3865 of SEQ ID NO: 316852
gguuaauuauauccuaaga

SEQ ID NO: 445198 - RNA, 19 nt, Artificial Sequence
  Description of Artificial Sequence: Synthetic oligonucleotide
  Antisense Strand to SEQ ID NO: 445197
ucuuaggauauaauuaacc

SEQ ID NO: 445199 - RNA, 19 nt, Artificial Sequence
  Description of Artificial Sequence: Synthetic oligonucleotide
  Sense strand starting at position 3909 of SEQ ID NO: 316852
gugggaccuucuccaucua

SEQ ID NO: 445200 - RNA, 19 nt, Artificial Sequence
  Description of Artificial Sequence: Synthetic oligonucleotide
  Antisense Strand to SEQ ID NO: 445199
uagauggagaaggucccac

SEQ ID NO: 445201 - RNA, 19 nt, Artificial Sequence
  Description of Artificial Sequence: Synthetic oligonucleotide
  Sense strand starting at position 428 of SEQ ID NO: 316853
cugguuuccaguugaagag

SEQ ID NO: 445202 - RNA, 19 nt, Artificial Sequence
  Description of Artificial Sequence: Synthetic oligonucleotide
  Antisense Strand to SEQ ID NO: 445201
cucuucaacuggaaaccag

SEQ ID NO: 445203 - RNA, 19 nt, Artificial Sequence
  Description of Artificial Sequence: Synthetic oligonucleotide
  Sense strand starting at position 635 of SEQ ID NO: 316853
gaggaaugccucugccaca

SEQ ID NO: 445204 - RNA, 19 nt, Artificial Sequence
  Description of Artificial Sequence: Synthetic oligonucleotide
  Antisense Strand to SEQ ID NO: 445203
uguggcagaggcauuccuc

SEQ ID NO: 445205 - RNA, 19 nt, Artificial Sequence
  Description of Artificial Sequence: Synthetic oligonucleotide
  Sense strand starting at position 636 of SEQ ID NO: 316853
aggaaugccucugccacaa

SEQ ID NO: 445206 - RNA, 19 nt, Artificial Sequence
  Description of Artificial Sequence: Synthetic oligonucleotide
  Antisense Strand to SEQ ID NO: 445205
uuguggcagaggcauuccu

SEQ ID NO: 445207 - RNA, 19 nt, Artificial Sequence
  Description of Artificial Sequence: Synthetic oligonucleotide
  Sense strand starting at position 695 of SEQ ID NO: 316853
uaaauauugcaaggugaca

SEQ ID NO: 445208 - RNA, 19 nt, Artificial Sequence
  Description of Artificial Sequence: Synthetic oligonucleotide
  Antisense Strand to SEQ ID NO: 445207
ugucaccuugcaauauuua

SEQ ID NO: 445209 - RNA, 19 nt, Artificial Sequence
  Description of Artificial Sequence: Synthetic oligonucleotide
  Sense strand starting at position 787 of SEQ ID NO: 316853
ccugauuauuaguuuccua

SEQ ID NO: 445210 - RNA, 19 nt, Artificial Sequence
  Description of Artificial Sequence: Synthetic oligonucleotide
  Antisense Strand to SEQ ID NO: 445209
uaggaaacuaauaaucagg

SEQ ID NO: 445211 - RNA, 19 nt, Artificial Sequence
  Description of Artificial Sequence: Synthetic oligonucleotide
  Sense strand starting at position 791 of SEQ ID NO: 316853
auuauuaguuuccuaggga

SEQ ID NO: 445212 - RNA, 19 nt, Artificial Sequence
  Description of Artificial Sequence: Synthetic oligonucleotide
  Antisense Strand to SEQ ID NO: 445211
ucccuaggaaacuaauaau

SEQ ID NO: 445213 - RNA, 19 nt, Artificial Sequence
  Description of Artificial Sequence: Synthetic oligonucleotide
  Sense strand starting at position 794 of SEQ ID NO: 316853
auuaguuuccuagggaaga

SEQ ID NO: 445214 - RNA, 19 nt, Artificial Sequence
  Description of Artificial Sequence: Synthetic oligonucleotide
  Antisense Strand to SEQ ID NO: 445213
ucuucccuaggaaacuaau

SEQ ID NO: 445215 - RNA, 19 nt, Artificial Sequence
  Description of Artificial Sequence: Synthetic oligonucleotide
  Sense strand starting at position 884 of SEQ ID NO: 316853
gaauuagaaguguguccaa

SEQ ID NO: 445216 - RNA, 19 nt, Artificial Sequence
  Description of Artificial Sequence: Synthetic oligonucleotide
  Antisense Strand to SEQ ID NO: 445215
uuggacacacuucuaauuc

SEQ ID NO: 445217 - RNA, 19 nt, Artificial Sequence
  Description of Artificial Sequence: Synthetic oligonucleotide
  Sense strand starting at position 1441 of SEQ ID NO: 316853
agaccucgcgcuucaugua

SEQ ID NO: 445218 - RNA, 19 nt, Artificial Sequence
  Description of Artificial Sequence: Synthetic oligonucleotide
  Antisense Strand to SEQ ID NO: 445217
uacaugaagcgcgaggucu

SEQ ID NO: 445219 - RNA, 19 nt, Artificial Sequence
  Description of Artificial Sequence: Synthetic oligonucleotide
  Sense strand starting at position 1739 of SEQ ID NO: 316853
ucgcuacguguucucuaua

SEQ ID NO: 445220 - RNA, 19 nt, Artificial Sequence
  Description of Artificial Sequence: Synthetic oligonucleotide
  Antisense Strand to SEQ ID NO: 445219
uauagagaacacguagcga

SEQ ID NO: 445221 - RNA, 19 nt, Artificial Sequence
  Description of Artificial Sequence: Synthetic oligonucleotide
  Sense strand starting at position 1742 of SEQ ID NO: 316853
cuacguguucucuauacaa

SEQ ID NO: 445222 - RNA, 19 nt, Artificial Sequence
  Description of Artificial Sequence: Synthetic oligonucleotide
  Antisense Strand to SEQ ID NO: 445221
uuguauagagaacacguag

SEQ ID NO: 445223 - RNA, 19 nt, Artificial Sequence
  Description of Artificial Sequence: Synthetic oligonucleotide
  Sense strand starting at position 1772 of SEQ ID NO: 316853
cuguaaagcgcuugauuuc

SEQ ID NO: 445224 - RNA, 19 nt, Artificial Sequence
  Description of Artificial Sequence: Synthetic oligonucleotide
  Antisense Strand to SEQ ID NO: 445223
gaaaucaagcgcuuuacag

SEQ ID NO: 445225 - RNA, 19 nt, Artificial Sequence
  Description of Artificial Sequence: Synthetic oligonucleotide
  Sense strand starting at position 1782 of SEQ ID NO: 316853
cuugauuucgaguguucuc

SEQ ID NO: 445226 - RNA, 19 nt, Artificial Sequence
  Description of Artificial Sequence: Synthetic oligonucleotide
  Antisense Strand to SEQ ID NO: 445225
gagaacacucgaaaucaag

SEQ ID NO: 445227 - RNA, 19 nt, Artificial Sequence
  Description of Artificial Sequence: Synthetic oligonucleotide
  Sense strand starting at position 1791 of SEQ ID NO: 316853
gaguguucuccugucugcu

SEQ ID NO: 445228 - RNA, 19 nt, Artificial Sequence
  Description of Artificial Sequence: Synthetic oligonucleotide
  Antisense Strand to SEQ ID NO: 445227
agcagacaggagaacacuc

SEQ ID NO: 445229 - RNA, 19 nt, Artificial Sequence
  Description of Artificial Sequence: Synthetic oligonucleotide
  Sense strand starting at position 1792 of SEQ ID NO: 316853
aguguucuccugucugcuu

SEQ ID NO: 445230 - RNA, 19 nt, Artificial Sequence
  Description of Artificial Sequence: Synthetic oligonucleotide
  Antisense Strand to SEQ ID NO: 445229
aagcagacaggagaacacu

SEQ ID NO: 445231 - RNA, 19 nt, Artificial Sequence
  Description of Artificial Sequence: Synthetic oligonucleotide
  Sense strand starting at position 2055 of SEQ ID NO: 316853
ccucgugcgauuugagaaa

SEQ ID NO: 445232 - RNA, 19 nt, Artificial Sequence
  Description of Artificial Sequence: Synthetic oligonucleotide
  Antisense Strand to SEQ ID NO: 445231
uuucucaaaucgcacgagg

SEQ ID NO: 445233 - RNA, 19 nt, Artificial Sequence
  Description of Artificial Sequence: Synthetic oligonucleotide
  Sense strand starting at position 2070 of SEQ ID NO: 316853
gaaauuaacccuuggcgag

SEQ ID NO: 445234 - RNA, 19 nt, Artificial Sequence
  Description of Artificial Sequence: Synthetic oligonucleotide
  Antisense Strand to SEQ ID NO: 445233
cucgccaaggguuaauuuc

SEQ ID NO: 445235 - RNA, 19 nt, Artificial Sequence
  Description of Artificial Sequence: Synthetic oligonucleotide
  Sense strand starting at position 2296 of SEQ ID NO: 316853
gagcuuggcgaguaaacga

SEQ ID NO: 445236 - RNA, 19 nt, Artificial Sequence
  Description of Artificial Sequence: Synthetic oligonucleotide
  Antisense Strand to SEQ ID NO: 445235
ucguuuacucgccaagcuc

SEQ ID NO: 445237 - RNA, 19 nt, Artificial Sequence
  Description of Artificial Sequence: Synthetic oligonucleotide
  Sense strand starting at position 2304 of SEQ ID NO: 316853
cgaguaaacgauugggaaa

SEQ ID NO: 445238 - RNA, 19 nt, Artificial Sequence
  Description of Artificial Sequence: Synthetic oligonucleotide
  Antisense Strand to SEQ ID NO: 445237
uuucccaaucguuuacucg

SEQ ID NO: 445239 - RNA, 19 nt, Artificial Sequence
  Description of Artificial Sequence: Synthetic oligonucleotide
  Sense strand starting at position 2338 of SEQ ID NO: 316853
gcucucuugcaagagaacu

SEQ ID NO: 445240 - RNA, 19 nt, Artificial Sequence
  Description of Artificial Sequence: Synthetic oligonucleotide
  Antisense Strand to SEQ ID NO: 445239
aguucucuugcaagagagc

SEQ ID NO: 445241 - RNA, 19 nt, Artificial Sequence
  Description of Artificial Sequence: Synthetic oligonucleotide
  Sense strand starting at position 2348 of SEQ ID NO: 316853
aagagaacuccgggcaaau

SEQ ID NO: 445242 - RNA, 19 nt, Artificial Sequence
  Description of Artificial Sequence: Synthetic oligonucleotide
  Antisense Strand to SEQ ID NO: 445241
auuugcccggaguucucuu

SEQ ID NO: 445243 - RNA, 19 nt, Artificial Sequence
  Description of Artificial Sequence: Synthetic oligonucleotide
  Sense strand starting at position 2359 of SEQ ID NO: 316853
gggcaaaucuacguugaga

SEQ ID NO: 445244 - RNA, 19 nt, Artificial Sequence
  Description of Artificial Sequence: Synthetic oligonucleotide
  Antisense Strand to SEQ ID NO: 445243
ucucaacguagauuugccc

SEQ ID NO: 445245 - RNA, 19 nt, Artificial Sequence
  Description of Artificial Sequence: Synthetic oligonucleotide
  Sense strand starting at position 2362 of SEQ ID NO: 316853
caaaucuacguugagauca

SEQ ID NO: 445246 - RNA, 19 nt, Artificial Sequence
  Description of Artificial Sequence: Synthetic oligonucleotide
  Antisense Strand to SEQ ID NO: 445245
ugaucucaacguagauuug

SEQ ID NO: 445247 - RNA, 19 nt, Artificial Sequence
  Description of Artificial Sequence: Synthetic oligonucleotide
  Sense strand starting at position 2370 of SEQ ID NO: 316853
cguugagaucaccagugaa

SEQ ID NO: 445248 - RNA, 19 nt, Artificial Sequence
  Description of Artificial Sequence: Synthetic oligonucleotide
  Antisense Strand to SEQ ID NO: 445247
uucacuggugaucucaacg

SEQ ID NO: 445249 - RNA, 19 nt, Artificial Sequence
  Description of Artificial Sequence: Synthetic oligonucleotide
  Sense strand starting at position 2458 of SEQ ID NO: 316853
ggagcucuggcuuagauuc

SEQ ID NO: 445250 - RNA, 19 nt, Artificial Sequence
  Description of Artificial Sequence: Synthetic oligonucleotide
  Antisense Strand to SEQ ID NO: 445249
gaaucuaagccagagcucc

SEQ ID NO: 445251 - RNA, 19 nt, Artificial Sequence
  Description of Artificial Sequence: Synthetic oligonucleotide
  Sense strand starting at position 2500 of SEQ ID NO: 316853
ggcagagcuccuuaaucuc

SEQ ID NO: 445252 - RNA, 19 nt, Artificial Sequence
  Description of Artificial Sequence: Synthetic oligonucleotide
  Antisense Strand to SEQ ID NO: 445251
gagauuaaggagcucugcc

SEQ ID NO: 445253 - RNA, 19 nt, Artificial Sequence
  Description of Artificial Sequence: Synthetic oligonucleotide
  Sense strand starting at position 2530 of SEQ ID NO: 316853
ggaugcugagugugaggau

SEQ ID NO: 445254 - RNA, 19 nt, Artificial Sequence
  Description of Artificial Sequence: Synthetic oligonucleotide
  Antisense Strand to SEQ ID NO: 445253
auccucacacucagcaucc

SEQ ID NO: 445255 - RNA, 19 nt, Artificial Sequence
  Description of Artificial Sequence: Synthetic oligonucleotide
  Sense strand starting at position 2583 of SEQ ID NO: 316853
ggaagaaagggcuggguua

SEQ ID NO: 445256 - RNA, 19 nt, Artificial Sequence
  Description of Artificial Sequence: Synthetic oligonucleotide
  Antisense Strand to SEQ ID NO: 445255
uaacccagcccuuucuucc

SEQ ID NO: 445257 - RNA, 19 nt, Artificial Sequence
  Description of Artificial Sequence: Synthetic oligonucleotide
  Sense strand starting at position 2596 of SEQ ID NO: 316853
ggguuagguggaggguuua

SEQ ID NO: 445258 - RNA, 19 nt, Artificial Sequence
  Description of Artificial Sequence: Synthetic oligonucleotide
  Antisense Strand to SEQ ID NO: 445257
uaaacccuccaccuaaccc

SEQ ID NO: 445259 - RNA, 19 nt, Artificial Sequence
  Description of Artificial Sequence: Synthetic oligonucleotide
  Sense strand starting at position 2740 of SEQ ID NO: 316853
uguacuuguagguagaaca

SEQ ID NO: 445260 - RNA, 19 nt, Artificial Sequence
  Description of Artificial Sequence: Synthetic oligonucleotide
  Antisense Strand to SEQ ID NO: 445259
uguucuaccuacaaguaca

SEQ ID NO: 445261 - RNA, 19 nt, Artificial Sequence
  Description of Artificial Sequence: Synthetic oligonucleotide
  Sense strand starting at position 2755 of SEQ ID NO: 316853
aacagaauaugugaggaga

SEQ ID NO: 445262 - RNA, 19 nt, Artificial Sequence
  Description of Artificial Sequence: Synthetic oligonucleotide
  Antisense Strand to SEQ ID NO: 445261
ucuccucacauauucuguu

SEQ ID NO: 445263 - RNA, 19 nt, Artificial Sequence
  Description of Artificial Sequence: Synthetic oligonucleotide
  Sense strand starting at position 3474 of SEQ ID NO: 316853
agauuaaagggcuagccua

SEQ ID NO: 445264 - RNA, 19 nt, Artificial Sequence
  Description of Artificial Sequence: Synthetic oligonucleotide
  Antisense Strand to SEQ ID NO: 445263
uaggcuagcccuuuaaucu

SEQ ID NO: 445265 - RNA, 19 nt, Artificial Sequence
  Description of Artificial Sequence: Synthetic oligonucleotide
  Sense strand starting at position 3487 of SEQ ID NO: 316853
agccuaguugauuagcaaa

SEQ ID NO: 445266 - RNA, 19 nt, Artificial Sequence
  Description of Artificial Sequence: Synthetic oligonucleotide
  Antisense Strand to SEQ ID NO: 445265
uuugcuaaucaacuaggcu

SEQ ID NO: 445267 - RNA, 19 nt, Artificial Sequence
  Description of Artificial Sequence: Synthetic oligonucleotide
  Sense strand starting at position 3489 of SEQ ID NO: 316853
ccuaguugauuagcaaauu

SEQ ID NO: 445268 - RNA, 19 nt, Artificial Sequence
  Description of Artificial Sequence: Synthetic oligonucleotide
  Antisense Strand to SEQ ID NO: 445267
aauuugcuaaucaacuagg

SEQ ID NO: 445269 - RNA, 19 nt, Artificial Sequence
  Description of Artificial Sequence: Synthetic oligonucleotide
  Sense strand starting at position 3528 of SEQ ID NO: 316853
caaagauucuguguaggga

SEQ ID NO: 445270 - RNA, 19 nt, Artificial Sequence
  Description of Artificial Sequence: Synthetic oligonucleotide
  Antisense Strand to SEQ ID NO: 445269
ucccuacacagaaucuuug

SEQ ID NO: 445271 - RNA, 19 nt, Artificial Sequence
  Description of Artificial Sequence: Synthetic oligonucleotide
  Sense strand starting at position 3873 of SEQ ID NO: 316853
aggguugucuuucuagaga

SEQ ID NO: 445272 - RNA, 19 nt, Artificial Sequence
  Description of Artificial Sequence: Synthetic oligonucleotide
  Antisense Strand to SEQ ID NO: 445271
ucucuagaaagacaacccu

SEQ ID NO: 445273 - RNA, 19 nt, Artificial Sequence
  Description of Artificial Sequence: Synthetic oligonucleotide
  Sense strand starting at position 3876 of SEQ ID NO: 316853
guugucuuucuagagaccu

SEQ ID NO: 445274 - RNA, 19 nt, Artificial Sequence
  Description of Artificial Sequence: Synthetic oligonucleotide
  Antisense Strand to SEQ ID NO: 445273
aggucucuagaaagacaac

SEQ ID NO: 445275 - RNA, 19 nt, Artificial Sequence
  Description of Artificial Sequence: Synthetic oligonucleotide
  Sense strand starting at position 3904 of SEQ ID NO: 316853
aagucuacgucacuuugaa

SEQ ID NO: 445276 - RNA, 19 nt, Artificial Sequence
  Description of Artificial Sequence: Synthetic oligonucleotide
  Antisense Strand to SEQ ID NO: 445275
uucaaagugacguagacuu

SEQ ID NO: 445277 - RNA, 19 nt, Artificial Sequence
  Description of Artificial Sequence: Synthetic oligonucleotide
  Sense strand starting at position 3947 of SEQ ID NO: 316853
gcaagauugggcuggaaga

SEQ ID NO: 445278 - RNA, 19 nt, Artificial Sequence
  Description of Artificial Sequence: Synthetic oligonucleotide
  Antisense Strand to SEQ ID NO: 445277
ucuuccagcccaaucuugc

SEQ ID NO: 445279 - RNA, 19 nt, Artificial Sequence
  Description of Artificial Sequence: Synthetic oligonucleotide
  Sense strand starting at position 3948 of SEQ ID NO: 316853
caagauugggcuggaagau

SEQ ID NO: 445280 - RNA, 19 nt, Artificial Sequence
  Description of Artificial Sequence: Synthetic oligonucleotide
  Antisense Strand to SEQ ID NO: 445279
aucuuccagcccaaucuug

SEQ ID NO: 445281 - RNA, 19 nt, Artificial Sequence
  Description of Artificial Sequence: Synthetic oligonucleotide
  Sense strand starting at position 379 of SEQ ID NO: 316854
cugguuuccaguugaagag

SEQ ID NO: 445282 - RNA, 19 nt, Artificial Sequence
  Description of Artificial Sequence: Synthetic oligonucleotide
  Antisense Strand to SEQ ID NO: 445281
cucuucaacuggaaaccag

SEQ ID NO: 445283 - RNA, 19 nt, Artificial Sequence
  Description of Artificial Sequence: Synthetic oligonucleotide
  Sense strand starting at position 586 of SEQ ID NO: 316854
gaggaaugccucugccaca

SEQ ID NO: 445284 - RNA, 19 nt, Artificial Sequence
  Description of Artificial Sequence: Synthetic oligonucleotide
  Antisense Strand to SEQ ID NO: 445283
uguggcagaggcauuccuc

SEQ ID NO: 445285 - RNA, 19 nt, Artificial Sequence
  Description of Artificial Sequence: Synthetic oligonucleotide
  Sense strand starting at position 587 of SEQ ID NO: 316854
aggaaugccucugccacaa

SEQ ID NO: 445286 - RNA, 19 nt, Artificial Sequence
  Description of Artificial Sequence: Synthetic oligonucleotide
  Antisense Strand to SEQ ID NO: 445285
uuguggcagaggcauuccu

SEQ ID NO: 445287 - RNA, 19 nt, Artificial Sequence
  Description of Artificial Sequence: Synthetic oligonucleotide
  Sense strand starting at position 646 of SEQ ID NO: 316854
uaaauauugcaaggugaca

SEQ ID NO: 445288 - RNA, 19 nt, Artificial Sequence
  Description of Artificial Sequence: Synthetic oligonucleotide
  Antisense Strand to SEQ ID NO: 445287
ugucaccuugcaauauuua

SEQ ID NO: 445289 - RNA, 19 nt, Artificial Sequence
  Description of Artificial Sequence: Synthetic oligonucleotide
  Sense strand starting at position 738 of SEQ ID NO: 316854
ccugauuauuaguuuccua

SEQ ID NO: 445290 - RNA, 19 nt, Artificial Sequence
  Description of Artificial Sequence: Synthetic oligonucleotide
  Antisense Strand to SEQ ID NO: 445289
uaggaaacuaauaaucagg

SEQ ID NO: 445291 - RNA, 19 nt, Artificial Sequence
  Description of Artificial Sequence: Synthetic oligonucleotide
  Sense strand starting at position 742 of SEQ ID NO: 316854
auuauuaguuuccuaggga

SEQ ID NO: 445292 - RNA, 19 nt, Artificial Sequence
  Description of Artificial Sequence: Synthetic oligonucleotide
  Antisense Strand to SEQ ID NO: 445291
ucccuaggaaacuaauaau

SEQ ID NO: 445293 - RNA, 19 nt, Artificial Sequence
  Description of Artificial Sequence: Synthetic oligonucleotide
  Sense strand starting at position 745 of SEQ ID NO: 316854
auuaguuuccuagggaaga

SEQ ID NO: 445294 - RNA, 19 nt, Artificial Sequence
  Description of Artificial Sequence: Synthetic oligonucleotide
  Antisense Strand to SEQ ID NO: 445293
ucuucccuaggaaacuaau

SEQ ID NO: 445295 - RNA, 19 nt, Artificial Sequence
  Description of Artificial Sequence: Synthetic oligonucleotide
  Sense strand starting at position 835 of SEQ ID NO: 316854
gaauuagaaguguguccaa

SEQ ID NO: 445296 - RNA, 19 nt, Artificial Sequence
  Description of Artificial Sequence: Synthetic oligonucleotide
  Antisense Strand to SEQ ID NO: 445295
uuggacacacuucuaauuc

SEQ ID NO: 445297 - RNA, 19 nt, Artificial Sequence
  Description of Artificial Sequence: Synthetic oligonucleotide
  Sense strand starting at position 1392 of SEQ ID NO: 316854
agaccucgcgcuucaugua

SEQ ID NO: 445298 - RNA, 19 nt, Artificial Sequence
  Description of Artificial Sequence: Synthetic oligonucleotide
  Antisense Strand to SEQ ID NO: 445297
uacaugaagcgcgaggucu

SEQ ID NO: 445299 - RNA, 19 nt, Artificial Sequence
  Description of Artificial Sequence: Synthetic oligonucleotide
  Sense strand starting at position 1690 of SEQ ID NO: 316854
ucgcuacguguucucuaua

SEQ ID NO: 445300 - RNA, 19 nt, Artificial Sequence
  Description of Artificial Sequence: Synthetic oligonucleotide
  Antisense Strand to SEQ ID NO: 445299
uauagagaacacguagcga

SEQ ID NO: 445301 - RNA, 19 nt, Artificial Sequence
  Description of Artificial Sequence: Synthetic oligonucleotide
  Sense strand starting at position 1693 of SEQ ID NO: 316854
cuacguguucucuauacaa

SEQ ID NO: 445302 - RNA, 19 nt, Artificial Sequence
  Description of Artificial Sequence: Synthetic oligonucleotide
  Antisense Strand to SEQ ID NO: 445301
uuguauagagaacacguag

SEQ ID NO: 445303 - RNA, 19 nt, Artificial Sequence
  Description of Artificial Sequence: Synthetic oligonucleotide
  Sense strand starting at position 1723 of SEQ ID NO: 316854
cuguaaagcgcuugauuuc

SEQ ID NO: 445304 - RNA, 19 nt, Artificial Sequence
  Description of Artificial Sequence: Synthetic oligonucleotide
  Antisense Strand to SEQ ID NO: 445303
gaaaucaagcgcuuuacag

SEQ ID NO: 445305 - RNA, 19 nt, Artificial Sequence
  Description of Artificial Sequence: Synthetic oligonucleotide
  Sense strand starting at position 1733 of SEQ ID NO: 316854
cuugauuucgaguguucuc

SEQ ID NO: 445306 - RNA, 19 nt, Artificial Sequence
  Description of Artificial Sequence: Synthetic oligonucleotide
  Antisense Strand to SEQ ID NO: 445305
gagaacacucgaaaucaag

SEQ ID NO: 445307 - RNA, 19 nt, Artificial Sequence
  Description of Artificial Sequence: Synthetic oligonucleotide
  Sense strand starting at position 1742 of SEQ ID NO: 316854
gaguguucuccugucugcu

SEQ ID NO: 445308 - RNA, 19 nt, Artificial Sequence
  Description of Artificial Sequence: Synthetic oligonucleotide
  Antisense Strand to SEQ ID NO: 445307
agcagacaggagaacacuc

SEQ ID NO: 445309 - RNA, 19 nt, Artificial Sequence
  Description of Artificial Sequence: Synthetic oligonucleotide
  Sense strand starting at position 1743 of SEQ ID NO: 316854
aguguucuccugucugcuu

SEQ ID NO: 445310 - RNA, 19 nt, Artificial Sequence
  Description of Artificial Sequence: Synthetic oligonucleotide
  Antisense Strand to SEQ ID NO: 445309
aagcagacaggagaacacu

SEQ ID NO: 445311 - RNA, 19 nt, Artificial Sequence
  Description of Artificial Sequence: Synthetic oligonucleotide
  Sense strand starting at position 2006 of SEQ ID NO: 316854
ccucgugcgauuugagaaa

SEQ ID NO: 445312 - RNA, 19 nt, Artificial Sequence
  Description of Artificial Sequence: Synthetic oligonucleotide
  Antisense Strand to SEQ ID NO: 445311
uuucucaaaucgcacgagg

SEQ ID NO: 445313 - RNA, 19 nt, Artificial Sequence
  Description of Artificial Sequence: Synthetic oligonucleotide
  Sense strand starting at position 2021 of SEQ ID NO: 316854
gaaauuaacccuuggcgag

SEQ ID NO: 445314 - RNA, 19 nt, Artificial Sequence
  Description of Artificial Sequence: Synthetic oligonucleotide
  Antisense Strand to SEQ ID NO: 445313
cucgccaaggguuaauuuc

SEQ ID NO: 445315 - RNA, 19 nt, Artificial Sequence
  Description of Artificial Sequence: Synthetic oligonucleotide
  Sense strand starting at position 2255 of SEQ ID NO: 316854
cgaguaaacgauugggaaa

SEQ ID NO: 445316 - RNA, 19 nt, Artificial Sequence
  Description of Artificial Sequence: Synthetic oligonucleotide
  Antisense Strand to SEQ ID NO: 445315
uuucccaaucguuuacucg

SEQ ID NO: 445317 - RNA, 19 nt, Artificial Sequence
  Description of Artificial Sequence: Synthetic oligonucleotide
  Sense strand starting at position 2289 of SEQ ID NO: 316854
gcucucuugcaagagaacu

SEQ ID NO: 445318 - RNA, 19 nt, Artificial Sequence
  Description of Artificial Sequence: Synthetic oligonucleotide
  Antisense Strand to SEQ ID NO: 445317
aguucucuugcaagagagc

SEQ ID NO: 445319 - RNA, 19 nt, Artificial Sequence
  Description of Artificial Sequence: Synthetic oligonucleotide
  Sense strand starting at position 2299 of SEQ ID NO: 316854
aagagaacuccgggcaaau

SEQ ID NO: 445320 - RNA, 19 nt, Artificial Sequence
  Description of Artificial Sequence: Synthetic oligonucleotide
  Antisense Strand to SEQ ID NO: 445319
auuugcccggaguucucuu

SEQ ID NO: 445321 - RNA, 19 nt, Artificial Sequence
  Description of Artificial Sequence: Synthetic oligonucleotide
  Sense strand starting at position 2310 of SEQ ID NO: 316854
gggcaaaucuacguugaga

SEQ ID NO: 445322 - RNA, 19 nt, Artificial Sequence
  Description of Artificial Sequence: Synthetic oligonucleotide
  Antisense Strand to SEQ ID NO: 445321
ucucaacguagauuugccc

SEQ ID NO: 445323 - RNA, 19 nt, Artificial Sequence
  Description of Artificial Sequence: Synthetic oligonucleotide
  Sense strand starting at position 2313 of SEQ ID NO: 316854
caaaucuacguugagauca

SEQ ID NO: 445324 - RNA, 19 nt, Artificial Sequence
  Description of Artificial Sequence: Synthetic oligonucleotide
  Antisense Strand to SEQ ID NO: 445323
ugaucucaacguagauuug

SEQ ID NO: 445325 - RNA, 19 nt, Artificial Sequence
  Description of Artificial Sequence: Synthetic oligonucleotide
  Sense strand starting at position 2321 of SEQ ID NO: 316854
cguugagaucaccagugaa

SEQ ID NO: 445326 - RNA, 19 nt, Artificial Sequence
  Description of Artificial Sequence: Synthetic oligonucleotide
  Antisense Strand to SEQ ID NO: 445325
uucacuggugaucucaacg

SEQ ID NO: 445327 - RNA, 19 nt, Artificial Sequence
  Description of Artificial Sequence: Synthetic oligonucleotide
  Sense strand starting at position 2409 of SEQ ID NO: 316854
ggagcucuggcuuagauuc

SEQ ID NO: 445328 - RNA, 19 nt, Artificial Sequence
  Description of Artificial Sequence: Synthetic oligonucleotide
  Antisense Strand to SEQ ID NO: 445327
gaaucuaagccagagcucc

SEQ ID NO: 445329 - RNA, 19 nt, Artificial Sequence
  Description of Artificial Sequence: Synthetic oligonucleotide
  Sense strand starting at position 2451 of SEQ ID NO: 316854
ggcagagcuccuuaaucuc

SEQ ID NO: 445330 - RNA, 19 nt, Artificial Sequence
  Description of Artificial Sequence: Synthetic oligonucleotide
  Antisense Strand to SEQ ID NO: 445329
gagauuaaggagcucugcc

SEQ ID NO: 445331 - RNA, 19 nt, Artificial Sequence
  Description of Artificial Sequence: Synthetic oligonucleotide
  Sense strand starting at position 2481 of SEQ ID NO: 316854
ggaugcugagugugaggau

SEQ ID NO: 445332 - RNA, 19 nt, Artificial Sequence
  Description of Artificial Sequence: Synthetic oligonucleotide
  Antisense Strand to SEQ ID NO: 445331
auccucacacucagcaucc

SEQ ID NO: 445333 - RNA, 19 nt, Artificial Sequence
  Description of Artificial Sequence: Synthetic oligonucleotide
  Sense strand starting at position 2534 of SEQ ID NO: 316854
ggaagaaagggcuggguua

SEQ ID NO: 445334 - RNA, 19 nt, Artificial Sequence
  Description of Artificial Sequence: Synthetic oligonucleotide
  Antisense Strand to SEQ ID NO: 445333
uaacccagcccuuucuucc

SEQ ID NO: 445335 - RNA, 19 nt, Artificial Sequence
  Description of Artificial Sequence: Synthetic oligonucleotide
  Sense strand starting at position 2547 of SEQ ID NO: 316854
ggguuagguggaggguuua

SEQ ID NO: 445336 - RNA, 19 nt, Artificial Sequence
  Description of Artificial Sequence: Synthetic oligonucleotide
  Antisense Strand to SEQ ID NO: 445335
uaaacccuccaccuaaccc

SEQ ID NO: 445337 - RNA, 19 nt, Artificial Sequence
  Description of Artificial Sequence: Synthetic oligonucleotide
  Sense strand starting at position 2691 of SEQ ID NO: 316854
uguacuuguagguagaaca

SEQ ID NO: 445338 - RNA, 19 nt, Artificial Sequence
  Description of Artificial Sequence: Synthetic oligonucleotide
  Antisense Strand to SEQ ID NO: 445337
uguucuaccuacaaguaca

SEQ ID NO: 445339 - RNA, 19 nt, Artificial Sequence
  Description of Artificial Sequence: Synthetic oligonucleotide
  Sense strand starting at position 2706 of SEQ ID NO: 316854
aacagaauaugugaggaga

SEQ ID NO: 445340 - RNA, 19 nt, Artificial Sequence
  Description of Artificial Sequence: Synthetic oligonucleotide
  Antisense Strand to SEQ ID NO: 445339
ucuccucacauauucuguu

SEQ ID NO: 445341 - RNA, 19 nt, Artificial Sequence
  Description of Artificial Sequence: Synthetic oligonucleotide
  Sense strand starting at position 3425 of SEQ ID NO: 316854
agauuaaagggcuagccua

SEQ ID NO: 445342 - RNA, 19 nt, Artificial Sequence
  Description of Artificial Sequence: Synthetic oligonucleotide
  Antisense Strand to SEQ ID NO: 445341
uaggcuagcccuuuaaucu

SEQ ID NO: 445343 - RNA, 19 nt, Artificial Sequence
  Description of Artificial Sequence: Synthetic oligonucleotide
  Sense strand starting at position 3438 of SEQ ID NO: 316854
agccuaguugauuagcaaa

SEQ ID NO: 445344 - RNA, 19 nt, Artificial Sequence
  Description of Artificial Sequence: Synthetic oligonucleotide
  Antisense Strand to SEQ ID NO: 445343
uuugcuaaucaacuaggcu

SEQ ID NO: 445345 - RNA, 19 nt, Artificial Sequence
  Description of Artificial Sequence: Synthetic oligonucleotide
  Sense strand starting at position 3440 of SEQ ID NO: 316854
ccuaguugauuagcaaauu

SEQ ID NO: 445346 - RNA, 19 nt, Artificial Sequence
  Description of Artificial Sequence: Synthetic oligonucleotide
  Antisense Strand to SEQ ID NO: 445345
aauuugcuaaucaacuagg

SEQ ID NO: 445347 - RNA, 19 nt, Artificial Sequence
  Description of Artificial Sequence: Synthetic oligonucleotide
  Sense strand starting at position 3479 of SEQ ID NO: 316854
caaagauucuguguaggga

SEQ ID NO: 445348 - RNA, 19 nt, Artificial Sequence
  Description of Artificial Sequence: Synthetic oligonucleotide
  Antisense Strand to SEQ ID NO: 445347
ucccuacacagaaucuuug

SEQ ID NO: 445349 - RNA, 19 nt, Artificial Sequence
  Description of Artificial Sequence: Synthetic oligonucleotide
  Sense strand starting at position 3824 of SEQ ID NO: 316854
aggguugucuuucuagaga

SEQ ID NO: 445350 - RNA, 19 nt, Artificial Sequence
  Description of Artificial Sequence: Synthetic oligonucleotide
  Antisense Strand to SEQ ID NO: 445349
ucucuagaaagacaacccu

SEQ ID NO: 445351 - RNA, 19 nt, Artificial Sequence
  Description of Artificial Sequence: Synthetic oligonucleotide
  Sense strand starting at position 3827 of SEQ ID NO: 316854
guugucuuucuagagaccu

SEQ ID NO: 445352 - RNA, 19 nt, Artificial Sequence
  Description of Artificial Sequence: Synthetic oligonucleotide
  Antisense Strand to SEQ ID NO: 445351
aggucucuagaaagacaac

SEQ ID NO: 445353 - RNA, 19 nt, Artificial Sequence
  Description of Artificial Sequence: Synthetic oligonucleotide
  Sense strand starting at position 3855 of SEQ ID NO: 316854
aagucuacgucacuuugaa

SEQ ID NO: 445354 - RNA, 19 nt, Artificial Sequence
  Description of Artificial Sequence: Synthetic oligonucleotide
  Antisense Strand to SEQ ID NO: 445353
uucaaagugacguagacuu

SEQ ID NO: 445355 - RNA, 19 nt, Artificial Sequence
  Description of Artificial Sequence: Synthetic oligonucleotide
  Sense strand starting at position 3898 of SEQ ID NO: 316854
gcaagauugggcuggaaga

SEQ ID NO: 445356 - RNA, 19 nt, Artificial Sequence
  Description of Artificial Sequence: Synthetic oligonucleotide
  Antisense Strand to SEQ ID NO: 445355
ucuuccagcccaaucuugc

SEQ ID NO: 445357 - RNA, 19 nt, Artificial Sequence
  Description of Artificial Sequence: Synthetic oligonucleotide
  Sense strand starting at position 3899 of SEQ ID NO: 316854
caagauugggcuggaagau

SEQ ID NO: 445358 - RNA, 19 nt, Artificial Sequence
  Description of Artificial Sequence: Synthetic oligonucleotide
  Antisense Strand to SEQ ID NO: 445357
aucuuccagcccaaucuug

SEQ ID NO: 445359 - RNA, 19 nt, Artificial Sequence
  Description of Artificial Sequence: Synthetic oligonucleotide
  Sense strand starting at position 3962 of SEQ ID NO: 316854
gccugugaauaaucaauaa

SEQ ID NO: 445360 - RNA, 19 nt, Artificial Sequence
  Description of Artificial Sequence: Synthetic oligonucleotide
  Antisense Strand to SEQ ID NO: 445359
uuauugauuauucacaggc

SEQ ID NO: 445361 - RNA, 19 nt, Artificial Sequence
  Description of Artificial Sequence: Synthetic oligonucleotide
  Sense strand starting at position 349 of SEQ ID NO: 316855
ucuaauugugagcaauauu

SEQ ID NO: 445362 - RNA, 19 nt, Artificial Sequence
  Description of Artificial Sequence: Synthetic oligonucleotide
  Antisense Strand to SEQ ID NO: 445361
aauauugcucacaauuaga

SEQ ID NO: 445363 - RNA, 19 nt, Artificial Sequence
  Description of Artificial Sequence: Synthetic oligonucleotide
  Sense strand starting at position 367 of SEQ ID NO: 316855
uuuccaugggauugagauu

SEQ ID NO: 445364 - RNA, 19 nt, Artificial Sequence
  Description of Artificial Sequence: Synthetic oligonucleotide
  Antisense Strand to SEQ ID NO: 445363
aaucucaaucccauggaaa

SEQ ID NO: 445365 - RNA, 19 nt, Artificial Sequence
  Description of Artificial Sequence: Synthetic oligonucleotide
  Sense strand starting at position 407 of SEQ ID NO: 316855
gaccgaaguuacuuauaag

SEQ ID NO: 445366 - RNA, 19 nt, Artificial Sequence
  Description of Artificial Sequence: Synthetic oligonucleotide
  Antisense Strand to SEQ ID NO: 445365
cuuauaaguaacuucgguc

SEQ ID NO: 445367 - RNA, 19 nt, Artificial Sequence
  Description of Artificial Sequence: Synthetic oligonucleotide
  Sense strand starting at position 431 of SEQ ID NO: 316855
gcaauaauuucugugguac

SEQ ID NO: 445368 - RNA, 19 nt, Artificial Sequence
  Description of Artificial Sequence: Synthetic oligonucleotide
  Antisense Strand to SEQ ID NO: 445367
guaccacagaaauuauugc

SEQ ID NO: 445369 - RNA, 19 nt, Artificial Sequence
  Description of Artificial Sequence: Synthetic oligonucleotide
  Sense strand starting at position 442 of SEQ ID NO: 316855
ugugguaccacauaaaugu

SEQ ID NO: 445370 - RNA, 19 nt, Artificial Sequence
  Description of Artificial Sequence: Synthetic oligonucleotide
  Antisense Strand to SEQ ID NO: 445369
acauuuaugugguaccaca

SEQ ID NO: 445371 - RNA, 19 nt, Artificial Sequence
  Description of Artificial Sequence: Synthetic oligonucleotide
  Sense strand starting at position 564 of SEQ ID NO: 316855
gcaaaugugcgugaauuug

SEQ ID NO: 445372 - RNA, 19 nt, Artificial Sequence
  Description of Artificial Sequence: Synthetic oligonucleotide
  Antisense Strand to SEQ ID NO: 445371
caaauucacgcacauuugc

SEQ ID NO: 445373 - RNA, 19 nt, Artificial Sequence
  Description of Artificial Sequence: Synthetic oligonucleotide
  Sense strand starting at position 641 of SEQ ID NO: 316855
aauguuguucagggaggga

SEQ ID NO: 445374 - RNA, 19 nt, Artificial Sequence
  Description of Artificial Sequence: Synthetic oligonucleotide
  Antisense Strand to SEQ ID NO: 445373
ucccucccugaacaacauu

SEQ ID NO: 445375 - RNA, 19 nt, Artificial Sequence
  Description of Artificial Sequence: Synthetic oligonucleotide
  Sense strand starting at position 880 of SEQ ID NO: 316855
augcuuauuucucccagua

SEQ ID NO: 445376 - RNA, 19 nt, Artificial Sequence
  Description of Artificial Sequence: Synthetic oligonucleotide
  Antisense Strand to SEQ ID NO: 445375
uacugggagaaauaagcau

SEQ ID NO: 445377 - RNA, 19 nt, Artificial Sequence
  Description of Artificial Sequence: Synthetic oligonucleotide
  Sense strand starting at position 1033 of SEQ ID NO: 316855
uaaaucguucuugaaauug

SEQ ID NO: 445378 - RNA, 19 nt, Artificial Sequence
  Description of Artificial Sequence: Synthetic oligonucleotide
  Antisense Strand to SEQ ID NO: 445377
caauuucaagaacgauuua

SEQ ID NO: 445379 - RNA, 19 nt, Artificial Sequence
  Description of Artificial Sequence: Synthetic oligonucleotide
  Sense strand starting at position 1041 of SEQ ID NO: 316855
ucuugaaauuguccauuga

SEQ ID NO: 445380 - RNA, 19 nt, Artificial Sequence
  Description of Artificial Sequence: Synthetic oligonucleotide
  Antisense Strand to SEQ ID NO: 445379
ucaauggacaauuucaaga

SEQ ID NO: 445381 - RNA, 19 nt, Artificial Sequence
  Description of Artificial Sequence: Synthetic oligonucleotide
  Sense strand starting at position 1042 of SEQ ID NO: 316855
cuugaaauuguccauugau

SEQ ID NO: 445382 - RNA, 19 nt, Artificial Sequence
  Description of Artificial Sequence: Synthetic oligonucleotide
  Antisense Strand to SEQ ID NO: 445381
aucaauggacaauuucaag

SEQ ID NO: 445383 - RNA, 19 nt, Artificial Sequence
  Description of Artificial Sequence: Synthetic oligonucleotide
  Sense strand starting at position 1057 of SEQ ID NO: 316855
ugauauacucaaggcuuau

SEQ ID NO: 445384 - RNA, 19 nt, Artificial Sequence
  Description of Artificial Sequence: Synthetic oligonucleotide
  Antisense Strand to SEQ ID NO: 445383
auaagccuugaguauauca

SEQ ID NO: 445385 - RNA, 19 nt, Artificial Sequence
  Description of Artificial Sequence: Synthetic oligonucleotide
  Sense strand starting at position 1100 of SEQ ID NO: 316855
ugaguuucuuaaccagaag

SEQ ID NO: 445386 - RNA, 19 nt, Artificial Sequence
  Description of Artificial Sequence: Synthetic oligonucleotide
  Antisense Strand to SEQ ID NO: 445385
cuucugguuaagaaacuca

SEQ ID NO: 445387 - RNA, 19 nt, Artificial Sequence
  Description of Artificial Sequence: Synthetic oligonucleotide
  Sense strand starting at position 1103 of SEQ ID NO: 316855
guuucuuaaccagaaguca

SEQ ID NO: 445388 - RNA, 19 nt, Artificial Sequence
  Description of Artificial Sequence: Synthetic oligonucleotide
  Antisense Strand to SEQ ID NO: 445387
ugacuucugguuaagaaac

SEQ ID NO: 445389 - RNA, 19 nt, Artificial Sequence
  Description of Artificial Sequence: Synthetic oligonucleotide
  Sense strand starting at position 1340 of SEQ ID NO: 316855
ggcuaacaucugcaauaua

SEQ ID NO: 445390 - RNA, 19 nt, Artificial Sequence
  Description of Artificial Sequence: Synthetic oligonucleotide
  Antisense Strand to SEQ ID NO: 445389
uauauugcagauguuagcc

SEQ ID NO: 445391 - RNA, 19 nt, Artificial Sequence
  Description of Artificial Sequence: Synthetic oligonucleotide
  Sense strand starting at position 1409 of SEQ ID NO: 316855
gagcuaugucugcaaagaa

SEQ ID NO: 445392 - RNA, 19 nt, Artificial Sequence
  Description of Artificial Sequence: Synthetic oligonucleotide
  Antisense Strand to SEQ ID NO: 445391
uucuuugcagacauagcuc

SEQ ID NO: 445393 - RNA, 19 nt, Artificial Sequence
  Description of Artificial Sequence: Synthetic oligonucleotide
  Sense strand starting at position 2160 of SEQ ID NO: 316855
ccuucuugagaauggauca

SEQ ID NO: 445394 - RNA, 19 nt, Artificial Sequence
  Description of Artificial Sequence: Synthetic oligonucleotide
  Antisense Strand to SEQ ID NO: 445393
ugauccauucucaagaagg

SEQ ID NO: 445395 - RNA, 19 nt, Artificial Sequence
  Description of Artificial Sequence: Synthetic oligonucleotide
  Sense strand starting at position 2479 of SEQ ID NO: 316855
agcaaagacaugugaaugu

SEQ ID NO: 445396 - RNA, 19 nt, Artificial Sequence
  Description of Artificial Sequence: Synthetic oligonucleotide
  Antisense Strand to SEQ ID NO: 445395
acauucacaugucuuugcu

SEQ ID NO: 445397 - RNA, 19 nt, Artificial Sequence
  Description of Artificial Sequence: Synthetic oligonucleotide
  Sense strand starting at position 2483 of SEQ ID NO: 316855
aagacaugugaaugucuau

SEQ ID NO: 445398 - RNA, 19 nt, Artificial Sequence
  Description of Artificial Sequence: Synthetic oligonucleotide
  Antisense Strand to SEQ ID NO: 445397
auagacauucacaugucuu

SEQ ID NO: 445399 - RNA, 19 nt, Artificial Sequence
  Description of Artificial Sequence: Synthetic oligonucleotide
  Sense strand starting at position 2610 of SEQ ID NO: 316855
gugaaaugccaucacacau

SEQ ID NO: 445400 - RNA, 19 nt, Artificial Sequence
  Description of Artificial Sequence: Synthetic oligonucleotide
  Antisense Strand to SEQ ID NO: 445399
augugugauggcauuucac

SEQ ID NO: 445401 - RNA, 19 nt, Artificial Sequence
  Description of Artificial Sequence: Synthetic oligonucleotide
  Sense strand starting at position 2617 of SEQ ID NO: 316855
gccaucacacaucagugaa

SEQ ID NO: 445402 - RNA, 19 nt, Artificial Sequence
  Description of Artificial Sequence: Synthetic oligonucleotide
  Antisense Strand to SEQ ID NO: 445401
uucacugaugugugauggc

SEQ ID NO: 445403 - RNA, 19 nt, Artificial Sequence
  Description of Artificial Sequence: Synthetic oligonucleotide
  Sense strand starting at position 2639 of SEQ ID NO: 316855
gggagagguugacucuuua

SEQ ID NO: 445404 - RNA, 19 nt, Artificial Sequence
  Description of Artificial Sequence: Synthetic oligonucleotide
  Antisense Strand to SEQ ID NO: 445403
uaaagagucaaccucuccc

SEQ ID NO: 445405 - RNA, 19 nt, Artificial Sequence
  Description of Artificial Sequence: Synthetic oligonucleotide
  Sense strand starting at position 2643 of SEQ ID NO: 316855
gagguugacucuuuaagac

SEQ ID NO: 445406 - RNA, 19 nt, Artificial Sequence
  Description of Artificial Sequence: Synthetic oligonucleotide
  Antisense Strand to SEQ ID NO: 445405
gucuuaaagagucaaccuc

SEQ ID NO: 445407 - RNA, 19 nt, Artificial Sequence
  Description of Artificial Sequence: Synthetic oligonucleotide
  Sense strand starting at position 2846 of SEQ ID NO: 316855
accuuuacucaugaggcuu

SEQ ID NO: 445408 - RNA, 19 nt, Artificial Sequence
  Description of Artificial Sequence: Synthetic oligonucleotide
  Antisense Strand to SEQ ID NO: 445407
aagccucaugaguaaaggu

SEQ ID NO: 445409 - RNA, 19 nt, Artificial Sequence
  Description of Artificial Sequence: Synthetic oligonucleotide
  Sense strand starting at position 2860 of SEQ ID NO: 316855
ggcuuuacuggacaacauu

SEQ ID NO: 445410 - RNA, 19 nt, Artificial Sequence
  Description of Artificial Sequence: Synthetic oligonucleotide
  Antisense Strand to SEQ ID NO: 445409
aauguuguccaguaaagcc

SEQ ID NO: 445411 - RNA, 19 nt, Artificial Sequence
  Description of Artificial Sequence: Synthetic oligonucleotide
  Sense strand starting at position 2866 of SEQ ID NO: 316855
acuggacaacauugucaau

SEQ ID NO: 445412 - RNA, 19 nt, Artificial Sequence
  Description of Artificial Sequence: Synthetic oligonucleotide
  Antisense Strand to SEQ ID NO: 445411
auugacaauguuguccagu

SEQ ID NO: 445413 - RNA, 19 nt, Artificial Sequence
  Description of Artificial Sequence: Synthetic oligonucleotide
  Sense strand starting at position 2868 of SEQ ID NO: 316855
uggacaacauugucaauga

SEQ ID NO: 445414 - RNA, 19 nt, Artificial Sequence
  Description of Artificial Sequence: Synthetic oligonucleotide
  Antisense Strand to SEQ ID NO: 445413
ucauugacaauguugucca

SEQ ID NO: 445415 - RNA, 19 nt, Artificial Sequence
  Description of Artificial Sequence: Synthetic oligonucleotide
  Sense strand starting at position 2882 of SEQ ID NO: 316855
aaugaaucgguguagauuc

SEQ ID NO: 445416 - RNA, 19 nt, Artificial Sequence
  Description of Artificial Sequence: Synthetic oligonucleotide
  Antisense Strand to SEQ ID NO: 445415
gaaucuacaccgauucauu

SEQ ID NO: 445417 - RNA, 19 nt, Artificial Sequence
  Description of Artificial Sequence: Synthetic oligonucleotide
  Sense strand starting at position 3027 of SEQ ID NO: 316855
acgaguuagacugagucaa

SEQ ID NO: 445418 - RNA, 19 nt, Artificial Sequence
  Description of Artificial Sequence: Synthetic oligonucleotide
  Antisense Strand to SEQ ID NO: 445417
uugacucagucuaacucgu

SEQ ID NO: 445419 - RNA, 19 nt, Artificial Sequence
  Description of Artificial Sequence: Synthetic oligonucleotide
  Sense strand starting at position 3029 of SEQ ID NO: 316855
gaguuagacugagucaacu

SEQ ID NO: 445420 - RNA, 19 nt, Artificial Sequence
  Description of Artificial Sequence: Synthetic oligonucleotide
  Antisense Strand to SEQ ID NO: 445419
aguugacucagucuaacuc

SEQ ID NO: 445421 - RNA, 19 nt, Artificial Sequence
  Description of Artificial Sequence: Synthetic oligonucleotide
  Sense strand starting at position 3123 of SEQ ID NO: 316855
ugugcauaagauugcauuu

SEQ ID NO: 445422 - RNA, 19 nt, Artificial Sequence
  Description of Artificial Sequence: Synthetic oligonucleotide
  Antisense Strand to SEQ ID NO: 445421
aaaugcaaucuuaugcaca

SEQ ID NO: 445423 - RNA, 19 nt, Artificial Sequence
  Description of Artificial Sequence: Synthetic oligonucleotide
  Sense strand starting at position 3362 of SEQ ID NO: 316855
acugaugcuggucacaaua

SEQ ID NO: 445424 - RNA, 19 nt, Artificial Sequence
  Description of Artificial Sequence: Synthetic oligonucleotide
  Antisense Strand to SEQ ID NO: 445423
uauugugaccagcaucagu

SEQ ID NO: 445425 - RNA, 19 nt, Artificial Sequence
  Description of Artificial Sequence: Synthetic oligonucleotide
  Sense strand starting at position 3457 of SEQ ID NO: 316855
cuauucuaagaaugcuuga

SEQ ID NO: 445426 - RNA, 19 nt, Artificial Sequence
  Description of Artificial Sequence: Synthetic oligonucleotide
  Antisense Strand to SEQ ID NO: 445425
ucaagcauucuuagaauag

SEQ ID NO: 445427 - RNA, 19 nt, Artificial Sequence
  Description of Artificial Sequence: Synthetic oligonucleotide
  Sense strand starting at position 3462 of SEQ ID NO: 316855
cuaagaaugcuugacagua

SEQ ID NO: 445428 - RNA, 19 nt, Artificial Sequence
  Description of Artificial Sequence: Synthetic oligonucleotide
  Antisense Strand to SEQ ID NO: 445427
uacugucaagcauucuuag

SEQ ID NO: 445429 - RNA, 19 nt, Artificial Sequence
  Description of Artificial Sequence: Synthetic oligonucleotide
  Sense strand starting at position 3501 of SEQ ID NO: 316855
agacaaagggccuguugau

SEQ ID NO: 445430 - RNA, 19 nt, Artificial Sequence
  Description of Artificial Sequence: Synthetic oligonucleotide
  Antisense Strand to SEQ ID NO: 445429
aucaacaggcccuuugucu

SEQ ID NO: 445431 - RNA, 19 nt, Artificial Sequence
  Description of Artificial Sequence: Synthetic oligonucleotide
  Sense strand starting at position 3701 of SEQ ID NO: 316855
caaacagaucaguggcaua

SEQ ID NO: 445432 - RNA, 19 nt, Artificial Sequence
  Description of Artificial Sequence: Synthetic oligonucleotide
  Antisense Strand to SEQ ID NO: 445431
uaugccacugaucuguuug

SEQ ID NO: 445433 - RNA, 19 nt, Artificial Sequence
  Description of Artificial Sequence: Synthetic oligonucleotide
  Sense strand starting at position 3849 of SEQ ID NO: 316855
agauuaaauauaggugagu

SEQ ID NO: 445434 - RNA, 19 nt, Artificial Sequence
  Description of Artificial Sequence: Synthetic oligonucleotide
  Antisense Strand to SEQ ID NO: 445433
acucaccuauauuuaaucu

SEQ ID NO: 445435 - RNA, 19 nt, Artificial Sequence
  Description of Artificial Sequence: Synthetic oligonucleotide
  Sense strand starting at position 3850 of SEQ ID NO: 316855
gauuaaauauaggugaguu

SEQ ID NO: 445436 - RNA, 19 nt, Artificial Sequence
  Description of Artificial Sequence: Synthetic oligonucleotide
  Antisense Strand to SEQ ID NO: 445435
aacucaccuauauuuaauc

SEQ ID NO: 445437 - RNA, 19 nt, Artificial Sequence
  Description of Artificial Sequence: Synthetic oligonucleotide
  Sense strand starting at position 3854 of SEQ ID NO: 316855
aaauauaggugaguuuaac

SEQ ID NO: 445438 - RNA, 19 nt, Artificial Sequence
  Description of Artificial Sequence: Synthetic oligonucleotide
  Antisense Strand to SEQ ID NO: 445437
guuaaacucaccuauauuu

SEQ ID NO: 445439 - RNA, 19 nt, Artificial Sequence
  Description of Artificial Sequence: Synthetic oligonucleotide
  Sense strand starting at position 3899 of SEQ ID NO: 316855
uauauuuacugugggauuu

SEQ ID NO: 445440 - RNA, 19 nt, Artificial Sequence
  Description of Artificial Sequence: Synthetic oligonucleotide
  Antisense Strand to SEQ ID NO: 445439
aaaucccacaguaaauaua

SEQ ID NO: 445441 - RNA, 19 nt, Artificial Sequence
  Description of Artificial Sequence: Synthetic oligonucleotide
  Sense strand starting at position 1 of SEQ ID NO: 316856
ucacuuaugcucuaagaug

SEQ ID NO: 445442 - RNA, 19 nt, Artificial Sequence
  Description of Artificial Sequence: Synthetic oligonucleotide
  Antisense Strand to SEQ ID NO: 445441
caucuuagagcauaaguga

SEQ ID NO: 445443 - RNA, 19 nt, Artificial Sequence
  Description of Artificial Sequence: Synthetic oligonucleotide
  Sense strand starting at position 97 of SEQ ID NO: 316856
uagacuuauguaugaaguu

SEQ ID NO: 445444 - RNA, 19 nt, Artificial Sequence
  Description of Artificial Sequence: Synthetic oligonucleotide
  Antisense Strand to SEQ ID NO: 445443
aacuucauacauaagucua

SEQ ID NO: 445445 - RNA, 19 nt, Artificial Sequence
  Description of Artificial Sequence: Synthetic oligonucleotide
  Sense strand starting at position 560 of SEQ ID NO: 316856
ggcagaauguaauuaaaca

SEQ ID NO: 445446 - RNA, 19 nt, Artificial Sequence
  Description of Artificial Sequence: Synthetic oligonucleotide
  Antisense Strand to SEQ ID NO: 445445
uguuuaauuacauucugcc

SEQ ID NO: 445447 - RNA, 19 nt, Artificial Sequence
  Description of Artificial Sequence: Synthetic oligonucleotide
  Sense strand starting at position 584 of SEQ ID NO: 316856
agcaguaguauguaaauac

SEQ ID NO: 445448 - RNA, 19 nt, Artificial Sequence
  Description of Artificial Sequence: Synthetic oligonucleotide
  Antisense Strand to SEQ ID NO: 445447
guauuuacauacuacugcu

SEQ ID NO: 445449 - RNA, 19 nt, Artificial Sequence
  Description of Artificial Sequence: Synthetic oligonucleotide
  Sense strand starting at position 681 of SEQ ID NO: 316856
uuuaguauagguuacaaca

SEQ ID NO: 445450 - RNA, 19 nt, Artificial Sequence
  Description of Artificial Sequence: Synthetic oligonucleotide
  Antisense Strand to SEQ ID NO: 445449
uguuguaaccuauacuaaa

SEQ ID NO: 445451 - RNA, 19 nt, Artificial Sequence
  Description of Artificial Sequence: Synthetic oligonucleotide
  Sense strand starting at position 755 of SEQ ID NO: 316856
cuaagauuauggcccaaga

SEQ ID NO: 445452 - RNA, 19 nt, Artificial Sequence
  Description of Artificial Sequence: Synthetic oligonucleotide
  Antisense Strand to SEQ ID NO: 445451
ucuugggccauaaucuuag

SEQ ID NO: 445453 - RNA, 19 nt, Artificial Sequence
  Description of Artificial Sequence: Synthetic oligonucleotide
  Sense strand starting at position 920 of SEQ ID NO: 316856
uauuauguuggaugacuga

SEQ ID NO: 445454 - RNA, 19 nt, Artificial Sequence
  Description of Artificial Sequence: Synthetic oligonucleotide
  Antisense Strand to SEQ ID NO: 445453
ucagucauccaacauaaua

SEQ ID NO: 445455 - RNA, 19 nt, Artificial Sequence
  Description of Artificial Sequence: Synthetic oligonucleotide
  Sense strand starting at position 923 of SEQ ID NO: 316856
uauguuggaugacugagau

SEQ ID NO: 445456 - RNA, 19 nt, Artificial Sequence
  Description of Artificial Sequence: Synthetic oligonucleotide
  Antisense Strand to SEQ ID NO: 445455
aucucagucauccaacaua

SEQ ID NO: 445457 - RNA, 19 nt, Artificial Sequence
  Description of Artificial Sequence: Synthetic oligonucleotide
  Sense strand starting at position 956 of SEQ ID NO: 316856
aaaguuagugauuaaaguc

SEQ ID NO: 445458 - RNA, 19 nt, Artificial Sequence
  Description of Artificial Sequence: Synthetic oligonucleotide
  Antisense Strand to SEQ ID NO: 445457
gacuuuaaucacuaacuuu

SEQ ID NO: 445459 - RNA, 19 nt, Artificial Sequence
  Description of Artificial Sequence: Synthetic oligonucleotide
  Sense strand starting at position 1026 of SEQ ID NO: 316856
aaguacaaugacuguguaa

SEQ ID NO: 445460 - RNA, 19 nt, Artificial Sequence
  Description of Artificial Sequence: Synthetic oligonucleotide
  Antisense Strand to SEQ ID NO: 445459
uuacacagucauuguacuu

SEQ ID NO: 445461 - RNA, 19 nt, Artificial Sequence
  Description of Artificial Sequence: Synthetic oligonucleotide
  Sense strand starting at position 1053 of SEQ ID NO: 316856
uccauuccaucugugaaag

SEQ ID NO: 445462 - RNA, 19 nt, Artificial Sequence
  Description of Artificial Sequence: Synthetic oligonucleotide
  Antisense Strand to SEQ ID NO: 445461
cuuucacagauggaaugga

SEQ ID NO: 445463 - RNA, 19 nt, Artificial Sequence
  Description of Artificial Sequence: Synthetic oligonucleotide
  Sense strand starting at position 1134 of SEQ ID NO: 316856
gacaguaucuaguuugaga

SEQ ID NO: 445464 - RNA, 19 nt, Artificial Sequence
  Description of Artificial Sequence: Synthetic oligonucleotide
  Antisense Strand to SEQ ID NO: 445463
ucucaaacuagauacuguc

SEQ ID NO: 445465 - RNA, 19 nt, Artificial Sequence
  Description of Artificial Sequence: Synthetic oligonucleotide
  Sense strand starting at position 1136 of SEQ ID NO: 316856
caguaucuaguuugagaac

SEQ ID NO: 445466 - RNA, 19 nt, Artificial Sequence
  Description of Artificial Sequence: Synthetic oligonucleotide
  Antisense Strand to SEQ ID NO: 445465
guucucaaacuagauacug

SEQ ID NO: 445467 - RNA, 19 nt, Artificial Sequence
  Description of Artificial Sequence: Synthetic oligonucleotide
  Sense strand starting at position 1391 of SEQ ID NO: 316856
cagucauaccuguauuagg

SEQ ID NO: 445468 - RNA, 19 nt, Artificial Sequence
  Description of Artificial Sequence: Synthetic oligonucleotide
  Antisense Strand to SEQ ID NO: 445467
ccuaauacagguaugacug

SEQ ID NO: 445469 - RNA, 19 nt, Artificial Sequence
  Description of Artificial Sequence: Synthetic oligonucleotide
  Sense strand starting at position 1561 of SEQ ID NO: 316856
aguaguaaaggaggucuaa

SEQ ID NO: 445470 - RNA, 19 nt, Artificial Sequence
  Description of Artificial Sequence: Synthetic oligonucleotide
  Antisense Strand to SEQ ID NO: 445469
uuagaccuccuuuacuacu

SEQ ID NO: 445471 - RNA, 19 nt, Artificial Sequence
  Description of Artificial Sequence: Synthetic oligonucleotide
  Sense strand starting at position 1647 of SEQ ID NO: 316856
agaagauuagucugcauac

SEQ ID NO: 445472 - RNA, 19 nt, Artificial Sequence
  Description of Artificial Sequence: Synthetic oligonucleotide
  Antisense Strand to SEQ ID NO: 445471
guaugcagacuaaucuucu

SEQ ID NO: 445473 - RNA, 19 nt, Artificial Sequence
  Description of Artificial Sequence: Synthetic oligonucleotide
  Sense strand starting at position 1648 of SEQ ID NO: 316856
gaagauuagucugcauaca

SEQ ID NO: 445474 - RNA, 19 nt, Artificial Sequence
  Description of Artificial Sequence: Synthetic oligonucleotide
  Antisense Strand to SEQ ID NO: 445473
uguaugcagacuaaucuuc

SEQ ID NO: 445475 - RNA, 19 nt, Artificial Sequence
  Description of Artificial Sequence: Synthetic oligonucleotide
  Sense strand starting at position 2038 of SEQ ID NO: 316856
ccauuuaagcacuguugua

SEQ ID NO: 445476 - RNA, 19 nt, Artificial Sequence
  Description of Artificial Sequence: Synthetic oligonucleotide
  Antisense Strand to SEQ ID NO: 445475
uacaacagugcuuaaaugg

SEQ ID NO: 445477 - RNA, 19 nt, Artificial Sequence
  Description of Artificial Sequence: Synthetic oligonucleotide
  Sense strand starting at position 2093 of SEQ ID NO: 316856
uugucaucacaagaguuua

SEQ ID NO: 445478 - RNA, 19 nt, Artificial Sequence
  Description of Artificial Sequence: Synthetic oligonucleotide
  Antisense Strand to SEQ ID NO: 445477
uaaacucuugugaugacaa

SEQ ID NO: 445479 - RNA, 19 nt, Artificial Sequence
  Description of Artificial Sequence: Synthetic oligonucleotide
  Sense strand starting at position 2211 of SEQ ID NO: 316856
agcuuacagcaguaagauu

SEQ ID NO: 445480 - RNA, 19 nt, Artificial Sequence
  Description of Artificial Sequence: Synthetic oligonucleotide
  Antisense Strand to SEQ ID NO: 445479
aaucuuacugcuguaagcu

SEQ ID NO: 445481 - RNA, 19 nt, Artificial Sequence
  Description of Artificial Sequence: Synthetic oligonucleotide
  Sense strand starting at position 2220 of SEQ ID NO: 316856
caguaagauuuagaagaug

SEQ ID NO: 445482 - RNA, 19 nt, Artificial Sequence
  Description of Artificial Sequence: Synthetic oligonucleotide
  Antisense Strand to SEQ ID NO: 445481
caucuucuaaaucuuacug

SEQ ID NO: 445483 - RNA, 19 nt, Artificial Sequence
  Description of Artificial Sequence: Synthetic oligonucleotide
  Sense strand starting at position 2419 of SEQ ID NO: 316856
auguuauauccauggguga

SEQ ID NO: 445484 - RNA, 19 nt, Artificial Sequence
  Description of Artificial Sequence: Synthetic oligonucleotide
  Antisense Strand to SEQ ID NO: 445483
ucacccauggauauaacau

SEQ ID NO: 445485 - RNA, 19 nt, Artificial Sequence
  Description of Artificial Sequence: Synthetic oligonucleotide
  Sense strand starting at position 2420 of SEQ ID NO: 316856
uguuauauccaugggugaa

SEQ ID NO: 445486 - RNA, 19 nt, Artificial Sequence
  Description of Artificial Sequence: Synthetic oligonucleotide
  Antisense Strand to SEQ ID NO: 445485
uucacccauggauauaaca

SEQ ID NO: 445487 - RNA, 19 nt, Artificial Sequence
  Description of Artificial Sequence: Synthetic oligonucleotide
  Sense strand starting at position 2421 of SEQ ID NO: 316856
guuauauccaugggugaaa

SEQ ID NO: 445488 - RNA, 19 nt, Artificial Sequence
  Description of Artificial Sequence: Synthetic oligonucleotide
  Antisense Strand to SEQ ID NO: 445487
uuucacccauggauauaac

SEQ ID NO: 445489 - RNA, 19 nt, Artificial Sequence
  Description of Artificial Sequence: Synthetic oligonucleotide
  Sense strand starting at position 2795 of SEQ ID NO: 316856
uggcaauguuugcuuauuu

SEQ ID NO: 445490 - RNA, 19 nt, Artificial Sequence
  Description of Artificial Sequence: Synthetic oligonucleotide
  Antisense Strand to SEQ ID NO: 445489
aaauaagcaaacauugcca

SEQ ID NO: 445491 - RNA, 19 nt, Artificial Sequence
  Description of Artificial Sequence: Synthetic oligonucleotide
  Sense strand starting at position 2918 of SEQ ID NO: 316856
cuguucuuccaaggacaga

SEQ ID NO: 445492 - RNA, 19 nt, Artificial Sequence
  Description of Artificial Sequence: Synthetic oligonucleotide
  Antisense Strand to SEQ ID NO: 445491
ucuguccuuggaagaacag

SEQ ID NO: 445493 - RNA, 19 nt, Artificial Sequence
  Description of Artificial Sequence: Synthetic oligonucleotide
  Sense strand starting at position 3083 of SEQ ID NO: 316856
auccaagaugugcaaaguu

SEQ ID NO: 445494 - RNA, 19 nt, Artificial Sequence
  Description of Artificial Sequence: Synthetic oligonucleotide
  Antisense Strand to SEQ ID NO: 445493
aacuuugcacaucuuggau

SEQ ID NO: 445495 - RNA, 19 nt, Artificial Sequence
  Description of Artificial Sequence: Synthetic oligonucleotide
  Sense strand starting at position 3140 of SEQ ID NO: 316856
uguagaaacugaguaguau

SEQ ID NO: 445496 - RNA, 19 nt, Artificial Sequence
  Description of Artificial Sequence: Synthetic oligonucleotide
  Antisense Strand to SEQ ID NO: 445495
auacuacucaguuucuaca

SEQ ID NO: 445497 - RNA, 19 nt, Artificial Sequence
  Description of Artificial Sequence: Synthetic oligonucleotide
  Sense strand starting at position 3141 of SEQ ID NO: 316856
guagaaacugaguaguauu

SEQ ID NO: 445498 - RNA, 19 nt, Artificial Sequence
  Description of Artificial Sequence: Synthetic oligonucleotide
  Antisense Strand to SEQ ID NO: 445497
aauacuacucaguuucuac

SEQ ID NO: 445499 - RNA, 19 nt, Artificial Sequence
  Description of Artificial Sequence: Synthetic oligonucleotide
  Sense strand starting at position 3230 of SEQ ID NO: 316856
uguucuuggaagugaaaug

SEQ ID NO: 445500 - RNA, 19 nt, Artificial Sequence
  Description of Artificial Sequence: Synthetic oligonucleotide
  Antisense Strand to SEQ ID NO: 445499
cauuucacuuccaagaaca

SEQ ID NO: 445501 - RNA, 19 nt, Artificial Sequence
  Description of Artificial Sequence: Synthetic oligonucleotide
  Sense strand starting at position 3315 of SEQ ID NO: 316856
uggccuuacccauauaggu

SEQ ID NO: 445502 - RNA, 19 nt, Artificial Sequence
  Description of Artificial Sequence: Synthetic oligonucleotide
  Antisense Strand to SEQ ID NO: 445501
accuauauggguaaggcca

SEQ ID NO: 445503 - RNA, 19 nt, Artificial Sequence
  Description of Artificial Sequence: Synthetic oligonucleotide
  Sense strand starting at position 3338 of SEQ ID NO: 316856
gggaguugccacuaaaccu

SEQ ID NO: 445504 - RNA, 19 nt, Artificial Sequence
  Description of Artificial Sequence: Synthetic oligonucleotide
  Antisense Strand to SEQ ID NO: 445503
agguuuaguggcaacuccc

SEQ ID NO: 445505 - RNA, 19 nt, Artificial Sequence
  Description of Artificial Sequence: Synthetic oligonucleotide
  Sense strand starting at position 3409 of SEQ ID NO: 316856
guuaguugucaugaaauaa

SEQ ID NO: 445506 - RNA, 19 nt, Artificial Sequence
  Description of Artificial Sequence: Synthetic oligonucleotide
  Antisense Strand to SEQ ID NO: 445505
uuauuucaugacaacuaac

SEQ ID NO: 445507 - RNA, 19 nt, Artificial Sequence
  Description of Artificial Sequence: Synthetic oligonucleotide
  Sense strand starting at position 3449 of SEQ ID NO: 316856
caagcuauugaaugaguga

SEQ ID NO: 445508 - RNA, 19 nt, Artificial Sequence
  Description of Artificial Sequence: Synthetic oligonucleotide
  Antisense Strand to SEQ ID NO: 445507
ucacucauucaauagcuug

SEQ ID NO: 445509 - RNA, 19 nt, Artificial Sequence
  Description of Artificial Sequence: Synthetic oligonucleotide
  Sense strand starting at position 3452 of SEQ ID NO: 316856
gcuauugaaugagugaauu

SEQ ID NO: 445510 - RNA, 19 nt, Artificial Sequence
  Description of Artificial Sequence: Synthetic oligonucleotide
  Antisense Strand to SEQ ID NO: 445509
aauucacucauucaauagc

SEQ ID NO: 445511 - RNA, 19 nt, Artificial Sequence
  Description of Artificial Sequence: Synthetic oligonucleotide
  Sense strand starting at position 3460 of SEQ ID NO: 316856
augagugaauucuuaguac

SEQ ID NO: 445512 - RNA, 19 nt, Artificial Sequence
  Description of Artificial Sequence: Synthetic oligonucleotide
  Antisense Strand to SEQ ID NO: 445511
guacuaagaauucacucau

SEQ ID NO: 445513 - RNA, 19 nt, Artificial Sequence
  Description of Artificial Sequence: Synthetic oligonucleotide
  Sense strand starting at position 3725 of SEQ ID NO: 316856
ugaaaucaguccuuuauga

SEQ ID NO: 445514 - RNA, 19 nt, Artificial Sequence
  Description of Artificial Sequence: Synthetic oligonucleotide
  Antisense Strand to SEQ ID NO: 445513
ucauaaaggacugauuuca

SEQ ID NO: 445515 - RNA, 19 nt, Artificial Sequence
  Description of Artificial Sequence: Synthetic oligonucleotide
  Sense strand starting at position 3802 of SEQ ID NO: 316856
auuacaacuguuugugaaa

SEQ ID NO: 445516 - RNA, 19 nt, Artificial Sequence
  Description of Artificial Sequence: Synthetic oligonucleotide
  Antisense Strand to SEQ ID NO: 445515
uuucacaaacaguuguaau

SEQ ID NO: 445517 - RNA, 19 nt, Artificial Sequence
  Description of Artificial Sequence: Synthetic oligonucleotide
  Sense strand starting at position 3814 of SEQ ID NO: 316856
ugugaaacauguuuaugau

SEQ ID NO: 445518 - RNA, 19 nt, Artificial Sequence
  Description of Artificial Sequence: Synthetic oligonucleotide
  Antisense Strand to SEQ ID NO: 445517
aucauaaacauguuucaca

SEQ ID NO: 445519 - RNA, 19 nt, Artificial Sequence
  Description of Artificial Sequence: Synthetic oligonucleotide
  Sense strand starting at position 3815 of SEQ ID NO: 316856
gugaaacauguuuaugauu

SEQ ID NO: 445520 - RNA, 19 nt, Artificial Sequence
  Description of Artificial Sequence: Synthetic oligonucleotide
  Antisense Strand to SEQ ID NO: 445519
aaucauaaacauguuucac

SEQ ID NO: 445521 - RNA, 19 nt, Artificial Sequence
  Description of Artificial Sequence: Synthetic oligonucleotide
  Sense strand starting at position 154 of SEQ ID NO: 316857
cucgauuucuucugaaccu

SEQ ID NO: 445522 - RNA, 19 nt, Artificial Sequence
  Description of Artificial Sequence: Synthetic oligonucleotide
  Antisense Strand to SEQ ID NO: 445521
agguucagaagaaaucgag

SEQ ID NO: 445523 - RNA, 19 nt, Artificial Sequence
  Description of Artificial Sequence: Synthetic oligonucleotide
  Sense strand starting at position 155 of SEQ ID NO: 316857
ucgauuucuucugaaccua

SEQ ID NO: 445524 - RNA, 19 nt, Artificial Sequence
  Description of Artificial Sequence: Synthetic oligonucleotide
  Antisense Strand to SEQ ID NO: 445523
uagguucagaagaaaucga

SEQ ID NO: 445525 - RNA, 19 nt, Artificial Sequence
  Description of Artificial Sequence: Synthetic oligonucleotide
  Sense strand starting at position 163 of SEQ ID NO: 316857
uucugaaccuaugcuaaga

SEQ ID NO: 445526 - RNA, 19 nt, Artificial Sequence
  Description of Artificial Sequence: Synthetic oligonucleotide
  Antisense Strand to SEQ ID NO: 445525
ucuuagcauagguucagaa

SEQ ID NO: 445527 - RNA, 19 nt, Artificial Sequence
  Description of Artificial Sequence: Synthetic oligonucleotide
  Sense strand starting at position 176 of SEQ ID NO: 316857
cuaagaugucaagguacug

SEQ ID NO: 445528 - RNA, 19 nt, Artificial Sequence
  Description of Artificial Sequence: Synthetic oligonucleotide
  Antisense Strand to SEQ ID NO: 445527
caguaccuugacaucuuag

SEQ ID NO: 445529 - RNA, 19 nt, Artificial Sequence
  Description of Artificial Sequence: Synthetic oligonucleotide
  Sense strand starting at position 334 of SEQ ID NO: 316857
ggccaagaauuccagacua

SEQ ID NO: 445530 - RNA, 19 nt, Artificial Sequence
  Description of Artificial Sequence: Synthetic oligonucleotide
  Antisense Strand to SEQ ID NO: 445529
uagucuggaauucuuggcc

SEQ ID NO: 445531 - RNA, 19 nt, Artificial Sequence
  Description of Artificial Sequence: Synthetic oligonucleotide
  Sense strand starting at position 629 of SEQ ID NO: 316857
cucaguuucuuggaagaug

SEQ ID NO: 445532 - RNA, 19 nt, Artificial Sequence
  Description of Artificial Sequence: Synthetic oligonucleotide
  Antisense Strand to SEQ ID NO: 445531
caucuuccaagaaacugag

SEQ ID NO: 445533 - RNA, 19 nt, Artificial Sequence
  Description of Artificial Sequence: Synthetic oligonucleotide
  Sense strand starting at position 672 of SEQ ID NO: 316857
uuuguauaucucgacuauu

SEQ ID NO: 445534 - RNA, 19 nt, Artificial Sequence
  Description of Artificial Sequence: Synthetic oligonucleotide
  Antisense Strand to SEQ ID NO: 445533
aauagucgagauauacaaa

SEQ ID NO: 445535 - RNA, 19 nt, Artificial Sequence
  Description of Artificial Sequence: Synthetic oligonucleotide
  Sense strand starting at position 675 of SEQ ID NO: 316857
guauaucucgacuauuauu

SEQ ID NO: 445536 - RNA, 19 nt, Artificial Sequence
  Description of Artificial Sequence: Synthetic oligonucleotide
  Antisense Strand to SEQ ID NO: 445535
aauaauagucgagauauac

SEQ ID NO: 445537 - RNA, 19 nt, Artificial Sequence
  Description of Artificial Sequence: Synthetic oligonucleotide
  Sense strand starting at position 684 of SEQ ID NO: 316857
gacuauuauugugcaugca

SEQ ID NO: 445538 - RNA, 19 nt, Artificial Sequence
  Description of Artificial Sequence: Synthetic oligonucleotide
  Antisense Strand to SEQ ID NO: 445537
ugcaugcacaauaauaguc

SEQ ID NO: 445539 - RNA, 19 nt, Artificial Sequence
  Description of Artificial Sequence: Synthetic oligonucleotide
  Sense strand starting at position 685 of SEQ ID NO: 316857
acuauuauugugcaugcaa

SEQ ID NO: 445540 - RNA, 19 nt, Artificial Sequence
  Description of Artificial Sequence: Synthetic oligonucleotide
  Antisense Strand to SEQ ID NO: 445539
uugcaugcacaauaauagu

SEQ ID NO: 445541 - RNA, 19 nt, Artificial Sequence
  Description of Artificial Sequence: Synthetic oligonucleotide
  Sense strand starting at position 717 of SEQ ID NO: 316857
guacuuguaucugcaauga

SEQ ID NO: 445542 - RNA, 19 nt, Artificial Sequence
  Description of Artificial Sequence: Synthetic oligonucleotide
  Antisense Strand to SEQ ID NO: 445541
ucauugcagauacaaguac

SEQ ID NO: 445543 - RNA, 19 nt, Artificial Sequence
  Description of Artificial Sequence: Synthetic oligonucleotide
  Sense strand starting at position 721 of SEQ ID NO: 316857
uuguaucugcaaugaauuc

SEQ ID NO: 445544 - RNA, 19 nt, Artificial Sequence
  Description of Artificial Sequence: Synthetic oligonucleotide
  Antisense Strand to SEQ ID NO: 445543
gaauucauugcagauacaa

SEQ ID NO: 445545 - RNA, 19 nt, Artificial Sequence
  Description of Artificial Sequence: Synthetic oligonucleotide
  Sense strand starting at position 841 of SEQ ID NO: 316857
gaaggaauccgcuaaguug

SEQ ID NO: 445546 - RNA, 19 nt, Artificial Sequence
  Description of Artificial Sequence: Synthetic oligonucleotide
  Antisense Strand to SEQ ID NO: 445545
caacuuagcggauuccuuc

SEQ ID NO: 445547 - RNA, 19 nt, Artificial Sequence
  Description of Artificial Sequence: Synthetic oligonucleotide
  Sense strand starting at position 904 of SEQ ID NO: 316857
aaggaaugcucuggauaag

SEQ ID NO: 445548 - RNA, 19 nt, Artificial Sequence
  Description of Artificial Sequence: Synthetic oligonucleotide
  Antisense Strand to SEQ ID NO: 445547
cuuauccagagcauuccuu

SEQ ID NO: 445549 - RNA, 19 nt, Artificial Sequence
  Description of Artificial Sequence: Synthetic oligonucleotide
  Sense strand starting at position 967 of SEQ ID NO: 316857
agacguguccuauagcuca

SEQ ID NO: 445550 - RNA, 19 nt, Artificial Sequence
  Description of Artificial Sequence: Synthetic oligonucleotide
  Antisense Strand to SEQ ID NO: 445549
ugagcuauaggacacgucu

SEQ ID NO: 445551 - RNA, 19 nt, Artificial Sequence
  Description of Artificial Sequence: Synthetic oligonucleotide
  Sense strand starting at position 1083 of SEQ ID NO: 316857
ccuugauugcccgacacca

SEQ ID NO: 445552 - RNA, 19 nt, Artificial Sequence
  Description of Artificial Sequence: Synthetic oligonucleotide
  Antisense Strand to SEQ ID NO: 445551
uggugucgggcaaucaagg

SEQ ID NO: 445553 - RNA, 19 nt, Artificial Sequence
  Description of Artificial Sequence: Synthetic oligonucleotide
  Sense strand starting at position 1378 of SEQ ID NO: 316857
agcuagugucgcgaggaaa

SEQ ID NO: 445554 - RNA, 19 nt, Artificial Sequence
  Description of Artificial Sequence: Synthetic oligonucleotide
  Antisense Strand to SEQ ID NO: 445553
uuuccucgcgacacuagcu

SEQ ID NO: 445555 - RNA, 19 nt, Artificial Sequence
  Description of Artificial Sequence: Synthetic oligonucleotide
  Sense strand starting at position 3159 of SEQ ID NO: 316857
gaacgaguacagcaauaua

SEQ ID NO: 445556 - RNA, 19 nt, Artificial Sequence
  Description of Artificial Sequence: Synthetic oligonucleotide
  Antisense Strand to SEQ ID NO: 445555
uauauugcuguacucguuc

SEQ ID NO: 445557 - RNA, 19 nt, Artificial Sequence
  Description of Artificial Sequence: Synthetic oligonucleotide
  Sense strand starting at position 3201 of SEQ ID NO: 316857
gaucaacgcgagcaagaau

SEQ ID NO: 445558 - RNA, 19 nt, Artificial Sequence
  Description of Artificial Sequence: Synthetic oligonucleotide
  Antisense Strand to SEQ ID NO: 445557
auucuugcucgcguugauc

SEQ ID NO: 445559 - RNA, 19 nt, Artificial Sequence
  Description of Artificial Sequence: Synthetic oligonucleotide
  Sense strand starting at position 3210 of SEQ ID NO: 316857
gagcaagaaucagcaggau

SEQ ID NO: 445560 - RNA, 19 nt, Artificial Sequence
  Description of Artificial Sequence: Synthetic oligonucleotide
  Antisense Strand to SEQ ID NO: 445559
auccugcugauucuugcuc

SEQ ID NO: 445561 - RNA, 19 nt, Artificial Sequence
  Description of Artificial Sequence: Synthetic oligonucleotide
  Sense strand starting at position 3553 of SEQ ID NO: 316857
cauugugucucuguuacca

SEQ ID NO: 445562 - RNA, 19 nt, Artificial Sequence
  Description of Artificial Sequence: Synthetic oligonucleotide
  Antisense Strand to SEQ ID NO: 445561
ugguaacagagacacaaug

SEQ ID NO: 445563 - RNA, 19 nt, Artificial Sequence
  Description of Artificial Sequence: Synthetic oligonucleotide
  Sense strand starting at position 3626 of SEQ ID NO: 316857
ggcgacugguacccagauu

SEQ ID NO: 445564 - RNA, 19 nt, Artificial Sequence
  Description of Artificial Sequence: Synthetic oligonucleotide
  Antisense Strand to SEQ ID NO: 445563
aaucuggguaccagucgcc

SEQ ID NO: 445565 - RNA, 19 nt, Artificial Sequence
  Description of Artificial Sequence: Synthetic oligonucleotide
  Sense strand starting at position 3651 of SEQ ID NO: 316857
acguguuaugauugaugag

SEQ ID NO: 445566 - RNA, 19 nt, Artificial Sequence
  Description of Artificial Sequence: Synthetic oligonucleotide
  Antisense Strand to SEQ ID NO: 445565
cucaucaaucauaacacgu

SEQ ID NO: 445567 - RNA, 19 nt, Artificial Sequence
  Description of Artificial Sequence: Synthetic oligonucleotide
  Sense strand starting at position 3652 of SEQ ID NO: 316857
cguguuaugauugaugagu

SEQ ID NO: 445568 - RNA, 19 nt, Artificial Sequence
  Description of Artificial Sequence: Synthetic oligonucleotide
  Antisense Strand to SEQ ID NO: 445567
acucaucaaucauaacacg

SEQ ID NO: 445569 - RNA, 19 nt, Artificial Sequence
  Description of Artificial Sequence: Synthetic oligonucleotide
  Sense strand starting at position 3661 of SEQ ID NO: 316857
auugaugaguucucugggu

SEQ ID NO: 445570 - RNA, 19 nt, Artificial Sequence
  Description of Artificial Sequence: Synthetic oligonucleotide
  Antisense Strand to SEQ ID NO: 445569
acccagagaacucaucaau

SEQ ID NO: 445571 - RNA, 19 nt, Artificial Sequence
  Description of Artificial Sequence: Synthetic oligonucleotide
  Sense strand starting at position 3665 of SEQ ID NO: 316857
augaguucucuggguggaa

SEQ ID NO: 445572 - RNA, 19 nt, Artificial Sequence
  Description of Artificial Sequence: Synthetic oligonucleotide
  Antisense Strand to SEQ ID NO: 445571
uuccacccagagaacucau

SEQ ID NO: 445573 - RNA, 19 nt, Artificial Sequence
  Description of Artificial Sequence: Synthetic oligonucleotide
  Sense strand starting at position 3666 of SEQ ID NO: 316857
ugaguucucuggguggaac

SEQ ID NO: 445574 - RNA, 19 nt, Artificial Sequence
  Description of Artificial Sequence: Synthetic oligonucleotide
  Antisense Strand to SEQ ID NO: 445573
guuccacccagagaacuca

SEQ ID NO: 445575 - RNA, 19 nt, Artificial Sequence
  Description of Artificial Sequence: Synthetic oligonucleotide
  Sense strand starting at position 3687 of SEQ ID NO: 316857
uggcuugacagcugagaac

SEQ ID NO: 445576 - RNA, 19 nt, Artificial Sequence
  Description of Artificial Sequence: Synthetic oligonucleotide
  Antisense Strand to SEQ ID NO: 445575
guucucagcugucaagcca

SEQ ID NO: 445577 - RNA, 19 nt, Artificial Sequence
  Description of Artificial Sequence: Synthetic oligonucleotide
  Sense strand starting at position 3712 of SEQ ID NO: 316857
ggaccuaaguaagauaaga

SEQ ID NO: 445578 - RNA, 19 nt, Artificial Sequence
  Description of Artificial Sequence: Synthetic oligonucleotide
  Antisense Strand to SEQ ID NO: 445577
ucuuaucuuacuuaggucc

SEQ ID NO: 445579 - RNA, 19 nt, Artificial Sequence
  Description of Artificial Sequence: Synthetic oligonucleotide
  Sense strand starting at position 3736 of SEQ ID NO: 316857
gggauucaucuaggaaguu

SEQ ID NO: 445580 - RNA, 19 nt, Artificial Sequence
  Description of Artificial Sequence: Synthetic oligonucleotide
  Antisense Strand to SEQ ID NO: 445579
aacuuccuagaugaauccc

SEQ ID NO: 445581 - RNA, 19 nt, Artificial Sequence
  Description of Artificial Sequence: Synthetic oligonucleotide
  Sense strand starting at position 3737 of SEQ ID NO: 316857
ggauucaucuaggaaguug

SEQ ID NO: 445582 - RNA, 19 nt, Artificial Sequence
  Description of Artificial Sequence: Synthetic oligonucleotide
  Antisense Strand to SEQ ID NO: 445581
caacuuccuagaugaaucc

SEQ ID NO: 445583 - RNA, 19 nt, Artificial Sequence
  Description of Artificial Sequence: Synthetic oligonucleotide
  Sense strand starting at position 3780 of SEQ ID NO: 316857
gcagaaccuuuacuguauu

SEQ ID NO: 445584 - RNA, 19 nt, Artificial Sequence
  Description of Artificial Sequence: Synthetic oligonucleotide
  Antisense Strand to SEQ ID NO: 445583
aauacaguaaagguucugc

SEQ ID NO: 445585 - RNA, 19 nt, Artificial Sequence
  Description of Artificial Sequence: Synthetic oligonucleotide
  Sense strand starting at position 3813 of SEQ ID NO: 316857
ugagcuuugcuuuauguag

SEQ ID NO: 445586 - RNA, 19 nt, Artificial Sequence
  Description of Artificial Sequence: Synthetic oligonucleotide
  Antisense Strand to SEQ ID NO: 445585
cuacauaaagcaaagcuca

SEQ ID NO: 445587 - RNA, 19 nt, Artificial Sequence
  Description of Artificial Sequence: Synthetic oligonucleotide
  Sense strand starting at position 3840 of SEQ ID NO: 316857
gugagcuguccgcugguuu

SEQ ID NO: 445588 - RNA, 19 nt, Artificial Sequence
  Description of Artificial Sequence: Synthetic oligonucleotide
  Antisense Strand to SEQ ID NO: 445587
aaaccagcggacagcucac

SEQ ID NO: 445589 - RNA, 19 nt, Artificial Sequence
  Description of Artificial Sequence: Synthetic oligonucleotide
  Sense strand starting at position 3857 of SEQ ID NO: 316857
uugaguaacuucguuggga

SEQ ID NO: 445590 - RNA, 19 nt, Artificial Sequence
  Description of Artificial Sequence: Synthetic oligonucleotide
  Antisense Strand to SEQ ID NO: 445589
ucccaacgaaguuacucaa

SEQ ID NO: 445591 - RNA, 19 nt, Artificial Sequence
  Description of Artificial Sequence: Synthetic oligonucleotide
  Sense strand starting at position 3858 of SEQ ID NO: 316857
ugaguaacuucguugggau

SEQ ID NO: 445592 - RNA, 19 nt, Artificial Sequence
  Description of Artificial Sequence: Synthetic oligonucleotide
  Antisense Strand to SEQ ID NO: 445591
aucccaacgaaguuacuca

SEQ ID NO: 445593 - RNA, 19 nt, Artificial Sequence
  Description of Artificial Sequence: Synthetic oligonucleotide
  Sense strand starting at position 3859 of SEQ ID NO: 316857
gaguaacuucguugggaua

SEQ ID NO: 445594 - RNA, 19 nt, Artificial Sequence
  Description of Artificial Sequence: Synthetic oligonucleotide
  Antisense Strand to SEQ ID NO: 445593
uaucccaacgaaguuacuc

SEQ ID NO: 445595 - RNA, 19 nt, Artificial Sequence
  Description of Artificial Sequence: Synthetic oligonucleotide
  Sense strand starting at position 3860 of SEQ ID NO: 316857
aguaacuucguugggauau

SEQ ID NO: 445596 - RNA, 19 nt, Artificial Sequence
  Description of Artificial Sequence: Synthetic oligonucleotide
  Antisense Strand to SEQ ID NO: 445595
auaucccaacgaaguuacu

SEQ ID NO: 445597 - RNA, 19 nt, Artificial Sequence
  Description of Artificial Sequence: Synthetic oligonucleotide
  Sense strand starting at position 3963 of SEQ ID NO: 316857
acgauuuaauuccagaacu

SEQ ID NO: 445598 - RNA, 19 nt, Artificial Sequence
  Description of Artificial Sequence: Synthetic oligonucleotide
  Antisense Strand to SEQ ID NO: 445597
aguucuggaauuaaaucgu

SEQ ID NO: 445599 - RNA, 19 nt, Artificial Sequence
  Description of Artificial Sequence: Synthetic oligonucleotide
  Sense strand starting at position 3982 of SEQ ID NO: 316857
gaaggaucauuugaguuau

SEQ ID NO: 445600 - RNA, 19 nt, Artificial Sequence
  Description of Artificial Sequence: Synthetic oligonucleotide
  Antisense Strand to SEQ ID NO: 445599
auaacucaaaugauccuuc

SEQ ID NO: 445601 - RNA, 19 nt, Artificial Sequence
  Description of Artificial Sequence: Synthetic oligonucleotide
  Sense strand starting at position 148 of SEQ ID NO: 316858
gagaguuuaugccuuuaac

SEQ ID NO: 445602 - RNA, 19 nt, Artificial Sequence
  Description of Artificial Sequence: Synthetic oligonucleotide
  Antisense Strand to SEQ ID NO: 445601
guuaaaggcauaaacucuc

SEQ ID NO: 445603 - RNA, 19 nt, Artificial Sequence
  Description of Artificial Sequence: Synthetic oligonucleotide
  Sense strand starting at position 175 of SEQ ID NO: 316858
gguaguagccacugaucaa

SEQ ID NO: 445604 - RNA, 19 nt, Artificial Sequence
  Description of Artificial Sequence: Synthetic oligonucleotide
  Antisense Strand to SEQ ID NO: 445603
uugaucaguggcuacuacc

SEQ ID NO: 445605 - RNA, 19 nt, Artificial Sequence
  Description of Artificial Sequence: Synthetic oligonucleotide
  Sense strand starting at position 310 of SEQ ID NO: 316858
aaggcuuagcauuauguuu

SEQ ID NO: 445606 - RNA, 19 nt, Artificial Sequence
  Description of Artificial Sequence: Synthetic oligonucleotide
  Antisense Strand to SEQ ID NO: 445605
aaacauaaugcuaagccuu

SEQ ID NO: 445607 - RNA, 19 nt, Artificial Sequence
  Description of Artificial Sequence: Synthetic oligonucleotide
  Sense strand starting at position 333 of SEQ ID NO: 316858
auuguaucaugagcaacaa

SEQ ID NO: 445608 - RNA, 19 nt, Artificial Sequence
  Description of Artificial Sequence: Synthetic oligonucleotide
  Antisense Strand to SEQ ID NO: 445607
uuguugcucaugauacaau

SEQ ID NO: 445609 - RNA, 19 nt, Artificial Sequence
  Description of Artificial Sequence: Synthetic oligonucleotide
  Sense strand starting at position 390 of SEQ ID NO: 316858
augaauauuuccugaaagc

SEQ ID NO: 445610 - RNA, 19 nt, Artificial Sequence
  Description of Artificial Sequence: Synthetic oligonucleotide
  Antisense Strand to SEQ ID NO: 445609
gcuuucaggaaauauucau

SEQ ID NO: 445611 - RNA, 19 nt, Artificial Sequence
  Description of Artificial Sequence: Synthetic oligonucleotide
  Sense strand starting at position 576 of SEQ ID NO: 316858
acugaaauuuacugauguu

SEQ ID NO: 445612 - RNA, 19 nt, Artificial Sequence
  Description of Artificial Sequence: Synthetic oligonucleotide
  Antisense Strand to SEQ ID NO: 445611
aacaucaguaaauuucagu

SEQ ID NO: 445613 - RNA, 19 nt, Artificial Sequence
  Description of Artificial Sequence: Synthetic oligonucleotide
  Sense strand starting at position 596 of SEQ ID NO: 316858
cacguaaauuuaguguaau

SEQ ID NO: 445614 - RNA, 19 nt, Artificial Sequence
  Description of Artificial Sequence: Synthetic oligonucleotide
  Antisense Strand to SEQ ID NO: 445613
auuacacuaaauuuacgug

SEQ ID NO: 445615 - RNA, 19 nt, Artificial Sequence
  Description of Artificial Sequence: Synthetic oligonucleotide
  Sense strand starting at position 653 of SEQ ID NO: 316858
ugcuacauagccugggaau

SEQ ID NO: 445616 - RNA, 19 nt, Artificial Sequence
  Description of Artificial Sequence: Synthetic oligonucleotide
  Antisense Strand to SEQ ID NO: 445615
auucccaggcuauguagca

SEQ ID NO: 445617 - RNA, 19 nt, Artificial Sequence
  Description of Artificial Sequence: Synthetic oligonucleotide
  Sense strand starting at position 654 of SEQ ID NO: 316858
gcuacauagccugggaaua

SEQ ID NO: 445618 - RNA, 19 nt, Artificial Sequence
  Description of Artificial Sequence: Synthetic oligonucleotide
  Antisense Strand to SEQ ID NO: 445617
uauucccaggcuauguagc

SEQ ID NO: 445619 - RNA, 19 nt, Artificial Sequence
  Description of Artificial Sequence: Synthetic oligonucleotide
  Sense strand starting at position 655 of SEQ ID NO: 316858
cuacauagccugggaauau

SEQ ID NO: 445620 - RNA, 19 nt, Artificial Sequence
  Description of Artificial Sequence: Synthetic oligonucleotide
  Antisense Strand to SEQ ID NO: 445619
auauucccaggcuauguag

SEQ ID NO: 445621 - RNA, 19 nt, Artificial Sequence
  Description of Artificial Sequence: Synthetic oligonucleotide
  Sense strand starting at position 731 of SEQ ID NO: 316858
caagauagggugcaguaua

SEQ ID NO: 445622 - RNA, 19 nt, Artificial Sequence
  Description of Artificial Sequence: Synthetic oligonucleotide
  Antisense Strand to SEQ ID NO: 445621
uauacugcacccuaucuug

SEQ ID NO: 445623 - RNA, 19 nt, Artificial Sequence
  Description of Artificial Sequence: Synthetic oligonucleotide
  Sense strand starting at position 751 of SEQ ID NO: 316858
uaugauuucuccugaugga

SEQ ID NO: 445624 - RNA, 19 nt, Artificial Sequence
  Description of Artificial Sequence: Synthetic oligonucleotide
  Antisense Strand to SEQ ID NO: 445623
uccaucaggagaaaucaua

SEQ ID NO: 445625 - RNA, 19 nt, Artificial Sequence
  Description of Artificial Sequence: Synthetic oligonucleotide
  Sense strand starting at position 895 of SEQ ID NO: 316858
ccaagagccgaucaauauc

SEQ ID NO: 445626 - RNA, 19 nt, Artificial Sequence
  Description of Artificial Sequence: Synthetic oligonucleotide
  Antisense Strand to SEQ ID NO: 445625
gauauugaucggcucuugg

SEQ ID NO: 445627 - RNA, 19 nt, Artificial Sequence
  Description of Artificial Sequence: Synthetic oligonucleotide
  Sense strand starting at position 2135 of SEQ ID NO: 316858
cuuccuguuguguucgcaa

SEQ ID NO: 445628 - RNA, 19 nt, Artificial Sequence
  Description of Artificial Sequence: Synthetic oligonucleotide
  Antisense Strand to SEQ ID NO: 445627
uugcgaacacaacaggaag

SEQ ID NO: 445629 - RNA, 19 nt, Artificial Sequence
  Description of Artificial Sequence: Synthetic oligonucleotide
  Sense strand starting at position 2199 of SEQ ID NO: 316858
ucagauagcuugcuaaaga

SEQ ID NO: 445630 - RNA, 19 nt, Artificial Sequence
  Description of Artificial Sequence: Synthetic oligonucleotide
  Antisense Strand to SEQ ID NO: 445629
ucuuuagcaagcuaucuga

SEQ ID NO: 445631 - RNA, 19 nt, Artificial Sequence
  Description of Artificial Sequence: Synthetic oligonucleotide
  Sense strand starting at position 2266 of SEQ ID NO: 316858
ccaauucuguccuuugaag

SEQ ID NO: 445632 - RNA, 19 nt, Artificial Sequence
  Description of Artificial Sequence: Synthetic oligonucleotide
  Antisense Strand to SEQ ID NO: 445631
cuucaaaggacagaauugg

SEQ ID NO: 445633 - RNA, 19 nt, Artificial Sequence
  Description of Artificial Sequence: Synthetic oligonucleotide
  Sense strand starting at position 2272 of SEQ ID NO: 316858
cuguccuuugaagaaguca

SEQ ID NO: 445634 - RNA, 19 nt, Artificial Sequence
  Description of Artificial Sequence: Synthetic oligonucleotide
  Antisense Strand to SEQ ID NO: 445633
ugacuucuucaaaggacag

SEQ ID NO: 445635 - RNA, 19 nt, Artificial Sequence
  Description of Artificial Sequence: Synthetic oligonucleotide
  Sense strand starting at position 2285 of SEQ ID NO: 316858
aagucauauccuggaauug

SEQ ID NO: 445636 - RNA, 19 nt, Artificial Sequence
  Description of Artificial Sequence: Synthetic oligonucleotide
  Antisense Strand to SEQ ID NO: 445635
caauuccaggauaugacuu

SEQ ID NO: 445637 - RNA, 19 nt, Artificial Sequence
  Description of Artificial Sequence: Synthetic oligonucleotide
  Sense strand starting at position 2303 of SEQ ID NO: 316858
gggugcucagggugauuca

SEQ ID NO: 445638 - RNA, 19 nt, Artificial Sequence
  Description of Artificial Sequence: Synthetic oligonucleotide
  Antisense Strand to SEQ ID NO: 445637
ugaaucacccugagcaccc

SEQ ID NO: 445639 - RNA, 19 nt, Artificial Sequence
  Description of Artificial Sequence: Synthetic oligonucleotide
  Sense strand starting at position 2304 of SEQ ID NO: 316858
ggugcucagggugauucaa

SEQ ID NO: 445640 - RNA, 19 nt, Artificial Sequence
  Description of Artificial Sequence: Synthetic oligonucleotide
  Antisense Strand to SEQ ID NO: 445639
uugaaucacccugagcacc

SEQ ID NO: 445641 - RNA, 19 nt, Artificial Sequence
  Description of Artificial Sequence: Synthetic oligonucleotide
  Sense strand starting at position 2326 of SEQ ID NO: 316858
ccaccuagguacucaguaa

SEQ ID NO: 445642 - RNA, 19 nt, Artificial Sequence
  Description of Artificial Sequence: Synthetic oligonucleotide
  Antisense Strand to SEQ ID NO: 445641
uuacugaguaccuaggugg

SEQ ID NO: 445643 - RNA, 19 nt, Artificial Sequence
  Description of Artificial Sequence: Synthetic oligonucleotide
  Sense strand starting at position 2354 of SEQ ID NO: 316858
gaauuagauuuggaaagca

SEQ ID NO: 445644 - RNA, 19 nt, Artificial Sequence
  Description of Artificial Sequence: Synthetic oligonucleotide
  Antisense Strand to SEQ ID NO: 445643
ugcuuuccaaaucuaauuc

SEQ ID NO: 445645 - RNA, 19 nt, Artificial Sequence
  Description of Artificial Sequence: Synthetic oligonucleotide
  Sense strand starting at position 2461 of SEQ ID NO: 316858
uggaaagcuuaagaagaga

SEQ ID NO: 445646 - RNA, 19 nt, Artificial Sequence
  Description of Artificial Sequence: Synthetic oligonucleotide
  Antisense Strand to SEQ ID NO: 445645
ucucuucuuaagcuuucca

SEQ ID NO: 445647 - RNA, 19 nt, Artificial Sequence
  Description of Artificial Sequence: Synthetic oligonucleotide
  Sense strand starting at position 2558 of SEQ ID NO: 316858
aagugagauugacuuccuu

SEQ ID NO: 445648 - RNA, 19 nt, Artificial Sequence
  Description of Artificial Sequence: Synthetic oligonucleotide
  Antisense Strand to SEQ ID NO: 445647
aaggaagucaaucucacuu

SEQ ID NO: 445649 - RNA, 19 nt, Artificial Sequence
  Description of Artificial Sequence: Synthetic oligonucleotide
  Sense strand starting at position 2562 of SEQ ID NO: 316858
gagauugacuuccuuagac

SEQ ID NO: 445650 - RNA, 19 nt, Artificial Sequence
  Description of Artificial Sequence: Synthetic oligonucleotide
  Antisense Strand to SEQ ID NO: 445649
gucuaaggaagucaaucuc

SEQ ID NO: 445651 - RNA, 19 nt, Artificial Sequence
  Description of Artificial Sequence: Synthetic oligonucleotide
  Sense strand starting at position 2576 of SEQ ID NO: 316858
uagacuuugaugugguaga

SEQ ID NO: 445652 - RNA, 19 nt, Artificial Sequence
  Description of Artificial Sequence: Synthetic oligonucleotide
  Antisense Strand to SEQ ID NO: 445651
ucuaccacaucaaagucua

SEQ ID NO: 445653 - RNA, 19 nt, Artificial Sequence
  Description of Artificial Sequence: Synthetic oligonucleotide
  Sense strand starting at position 2595 of SEQ ID NO: 316858
gcacguuuaaaguagauuc

SEQ ID NO: 445654 - RNA, 19 nt, Artificial Sequence
  Description of Artificial Sequence: Synthetic oligonucleotide
  Antisense Strand to SEQ ID NO: 445653
gaaucuacuuuaaacgugc

SEQ ID NO: 445655 - RNA, 19 nt, Artificial Sequence
  Description of Artificial Sequence: Synthetic oligonucleotide
  Sense strand starting at position 2606 of SEQ ID NO: 316858
guagauuccagaugugaaa

SEQ ID NO: 445656 - RNA, 19 nt, Artificial Sequence
  Description of Artificial Sequence: Synthetic oligonucleotide
  Antisense Strand to SEQ ID NO: 445655
uuucacaucuggaaucuac

SEQ ID NO: 445657 - RNA, 19 nt, Artificial Sequence
  Description of Artificial Sequence: Synthetic oligonucleotide
  Sense strand starting at position 2738 of SEQ ID NO: 316858
gacugacauuuagagaggu

SEQ ID NO: 445658 - RNA, 19 nt, Artificial Sequence
  Description of Artificial Sequence: Synthetic oligonucleotide
  Antisense Strand to SEQ ID NO: 445657
accucucuaaaugucaguc

SEQ ID NO: 445659 - RNA, 19 nt, Artificial Sequence
  Description of Artificial Sequence: Synthetic oligonucleotide
  Sense strand starting at position 2824 of SEQ ID NO: 316858
gucuaaaguccauauaucu

SEQ ID NO: 445660 - RNA, 19 nt, Artificial Sequence
  Description of Artificial Sequence: Synthetic oligonucleotide
  Antisense Strand to SEQ ID NO: 445659
agauauauggacuuuagac

SEQ ID NO: 445661 - RNA, 19 nt, Artificial Sequence
  Description of Artificial Sequence: Synthetic oligonucleotide
  Sense strand starting at position 3421 of SEQ ID NO: 316858
ccauuuaguugacaagaca

SEQ ID NO: 445662 - RNA, 19 nt, Artificial Sequence
  Description of Artificial Sequence: Synthetic oligonucleotide
  Antisense Strand to SEQ ID NO: 445661
ugucuugucaacuaaaugg

SEQ ID NO: 445663 - RNA, 19 nt, Artificial Sequence
  Description of Artificial Sequence: Synthetic oligonucleotide
  Sense strand starting at position 3583 of SEQ ID NO: 316858
uguaacauuucugcuguuu

SEQ ID NO: 445664 - RNA, 19 nt, Artificial Sequence
  Description of Artificial Sequence: Synthetic oligonucleotide
  Antisense Strand to SEQ ID NO: 445663
aaacagcagaaauguuaca

SEQ ID NO: 445665 - RNA, 19 nt, Artificial Sequence
  Description of Artificial Sequence: Synthetic oligonucleotide
  Sense strand starting at position 3718 of SEQ ID NO: 316858
uugagaucacaguauguuu

SEQ ID NO: 445666 - RNA, 19 nt, Artificial Sequence
  Description of Artificial Sequence: Synthetic oligonucleotide
  Antisense Strand to SEQ ID NO: 445665
aaacauacugugaucucaa

SEQ ID NO: 445667 - RNA, 19 nt, Artificial Sequence
  Description of Artificial Sequence: Synthetic oligonucleotide
  Sense strand starting at position 3720 of SEQ ID NO: 316858
gagaucacaguauguuuaa

SEQ ID NO: 445668 - RNA, 19 nt, Artificial Sequence
  Description of Artificial Sequence: Synthetic oligonucleotide
  Antisense Strand to SEQ ID NO: 445667
uuaaacauacugugaucuc

SEQ ID NO: 445669 - RNA, 19 nt, Artificial Sequence
  Description of Artificial Sequence: Synthetic oligonucleotide
  Sense strand starting at position 3723 of SEQ ID NO: 316858
aucacaguauguuuaaguu

SEQ ID NO: 445670 - RNA, 19 nt, Artificial Sequence
  Description of Artificial Sequence: Synthetic oligonucleotide
  Antisense Strand to SEQ ID NO: 445669
aacuuaaacauacugugau

SEQ ID NO: 445671 - RNA, 19 nt, Artificial Sequence
  Description of Artificial Sequence: Synthetic oligonucleotide
  Sense strand starting at position 3735 of SEQ ID NO: 316858
uuaaguuuggcacauuaac

SEQ ID NO: 445672 - RNA, 19 nt, Artificial Sequence
  Description of Artificial Sequence: Synthetic oligonucleotide
  Antisense Strand to SEQ ID NO: 445671
guuaaugugccaaacuuaa

SEQ ID NO: 445673 - RNA, 19 nt, Artificial Sequence
  Description of Artificial Sequence: Synthetic oligonucleotide
  Sense strand starting at position 3815 of SEQ ID NO: 316858
aauguuugaugggucaaau

SEQ ID NO: 445674 - RNA, 19 nt, Artificial Sequence
  Description of Artificial Sequence: Synthetic oligonucleotide
  Antisense Strand to SEQ ID NO: 445673
auuugacccaucaaacauu

SEQ ID NO: 445675 - RNA, 19 nt, Artificial Sequence
  Description of Artificial Sequence: Synthetic oligonucleotide
  Sense strand starting at position 3836 of SEQ ID NO: 316858
uuugauauguuucuuagga

SEQ ID NO: 445676 - RNA, 19 nt, Artificial Sequence
  Description of Artificial Sequence: Synthetic oligonucleotide
  Antisense Strand to SEQ ID NO: 445675
uccuaagaaacauaucaaa

SEQ ID NO: 445677 - RNA, 19 nt, Artificial Sequence
  Description of Artificial Sequence: Synthetic oligonucleotide
  Sense strand starting at position 3837 of SEQ ID NO: 316858
uugauauguuucuuaggaa

SEQ ID NO: 445678 - RNA, 19 nt, Artificial Sequence
  Description of Artificial Sequence: Synthetic oligonucleotide
  Antisense Strand to SEQ ID NO: 445677
uuccuaagaaacauaucaa

SEQ ID NO: 445679 - RNA, 19 nt, Artificial Sequence
  Description of Artificial Sequence: Synthetic oligonucleotide
  Sense strand starting at position 3975 of SEQ ID NO: 316858
uggcaaacauuugaaaucu

SEQ ID NO: 445680 - RNA, 19 nt, Artificial Sequence
  Description of Artificial Sequence: Synthetic oligonucleotide
  Antisense Strand to SEQ ID NO: 445679
agauuucaaauguuugcca

SEQ ID NO: 445681 - RNA, 19 nt, Artificial Sequence
  Description of Artificial Sequence: Synthetic oligonucleotide
  Sense strand starting at position 138 of SEQ ID NO: 316859
cuggcaaggcucugaaaga

SEQ ID NO: 445682 - RNA, 19 nt, Artificial Sequence
  Description of Artificial Sequence: Synthetic oligonucleotide
  Antisense Strand to SEQ ID NO: 445681
ucuuucagagccuugccag

SEQ ID NO: 445683 - RNA, 19 nt, Artificial Sequence
  Description of Artificial Sequence: Synthetic oligonucleotide
  Sense strand starting at position 220 of SEQ ID NO: 316859
cacaaucacgucuauguga

SEQ ID NO: 445684 - RNA, 19 nt, Artificial Sequence
  Description of Artificial Sequence: Synthetic oligonucleotide
  Antisense Strand to SEQ ID NO: 445683
ucacauagacgugauugug

SEQ ID NO: 445685 - RNA, 19 nt, Artificial Sequence
  Description of Artificial Sequence: Synthetic oligonucleotide
  Sense strand starting at position 222 of SEQ ID NO: 316859
caaucacgucuaugugaga

SEQ ID NO: 445686 - RNA, 19 nt, Artificial Sequence
  Description of Artificial Sequence: Synthetic oligonucleotide
  Antisense Strand to SEQ ID NO: 445685
ucucacauagacgugauug

SEQ ID NO: 445687 - RNA, 19 nt, Artificial Sequence
  Description of Artificial Sequence: Synthetic oligonucleotide
  Sense strand starting at position 380 of SEQ ID NO: 316859
gcuugugugcagucugauu

SEQ ID NO: 445688 - RNA, 19 nt, Artificial Sequence
  Description of Artificial Sequence: Synthetic oligonucleotide
  Antisense Strand to SEQ ID NO: 445687
aaucagacugcacacaagc

SEQ ID NO: 445689 - RNA, 19 nt, Artificial Sequence
  Description of Artificial Sequence: Synthetic oligonucleotide
  Sense strand starting at position 561 of SEQ ID NO: 316859
uguggagguccaugagaua

SEQ ID NO: 445690 - RNA, 19 nt, Artificial Sequence
  Description of Artificial Sequence: Synthetic oligonucleotide
  Antisense Strand to SEQ ID NO: 445689
uaucucauggaccuccaca

SEQ ID NO: 445691 - RNA, 19 nt, Artificial Sequence
  Description of Artificial Sequence: Synthetic oligonucleotide
  Sense strand starting at position 606 of SEQ ID NO: 316859
acauaauuagcagagcucu

SEQ ID NO: 445692 - RNA, 19 nt, Artificial Sequence
  Description of Artificial Sequence: Synthetic oligonucleotide
  Antisense Strand to SEQ ID NO: 445691
agagcucugcuaauuaugu

SEQ ID NO: 445693 - RNA, 19 nt, Artificial Sequence
  Description of Artificial Sequence: Synthetic oligonucleotide
  Sense strand starting at position 664 of SEQ ID NO: 316859
gcaauaacagugcauucuu

SEQ ID NO: 445694 - RNA, 19 nt, Artificial Sequence
  Description of Artificial Sequence: Synthetic oligonucleotide
  Antisense Strand to SEQ ID NO: 445693
aagaaugcacuguuauugc

SEQ ID NO: 445695 - RNA, 19 nt, Artificial Sequence
  Description of Artificial Sequence: Synthetic oligonucleotide
  Sense strand starting at position 692 of SEQ ID NO: 316859
ccuggauaguuugcuaaau

SEQ ID NO: 445696 - RNA, 19 nt, Artificial Sequence
  Description of Artificial Sequence: Synthetic oligonucleotide
  Antisense Strand to SEQ ID NO: 445695
auuuagcaaacuauccagg

SEQ ID NO: 445697 - RNA, 19 nt, Artificial Sequence
  Description of Artificial Sequence: Synthetic oligonucleotide
  Sense strand starting at position 693 of SEQ ID NO: 316859
cuggauaguuugcuaaauu

SEQ ID NO: 445698 - RNA, 19 nt, Artificial Sequence
  Description of Artificial Sequence: Synthetic oligonucleotide
  Antisense Strand to SEQ ID NO: 445697
aauuuagcaaacuauccag

SEQ ID NO: 445699 - RNA, 19 nt, Artificial Sequence
  Description of Artificial Sequence: Synthetic oligonucleotide
  Sense strand starting at position 702 of SEQ ID NO: 316859
uugcuaaauucuuucugag

SEQ ID NO: 445700 - RNA, 19 nt, Artificial Sequence
  Description of Artificial Sequence: Synthetic oligonucleotide
  Antisense Strand to SEQ ID NO: 445699
cucagaaagaauuuagcaa

SEQ ID NO: 445701 - RNA, 19 nt, Artificial Sequence
  Description of Artificial Sequence: Synthetic oligonucleotide
  Sense strand starting at position 704 of SEQ ID NO: 316859
gcuaaauucuuucugagag

SEQ ID NO: 445702 - RNA, 19 nt, Artificial Sequence
  Description of Artificial Sequence: Synthetic oligonucleotide
  Antisense Strand to SEQ ID NO: 445701
cucucagaaagaauuuagc

SEQ ID NO: 445703 - RNA, 19 nt, Artificial Sequence
  Description of Artificial Sequence: Synthetic oligonucleotide
  Sense strand starting at position 778 of SEQ ID NO: 316859
ccaacucugugagcagaga

SEQ ID NO: 445704 - RNA, 19 nt, Artificial Sequence
  Description of Artificial Sequence: Synthetic oligonucleotide
  Antisense Strand to SEQ ID NO: 445703
ucucugcucacagaguugg

SEQ ID NO: 445705 - RNA, 19 nt, Artificial Sequence
  Description of Artificial Sequence: Synthetic oligonucleotide
  Sense strand starting at position 876 of SEQ ID NO: 316859
gaaggccguccuuaggaaa

SEQ ID NO: 445706 - RNA, 19 nt, Artificial Sequence
  Description of Artificial Sequence: Synthetic oligonucleotide
  Antisense Strand to SEQ ID NO: 445705
uuuccuaaggacggccuuc

SEQ ID NO: 445707 - RNA, 19 nt, Artificial Sequence
  Description of Artificial Sequence: Synthetic oligonucleotide
  Sense strand starting at position 1300 of SEQ ID NO: 316859
auaugagccucauuagaau

SEQ ID NO: 445708 - RNA, 19 nt, Artificial Sequence
  Description of Artificial Sequence: Synthetic oligonucleotide
  Antisense Strand to SEQ ID NO: 445707
auucuaaugaggcucauau

SEQ ID NO: 445709 - RNA, 19 nt, Artificial Sequence
  Description of Artificial Sequence: Synthetic oligonucleotide
  Sense strand starting at position 1655 of SEQ ID NO: 316859
agggaagucuggagucaag

SEQ ID NO: 445710 - RNA, 19 nt, Artificial Sequence
  Description of Artificial Sequence: Synthetic oligonucleotide
  Antisense Strand to SEQ ID NO: 445709
cuugacuccagacuucccu

SEQ ID NO: 445711 - RNA, 19 nt, Artificial Sequence
  Description of Artificial Sequence: Synthetic oligonucleotide
  Sense strand starting at position 1658 of SEQ ID NO: 316859
gaagucuggagucaaguaa

SEQ ID NO: 445712 - RNA, 19 nt, Artificial Sequence
  Description of Artificial Sequence: Synthetic oligonucleotide
  Antisense Strand to SEQ ID NO: 445711
uuacuugacuccagacuuc

SEQ ID NO: 445713 - RNA, 19 nt, Artificial Sequence
  Description of Artificial Sequence: Synthetic oligonucleotide
  Sense strand starting at position 1665 of SEQ ID NO: 316859
ggagucaaguaauccacuu

SEQ ID NO: 445714 - RNA, 19 nt, Artificial Sequence
  Description of Artificial Sequence: Synthetic oligonucleotide
  Antisense Strand to SEQ ID NO: 445713
aaguggauuacuugacucc

SEQ ID NO: 445715 - RNA, 19 nt, Artificial Sequence
  Description of Artificial Sequence: Synthetic oligonucleotide
  Sense strand starting at position 1890 of SEQ ID NO: 316859
acagcugucgccuugcaaa

SEQ ID NO: 445716 - RNA, 19 nt, Artificial Sequence
  Description of Artificial Sequence: Synthetic oligonucleotide
  Antisense Strand to SEQ ID NO: 445715
uuugcaaggcgacagcugu

SEQ ID NO: 445717 - RNA, 19 nt, Artificial Sequence
  Description of Artificial Sequence: Synthetic oligonucleotide
  Sense strand starting at position 1892 of SEQ ID NO: 316859
agcugucgccuugcaaaga

SEQ ID NO: 445718 - RNA, 19 nt, Artificial Sequence
  Description of Artificial Sequence: Synthetic oligonucleotide
  Antisense Strand to SEQ ID NO: 445717
ucuuugcaaggcgacagcu

SEQ ID NO: 445719 - RNA, 19 nt, Artificial Sequence
  Description of Artificial Sequence: Synthetic oligonucleotide
  Sense strand starting at position 1916 of SEQ ID NO: 316859
gauggagaaucuguagcua

SEQ ID NO: 445720 - RNA, 19 nt, Artificial Sequence
  Description of Artificial Sequence: Synthetic oligonucleotide
  Antisense Strand to SEQ ID NO: 445719
uagcuacagauucuccauc

SEQ ID NO: 445721 - RNA, 19 nt, Artificial Sequence
  Description of Artificial Sequence: Synthetic oligonucleotide
  Sense strand starting at position 1920 of SEQ ID NO: 316859
gagaaucuguagcuauucu

SEQ ID NO: 445722 - RNA, 19 nt, Artificial Sequence
  Description of Artificial Sequence: Synthetic oligonucleotide
  Antisense Strand to SEQ ID NO: 445721
agaauagcuacagauucuc

SEQ ID NO: 445723 - RNA, 19 nt, Artificial Sequence
  Description of Artificial Sequence: Synthetic oligonucleotide
  Sense strand starting at position 2072 of SEQ ID NO: 316859
cagauaaacuggguuccaa

SEQ ID NO: 445724 - RNA, 19 nt, Artificial Sequence
  Description of Artificial Sequence: Synthetic oligonucleotide
  Antisense Strand to SEQ ID NO: 445723
uuggaacccaguuuaucug

SEQ ID NO: 445725 - RNA, 19 nt, Artificial Sequence
  Description of Artificial Sequence: Synthetic oligonucleotide
  Sense strand starting at position 2140 of SEQ ID NO: 316859
gugaacguuccagaaauac

SEQ ID NO: 445726 - RNA, 19 nt, Artificial Sequence
  Description of Artificial Sequence: Synthetic oligonucleotide
  Antisense Strand to SEQ ID NO: 445725
guauuucuggaacguucac

SEQ ID NO: 445727 - RNA, 19 nt, Artificial Sequence
  Description of Artificial Sequence: Synthetic oligonucleotide
  Sense strand starting at position 2264 of SEQ ID NO: 316859
gcuguuaucccacaucaug

SEQ ID NO: 445728 - RNA, 19 nt, Artificial Sequence
  Description of Artificial Sequence: Synthetic oligonucleotide
  Antisense Strand to SEQ ID NO: 445727
caugaugugggauaacagc

SEQ ID NO: 445729 - RNA, 19 nt, Artificial Sequence
  Description of Artificial Sequence: Synthetic oligonucleotide
  Sense strand starting at position 2431 of SEQ ID NO: 316859
cuaugucuuggccacuuau

SEQ ID NO: 445730 - RNA, 19 nt, Artificial Sequence
  Description of Artificial Sequence: Synthetic oligonucleotide
  Antisense Strand to SEQ ID NO: 445729
auaaguggccaagacauag

SEQ ID NO: 445731 - RNA, 19 nt, Artificial Sequence
  Description of Artificial Sequence: Synthetic oligonucleotide
  Sense strand starting at position 2495 of SEQ ID NO: 316859
augugauuuagcugcuggu

SEQ ID NO: 445732 - RNA, 19 nt, Artificial Sequence
  Description of Artificial Sequence: Synthetic oligonucleotide
  Antisense Strand to SEQ ID NO: 445731
accagcagcuaaaucacau

SEQ ID NO: 445733 - RNA, 19 nt, Artificial Sequence
  Description of Artificial Sequence: Synthetic oligonucleotide
  Sense strand starting at position 2562 of SEQ ID NO: 316859
gcuuccagaguuggacaau

SEQ ID NO: 445734 - RNA, 19 nt, Artificial Sequence
  Description of Artificial Sequence: Synthetic oligonucleotide
  Antisense Strand to SEQ ID NO: 445733
auuguccaacucuggaagc

SEQ ID NO: 445735 - RNA, 19 nt, Artificial Sequence
  Description of Artificial Sequence: Synthetic oligonucleotide
  Sense strand starting at position 2587 of SEQ ID NO: 316859
ucauuacuggcagaauggu

SEQ ID NO: 445736 - RNA, 19 nt, Artificial Sequence
  Description of Artificial Sequence: Synthetic oligonucleotide
  Antisense Strand to SEQ ID NO: 445735
accauucugccaguaauga

SEQ ID NO: 445737 - RNA, 19 nt, Artificial Sequence
  Description of Artificial Sequence: Synthetic oligonucleotide
  Sense strand starting at position 2593 of SEQ ID NO: 316859
cuggcagaauggucugaag

SEQ ID NO: 445738 - RNA, 19 nt, Artificial Sequence
  Description of Artificial Sequence: Synthetic oligonucleotide
  Antisense Strand to SEQ ID NO: 445737
cuucagaccauucugccag

SEQ ID NO: 445739 - RNA, 19 nt, Artificial Sequence
  Description of Artificial Sequence: Synthetic oligonucleotide
  Sense strand starting at position 2595 of SEQ ID NO: 316859
ggcagaauggucugaagca

SEQ ID NO: 445740 - RNA, 19 nt, Artificial Sequence
  Description of Artificial Sequence: Synthetic oligonucleotide
  Antisense Strand to SEQ ID NO: 445739
ugcuucagaccauucugcc

SEQ ID NO: 445741 - RNA, 19 nt, Artificial Sequence
  Description of Artificial Sequence: Synthetic oligonucleotide
  Sense strand starting at position 2779 of SEQ ID NO: 316859
cagacagaguuagcacaaa

SEQ ID NO: 445742 - RNA, 19 nt, Artificial Sequence
  Description of Artificial Sequence: Synthetic oligonucleotide
  Antisense Strand to SEQ ID NO: 445741
uuugugcuaacucugucug

SEQ ID NO: 445743 - RNA, 19 nt, Artificial Sequence
  Description of Artificial Sequence: Synthetic oligonucleotide
  Sense strand starting at position 3077 of SEQ ID NO: 316859
uggucauaucugcaguaag

SEQ ID NO: 445744 - RNA, 19 nt, Artificial Sequence
  Description of Artificial Sequence: Synthetic oligonucleotide
  Antisense Strand to SEQ ID NO: 445743
cuuacugcagauaugacca

SEQ ID NO: 445745 - RNA, 19 nt, Artificial Sequence
  Description of Artificial Sequence: Synthetic oligonucleotide
  Sense strand starting at position 3181 of SEQ ID NO: 316859
auagcaaguguugaacaaa

SEQ ID NO: 445746 - RNA, 19 nt, Artificial Sequence
  Description of Artificial Sequence: Synthetic oligonucleotide
  Antisense Strand to SEQ ID NO: 445745
uuuguucaacacuugcuau

SEQ ID NO: 445747 - RNA, 19 nt, Artificial Sequence
  Description of Artificial Sequence: Synthetic oligonucleotide
  Sense strand starting at position 3184 of SEQ ID NO: 316859
gcaaguguugaacaaaugu

SEQ ID NO: 445748 - RNA, 19 nt, Artificial Sequence
  Description of Artificial Sequence: Synthetic oligonucleotide
  Antisense Strand to SEQ ID NO: 445747
acauuuguucaacacuugc

SEQ ID NO: 445749 - RNA, 19 nt, Artificial Sequence
  Description of Artificial Sequence: Synthetic oligonucleotide
  Sense strand starting at position 3207 of SEQ ID NO: 316859
uguuauucgcauuauaaca

SEQ ID NO: 445750 - RNA, 19 nt, Artificial Sequence
  Description of Artificial Sequence: Synthetic oligonucleotide
  Antisense Strand to SEQ ID NO: 445749
uguuauaaugcgaauaaca

SEQ ID NO: 445751 - RNA, 19 nt, Artificial Sequence
  Description of Artificial Sequence: Synthetic oligonucleotide
  Sense strand starting at position 3230 of SEQ ID NO: 316859
uugucuccugaggaaacuu

SEQ ID NO: 445752 - RNA, 19 nt, Artificial Sequence
  Description of Artificial Sequence: Synthetic oligonucleotide
  Antisense Strand to SEQ ID NO: 445751
aaguuuccucaggagacaa

SEQ ID NO: 445753 - RNA, 19 nt, Artificial Sequence
  Description of Artificial Sequence: Synthetic oligonucleotide
  Sense strand starting at position 3372 of SEQ ID NO: 316859
uucuguuguauuugaguca

SEQ ID NO: 445754 - RNA, 19 nt, Artificial Sequence
  Description of Artificial Sequence: Synthetic oligonucleotide
  Antisense Strand to SEQ ID NO: 445753
ugacucaaauacaacagaa

SEQ ID NO: 445755 - RNA, 19 nt, Artificial Sequence
  Description of Artificial Sequence: Synthetic oligonucleotide
  Sense strand starting at position 3400 of SEQ ID NO: 316859
acaggaucaccaugucacu

SEQ ID NO: 445756 - RNA, 19 nt, Artificial Sequence
  Description of Artificial Sequence: Synthetic oligonucleotide
  Antisense Strand to SEQ ID NO: 445755
agugacauggugauccugu

SEQ ID NO: 445757 - RNA, 19 nt, Artificial Sequence
  Description of Artificial Sequence: Synthetic oligonucleotide
  Sense strand starting at position 3587 of SEQ ID NO: 316859
aaagguuguuacuuugaaa

SEQ ID NO: 445758 - RNA, 19 nt, Artificial Sequence
  Description of Artificial Sequence: Synthetic oligonucleotide
  Antisense Strand to SEQ ID NO: 445757
uuucaaaguaacaaccuuu

SEQ ID NO: 445759 - RNA, 19 nt, Artificial Sequence
  Description of Artificial Sequence: Synthetic oligonucleotide
  Sense strand starting at position 3631 of SEQ ID NO: 316859
cugugugguauuguugcua

SEQ ID NO: 445760 - RNA, 19 nt, Artificial Sequence
  Description of Artificial Sequence: Synthetic oligonucleotide
  Antisense Strand to SEQ ID NO: 445759
uagcaacaauaccacacag

SEQ ID NO: 445761 - RNA, 19 nt, Artificial Sequence
  Description of Artificial Sequence: Synthetic oligonucleotide
  Sense strand starting at position 357 of SEQ ID NO: 316860
agacaaauaguuggcuaaa

SEQ ID NO: 445762 - RNA, 19 nt, Artificial Sequence
  Description of Artificial Sequence: Synthetic oligonucleotide
  Antisense Strand to SEQ ID NO: 445761
uuuagccaacuauuugucu

SEQ ID NO: 445763 - RNA, 19 nt, Artificial Sequence
  Description of Artificial Sequence: Synthetic oligonucleotide
  Sense strand starting at position 489 of SEQ ID NO: 316860
gaagaacacugagauauga

SEQ ID NO: 445764 - RNA, 19 nt, Artificial Sequence
  Description of Artificial Sequence: Synthetic oligonucleotide
  Antisense Strand to SEQ ID NO: 445763
ucauaucucaguguucuuc

SEQ ID NO: 445765 - RNA, 19 nt, Artificial Sequence
  Description of Artificial Sequence: Synthetic oligonucleotide
  Sense strand starting at position 716 of SEQ ID NO: 316860
uccagaagccacugugaua

SEQ ID NO: 445766 - RNA, 19 nt, Artificial Sequence
  Description of Artificial Sequence: Synthetic oligonucleotide
  Antisense Strand to SEQ ID NO: 445765
uaucacaguggcuucugga

SEQ ID NO: 445767 - RNA, 19 nt, Artificial Sequence
  Description of Artificial Sequence: Synthetic oligonucleotide
  Sense strand starting at position 727 of SEQ ID NO: 316860
cugugauaauaauuaagug

SEQ ID NO: 445768 - RNA, 19 nt, Artificial Sequence
  Description of Artificial Sequence: Synthetic oligonucleotide
  Antisense Strand to SEQ ID NO: 445767
cacuuaauuauuaucacag

SEQ ID NO: 445769 - RNA, 19 nt, Artificial Sequence
  Description of Artificial Sequence: Synthetic oligonucleotide
  Sense strand starting at position 784 of SEQ ID NO: 316860
ggguacaagugguuaggaa

SEQ ID NO: 445770 - RNA, 19 nt, Artificial Sequence
  Description of Artificial Sequence: Synthetic oligonucleotide
  Antisense Strand to SEQ ID NO: 445769
uuccuaaccacuuguaccc

SEQ ID NO: 445771 - RNA, 19 nt, Artificial Sequence
  Description of Artificial Sequence: Synthetic oligonucleotide
  Sense strand starting at position 799 of SEQ ID NO: 316860
ggaaauacagcauaugcua

SEQ ID NO: 445772 - RNA, 19 nt, Artificial Sequence
  Description of Artificial Sequence: Synthetic oligonucleotide
  Antisense Strand to SEQ ID NO: 445771
uagcauaugcuguauuucc

SEQ ID NO: 445773 - RNA, 19 nt, Artificial Sequence
  Description of Artificial Sequence: Synthetic oligonucleotide
  Sense strand starting at position 910 of SEQ ID NO: 316860
ggcaucaaagcuuauaauc

SEQ ID NO: 445774 - RNA, 19 nt, Artificial Sequence
  Description of Artificial Sequence: Synthetic oligonucleotide
  Antisense Strand to SEQ ID NO: 445773
gauuauaagcuuugaugcc

SEQ ID NO: 445775 - RNA, 19 nt, Artificial Sequence
  Description of Artificial Sequence: Synthetic oligonucleotide
  Sense strand starting at position 949 of SEQ ID NO: 316860
gcucaucaagaaugccaaa

SEQ ID NO: 445776 - RNA, 19 nt, Artificial Sequence
  Description of Artificial Sequence: Synthetic oligonucleotide
  Antisense Strand to SEQ ID NO: 445775
uuuggcauucuugaugagc

SEQ ID NO: 445777 - RNA, 19 nt, Artificial Sequence
  Description of Artificial Sequence: Synthetic oligonucleotide
  Sense strand starting at position 971 of SEQ ID NO: 316860
gggacaaacugucucugua

SEQ ID NO: 445778 - RNA, 19 nt, Artificial Sequence
  Description of Artificial Sequence: Synthetic oligonucleotide
  Antisense Strand to SEQ ID NO: 445777
uacagagacaguuuguccc

SEQ ID NO: 445779 - RNA, 19 nt, Artificial Sequence
  Description of Artificial Sequence: Synthetic oligonucleotide
  Sense strand starting at position 1124 of SEQ ID NO: 316860
gcacauuuaucugucacuu

SEQ ID NO: 445780 - RNA, 19 nt, Artificial Sequence
  Description of Artificial Sequence: Synthetic oligonucleotide
  Antisense Strand to SEQ ID NO: 445779
aagugacagauaaaugugc

SEQ ID NO: 445781 - RNA, 19 nt, Artificial Sequence
  Description of Artificial Sequence: Synthetic oligonucleotide
  Sense strand starting at position 1166 of SEQ ID NO: 316860
agagcugauuaucuaauaa

SEQ ID NO: 445782 - RNA, 19 nt, Artificial Sequence
  Description of Artificial Sequence: Synthetic oligonucleotide
  Antisense Strand to SEQ ID NO: 445781
uuauuagauaaucagcucu

SEQ ID NO: 445783 - RNA, 19 nt, Artificial Sequence
  Description of Artificial Sequence: Synthetic oligonucleotide
  Sense strand starting at position 1366 of SEQ ID NO: 316860
agugcugucauugcuguau

SEQ ID NO: 445784 - RNA, 19 nt, Artificial Sequence
  Description of Artificial Sequence: Synthetic oligonucleotide
  Antisense Strand to SEQ ID NO: 445783
auacagcaaugacagcacu

SEQ ID NO: 445785 - RNA, 19 nt, Artificial Sequence
  Description of Artificial Sequence: Synthetic oligonucleotide
  Sense strand starting at position 1408 of SEQ ID NO: 316860
cagagagccuccuucuaug

SEQ ID NO: 445786 - RNA, 19 nt, Artificial Sequence
  Description of Artificial Sequence: Synthetic oligonucleotide
  Antisense Strand to SEQ ID NO: 445785
cauagaaggaggcucucug

SEQ ID NO: 445787 - RNA, 19 nt, Artificial Sequence
  Description of Artificial Sequence: Synthetic oligonucleotide
  Sense strand starting at position 1438 of SEQ ID NO: 316860
gauggaaaguauucuuauu

SEQ ID NO: 445788 - RNA, 19 nt, Artificial Sequence
  Description of Artificial Sequence: Synthetic oligonucleotide
  Antisense Strand to SEQ ID NO: 445787
aauaagaauacuuuccauc

SEQ ID NO: 445789 - RNA, 19 nt, Artificial Sequence
  Description of Artificial Sequence: Synthetic oligonucleotide
  Sense strand starting at position 1440 of SEQ ID NO: 316860
uggaaaguauucuuauucu

SEQ ID NO: 445790 - RNA, 19 nt, Artificial Sequence
  Description of Artificial Sequence: Synthetic oligonucleotide
  Antisense Strand to SEQ ID NO: 445789
agaauaagaauacuuucca

SEQ ID NO: 445791 - RNA, 19 nt, Artificial Sequence
  Description of Artificial Sequence: Synthetic oligonucleotide
  Sense strand starting at position 1493 of SEQ ID NO: 316860
aguugaaauccauaacgug

SEQ ID NO: 445792 - RNA, 19 nt, Artificial Sequence
  Description of Artificial Sequence: Synthetic oligonucleotide
  Antisense Strand to SEQ ID NO: 445791
cacguuauggauuucaacu

SEQ ID NO: 445793 - RNA, 19 nt, Artificial Sequence
  Description of Artificial Sequence: Synthetic oligonucleotide
  Sense strand starting at position 1682 of SEQ ID NO: 316860
aaacauucuggaggucuca

SEQ ID NO: 445794 - RNA, 19 nt, Artificial Sequence
  Description of Artificial Sequence: Synthetic oligonucleotide
  Antisense Strand to SEQ ID NO: 445793
ugagaccuccagaauguuu

SEQ ID NO: 445795 - RNA, 19 nt, Artificial Sequence
  Description of Artificial Sequence: Synthetic oligonucleotide
  Sense strand starting at position 1886 of SEQ ID NO: 316860
auuaccuaccguugaauaa

SEQ ID NO: 445796 - RNA, 19 nt, Artificial Sequence
  Description of Artificial Sequence: Synthetic oligonucleotide
  Antisense Strand to SEQ ID NO: 445795
uuauucaacgguagguaau

SEQ ID NO: 445797 - RNA, 19 nt, Artificial Sequence
  Description of Artificial Sequence: Synthetic oligonucleotide
  Sense strand starting at position 1887 of SEQ ID NO: 316860
uuaccuaccguugaauaaa

SEQ ID NO: 445798 - RNA, 19 nt, Artificial Sequence
  Description of Artificial Sequence: Synthetic oligonucleotide
  Antisense Strand to SEQ ID NO: 445797
uuuauucaacgguagguaa

SEQ ID NO: 445799 - RNA, 19 nt, Artificial Sequence
  Description of Artificial Sequence: Synthetic oligonucleotide
  Sense strand starting at position 2111 of SEQ ID NO: 316860
cacgcacuugguuaggaua

SEQ ID NO: 445800 - RNA, 19 nt, Artificial Sequence
  Description of Artificial Sequence: Synthetic oligonucleotide
  Antisense Strand to SEQ ID NO: 445799
uauccuaaccaagugcgug

SEQ ID NO: 445801 - RNA, 19 nt, Artificial Sequence
  Description of Artificial Sequence: Synthetic oligonucleotide
  Sense strand starting at position 2119 of SEQ ID NO: 316860
ugguuaggauaccuguauu

SEQ ID NO: 445802 - RNA, 19 nt, Artificial Sequence
  Description of Artificial Sequence: Synthetic oligonucleotide
  Antisense Strand to SEQ ID NO: 445801
aauacagguauccuaacca

SEQ ID NO: 445803 - RNA, 19 nt, Artificial Sequence
  Description of Artificial Sequence: Synthetic oligonucleotide
  Sense strand starting at position 2122 of SEQ ID NO: 316860
uuaggauaccuguauuauc

SEQ ID NO: 445804 - RNA, 19 nt, Artificial Sequence
  Description of Artificial Sequence: Synthetic oligonucleotide
  Antisense Strand to SEQ ID NO: 445803
gauaauacagguauccuaa

SEQ ID NO: 445805 - RNA, 19 nt, Artificial Sequence
  Description of Artificial Sequence: Synthetic oligonucleotide
  Sense strand starting at position 2141 of SEQ ID NO: 316860
uagcaaugugaucaaguuu

SEQ ID NO: 445806 - RNA, 19 nt, Artificial Sequence
  Description of Artificial Sequence: Synthetic oligonucleotide
  Antisense Strand to SEQ ID NO: 445805
aaacuugaucacauugcua

SEQ ID NO: 445807 - RNA, 19 nt, Artificial Sequence
  Description of Artificial Sequence: Synthetic oligonucleotide
  Sense strand starting at position 2254 of SEQ ID NO: 316860
cucccauuggugugaagag

SEQ ID NO: 445808 - RNA, 19 nt, Artificial Sequence
  Description of Artificial Sequence: Synthetic oligonucleotide
  Antisense Strand to SEQ ID NO: 445807
cucuucacaccaaugggag

SEQ ID NO: 445809 - RNA, 19 nt, Artificial Sequence
  Description of Artificial Sequence: Synthetic oligonucleotide
  Sense strand starting at position 2282 of SEQ ID NO: 316860
agcucaaacuaugcuagaa

SEQ ID NO: 445810 - RNA, 19 nt, Artificial Sequence
  Description of Artificial Sequence: Synthetic oligonucleotide
  Antisense Strand to SEQ ID NO: 445809
uucuagcauaguuugagcu

SEQ ID NO: 445811 - RNA, 19 nt, Artificial Sequence
  Description of Artificial Sequence: Synthetic oligonucleotide
  Sense strand starting at position 2373 of SEQ ID NO: 316860
cugaaacuauaguugguua

SEQ ID NO: 445812 - RNA, 19 nt, Artificial Sequence
  Description of Artificial Sequence: Synthetic oligonucleotide
  Antisense Strand to SEQ ID NO: 445811
uaaccaacuauaguuucag

SEQ ID NO: 445813 - RNA, 19 nt, Artificial Sequence
  Description of Artificial Sequence: Synthetic oligonucleotide
  Sense strand starting at position 2375 of SEQ ID NO: 316860
gaaacuauaguugguuaua

SEQ ID NO: 445814 - RNA, 19 nt, Artificial Sequence
  Description of Artificial Sequence: Synthetic oligonucleotide
  Antisense Strand to SEQ ID NO: 445813
uauaaccaacuauaguuuc

SEQ ID NO: 445815 - RNA, 19 nt, Artificial Sequence
  Description of Artificial Sequence: Synthetic oligonucleotide
  Sense strand starting at position 2378 of SEQ ID NO: 316860
acuauaguugguuauacca

SEQ ID NO: 445816 - RNA, 19 nt, Artificial Sequence
  Description of Artificial Sequence: Synthetic oligonucleotide
  Antisense Strand to SEQ ID NO: 445815
ugguauaaccaacuauagu

SEQ ID NO: 445817 - RNA, 19 nt, Artificial Sequence
  Description of Artificial Sequence: Synthetic oligonucleotide
  Sense strand starting at position 2440 of SEQ ID NO: 316860
uuguuaauuuaguugcaga

SEQ ID NO: 445818 - RNA, 19 nt, Artificial Sequence
  Description of Artificial Sequence: Synthetic oligonucleotide
  Antisense Strand to SEQ ID NO: 445817
ucugcaacuaaauuaacaa

SEQ ID NO: 445819 - RNA, 19 nt, Artificial Sequence
  Description of Artificial Sequence: Synthetic oligonucleotide
  Sense strand starting at position 2528 of SEQ ID NO: 316860
ugacaagugcuguaaauaa

SEQ ID NO: 445820 - RNA, 19 nt, Artificial Sequence
  Description of Artificial Sequence: Synthetic oligonucleotide
  Antisense Strand to SEQ ID NO: 445819
uuauuuacagcacuuguca

SEQ ID NO: 445821 - RNA, 19 nt, Artificial Sequence
  Description of Artificial Sequence: Synthetic oligonucleotide
  Sense strand starting at position 2623 of SEQ ID NO: 316860
ugccauauuccaggaacaa

SEQ ID NO: 445822 - RNA, 19 nt, Artificial Sequence
  Description of Artificial Sequence: Synthetic oligonucleotide
  Antisense Strand to SEQ ID NO: 445821
uuguuccuggaauauggca

SEQ ID NO: 445823 - RNA, 19 nt, Artificial Sequence
  Description of Artificial Sequence: Synthetic oligonucleotide
  Sense strand starting at position 2758 of SEQ ID NO: 316860
acauuuaguuuggauacau

SEQ ID NO: 445824 - RNA, 19 nt, Artificial Sequence
  Description of Artificial Sequence: Synthetic oligonucleotide
  Antisense Strand to SEQ ID NO: 445823
auguauccaaacuaaaugu

SEQ ID NO: 445825 - RNA, 19 nt, Artificial Sequence
  Description of Artificial Sequence: Synthetic oligonucleotide
  Sense strand starting at position 2948 of SEQ ID NO: 316860
auauaucuuccugaggcau

SEQ ID NO: 445826 - RNA, 19 nt, Artificial Sequence
  Description of Artificial Sequence: Synthetic oligonucleotide
  Antisense Strand to SEQ ID NO: 445825
augccucaggaagauauau

SEQ ID NO: 445827 - RNA, 19 nt, Artificial Sequence
  Description of Artificial Sequence: Synthetic oligonucleotide
  Sense strand starting at position 3150 of SEQ ID NO: 316860
agaacaagcuuguugaacu

SEQ ID NO: 445828 - RNA, 19 nt, Artificial Sequence
  Description of Artificial Sequence: Synthetic oligonucleotide
  Antisense Strand to SEQ ID NO: 445827
aguucaacaagcuuguucu

SEQ ID NO: 445829 - RNA, 19 nt, Artificial Sequence
  Description of Artificial Sequence: Synthetic oligonucleotide
  Sense strand starting at position 3168 of SEQ ID NO: 316860
ucauuauaacuugggcaau

SEQ ID NO: 445830 - RNA, 19 nt, Artificial Sequence
  Description of Artificial Sequence: Synthetic oligonucleotide
  Antisense Strand to SEQ ID NO: 445829
auugcccaaguuauaauga

SEQ ID NO: 445831 - RNA, 19 nt, Artificial Sequence
  Description of Artificial Sequence: Synthetic oligonucleotide
  Sense strand starting at position 3170 of SEQ ID NO: 316860
auuauaacuugggcaauca

SEQ ID NO: 445832 - RNA, 19 nt, Artificial Sequence
  Description of Artificial Sequence: Synthetic oligonucleotide
  Antisense Strand to SEQ ID NO: 445831
ugauugcccaaguuauaau

SEQ ID NO: 445833 - RNA, 19 nt, Artificial Sequence
  Description of Artificial Sequence: Synthetic oligonucleotide
  Sense strand starting at position 3375 of SEQ ID NO: 316860
ugcaccauugcugagaauu

SEQ ID NO: 445834 - RNA, 19 nt, Artificial Sequence
  Description of Artificial Sequence: Synthetic oligonucleotide
  Antisense Strand to SEQ ID NO: 445833
aauucucagcaauggugca

SEQ ID NO: 445835 - RNA, 19 nt, Artificial Sequence
  Description of Artificial Sequence: Synthetic oligonucleotide
  Sense strand starting at position 3444 of SEQ ID NO: 316860
guaguuucuggagggagau

SEQ ID NO: 445836 - RNA, 19 nt, Artificial Sequence
  Description of Artificial Sequence: Synthetic oligonucleotide
  Antisense Strand to SEQ ID NO: 445835
aucucccuccagaaacuac

SEQ ID NO: 445837 - RNA, 19 nt, Artificial Sequence
  Description of Artificial Sequence: Synthetic oligonucleotide
  Sense strand starting at position 3763 of SEQ ID NO: 316860
guuuauuucuaagacugag

SEQ ID NO: 445838 - RNA, 19 nt, Artificial Sequence
  Description of Artificial Sequence: Synthetic oligonucleotide
  Antisense Strand to SEQ ID NO: 445837
cucagucuuagaaauaaac

SEQ ID NO: 445839 - RNA, 19 nt, Artificial Sequence
  Description of Artificial Sequence: Synthetic oligonucleotide
  Sense strand starting at position 3790 of SEQ ID NO: 316860
guacaaagauuaucuuugu

SEQ ID NO: 445840 - RNA, 19 nt, Artificial Sequence
  Description of Artificial Sequence: Synthetic oligonucleotide
  Antisense Strand to SEQ ID NO: 445839
acaaagauaaucuuuguac

SEQ ID NO: 445841 - RNA, 19 nt, Artificial Sequence
  Description of Artificial Sequence: Synthetic oligonucleotide
  Sense strand starting at position 205 of SEQ ID NO: 316861
acaguauucugggucugga

SEQ ID NO: 445842 - RNA, 19 nt, Artificial Sequence
  Description of Artificial Sequence: Synthetic oligonucleotide
  Antisense Strand to SEQ ID NO: 445841
uccagacccagaauacugu

SEQ ID NO: 445843 - RNA, 19 nt, Artificial Sequence
  Description of Artificial Sequence: Synthetic oligonucleotide
  Sense strand starting at position 399 of SEQ ID NO: 316861
uuggcuugagugugacaau

SEQ ID NO: 445844 - RNA, 19 nt, Artificial Sequence
  Description of Artificial Sequence: Synthetic oligonucleotide
  Antisense Strand to SEQ ID NO: 445843
auugucacacucaagccaa

SEQ ID NO: 445845 - RNA, 19 nt, Artificial Sequence
  Description of Artificial Sequence: Synthetic oligonucleotide
  Sense strand starting at position 647 of SEQ ID NO: 316861
uccagagauccuugucacu

SEQ ID NO: 445846 - RNA, 19 nt, Artificial Sequence
  Description of Artificial Sequence: Synthetic oligonucleotide
  Antisense Strand to SEQ ID NO: 445845
agugacaaggaucucugga

SEQ ID NO: 445847 - RNA, 19 nt, Artificial Sequence
  Description of Artificial Sequence: Synthetic oligonucleotide
  Sense strand starting at position 649 of SEQ ID NO: 316861
cagagauccuugucacuga

SEQ ID NO: 445848 - RNA, 19 nt, Artificial Sequence
  Description of Artificial Sequence: Synthetic oligonucleotide
  Antisense Strand to SEQ ID NO: 445847
ucagugacaaggaucucug

SEQ ID NO: 445849 - RNA, 19 nt, Artificial Sequence
  Description of Artificial Sequence: Synthetic oligonucleotide
  Sense strand starting at position 946 of SEQ ID NO: 316861
uugagaugagacugcgauu

SEQ ID NO: 445850 - RNA, 19 nt, Artificial Sequence
  Description of Artificial Sequence: Synthetic oligonucleotide
  Antisense Strand to SEQ ID NO: 445849
aaucgcagucucaucucaa

SEQ ID NO: 445851 - RNA, 19 nt, Artificial Sequence
  Description of Artificial Sequence: Synthetic oligonucleotide
  Sense strand starting at position 949 of SEQ ID NO: 316861
agaugagacugcgauuuag

SEQ ID NO: 445852 - RNA, 19 nt, Artificial Sequence
  Description of Artificial Sequence: Synthetic oligonucleotide
  Antisense Strand to SEQ ID NO: 445851
cuaaaucgcagucucaucu

SEQ ID NO: 445853 - RNA, 19 nt, Artificial Sequence
  Description of Artificial Sequence: Synthetic oligonucleotide
  Sense strand starting at position 958 of SEQ ID NO: 316861
ugcgauuuagucugcagca

SEQ ID NO: 445854 - RNA, 19 nt, Artificial Sequence
  Description of Artificial Sequence: Synthetic oligonucleotide
  Antisense Strand to SEQ ID NO: 445853
ugcugcagacuaaaucgca

SEQ ID NO: 445855 - RNA, 19 nt, Artificial Sequence
  Description of Artificial Sequence: Synthetic oligonucleotide
  Sense strand starting at position 959 of SEQ ID NO: 316861
gcgauuuagucugcagcag

SEQ ID NO: 445856 - RNA, 19 nt, Artificial Sequence
  Description of Artificial Sequence: Synthetic oligonucleotide
  Antisense Strand to SEQ ID NO: 445855
cugcugcagacuaaaucgc

SEQ ID NO: 445857 - RNA, 19 nt, Artificial Sequence
  Description of Artificial Sequence: Synthetic oligonucleotide
  Sense strand starting at position 1398 of SEQ ID NO: 316861
cacggauccggcugagaca

SEQ ID NO: 445858 - RNA, 19 nt, Artificial Sequence
  Description of Artificial Sequence: Synthetic oligonucleotide
  Antisense Strand to SEQ ID NO: 445857
ugucucagccggauccgug

SEQ ID NO: 445859 - RNA, 19 nt, Artificial Sequence
  Description of Artificial Sequence: Synthetic oligonucleotide
  Sense strand starting at position 1407 of SEQ ID NO: 316861
ggcugagacagcugaaguu

SEQ ID NO: 445860 - RNA, 19 nt, Artificial Sequence
  Description of Artificial Sequence: Synthetic oligonucleotide
  Antisense Strand to SEQ ID NO: 445859
aacuucagcugucucagcc

SEQ ID NO: 445861 - RNA, 19 nt, Artificial Sequence
  Description of Artificial Sequence: Synthetic oligonucleotide
  Sense strand starting at position 2213 of SEQ ID NO: 316861
gucuuccucccgggauaau

SEQ ID NO: 445862 - RNA, 19 nt, Artificial Sequence
  Description of Artificial Sequence: Synthetic oligonucleotide
  Antisense Strand to SEQ ID NO: 445861
auuaucccgggaggaagac

SEQ ID NO: 445863 - RNA, 19 nt, Artificial Sequence
  Description of Artificial Sequence: Synthetic oligonucleotide
  Sense strand starting at position 2214 of SEQ ID NO: 316861
ucuuccucccgggauaauu

SEQ ID NO: 445864 - RNA, 19 nt, Artificial Sequence
  Description of Artificial Sequence: Synthetic oligonucleotide
  Antisense Strand to SEQ ID NO: 445863
aauuaucccgggaggaaga

SEQ ID NO: 445865 - RNA, 19 nt, Artificial Sequence
  Description of Artificial Sequence: Synthetic oligonucleotide
  Sense strand starting at position 2427 of SEQ ID NO: 316861
guggcuaguuucuuaaaca

SEQ ID NO: 445866 - RNA, 19 nt, Artificial Sequence
  Description of Artificial Sequence: Synthetic oligonucleotide
  Antisense Strand to SEQ ID NO: 445865
uguuuaagaaacuagccac

SEQ ID NO: 445867 - RNA, 19 nt, Artificial Sequence
  Description of Artificial Sequence: Synthetic oligonucleotide
  Sense strand starting at position 2486 of SEQ ID NO: 316861
auacuuugauggcuggaau

SEQ ID NO: 445868 - RNA, 19 nt, Artificial Sequence
  Description of Artificial Sequence: Synthetic oligonucleotide
  Antisense Strand to SEQ ID NO: 445867
auuccagccaucaaaguau

SEQ ID NO: 445869 - RNA, 19 nt, Artificial Sequence
  Description of Artificial Sequence: Synthetic oligonucleotide
  Sense strand starting at position 2487 of SEQ ID NO: 316861
uacuuugauggcuggaaua

SEQ ID NO: 445870 - RNA, 19 nt, Artificial Sequence
  Description of Artificial Sequence: Synthetic oligonucleotide
  Antisense Strand to SEQ ID NO: 445869
uauuccagccaucaaagua

SEQ ID NO: 445871 - RNA, 19 nt, Artificial Sequence
  Description of Artificial Sequence: Synthetic oligonucleotide
  Sense strand starting at position 2560 of SEQ ID NO: 316861
gguagcucuguuugagauu

SEQ ID NO: 445872 - RNA, 19 nt, Artificial Sequence
  Description of Artificial Sequence: Synthetic oligonucleotide
  Antisense Strand to SEQ ID NO: 445871
aaucucaaacagagcuacc

SEQ ID NO: 445873 - RNA, 19 nt, Artificial Sequence
  Description of Artificial Sequence: Synthetic oligonucleotide
  Sense strand starting at position 2586 of SEQ ID NO: 316861
gucaaagaauuugacuauu

SEQ ID NO: 445874 - RNA, 19 nt, Artificial Sequence
  Description of Artificial Sequence: Synthetic oligonucleotide
  Antisense Strand to SEQ ID NO: 445873
aauagucaaauucuuugac

SEQ ID NO: 445875 - RNA, 19 nt, Artificial Sequence
  Description of Artificial Sequence: Synthetic oligonucleotide
  Sense strand starting at position 2595 of SEQ ID NO: 316861
uuugacuauugagauuugu

SEQ ID NO: 445876 - RNA, 19 nt, Artificial Sequence
  Description of Artificial Sequence: Synthetic oligonucleotide
  Antisense Strand to SEQ ID NO: 445875
acaaaucucaauagucaaa

SEQ ID NO: 445877 - RNA, 19 nt, Artificial Sequence
  Description of Artificial Sequence: Synthetic oligonucleotide
  Sense strand starting at position 2700 of SEQ ID NO: 316861
gcagauacacgacauacau

SEQ ID NO: 445878 - RNA, 19 nt, Artificial Sequence
  Description of Artificial Sequence: Synthetic oligonucleotide
  Antisense Strand to SEQ ID NO: 445877
auguaugucguguaucugc

SEQ ID NO: 445879 - RNA, 19 nt, Artificial Sequence
  Description of Artificial Sequence: Synthetic oligonucleotide
  Sense strand starting at position 2724 of SEQ ID NO: 316861
ugaaauuagccucggucaa

SEQ ID NO: 445880 - RNA, 19 nt, Artificial Sequence
  Description of Artificial Sequence: Synthetic oligonucleotide
  Antisense Strand to SEQ ID NO: 445879
uugaccgaggcuaauuuca

SEQ ID NO: 445881 - RNA, 19 nt, Artificial Sequence
  Description of Artificial Sequence: Synthetic oligonucleotide
  Sense strand starting at position 2725 of SEQ ID NO: 316861
gaaauuagccucggucaaa

SEQ ID NO: 445882 - RNA, 19 nt, Artificial Sequence
  Description of Artificial Sequence: Synthetic oligonucleotide
  Antisense Strand to SEQ ID NO: 445881
uuugaccgaggcuaauuuc

SEQ ID NO: 445883 - RNA, 19 nt, Artificial Sequence
  Description of Artificial Sequence: Synthetic oligonucleotide
  Sense strand starting at position 2726 of SEQ ID NO: 316861
aaauuagccucggucaaau

SEQ ID NO: 445884 - RNA, 19 nt, Artificial Sequence
  Description of Artificial Sequence: Synthetic oligonucleotide
  Antisense Strand to SEQ ID NO: 445883
auuugaccgaggcuaauuu

SEQ ID NO: 445885 - RNA, 19 nt, Artificial Sequence
  Description of Artificial Sequence: Synthetic oligonucleotide
  Sense strand starting at position 2728 of SEQ ID NO: 316861
auuagccucggucaaauaa

SEQ ID NO: 445886 - RNA, 19 nt, Artificial Sequence
  Description of Artificial Sequence: Synthetic oligonucleotide
  Antisense Strand to SEQ ID NO: 445885
uuauuugaccgaggcuaau

SEQ ID NO: 445887 - RNA, 19 nt, Artificial Sequence
  Description of Artificial Sequence: Synthetic oligonucleotide
  Sense strand starting at position 2774 of SEQ ID NO: 316861
uuaauugauugugcccuau

SEQ ID NO: 445888 - RNA, 19 nt, Artificial Sequence
  Description of Artificial Sequence: Synthetic oligonucleotide
  Antisense Strand to SEQ ID NO: 445887
auagggcacaaucaauuaa

SEQ ID NO: 445889 - RNA, 19 nt, Artificial Sequence
  Description of Artificial Sequence: Synthetic oligonucleotide
  Sense strand starting at position 2776 of SEQ ID NO: 316861
aauugauugugcccuauag

SEQ ID NO: 445890 - RNA, 19 nt, Artificial Sequence
  Description of Artificial Sequence: Synthetic oligonucleotide
  Antisense Strand to SEQ ID NO: 445889
cuauagggcacaaucaauu

SEQ ID NO: 445891 - RNA, 19 nt, Artificial Sequence
  Description of Artificial Sequence: Synthetic oligonucleotide
  Sense strand starting at position 2778 of SEQ ID NO: 316861
uugauugugcccuauagca

SEQ ID NO: 445892 - RNA, 19 nt, Artificial Sequence
  Description of Artificial Sequence: Synthetic oligonucleotide
  Antisense Strand to SEQ ID NO: 445891
ugcuauagggcacaaucaa

SEQ ID NO: 445893 - RNA, 19 nt, Artificial Sequence
  Description of Artificial Sequence: Synthetic oligonucleotide
  Sense strand starting at position 2780 of SEQ ID NO: 316861
gauugugcccuauagcauu

SEQ ID NO: 445894 - RNA, 19 nt, Artificial Sequence
  Description of Artificial Sequence: Synthetic oligonucleotide
  Antisense Strand to SEQ ID NO: 445893
aaugcuauagggcacaauc

SEQ ID NO: 445895 - RNA, 19 nt, Artificial Sequence
  Description of Artificial Sequence: Synthetic oligonucleotide
  Sense strand starting at position 2786 of SEQ ID NO: 316861
gcccuauagcauugggaga

SEQ ID NO: 445896 - RNA, 19 nt, Artificial Sequence
  Description of Artificial Sequence: Synthetic oligonucleotide
  Antisense Strand to SEQ ID NO: 445895
ucucccaaugcuauagggc

SEQ ID NO: 445897 - RNA, 19 nt, Artificial Sequence
  Description of Artificial Sequence: Synthetic oligonucleotide
  Sense strand starting at position 2787 of SEQ ID NO: 316861
cccuauagcauugggagau

SEQ ID NO: 445898 - RNA, 19 nt, Artificial Sequence
  Description of Artificial Sequence: Synthetic oligonucleotide
  Antisense Strand to SEQ ID NO: 445897
aucucccaaugcuauaggg

SEQ ID NO: 445899 - RNA, 19 nt, Artificial Sequence
  Description of Artificial Sequence: Synthetic oligonucleotide
  Sense strand starting at position 2880 of SEQ ID NO: 316861
uuuaguauauucccucgau

SEQ ID NO: 445900 - RNA, 19 nt, Artificial Sequence
  Description of Artificial Sequence: Synthetic oligonucleotide
  Antisense Strand to SEQ ID NO: 445899
aucgagggaauauacuaaa

SEQ ID NO: 445901 - RNA, 19 nt, Artificial Sequence
  Description of Artificial Sequence: Synthetic oligonucleotide
  Sense strand starting at position 2881 of SEQ ID NO: 316861
uuaguauauucccucgauu

SEQ ID NO: 445902 - RNA, 19 nt, Artificial Sequence
  Description of Artificial Sequence: Synthetic oligonucleotide
  Antisense Strand to SEQ ID NO: 445901
aaucgagggaauauacuaa

SEQ ID NO: 445903 - RNA, 19 nt, Artificial Sequence
  Description of Artificial Sequence: Synthetic oligonucleotide
  Sense strand starting at position 2983 of SEQ ID NO: 316861
uacagaaaggucugauuau

SEQ ID NO: 445904 - RNA, 19 nt, Artificial Sequence
  Description of Artificial Sequence: Synthetic oligonucleotide
  Antisense Strand to SEQ ID NO: 445903
auaaucagaccuuucugua

SEQ ID NO: 445905 - RNA, 19 nt, Artificial Sequence
  Description of Artificial Sequence: Synthetic oligonucleotide
  Sense strand starting at position 2989 of SEQ ID NO: 316861
aaggucugauuauagaaga

SEQ ID NO: 445906 - RNA, 19 nt, Artificial Sequence
  Description of Artificial Sequence: Synthetic oligonucleotide
  Antisense Strand to SEQ ID NO: 445905
ucuucuauaaucagaccuu

SEQ ID NO: 445907 - RNA, 19 nt, Artificial Sequence
  Description of Artificial Sequence: Synthetic oligonucleotide
  Sense strand starting at position 3079 of SEQ ID NO: 316861
ugagucagcucaccaguuu

SEQ ID NO: 445908 - RNA, 19 nt, Artificial Sequence
  Description of Artificial Sequence: Synthetic oligonucleotide
  Antisense Strand to SEQ ID NO: 445907
aaacuggugagcugacuca

SEQ ID NO: 445909 - RNA, 19 nt, Artificial Sequence
  Description of Artificial Sequence: Synthetic oligonucleotide
  Sense strand starting at position 3097 of SEQ ID NO: 316861
uugacauaucuagagccuu

SEQ ID NO: 445910 - RNA, 19 nt, Artificial Sequence
  Description of Artificial Sequence: Synthetic oligonucleotide
  Antisense Strand to SEQ ID NO: 445909
aaggcucuagauaugucaa

SEQ ID NO: 445911 - RNA, 19 nt, Artificial Sequence
  Description of Artificial Sequence: Synthetic oligonucleotide
  Sense strand starting at position 3112 of SEQ ID NO: 316861
ccuuguuugucuccacaau

SEQ ID NO: 445912 - RNA, 19 nt, Artificial Sequence
  Description of Artificial Sequence: Synthetic oligonucleotide
  Antisense Strand to SEQ ID NO: 445911
auuguggagacaaacaagg

SEQ ID NO: 445913 - RNA, 19 nt, Artificial Sequence
  Description of Artificial Sequence: Synthetic oligonucleotide
  Sense strand starting at position 3141 of SEQ ID NO: 316861
cuaucuuuagcuggugaca

SEQ ID NO: 445914 - RNA, 19 nt, Artificial Sequence
  Description of Artificial Sequence: Synthetic oligonucleotide
  Antisense Strand to SEQ ID NO: 445913
ugucaccagcuaaagauag

SEQ ID NO: 445915 - RNA, 19 nt, Artificial Sequence
  Description of Artificial Sequence: Synthetic oligonucleotide
  Sense strand starting at position 3196 of SEQ ID NO: 316861
agaauaaagcagcagugau

SEQ ID NO: 445916 - RNA, 19 nt, Artificial Sequence
  Description of Artificial Sequence: Synthetic oligonucleotide
  Antisense Strand to SEQ ID NO: 445915
aucacugcugcuuuauucu

SEQ ID NO: 445917 - RNA, 19 nt, Artificial Sequence
  Description of Artificial Sequence: Synthetic oligonucleotide
  Sense strand starting at position 3230 of SEQ ID NO: 316861
ggugaaagcucaucuuuga

SEQ ID NO: 445918 - RNA, 19 nt, Artificial Sequence
  Description of Artificial Sequence: Synthetic oligonucleotide
  Antisense Strand to SEQ ID NO: 445917
ucaaagaugagcuuucacc

SEQ ID NO: 445919 - RNA, 19 nt, Artificial Sequence
  Description of Artificial Sequence: Synthetic oligonucleotide
  Sense strand starting at position 3656 of SEQ ID NO: 316861
uugcaugucuaugugacua

SEQ ID NO: 445920 - RNA, 19 nt, Artificial Sequence
  Description of Artificial Sequence: Synthetic oligonucleotide
  Antisense Strand to SEQ ID NO: 445919
uagucacauagacaugcaa

SEQ ID NO: 445921 - RNA, 19 nt, Artificial Sequence
  Description of Artificial Sequence: Synthetic oligonucleotide
  Sense strand starting at position 139 of SEQ ID NO: 316862
agaaauaacagguggucuu

SEQ ID NO: 445922 - RNA, 19 nt, Artificial Sequence
  Description of Artificial Sequence: Synthetic oligonucleotide
  Antisense Strand to SEQ ID NO: 445921
aagaccaccuguuauuucu

SEQ ID NO: 445923 - RNA, 19 nt, Artificial Sequence
  Description of Artificial Sequence: Synthetic oligonucleotide
  Sense strand starting at position 172 of SEQ ID NO: 316862
augggcucugcauaacuga

SEQ ID NO: 445924 - RNA, 19 nt, Artificial Sequence
  Description of Artificial Sequence: Synthetic oligonucleotide
  Antisense Strand to SEQ ID NO: 445923
ucaguuaugcagagcccau

SEQ ID NO: 445925 - RNA, 19 nt, Artificial Sequence
  Description of Artificial Sequence: Synthetic oligonucleotide
  Sense strand starting at position 175 of SEQ ID NO: 316862
ggcucugcauaacugaaua

SEQ ID NO: 445926 - RNA, 19 nt, Artificial Sequence
  Description of Artificial Sequence: Synthetic oligonucleotide
  Antisense Strand to SEQ ID NO: 445925
uauucaguuaugcagagcc

SEQ ID NO: 445927 - RNA, 19 nt, Artificial Sequence
  Description of Artificial Sequence: Synthetic oligonucleotide
  Sense strand starting at position 180 of SEQ ID NO: 316862
ugcauaacugaauagaguu

SEQ ID NO: 445928 - RNA, 19 nt, Artificial Sequence
  Description of Artificial Sequence: Synthetic oligonucleotide
  Antisense Strand to SEQ ID NO: 445927
aacucuauucaguuaugca

SEQ ID NO: 445929 - RNA, 19 nt, Artificial Sequence
  Description of Artificial Sequence: Synthetic oligonucleotide
  Sense strand starting at position 232 of SEQ ID NO: 316862
uuccuaguggcagagaaau

SEQ ID NO: 445930 - RNA, 19 nt, Artificial Sequence
  Description of Artificial Sequence: Synthetic oligonucleotide
  Antisense Strand to SEQ ID NO: 445929
auuucucugccacuaggaa

SEQ ID NO: 445931 - RNA, 19 nt, Artificial Sequence
  Description of Artificial Sequence: Synthetic oligonucleotide
  Sense strand starting at position 334 of SEQ ID NO: 316862
uaaguaaugcaaugaagga

SEQ ID NO: 445932 - RNA, 19 nt, Artificial Sequence
  Description of Artificial Sequence: Synthetic oligonucleotide
  Antisense Strand to SEQ ID NO: 445931
uccuucauugcauuacuua

SEQ ID NO: 445933 - RNA, 19 nt, Artificial Sequence
  Description of Artificial Sequence: Synthetic oligonucleotide
  Sense strand starting at position 399 of SEQ ID NO: 316862
guggguaguaaccagguua

SEQ ID NO: 445934 - RNA, 19 nt, Artificial Sequence
  Description of Artificial Sequence: Synthetic oligonucleotide
  Antisense Strand to SEQ ID NO: 445933
uaaccugguuacuacccac

SEQ ID NO: 445935 - RNA, 19 nt, Artificial Sequence
  Description of Artificial Sequence: Synthetic oligonucleotide
  Sense strand starting at position 524 of SEQ ID NO: 316862
aaguuauucugaccucgag

SEQ ID NO: 445936 - RNA, 19 nt, Artificial Sequence
  Description of Artificial Sequence: Synthetic oligonucleotide
  Antisense Strand to SEQ ID NO: 445935
cucgaggucagaauaacuu

SEQ ID NO: 445937 - RNA, 19 nt, Artificial Sequence
  Description of Artificial Sequence: Synthetic oligonucleotide
  Sense strand starting at position 528 of SEQ ID NO: 316862
uauucugaccucgagguua

SEQ ID NO: 445938 - RNA, 19 nt, Artificial Sequence
  Description of Artificial Sequence: Synthetic oligonucleotide
  Antisense Strand to SEQ ID NO: 445937
uaaccucgaggucagaaua

SEQ ID NO: 445939 - RNA, 19 nt, Artificial Sequence
  Description of Artificial Sequence: Synthetic oligonucleotide
  Sense strand starting at position 560 of SEQ ID NO: 316862
ggaagacugucaccuuucu

SEQ ID NO: 445940 - RNA, 19 nt, Artificial Sequence
  Description of Artificial Sequence: Synthetic oligonucleotide
  Antisense Strand to SEQ ID NO: 445939
agaaaggugacagucuucc

SEQ ID NO: 445941 - RNA, 19 nt, Artificial Sequence
  Description of Artificial Sequence: Synthetic oligonucleotide
  Sense strand starting at position 612 of SEQ ID NO: 316862
ccacauuguuuacugagaa

SEQ ID NO: 445942 - RNA, 19 nt, Artificial Sequence
  Description of Artificial Sequence: Synthetic oligonucleotide
  Antisense Strand to SEQ ID NO: 445941
uucucaguaaacaaugugg

SEQ ID NO: 445943 - RNA, 19 nt, Artificial Sequence
  Description of Artificial Sequence: Synthetic oligonucleotide
  Sense strand starting at position 698 of SEQ ID NO: 316862
uggacuuagacuuguaagu

SEQ ID NO: 445944 - RNA, 19 nt, Artificial Sequence
  Description of Artificial Sequence: Synthetic oligonucleotide
  Antisense Strand to SEQ ID NO: 445943
acuuacaagucuaagucca

SEQ ID NO: 445945 - RNA, 19 nt, Artificial Sequence
  Description of Artificial Sequence: Synthetic oligonucleotide
  Sense strand starting at position 760 of SEQ ID NO: 316862
ugagauaaggugugccaaa

SEQ ID NO: 445946 - RNA, 19 nt, Artificial Sequence
  Description of Artificial Sequence: Synthetic oligonucleotide
  Antisense Strand to SEQ ID NO: 445945
uuuggcacaccuuaucuca

SEQ ID NO: 445947 - RNA, 19 nt, Artificial Sequence
  Description of Artificial Sequence: Synthetic oligonucleotide
  Sense strand starting at position 827 of SEQ ID NO: 316862
gggaaucagccucauucca

SEQ ID NO: 445948 - RNA, 19 nt, Artificial Sequence
  Description of Artificial Sequence: Synthetic oligonucleotide
  Antisense Strand to SEQ ID NO: 445947
uggaaugaggcugauuccc

SEQ ID NO: 445949 - RNA, 19 nt, Artificial Sequence
  Description of Artificial Sequence: Synthetic oligonucleotide
  Sense strand starting at position 856 of SEQ ID NO: 316862
gaauaugagacugguggua

SEQ ID NO: 445950 - RNA, 19 nt, Artificial Sequence
  Description of Artificial Sequence: Synthetic oligonucleotide
  Antisense Strand to SEQ ID NO: 445949
uaccaccagucucauauuc

SEQ ID NO: 445951 - RNA, 19 nt, Artificial Sequence
  Description of Artificial Sequence: Synthetic oligonucleotide
  Sense strand starting at position 1024 of SEQ ID NO: 316862
uaggaagacuggcauuuaa

SEQ ID NO: 445952 - RNA, 19 nt, Artificial Sequence
  Description of Artificial Sequence: Synthetic oligonucleotide
  Antisense Strand to SEQ ID NO: 445951
uuaaaugccagucuuccua

SEQ ID NO: 445953 - RNA, 19 nt, Artificial Sequence
  Description of Artificial Sequence: Synthetic oligonucleotide
  Sense strand starting at position 1038 of SEQ ID NO: 316862
uuuaaauacccucagcgau

SEQ ID NO: 445954 - RNA, 19 nt, Artificial Sequence
  Description of Artificial Sequence: Synthetic oligonucleotide
  Antisense Strand to SEQ ID NO: 445953
aucgcugaggguauuuaaa

SEQ ID NO: 445955 - RNA, 19 nt, Artificial Sequence
  Description of Artificial Sequence: Synthetic oligonucleotide
  Sense strand starting at position 1434 of SEQ ID NO: 316862
ccuuuagauuucuaggacu

SEQ ID NO: 445956 - RNA, 19 nt, Artificial Sequence
  Description of Artificial Sequence: Synthetic oligonucleotide
  Antisense Strand to SEQ ID NO: 445955
aguccuagaaaucuaaagg

SEQ ID NO: 445957 - RNA, 19 nt, Artificial Sequence
  Description of Artificial Sequence: Synthetic oligonucleotide
  Sense strand starting at position 1671 of SEQ ID NO: 316862
uggagacaacuccguacuu

SEQ ID NO: 445958 - RNA, 19 nt, Artificial Sequence
  Description of Artificial Sequence: Synthetic oligonucleotide
  Antisense Strand to SEQ ID NO: 445957
aaguacggaguugucucca

SEQ ID NO: 445959 - RNA, 19 nt, Artificial Sequence
  Description of Artificial Sequence: Synthetic oligonucleotide
  Sense strand starting at position 1673 of SEQ ID NO: 316862
gagacaacuccguacuugu

SEQ ID NO: 445960 - RNA, 19 nt, Artificial Sequence
  Description of Artificial Sequence: Synthetic oligonucleotide
  Antisense Strand to SEQ ID NO: 445959
acaaguacggaguugucuc

SEQ ID NO: 445961 - RNA, 19 nt, Artificial Sequence
  Description of Artificial Sequence: Synthetic oligonucleotide
  Sense strand starting at position 1684 of SEQ ID NO: 316862
guacuugucgaaugacaaa

SEQ ID NO: 445962 - RNA, 19 nt, Artificial Sequence
  Description of Artificial Sequence: Synthetic oligonucleotide
  Antisense Strand to SEQ ID NO: 445961
uuugucauucgacaaguac

SEQ ID NO: 445963 - RNA, 19 nt, Artificial Sequence
  Description of Artificial Sequence: Synthetic oligonucleotide
  Sense strand starting at position 2085 of SEQ ID NO: 316862
ucauaauuggcccgaggga

SEQ ID NO: 445964 - RNA, 19 nt, Artificial Sequence
  Description of Artificial Sequence: Synthetic oligonucleotide
  Antisense Strand to SEQ ID NO: 445963
ucccucgggccaauuauga

SEQ ID NO: 445965 - RNA, 19 nt, Artificial Sequence
  Description of Artificial Sequence: Synthetic oligonucleotide
  Sense strand starting at position 2153 of SEQ ID NO: 316862
ugagaguagugguugagga

SEQ ID NO: 445966 - RNA, 19 nt, Artificial Sequence
  Description of Artificial Sequence: Synthetic oligonucleotide
  Antisense Strand to SEQ ID NO: 445965
uccucaaccacuacucuca

SEQ ID NO: 445967 - RNA, 19 nt, Artificial Sequence
  Description of Artificial Sequence: Synthetic oligonucleotide
  Sense strand starting at position 2154 of SEQ ID NO: 316862
gagaguagugguugaggaa

SEQ ID NO: 445968 - RNA, 19 nt, Artificial Sequence
  Description of Artificial Sequence: Synthetic oligonucleotide
  Antisense Strand to SEQ ID NO: 445967
uuccucaaccacuacucuc

SEQ ID NO: 445969 - RNA, 19 nt, Artificial Sequence
  Description of Artificial Sequence: Synthetic oligonucleotide
  Sense strand starting at position 2896 of SEQ ID NO: 316862
gugaaauccugcucaaauu

SEQ ID NO: 445970 - RNA, 19 nt, Artificial Sequence
  Description of Artificial Sequence: Synthetic oligonucleotide
  Antisense Strand to SEQ ID NO: 445969
aauuugagcaggauuucac

SEQ ID NO: 445971 - RNA, 19 nt, Artificial Sequence
  Description of Artificial Sequence: Synthetic oligonucleotide
  Sense strand starting at position 3040 of SEQ ID NO: 316862
ugggaaagcuacuuuguau

SEQ ID NO: 445972 - RNA, 19 nt, Artificial Sequence
  Description of Artificial Sequence: Synthetic oligonucleotide
  Antisense Strand to SEQ ID NO: 445971
auacaaaguagcuuuccca

SEQ ID NO: 445973 - RNA, 19 nt, Artificial Sequence
  Description of Artificial Sequence: Synthetic oligonucleotide
  Sense strand starting at position 3127 of SEQ ID NO: 316862
acugcacuccucuauagga

SEQ ID NO: 445974 - RNA, 19 nt, Artificial Sequence
  Description of Artificial Sequence: Synthetic oligonucleotide
  Antisense Strand to SEQ ID NO: 445973
uccuauagaggagugcagu

SEQ ID NO: 445975 - RNA, 19 nt, Artificial Sequence
  Description of Artificial Sequence: Synthetic oligonucleotide
  Sense strand starting at position 3143 of SEQ ID NO: 316862
ggaccuaagaacugugagu

SEQ ID NO: 445976 - RNA, 19 nt, Artificial Sequence
  Description of Artificial Sequence: Synthetic oligonucleotide
  Antisense Strand to SEQ ID NO: 445975
acucacaguucuuaggucc

SEQ ID NO: 445977 - RNA, 19 nt, Artificial Sequence
  Description of Artificial Sequence: Synthetic oligonucleotide
  Sense strand starting at position 3145 of SEQ ID NO: 316862
accuaagaacugugaguca

SEQ ID NO: 445978 - RNA, 19 nt, Artificial Sequence
  Description of Artificial Sequence: Synthetic oligonucleotide
  Antisense Strand to SEQ ID NO: 445977
ugacucacaguucuuaggu

SEQ ID NO: 445979 - RNA, 19 nt, Artificial Sequence
  Description of Artificial Sequence: Synthetic oligonucleotide
  Sense strand starting at position 3148 of SEQ ID NO: 316862
uaagaacugugagucaauu

SEQ ID NO: 445980 - RNA, 19 nt, Artificial Sequence
  Description of Artificial Sequence: Synthetic oligonucleotide
  Antisense Strand to SEQ ID NO: 445979
aauugacucacaguucuua

SEQ ID NO: 445981 - RNA, 19 nt, Artificial Sequence
  Description of Artificial Sequence: Synthetic oligonucleotide
  Sense strand starting at position 3206 of SEQ ID NO: 316862
auggaaucuaauggauguu

SEQ ID NO: 445982 - RNA, 19 nt, Artificial Sequence
  Description of Artificial Sequence: Synthetic oligonucleotide
  Antisense Strand to SEQ ID NO: 445981
aacauccauuagauuccau

SEQ ID NO: 445983 - RNA, 19 nt, Artificial Sequence
  Description of Artificial Sequence: Synthetic oligonucleotide
  Sense strand starting at position 3313 of SEQ ID NO: 316862
cccuuuaauguccagaaug

SEQ ID NO: 445984 - RNA, 19 nt, Artificial Sequence
  Description of Artificial Sequence: Synthetic oligonucleotide
  Antisense Strand to SEQ ID NO: 445983
cauucuggacauuaaaggg

SEQ ID NO: 445985 - RNA, 19 nt, Artificial Sequence
  Description of Artificial Sequence: Synthetic oligonucleotide
  Sense strand starting at position 3315 of SEQ ID NO: 316862
cuuuaauguccagaaugcu

SEQ ID NO: 445986 - RNA, 19 nt, Artificial Sequence
  Description of Artificial Sequence: Synthetic oligonucleotide
  Antisense Strand to SEQ ID NO: 445985
agcauucuggacauuaaag

SEQ ID NO: 445987 - RNA, 19 nt, Artificial Sequence
  Description of Artificial Sequence: Synthetic oligonucleotide
  Sense strand starting at position 3701 of SEQ ID NO: 316862
gugugaauuccuggacaag

SEQ ID NO: 445988 - RNA, 19 nt, Artificial Sequence
  Description of Artificial Sequence: Synthetic oligonucleotide
  Antisense Strand to SEQ ID NO: 445987
cuuguccaggaauucacac

SEQ ID NO: 445989 - RNA, 19 nt, Artificial Sequence
  Description of Artificial Sequence: Synthetic oligonucleotide
  Sense strand starting at position 3702 of SEQ ID NO: 316862
ugugaauuccuggacaagu

SEQ ID NO: 445990 - RNA, 19 nt, Artificial Sequence
  Description of Artificial Sequence: Synthetic oligonucleotide
  Antisense Strand to SEQ ID NO: 445989
acuuguccaggaauucaca

SEQ ID NO: 445991 - RNA, 19 nt, Artificial Sequence
  Description of Artificial Sequence: Synthetic oligonucleotide
  Sense strand starting at position 3789 of SEQ ID NO: 316862
uaaugaaagugcuuaguag

SEQ ID NO: 445992 - RNA, 19 nt, Artificial Sequence
  Description of Artificial Sequence: Synthetic oligonucleotide
  Antisense Strand to SEQ ID NO: 445991
cuacuaagcacuuucauua

SEQ ID NO: 445993 - RNA, 19 nt, Artificial Sequence
  Description of Artificial Sequence: Synthetic oligonucleotide
  Sense strand starting at position 3790 of SEQ ID NO: 316862
aaugaaagugcuuaguaga

SEQ ID NO: 445994 - RNA, 19 nt, Artificial Sequence
  Description of Artificial Sequence: Synthetic oligonucleotide
  Antisense Strand to SEQ ID NO: 445993
ucuacuaagcacuuucauu

SEQ ID NO: 445995 - RNA, 19 nt, Artificial Sequence
  Description of Artificial Sequence: Synthetic oligonucleotide
  Sense strand starting at position 3858 of SEQ ID NO: 316862
aaacguugaugcuuaagau

SEQ ID NO: 445996 - RNA, 19 nt, Artificial Sequence
  Description of Artificial Sequence: Synthetic oligonucleotide
  Antisense Strand to SEQ ID NO: 445995
aucuuaagcaucaacguuu

SEQ ID NO: 445997 - RNA, 19 nt, Artificial Sequence
  Description of Artificial Sequence: Synthetic oligonucleotide
  Sense strand starting at position 3859 of SEQ ID NO: 316862
aacguugaugcuuaagaug

SEQ ID NO: 445998 - RNA, 19 nt, Artificial Sequence
  Description of Artificial Sequence: Synthetic oligonucleotide
  Antisense Strand to SEQ ID NO: 445997
caucuuaagcaucaacguu

SEQ ID NO: 445999 - RNA, 19 nt, Artificial Sequence
  Description of Artificial Sequence: Synthetic oligonucleotide
  Sense strand starting at position 3885 of SEQ ID NO: 316862
uugguaguuggucaauauu

SEQ ID NO: 446000 - RNA, 19 nt, Artificial Sequence
  Description of Artificial Sequence: Synthetic oligonucleotide
  Antisense Strand to SEQ ID NO: 445999
aauauugaccaacuaccaa

SEQ ID NO: 446001 - RNA, 19 nt, Artificial Sequence
  Description of Artificial Sequence: Synthetic oligonucleotide
  Sense strand starting at position 216 of SEQ ID NO: 316863
augacauagugagcuugua

SEQ ID NO: 446002 - RNA, 19 nt, Artificial Sequence
  Description of Artificial Sequence: Synthetic oligonucleotide
  Antisense Strand to SEQ ID NO: 446001
uacaagcucacuaugucau

SEQ ID NO: 446003 - RNA, 19 nt, Artificial Sequence
  Description of Artificial Sequence: Synthetic oligonucleotide
  Sense strand starting at position 226 of SEQ ID NO: 316863
gagcuuguacacuggugaa

SEQ ID NO: 446004 - RNA, 19 nt, Artificial Sequence
  Description of Artificial Sequence: Synthetic oligonucleotide
  Antisense Strand to SEQ ID NO: 446003
uucaccaguguacaagcuc

SEQ ID NO: 446005 - RNA, 19 nt, Artificial Sequence
  Description of Artificial Sequence: Synthetic oligonucleotide
  Sense strand starting at position 272 of SEQ ID NO: 316863
cuagguauacccugggacu

SEQ ID NO: 446006 - RNA, 19 nt, Artificial Sequence
  Description of Artificial Sequence: Synthetic oligonucleotide
  Antisense Strand to SEQ ID NO: 446005
agucccaggguauaccuag

SEQ ID NO: 446007 - RNA, 19 nt, Artificial Sequence
  Description of Artificial Sequence: Synthetic oligonucleotide
  Sense strand starting at position 347 of SEQ ID NO: 316863
acggaauucuucuuauuau

SEQ ID NO: 446008 - RNA, 19 nt, Artificial Sequence
  Description of Artificial Sequence: Synthetic oligonucleotide
  Antisense Strand to SEQ ID NO: 446007
auaauaagaagaauuccgu

SEQ ID NO: 446009 - RNA, 19 nt, Artificial Sequence
  Description of Artificial Sequence: Synthetic oligonucleotide
  Sense strand starting at position 667 of SEQ ID NO: 316863
gauucucgaccucagcaua

SEQ ID NO: 446010 - RNA, 19 nt, Artificial Sequence
  Description of Artificial Sequence: Synthetic oligonucleotide
  Antisense Strand to SEQ ID NO: 446009
uaugcugaggucgagaauc

SEQ ID NO: 446011 - RNA, 19 nt, Artificial Sequence
  Description of Artificial Sequence: Synthetic oligonucleotide
  Sense strand starting at position 703 of SEQ ID NO: 316863
ggcauauaauuguuauccu

SEQ ID NO: 446012 - RNA, 19 nt, Artificial Sequence
  Description of Artificial Sequence: Synthetic oligonucleotide
  Antisense Strand to SEQ ID NO: 446011
aggauaacaauuauaugcc

SEQ ID NO: 446013 - RNA, 19 nt, Artificial Sequence
  Description of Artificial Sequence: Synthetic oligonucleotide
  Sense strand starting at position 775 of SEQ ID NO: 316863
uuaggaaacugauagagua

SEQ ID NO: 446014 - RNA, 19 nt, Artificial Sequence
  Description of Artificial Sequence: Synthetic oligonucleotide
  Antisense Strand to SEQ ID NO: 446013
uacucuaucaguuuccuaa

SEQ ID NO: 446015 - RNA, 19 nt, Artificial Sequence
  Description of Artificial Sequence: Synthetic oligonucleotide
  Sense strand starting at position 783 of SEQ ID NO: 316863
cugauagaguaucuuuaug

SEQ ID NO: 446016 - RNA, 19 nt, Artificial Sequence
  Description of Artificial Sequence: Synthetic oligonucleotide
  Antisense Strand to SEQ ID NO: 446015
cauaaagauacucuaucag

SEQ ID NO: 446017 - RNA, 19 nt, Artificial Sequence
  Description of Artificial Sequence: Synthetic oligonucleotide
  Sense strand starting at position 785 of SEQ ID NO: 316863
gauagaguaucuuuaugga

SEQ ID NO: 446018 - RNA, 19 nt, Artificial Sequence
  Description of Artificial Sequence: Synthetic oligonucleotide
  Antisense Strand to SEQ ID NO: 446017
uccauaaagauacucuauc

SEQ ID NO: 446019 - RNA, 19 nt, Artificial Sequence
  Description of Artificial Sequence: Synthetic oligonucleotide
  Sense strand starting at position 962 of SEQ ID NO: 316863
caguuaugcgauggauuag

SEQ ID NO: 446020 - RNA, 19 nt, Artificial Sequence
  Description of Artificial Sequence: Synthetic oligonucleotide
  Antisense Strand to SEQ ID NO: 446019
cuaauccaucgcauaacug

SEQ ID NO: 446021 - RNA, 19 nt, Artificial Sequence
  Description of Artificial Sequence: Synthetic oligonucleotide
  Sense strand starting at position 963 of SEQ ID NO: 316863
aguuaugcgauggauuaga

SEQ ID NO: 446022 - RNA, 19 nt, Artificial Sequence
  Description of Artificial Sequence: Synthetic oligonucleotide
  Antisense Strand to SEQ ID NO: 446021
ucuaauccaucgcauaacu

SEQ ID NO: 446023 - RNA, 19 nt, Artificial Sequence
  Description of Artificial Sequence: Synthetic oligonucleotide
  Sense strand starting at position 1004 of SEQ ID NO: 316863
uggccacugugcucacaaa

SEQ ID NO: 446024 - RNA, 19 nt, Artificial Sequence
  Description of Artificial Sequence: Synthetic oligonucleotide
  Antisense Strand to SEQ ID NO: 446023
uuugugagcacaguggcca

SEQ ID NO: 446025 - RNA, 19 nt, Artificial Sequence
  Description of Artificial Sequence: Synthetic oligonucleotide
  Sense strand starting at position 1190 of SEQ ID NO: 316863
cuguuaagcgagcaggauu

SEQ ID NO: 446026 - RNA, 19 nt, Artificial Sequence
  Description of Artificial Sequence: Synthetic oligonucleotide
  Antisense Strand to SEQ ID NO: 446025
aauccugcucgcuuaacag

SEQ ID NO: 446027 - RNA, 19 nt, Artificial Sequence
  Description of Artificial Sequence: Synthetic oligonucleotide
  Sense strand starting at position 1244 of SEQ ID NO: 316863
ugcucagggcuggguaauu

SEQ ID NO: 446028 - RNA, 19 nt, Artificial Sequence
  Description of Artificial Sequence: Synthetic oligonucleotide
  Antisense Strand to SEQ ID NO: 446027
aauuacccagcccugagca

SEQ ID NO: 446029 - RNA, 19 nt, Artificial Sequence
  Description of Artificial Sequence: Synthetic oligonucleotide
  Sense strand starting at position 1254 of SEQ ID NO: 316863
uggguaauuuccucccgcu

SEQ ID NO: 446030 - RNA, 19 nt, Artificial Sequence
  Description of Artificial Sequence: Synthetic oligonucleotide
  Antisense Strand to SEQ ID NO: 446029
agcgggaggaaauuaccca

SEQ ID NO: 446031 - RNA, 19 nt, Artificial Sequence
  Description of Artificial Sequence: Synthetic oligonucleotide
  Sense strand starting at position 1281 of SEQ ID NO: 316863
ggaacauaccugcgcuuaa

SEQ ID NO: 446032 - RNA, 19 nt, Artificial Sequence
  Description of Artificial Sequence: Synthetic oligonucleotide
  Antisense Strand to SEQ ID NO: 446031
uuaagcgcagguauguucc

SEQ ID NO: 446033 - RNA, 19 nt, Artificial Sequence
  Description of Artificial Sequence: Synthetic oligonucleotide
  Sense strand starting at position 1704 of SEQ ID NO: 316863
gugcaacuccgagggauaa

SEQ ID NO: 446034 - RNA, 19 nt, Artificial Sequence
  Description of Artificial Sequence: Synthetic oligonucleotide
  Antisense Strand to SEQ ID NO: 446033
uuaucccucggaguugcac

SEQ ID NO: 446035 - RNA, 19 nt, Artificial Sequence
  Description of Artificial Sequence: Synthetic oligonucleotide
  Sense strand starting at position 1705 of SEQ ID NO: 316863
ugcaacuccgagggauaaa

SEQ ID NO: 446036 - RNA, 19 nt, Artificial Sequence
  Description of Artificial Sequence: Synthetic oligonucleotide
  Antisense Strand to SEQ ID NO: 446035
uuuaucccucggaguugca

SEQ ID NO: 446037 - RNA, 19 nt, Artificial Sequence
  Description of Artificial Sequence: Synthetic oligonucleotide
  Sense strand starting at position 2204 of SEQ ID NO: 316863
gcaggagaaucggcuucuu

SEQ ID NO: 446038 - RNA, 19 nt, Artificial Sequence
  Description of Artificial Sequence: Synthetic oligonucleotide
  Antisense Strand to SEQ ID NO: 446037
aagaagccgauucuccugc

SEQ ID NO: 446039 - RNA, 19 nt, Artificial Sequence
  Description of Artificial Sequence: Synthetic oligonucleotide
  Sense strand starting at position 2288 of SEQ ID NO: 316863
gggagacuucgcgauuacc

SEQ ID NO: 446040 - RNA, 19 nt, Artificial Sequence
  Description of Artificial Sequence: Synthetic oligonucleotide
  Antisense Strand to SEQ ID NO: 446039
gguaaucgcgaagucuccc

SEQ ID NO: 446041 - RNA, 19 nt, Artificial Sequence
  Description of Artificial Sequence: Synthetic oligonucleotide
  Sense strand starting at position 2404 of SEQ ID NO: 316863
cgccuucaucaggugugua

SEQ ID NO: 446042 - RNA, 19 nt, Artificial Sequence
  Description of Artificial Sequence: Synthetic oligonucleotide
  Antisense Strand to SEQ ID NO: 446041
uacacaccugaugaaggcg

SEQ ID NO: 446043 - RNA, 19 nt, Artificial Sequence
  Description of Artificial Sequence: Synthetic oligonucleotide
  Sense strand starting at position 2532 of SEQ ID NO: 316863
cguuauaagagcuaaggga

SEQ ID NO: 446044 - RNA, 19 nt, Artificial Sequence
  Description of Artificial Sequence: Synthetic oligonucleotide
  Antisense Strand to SEQ ID NO: 446043
ucccuuagcucuuauaacg

SEQ ID NO: 446045 - RNA, 19 nt, Artificial Sequence
  Description of Artificial Sequence: Synthetic oligonucleotide
  Sense strand starting at position 2585 of SEQ ID NO: 316863
aggaaaucaucuuucucug

SEQ ID NO: 446046 - RNA, 19 nt, Artificial Sequence
  Description of Artificial Sequence: Synthetic oligonucleotide
  Antisense Strand to SEQ ID NO: 446045
cagagaaagaugauuuccu

SEQ ID NO: 446047 - RNA, 19 nt, Artificial Sequence
  Description of Artificial Sequence: Synthetic oligonucleotide
  Sense strand starting at position 2592 of SEQ ID NO: 316863
caucuuucucuguggacga

SEQ ID NO: 446048 - RNA, 19 nt, Artificial Sequence
  Description of Artificial Sequence: Synthetic oligonucleotide
  Antisense Strand to SEQ ID NO: 446047
ucguccacagagaaagaug

SEQ ID NO: 446049 - RNA, 19 nt, Artificial Sequence
  Description of Artificial Sequence: Synthetic oligonucleotide
  Sense strand starting at position 2594 of SEQ ID NO: 316863
ucuuucucuguggacgaau

SEQ ID NO: 446050 - RNA, 19 nt, Artificial Sequence
  Description of Artificial Sequence: Synthetic oligonucleotide
  Antisense Strand to SEQ ID NO: 446049
auucguccacagagaaaga

SEQ ID NO: 446051 - RNA, 19 nt, Artificial Sequence
  Description of Artificial Sequence: Synthetic oligonucleotide
  Sense strand starting at position 2596 of SEQ ID NO: 316863
uuucucuguggacgaauga

SEQ ID NO: 446052 - RNA, 19 nt, Artificial Sequence
  Description of Artificial Sequence: Synthetic oligonucleotide
  Antisense Strand to SEQ ID NO: 446051
ucauucguccacagagaaa

SEQ ID NO: 446053 - RNA, 19 nt, Artificial Sequence
  Description of Artificial Sequence: Synthetic oligonucleotide
  Sense strand starting at position 2597 of SEQ ID NO: 316863
uucucuguggacgaaugaa

SEQ ID NO: 446054 - RNA, 19 nt, Artificial Sequence
  Description of Artificial Sequence: Synthetic oligonucleotide
  Antisense Strand to SEQ ID NO: 446053
uucauucguccacagagaa

SEQ ID NO: 446055 - RNA, 19 nt, Artificial Sequence
  Description of Artificial Sequence: Synthetic oligonucleotide
  Sense strand starting at position 2656 of SEQ ID NO: 316863
acugguguucuguacucuu

SEQ ID NO: 446056 - RNA, 19 nt, Artificial Sequence
  Description of Artificial Sequence: Synthetic oligonucleotide
  Antisense Strand to SEQ ID NO: 446055
aagaguacagaacaccagu

SEQ ID NO: 446057 - RNA, 19 nt, Artificial Sequence
  Description of Artificial Sequence: Synthetic oligonucleotide
  Sense strand starting at position 2701 of SEQ ID NO: 316863
gacuaaaugcgaugaaaga

SEQ ID NO: 446058 - RNA, 19 nt, Artificial Sequence
  Description of Artificial Sequence: Synthetic oligonucleotide
  Antisense Strand to SEQ ID NO: 446057
ucuuucaucgcauuuaguc

SEQ ID NO: 446059 - RNA, 19 nt, Artificial Sequence
  Description of Artificial Sequence: Synthetic oligonucleotide
  Sense strand starting at position 2955 of SEQ ID NO: 316863
caauuaaccgguuauagug

SEQ ID NO: 446060 - RNA, 19 nt, Artificial Sequence
  Description of Artificial Sequence: Synthetic oligonucleotide
  Antisense Strand to SEQ ID NO: 446059
cacuauaaccgguuaauug

SEQ ID NO: 446061 - RNA, 19 nt, Artificial Sequence
  Description of Artificial Sequence: Synthetic oligonucleotide
  Sense strand starting at position 3162 of SEQ ID NO: 316863
gacauaugguccgcaguug

SEQ ID NO: 446062 - RNA, 19 nt, Artificial Sequence
  Description of Artificial Sequence: Synthetic oligonucleotide
  Antisense Strand to SEQ ID NO: 446061
caacugcggaccauauguc

SEQ ID NO: 446063 - RNA, 19 nt, Artificial Sequence
  Description of Artificial Sequence: Synthetic oligonucleotide
  Sense strand starting at position 3179 of SEQ ID NO: 316863
ugggauacuaacuguugua

SEQ ID NO: 446064 - RNA, 19 nt, Artificial Sequence
  Description of Artificial Sequence: Synthetic oligonucleotide
  Antisense Strand to SEQ ID NO: 446063
uacaacaguuaguauccca

SEQ ID NO: 446065 - RNA, 19 nt, Artificial Sequence
  Description of Artificial Sequence: Synthetic oligonucleotide
  Sense strand starting at position 3446 of SEQ ID NO: 316863
ggcucaagacauggguuua

SEQ ID NO: 446066 - RNA, 19 nt, Artificial Sequence
  Description of Artificial Sequence: Synthetic oligonucleotide
  Antisense Strand to SEQ ID NO: 446065
uaaacccaugucuugagcc

SEQ ID NO: 446067 - RNA, 19 nt, Artificial Sequence
  Description of Artificial Sequence: Synthetic oligonucleotide
  Sense strand starting at position 3447 of SEQ ID NO: 316863
gcucaagacauggguuuaa

SEQ ID NO: 446068 - RNA, 19 nt, Artificial Sequence
  Description of Artificial Sequence: Synthetic oligonucleotide
  Antisense Strand to SEQ ID NO: 446067
uuaaacccaugucuugagc

SEQ ID NO: 446069 - RNA, 19 nt, Artificial Sequence
  Description of Artificial Sequence: Synthetic oligonucleotide
  Sense strand starting at position 3486 of SEQ ID NO: 316863
ugcuaauguugacucacua

SEQ ID NO: 446070 - RNA, 19 nt, Artificial Sequence
  Description of Artificial Sequence: Synthetic oligonucleotide
  Antisense Strand to SEQ ID NO: 446069
uagugagucaacauuagca

SEQ ID NO: 446071 - RNA, 19 nt, Artificial Sequence
  Description of Artificial Sequence: Synthetic oligonucleotide
  Sense strand starting at position 3539 of SEQ ID NO: 316863
aguagcacucuuugagaug

SEQ ID NO: 446072 - RNA, 19 nt, Artificial Sequence
  Description of Artificial Sequence: Synthetic oligonucleotide
  Antisense Strand to SEQ ID NO: 446071
caucucaaagagugcuacu

SEQ ID NO: 446073 - RNA, 19 nt, Artificial Sequence
  Description of Artificial Sequence: Synthetic oligonucleotide
  Sense strand starting at position 3595 of SEQ ID NO: 316863
ugcauuacagugugaugaa

SEQ ID NO: 446074 - RNA, 19 nt, Artificial Sequence
  Description of Artificial Sequence: Synthetic oligonucleotide
  Antisense Strand to SEQ ID NO: 446073
uucaucacacuguaaugca

SEQ ID NO: 446075 - RNA, 19 nt, Artificial Sequence
  Description of Artificial Sequence: Synthetic oligonucleotide
  Sense strand starting at position 3683 of SEQ ID NO: 316863
uucugcauaugucuuuaga

SEQ ID NO: 446076 - RNA, 19 nt, Artificial Sequence
  Description of Artificial Sequence: Synthetic oligonucleotide
  Antisense Strand to SEQ ID NO: 446075
ucuaaagacauaugcagaa

SEQ ID NO: 446077 - RNA, 19 nt, Artificial Sequence
  Description of Artificial Sequence: Synthetic oligonucleotide
  Sense strand starting at position 3685 of SEQ ID NO: 316863
cugcauaugucuuuagaca

SEQ ID NO: 446078 - RNA, 19 nt, Artificial Sequence
  Description of Artificial Sequence: Synthetic oligonucleotide
  Antisense Strand to SEQ ID NO: 446077
ugucuaaagacauaugcag

SEQ ID NO: 446079 - RNA, 19 nt, Artificial Sequence
  Description of Artificial Sequence: Synthetic oligonucleotide
  Sense strand starting at position 3686 of SEQ ID NO: 316863
ugcauaugucuuuagacac

SEQ ID NO: 446080 - RNA, 19 nt, Artificial Sequence
  Description of Artificial Sequence: Synthetic oligonucleotide
  Antisense Strand to SEQ ID NO: 446079
gugucuaaagacauaugca

SEQ ID NO: 446081 - RNA, 19 nt, Artificial Sequence
  Description of Artificial Sequence: Synthetic oligonucleotide
  Sense strand starting at position 64 of SEQ ID NO: 316864
ggaacuguguagucugaau

SEQ ID NO: 446082 - RNA, 19 nt, Artificial Sequence
  Description of Artificial Sequence: Synthetic oligonucleotide
  Antisense Strand to SEQ ID NO: 446081
auucagacuacacaguucc

SEQ ID NO: 446083 - RNA, 19 nt, Artificial Sequence
  Description of Artificial Sequence: Synthetic oligonucleotide
  Sense strand starting at position 177 of SEQ ID NO: 316864
cgugguugagaagagaagu

SEQ ID NO: 446084 - RNA, 19 nt, Artificial Sequence
  Description of Artificial Sequence: Synthetic oligonucleotide
  Antisense Strand to SEQ ID NO: 446083
acuucucuucucaaccacg

SEQ ID NO: 446085 - RNA, 19 nt, Artificial Sequence
  Description of Artificial Sequence: Synthetic oligonucleotide
  Sense strand starting at position 392 of SEQ ID NO: 316864
aucugacuacuuuaacguu

SEQ ID NO: 446086 - RNA, 19 nt, Artificial Sequence
  Description of Artificial Sequence: Synthetic oligonucleotide
  Antisense Strand to SEQ ID NO: 446085
aacguuaaaguagucagau

SEQ ID NO: 446087 - RNA, 19 nt, Artificial Sequence
  Description of Artificial Sequence: Synthetic oligonucleotide
  Sense strand starting at position 547 of SEQ ID NO: 316864
auccuugaauuuggaauau

SEQ ID NO: 446088 - RNA, 19 nt, Artificial Sequence
  Description of Artificial Sequence: Synthetic oligonucleotide
  Antisense Strand to SEQ ID NO: 446087
auauuccaaauucaaggau

SEQ ID NO: 446089 - RNA, 19 nt, Artificial Sequence
  Description of Artificial Sequence: Synthetic oligonucleotide
  Sense strand starting at position 760 of SEQ ID NO: 316864
cgauaaagcccuuagaguu

SEQ ID NO: 446090 - RNA, 19 nt, Artificial Sequence
  Description of Artificial Sequence: Synthetic oligonucleotide
  Antisense Strand to SEQ ID NO: 446089
aacucuaagggcuuuaucg

SEQ ID NO: 446091 - RNA, 19 nt, Artificial Sequence
  Description of Artificial Sequence: Synthetic oligonucleotide
  Sense strand starting at position 1111 of SEQ ID NO: 316864
uccagauacacuuggguga

SEQ ID NO: 446092 - RNA, 19 nt, Artificial Sequence
  Description of Artificial Sequence: Synthetic oligonucleotide
  Antisense Strand to SEQ ID NO: 446091
ucacccaaguguaucugga

SEQ ID NO: 446093 - RNA, 19 nt, Artificial Sequence
  Description of Artificial Sequence: Synthetic oligonucleotide
  Sense strand starting at position 1122 of SEQ ID NO: 316864
uugggugacuuggucaaca

SEQ ID NO: 446094 - RNA, 19 nt, Artificial Sequence
  Description of Artificial Sequence: Synthetic oligonucleotide
  Antisense Strand to SEQ ID NO: 446093
uguugaccaagucacccaa

SEQ ID NO: 446095 - RNA, 19 nt, Artificial Sequence
  Description of Artificial Sequence: Synthetic oligonucleotide
  Sense strand starting at position 1124 of SEQ ID NO: 316864
gggugacuuggucaacaua

SEQ ID NO: 446096 - RNA, 19 nt, Artificial Sequence
  Description of Artificial Sequence: Synthetic oligonucleotide
  Antisense Strand to SEQ ID NO: 446095
uauguugaccaagucaccc

SEQ ID NO: 446097 - RNA, 19 nt, Artificial Sequence
  Description of Artificial Sequence: Synthetic oligonucleotide
  Sense strand starting at position 1144 of SEQ ID NO: 316864
gaauguuaaccaugaugug

SEQ ID NO: 446098 - RNA, 19 nt, Artificial Sequence
  Description of Artificial Sequence: Synthetic oligonucleotide
  Antisense Strand to SEQ ID NO: 446097
cacaucaugguuaacauuc

SEQ ID NO: 446099 - RNA, 19 nt, Artificial Sequence
  Description of Artificial Sequence: Synthetic oligonucleotide
  Sense strand starting at position 1367 of SEQ ID NO: 316864
gagggcguguugacaaguu

SEQ ID NO: 446100 - RNA, 19 nt, Artificial Sequence
  Description of Artificial Sequence: Synthetic oligonucleotide
  Antisense Strand to SEQ ID NO: 446099
aacuugucaacacgcccuc

SEQ ID NO: 446101 - RNA, 19 nt, Artificial Sequence
  Description of Artificial Sequence: Synthetic oligonucleotide
  Sense strand starting at position 1397 of SEQ ID NO: 316864
ugaccuuuagccuagauau

SEQ ID NO: 446102 - RNA, 19 nt, Artificial Sequence
  Description of Artificial Sequence: Synthetic oligonucleotide
  Antisense Strand to SEQ ID NO: 446101
auaucuaggcuaaagguca

SEQ ID NO: 446103 - RNA, 19 nt, Artificial Sequence
  Description of Artificial Sequence: Synthetic oligonucleotide
  Sense strand starting at position 1482 of SEQ ID NO: 316864
ugaccuuugcccuagauag

SEQ ID NO: 446104 - RNA, 19 nt, Artificial Sequence
  Description of Artificial Sequence: Synthetic oligonucleotide
  Antisense Strand to SEQ ID NO: 446103
cuaucuagggcaaagguca

SEQ ID NO: 446105 - RNA, 19 nt, Artificial Sequence
  Description of Artificial Sequence: Synthetic oligonucleotide
  Sense strand starting at position 2022 of SEQ ID NO: 316864
cggcuuccugggaggugua

SEQ ID NO: 446106 - RNA, 19 nt, Artificial Sequence
  Description of Artificial Sequence: Synthetic oligonucleotide
  Antisense Strand to SEQ ID NO: 446105
uacaccucccaggaagccg

SEQ ID NO: 446107 - RNA, 19 nt, Artificial Sequence
  Description of Artificial Sequence: Synthetic oligonucleotide
  Sense strand starting at position 2261 of SEQ ID NO: 316864
cggcuucucgggucggauu

SEQ ID NO: 446108 - RNA, 19 nt, Artificial Sequence
  Description of Artificial Sequence: Synthetic oligonucleotide
  Antisense Strand to SEQ ID NO: 446107
aauccgacccgagaagccg

SEQ ID NO: 446109 - RNA, 19 nt, Artificial Sequence
  Description of Artificial Sequence: Synthetic oligonucleotide
  Sense strand starting at position 2836 of SEQ ID NO: 316864
cuccuuucccaucggagaa

SEQ ID NO: 446110 - RNA, 19 nt, Artificial Sequence
  Description of Artificial Sequence: Synthetic oligonucleotide
  Antisense Strand to SEQ ID NO: 446109
uucuccgaugggaaaggag

SEQ ID NO: 446111 - RNA, 19 nt, Artificial Sequence
  Description of Artificial Sequence: Synthetic oligonucleotide
  Sense strand starting at position 2840 of SEQ ID NO: 316864
uuucccaucggagaauagu

SEQ ID NO: 446112 - RNA, 19 nt, Artificial Sequence
  Description of Artificial Sequence: Synthetic oligonucleotide
  Antisense Strand to SEQ ID NO: 446111
acuauucuccgaugggaaa

SEQ ID NO: 446113 - RNA, 19 nt, Artificial Sequence
  Description of Artificial Sequence: Synthetic oligonucleotide
  Sense strand starting at position 2868 of SEQ ID NO: 316864
auggguuucggagaauagu

SEQ ID NO: 446114 - RNA, 19 nt, Artificial Sequence
  Description of Artificial Sequence: Synthetic oligonucleotide
  Antisense Strand to SEQ ID NO: 446113
acuauucuccgaaacccau

SEQ ID NO: 446115 - RNA, 19 nt, Artificial Sequence
  Description of Artificial Sequence: Synthetic oligonucleotide
  Sense strand starting at position 2911 of SEQ ID NO: 316864
uucuguggguacuugagau

SEQ ID NO: 446116 - RNA, 19 nt, Artificial Sequence
  Description of Artificial Sequence: Synthetic oligonucleotide
  Antisense Strand to SEQ ID NO: 446115
aucucaaguacccacagaa

SEQ ID NO: 446117 - RNA, 19 nt, Artificial Sequence
  Description of Artificial Sequence: Synthetic oligonucleotide
  Sense strand starting at position 2923 of SEQ ID NO: 316864
uugagaucaggcugugauu

SEQ ID NO: 446118 - RNA, 19 nt, Artificial Sequence
  Description of Artificial Sequence: Synthetic oligonucleotide
  Antisense Strand to SEQ ID NO: 446117
aaucacagccugaucucaa

SEQ ID NO: 446119 - RNA, 19 nt, Artificial Sequence
  Description of Artificial Sequence: Synthetic oligonucleotide
  Sense strand starting at position 3043 of SEQ ID NO: 316864
gcuugaaggguuuagguca

SEQ ID NO: 446120 - RNA, 19 nt, Artificial Sequence
  Description of Artificial Sequence: Synthetic oligonucleotide
  Antisense Strand to SEQ ID NO: 446119
ugaccuaaacccuucaagc

SEQ ID NO: 446121 - RNA, 19 nt, Artificial Sequence
  Description of Artificial Sequence: Synthetic oligonucleotide
  Sense strand starting at position 3079 of SEQ ID NO: 316864
gacgguuuaguucaggacu

SEQ ID NO: 446122 - RNA, 19 nt, Artificial Sequence
  Description of Artificial Sequence: Synthetic oligonucleotide
  Antisense Strand to SEQ ID NO: 446121
aguccugaacuaaaccguc

SEQ ID NO: 446123 - RNA, 19 nt, Artificial Sequence
  Description of Artificial Sequence: Synthetic oligonucleotide
  Sense strand starting at position 3104 of SEQ ID NO: 316864
uuuguaugauugcuagaau

SEQ ID NO: 446124 - RNA, 19 nt, Artificial Sequence
  Description of Artificial Sequence: Synthetic oligonucleotide
  Antisense Strand to SEQ ID NO: 446123
auucuagcaaucauacaaa

SEQ ID NO: 446125 - RNA, 19 nt, Artificial Sequence
  Description of Artificial Sequence: Synthetic oligonucleotide
  Sense strand starting at position 3107 of SEQ ID NO: 316864
guaugauugcuagaaugca

SEQ ID NO: 446126 - RNA, 19 nt, Artificial Sequence
  Description of Artificial Sequence: Synthetic oligonucleotide
  Antisense Strand to SEQ ID NO: 446125
ugcauucuagcaaucauac

SEQ ID NO: 446127 - RNA, 19 nt, Artificial Sequence
  Description of Artificial Sequence: Synthetic oligonucleotide
  Sense strand starting at position 3129 of SEQ ID NO: 316864
uuaggauaguuucuguuaa

SEQ ID NO: 446128 - RNA, 19 nt, Artificial Sequence
  Description of Artificial Sequence: Synthetic oligonucleotide
  Antisense Strand to SEQ ID NO: 446127
uuaacagaaacuauccuaa

SEQ ID NO: 446129 - RNA, 19 nt, Artificial Sequence
  Description of Artificial Sequence: Synthetic oligonucleotide
  Sense strand starting at position 3131 of SEQ ID NO: 316864
aggauaguuucuguuaaau

SEQ ID NO: 446130 - RNA, 19 nt, Artificial Sequence
  Description of Artificial Sequence: Synthetic oligonucleotide
  Antisense Strand to SEQ ID NO: 446129
auuuaacagaaacuauccu

SEQ ID NO: 446131 - RNA, 19 nt, Artificial Sequence
  Description of Artificial Sequence: Synthetic oligonucleotide
  Sense strand starting at position 3249 of SEQ ID NO: 316864
ggucaaguggaaugaggua

SEQ ID NO: 446132 - RNA, 19 nt, Artificial Sequence
  Description of Artificial Sequence: Synthetic oligonucleotide
  Antisense Strand to SEQ ID NO: 446131
uaccucauuccacuugacc

SEQ ID NO: 446133 - RNA, 19 nt, Artificial Sequence
  Description of Artificial Sequence: Synthetic oligonucleotide
  Sense strand starting at position 3270 of SEQ ID NO: 316864
uagaguguaaccugggaga

SEQ ID NO: 446134 - RNA, 19 nt, Artificial Sequence
  Description of Artificial Sequence: Synthetic oligonucleotide
  Antisense Strand to SEQ ID NO: 446133
ucucccagguuacacucua

SEQ ID NO: 446135 - RNA, 19 nt, Artificial Sequence
  Description of Artificial Sequence: Synthetic oligonucleotide
  Sense strand starting at position 3272 of SEQ ID NO: 316864
gaguguaaccugggagagu

SEQ ID NO: 446136 - RNA, 19 nt, Artificial Sequence
  Description of Artificial Sequence: Synthetic oligonucleotide
  Antisense Strand to SEQ ID NO: 446135
acucucccagguuacacuc

SEQ ID NO: 446137 - RNA, 19 nt, Artificial Sequence
  Description of Artificial Sequence: Synthetic oligonucleotide
  Sense strand starting at position 3300 of SEQ ID NO: 316864
ugaccuuuccugcagauug

SEQ ID NO: 446138 - RNA, 19 nt, Artificial Sequence
  Description of Artificial Sequence: Synthetic oligonucleotide
  Antisense Strand to SEQ ID NO: 446137
caaucugcaggaaagguca

SEQ ID NO: 446139 - RNA, 19 nt, Artificial Sequence
  Description of Artificial Sequence: Synthetic oligonucleotide
  Sense strand starting at position 3373 of SEQ ID NO: 316864
ggaugacuagagugcuuaa

SEQ ID NO: 446140 - RNA, 19 nt, Artificial Sequence
  Description of Artificial Sequence: Synthetic oligonucleotide
  Antisense Strand to SEQ ID NO: 446139
uuaagcacucuagucaucc

SEQ ID NO: 446141 - RNA, 19 nt, Artificial Sequence
  Description of Artificial Sequence: Synthetic oligonucleotide
  Sense strand starting at position 3376 of SEQ ID NO: 316864
ugacuagagugcuuaacca

SEQ ID NO: 446142 - RNA, 19 nt, Artificial Sequence
  Description of Artificial Sequence: Synthetic oligonucleotide
  Antisense Strand to SEQ ID NO: 446141
ugguuaagcacucuaguca

SEQ ID NO: 446143 - RNA, 19 nt, Artificial Sequence
  Description of Artificial Sequence: Synthetic oligonucleotide
  Sense strand starting at position 3423 of SEQ ID NO: 316864
gcaaguaaauauguagaau

SEQ ID NO: 446144 - RNA, 19 nt, Artificial Sequence
  Description of Artificial Sequence: Synthetic oligonucleotide
  Antisense Strand to SEQ ID NO: 446143
auucuacauauuuacuugc

SEQ ID NO: 446145 - RNA, 19 nt, Artificial Sequence
  Description of Artificial Sequence: Synthetic oligonucleotide
  Sense strand starting at position 3434 of SEQ ID NO: 316864
uguagaaugaagugcuaau

SEQ ID NO: 446146 - RNA, 19 nt, Artificial Sequence
  Description of Artificial Sequence: Synthetic oligonucleotide
  Antisense Strand to SEQ ID NO: 446145
auuagcacuucauucuaca

SEQ ID NO: 446147 - RNA, 19 nt, Artificial Sequence
  Description of Artificial Sequence: Synthetic oligonucleotide
  Sense strand starting at position 3447 of SEQ ID NO: 316864
gcuaauguguuauugagga

SEQ ID NO: 446148 - RNA, 19 nt, Artificial Sequence
  Description of Artificial Sequence: Synthetic oligonucleotide
  Antisense Strand to SEQ ID NO: 446147
uccucaauaacacauuagc

SEQ ID NO: 446149 - RNA, 19 nt, Artificial Sequence
  Description of Artificial Sequence: Synthetic oligonucleotide
  Sense strand starting at position 3452 of SEQ ID NO: 316864
uguguuauugaggaacacu

SEQ ID NO: 446150 - RNA, 19 nt, Artificial Sequence
  Description of Artificial Sequence: Synthetic oligonucleotide
  Antisense Strand to SEQ ID NO: 446149
aguguuccucaauaacaca

SEQ ID NO: 446151 - RNA, 19 nt, Artificial Sequence
  Description of Artificial Sequence: Synthetic oligonucleotide
  Sense strand starting at position 3478 of SEQ ID NO: 316864
uuuauaucauuggugaaga

SEQ ID NO: 446152 - RNA, 19 nt, Artificial Sequence
  Description of Artificial Sequence: Synthetic oligonucleotide
  Antisense Strand to SEQ ID NO: 446151
ucuucaccaaugauauaaa

SEQ ID NO: 446153 - RNA, 19 nt, Artificial Sequence
  Description of Artificial Sequence: Synthetic oligonucleotide
  Sense strand starting at position 3565 of SEQ ID NO: 316864
uaauguuauuugucagagc

SEQ ID NO: 446154 - RNA, 19 nt, Artificial Sequence
  Description of Artificial Sequence: Synthetic oligonucleotide
  Antisense Strand to SEQ ID NO: 446153
gcucugacaaauaacauua

SEQ ID NO: 446155 - RNA, 19 nt, Artificial Sequence
  Description of Artificial Sequence: Synthetic oligonucleotide
  Sense strand starting at position 3620 of SEQ ID NO: 316864
guuuaaaguguucacaggu

SEQ ID NO: 446156 - RNA, 19 nt, Artificial Sequence
  Description of Artificial Sequence: Synthetic oligonucleotide
  Antisense Strand to SEQ ID NO: 446155
accugugaacacuuuaaac

SEQ ID NO: 446157 - RNA, 19 nt, Artificial Sequence
  Description of Artificial Sequence: Synthetic oligonucleotide
  Sense strand starting at position 3634 of SEQ ID NO: 316864
caggucaaugcccauguua

SEQ ID NO: 446158 - RNA, 19 nt, Artificial Sequence
  Description of Artificial Sequence: Synthetic oligonucleotide
  Antisense Strand to SEQ ID NO: 446157
uaacaugggcauugaccug

SEQ ID NO: 446159 - RNA, 19 nt, Artificial Sequence
  Description of Artificial Sequence: Synthetic oligonucleotide
  Sense strand starting at position 3727 of SEQ ID NO: 316864
ucaucuuguugagcugaga

SEQ ID NO: 446160 - RNA, 19 nt, Artificial Sequence
  Description of Artificial Sequence: Synthetic oligonucleotide
  Antisense Strand to SEQ ID NO: 446159
ucucagcucaacaagauga

SEQ ID NO: 446161 - RNA, 19 nt, Artificial Sequence
  Description of Artificial Sequence: Synthetic oligonucleotide
  Sense strand starting at position 30 of SEQ ID NO: 316865
uuugcaucccaggaauaua

SEQ ID NO: 446162 - RNA, 19 nt, Artificial Sequence
  Description of Artificial Sequence: Synthetic oligonucleotide
  Antisense Strand to SEQ ID NO: 446161
uauauuccugggaugcaaa

SEQ ID NO: 446163 - RNA, 19 nt, Artificial Sequence
  Description of Artificial Sequence: Synthetic oligonucleotide
  Sense strand starting at position 99 of SEQ ID NO: 316865
ugucucuguggagagguua

SEQ ID NO: 446164 - RNA, 19 nt, Artificial Sequence
  Description of Artificial Sequence: Synthetic oligonucleotide
  Antisense Strand to SEQ ID NO: 446163
uaaccucuccacagagaca

SEQ ID NO: 446165 - RNA, 19 nt, Artificial Sequence
  Description of Artificial Sequence: Synthetic oligonucleotide
  Sense strand starting at position 107 of SEQ ID NO: 316865
uggagagguuagccaaguu

SEQ ID NO: 446166 - RNA, 19 nt, Artificial Sequence
  Description of Artificial Sequence: Synthetic oligonucleotide
  Antisense Strand to SEQ ID NO: 446165
aacuuggcuaaccucucca

SEQ ID NO: 446167 - RNA, 19 nt, Artificial Sequence
  Description of Artificial Sequence: Synthetic oligonucleotide
  Sense strand starting at position 123 of SEQ ID NO: 316865
guugcuuggcucuuaaguu

SEQ ID NO: 446168 - RNA, 19 nt, Artificial Sequence
  Description of Artificial Sequence: Synthetic oligonucleotide
  Antisense Strand to SEQ ID NO: 446167
aacuuaagagccaagcaac

SEQ ID NO: 446169 - RNA, 19 nt, Artificial Sequence
  Description of Artificial Sequence: Synthetic oligonucleotide
  Sense strand starting at position 127 of SEQ ID NO: 316865
cuuggcucuuaaguugaaa

SEQ ID NO: 446170 - RNA, 19 nt, Artificial Sequence
  Description of Artificial Sequence: Synthetic oligonucleotide
  Antisense Strand to SEQ ID NO: 446169
uuucaacuuaagagccaag

SEQ ID NO: 446171 - RNA, 19 nt, Artificial Sequence
  Description of Artificial Sequence: Synthetic oligonucleotide
  Sense strand starting at position 130 of SEQ ID NO: 316865
ggcucuuaaguugaaacuu

SEQ ID NO: 446172 - RNA, 19 nt, Artificial Sequence
  Description of Artificial Sequence: Synthetic oligonucleotide
  Antisense Strand to SEQ ID NO: 446171
aaguuucaacuuaagagcc

SEQ ID NO: 446173 - RNA, 19 nt, Artificial Sequence
  Description of Artificial Sequence: Synthetic oligonucleotide
  Sense strand starting at position 142 of SEQ ID NO: 316865
gaaacuuccugguugguga

SEQ ID NO: 446174 - RNA, 19 nt, Artificial Sequence
  Description of Artificial Sequence: Synthetic oligonucleotide
  Antisense Strand to SEQ ID NO: 446173
ucaccaaccaggaaguuuc

SEQ ID NO: 446175 - RNA, 19 nt, Artificial Sequence
  Description of Artificial Sequence: Synthetic oligonucleotide
  Sense strand starting at position 143 of SEQ ID NO: 316865
aaacuuccugguuggugaa

SEQ ID NO: 446176 - RNA, 19 nt, Artificial Sequence
  Description of Artificial Sequence: Synthetic oligonucleotide
  Antisense Strand to SEQ ID NO: 446175
uucaccaaccaggaaguuu

SEQ ID NO: 446177 - RNA, 19 nt, Artificial Sequence
  Description of Artificial Sequence: Synthetic oligonucleotide
  Sense strand starting at position 572 of SEQ ID NO: 316865
gauauuaugucaguguuaa

SEQ ID NO: 446178 - RNA, 19 nt, Artificial Sequence
  Description of Artificial Sequence: Synthetic oligonucleotide
  Antisense Strand to SEQ ID NO: 446177
uuaacacugacauaauauc

SEQ ID NO: 446179 - RNA, 19 nt, Artificial Sequence
  Description of Artificial Sequence: Synthetic oligonucleotide
  Sense strand starting at position 791 of SEQ ID NO: 316865
uaaucuaaucuaggaggua

SEQ ID NO: 446180 - RNA, 19 nt, Artificial Sequence
  Description of Artificial Sequence: Synthetic oligonucleotide
  Antisense Strand to SEQ ID NO: 446179
uaccuccuagauuagauua

SEQ ID NO: 446181 - RNA, 19 nt, Artificial Sequence
  Description of Artificial Sequence: Synthetic oligonucleotide
  Sense strand starting at position 909 of SEQ ID NO: 316865
cuugguccucuguauauca

SEQ ID NO: 446182 - RNA, 19 nt, Artificial Sequence
  Description of Artificial Sequence: Synthetic oligonucleotide
  Antisense Strand to SEQ ID NO: 446181
ugauauacagaggaccaag

SEQ ID NO: 446183 - RNA, 19 nt, Artificial Sequence
  Description of Artificial Sequence: Synthetic oligonucleotide
  Sense strand starting at position 996 of SEQ ID NO: 316865
ccucuuuggcuuuagauau

SEQ ID NO: 446184 - RNA, 19 nt, Artificial Sequence
  Description of Artificial Sequence: Synthetic oligonucleotide
  Antisense Strand to SEQ ID NO: 446183
auaucuaaagccaaagagg

SEQ ID NO: 446185 - RNA, 19 nt, Artificial Sequence
  Description of Artificial Sequence: Synthetic oligonucleotide
  Sense strand starting at position 1610 of SEQ ID NO: 316865
uccaguaauuugggaacaa

SEQ ID NO: 446186 - RNA, 19 nt, Artificial Sequence
  Description of Artificial Sequence: Synthetic oligonucleotide
  Antisense Strand to SEQ ID NO: 446185
uuguucccaaauuacugga

SEQ ID NO: 446187 - RNA, 19 nt, Artificial Sequence
  Description of Artificial Sequence: Synthetic oligonucleotide
  Sense strand starting at position 1611 of SEQ ID NO: 316865
ccaguaauuugggaacaau

SEQ ID NO: 446188 - RNA, 19 nt, Artificial Sequence
  Description of Artificial Sequence: Synthetic oligonucleotide
  Antisense Strand to SEQ ID NO: 446187
auuguucccaaauuacugg

SEQ ID NO: 446189 - RNA, 19 nt, Artificial Sequence
  Description of Artificial Sequence: Synthetic oligonucleotide
  Sense strand starting at position 2053 of SEQ ID NO: 316865
agcauauuacuguauuagu

SEQ ID NO: 446190 - RNA, 19 nt, Artificial Sequence
  Description of Artificial Sequence: Synthetic oligonucleotide
  Antisense Strand to SEQ ID NO: 446189
acuaauacaguaauaugcu

SEQ ID NO: 446191 - RNA, 19 nt, Artificial Sequence
  Description of Artificial Sequence: Synthetic oligonucleotide
  Sense strand starting at position 2070 of SEQ ID NO: 316865
guaugauuauauucuuagg

SEQ ID NO: 446192 - RNA, 19 nt, Artificial Sequence
  Description of Artificial Sequence: Synthetic oligonucleotide
  Antisense Strand to SEQ ID NO: 446191
ccuaagaauauaaucauac

SEQ ID NO: 446193 - RNA, 19 nt, Artificial Sequence
  Description of Artificial Sequence: Synthetic oligonucleotide
  Sense strand starting at position 2289 of SEQ ID NO: 316865
uugaacagccuaugauaca

SEQ ID NO: 446194 - RNA, 19 nt, Artificial Sequence
  Description of Artificial Sequence: Synthetic oligonucleotide
  Antisense Strand to SEQ ID NO: 446193
uguaucauaggcuguucaa

SEQ ID NO: 446195 - RNA, 19 nt, Artificial Sequence
  Description of Artificial Sequence: Synthetic oligonucleotide
  Sense strand starting at position 2341 of SEQ ID NO: 316865
gcuacaaagcuauauagca

SEQ ID NO: 446196 - RNA, 19 nt, Artificial Sequence
  Description of Artificial Sequence: Synthetic oligonucleotide
  Antisense Strand to SEQ ID NO: 446195
ugcuauauagcuuuguagc

SEQ ID NO: 446197 - RNA, 19 nt, Artificial Sequence
  Description of Artificial Sequence: Synthetic oligonucleotide
  Sense strand starting at position 2354 of SEQ ID NO: 316865
auagcaugugacugacuau

SEQ ID NO: 446198 - RNA, 19 nt, Artificial Sequence
  Description of Artificial Sequence: Synthetic oligonucleotide
  Antisense Strand to SEQ ID NO: 446197
auagucagucacaugcuau

SEQ ID NO: 446199 - RNA, 19 nt, Artificial Sequence
  Description of Artificial Sequence: Synthetic oligonucleotide
  Sense strand starting at position 2357 of SEQ ID NO: 316865
gcaugugacugacuauacu

SEQ ID NO: 446200 - RNA, 19 nt, Artificial Sequence
  Description of Artificial Sequence: Synthetic oligonucleotide
  Antisense Strand to SEQ ID NO: 446199
aguauagucagucacaugc

SEQ ID NO: 446201 - RNA, 19 nt, Artificial Sequence
  Description of Artificial Sequence: Synthetic oligonucleotide
  Sense strand starting at position 2399 of SEQ ID NO: 316865
guauguauguaacuaaaca

SEQ ID NO: 446202 - RNA, 19 nt, Artificial Sequence
  Description of Artificial Sequence: Synthetic oligonucleotide
  Antisense Strand to SEQ ID NO: 446201
uguuuaguuacauacauac

SEQ ID NO: 446203 - RNA, 19 nt, Artificial Sequence
  Description of Artificial Sequence: Synthetic oligonucleotide
  Sense strand starting at position 2471 of SEQ ID NO: 316865
gguauaucuguacagggua

SEQ ID NO: 446204 - RNA, 19 nt, Artificial Sequence
  Description of Artificial Sequence: Synthetic oligonucleotide
  Antisense Strand to SEQ ID NO: 446203
uacccuguacagauauacc

SEQ ID NO: 446205 - RNA, 19 nt, Artificial Sequence
  Description of Artificial Sequence: Synthetic oligonucleotide
  Sense strand starting at position 2485 of SEQ ID NO: 316865
ggguacuuaccaugaauag

SEQ ID NO: 446206 - RNA, 19 nt, Artificial Sequence
  Description of Artificial Sequence: Synthetic oligonucleotide
  Antisense Strand to SEQ ID NO: 446205
cuauucaugguaaguaccc

SEQ ID NO: 446207 - RNA, 19 nt, Artificial Sequence
  Description of Artificial Sequence: Synthetic oligonucleotide
  Sense strand starting at position 2539 of SEQ ID NO: 316865
cugagugagcagugagaau

SEQ ID NO: 446208 - RNA, 19 nt, Artificial Sequence
  Description of Artificial Sequence: Synthetic oligonucleotide
  Antisense Strand to SEQ ID NO: 446207
auucucacugcucacucag

SEQ ID NO: 446209 - RNA, 19 nt, Artificial Sequence
  Description of Artificial Sequence: Synthetic oligonucleotide
  Sense strand starting at position 2656 of SEQ ID NO: 316865
cuuagcuuacaguaauguu

SEQ ID NO: 446210 - RNA, 19 nt, Artificial Sequence
  Description of Artificial Sequence: Synthetic oligonucleotide
  Antisense Strand to SEQ ID NO: 446209
aacauuacuguaagcuaag

SEQ ID NO: 446211 - RNA, 19 nt, Artificial Sequence
  Description of Artificial Sequence: Synthetic oligonucleotide
  Sense strand starting at position 2984 of SEQ ID NO: 316865
aaugguagcuucuuccaga

SEQ ID NO: 446212 - RNA, 19 nt, Artificial Sequence
  Description of Artificial Sequence: Synthetic oligonucleotide
  Antisense Strand to SEQ ID NO: 446211
ucuggaagaagcuaccauu

SEQ ID NO: 446213 - RNA, 19 nt, Artificial Sequence
  Description of Artificial Sequence: Synthetic oligonucleotide
  Sense strand starting at position 2985 of SEQ ID NO: 316865
augguagcuucuuccagaa

SEQ ID NO: 446214 - RNA, 19 nt, Artificial Sequence
  Description of Artificial Sequence: Synthetic oligonucleotide
  Antisense Strand to SEQ ID NO: 446213
uucuggaagaagcuaccau

SEQ ID NO: 446215 - RNA, 19 nt, Artificial Sequence
  Description of Artificial Sequence: Synthetic oligonucleotide
  Sense strand starting at position 3226 of SEQ ID NO: 316865
aauugaguaauguguugag

SEQ ID NO: 446216 - RNA, 19 nt, Artificial Sequence
  Description of Artificial Sequence: Synthetic oligonucleotide
  Antisense Strand to SEQ ID NO: 446215
cucaacacauuacucaauu

SEQ ID NO: 446217 - RNA, 19 nt, Artificial Sequence
  Description of Artificial Sequence: Synthetic oligonucleotide
  Sense strand starting at position 3230 of SEQ ID NO: 316865
gaguaauguguugagcuac

SEQ ID NO: 446218 - RNA, 19 nt, Artificial Sequence
  Description of Artificial Sequence: Synthetic oligonucleotide
  Antisense Strand to SEQ ID NO: 446217
guagcucaacacauuacuc

SEQ ID NO: 446219 - RNA, 19 nt, Artificial Sequence
  Description of Artificial Sequence: Synthetic oligonucleotide
  Sense strand starting at position 3242 of SEQ ID NO: 316865
gagcuacgauggucuggaa

SEQ ID NO: 446220 - RNA, 19 nt, Artificial Sequence
  Description of Artificial Sequence: Synthetic oligonucleotide
  Antisense Strand to SEQ ID NO: 446219
uuccagaccaucguagcuc

SEQ ID NO: 446221 - RNA, 19 nt, Artificial Sequence
  Description of Artificial Sequence: Synthetic oligonucleotide
  Sense strand starting at position 3254 of SEQ ID NO: 316865
ucuggaagcuauguucuaa

SEQ ID NO: 446222 - RNA, 19 nt, Artificial Sequence
  Description of Artificial Sequence: Synthetic oligonucleotide
  Antisense Strand to SEQ ID NO: 446221
uuagaacauagcuuccaga

SEQ ID NO: 446223 - RNA, 19 nt, Artificial Sequence
  Description of Artificial Sequence: Synthetic oligonucleotide
  Sense strand starting at position 3308 of SEQ ID NO: 316865
uuauaaugucaagggauua

SEQ ID NO: 446224 - RNA, 19 nt, Artificial Sequence
  Description of Artificial Sequence: Synthetic oligonucleotide
  Antisense Strand to SEQ ID NO: 446223
uaaucccuugacauuauaa

SEQ ID NO: 446225 - RNA, 19 nt, Artificial Sequence
  Description of Artificial Sequence: Synthetic oligonucleotide
  Sense strand starting at position 3345 of SEQ ID NO: 316865
uguugacugaagggucauu

SEQ ID NO: 446226 - RNA, 19 nt, Artificial Sequence
  Description of Artificial Sequence: Synthetic oligonucleotide
  Antisense Strand to SEQ ID NO: 446225
aaugacccuucagucaaca

SEQ ID NO: 446227 - RNA, 19 nt, Artificial Sequence
  Description of Artificial Sequence: Synthetic oligonucleotide
  Sense strand starting at position 3350 of SEQ ID NO: 316865
acugaagggucauuaugca

SEQ ID NO: 446228 - RNA, 19 nt, Artificial Sequence
  Description of Artificial Sequence: Synthetic oligonucleotide
  Antisense Strand to SEQ ID NO: 446227
ugcauaaugacccuucagu

SEQ ID NO: 446229 - RNA, 19 nt, Artificial Sequence
  Description of Artificial Sequence: Synthetic oligonucleotide
  Sense strand starting at position 3854 of SEQ ID NO: 316865
ucaugucaggcuuaacuau

SEQ ID NO: 446230 - RNA, 19 nt, Artificial Sequence
  Description of Artificial Sequence: Synthetic oligonucleotide
  Antisense Strand to SEQ ID NO: 446229
auaguuaagccugacauga

SEQ ID NO: 446231 - RNA, 19 nt, Artificial Sequence
  Description of Artificial Sequence: Synthetic oligonucleotide
  Sense strand starting at position 3862 of SEQ ID NO: 316865
ggcuuaacuauggauuagu

SEQ ID NO: 446232 - RNA, 19 nt, Artificial Sequence
  Description of Artificial Sequence: Synthetic oligonucleotide
  Antisense Strand to SEQ ID NO: 446231
acuaauccauaguuaagcc

SEQ ID NO: 446233 - RNA, 19 nt, Artificial Sequence
  Description of Artificial Sequence: Synthetic oligonucleotide
  Sense strand starting at position 3872 of SEQ ID NO: 316865
uggauuagucaugaaagcu

SEQ ID NO: 446234 - RNA, 19 nt, Artificial Sequence
  Description of Artificial Sequence: Synthetic oligonucleotide
  Antisense Strand to SEQ ID NO: 446233
agcuuucaugacuaaucca

SEQ ID NO: 446235 - RNA, 19 nt, Artificial Sequence
  Description of Artificial Sequence: Synthetic oligonucleotide
  Sense strand starting at position 3887 of SEQ ID NO: 316865
agcugaacacuuugagagu

SEQ ID NO: 446236 - RNA, 19 nt, Artificial Sequence
  Description of Artificial Sequence: Synthetic oligonucleotide
  Antisense Strand to SEQ ID NO: 446235
acucucaaaguguucagcu

SEQ ID NO: 446237 - RNA, 19 nt, Artificial Sequence
  Description of Artificial Sequence: Synthetic oligonucleotide
  Sense strand starting at position 3898 of SEQ ID NO: 316865
uugagaguaauauggagua

SEQ ID NO: 446238 - RNA, 19 nt, Artificial Sequence
  Description of Artificial Sequence: Synthetic oligonucleotide
  Antisense Strand to SEQ ID NO: 446237
uacuccauauuacucucaa

SEQ ID NO: 446239 - RNA, 19 nt, Artificial Sequence
  Description of Artificial Sequence: Synthetic oligonucleotide
  Sense strand starting at position 3940 of SEQ ID NO: 316865
uggcuuuaagcacaaacuu

SEQ ID NO: 446240 - RNA, 19 nt, Artificial Sequence
  Description of Artificial Sequence: Synthetic oligonucleotide
  Antisense Strand to SEQ ID NO: 446239
aaguuugugcuuaaagcca

SEQ ID NO: 446241 - RNA, 19 nt, Artificial Sequence
  Description of Artificial Sequence: Synthetic oligonucleotide
  Sense strand starting at position 10 of SEQ ID NO: 316866
gcauaauaaggucauccau

SEQ ID NO: 446242 - RNA, 19 nt, Artificial Sequence
  Description of Artificial Sequence: Synthetic oligonucleotide
  Antisense Strand to SEQ ID NO: 446241
auggaugaccuuauuaugc

SEQ ID NO: 446243 - RNA, 19 nt, Artificial Sequence
  Description of Artificial Sequence: Synthetic oligonucleotide
  Sense strand starting at position 39 of SEQ ID NO: 316866
ggaugaauggcuggauuau

SEQ ID NO: 446244 - RNA, 19 nt, Artificial Sequence
  Description of Artificial Sequence: Synthetic oligonucleotide
  Antisense Strand to SEQ ID NO: 446243
auaauccagccauucaucc

SEQ ID NO: 446245 - RNA, 19 nt, Artificial Sequence
  Description of Artificial Sequence: Synthetic oligonucleotide
  Sense strand starting at position 194 of SEQ ID NO: 316866
guucuaguaguagaaauau

SEQ ID NO: 446246 - RNA, 19 nt, Artificial Sequence
  Description of Artificial Sequence: Synthetic oligonucleotide
  Antisense Strand to SEQ ID NO: 446245
auauuucuacuacuagaac

SEQ ID NO: 446247 - RNA, 19 nt, Artificial Sequence
  Description of Artificial Sequence: Synthetic oligonucleotide
  Sense strand starting at position 222 of SEQ ID NO: 316866
auauguaacuguuuagaag

SEQ ID NO: 446248 - RNA, 19 nt, Artificial Sequence
  Description of Artificial Sequence: Synthetic oligonucleotide
  Antisense Strand to SEQ ID NO: 446247
cuucuaaacaguuacauau

SEQ ID NO: 446249 - RNA, 19 nt, Artificial Sequence
  Description of Artificial Sequence: Synthetic oligonucleotide
  Sense strand starting at position 321 of SEQ ID NO: 316866
gcaucaucagcugaaauga

SEQ ID NO: 446250 - RNA, 19 nt, Artificial Sequence
  Description of Artificial Sequence: Synthetic oligonucleotide
  Antisense Strand to SEQ ID NO: 446249
ucauuucagcugaugaugc

SEQ ID NO: 446251 - RNA, 19 nt, Artificial Sequence
  Description of Artificial Sequence: Synthetic oligonucleotide
  Sense strand starting at position 383 of SEQ ID NO: 316866
guuaguuuauaccuacaag

SEQ ID NO: 446252 - RNA, 19 nt, Artificial Sequence
  Description of Artificial Sequence: Synthetic oligonucleotide
  Antisense Strand to SEQ ID NO: 446251
cuuguagguauaaacuaac

SEQ ID NO: 446253 - RNA, 19 nt, Artificial Sequence
  Description of Artificial Sequence: Synthetic oligonucleotide
  Sense strand starting at position 386 of SEQ ID NO: 316866
aguuuauaccuacaaguua

SEQ ID NO: 446254 - RNA, 19 nt, Artificial Sequence
  Description of Artificial Sequence: Synthetic oligonucleotide
  Antisense Strand to SEQ ID NO: 446253
uaacuuguagguauaaacu

SEQ ID NO: 446255 - RNA, 19 nt, Artificial Sequence
  Description of Artificial Sequence: Synthetic oligonucleotide
  Sense strand starting at position 555 of SEQ ID NO: 316866
auuuguucugcucauguca

SEQ ID NO: 446256 - RNA, 19 nt, Artificial Sequence
  Description of Artificial Sequence: Synthetic oligonucleotide
  Antisense Strand to SEQ ID NO: 446255
ugacaugagcagaacaaau

SEQ ID NO: 446257 - RNA, 19 nt, Artificial Sequence
  Description of Artificial Sequence: Synthetic oligonucleotide
  Sense strand starting at position 570 of SEQ ID NO: 316866
gucagaaaccauuaggcau

SEQ ID NO: 446258 - RNA, 19 nt, Artificial Sequence
  Description of Artificial Sequence: Synthetic oligonucleotide
  Antisense Strand to SEQ ID NO: 446257
augccuaaugguuucugac

SEQ ID NO: 446259 - RNA, 19 nt, Artificial Sequence
  Description of Artificial Sequence: Synthetic oligonucleotide
  Sense strand starting at position 618 of SEQ ID NO: 316866
aacgcagugagugauuaga

SEQ ID NO: 446260 - RNA, 19 nt, Artificial Sequence
  Description of Artificial Sequence: Synthetic oligonucleotide
  Antisense Strand to SEQ ID NO: 446259
ucuaaucacucacugcguu

SEQ ID NO: 446261 - RNA, 19 nt, Artificial Sequence
  Description of Artificial Sequence: Synthetic oligonucleotide
  Sense strand starting at position 642 of SEQ ID NO: 316866
uaggguagugauugauuaa

SEQ ID NO: 446262 - RNA, 19 nt, Artificial Sequence
  Description of Artificial Sequence: Synthetic oligonucleotide
  Antisense Strand to SEQ ID NO: 446261
uuaaucaaucacuacccua

SEQ ID NO: 446263 - RNA, 19 nt, Artificial Sequence
  Description of Artificial Sequence: Synthetic oligonucleotide
  Sense strand starting at position 709 of SEQ ID NO: 316866
uggaacuagucuuccaaac

SEQ ID NO: 446264 - RNA, 19 nt, Artificial Sequence
  Description of Artificial Sequence: Synthetic oligonucleotide
  Antisense Strand to SEQ ID NO: 446263
guuuggaagacuaguucca

SEQ ID NO: 446265 - RNA, 19 nt, Artificial Sequence
  Description of Artificial Sequence: Synthetic oligonucleotide
  Sense strand starting at position 756 of SEQ ID NO: 316866
ggagcuucagucugagaaa

SEQ ID NO: 446266 - RNA, 19 nt, Artificial Sequence
  Description of Artificial Sequence: Synthetic oligonucleotide
  Antisense Strand to SEQ ID NO: 446265
uuucucagacugaagcucc

SEQ ID NO: 446267 - RNA, 19 nt, Artificial Sequence
  Description of Artificial Sequence: Synthetic oligonucleotide
  Sense strand starting at position 768 of SEQ ID NO: 316866
ugagaaacuguccagcauu

SEQ ID NO: 446268 - RNA, 19 nt, Artificial Sequence
  Description of Artificial Sequence: Synthetic oligonucleotide
  Antisense Strand to SEQ ID NO: 446267
aaugcuggacaguuucuca

SEQ ID NO: 446269 - RNA, 19 nt, Artificial Sequence
  Description of Artificial Sequence: Synthetic oligonucleotide
  Sense strand starting at position 887 of SEQ ID NO: 316866
gacgguugacuuuacagua

SEQ ID NO: 446270 - RNA, 19 nt, Artificial Sequence
  Description of Artificial Sequence: Synthetic oligonucleotide
  Antisense Strand to SEQ ID NO: 446269
uacuguaaagucaaccguc

SEQ ID NO: 446271 - RNA, 19 nt, Artificial Sequence
  Description of Artificial Sequence: Synthetic oligonucleotide
  Sense strand starting at position 992 of SEQ ID NO: 316866
gcuccugugaaguagaaug

SEQ ID NO: 446272 - RNA, 19 nt, Artificial Sequence
  Description of Artificial Sequence: Synthetic oligonucleotide
  Antisense Strand to SEQ ID NO: 446271
cauucuacuucacaggagc

SEQ ID NO: 446273 - RNA, 19 nt, Artificial Sequence
  Description of Artificial Sequence: Synthetic oligonucleotide
  Sense strand starting at position 994 of SEQ ID NO: 316866
uccugugaaguagaauguu

SEQ ID NO: 446274 - RNA, 19 nt, Artificial Sequence
  Description of Artificial Sequence: Synthetic oligonucleotide
  Antisense Strand to SEQ ID NO: 446273
aacauucuacuucacagga

SEQ ID NO: 446275 - RNA, 19 nt, Artificial Sequence
  Description of Artificial Sequence: Synthetic oligonucleotide
  Sense strand starting at position 1035 of SEQ ID NO: 316866
caauuaauuugacagaggu

SEQ ID NO: 446276 - RNA, 19 nt, Artificial Sequence
  Description of Artificial Sequence: Synthetic oligonucleotide
  Antisense Strand to SEQ ID NO: 446275
accucugucaaauuaauug

SEQ ID NO: 446277 - RNA, 19 nt, Artificial Sequence
  Description of Artificial Sequence: Synthetic oligonucleotide
  Sense strand starting at position 1247 of SEQ ID NO: 316866
uucuauuggcuagauaaac

SEQ ID NO: 446278 - RNA, 19 nt, Artificial Sequence
  Description of Artificial Sequence: Synthetic oligonucleotide
  Antisense Strand to SEQ ID NO: 446277
guuuaucuagccaauagaa

SEQ ID NO: 446279 - RNA, 19 nt, Artificial Sequence
  Description of Artificial Sequence: Synthetic oligonucleotide
  Sense strand starting at position 2351 of SEQ ID NO: 316866
gcguccuaacgagaaauaa

SEQ ID NO: 446280 - RNA, 19 nt, Artificial Sequence
  Description of Artificial Sequence: Synthetic oligonucleotide
  Antisense Strand to SEQ ID NO: 446279
uuauuucucguuaggacgc

SEQ ID NO: 446281 - RNA, 19 nt, Artificial Sequence
  Description of Artificial Sequence: Synthetic oligonucleotide
  Sense strand starting at position 2390 of SEQ ID NO: 316866
uccauuggcagugaugaua

SEQ ID NO: 446282 - RNA, 19 nt, Artificial Sequence
  Description of Artificial Sequence: Synthetic oligonucleotide
  Antisense Strand to SEQ ID NO: 446281
uaucaucacugccaaugga

SEQ ID NO: 446283 - RNA, 19 nt, Artificial Sequence
  Description of Artificial Sequence: Synthetic oligonucleotide
  Sense strand starting at position 2393 of SEQ ID NO: 316866
auuggcagugaugauauau

SEQ ID NO: 446284 - RNA, 19 nt, Artificial Sequence
  Description of Artificial Sequence: Synthetic oligonucleotide
  Antisense Strand to SEQ ID NO: 446283
auauaucaucacugccaau

SEQ ID NO: 446285 - RNA, 19 nt, Artificial Sequence
  Description of Artificial Sequence: Synthetic oligonucleotide
  Sense strand starting at position 2401 of SEQ ID NO: 316866
ugaugauauaugcaguguu

SEQ ID NO: 446286 - RNA, 19 nt, Artificial Sequence
  Description of Artificial Sequence: Synthetic oligonucleotide
  Antisense Strand to SEQ ID NO: 446285
aacacugcauauaucauca

SEQ ID NO: 446287 - RNA, 19 nt, Artificial Sequence
  Description of Artificial Sequence: Synthetic oligonucleotide
  Sense strand starting at position 2524 of SEQ ID NO: 316866
gagagaugaccacgagugu

SEQ ID NO: 446288 - RNA, 19 nt, Artificial Sequence
  Description of Artificial Sequence: Synthetic oligonucleotide
  Antisense Strand to SEQ ID NO: 446287
acacucguggucaucucuc

SEQ ID NO: 446289 - RNA, 19 nt, Artificial Sequence
  Description of Artificial Sequence: Synthetic oligonucleotide
  Sense strand starting at position 2525 of SEQ ID NO: 316866
agagaugaccacgaguguu

SEQ ID NO: 446290 - RNA, 19 nt, Artificial Sequence
  Description of Artificial Sequence: Synthetic oligonucleotide
  Antisense Strand to SEQ ID NO: 446289
aacacucguggucaucucu

SEQ ID NO: 446291 - RNA, 19 nt, Artificial Sequence
  Description of Artificial Sequence: Synthetic oligonucleotide
  Sense strand starting at position 2617 of SEQ ID NO: 316866
cgggacucauucuuagauu

SEQ ID NO: 446292 - RNA, 19 nt, Artificial Sequence
  Description of Artificial Sequence: Synthetic oligonucleotide
  Antisense Strand to SEQ ID NO: 446291
aaucuaagaaugagucccg

SEQ ID NO: 446293 - RNA, 19 nt, Artificial Sequence
  Description of Artificial Sequence: Synthetic oligonucleotide
  Sense strand starting at position 2618 of SEQ ID NO: 316866
gggacucauucuuagauuu

SEQ ID NO: 446294 - RNA, 19 nt, Artificial Sequence
  Description of Artificial Sequence: Synthetic oligonucleotide
  Antisense Strand to SEQ ID NO: 446293
aaaucuaagaaugaguccc

SEQ ID NO: 446295 - RNA, 19 nt, Artificial Sequence
  Description of Artificial Sequence: Synthetic oligonucleotide
  Sense strand starting at position 2648 of SEQ ID NO: 316866
ucaagauggucuucucaca

SEQ ID NO: 446296 - RNA, 19 nt, Artificial Sequence
  Description of Artificial Sequence: Synthetic oligonucleotide
  Antisense Strand to SEQ ID NO: 446295
ugugagaagaccaucuuga

SEQ ID NO: 446297 - RNA, 19 nt, Artificial Sequence
  Description of Artificial Sequence: Synthetic oligonucleotide
  Sense strand starting at position 3050 of SEQ ID NO: 316866
cucugcucuguagauaaga

SEQ ID NO: 446298 - RNA, 19 nt, Artificial Sequence
  Description of Artificial Sequence: Synthetic oligonucleotide
  Antisense Strand to SEQ ID NO: 446297
ucuuaucuacagagcagag

SEQ ID NO: 446299 - RNA, 19 nt, Artificial Sequence
  Description of Artificial Sequence: Synthetic oligonucleotide
  Sense strand starting at position 3081 of SEQ ID NO: 316866
aggaaaggugaagguuuau

SEQ ID NO: 446300 - RNA, 19 nt, Artificial Sequence
  Description of Artificial Sequence: Synthetic oligonucleotide
  Antisense Strand to SEQ ID NO: 446299
auaaaccuucaccuuuccu

SEQ ID NO: 446301 - RNA, 19 nt, Artificial Sequence
  Description of Artificial Sequence: Synthetic oligonucleotide
  Sense strand starting at position 3119 of SEQ ID NO: 316866
uagucauuggguuaaggau

SEQ ID NO: 446302 - RNA, 19 nt, Artificial Sequence
  Description of Artificial Sequence: Synthetic oligonucleotide
  Antisense Strand to SEQ ID NO: 446301
auccuuaacccaaugacua

SEQ ID NO: 446303 - RNA, 19 nt, Artificial Sequence
  Description of Artificial Sequence: Synthetic oligonucleotide
  Sense strand starting at position 3127 of SEQ ID NO: 316866
ggguuaaggauaggucauu

SEQ ID NO: 446304 - RNA, 19 nt, Artificial Sequence
  Description of Artificial Sequence: Synthetic oligonucleotide
  Antisense Strand to SEQ ID NO: 446303
aaugaccuauccuuaaccc

SEQ ID NO: 446305 - RNA, 19 nt, Artificial Sequence
  Description of Artificial Sequence: Synthetic oligonucleotide
  Sense strand starting at position 3182 of SEQ ID NO: 316866
gccuaauuugcauguauca

SEQ ID NO: 446306 - RNA, 19 nt, Artificial Sequence
  Description of Artificial Sequence: Synthetic oligonucleotide
  Antisense Strand to SEQ ID NO: 446305
ugauacaugcaaauuaggc

SEQ ID NO: 446307 - RNA, 19 nt, Artificial Sequence
  Description of Artificial Sequence: Synthetic oligonucleotide
  Sense strand starting at position 3278 of SEQ ID NO: 316866
guagaauuggauugccuaa

SEQ ID NO: 446308 - RNA, 19 nt, Artificial Sequence
  Description of Artificial Sequence: Synthetic oligonucleotide
  Antisense Strand to SEQ ID NO: 446307
uuaggcaauccaauucuac

SEQ ID NO: 446309 - RNA, 19 nt, Artificial Sequence
  Description of Artificial Sequence: Synthetic oligonucleotide
  Sense strand starting at position 3322 of SEQ ID NO: 316866
gaggaacaguguguuaauu

SEQ ID NO: 446310 - RNA, 19 nt, Artificial Sequence
  Description of Artificial Sequence: Synthetic oligonucleotide
  Antisense Strand to SEQ ID NO: 446309
aauuaacacacuguuccuc

SEQ ID NO: 446311 - RNA, 19 nt, Artificial Sequence
  Description of Artificial Sequence: Synthetic oligonucleotide
  Sense strand starting at position 3740 of SEQ ID NO: 316866
aguucugugccugaaagau

SEQ ID NO: 446312 - RNA, 19 nt, Artificial Sequence
  Description of Artificial Sequence: Synthetic oligonucleotide
  Antisense Strand to SEQ ID NO: 446311
aucuuucaggcacagaacu

SEQ ID NO: 446313 - RNA, 19 nt, Artificial Sequence
  Description of Artificial Sequence: Synthetic oligonucleotide
  Sense strand starting at position 3854 of SEQ ID NO: 316866
uucccagugccuuaagaaa

SEQ ID NO: 446314 - RNA, 19 nt, Artificial Sequence
  Description of Artificial Sequence: Synthetic oligonucleotide
  Antisense Strand to SEQ ID NO: 446313
uuucuuaaggcacugggaa

SEQ ID NO: 446315 - RNA, 19 nt, Artificial Sequence
  Description of Artificial Sequence: Synthetic oligonucleotide
  Sense strand starting at position 3898 of SEQ ID NO: 316866
agaucugguucuuccauaa

SEQ ID NO: 446316 - RNA, 19 nt, Artificial Sequence
  Description of Artificial Sequence: Synthetic oligonucleotide
  Antisense Strand to SEQ ID NO: 446315
uuauggaagaaccagaucu

SEQ ID NO: 446317 - RNA, 19 nt, Artificial Sequence
  Description of Artificial Sequence: Synthetic oligonucleotide
  Sense strand starting at position 3943 of SEQ ID NO: 316866
aggcccaauuucuuuguau

SEQ ID NO: 446318 - RNA, 19 nt, Artificial Sequence
  Description of Artificial Sequence: Synthetic oligonucleotide
  Antisense Strand to SEQ ID NO: 446317
auacaaagaaauugggccu

SEQ ID NO: 446319 - RNA, 19 nt, Artificial Sequence
  Description of Artificial Sequence: Synthetic oligonucleotide
  Sense strand starting at position 3945 of SEQ ID NO: 316866
gcccaauuucuuuguauug

SEQ ID NO: 446320 - RNA, 19 nt, Artificial Sequence
  Description of Artificial Sequence: Synthetic oligonucleotide
  Antisense Strand to SEQ ID NO: 446319
caauacaaagaaauugggc

SEQ ID NO: 446321 - RNA, 19 nt, Artificial Sequence
  Description of Artificial Sequence: Synthetic oligonucleotide
  Sense strand starting at position 61 of SEQ ID NO: 316867
cccagauggcuugguuaau

SEQ ID NO: 446322 - RNA, 19 nt, Artificial Sequence
  Description of Artificial Sequence: Synthetic oligonucleotide
  Antisense Strand to SEQ ID NO: 446321
auuaaccaagccaucuggg

SEQ ID NO: 446323 - RNA, 19 nt, Artificial Sequence
  Description of Artificial Sequence: Synthetic oligonucleotide
  Sense strand starting at position 62 of SEQ ID NO: 316867
ccagauggcuugguuaauc

SEQ ID NO: 446324 - RNA, 19 nt, Artificial Sequence
  Description of Artificial Sequence: Synthetic oligonucleotide
  Antisense Strand to SEQ ID NO: 446323
gauuaaccaagccaucugg

SEQ ID NO: 446325 - RNA, 19 nt, Artificial Sequence
  Description of Artificial Sequence: Synthetic oligonucleotide
  Sense strand starting at position 73 of SEQ ID NO: 316867
gguuaaucccgguaagccu

SEQ ID NO: 446326 - RNA, 19 nt, Artificial Sequence
  Description of Artificial Sequence: Synthetic oligonucleotide
  Antisense Strand to SEQ ID NO: 446325
aggcuuaccgggauuaacc

SEQ ID NO: 446327 - RNA, 19 nt, Artificial Sequence
  Description of Artificial Sequence: Synthetic oligonucleotide
  Sense strand starting at position 174 of SEQ ID NO: 316867
accaacuaggguugaaauu

SEQ ID NO: 446328 - RNA, 19 nt, Artificial Sequence
  Description of Artificial Sequence: Synthetic oligonucleotide
  Antisense Strand to SEQ ID NO: 446327
aauuucaacccuaguuggu

SEQ ID NO: 446329 - RNA, 19 nt, Artificial Sequence
  Description of Artificial Sequence: Synthetic oligonucleotide
  Sense strand starting at position 397 of SEQ ID NO: 316867
aucucuuagugucucuuaa

SEQ ID NO: 446330 - RNA, 19 nt, Artificial Sequence
  Description of Artificial Sequence: Synthetic oligonucleotide
  Antisense Strand to SEQ ID NO: 446329
uuaagagacacuaagagau

SEQ ID NO: 446331 - RNA, 19 nt, Artificial Sequence
  Description of Artificial Sequence: Synthetic oligonucleotide
  Sense strand starting at position 399 of SEQ ID NO: 316867
cucuuagugucucuuaauc

SEQ ID NO: 446332 - RNA, 19 nt, Artificial Sequence
  Description of Artificial Sequence: Synthetic oligonucleotide
  Antisense Strand to SEQ ID NO: 446331
gauuaagagacacuaagag

SEQ ID NO: 446333 - RNA, 19 nt, Artificial Sequence
  Description of Artificial Sequence: Synthetic oligonucleotide
  Sense strand starting at position 486 of SEQ ID NO: 316867
cagcucuuugcgguguaau

SEQ ID NO: 446334 - RNA, 19 nt, Artificial Sequence
  Description of Artificial Sequence: Synthetic oligonucleotide
  Antisense Strand to SEQ ID NO: 446333
auuacaccgcaaagagcug

SEQ ID NO: 446335 - RNA, 19 nt, Artificial Sequence
  Description of Artificial Sequence: Synthetic oligonucleotide
  Sense strand starting at position 565 of SEQ ID NO: 316867
cgcacaagaucugucucau

SEQ ID NO: 446336 - RNA, 19 nt, Artificial Sequence
  Description of Artificial Sequence: Synthetic oligonucleotide
  Antisense Strand to SEQ ID NO: 446335
augagacagaucuugugcg

SEQ ID NO: 446337 - RNA, 19 nt, Artificial Sequence
  Description of Artificial Sequence: Synthetic oligonucleotide
  Sense strand starting at position 626 of SEQ ID NO: 316867
uuguuucugaucgcgcaga

SEQ ID NO: 446338 - RNA, 19 nt, Artificial Sequence
  Description of Artificial Sequence: Synthetic oligonucleotide
  Antisense Strand to SEQ ID NO: 446337
ucugcgcgaucagaaacaa

SEQ ID NO: 446339 - RNA, 19 nt, Artificial Sequence
  Description of Artificial Sequence: Synthetic oligonucleotide
  Sense strand starting at position 628 of SEQ ID NO: 316867
guuucugaucgcgcagacu

SEQ ID NO: 446340 - RNA, 19 nt, Artificial Sequence
  Description of Artificial Sequence: Synthetic oligonucleotide
  Antisense Strand to SEQ ID NO: 446339
agucugcgcgaucagaaac

SEQ ID NO: 446341 - RNA, 19 nt, Artificial Sequence
  Description of Artificial Sequence: Synthetic oligonucleotide
  Sense strand starting at position 631 of SEQ ID NO: 316867
ucugaucgcgcagacuuua

SEQ ID NO: 446342 - RNA, 19 nt, Artificial Sequence
  Description of Artificial Sequence: Synthetic oligonucleotide
  Antisense Strand to SEQ ID NO: 446341
uaaagucugcgcgaucaga

SEQ ID NO: 446343 - RNA, 19 nt, Artificial Sequence
  Description of Artificial Sequence: Synthetic oligonucleotide
  Sense strand starting at position 854 of SEQ ID NO: 316867
acacuucugucacuuuagu

SEQ ID NO: 446344 - RNA, 19 nt, Artificial Sequence
  Description of Artificial Sequence: Synthetic oligonucleotide
  Antisense Strand to SEQ ID NO: 446343
acuaaagugacagaagugu

SEQ ID NO: 446345 - RNA, 19 nt, Artificial Sequence
  Description of Artificial Sequence: Synthetic oligonucleotide
  Sense strand starting at position 868 of SEQ ID NO: 316867
uuaguaaguugcuuaaccu

SEQ ID NO: 446346 - RNA, 19 nt, Artificial Sequence
  Description of Artificial Sequence: Synthetic oligonucleotide
  Antisense Strand to SEQ ID NO: 446345
agguuaagcaacuuacuaa

SEQ ID NO: 446347 - RNA, 19 nt, Artificial Sequence
  Description of Artificial Sequence: Synthetic oligonucleotide
  Sense strand starting at position 931 of SEQ ID NO: 316867
uguggagauucauugagau

SEQ ID NO: 446348 - RNA, 19 nt, Artificial Sequence
  Description of Artificial Sequence: Synthetic oligonucleotide
  Antisense Strand to SEQ ID NO: 446347
aucucaaugaaucuccaca

SEQ ID NO: 446349 - RNA, 19 nt, Artificial Sequence
  Description of Artificial Sequence: Synthetic oligonucleotide
  Sense strand starting at position 991 of SEQ ID NO: 316867
cuuaauaaacgcuagcauu

SEQ ID NO: 446350 - RNA, 19 nt, Artificial Sequence
  Description of Artificial Sequence: Synthetic oligonucleotide
  Antisense Strand to SEQ ID NO: 446349
aaugcuagcguuuauuaag

SEQ ID NO: 446351 - RNA, 19 nt, Artificial Sequence
  Description of Artificial Sequence: Synthetic oligonucleotide
  Sense strand starting at position 1039 of SEQ ID NO: 316867
ggugucauaaccgauaguu

SEQ ID NO: 446352 - RNA, 19 nt, Artificial Sequence
  Description of Artificial Sequence: Synthetic oligonucleotide
  Antisense Strand to SEQ ID NO: 446351
aacuaucgguuaugacacc

SEQ ID NO: 446353 - RNA, 19 nt, Artificial Sequence
  Description of Artificial Sequence: Synthetic oligonucleotide
  Sense strand starting at position 1041 of SEQ ID NO: 316867
ugucauaaccgauaguuua

SEQ ID NO: 446354 - RNA, 19 nt, Artificial Sequence
  Description of Artificial Sequence: Synthetic oligonucleotide
  Antisense Strand to SEQ ID NO: 446353
uaaacuaucgguuaugaca

SEQ ID NO: 446355 - RNA, 19 nt, Artificial Sequence
  Description of Artificial Sequence: Synthetic oligonucleotide
  Sense strand starting at position 1048 of SEQ ID NO: 316867
accgauaguuuacuugcaa

SEQ ID NO: 446356 - RNA, 19 nt, Artificial Sequence
  Description of Artificial Sequence: Synthetic oligonucleotide
  Antisense Strand to SEQ ID NO: 446355
uugcaaguaaacuaucggu

SEQ ID NO: 446357 - RNA, 19 nt, Artificial Sequence
  Description of Artificial Sequence: Synthetic oligonucleotide
  Sense strand starting at position 1049 of SEQ ID NO: 316867
ccgauaguuuacuugcaaa

SEQ ID NO: 446358 - RNA, 19 nt, Artificial Sequence
  Description of Artificial Sequence: Synthetic oligonucleotide
  Antisense Strand to SEQ ID NO: 446357
uuugcaaguaaacuaucgg

SEQ ID NO: 446359 - RNA, 19 nt, Artificial Sequence
  Description of Artificial Sequence: Synthetic oligonucleotide
  Sense strand starting at position 1113 of SEQ ID NO: 316867
gucucucccgcucaugaau

SEQ ID NO: 446360 - RNA, 19 nt, Artificial Sequence
  Description of Artificial Sequence: Synthetic oligonucleotide
  Antisense Strand to SEQ ID NO: 446359
auucaugagcgggagagac

SEQ ID NO: 446361 - RNA, 19 nt, Artificial Sequence
  Description of Artificial Sequence: Synthetic oligonucleotide
  Sense strand starting at position 1124 of SEQ ID NO: 316867
ucaugaaugucgucccuag

SEQ ID NO: 446362 - RNA, 19 nt, Artificial Sequence
  Description of Artificial Sequence: Synthetic oligonucleotide
  Antisense Strand to SEQ ID NO: 446361
cuagggacgacauucauga

SEQ ID NO: 446363 - RNA, 19 nt, Artificial Sequence
  Description of Artificial Sequence: Synthetic oligonucleotide
  Sense strand starting at position 2149 of SEQ ID NO: 316867
uuagaaggcuccuuuaagu

SEQ ID NO: 446364 - RNA, 19 nt, Artificial Sequence
  Description of Artificial Sequence: Synthetic oligonucleotide
  Antisense Strand to SEQ ID NO: 446363
acuuaaaggagccuucuaa

SEQ ID NO: 446365 - RNA, 19 nt, Artificial Sequence
  Description of Artificial Sequence: Synthetic oligonucleotide
  Sense strand starting at position 2172 of SEQ ID NO: 316867
ugaggcuuagaauaugcua

SEQ ID NO: 446366 - RNA, 19 nt, Artificial Sequence
  Description of Artificial Sequence: Synthetic oligonucleotide
  Antisense Strand to SEQ ID NO: 446365
uagcauauucuaagccuca

SEQ ID NO: 446367 - RNA, 19 nt, Artificial Sequence
  Description of Artificial Sequence: Synthetic oligonucleotide
  Sense strand starting at position 2654 of SEQ ID NO: 316867
uggagagaaucuguugugu

SEQ ID NO: 446368 - RNA, 19 nt, Artificial Sequence
  Description of Artificial Sequence: Synthetic oligonucleotide
  Antisense Strand to SEQ ID NO: 446367
acacaacagauucucucca

SEQ ID NO: 446369 - RNA, 19 nt, Artificial Sequence
  Description of Artificial Sequence: Synthetic oligonucleotide
  Sense strand starting at position 2734 of SEQ ID NO: 316867
ucucacaguuguuuagagu

SEQ ID NO: 446370 - RNA, 19 nt, Artificial Sequence
  Description of Artificial Sequence: Synthetic oligonucleotide
  Antisense Strand to SEQ ID NO: 446369
acucuaaacaacugugaga

SEQ ID NO: 446371 - RNA, 19 nt, Artificial Sequence
  Description of Artificial Sequence: Synthetic oligonucleotide
  Sense strand starting at position 2740 of SEQ ID NO: 316867
aguuguuuagagugauaaa

SEQ ID NO: 446372 - RNA, 19 nt, Artificial Sequence
  Description of Artificial Sequence: Synthetic oligonucleotide
  Antisense Strand to SEQ ID NO: 446371
uuuaucacucuaaacaacu

SEQ ID NO: 446373 - RNA, 19 nt, Artificial Sequence
  Description of Artificial Sequence: Synthetic oligonucleotide
  Sense strand starting at position 2778 of SEQ ID NO: 316867
cuguguuugcuuuaaacaa

SEQ ID NO: 446374 - RNA, 19 nt, Artificial Sequence
  Description of Artificial Sequence: Synthetic oligonucleotide
  Antisense Strand to SEQ ID NO: 446373
uuguuuaaagcaaacacag

SEQ ID NO: 446375 - RNA, 19 nt, Artificial Sequence
  Description of Artificial Sequence: Synthetic oligonucleotide
  Sense strand starting at position 3050 of SEQ ID NO: 316867
ugggaacuguuauccaaau

SEQ ID NO: 446376 - RNA, 19 nt, Artificial Sequence
  Description of Artificial Sequence: Synthetic oligonucleotide
  Antisense Strand to SEQ ID NO: 446375
auuuggauaacaguuccca

SEQ ID NO: 446377 - RNA, 19 nt, Artificial Sequence
  Description of Artificial Sequence: Synthetic oligonucleotide
  Sense strand starting at position 3051 of SEQ ID NO: 316867
gggaacuguuauccaaauu

SEQ ID NO: 446378 - RNA, 19 nt, Artificial Sequence
  Description of Artificial Sequence: Synthetic oligonucleotide
  Antisense Strand to SEQ ID NO: 446377
aauuuggauaacaguuccc

SEQ ID NO: 446379 - RNA, 19 nt, Artificial Sequence
  Description of Artificial Sequence: Synthetic oligonucleotide
  Sense strand starting at position 3118 of SEQ ID NO: 316867
gugacucauuugcaauuaa

SEQ ID NO: 446380 - RNA, 19 nt, Artificial Sequence
  Description of Artificial Sequence: Synthetic oligonucleotide
  Antisense Strand to SEQ ID NO: 446379
uuaauugcaaaugagucac

SEQ ID NO: 446381 - RNA, 19 nt, Artificial Sequence
  Description of Artificial Sequence: Synthetic oligonucleotide
  Sense strand starting at position 3145 of SEQ ID NO: 316867
gcagaauucuugucucauu

SEQ ID NO: 446382 - RNA, 19 nt, Artificial Sequence
  Description of Artificial Sequence: Synthetic oligonucleotide
  Antisense Strand to SEQ ID NO: 446381
aaugagacaagaauucugc

SEQ ID NO: 446383 - RNA, 19 nt, Artificial Sequence
  Description of Artificial Sequence: Synthetic oligonucleotide
  Sense strand starting at position 3183 of SEQ ID NO: 316867
agggcaaacucucugcuau

SEQ ID NO: 446384 - RNA, 19 nt, Artificial Sequence
  Description of Artificial Sequence: Synthetic oligonucleotide
  Antisense Strand to SEQ ID NO: 446383
auagcagagaguuugcccu

SEQ ID NO: 446385 - RNA, 19 nt, Artificial Sequence
  Description of Artificial Sequence: Synthetic oligonucleotide
  Sense strand starting at position 3184 of SEQ ID NO: 316867
gggcaaacucucugcuaug

SEQ ID NO: 446386 - RNA, 19 nt, Artificial Sequence
  Description of Artificial Sequence: Synthetic oligonucleotide
  Antisense Strand to SEQ ID NO: 446385
cauagcagagaguuugccc

SEQ ID NO: 446387 - RNA, 19 nt, Artificial Sequence
  Description of Artificial Sequence: Synthetic oligonucleotide
  Sense strand starting at position 3434 of SEQ ID NO: 316867
gugagacccugacuccaua

SEQ ID NO: 446388 - RNA, 19 nt, Artificial Sequence
  Description of Artificial Sequence: Synthetic oligonucleotide
  Antisense Strand to SEQ ID NO: 446387
uauggagucagggucucac

SEQ ID NO: 446389 - RNA, 19 nt, Artificial Sequence
  Description of Artificial Sequence: Synthetic oligonucleotide
  Sense strand starting at position 3503 of SEQ ID NO: 316867
aucauaaaguuguugacua

SEQ ID NO: 446390 - RNA, 19 nt, Artificial Sequence
  Description of Artificial Sequence: Synthetic oligonucleotide
  Antisense Strand to SEQ ID NO: 446389
uagucaacaacuuuaugau

SEQ ID NO: 446391 - RNA, 19 nt, Artificial Sequence
  Description of Artificial Sequence: Synthetic oligonucleotide
  Sense strand starting at position 3531 of SEQ ID NO: 316867
ccuuuaaaugacugacugu

SEQ ID NO: 446392 - RNA, 19 nt, Artificial Sequence
  Description of Artificial Sequence: Synthetic oligonucleotide
  Antisense Strand to SEQ ID NO: 446391
acagucagucauuuaaagg

SEQ ID NO: 446393 - RNA, 19 nt, Artificial Sequence
  Description of Artificial Sequence: Synthetic oligonucleotide
  Sense strand starting at position 3534 of SEQ ID NO: 316867
uuaaaugacugacugucaa

SEQ ID NO: 446394 - RNA, 19 nt, Artificial Sequence
  Description of Artificial Sequence: Synthetic oligonucleotide
  Antisense Strand to SEQ ID NO: 446393
uugacagucagucauuuaa

SEQ ID NO: 446395 - RNA, 19 nt, Artificial Sequence
  Description of Artificial Sequence: Synthetic oligonucleotide
  Sense strand starting at position 3570 of SEQ ID NO: 316867
gcaacaugcuuggcauuua

SEQ ID NO: 446396 - RNA, 19 nt, Artificial Sequence
  Description of Artificial Sequence: Synthetic oligonucleotide
  Antisense Strand to SEQ ID NO: 446395
uaaaugccaagcauguugc

SEQ ID NO: 446397 - RNA, 19 nt, Artificial Sequence
  Description of Artificial Sequence: Synthetic oligonucleotide
  Sense strand starting at position 3582 of SEQ ID NO: 316867
gcauuuagccuguggucuu

SEQ ID NO: 446398 - RNA, 19 nt, Artificial Sequence
  Description of Artificial Sequence: Synthetic oligonucleotide
  Antisense Strand to SEQ ID NO: 446397
aagaccacaggcuaaaugc

SEQ ID NO: 446399 - RNA, 19 nt, Artificial Sequence
  Description of Artificial Sequence: Synthetic oligonucleotide
  Sense strand starting at position 3595 of SEQ ID NO: 316867
ggucuugucacaugccuga

SEQ ID NO: 446400 - RNA, 19 nt, Artificial Sequence
  Description of Artificial Sequence: Synthetic oligonucleotide
  Antisense Strand to SEQ ID NO: 446399
ucaggcaugugacaagacc

SEQ ID NO: 446401 - RNA, 19 nt, Artificial Sequence
  Description of Artificial Sequence: Synthetic oligonucleotide
  Sense strand starting at position 116 of SEQ ID NO: 316868
cgagcugauuuggaggaaa

SEQ ID NO: 446402 - RNA, 19 nt, Artificial Sequence
  Description of Artificial Sequence: Synthetic oligonucleotide
  Antisense Strand to SEQ ID NO: 446401
uuuccuccaaaucagcucg

SEQ ID NO: 446403 - RNA, 19 nt, Artificial Sequence
  Description of Artificial Sequence: Synthetic oligonucleotide
  Sense strand starting at position 418 of SEQ ID NO: 316868
cguuucaacgaucaggaaa

SEQ ID NO: 446404 - RNA, 19 nt, Artificial Sequence
  Description of Artificial Sequence: Synthetic oligonucleotide
  Antisense Strand to SEQ ID NO: 446403
uuuccugaucguugaaacg

SEQ ID NO: 446405 - RNA, 19 nt, Artificial Sequence
  Description of Artificial Sequence: Synthetic oligonucleotide
  Sense strand starting at position 540 of SEQ ID NO: 316868
cgaggaaggucuccaguuu

SEQ ID NO: 446406 - RNA, 19 nt, Artificial Sequence
  Description of Artificial Sequence: Synthetic oligonucleotide
  Antisense Strand to SEQ ID NO: 446405
aaacuggagaccuuccucg

SEQ ID NO: 446407 - RNA, 19 nt, Artificial Sequence
  Description of Artificial Sequence: Synthetic oligonucleotide
  Sense strand starting at position 552 of SEQ ID NO: 316868
ccaguuucccucgaagcuu

SEQ ID NO: 446408 - RNA, 19 nt, Artificial Sequence
  Description of Artificial Sequence: Synthetic oligonucleotide
  Antisense Strand to SEQ ID NO: 446407
aagcuucgagggaaacugg

SEQ ID NO: 446409 - RNA, 19 nt, Artificial Sequence
  Description of Artificial Sequence: Synthetic oligonucleotide
  Sense strand starting at position 633 of SEQ ID NO: 316868
uuccucauucuuugcgaaa

SEQ ID NO: 446410 - RNA, 19 nt, Artificial Sequence
  Description of Artificial Sequence: Synthetic oligonucleotide
  Antisense Strand to SEQ ID NO: 446409
uuucgcaaagaaugaggaa

SEQ ID NO: 446411 - RNA, 19 nt, Artificial Sequence
  Description of Artificial Sequence: Synthetic oligonucleotide
  Sense strand starting at position 634 of SEQ ID NO: 316868
uccucauucuuugcgaaau

SEQ ID NO: 446412 - RNA, 19 nt, Artificial Sequence
  Description of Artificial Sequence: Synthetic oligonucleotide
  Antisense Strand to SEQ ID NO: 446411
auuucgcaaagaaugagga

SEQ ID NO: 446413 - RNA, 19 nt, Artificial Sequence
  Description of Artificial Sequence: Synthetic oligonucleotide
  Sense strand starting at position 1287 of SEQ ID NO: 316868
cuguaagccucagcucaga

SEQ ID NO: 446414 - RNA, 19 nt, Artificial Sequence
  Description of Artificial Sequence: Synthetic oligonucleotide
  Antisense Strand to SEQ ID NO: 446413
ucugagcugaggcuuacag

SEQ ID NO: 446415 - RNA, 19 nt, Artificial Sequence
  Description of Artificial Sequence: Synthetic oligonucleotide
  Sense strand starting at position 1330 of SEQ ID NO: 316868
cugacacacggaugugaau

SEQ ID NO: 446416 - RNA, 19 nt, Artificial Sequence
  Description of Artificial Sequence: Synthetic oligonucleotide
  Antisense Strand to SEQ ID NO: 446415
auucacauccgugugucag

SEQ ID NO: 446417 - RNA, 19 nt, Artificial Sequence
  Description of Artificial Sequence: Synthetic oligonucleotide
  Sense strand starting at position 1567 of SEQ ID NO: 316868
ucgcauucccagugggaaa

SEQ ID NO: 446418 - RNA, 19 nt, Artificial Sequence
  Description of Artificial Sequence: Synthetic oligonucleotide
  Antisense Strand to SEQ ID NO: 446417
uuucccacugggaaugcga

SEQ ID NO: 446419 - RNA, 19 nt, Artificial Sequence
  Description of Artificial Sequence: Synthetic oligonucleotide
  Sense strand starting at position 1628 of SEQ ID NO: 316868
gggagcuggugucugaagu

SEQ ID NO: 446420 - RNA, 19 nt, Artificial Sequence
  Description of Artificial Sequence: Synthetic oligonucleotide
  Antisense Strand to SEQ ID NO: 446419
acuucagacaccagcuccc

SEQ ID NO: 446421 - RNA, 19 nt, Artificial Sequence
  Description of Artificial Sequence: Synthetic oligonucleotide
  Sense strand starting at position 1858 of SEQ ID NO: 316868
cuguuaggcugucuauaaa

SEQ ID NO: 446422 - RNA, 19 nt, Artificial Sequence
  Description of Artificial Sequence: Synthetic oligonucleotide
  Antisense Strand to SEQ ID NO: 446421
uuuauagacagccuaacag

SEQ ID NO: 446423 - RNA, 19 nt, Artificial Sequence
  Description of Artificial Sequence: Synthetic oligonucleotide
  Sense strand starting at position 1942 of SEQ ID NO: 316868
ggccuuuccugaccuaaca

SEQ ID NO: 446424 - RNA, 19 nt, Artificial Sequence
  Description of Artificial Sequence: Synthetic oligonucleotide
  Antisense Strand to SEQ ID NO: 446423
uguuaggucaggaaaggcc

SEQ ID NO: 446425 - RNA, 19 nt, Artificial Sequence
  Description of Artificial Sequence: Synthetic oligonucleotide
  Sense strand starting at position 1977 of SEQ ID NO: 316868
guucgagaagcugagaauu

SEQ ID NO: 446426 - RNA, 19 nt, Artificial Sequence
  Description of Artificial Sequence: Synthetic oligonucleotide
  Antisense Strand to SEQ ID NO: 446425
aauucucagcuucucgaac

SEQ ID NO: 446427 - RNA, 19 nt, Artificial Sequence
  Description of Artificial Sequence: Synthetic oligonucleotide
  Sense strand starting at position 1979 of SEQ ID NO: 316868
ucgagaagcugagaauuua

SEQ ID NO: 446428 - RNA, 19 nt, Artificial Sequence
  Description of Artificial Sequence: Synthetic oligonucleotide
  Antisense Strand to SEQ ID NO: 446427
uaaauucucagcuucucga

SEQ ID NO: 446429 - RNA, 19 nt, Artificial Sequence
  Description of Artificial Sequence: Synthetic oligonucleotide
  Sense strand starting at position 2094 of SEQ ID NO: 316868
uuguuugacagucagucau

SEQ ID NO: 446430 - RNA, 19 nt, Artificial Sequence
  Description of Artificial Sequence: Synthetic oligonucleotide
  Antisense Strand to SEQ ID NO: 446429
augacugacugucaaacaa

SEQ ID NO: 446431 - RNA, 19 nt, Artificial Sequence
  Description of Artificial Sequence: Synthetic oligonucleotide
  Sense strand starting at position 2096 of SEQ ID NO: 316868
guuugacagucagucauuu

SEQ ID NO: 446432 - RNA, 19 nt, Artificial Sequence
  Description of Artificial Sequence: Synthetic oligonucleotide
  Antisense Strand to SEQ ID NO: 446431
aaaugacugacugucaaac

SEQ ID NO: 446433 - RNA, 19 nt, Artificial Sequence
  Description of Artificial Sequence: Synthetic oligonucleotide
  Sense strand starting at position 2365 of SEQ ID NO: 316868
aaacaagagcgucaaguua

SEQ ID NO: 446434 - RNA, 19 nt, Artificial Sequence
  Description of Artificial Sequence: Synthetic oligonucleotide
  Antisense Strand to SEQ ID NO: 446433
uaacuugacgcucuuguuu

SEQ ID NO: 446435 - RNA, 19 nt, Artificial Sequence
  Description of Artificial Sequence: Synthetic oligonucleotide
  Sense strand starting at position 2453 of SEQ ID NO: 316868
cagagaguuugcccugaag

SEQ ID NO: 446436 - RNA, 19 nt, Artificial Sequence
  Description of Artificial Sequence: Synthetic oligonucleotide
  Antisense Strand to SEQ ID NO: 446435
cuucagggcaaacucucug

SEQ ID NO: 446437 - RNA, 19 nt, Artificial Sequence
  Description of Artificial Sequence: Synthetic oligonucleotide
  Sense strand starting at position 2455 of SEQ ID NO: 316868
gagaguuugcccugaagcc

SEQ ID NO: 446438 - RNA, 19 nt, Artificial Sequence
  Description of Artificial Sequence: Synthetic oligonucleotide
  Antisense Strand to SEQ ID NO: 446437
ggcuucagggcaaacucuc

SEQ ID NO: 446439 - RNA, 19 nt, Artificial Sequence
  Description of Artificial Sequence: Synthetic oligonucleotide
  Sense strand starting at position 2456 of SEQ ID NO: 316868
agaguuugcccugaagcca

SEQ ID NO: 446440 - RNA, 19 nt, Artificial Sequence
  Description of Artificial Sequence: Synthetic oligonucleotide
  Antisense Strand to SEQ ID NO: 446439
uggcuucagggcaaacucu

SEQ ID NO: 446441 - RNA, 19 nt, Artificial Sequence
  Description of Artificial Sequence: Synthetic oligonucleotide
  Sense strand starting at position 2471 of SEQ ID NO: 316868
gccagacacagguguaaau

SEQ ID NO: 446442 - RNA, 19 nt, Artificial Sequence
  Description of Artificial Sequence: Synthetic oligonucleotide
  Antisense Strand to SEQ ID NO: 446441
auuuacaccugugucuggc

SEQ ID NO: 446443 - RNA, 19 nt, Artificial Sequence
  Description of Artificial Sequence: Synthetic oligonucleotide
  Sense strand starting at position 2480 of SEQ ID NO: 316868
agguguaaaugagacaaga

SEQ ID NO: 446444 - RNA, 19 nt, Artificial Sequence
  Description of Artificial Sequence: Synthetic oligonucleotide
  Antisense Strand to SEQ ID NO: 446443
ucuugucucauuuacaccu

SEQ ID NO: 446445 - RNA, 19 nt, Artificial Sequence
  Description of Artificial Sequence: Synthetic oligonucleotide
  Sense strand starting at position 2574 of SEQ ID NO: 316868
gaugaagaauuuggauaac

SEQ ID NO: 446446 - RNA, 19 nt, Artificial Sequence
  Description of Artificial Sequence: Synthetic oligonucleotide
  Antisense Strand to SEQ ID NO: 446445
guuauccaaauucuucauc

SEQ ID NO: 446447 - RNA, 19 nt, Artificial Sequence
  Description of Artificial Sequence: Synthetic oligonucleotide
  Sense strand starting at position 2586 of SEQ ID NO: 316868
ggauaacaguucccaucuu

SEQ ID NO: 446448 - RNA, 19 nt, Artificial Sequence
  Description of Artificial Sequence: Synthetic oligonucleotide
  Antisense Strand to SEQ ID NO: 446447
aagaugggaacuguuaucc

SEQ ID NO: 446449 - RNA, 19 nt, Artificial Sequence
  Description of Artificial Sequence: Synthetic oligonucleotide
  Sense strand starting at position 2597 of SEQ ID NO: 316868
cccaucuugccaugaggaa

SEQ ID NO: 446450 - RNA, 19 nt, Artificial Sequence
  Description of Artificial Sequence: Synthetic oligonucleotide
  Antisense Strand to SEQ ID NO: 446449
uuccucauggcaagauggg

SEQ ID NO: 446451 - RNA, 19 nt, Artificial Sequence
  Description of Artificial Sequence: Synthetic oligonucleotide
  Sense strand starting at position 2640 of SEQ ID NO: 316868
cuggacaucuaggcugaaa

SEQ ID NO: 446452 - RNA, 19 nt, Artificial Sequence
  Description of Artificial Sequence: Synthetic oligonucleotide
  Antisense Strand to SEQ ID NO: 446451
uuucagccuagauguccag

SEQ ID NO: 446453 - RNA, 19 nt, Artificial Sequence
  Description of Artificial Sequence: Synthetic oligonucleotide
  Sense strand starting at position 2843 of SEQ ID NO: 316868
cccauaaauguuuguuuaa

SEQ ID NO: 446454 - RNA, 19 nt, Artificial Sequence
  Description of Artificial Sequence: Synthetic oligonucleotide
  Antisense Strand to SEQ ID NO: 446453
uuaaacaaacauuuauggg

SEQ ID NO: 446455 - RNA, 19 nt, Artificial Sequence
  Description of Artificial Sequence: Synthetic oligonucleotide
  Sense strand starting at position 2911 of SEQ ID NO: 316868
gugagauacucacuagccu

SEQ ID NO: 446456 - RNA, 19 nt, Artificial Sequence
  Description of Artificial Sequence: Synthetic oligonucleotide
  Antisense Strand to SEQ ID NO: 446455
aggcuagugaguaucucac

SEQ ID NO: 446457 - RNA, 19 nt, Artificial Sequence
  Description of Artificial Sequence: Synthetic oligonucleotide
  Sense strand starting at position 2991 of SEQ ID NO: 316868
ucuccaagugcugaguaaa

SEQ ID NO: 446458 - RNA, 19 nt, Artificial Sequence
  Description of Artificial Sequence: Synthetic oligonucleotide
  Antisense Strand to SEQ ID NO: 446457
uuuacucagcacuuggaga

SEQ ID NO: 446459 - RNA, 19 nt, Artificial Sequence
  Description of Artificial Sequence: Synthetic oligonucleotide
  Sense strand starting at position 2994 of SEQ ID NO: 316868
ccaagugcugaguaaauga

SEQ ID NO: 446460 - RNA, 19 nt, Artificial Sequence
  Description of Artificial Sequence: Synthetic oligonucleotide
  Antisense Strand to SEQ ID NO: 446459
ucauuuacucagcacuugg

SEQ ID NO: 446461 - RNA, 19 nt, Artificial Sequence
  Description of Artificial Sequence: Synthetic oligonucleotide
  Sense strand starting at position 3049 of SEQ ID NO: 316868
guguaagggucucuuuauc

SEQ ID NO: 446462 - RNA, 19 nt, Artificial Sequence
  Description of Artificial Sequence: Synthetic oligonucleotide
  Antisense Strand to SEQ ID NO: 446461
gauaaagagacccuuacac

SEQ ID NO: 446463 - RNA, 19 nt, Artificial Sequence
  Description of Artificial Sequence: Synthetic oligonucleotide
  Sense strand starting at position 3236 of SEQ ID NO: 316868
cgaccuucccugggacaaa

SEQ ID NO: 446464 - RNA, 19 nt, Artificial Sequence
  Description of Artificial Sequence: Synthetic oligonucleotide
  Antisense Strand to SEQ ID NO: 446463
uuugucccagggaaggucg

SEQ ID NO: 446465 - RNA, 19 nt, Artificial Sequence
  Description of Artificial Sequence: Synthetic oligonucleotide
  Sense strand starting at position 3268 of SEQ ID NO: 316868
aggagucuucgcgugagca

SEQ ID NO: 446466 - RNA, 19 nt, Artificial Sequence
  Description of Artificial Sequence: Synthetic oligonucleotide
  Antisense Strand to SEQ ID NO: 446465
ugcucacgcgaagacuccu

SEQ ID NO: 446467 - RNA, 19 nt, Artificial Sequence
  Description of Artificial Sequence: Synthetic oligonucleotide
  Sense strand starting at position 3271 of SEQ ID NO: 316868
agucuucgcgugagcaagu

SEQ ID NO: 446468 - RNA, 19 nt, Artificial Sequence
  Description of Artificial Sequence: Synthetic oligonucleotide
  Antisense Strand to SEQ ID NO: 446467
acuugcucacgcgaagacu

SEQ ID NO: 446469 - RNA, 19 nt, Artificial Sequence
  Description of Artificial Sequence: Synthetic oligonucleotide
  Sense strand starting at position 3276 of SEQ ID NO: 316868
ucgcgugagcaaguucaga

SEQ ID NO: 446470 - RNA, 19 nt, Artificial Sequence
  Description of Artificial Sequence: Synthetic oligonucleotide
  Antisense Strand to SEQ ID NO: 446469
ucugaacuugcucacgcga

SEQ ID NO: 446471 - RNA, 19 nt, Artificial Sequence
  Description of Artificial Sequence: Synthetic oligonucleotide
  Sense strand starting at position 3323 of SEQ ID NO: 316868
gguugauggguagagguua

SEQ ID NO: 446472 - RNA, 19 nt, Artificial Sequence
  Description of Artificial Sequence: Synthetic oligonucleotide
  Antisense Strand to SEQ ID NO: 446471
uaaccucuacccaucaacc

SEQ ID NO: 446473 - RNA, 19 nt, Artificial Sequence
  Description of Artificial Sequence: Synthetic oligonucleotide
  Sense strand starting at position 3413 of SEQ ID NO: 316868
cgcagaggguuauugagaa

SEQ ID NO: 446474 - RNA, 19 nt, Artificial Sequence
  Description of Artificial Sequence: Synthetic oligonucleotide
  Antisense Strand to SEQ ID NO: 446473
uucucaauaacccucugcg

SEQ ID NO: 446475 - RNA, 19 nt, Artificial Sequence
  Description of Artificial Sequence: Synthetic oligonucleotide
  Sense strand starting at position 3438 of SEQ ID NO: 316868
ugagaucauuaagcuaaau

SEQ ID NO: 446476 - RNA, 19 nt, Artificial Sequence
  Description of Artificial Sequence: Synthetic oligonucleotide
  Antisense Strand to SEQ ID NO: 446475
auuuagcuuaaugaucuca

SEQ ID NO: 446477 - RNA, 19 nt, Artificial Sequence
  Description of Artificial Sequence: Synthetic oligonucleotide
  Sense strand starting at position 3448 of SEQ ID NO: 316868
aagcuaaaugcguagcaua

SEQ ID NO: 446478 - RNA, 19 nt, Artificial Sequence
  Description of Artificial Sequence: Synthetic oligonucleotide
  Antisense Strand to SEQ ID NO: 446477
uaugcuacgcauuuagcuu

SEQ ID NO: 446479 - RNA, 19 nt, Artificial Sequence
  Description of Artificial Sequence: Synthetic oligonucleotide
  Sense strand starting at position 3496 of SEQ ID NO: 316868
uucuaagccucaguaaagu

SEQ ID NO: 446480 - RNA, 19 nt, Artificial Sequence
  Description of Artificial Sequence: Synthetic oligonucleotide
  Antisense Strand to SEQ ID NO: 446479
acuuuacugaggcuuagaa

SEQ ID NO: 446481 - RNA, 19 nt, Artificial Sequence
  Description of Artificial Sequence: Synthetic oligonucleotide
  Sense strand starting at position 3 of SEQ ID NO: 316869
ggaacugugcucugggaac

SEQ ID NO: 446482 - RNA, 19 nt, Artificial Sequence
  Description of Artificial Sequence: Synthetic oligonucleotide
  Antisense Strand to SEQ ID NO: 446481
guucccagagcacaguucc

SEQ ID NO: 446483 - RNA, 19 nt, Artificial Sequence
  Description of Artificial Sequence: Synthetic oligonucleotide
  Sense strand starting at position 147 of SEQ ID NO: 316869
gcagaagggcuaugcaaga

SEQ ID NO: 446484 - RNA, 19 nt, Artificial Sequence
  Description of Artificial Sequence: Synthetic oligonucleotide
  Antisense Strand to SEQ ID NO: 446483
ucuugcauagcccuucugc

SEQ ID NO: 446485 - RNA, 19 nt, Artificial Sequence
  Description of Artificial Sequence: Synthetic oligonucleotide
  Sense strand starting at position 273 of SEQ ID NO: 316869
aggugcucauucccagauu

SEQ ID NO: 446486 - RNA, 19 nt, Artificial Sequence
  Description of Artificial Sequence: Synthetic oligonucleotide
  Antisense Strand to SEQ ID NO: 446485
aaucugggaaugagcaccu

SEQ ID NO: 446487 - RNA, 19 nt, Artificial Sequence
  Description of Artificial Sequence: Synthetic oligonucleotide
  Sense strand starting at position 431 of SEQ ID NO: 316869
gccaaugugcaccaggauu

SEQ ID NO: 446488 - RNA, 19 nt, Artificial Sequence
  Description of Artificial Sequence: Synthetic oligonucleotide
  Antisense Strand to SEQ ID NO: 446487
aauccuggugcacauuggc

SEQ ID NO: 446489 - RNA, 19 nt, Artificial Sequence
  Description of Artificial Sequence: Synthetic oligonucleotide
  Sense strand starting at position 641 of SEQ ID NO: 316869
cagggaacauguucuguca

SEQ ID NO: 446490 - RNA, 19 nt, Artificial Sequence
  Description of Artificial Sequence: Synthetic oligonucleotide
  Antisense Strand to SEQ ID NO: 446489
ugacagaacauguucccug

SEQ ID NO: 446491 - RNA, 19 nt, Artificial Sequence
  Description of Artificial Sequence: Synthetic oligonucleotide
  Sense strand starting at position 644 of SEQ ID NO: 316869
ggaacauguucugucauug

SEQ ID NO: 446492 - RNA, 19 nt, Artificial Sequence
  Description of Artificial Sequence: Synthetic oligonucleotide
  Antisense Strand to SEQ ID NO: 446491
caaugacagaacauguucc

SEQ ID NO: 446493 - RNA, 19 nt, Artificial Sequence
  Description of Artificial Sequence: Synthetic oligonucleotide
  Sense strand starting at position 745 of SEQ ID NO: 316869
agacuaaaccucugccagu

SEQ ID NO: 446494 - RNA, 19 nt, Artificial Sequence
  Description of Artificial Sequence: Synthetic oligonucleotide
  Antisense Strand to SEQ ID NO: 446493
acuggcagagguuuagucu

SEQ ID NO: 446495 - RNA, 19 nt, Artificial Sequence
  Description of Artificial Sequence: Synthetic oligonucleotide
  Sense strand starting at position 867 of SEQ ID NO: 316869
cagggcaguccugggaaua

SEQ ID NO: 446496 - RNA, 19 nt, Artificial Sequence
  Description of Artificial Sequence: Synthetic oligonucleotide
  Antisense Strand to SEQ ID NO: 446495
uauucccaggacugcccug

SEQ ID NO: 446497 - RNA, 19 nt, Artificial Sequence
  Description of Artificial Sequence: Synthetic oligonucleotide
  Sense strand starting at position 868 of SEQ ID NO: 316869
agggcaguccugggaauag

SEQ ID NO: 446498 - RNA, 19 nt, Artificial Sequence
  Description of Artificial Sequence: Synthetic oligonucleotide
  Antisense Strand to SEQ ID NO: 446497
cuauucccaggacugcccu

SEQ ID NO: 446499 - RNA, 19 nt, Artificial Sequence
  Description of Artificial Sequence: Synthetic oligonucleotide
  Sense strand starting at position 1097 of SEQ ID NO: 316869
cgagcugauuuggaggaaa

SEQ ID NO: 446500 - RNA, 19 nt, Artificial Sequence
  Description of Artificial Sequence: Synthetic oligonucleotide
  Antisense Strand to SEQ ID NO: 446499
uuuccuccaaaucagcucg

SEQ ID NO: 446501 - RNA, 19 nt, Artificial Sequence
  Description of Artificial Sequence: Synthetic oligonucleotide
  Sense strand starting at position 1399 of SEQ ID NO: 316869
cguuucaacgaucaggaaa

SEQ ID NO: 446502 - RNA, 19 nt, Artificial Sequence
  Description of Artificial Sequence: Synthetic oligonucleotide
  Antisense Strand to SEQ ID NO: 446501
uuuccugaucguugaaacg

SEQ ID NO: 446503 - RNA, 19 nt, Artificial Sequence
  Description of Artificial Sequence: Synthetic oligonucleotide
  Sense strand starting at position 1521 of SEQ ID NO: 316869
cgaggaaggucuccaguuu

SEQ ID NO: 446504 - RNA, 19 nt, Artificial Sequence
  Description of Artificial Sequence: Synthetic oligonucleotide
  Antisense Strand to SEQ ID NO: 446503
aaacuggagaccuuccucg

SEQ ID NO: 446505 - RNA, 19 nt, Artificial Sequence
  Description of Artificial Sequence: Synthetic oligonucleotide
  Sense strand starting at position 1533 of SEQ ID NO: 316869
ccaguuucccucgaagcuu

SEQ ID NO: 446506 - RNA, 19 nt, Artificial Sequence
  Description of Artificial Sequence: Synthetic oligonucleotide
  Antisense Strand to SEQ ID NO: 446505
aagcuucgagggaaacugg

SEQ ID NO: 446507 - RNA, 19 nt, Artificial Sequence
  Description of Artificial Sequence: Synthetic oligonucleotide
  Sense strand starting at position 1614 of SEQ ID NO: 316869
uuccucauucuuugcgaaa

SEQ ID NO: 446508 - RNA, 19 nt, Artificial Sequence
  Description of Artificial Sequence: Synthetic oligonucleotide
  Antisense Strand to SEQ ID NO: 446507
uuucgcaaagaaugaggaa

SEQ ID NO: 446509 - RNA, 19 nt, Artificial Sequence
  Description of Artificial Sequence: Synthetic oligonucleotide
  Sense strand starting at position 1615 of SEQ ID NO: 316869
uccucauucuuugcgaaau

SEQ ID NO: 446510 - RNA, 19 nt, Artificial Sequence
  Description of Artificial Sequence: Synthetic oligonucleotide
  Antisense Strand to SEQ ID NO: 446509
auuucgcaaagaaugagga

SEQ ID NO: 446511 - RNA, 19 nt, Artificial Sequence
  Description of Artificial Sequence: Synthetic oligonucleotide
  Sense strand starting at position 2266 of SEQ ID NO: 316869
gucuguaagccucagcuca

SEQ ID NO: 446512 - RNA, 19 nt, Artificial Sequence
  Description of Artificial Sequence: Synthetic oligonucleotide
  Antisense Strand to SEQ ID NO: 446511
ugagcugaggcuuacagac

SEQ ID NO: 446513 - RNA, 19 nt, Artificial Sequence
  Description of Artificial Sequence: Synthetic oligonucleotide
  Sense strand starting at position 2268 of SEQ ID NO: 316869
cuguaagccucagcucaga

SEQ ID NO: 446514 - RNA, 19 nt, Artificial Sequence
  Description of Artificial Sequence: Synthetic oligonucleotide
  Antisense Strand to SEQ ID NO: 446513
ucugagcugaggcuuacag

SEQ ID NO: 446515 - RNA, 19 nt, Artificial Sequence
  Description of Artificial Sequence: Synthetic oligonucleotide
  Sense strand starting at position 2311 of SEQ ID NO: 316869
cugacacacggaugugaau

SEQ ID NO: 446516 - RNA, 19 nt, Artificial Sequence
  Description of Artificial Sequence: Synthetic oligonucleotide
  Antisense Strand to SEQ ID NO: 446515
auucacauccgugugucag

SEQ ID NO: 446517 - RNA, 19 nt, Artificial Sequence
  Description of Artificial Sequence: Synthetic oligonucleotide
  Sense strand starting at position 2548 of SEQ ID NO: 316869
ucgcauucccagugggaaa

SEQ ID NO: 446518 - RNA, 19 nt, Artificial Sequence
  Description of Artificial Sequence: Synthetic oligonucleotide
  Antisense Strand to SEQ ID NO: 446517
uuucccacugggaaugcga

SEQ ID NO: 446519 - RNA, 19 nt, Artificial Sequence
  Description of Artificial Sequence: Synthetic oligonucleotide
  Sense strand starting at position 2609 of SEQ ID NO: 316869
gggagcuggugucugaagu

SEQ ID NO: 446520 - RNA, 19 nt, Artificial Sequence
  Description of Artificial Sequence: Synthetic oligonucleotide
  Antisense Strand to SEQ ID NO: 446519
acuucagacaccagcuccc

SEQ ID NO: 446521 - RNA, 19 nt, Artificial Sequence
  Description of Artificial Sequence: Synthetic oligonucleotide
  Sense strand starting at position 2839 of SEQ ID NO: 316869
cuguuaggcugucuauaaa

SEQ ID NO: 446522 - RNA, 19 nt, Artificial Sequence
  Description of Artificial Sequence: Synthetic oligonucleotide
  Antisense Strand to SEQ ID NO: 446521
uuuauagacagccuaacag

SEQ ID NO: 446523 - RNA, 19 nt, Artificial Sequence
  Description of Artificial Sequence: Synthetic oligonucleotide
  Sense strand starting at position 2923 of SEQ ID NO: 316869
ggccuuuccugaccuaaca

SEQ ID NO: 446524 - RNA, 19 nt, Artificial Sequence
  Description of Artificial Sequence: Synthetic oligonucleotide
  Antisense Strand to SEQ ID NO: 446523
uguuaggucaggaaaggcc

SEQ ID NO: 446525 - RNA, 19 nt, Artificial Sequence
  Description of Artificial Sequence: Synthetic oligonucleotide
  Sense strand starting at position 2958 of SEQ ID NO: 316869
guucgagaagcugagaauu

SEQ ID NO: 446526 - RNA, 19 nt, Artificial Sequence
  Description of Artificial Sequence: Synthetic oligonucleotide
  Antisense Strand to SEQ ID NO: 446525
aauucucagcuucucgaac

SEQ ID NO: 446527 - RNA, 19 nt, Artificial Sequence
  Description of Artificial Sequence: Synthetic oligonucleotide
  Sense strand starting at position 2960 of SEQ ID NO: 316869
ucgagaagcugagaauuua

SEQ ID NO: 446528 - RNA, 19 nt, Artificial Sequence
  Description of Artificial Sequence: Synthetic oligonucleotide
  Antisense Strand to SEQ ID NO: 446527
uaaauucucagcuucucga

SEQ ID NO: 446529 - RNA, 19 nt, Artificial Sequence
  Description of Artificial Sequence: Synthetic oligonucleotide
  Sense strand starting at position 3075 of SEQ ID NO: 316869
uuguuugacagucagucau

SEQ ID NO: 446530 - RNA, 19 nt, Artificial Sequence
  Description of Artificial Sequence: Synthetic oligonucleotide
  Antisense Strand to SEQ ID NO: 446529
augacugacugucaaacaa

SEQ ID NO: 446531 - RNA, 19 nt, Artificial Sequence
  Description of Artificial Sequence: Synthetic oligonucleotide
  Sense strand starting at position 3077 of SEQ ID NO: 316869
guuugacagucagucauuu

SEQ ID NO: 446532 - RNA, 19 nt, Artificial Sequence
  Description of Artificial Sequence: Synthetic oligonucleotide
  Antisense Strand to SEQ ID NO: 446531
aaaugacugacugucaaac

SEQ ID NO: 446533 - RNA, 19 nt, Artificial Sequence
  Description of Artificial Sequence: Synthetic oligonucleotide
  Sense strand starting at position 3346 of SEQ ID NO: 316869
aaacaagagcgucaaguua

SEQ ID NO: 446534 - RNA, 19 nt, Artificial Sequence
  Description of Artificial Sequence: Synthetic oligonucleotide
  Antisense Strand to SEQ ID NO: 446533
uaacuugacgcucuuguuu

SEQ ID NO: 446535 - RNA, 19 nt, Artificial Sequence
  Description of Artificial Sequence: Synthetic oligonucleotide
  Sense strand starting at position 3434 of SEQ ID NO: 316869
cagagaguuugcccugaag

SEQ ID NO: 446536 - RNA, 19 nt, Artificial Sequence
  Description of Artificial Sequence: Synthetic oligonucleotide
  Antisense Strand to SEQ ID NO: 446535
cuucagggcaaacucucug

SEQ ID NO: 446537 - RNA, 19 nt, Artificial Sequence
  Description of Artificial Sequence: Synthetic oligonucleotide
  Sense strand starting at position 3436 of SEQ ID NO: 316869
gagaguuugcccugaagcc

SEQ ID NO: 446538 - RNA, 19 nt, Artificial Sequence
  Description of Artificial Sequence: Synthetic oligonucleotide
  Antisense Strand to SEQ ID NO: 446537
ggcuucagggcaaacucuc

SEQ ID NO: 446539 - RNA, 19 nt, Artificial Sequence
  Description of Artificial Sequence: Synthetic oligonucleotide
  Sense strand starting at position 3437 of SEQ ID NO: 316869
agaguuugcccugaagcca

SEQ ID NO: 446540 - RNA, 19 nt, Artificial Sequence
  Description of Artificial Sequence: Synthetic oligonucleotide
  Antisense Strand to SEQ ID NO: 446539
uggcuucagggcaaacucu

SEQ ID NO: 446541 - RNA, 19 nt, Artificial Sequence
  Description of Artificial Sequence: Synthetic oligonucleotide
  Sense strand starting at position 3452 of SEQ ID NO: 316869
gccagacacagguguaaau

SEQ ID NO: 446542 - RNA, 19 nt, Artificial Sequence
  Description of Artificial Sequence: Synthetic oligonucleotide
  Antisense Strand to SEQ ID NO: 446541
auuuacaccugugucuggc

SEQ ID NO: 446543 - RNA, 19 nt, Artificial Sequence
  Description of Artificial Sequence: Synthetic oligonucleotide
  Sense strand starting at position 3461 of SEQ ID NO: 316869
agguguaaaugagacaaga

SEQ ID NO: 446544 - RNA, 19 nt, Artificial Sequence
  Description of Artificial Sequence: Synthetic oligonucleotide
  Antisense Strand to SEQ ID NO: 446543
ucuugucucauuuacaccu

SEQ ID NO: 446545 - RNA, 19 nt, Artificial Sequence
  Description of Artificial Sequence: Synthetic oligonucleotide
  Sense strand starting at position 3555 of SEQ ID NO: 316869
gaugaagaauuuggauaac

SEQ ID NO: 446546 - RNA, 19 nt, Artificial Sequence
  Description of Artificial Sequence: Synthetic oligonucleotide
  Antisense Strand to SEQ ID NO: 446545
guuauccaaauucuucauc

SEQ ID NO: 446547 - RNA, 19 nt, Artificial Sequence
  Description of Artificial Sequence: Synthetic oligonucleotide
  Sense strand starting at position 3567 of SEQ ID NO: 316869
ggauaacaguucccaucuu

SEQ ID NO: 446548 - RNA, 19 nt, Artificial Sequence
  Description of Artificial Sequence: Synthetic oligonucleotide
  Antisense Strand to SEQ ID NO: 446547
aagaugggaacuguuaucc

SEQ ID NO: 446549 - RNA, 19 nt, Artificial Sequence
  Description of Artificial Sequence: Synthetic oligonucleotide
  Sense strand starting at position 3578 of SEQ ID NO: 316869
cccaucuugccaugaggaa

SEQ ID NO: 446550 - RNA, 19 nt, Artificial Sequence
  Description of Artificial Sequence: Synthetic oligonucleotide
  Antisense Strand to SEQ ID NO: 446549
uuccucauggcaagauggg

SEQ ID NO: 446551 - RNA, 19 nt, Artificial Sequence
  Description of Artificial Sequence: Synthetic oligonucleotide
  Sense strand starting at position 3621 of SEQ ID NO: 316869
cuggacaucuaggcugaaa

SEQ ID NO: 446552 - RNA, 19 nt, Artificial Sequence
  Description of Artificial Sequence: Synthetic oligonucleotide
  Antisense Strand to SEQ ID NO: 446551
uuucagccuagauguccag

SEQ ID NO: 446553 - RNA, 19 nt, Artificial Sequence
  Description of Artificial Sequence: Synthetic oligonucleotide
  Sense strand starting at position 3824 of SEQ ID NO: 316869
cccauaaauguuuguuuaa

SEQ ID NO: 446554 - RNA, 19 nt, Artificial Sequence
  Description of Artificial Sequence: Synthetic oligonucleotide
  Antisense Strand to SEQ ID NO: 446553
uuaaacaaacauuuauggg

SEQ ID NO: 446555 - RNA, 19 nt, Artificial Sequence
  Description of Artificial Sequence: Synthetic oligonucleotide
  Sense strand starting at position 3892 of SEQ ID NO: 316869
gugagauacucacuagccu

SEQ ID NO: 446556 - RNA, 19 nt, Artificial Sequence
  Description of Artificial Sequence: Synthetic oligonucleotide
  Antisense Strand to SEQ ID NO: 446555
aggcuagugaguaucucac

SEQ ID NO: 446557 - RNA, 19 nt, Artificial Sequence
  Description of Artificial Sequence: Synthetic oligonucleotide
  Sense strand starting at position 3972 of SEQ ID NO: 316869
ucuccaagugcugaguaaa

SEQ ID NO: 446558 - RNA, 19 nt, Artificial Sequence
  Description of Artificial Sequence: Synthetic oligonucleotide
  Antisense Strand to SEQ ID NO: 446557
uuuacucagcacuuggaga

SEQ ID NO: 446559 - RNA, 19 nt, Artificial Sequence
  Description of Artificial Sequence: Synthetic oligonucleotide
  Sense strand starting at position 3975 of SEQ ID NO: 316869
ccaagugcugaguaaauga

SEQ ID NO: 446560 - RNA, 19 nt, Artificial Sequence
  Description of Artificial Sequence: Synthetic oligonucleotide
  Antisense Strand to SEQ ID NO: 446559
ucauuuacucagcacuugg

SEQ ID NO: 446561 - RNA, 19 nt, Artificial Sequence
  Description of Artificial Sequence: Synthetic oligonucleotide
  Sense strand starting at position 112 of SEQ ID NO: 316870
aaaguaggaccaugucuua

SEQ ID NO: 446562 - RNA, 19 nt, Artificial Sequence
  Description of Artificial Sequence: Synthetic oligonucleotide
  Antisense Strand to SEQ ID NO: 446561
uaagacaugguccuacuuu

SEQ ID NO: 446563 - RNA, 19 nt, Artificial Sequence
  Description of Artificial Sequence: Synthetic oligonucleotide
  Sense strand starting at position 115 of SEQ ID NO: 316870
guaggaccaugucuuaauc

SEQ ID NO: 446564 - RNA, 19 nt, Artificial Sequence
  Description of Artificial Sequence: Synthetic oligonucleotide
  Antisense Strand to SEQ ID NO: 446563
gauuaagacaugguccuac

SEQ ID NO: 446565 - RNA, 19 nt, Artificial Sequence
  Description of Artificial Sequence: Synthetic oligonucleotide
  Sense strand starting at position 137 of SEQ ID NO: 316870
uuuguauuccuagaacuug

SEQ ID NO: 446566 - RNA, 19 nt, Artificial Sequence
  Description of Artificial Sequence: Synthetic oligonucleotide
  Antisense Strand to SEQ ID NO: 446565
caaguucuaggaauacaaa

SEQ ID NO: 446567 - RNA, 19 nt, Artificial Sequence
  Description of Artificial Sequence: Synthetic oligonucleotide
  Sense strand starting at position 311 of SEQ ID NO: 316870
cuaccacauucugcgauuu

SEQ ID NO: 446568 - RNA, 19 nt, Artificial Sequence
  Description of Artificial Sequence: Synthetic oligonucleotide
  Antisense Strand to SEQ ID NO: 446567
aaaucgcagaaugugguag

SEQ ID NO: 446569 - RNA, 19 nt, Artificial Sequence
  Description of Artificial Sequence: Synthetic oligonucleotide
  Sense strand starting at position 718 of SEQ ID NO: 316870
gucuaaugggcucauuaaa

SEQ ID NO: 446570 - RNA, 19 nt, Artificial Sequence
  Description of Artificial Sequence: Synthetic oligonucleotide
  Antisense Strand to SEQ ID NO: 446569
uuuaaugagcccauuagac

SEQ ID NO: 446571 - RNA, 19 nt, Artificial Sequence
  Description of Artificial Sequence: Synthetic oligonucleotide
  Sense strand starting at position 798 of SEQ ID NO: 316870
guguuuaguggauacuuaa

SEQ ID NO: 446572 - RNA, 19 nt, Artificial Sequence
  Description of Artificial Sequence: Synthetic oligonucleotide
  Antisense Strand to SEQ ID NO: 446571
uuaaguauccacuaaacac

SEQ ID NO: 446573 - RNA, 19 nt, Artificial Sequence
  Description of Artificial Sequence: Synthetic oligonucleotide
  Sense strand starting at position 1040 of SEQ ID NO: 316870
acacuauucuagguuacag

SEQ ID NO: 446574 - RNA, 19 nt, Artificial Sequence
  Description of Artificial Sequence: Synthetic oligonucleotide
  Antisense Strand to SEQ ID NO: 446573
cuguaaccuagaauagugu

SEQ ID NO: 446575 - RNA, 19 nt, Artificial Sequence
  Description of Artificial Sequence: Synthetic oligonucleotide
  Sense strand starting at position 1042 of SEQ ID NO: 316870
acuauucuagguuacagua

SEQ ID NO: 446576 - RNA, 19 nt, Artificial Sequence
  Description of Artificial Sequence: Synthetic oligonucleotide
  Antisense Strand to SEQ ID NO: 446575
uacuguaaccuagaauagu

SEQ ID NO: 446577 - RNA, 19 nt, Artificial Sequence
  Description of Artificial Sequence: Synthetic oligonucleotide
  Sense strand starting at position 1050 of SEQ ID NO: 316870
agguuacaguagucaacau

SEQ ID NO: 446578 - RNA, 19 nt, Artificial Sequence
  Description of Artificial Sequence: Synthetic oligonucleotide
  Antisense Strand to SEQ ID NO: 446577
auguugacuacuguaaccu

SEQ ID NO: 446579 - RNA, 19 nt, Artificial Sequence
  Description of Artificial Sequence: Synthetic oligonucleotide
  Sense strand starting at position 1118 of SEQ ID NO: 316870
cauccuaagagucgaguga

SEQ ID NO: 446580 - RNA, 19 nt, Artificial Sequence
  Description of Artificial Sequence: Synthetic oligonucleotide
  Antisense Strand to SEQ ID NO: 446579
ucacucgacucuuaggaug

SEQ ID NO: 446581 - RNA, 19 nt, Artificial Sequence
  Description of Artificial Sequence: Synthetic oligonucleotide
  Sense strand starting at position 1119 of SEQ ID NO: 316870
auccuaagagucgagugau

SEQ ID NO: 446582 - RNA, 19 nt, Artificial Sequence
  Description of Artificial Sequence: Synthetic oligonucleotide
  Antisense Strand to SEQ ID NO: 446581
aucacucgacucuuaggau

SEQ ID NO: 446583 - RNA, 19 nt, Artificial Sequence
  Description of Artificial Sequence: Synthetic oligonucleotide
  Sense strand starting at position 1122 of SEQ ID NO: 316870
cuaagagucgagugauuaa

SEQ ID NO: 446584 - RNA, 19 nt, Artificial Sequence
  Description of Artificial Sequence: Synthetic oligonucleotide
  Antisense Strand to SEQ ID NO: 446583
uuaaucacucgacucuuag

SEQ ID NO: 446585 - RNA, 19 nt, Artificial Sequence
  Description of Artificial Sequence: Synthetic oligonucleotide
  Sense strand starting at position 1373 of SEQ ID NO: 316870
auauuaaugcaugaagcau

SEQ ID NO: 446586 - RNA, 19 nt, Artificial Sequence
  Description of Artificial Sequence: Synthetic oligonucleotide
  Antisense Strand to SEQ ID NO: 446585
augcuucaugcauuaauau

SEQ ID NO: 446587 - RNA, 19 nt, Artificial Sequence
  Description of Artificial Sequence: Synthetic oligonucleotide
  Sense strand starting at position 1403 of SEQ ID NO: 316870
agauauaacugugcaagga

SEQ ID NO: 446588 - RNA, 19 nt, Artificial Sequence
  Description of Artificial Sequence: Synthetic oligonucleotide
  Antisense Strand to SEQ ID NO: 446587
uccuugcacaguuauaucu

SEQ ID NO: 446589 - RNA, 19 nt, Artificial Sequence
  Description of Artificial Sequence: Synthetic oligonucleotide
  Sense strand starting at position 1407 of SEQ ID NO: 316870
auaacugugcaaggaaaua

SEQ ID NO: 446590 - RNA, 19 nt, Artificial Sequence
  Description of Artificial Sequence: Synthetic oligonucleotide
  Antisense Strand to SEQ ID NO: 446589
uauuuccuugcacaguuau

SEQ ID NO: 446591 - RNA, 19 nt, Artificial Sequence
  Description of Artificial Sequence: Synthetic oligonucleotide
  Sense strand starting at position 1484 of SEQ ID NO: 316870
ggaugugaauuuggacaaa

SEQ ID NO: 446592 - RNA, 19 nt, Artificial Sequence
  Description of Artificial Sequence: Synthetic oligonucleotide
  Antisense Strand to SEQ ID NO: 446591
uuuguccaaauucacaucc

SEQ ID NO: 446593 - RNA, 19 nt, Artificial Sequence
  Description of Artificial Sequence: Synthetic oligonucleotide
  Sense strand starting at position 1689 of SEQ ID NO: 316870
ucgucuuaccgggacaaac

SEQ ID NO: 446594 - RNA, 19 nt, Artificial Sequence
  Description of Artificial Sequence: Synthetic oligonucleotide
  Antisense Strand to SEQ ID NO: 446593
guuugucccgguaagacga

SEQ ID NO: 446595 - RNA, 19 nt, Artificial Sequence
  Description of Artificial Sequence: Synthetic oligonucleotide
  Sense strand starting at position 2317 of SEQ ID NO: 316870
gagcuuaaaugaguuaaau

SEQ ID NO: 446596 - RNA, 19 nt, Artificial Sequence
  Description of Artificial Sequence: Synthetic oligonucleotide
  Antisense Strand to SEQ ID NO: 446595
auuuaacucauuuaagcuc

SEQ ID NO: 446597 - RNA, 19 nt, Artificial Sequence
  Description of Artificial Sequence: Synthetic oligonucleotide
  Sense strand starting at position 2430 of SEQ ID NO: 316870
ugaccuugauacucaaagu

SEQ ID NO: 446598 - RNA, 19 nt, Artificial Sequence
  Description of Artificial Sequence: Synthetic oligonucleotide
  Antisense Strand to SEQ ID NO: 446597
acuuugaguaucaagguca

SEQ ID NO: 446599 - RNA, 19 nt, Artificial Sequence
  Description of Artificial Sequence: Synthetic oligonucleotide
  Sense strand starting at position 2542 of SEQ ID NO: 316870
gcaucuuagcaagaugaug

SEQ ID NO: 446600 - RNA, 19 nt, Artificial Sequence
  Description of Artificial Sequence: Synthetic oligonucleotide
  Antisense Strand to SEQ ID NO: 446599
caucaucuugcuaagaugc

SEQ ID NO: 446601 - RNA, 19 nt, Artificial Sequence
  Description of Artificial Sequence: Synthetic oligonucleotide
  Sense strand starting at position 2560 of SEQ ID NO: 316870
gcuuaugcauauuuaaguu

SEQ ID NO: 446602 - RNA, 19 nt, Artificial Sequence
  Description of Artificial Sequence: Synthetic oligonucleotide
  Antisense Strand to SEQ ID NO: 446601
aacuuaaauaugcauaagc

SEQ ID NO: 446603 - RNA, 19 nt, Artificial Sequence
  Description of Artificial Sequence: Synthetic oligonucleotide
  Sense strand starting at position 2572 of SEQ ID NO: 316870
uuaaguuugggaugcauaa

SEQ ID NO: 446604 - RNA, 19 nt, Artificial Sequence
  Description of Artificial Sequence: Synthetic oligonucleotide
  Antisense Strand to SEQ ID NO: 446603
uuaugcaucccaaacuuaa

SEQ ID NO: 446605 - RNA, 19 nt, Artificial Sequence
  Description of Artificial Sequence: Synthetic oligonucleotide
  Sense strand starting at position 2809 of SEQ ID NO: 316870
ucagauaaaugugcuagaa

SEQ ID NO: 446606 - RNA, 19 nt, Artificial Sequence
  Description of Artificial Sequence: Synthetic oligonucleotide
  Antisense Strand to SEQ ID NO: 446605
uucuagcacauuuaucuga

SEQ ID NO: 446607 - RNA, 19 nt, Artificial Sequence
  Description of Artificial Sequence: Synthetic oligonucleotide
  Sense strand starting at position 2837 of SEQ ID NO: 316870
agcaaacaguaguuagaau

SEQ ID NO: 446608 - RNA, 19 nt, Artificial Sequence
  Description of Artificial Sequence: Synthetic oligonucleotide
  Antisense Strand to SEQ ID NO: 446607
auucuaacuacuguuugcu

SEQ ID NO: 446609 - RNA, 19 nt, Artificial Sequence
  Description of Artificial Sequence: Synthetic oligonucleotide
  Sense strand starting at position 2892 of SEQ ID NO: 316870
gcaggaucugguuauaucu

SEQ ID NO: 446610 - RNA, 19 nt, Artificial Sequence
  Description of Artificial Sequence: Synthetic oligonucleotide
  Antisense Strand to SEQ ID NO: 446609
agauauaaccagauccugc

SEQ ID NO: 446611 - RNA, 19 nt, Artificial Sequence
  Description of Artificial Sequence: Synthetic oligonucleotide
  Sense strand starting at position 2951 of SEQ ID NO: 316870
guggacacucuaugacaau

SEQ ID NO: 446612 - RNA, 19 nt, Artificial Sequence
  Description of Artificial Sequence: Synthetic oligonucleotide
  Antisense Strand to SEQ ID NO: 446611
auugucauagaguguccac

SEQ ID NO: 446613 - RNA, 19 nt, Artificial Sequence
  Description of Artificial Sequence: Synthetic oligonucleotide
  Sense strand starting at position 3102 of SEQ ID NO: 316870
ugcccaucgccugacauuu

SEQ ID NO: 446614 - RNA, 19 nt, Artificial Sequence
  Description of Artificial Sequence: Synthetic oligonucleotide
  Antisense Strand to SEQ ID NO: 446613
aaaugucaggcgaugggca

SEQ ID NO: 446615 - RNA, 19 nt, Artificial Sequence
  Description of Artificial Sequence: Synthetic oligonucleotide
  Sense strand starting at position 3230 of SEQ ID NO: 316870
gaaauuugaucccagggag

SEQ ID NO: 446616 - RNA, 19 nt, Artificial Sequence
  Description of Artificial Sequence: Synthetic oligonucleotide
  Antisense Strand to SEQ ID NO: 446615
cucccugggaucaaauuuc

SEQ ID NO: 446617 - RNA, 19 nt, Artificial Sequence
  Description of Artificial Sequence: Synthetic oligonucleotide
  Sense strand starting at position 3294 of SEQ ID NO: 316870
guauaagaauguguuacug

SEQ ID NO: 446618 - RNA, 19 nt, Artificial Sequence
  Description of Artificial Sequence: Synthetic oligonucleotide
  Antisense Strand to SEQ ID NO: 446617
caguaacacauucuuauac

SEQ ID NO: 446619 - RNA, 19 nt, Artificial Sequence
  Description of Artificial Sequence: Synthetic oligonucleotide
  Sense strand starting at position 3298 of SEQ ID NO: 316870
aagaauguguuacugaguu

SEQ ID NO: 446620 - RNA, 19 nt, Artificial Sequence
  Description of Artificial Sequence: Synthetic oligonucleotide
  Antisense Strand to SEQ ID NO: 446619
aacucaguaacacauucuu

SEQ ID NO: 446621 - RNA, 19 nt, Artificial Sequence
  Description of Artificial Sequence: Synthetic oligonucleotide
  Sense strand starting at position 3311 of SEQ ID NO: 316870
ugaguuggucaucaccaua

SEQ ID NO: 446622 - RNA, 19 nt, Artificial Sequence
  Description of Artificial Sequence: Synthetic oligonucleotide
  Antisense Strand to SEQ ID NO: 446621
uauggugaugaccaacuca

SEQ ID NO: 446623 - RNA, 19 nt, Artificial Sequence
  Description of Artificial Sequence: Synthetic oligonucleotide
  Sense strand starting at position 3440 of SEQ ID NO: 316870
uccucuuugaucgaagguu

SEQ ID NO: 446624 - RNA, 19 nt, Artificial Sequence
  Description of Artificial Sequence: Synthetic oligonucleotide
  Antisense Strand to SEQ ID NO: 446623
aaccuucgaucaaagagga

SEQ ID NO: 446625 - RNA, 19 nt, Artificial Sequence
  Description of Artificial Sequence: Synthetic oligonucleotide
  Sense strand starting at position 3619 of SEQ ID NO: 316870
ugcagcagugguuagaaua

SEQ ID NO: 446626 - RNA, 19 nt, Artificial Sequence
  Description of Artificial Sequence: Synthetic oligonucleotide
  Antisense Strand to SEQ ID NO: 446625
uauucuaaccacugcugca

SEQ ID NO: 446627 - RNA, 19 nt, Artificial Sequence
  Description of Artificial Sequence: Synthetic oligonucleotide
  Sense strand starting at position 3629 of SEQ ID NO: 316870
guuagaauaauaggcugaa

SEQ ID NO: 446628 - RNA, 19 nt, Artificial Sequence
  Description of Artificial Sequence: Synthetic oligonucleotide
  Antisense Strand to SEQ ID NO: 446627
uucagccuauuauucuaac

SEQ ID NO: 446629 - RNA, 19 nt, Artificial Sequence
  Description of Artificial Sequence: Synthetic oligonucleotide
  Sense strand starting at position 3681 of SEQ ID NO: 316870
ggacauagaagguguccau

SEQ ID NO: 446630 - RNA, 19 nt, Artificial Sequence
  Description of Artificial Sequence: Synthetic oligonucleotide
  Antisense Strand to SEQ ID NO: 446629
auggacaccuucuaugucc

SEQ ID NO: 446631 - RNA, 19 nt, Artificial Sequence
  Description of Artificial Sequence: Synthetic oligonucleotide
  Sense strand starting at position 3684 of SEQ ID NO: 316870
cauagaagguguccauauc

SEQ ID NO: 446632 - RNA, 19 nt, Artificial Sequence
  Description of Artificial Sequence: Synthetic oligonucleotide
  Antisense Strand to SEQ ID NO: 446631
gauauggacaccuucuaug

SEQ ID NO: 446633 - RNA, 19 nt, Artificial Sequence
  Description of Artificial Sequence: Synthetic oligonucleotide
  Sense strand starting at position 3685 of SEQ ID NO: 316870
auagaagguguccauaucu

SEQ ID NO: 446634 - RNA, 19 nt, Artificial Sequence
  Description of Artificial Sequence: Synthetic oligonucleotide
  Antisense Strand to SEQ ID NO: 446633
agauauggacaccuucuau

SEQ ID NO: 446635 - RNA, 19 nt, Artificial Sequence
  Description of Artificial Sequence: Synthetic oligonucleotide
  Sense strand starting at position 3754 of SEQ ID NO: 316870
aggucucuucaaggugaug

SEQ ID NO: 446636 - RNA, 19 nt, Artificial Sequence
  Description of Artificial Sequence: Synthetic oligonucleotide
  Antisense Strand to SEQ ID NO: 446635
caucaccuugaagagaccu

SEQ ID NO: 446637 - RNA, 19 nt, Artificial Sequence
  Description of Artificial Sequence: Synthetic oligonucleotide
  Sense strand starting at position 3850 of SEQ ID NO: 316870
ucaggaccauacuuguauu

SEQ ID NO: 446638 - RNA, 19 nt, Artificial Sequence
  Description of Artificial Sequence: Synthetic oligonucleotide
  Antisense Strand to SEQ ID NO: 446637
aauacaaguaugguccuga

SEQ ID NO: 446639 - RNA, 19 nt, Artificial Sequence
  Description of Artificial Sequence: Synthetic oligonucleotide
  Sense strand starting at position 3936 of SEQ ID NO: 316870
uguuucucuggugaaauag

SEQ ID NO: 446640 - RNA, 19 nt, Artificial Sequence
  Description of Artificial Sequence: Synthetic oligonucleotide
  Antisense Strand to SEQ ID NO: 446639
cuauuucaccagagaaaca

SEQ ID NO: 446641 - RNA, 19 nt, Artificial Sequence
  Description of Artificial Sequence: Synthetic oligonucleotide
  Sense strand starting at position 149 of SEQ ID NO: 316871
aaguucuaaggguaucacu

SEQ ID NO: 446642 - RNA, 19 nt, Artificial Sequence
  Description of Artificial Sequence: Synthetic oligonucleotide
  Antisense Strand to SEQ ID NO: 446641
agugauacccuuagaacuu

SEQ ID NO: 446643 - RNA, 19 nt, Artificial Sequence
  Description of Artificial Sequence: Synthetic oligonucleotide
  Sense strand starting at position 195 of SEQ ID NO: 316871
guacaauacugaguuaacu

SEQ ID NO: 446644 - RNA, 19 nt, Artificial Sequence
  Description of Artificial Sequence: Synthetic oligonucleotide
  Antisense Strand to SEQ ID NO: 446643
aguuaacucaguauuguac

SEQ ID NO: 446645 - RNA, 19 nt, Artificial Sequence
  Description of Artificial Sequence: Synthetic oligonucleotide
  Sense strand starting at position 392 of SEQ ID NO: 316871
agaucugacugccuauaag

SEQ ID NO: 446646 - RNA, 19 nt, Artificial Sequence
  Description of Artificial Sequence: Synthetic oligonucleotide
  Antisense Strand to SEQ ID NO: 446645
cuuauaggcagucagaucu

SEQ ID NO: 446647 - RNA, 19 nt, Artificial Sequence
  Description of Artificial Sequence: Synthetic oligonucleotide
  Sense strand starting at position 426 of SEQ ID NO: 316871
ggcuaaugucaugaaauau

SEQ ID NO: 446648 - RNA, 19 nt, Artificial Sequence
  Description of Artificial Sequence: Synthetic oligonucleotide
  Antisense Strand to SEQ ID NO: 446647
auauuucaugacauuagcc

SEQ ID NO: 446649 - RNA, 19 nt, Artificial Sequence
  Description of Artificial Sequence: Synthetic oligonucleotide
  Sense strand starting at position 634 of SEQ ID NO: 316871
guccaagaacucugcaaag

SEQ ID NO: 446650 - RNA, 19 nt, Artificial Sequence
  Description of Artificial Sequence: Synthetic oligonucleotide
  Antisense Strand to SEQ ID NO: 446649
cuuugcagaguucuuggac

SEQ ID NO: 446651 - RNA, 19 nt, Artificial Sequence
  Description of Artificial Sequence: Synthetic oligonucleotide
  Sense strand starting at position 726 of SEQ ID NO: 316871
ucuuaaugugaguaauauc

SEQ ID NO: 446652 - RNA, 19 nt, Artificial Sequence
  Description of Artificial Sequence: Synthetic oligonucleotide
  Antisense Strand to SEQ ID NO: 446651
gauauuacucacauuaaga

SEQ ID NO: 446653 - RNA, 19 nt, Artificial Sequence
  Description of Artificial Sequence: Synthetic oligonucleotide
  Sense strand starting at position 753 of SEQ ID NO: 316871
ccaaauaaaucauaggaga

SEQ ID NO: 446654 - RNA, 19 nt, Artificial Sequence
  Description of Artificial Sequence: Synthetic oligonucleotide
  Antisense Strand to SEQ ID NO: 446653
ucuccuaugauuuauuugg

SEQ ID NO: 446655 - RNA, 19 nt, Artificial Sequence
  Description of Artificial Sequence: Synthetic oligonucleotide
  Sense strand starting at position 1109 of SEQ ID NO: 316871
ucuauauuagugugagaaa

SEQ ID NO: 446656 - RNA, 19 nt, Artificial Sequence
  Description of Artificial Sequence: Synthetic oligonucleotide
  Antisense Strand to SEQ ID NO: 446655
uuucucacacuaauauaga

SEQ ID NO: 446657 - RNA, 19 nt, Artificial Sequence
  Description of Artificial Sequence: Synthetic oligonucleotide
  Sense strand starting at position 1145 of SEQ ID NO: 316871
cuacuaguugucuauacga

SEQ ID NO: 446658 - RNA, 19 nt, Artificial Sequence
  Description of Artificial Sequence: Synthetic oligonucleotide
  Antisense Strand to SEQ ID NO: 446657
ucguauagacaacuaguag

SEQ ID NO: 446659 - RNA, 19 nt, Artificial Sequence
  Description of Artificial Sequence: Synthetic oligonucleotide
  Sense strand starting at position 1147 of SEQ ID NO: 316871
acuaguugucuauacgauu

SEQ ID NO: 446660 - RNA, 19 nt, Artificial Sequence
  Description of Artificial Sequence: Synthetic oligonucleotide
  Antisense Strand to SEQ ID NO: 446659
aaucguauagacaacuagu

SEQ ID NO: 446661 - RNA, 19 nt, Artificial Sequence
  Description of Artificial Sequence: Synthetic oligonucleotide
  Sense strand starting at position 1185 of SEQ ID NO: 316871
cuaugugauacgugacaga

SEQ ID NO: 446662 - RNA, 19 nt, Artificial Sequence
  Description of Artificial Sequence: Synthetic oligonucleotide
  Antisense Strand to SEQ ID NO: 446661
ucugucacguaucacauag

SEQ ID NO: 446663 - RNA, 19 nt, Artificial Sequence
  Description of Artificial Sequence: Synthetic oligonucleotide
  Sense strand starting at position 1366 of SEQ ID NO: 316871
ccgaauguguaucucauuu

SEQ ID NO: 446664 - RNA, 19 nt, Artificial Sequence
  Description of Artificial Sequence: Synthetic oligonucleotide
  Antisense Strand to SEQ ID NO: 446663
aaaugagauacacauucgg

SEQ ID NO: 446665 - RNA, 19 nt, Artificial Sequence
  Description of Artificial Sequence: Synthetic oligonucleotide
  Sense strand starting at position 2113 of SEQ ID NO: 316871
ggccguuucugaacgugaa

SEQ ID NO: 446666 - RNA, 19 nt, Artificial Sequence
  Description of Artificial Sequence: Synthetic oligonucleotide
  Antisense Strand to SEQ ID NO: 446665
uucacguucagaaacggcc

SEQ ID NO: 446667 - RNA, 19 nt, Artificial Sequence
  Description of Artificial Sequence: Synthetic oligonucleotide
  Sense strand starting at position 2126 of SEQ ID NO: 316871
cgugaaguuccguuucuuu

SEQ ID NO: 446668 - RNA, 19 nt, Artificial Sequence
  Description of Artificial Sequence: Synthetic oligonucleotide
  Antisense Strand to SEQ ID NO: 446667
aaagaaacggaacuucacg

SEQ ID NO: 446669 - RNA, 19 nt, Artificial Sequence
  Description of Artificial Sequence: Synthetic oligonucleotide
  Sense strand starting at position 2258 of SEQ ID NO: 316871
ggagacuagacauguacuu

SEQ ID NO: 446670 - RNA, 19 nt, Artificial Sequence
  Description of Artificial Sequence: Synthetic oligonucleotide
  Antisense Strand to SEQ ID NO: 446669
aaguacaugucuagucucc

SEQ ID NO: 446671 - RNA, 19 nt, Artificial Sequence
  Description of Artificial Sequence: Synthetic oligonucleotide
  Sense strand starting at position 2297 of SEQ ID NO: 316871
ugacauuggucccuggaaa

SEQ ID NO: 446672 - RNA, 19 nt, Artificial Sequence
  Description of Artificial Sequence: Synthetic oligonucleotide
  Antisense Strand to SEQ ID NO: 446671
uuuccagggaccaauguca

SEQ ID NO: 446673 - RNA, 19 nt, Artificial Sequence
  Description of Artificial Sequence: Synthetic oligonucleotide
  Sense strand starting at position 2298 of SEQ ID NO: 316871
gacauuggucccuggaaag

SEQ ID NO: 446674 - RNA, 19 nt, Artificial Sequence
  Description of Artificial Sequence: Synthetic oligonucleotide
  Antisense Strand to SEQ ID NO: 446673
cuuuccagggaccaauguc

SEQ ID NO: 446675 - RNA, 19 nt, Artificial Sequence
  Description of Artificial Sequence: Synthetic oligonucleotide
  Sense strand starting at position 2434 of SEQ ID NO: 316871
ucuugugggaucugagaag

SEQ ID NO: 446676 - RNA, 19 nt, Artificial Sequence
  Description of Artificial Sequence: Synthetic oligonucleotide
  Antisense Strand to SEQ ID NO: 446675
cuucucagaucccacaaga

SEQ ID NO: 446677 - RNA, 19 nt, Artificial Sequence
  Description of Artificial Sequence: Synthetic oligonucleotide
  Sense strand starting at position 2479 of SEQ ID NO: 316871
guaguaacuaacgauguua

SEQ ID NO: 446678 - RNA, 19 nt, Artificial Sequence
  Description of Artificial Sequence: Synthetic oligonucleotide
  Antisense Strand to SEQ ID NO: 446677
uaacaucguuaguuacuac

SEQ ID NO: 446679 - RNA, 19 nt, Artificial Sequence
  Description of Artificial Sequence: Synthetic oligonucleotide
  Sense strand starting at position 2481 of SEQ ID NO: 316871
aguaacuaacgauguuacu

SEQ ID NO: 446680 - RNA, 19 nt, Artificial Sequence
  Description of Artificial Sequence: Synthetic oligonucleotide
  Antisense Strand to SEQ ID NO: 446679
aguaacaucguuaguuacu

SEQ ID NO: 446681 - RNA, 19 nt, Artificial Sequence
  Description of Artificial Sequence: Synthetic oligonucleotide
  Sense strand starting at position 2500 of SEQ ID NO: 316871
acuacuguggacugaaagu

SEQ ID NO: 446682 - RNA, 19 nt, Artificial Sequence
  Description of Artificial Sequence: Synthetic oligonucleotide
  Antisense Strand to SEQ ID NO: 446681
acuuucaguccacaguagu

SEQ ID NO: 446683 - RNA, 19 nt, Artificial Sequence
  Description of Artificial Sequence: Synthetic oligonucleotide
  Sense strand starting at position 2637 of SEQ ID NO: 316871
ggcaguaucaaauaguagu

SEQ ID NO: 446684 - RNA, 19 nt, Artificial Sequence
  Description of Artificial Sequence: Synthetic oligonucleotide
  Antisense Strand to SEQ ID NO: 446683
acuacuauuugauacugcc

SEQ ID NO: 446685 - RNA, 19 nt, Artificial Sequence
  Description of Artificial Sequence: Synthetic oligonucleotide
  Sense strand starting at position 2704 of SEQ ID NO: 316871
cuacuauaacccugggcaa

SEQ ID NO: 446686 - RNA, 19 nt, Artificial Sequence
  Description of Artificial Sequence: Synthetic oligonucleotide
  Antisense Strand to SEQ ID NO: 446685
uugcccaggguuauaguag

SEQ ID NO: 446687 - RNA, 19 nt, Artificial Sequence
  Description of Artificial Sequence: Synthetic oligonucleotide
  Sense strand starting at position 2719 of SEQ ID NO: 316871
gcaaguuaaccugugugcu

SEQ ID NO: 446688 - RNA, 19 nt, Artificial Sequence
  Description of Artificial Sequence: Synthetic oligonucleotide
  Antisense Strand to SEQ ID NO: 446687
agcacacagguuaacuugc

SEQ ID NO: 446689 - RNA, 19 nt, Artificial Sequence
  Description of Artificial Sequence: Synthetic oligonucleotide
  Sense strand starting at position 2798 of SEQ ID NO: 316871
ccuauuuauucugaggaau

SEQ ID NO: 446690 - RNA, 19 nt, Artificial Sequence
  Description of Artificial Sequence: Synthetic oligonucleotide
  Antisense Strand to SEQ ID NO: 446689
auuccucagaauaaauagg

SEQ ID NO: 446691 - RNA, 19 nt, Artificial Sequence
  Description of Artificial Sequence: Synthetic oligonucleotide
  Sense strand starting at position 2875 of SEQ ID NO: 316871
cuauuuaaguguuugcaua

SEQ ID NO: 446692 - RNA, 19 nt, Artificial Sequence
  Description of Artificial Sequence: Synthetic oligonucleotide
  Antisense Strand to SEQ ID NO: 446691
uaugcaaacacuuaaauag

SEQ ID NO: 446693 - RNA, 19 nt, Artificial Sequence
  Description of Artificial Sequence: Synthetic oligonucleotide
  Sense strand starting at position 3060 of SEQ ID NO: 316871
ggccuacucuguccaagaa

SEQ ID NO: 446694 - RNA, 19 nt, Artificial Sequence
  Description of Artificial Sequence: Synthetic oligonucleotide
  Antisense Strand to SEQ ID NO: 446693
uucuuggacagaguaggcc

SEQ ID NO: 446695 - RNA, 19 nt, Artificial Sequence
  Description of Artificial Sequence: Synthetic oligonucleotide
  Sense strand starting at position 3061 of SEQ ID NO: 316871
gccuacucuguccaagaau

SEQ ID NO: 446696 - RNA, 19 nt, Artificial Sequence
  Description of Artificial Sequence: Synthetic oligonucleotide
  Antisense Strand to SEQ ID NO: 446695
auucuuggacagaguaggc

SEQ ID NO: 446697 - RNA, 19 nt, Artificial Sequence
  Description of Artificial Sequence: Synthetic oligonucleotide
  Sense strand starting at position 3198 of SEQ ID NO: 316871
ugagaauaggaaugcuauc

SEQ ID NO: 446698 - RNA, 19 nt, Artificial Sequence
  Description of Artificial Sequence: Synthetic oligonucleotide
  Antisense Strand to SEQ ID NO: 446697
gauagcauuccuauucuca

SEQ ID NO: 446699 - RNA, 19 nt, Artificial Sequence
  Description of Artificial Sequence: Synthetic oligonucleotide
  Sense strand starting at position 3477 of SEQ ID NO: 316871
guucuuuagcaacaugaau

SEQ ID NO: 446700 - RNA, 19 nt, Artificial Sequence
  Description of Artificial Sequence: Synthetic oligonucleotide
  Antisense Strand to SEQ ID NO: 446699
auucauguugcuaaagaac

SEQ ID NO: 446701 - RNA, 19 nt, Artificial Sequence
  Description of Artificial Sequence: Synthetic oligonucleotide
  Sense strand starting at position 3519 of SEQ ID NO: 316871
accagaacuccugguugau

SEQ ID NO: 446702 - RNA, 19 nt, Artificial Sequence
  Description of Artificial Sequence: Synthetic oligonucleotide
  Antisense Strand to SEQ ID NO: 446701
aucaaccaggaguucuggu

SEQ ID NO: 446703 - RNA, 19 nt, Artificial Sequence
  Description of Artificial Sequence: Synthetic oligonucleotide
  Sense strand starting at position 3521 of SEQ ID NO: 316871
cagaacuccugguugauaa

SEQ ID NO: 446704 - RNA, 19 nt, Artificial Sequence
  Description of Artificial Sequence: Synthetic oligonucleotide
  Antisense Strand to SEQ ID NO: 446703
uuaucaaccaggaguucug

SEQ ID NO: 446705 - RNA, 19 nt, Artificial Sequence
  Description of Artificial Sequence: Synthetic oligonucleotide
  Sense strand starting at position 3522 of SEQ ID NO: 316871
agaacuccugguugauaag

SEQ ID NO: 446706 - RNA, 19 nt, Artificial Sequence
  Description of Artificial Sequence: Synthetic oligonucleotide
  Antisense Strand to SEQ ID NO: 446705
cuuaucaaccaggaguucu

SEQ ID NO: 446707 - RNA, 19 nt, Artificial Sequence
  Description of Artificial Sequence: Synthetic oligonucleotide
  Sense strand starting at position 3523 of SEQ ID NO: 316871
gaacuccugguugauaagu

SEQ ID NO: 446708 - RNA, 19 nt, Artificial Sequence
  Description of Artificial Sequence: Synthetic oligonucleotide
  Antisense Strand to SEQ ID NO: 446707
acuuaucaaccaggaguuc

SEQ ID NO: 446709 - RNA, 19 nt, Artificial Sequence
  Description of Artificial Sequence: Synthetic oligonucleotide
  Sense strand starting at position 3602 of SEQ ID NO: 316871
gaaauagaccuuuguugaa

SEQ ID NO: 446710 - RNA, 19 nt, Artificial Sequence
  Description of Artificial Sequence: Synthetic oligonucleotide
  Antisense Strand to SEQ ID NO: 446709
uucaacaaaggucuauuuc

SEQ ID NO: 446711 - RNA, 19 nt, Artificial Sequence
  Description of Artificial Sequence: Synthetic oligonucleotide
  Sense strand starting at position 3624 of SEQ ID NO: 316871
gccuguuauuuacugcaag

SEQ ID NO: 446712 - RNA, 19 nt, Artificial Sequence
  Description of Artificial Sequence: Synthetic oligonucleotide
  Antisense Strand to SEQ ID NO: 446711
cuugcaguaaauaacaggc

SEQ ID NO: 446713 - RNA, 19 nt, Artificial Sequence
  Description of Artificial Sequence: Synthetic oligonucleotide
  Sense strand starting at position 3703 of SEQ ID NO: 316871
cuuggagugagcuaaauau

SEQ ID NO: 446714 - RNA, 19 nt, Artificial Sequence
  Description of Artificial Sequence: Synthetic oligonucleotide
  Antisense Strand to SEQ ID NO: 446713
auauuuagcucacuccaag

SEQ ID NO: 446715 - RNA, 19 nt, Artificial Sequence
  Description of Artificial Sequence: Synthetic oligonucleotide
  Sense strand starting at position 3763 of SEQ ID NO: 316871
acaauuauucuguguuaag

SEQ ID NO: 446716 - RNA, 19 nt, Artificial Sequence
  Description of Artificial Sequence: Synthetic oligonucleotide
  Antisense Strand to SEQ ID NO: 446715
cuuaacacagaauaauugu

SEQ ID NO: 446717 - RNA, 19 nt, Artificial Sequence
  Description of Artificial Sequence: Synthetic oligonucleotide
  Sense strand starting at position 3775 of SEQ ID NO: 316871
uguuaaguggucugaauga

SEQ ID NO: 446718 - RNA, 19 nt, Artificial Sequence
  Description of Artificial Sequence: Synthetic oligonucleotide
  Antisense Strand to SEQ ID NO: 446717
ucauucagaccacuuaaca

SEQ ID NO: 446719 - RNA, 19 nt, Artificial Sequence
  Description of Artificial Sequence: Synthetic oligonucleotide
  Sense strand starting at position 3863 of SEQ ID NO: 316871
ggcaaaggcuucccaugaa

SEQ ID NO: 446720 - RNA, 19 nt, Artificial Sequence
  Description of Artificial Sequence: Synthetic oligonucleotide
  Antisense Strand to SEQ ID NO: 446719
uucaugggaagccuuugcc

SEQ ID NO: 446721 - RNA, 19 nt, Artificial Sequence
  Description of Artificial Sequence: Synthetic oligonucleotide
  Sense strand starting at position 277 of SEQ ID NO: 316872
cuuaauauuggcuaaguaa

SEQ ID NO: 446722 - RNA, 19 nt, Artificial Sequence
  Description of Artificial Sequence: Synthetic oligonucleotide
  Antisense Strand to SEQ ID NO: 446721
uuacuuagccaauauuaag

SEQ ID NO: 446723 - RNA, 19 nt, Artificial Sequence
  Description of Artificial Sequence: Synthetic oligonucleotide
  Sense strand starting at position 318 of SEQ ID NO: 316872
gugacauaggguggagaau

SEQ ID NO: 446724 - RNA, 19 nt, Artificial Sequence
  Description of Artificial Sequence: Synthetic oligonucleotide
  Antisense Strand to SEQ ID NO: 446723
auucuccacccuaugucac

SEQ ID NO: 446725 - RNA, 19 nt, Artificial Sequence
  Description of Artificial Sequence: Synthetic oligonucleotide
  Sense strand starting at position 330 of SEQ ID NO: 316872
ggagaauuaacaggguagu

SEQ ID NO: 446726 - RNA, 19 nt, Artificial Sequence
  Description of Artificial Sequence: Synthetic oligonucleotide
  Antisense Strand to SEQ ID NO: 446725
acuacccuguuaauucucc

SEQ ID NO: 446727 - RNA, 19 nt, Artificial Sequence
  Description of Artificial Sequence: Synthetic oligonucleotide
  Sense strand starting at position 331 of SEQ ID NO: 316872
gagaauuaacaggguaguu

SEQ ID NO: 446728 - RNA, 19 nt, Artificial Sequence
  Description of Artificial Sequence: Synthetic oligonucleotide
  Antisense Strand to SEQ ID NO: 446727
aacuacccuguuaauucuc

SEQ ID NO: 446729 - RNA, 19 nt, Artificial Sequence
  Description of Artificial Sequence: Synthetic oligonucleotide
  Sense strand starting at position 336 of SEQ ID NO: 316872
uuaacaggguaguuaaauu

SEQ ID NO: 446730 - RNA, 19 nt, Artificial Sequence
  Description of Artificial Sequence: Synthetic oligonucleotide
  Antisense Strand to SEQ ID NO: 446729
aauuuaacuacccuguuaa

SEQ ID NO: 446731 - RNA, 19 nt, Artificial Sequence
  Description of Artificial Sequence: Synthetic oligonucleotide
  Sense strand starting at position 363 of SEQ ID NO: 316872
gcauaaacuguguaugaau

SEQ ID NO: 446732 - RNA, 19 nt, Artificial Sequence
  Description of Artificial Sequence: Synthetic oligonucleotide
  Antisense Strand to SEQ ID NO: 446731
auucauacacaguuuaugc

SEQ ID NO: 446733 - RNA, 19 nt, Artificial Sequence
  Description of Artificial Sequence: Synthetic oligonucleotide
  Sense strand starting at position 440 of SEQ ID NO: 316872
ugaacugacugcuuuauga

SEQ ID NO: 446734 - RNA, 19 nt, Artificial Sequence
  Description of Artificial Sequence: Synthetic oligonucleotide
  Antisense Strand to SEQ ID NO: 446733
ucauaaagcagucaguuca

SEQ ID NO: 446735 - RNA, 19 nt, Artificial Sequence
  Description of Artificial Sequence: Synthetic oligonucleotide
  Sense strand starting at position 529 of SEQ ID NO: 316872
gaaugauguauguaggcau

SEQ ID NO: 446736 - RNA, 19 nt, Artificial Sequence
  Description of Artificial Sequence: Synthetic oligonucleotide
  Antisense Strand to SEQ ID NO: 446735
augccuacauacaucauuc

SEQ ID NO: 446737 - RNA, 19 nt, Artificial Sequence
  Description of Artificial Sequence: Synthetic oligonucleotide
  Sense strand starting at position 533 of SEQ ID NO: 316872
gauguauguaggcauggau

SEQ ID NO: 446738 - RNA, 19 nt, Artificial Sequence
  Description of Artificial Sequence: Synthetic oligonucleotide
  Antisense Strand to SEQ ID NO: 446737
auccaugccuacauacauc

SEQ ID NO: 446739 - RNA, 19 nt, Artificial Sequence
  Description of Artificial Sequence: Synthetic oligonucleotide
  Sense strand starting at position 697 of SEQ ID NO: 316872
gggauucucccacaugugu

SEQ ID NO: 446740 - RNA, 19 nt, Artificial Sequence
  Description of Artificial Sequence: Synthetic oligonucleotide
  Antisense Strand to SEQ ID NO: 446739
acacaugugggagaauccc

SEQ ID NO: 446741 - RNA, 19 nt, Artificial Sequence
  Description of Artificial Sequence: Synthetic oligonucleotide
  Sense strand starting at position 717 of SEQ ID NO: 316872
gagauugcagugugauuuc

SEQ ID NO: 446742 - RNA, 19 nt, Artificial Sequence
  Description of Artificial Sequence: Synthetic oligonucleotide
  Antisense Strand to SEQ ID NO: 446741
gaaaucacacugcaaucuc

SEQ ID NO: 446743 - RNA, 19 nt, Artificial Sequence
  Description of Artificial Sequence: Synthetic oligonucleotide
  Sense strand starting at position 980 of SEQ ID NO: 316872
uucccaauccuggagcauu

SEQ ID NO: 446744 - RNA, 19 nt, Artificial Sequence
  Description of Artificial Sequence: Synthetic oligonucleotide
  Antisense Strand to SEQ ID NO: 446743
aaugcuccaggauugggaa

SEQ ID NO: 446745 - RNA, 19 nt, Artificial Sequence
  Description of Artificial Sequence: Synthetic oligonucleotide
  Sense strand starting at position 1492 of SEQ ID NO: 316872
uuccucucagauuaguuau

SEQ ID NO: 446746 - RNA, 19 nt, Artificial Sequence
  Description of Artificial Sequence: Synthetic oligonucleotide
  Antisense Strand to SEQ ID NO: 446745
auaacuaaucugagaggaa

SEQ ID NO: 446747 - RNA, 19 nt, Artificial Sequence
  Description of Artificial Sequence: Synthetic oligonucleotide
  Sense strand starting at position 1495 of SEQ ID NO: 316872
cucucagauuaguuaugga

SEQ ID NO: 446748 - RNA, 19 nt, Artificial Sequence
  Description of Artificial Sequence: Synthetic oligonucleotide
  Antisense Strand to SEQ ID NO: 446747
uccauaacuaaucugagag

SEQ ID NO: 446749 - RNA, 19 nt, Artificial Sequence
  Description of Artificial Sequence: Synthetic oligonucleotide
  Sense strand starting at position 1509 of SEQ ID NO: 316872
auggauauuagcggaacau

SEQ ID NO: 446750 - RNA, 19 nt, Artificial Sequence
  Description of Artificial Sequence: Synthetic oligonucleotide
  Antisense Strand to SEQ ID NO: 446749
auguuccgcuaauauccau

SEQ ID NO: 446751 - RNA, 19 nt, Artificial Sequence
  Description of Artificial Sequence: Synthetic oligonucleotide
  Sense strand starting at position 1510 of SEQ ID NO: 316872
uggauauuagcggaacauc

SEQ ID NO: 446752 - RNA, 19 nt, Artificial Sequence
  Description of Artificial Sequence: Synthetic oligonucleotide
  Antisense Strand to SEQ ID NO: 446751
gauguuccgcuaauaucca

SEQ ID NO: 446753 - RNA, 19 nt, Artificial Sequence
  Description of Artificial Sequence: Synthetic oligonucleotide
  Sense strand starting at position 1518 of SEQ ID NO: 316872
agcggaacaucucuacaaa

SEQ ID NO: 446754 - RNA, 19 nt, Artificial Sequence
  Description of Artificial Sequence: Synthetic oligonucleotide
  Antisense Strand to SEQ ID NO: 446753
uuuguagagauguuccgcu

SEQ ID NO: 446755 - RNA, 19 nt, Artificial Sequence
  Description of Artificial Sequence: Synthetic oligonucleotide
  Sense strand starting at position 1519 of SEQ ID NO: 316872
gcggaacaucucuacaaag

SEQ ID NO: 446756 - RNA, 19 nt, Artificial Sequence
  Description of Artificial Sequence: Synthetic oligonucleotide
  Antisense Strand to SEQ ID NO: 446755
cuuuguagagauguuccgc

SEQ ID NO: 446757 - RNA, 19 nt, Artificial Sequence
  Description of Artificial Sequence: Synthetic oligonucleotide
  Sense strand starting at position 1620 of SEQ ID NO: 316872
aggcguauuugcuugagag

SEQ ID NO: 446758 - RNA, 19 nt, Artificial Sequence
  Description of Artificial Sequence: Synthetic oligonucleotide
  Antisense Strand to SEQ ID NO: 446757
cucucaagcaaauacgccu

SEQ ID NO: 446759 - RNA, 19 nt, Artificial Sequence
  Description of Artificial Sequence: Synthetic oligonucleotide
  Sense strand starting at position 1621 of SEQ ID NO: 316872
ggcguauuugcuugagagg

SEQ ID NO: 446760 - RNA, 19 nt, Artificial Sequence
  Description of Artificial Sequence: Synthetic oligonucleotide
  Antisense Strand to SEQ ID NO: 446759
ccucucaagcaaauacgcc

SEQ ID NO: 446761 - RNA, 19 nt, Artificial Sequence
  Description of Artificial Sequence: Synthetic oligonucleotide
  Sense strand starting at position 1627 of SEQ ID NO: 316872
uuugcuugagaggaauguu

SEQ ID NO: 446762 - RNA, 19 nt, Artificial Sequence
  Description of Artificial Sequence: Synthetic oligonucleotide
  Antisense Strand to SEQ ID NO: 446761
aacauuccucucaagcaaa

SEQ ID NO: 446763 - RNA, 19 nt, Artificial Sequence
  Description of Artificial Sequence: Synthetic oligonucleotide
  Sense strand starting at position 1630 of SEQ ID NO: 316872
gcuugagaggaauguuaaa

SEQ ID NO: 446764 - RNA, 19 nt, Artificial Sequence
  Description of Artificial Sequence: Synthetic oligonucleotide
  Antisense Strand to SEQ ID NO: 446763
uuuaacauuccucucaagc

SEQ ID NO: 446765 - RNA, 19 nt, Artificial Sequence
  Description of Artificial Sequence: Synthetic oligonucleotide
  Sense strand starting at position 2208 of SEQ ID NO: 316872
gcucuugcccagucaguuu

SEQ ID NO: 446766 - RNA, 19 nt, Artificial Sequence
  Description of Artificial Sequence: Synthetic oligonucleotide
  Antisense Strand to SEQ ID NO: 446765
aaacugacugggcaagagc

SEQ ID NO: 446767 - RNA, 19 nt, Artificial Sequence
  Description of Artificial Sequence: Synthetic oligonucleotide
  Sense strand starting at position 2253 of SEQ ID NO: 316872
ggccuaagcagauaggauu

SEQ ID NO: 446768 - RNA, 19 nt, Artificial Sequence
  Description of Artificial Sequence: Synthetic oligonucleotide
  Antisense Strand to SEQ ID NO: 446767
aauccuaucugcuuaggcc

SEQ ID NO: 446769 - RNA, 19 nt, Artificial Sequence
  Description of Artificial Sequence: Synthetic oligonucleotide
  Sense strand starting at position 2803 of SEQ ID NO: 316872
uaggaagugacaugucuag

SEQ ID NO: 446770 - RNA, 19 nt, Artificial Sequence
  Description of Artificial Sequence: Synthetic oligonucleotide
  Antisense Strand to SEQ ID NO: 446769
cuagacaugucacuuccua

SEQ ID NO: 446771 - RNA, 19 nt, Artificial Sequence
  Description of Artificial Sequence: Synthetic oligonucleotide
  Sense strand starting at position 2853 of SEQ ID NO: 316872
cgucacaucccugaaggaa

SEQ ID NO: 446772 - RNA, 19 nt, Artificial Sequence
  Description of Artificial Sequence: Synthetic oligonucleotide
  Antisense Strand to SEQ ID NO: 446771
uuccuucagggaugugacg

SEQ ID NO: 446773 - RNA, 19 nt, Artificial Sequence
  Description of Artificial Sequence: Synthetic oligonucleotide
  Sense strand starting at position 2893 of SEQ ID NO: 316872
gagucuucccacuggacag

SEQ ID NO: 446774 - RNA, 19 nt, Artificial Sequence
  Description of Artificial Sequence: Synthetic oligonucleotide
  Antisense Strand to SEQ ID NO: 446773
cuguccagugggaagacuc

SEQ ID NO: 446775 - RNA, 19 nt, Artificial Sequence
  Description of Artificial Sequence: Synthetic oligonucleotide
  Sense strand starting at position 2948 of SEQ ID NO: 316872
guuuauaggcaggaaaguu

SEQ ID NO: 446776 - RNA, 19 nt, Artificial Sequence
  Description of Artificial Sequence: Synthetic oligonucleotide
  Antisense Strand to SEQ ID NO: 446775
aacuuuccugccuauaaac

SEQ ID NO: 446777 - RNA, 19 nt, Artificial Sequence
  Description of Artificial Sequence: Synthetic oligonucleotide
  Sense strand starting at position 3289 of SEQ ID NO: 316872
uggagaaagauacguuuau

SEQ ID NO: 446778 - RNA, 19 nt, Artificial Sequence
  Description of Artificial Sequence: Synthetic oligonucleotide
  Antisense Strand to SEQ ID NO: 446777
auaaacguaucuuucucca

SEQ ID NO: 446779 - RNA, 19 nt, Artificial Sequence
  Description of Artificial Sequence: Synthetic oligonucleotide
  Sense strand starting at position 3290 of SEQ ID NO: 316872
ggagaaagauacguuuaug

SEQ ID NO: 446780 - RNA, 19 nt, Artificial Sequence
  Description of Artificial Sequence: Synthetic oligonucleotide
  Antisense Strand to SEQ ID NO: 446779
cauaaacguaucuuucucc

SEQ ID NO: 446781 - RNA, 19 nt, Artificial Sequence
  Description of Artificial Sequence: Synthetic oligonucleotide
  Sense strand starting at position 3293 of SEQ ID NO: 316872
gaaagauacguuuaugguu

SEQ ID NO: 446782 - RNA, 19 nt, Artificial Sequence
  Description of Artificial Sequence: Synthetic oligonucleotide
  Antisense Strand to SEQ ID NO: 446781
aaccauaaacguaucuuuc

SEQ ID NO: 446783 - RNA, 19 nt, Artificial Sequence
  Description of Artificial Sequence: Synthetic oligonucleotide
  Sense strand starting at position 3300 of SEQ ID NO: 316872
acguuuaugguucagagaa

SEQ ID NO: 446784 - RNA, 19 nt, Artificial Sequence
  Description of Artificial Sequence: Synthetic oligonucleotide
  Antisense Strand to SEQ ID NO: 446783
uucucugaaccauaaacgu

SEQ ID NO: 446785 - RNA, 19 nt, Artificial Sequence
  Description of Artificial Sequence: Synthetic oligonucleotide
  Sense strand starting at position 3453 of SEQ ID NO: 316872
uuguaaagugcugaagaac

SEQ ID NO: 446786 - RNA, 19 nt, Artificial Sequence
  Description of Artificial Sequence: Synthetic oligonucleotide
  Antisense Strand to SEQ ID NO: 446785
guucuucagcacuuuacaa

SEQ ID NO: 446787 - RNA, 19 nt, Artificial Sequence
  Description of Artificial Sequence: Synthetic oligonucleotide
  Sense strand starting at position 3465 of SEQ ID NO: 316872
gaagaacuagggugauguu

SEQ ID NO: 446788 - RNA, 19 nt, Artificial Sequence
  Description of Artificial Sequence: Synthetic oligonucleotide
  Antisense Strand to SEQ ID NO: 446787
aacaucacccuaguucuuc

SEQ ID NO: 446789 - RNA, 19 nt, Artificial Sequence
  Description of Artificial Sequence: Synthetic oligonucleotide
  Sense strand starting at position 3479 of SEQ ID NO: 316872
auguucuaucuggaaggca

SEQ ID NO: 446790 - RNA, 19 nt, Artificial Sequence
  Description of Artificial Sequence: Synthetic oligonucleotide
  Antisense Strand to SEQ ID NO: 446789
ugccuuccagauagaacau

SEQ ID NO: 446791 - RNA, 19 nt, Artificial Sequence
  Description of Artificial Sequence: Synthetic oligonucleotide
  Sense strand starting at position 3873 of SEQ ID NO: 316872
uccuaaguuugauuuagcu

SEQ ID NO: 446792 - RNA, 19 nt, Artificial Sequence
  Description of Artificial Sequence: Synthetic oligonucleotide
  Antisense Strand to SEQ ID NO: 446791
agcuaaaucaaacuuagga

SEQ ID NO: 446793 - RNA, 19 nt, Artificial Sequence
  Description of Artificial Sequence: Synthetic oligonucleotide
  Sense strand starting at position 3877 of SEQ ID NO: 316872
aaguuugauuuagcuaguu

SEQ ID NO: 446794 - RNA, 19 nt, Artificial Sequence
  Description of Artificial Sequence: Synthetic oligonucleotide
  Antisense Strand to SEQ ID NO: 446793
aacuagcuaaaucaaacuu

SEQ ID NO: 446795 - RNA, 19 nt, Artificial Sequence
  Description of Artificial Sequence: Synthetic oligonucleotide
  Sense strand starting at position 3895 of SEQ ID NO: 316872
uagugaaaucuuuaagguc

SEQ ID NO: 446796 - RNA, 19 nt, Artificial Sequence
  Description of Artificial Sequence: Synthetic oligonucleotide
  Antisense Strand to SEQ ID NO: 446795
gaccuuaaagauuucacua

SEQ ID NO: 446797 - RNA, 19 nt, Artificial Sequence
  Description of Artificial Sequence: Synthetic oligonucleotide
  Sense strand starting at position 3903 of SEQ ID NO: 316872
ucuuuaaggucuuugaaau

SEQ ID NO: 446798 - RNA, 19 nt, Artificial Sequence
  Description of Artificial Sequence: Synthetic oligonucleotide
  Antisense Strand to SEQ ID NO: 446797
auuucaaagaccuuaaaga

SEQ ID NO: 446799 - RNA, 19 nt, Artificial Sequence
  Description of Artificial Sequence: Synthetic oligonucleotide
  Sense strand starting at position 3904 of SEQ ID NO: 316872
cuuuaaggucuuugaaaua

SEQ ID NO: 446800 - RNA, 19 nt, Artificial Sequence
  Description of Artificial Sequence: Synthetic oligonucleotide
  Antisense Strand to SEQ ID NO: 446799
uauuucaaagaccuuaaag

SEQ ID NO: 446801 - RNA, 19 nt, Artificial Sequence
  Description of Artificial Sequence: Synthetic oligonucleotide
  Sense strand starting at position 235 of SEQ ID NO: 316873
cuuuaugaauaggucuaua

SEQ ID NO: 446802 - RNA, 19 nt, Artificial Sequence
  Description of Artificial Sequence: Synthetic oligonucleotide
  Antisense Strand to SEQ ID NO: 446801
uauagaccuauucauaaag

SEQ ID NO: 446803 - RNA, 19 nt, Artificial Sequence
  Description of Artificial Sequence: Synthetic oligonucleotide
  Sense strand starting at position 345 of SEQ ID NO: 316873
cugccaauuugugcaauau

SEQ ID NO: 446804 - RNA, 19 nt, Artificial Sequence
  Description of Artificial Sequence: Synthetic oligonucleotide
  Antisense Strand to SEQ ID NO: 446803
auauugcacaaauuggcag

SEQ ID NO: 446805 - RNA, 19 nt, Artificial Sequence
  Description of Artificial Sequence: Synthetic oligonucleotide
  Sense strand starting at position 513 of SEQ ID NO: 316873
aguucaguuccgucugcua

SEQ ID NO: 446806 - RNA, 19 nt, Artificial Sequence
  Description of Artificial Sequence: Synthetic oligonucleotide
  Antisense Strand to SEQ ID NO: 446805
uagcagacggaacugaacu

SEQ ID NO: 446807 - RNA, 19 nt, Artificial Sequence
  Description of Artificial Sequence: Synthetic oligonucleotide
  Sense strand starting at position 528 of SEQ ID NO: 316873
gcuagauuguaauuaaagg

SEQ ID NO: 446808 - RNA, 19 nt, Artificial Sequence
  Description of Artificial Sequence: Synthetic oligonucleotide
  Antisense Strand to SEQ ID NO: 446807
ccuuuaauuacaaucuagc

SEQ ID NO: 446809 - RNA, 19 nt, Artificial Sequence
  Description of Artificial Sequence: Synthetic oligonucleotide
  Sense strand starting at position 589 of SEQ ID NO: 316873
uugauucuuugacugugaa

SEQ ID NO: 446810 - RNA, 19 nt, Artificial Sequence
  Description of Artificial Sequence: Synthetic oligonucleotide
  Antisense Strand to SEQ ID NO: 446809
uucacagucaaagaaucaa

SEQ ID NO: 446811 - RNA, 19 nt, Artificial Sequence
  Description of Artificial Sequence: Synthetic oligonucleotide
  Sense strand starting at position 590 of SEQ ID NO: 316873
ugauucuuugacugugaau

SEQ ID NO: 446812 - RNA, 19 nt, Artificial Sequence
  Description of Artificial Sequence: Synthetic oligonucleotide
  Antisense Strand to SEQ ID NO: 446811
auucacagucaaagaauca

SEQ ID NO: 446813 - RNA, 19 nt, Artificial Sequence
  Description of Artificial Sequence: Synthetic oligonucleotide
  Sense strand starting at position 608 of SEQ ID NO: 316873
uuuauuuccuucuugugua

SEQ ID NO: 446814 - RNA, 19 nt, Artificial Sequence
  Description of Artificial Sequence: Synthetic oligonucleotide
  Antisense Strand to SEQ ID NO: 446813
uacacaagaaggaaauaaa

SEQ ID NO: 446815 - RNA, 19 nt, Artificial Sequence
  Description of Artificial Sequence: Synthetic oligonucleotide
  Sense strand starting at position 797 of SEQ ID NO: 316873
gccuuugcacaagaacauu

SEQ ID NO: 446816 - RNA, 19 nt, Artificial Sequence
  Description of Artificial Sequence: Synthetic oligonucleotide
  Antisense Strand to SEQ ID NO: 446815
aauguucuugugcaaaggc

SEQ ID NO: 446817 - RNA, 19 nt, Artificial Sequence
  Description of Artificial Sequence: Synthetic oligonucleotide
  Sense strand starting at position 1237 of SEQ ID NO: 316873
guuccuaaacuguaagcua

SEQ ID NO: 446818 - RNA, 19 nt, Artificial Sequence
  Description of Artificial Sequence: Synthetic oligonucleotide
  Antisense Strand to SEQ ID NO: 446817
uagcuuacaguuuaggaac

SEQ ID NO: 446819 - RNA, 19 nt, Artificial Sequence
  Description of Artificial Sequence: Synthetic oligonucleotide
  Sense strand starting at position 1361 of SEQ ID NO: 316873
aauuaaacgcccuggagaa

SEQ ID NO: 446820 - RNA, 19 nt, Artificial Sequence
  Description of Artificial Sequence: Synthetic oligonucleotide
  Antisense Strand to SEQ ID NO: 446819
uucuccagggcguuuaauu

SEQ ID NO: 446821 - RNA, 19 nt, Artificial Sequence
  Description of Artificial Sequence: Synthetic oligonucleotide
  Sense strand starting at position 1362 of SEQ ID NO: 316873
auuaaacgcccuggagaaa

SEQ ID NO: 446822 - RNA, 19 nt, Artificial Sequence
  Description of Artificial Sequence: Synthetic oligonucleotide
  Antisense Strand to SEQ ID NO: 446821
uuucuccagggcguuuaau

SEQ ID NO: 446823 - RNA, 19 nt, Artificial Sequence
  Description of Artificial Sequence: Synthetic oligonucleotide
  Sense strand starting at position 1616 of SEQ ID NO: 316873
aggaaacauuucuggaucu

SEQ ID NO: 446824 - RNA, 19 nt, Artificial Sequence
  Description of Artificial Sequence: Synthetic oligonucleotide
  Antisense Strand to SEQ ID NO: 446823
agauccagaaauguuuccu

SEQ ID NO: 446825 - RNA, 19 nt, Artificial Sequence
  Description of Artificial Sequence: Synthetic oligonucleotide
  Sense strand starting at position 1672 of SEQ ID NO: 316873
uuucuuccauuagugagau

SEQ ID NO: 446826 - RNA, 19 nt, Artificial Sequence
  Description of Artificial Sequence: Synthetic oligonucleotide
  Antisense Strand to SEQ ID NO: 446825
aucucacuaauggaagaaa

SEQ ID NO: 446827 - RNA, 19 nt, Artificial Sequence
  Description of Artificial Sequence: Synthetic oligonucleotide
  Sense strand starting at position 1682 of SEQ ID NO: 316873
uagugagauaguggauucu

SEQ ID NO: 446828 - RNA, 19 nt, Artificial Sequence
  Description of Artificial Sequence: Synthetic oligonucleotide
  Antisense Strand to SEQ ID NO: 446827
agaauccacuaucucacua

SEQ ID NO: 446829 - RNA, 19 nt, Artificial Sequence
  Description of Artificial Sequence: Synthetic oligonucleotide
  Sense strand starting at position 1688 of SEQ ID NO: 316873
gauaguggauucuuccuaa

SEQ ID NO: 446830 - RNA, 19 nt, Artificial Sequence
  Description of Artificial Sequence: Synthetic oligonucleotide
  Antisense Strand to SEQ ID NO: 446829
uuaggaagaauccacuauc

SEQ ID NO: 446831 - RNA, 19 nt, Artificial Sequence
  Description of Artificial Sequence: Synthetic oligonucleotide
  Sense strand starting at position 1715 of SEQ ID NO: 316873
gggagaauaugguuucccu

SEQ ID NO: 446832 - RNA, 19 nt, Artificial Sequence
  Description of Artificial Sequence: Synthetic oligonucleotide
  Antisense Strand to SEQ ID NO: 446831
agggaaaccauauucuccc

SEQ ID NO: 446833 - RNA, 19 nt, Artificial Sequence
  Description of Artificial Sequence: Synthetic oligonucleotide
  Sense strand starting at position 1735 of SEQ ID NO: 316873
cucugaacaucuucuggau

SEQ ID NO: 446834 - RNA, 19 nt, Artificial Sequence
  Description of Artificial Sequence: Synthetic oligonucleotide
  Antisense Strand to SEQ ID NO: 446833
auccagaagauguucagag

SEQ ID NO: 446835 - RNA, 19 nt, Artificial Sequence
  Description of Artificial Sequence: Synthetic oligonucleotide
  Sense strand starting at position 1769 of SEQ ID NO: 316873
aggagcuaucuguaagcua

SEQ ID NO: 446836 - RNA, 19 nt, Artificial Sequence
  Description of Artificial Sequence: Synthetic oligonucleotide
  Antisense Strand to SEQ ID NO: 446835
uagcuuacagauagcuccu

SEQ ID NO: 446837 - RNA, 19 nt, Artificial Sequence
  Description of Artificial Sequence: Synthetic oligonucleotide
  Sense strand starting at position 1929 of SEQ ID NO: 316873
ugucaaacgccaugauuuc

SEQ ID NO: 446838 - RNA, 19 nt, Artificial Sequence
  Description of Artificial Sequence: Synthetic oligonucleotide
  Antisense Strand to SEQ ID NO: 446837
gaaaucauggcguuugaca

SEQ ID NO: 446839 - RNA, 19 nt, Artificial Sequence
  Description of Artificial Sequence: Synthetic oligonucleotide
  Sense strand starting at position 1959 of SEQ ID NO: 316873
ccucuaggcagcuagagau

SEQ ID NO: 446840 - RNA, 19 nt, Artificial Sequence
  Description of Artificial Sequence: Synthetic oligonucleotide
  Antisense Strand to SEQ ID NO: 446839
aucucuagcugccuagagg

SEQ ID NO: 446841 - RNA, 19 nt, Artificial Sequence
  Description of Artificial Sequence: Synthetic oligonucleotide
  Sense strand starting at position 1984 of SEQ ID NO: 316873
cuguccuugggcgagaauu

SEQ ID NO: 446842 - RNA, 19 nt, Artificial Sequence
  Description of Artificial Sequence: Synthetic oligonucleotide
  Antisense Strand to SEQ ID NO: 446841
aauucucgcccaaggacag

SEQ ID NO: 446843 - RNA, 19 nt, Artificial Sequence
  Description of Artificial Sequence: Synthetic oligonucleotide
  Sense strand starting at position 2122 of SEQ ID NO: 316873
uucuguacauuccugagau

SEQ ID NO: 446844 - RNA, 19 nt, Artificial Sequence
  Description of Artificial Sequence: Synthetic oligonucleotide
  Antisense Strand to SEQ ID NO: 446843
aucucaggaauguacagaa

SEQ ID NO: 446845 - RNA, 19 nt, Artificial Sequence
  Description of Artificial Sequence: Synthetic oligonucleotide
  Sense strand starting at position 2124 of SEQ ID NO: 316873
cuguacauuccugagaucu

SEQ ID NO: 446846 - RNA, 19 nt, Artificial Sequence
  Description of Artificial Sequence: Synthetic oligonucleotide
  Antisense Strand to SEQ ID NO: 446845
agaucucaggaauguacag

SEQ ID NO: 446847 - RNA, 19 nt, Artificial Sequence
  Description of Artificial Sequence: Synthetic oligonucleotide
  Sense strand starting at position 2273 of SEQ ID NO: 316873
gacuauguuggagguaaua

SEQ ID NO: 446848 - RNA, 19 nt, Artificial Sequence
  Description of Artificial Sequence: Synthetic oligonucleotide
  Antisense Strand to SEQ ID NO: 446847
uauuaccuccaacauaguc

SEQ ID NO: 446849 - RNA, 19 nt, Artificial Sequence
  Description of Artificial Sequence: Synthetic oligonucleotide
  Sense strand starting at position 2459 of SEQ ID NO: 316873
uugccaggaguuuggauaa

SEQ ID NO: 446850 - RNA, 19 nt, Artificial Sequence
  Description of Artificial Sequence: Synthetic oligonucleotide
  Antisense Strand to SEQ ID NO: 446849
uuauccaaacuccuggcaa

SEQ ID NO: 446851 - RNA, 19 nt, Artificial Sequence
  Description of Artificial Sequence: Synthetic oligonucleotide
  Sense strand starting at position 2509 of SEQ ID NO: 316873
acaauaagugcucauugau

SEQ ID NO: 446852 - RNA, 19 nt, Artificial Sequence
  Description of Artificial Sequence: Synthetic oligonucleotide
  Antisense Strand to SEQ ID NO: 446851
aucaaugagcacuuauugu

SEQ ID NO: 446853 - RNA, 19 nt, Artificial Sequence
  Description of Artificial Sequence: Synthetic oligonucleotide
  Sense strand starting at position 2531 of SEQ ID NO: 316873
ugucuugauccugaauggu

SEQ ID NO: 446854 - RNA, 19 nt, Artificial Sequence
  Description of Artificial Sequence: Synthetic oligonucleotide
  Antisense Strand to SEQ ID NO: 446853
accauucaggaucaagaca

SEQ ID NO: 446855 - RNA, 19 nt, Artificial Sequence
  Description of Artificial Sequence: Synthetic oligonucleotide
  Sense strand starting at position 2534 of SEQ ID NO: 316873
cuugauccugaauggugau

SEQ ID NO: 446856 - RNA, 19 nt, Artificial Sequence
  Description of Artificial Sequence: Synthetic oligonucleotide
  Antisense Strand to SEQ ID NO: 446855
aucaccauucaggaucaag

SEQ ID NO: 446857 - RNA, 19 nt, Artificial Sequence
  Description of Artificial Sequence: Synthetic oligonucleotide
  Sense strand starting at position 2535 of SEQ ID NO: 316873
uugauccugaauggugaua

SEQ ID NO: 446858 - RNA, 19 nt, Artificial Sequence
  Description of Artificial Sequence: Synthetic oligonucleotide
  Antisense Strand to SEQ ID NO: 446857
uaucaccauucaggaucaa

SEQ ID NO: 446859 - RNA, 19 nt, Artificial Sequence
  Description of Artificial Sequence: Synthetic oligonucleotide
  Sense strand starting at position 2638 of SEQ ID NO: 316873
cugccaugugcagagagaa

SEQ ID NO: 446860 - RNA, 19 nt, Artificial Sequence
  Description of Artificial Sequence: Synthetic oligonucleotide
  Antisense Strand to SEQ ID NO: 446859
uucucucugcacauggcag

SEQ ID NO: 446861 - RNA, 19 nt, Artificial Sequence
  Description of Artificial Sequence: Synthetic oligonucleotide
  Sense strand starting at position 2870 of SEQ ID NO: 316873
gggaggaaacuugguguga

SEQ ID NO: 446862 - RNA, 19 nt, Artificial Sequence
  Description of Artificial Sequence: Synthetic oligonucleotide
  Antisense Strand to SEQ ID NO: 446861
ucacaccaaguuuccuccc

SEQ ID NO: 446863 - RNA, 19 nt, Artificial Sequence
  Description of Artificial Sequence: Synthetic oligonucleotide
  Sense strand starting at position 2871 of SEQ ID NO: 316873
ggaggaaacuuggugugaa

SEQ ID NO: 446864 - RNA, 19 nt, Artificial Sequence
  Description of Artificial Sequence: Synthetic oligonucleotide
  Antisense Strand to SEQ ID NO: 446863
uucacaccaaguuuccucc

SEQ ID NO: 446865 - RNA, 19 nt, Artificial Sequence
  Description of Artificial Sequence: Synthetic oligonucleotide
  Sense strand starting at position 2874 of SEQ ID NO: 316873
ggaaacuuggugugaagua

SEQ ID NO: 446866 - RNA, 19 nt, Artificial Sequence
  Description of Artificial Sequence: Synthetic oligonucleotide
  Antisense Strand to SEQ ID NO: 446865
uacuucacaccaaguuucc

SEQ ID NO: 446867 - RNA, 19 nt, Artificial Sequence
  Description of Artificial Sequence: Synthetic oligonucleotide
  Sense strand starting at position 2910 of SEQ ID NO: 316873
gucuuaagauguuuauuac

SEQ ID NO: 446868 - RNA, 19 nt, Artificial Sequence
  Description of Artificial Sequence: Synthetic oligonucleotide
  Antisense Strand to SEQ ID NO: 446867
guaauaaacaucuuaagac

SEQ ID NO: 446869 - RNA, 19 nt, Artificial Sequence
  Description of Artificial Sequence: Synthetic oligonucleotide
  Sense strand starting at position 2939 of SEQ ID NO: 316873
cuauuauugugacugaaug

SEQ ID NO: 446870 - RNA, 19 nt, Artificial Sequence
  Description of Artificial Sequence: Synthetic oligonucleotide
  Antisense Strand to SEQ ID NO: 446869
cauucagucacaauaauag

SEQ ID NO: 446871 - RNA, 19 nt, Artificial Sequence
  Description of Artificial Sequence: Synthetic oligonucleotide
  Sense strand starting at position 3004 of SEQ ID NO: 316873
gggcuugcccaagauauua

SEQ ID NO: 446872 - RNA, 19 nt, Artificial Sequence
  Description of Artificial Sequence: Synthetic oligonucleotide
  Antisense Strand to SEQ ID NO: 446871
uaauaucuugggcaagccc

SEQ ID NO: 446873 - RNA, 19 nt, Artificial Sequence
  Description of Artificial Sequence: Synthetic oligonucleotide
  Sense strand starting at position 3012 of SEQ ID NO: 316873
ccaagauauuacuuagggu

SEQ ID NO: 446874 - RNA, 19 nt, Artificial Sequence
  Description of Artificial Sequence: Synthetic oligonucleotide
  Antisense Strand to SEQ ID NO: 446873
acccuaaguaauaucuugg

SEQ ID NO: 446875 - RNA, 19 nt, Artificial Sequence
  Description of Artificial Sequence: Synthetic oligonucleotide
  Sense strand starting at position 3722 of SEQ ID NO: 316873
agagccuggcuguaacaau

SEQ ID NO: 446876 - RNA, 19 nt, Artificial Sequence
  Description of Artificial Sequence: Synthetic oligonucleotide
  Antisense Strand to SEQ ID NO: 446875
auuguuacagccaggcucu

SEQ ID NO: 446877 - RNA, 19 nt, Artificial Sequence
  Description of Artificial Sequence: Synthetic oligonucleotide
  Sense strand starting at position 3808 of SEQ ID NO: 316873
gcgggaagaucucuugauc

SEQ ID NO: 446878 - RNA, 19 nt, Artificial Sequence
  Description of Artificial Sequence: Synthetic oligonucleotide
  Antisense Strand to SEQ ID NO: 446877
gaucaagagaucuucccgc

SEQ ID NO: 446879 - RNA, 19 nt, Artificial Sequence
  Description of Artificial Sequence: Synthetic oligonucleotide
  Sense strand starting at position 3836 of SEQ ID NO: 316873
ggagauugcaaugaguugu

SEQ ID NO: 446880 - RNA, 19 nt, Artificial Sequence
  Description of Artificial Sequence: Synthetic oligonucleotide
  Antisense Strand to SEQ ID NO: 446879
acaacucauugcaaucucc

SEQ ID NO: 446881 - RNA, 19 nt, Artificial Sequence
  Description of Artificial Sequence: Synthetic oligonucleotide
  Sense strand starting at position 100 of SEQ ID NO: 316874
uuguauaaagcuugacaag

SEQ ID NO: 446882 - RNA, 19 nt, Artificial Sequence
  Description of Artificial Sequence: Synthetic oligonucleotide
  Antisense Strand to SEQ ID NO: 446881
cuugucaagcuuuauacaa

SEQ ID NO: 446883 - RNA, 19 nt, Artificial Sequence
  Description of Artificial Sequence: Synthetic oligonucleotide
  Sense strand starting at position 101 of SEQ ID NO: 316874
uguauaaagcuugacaagu

SEQ ID NO: 446884 - RNA, 19 nt, Artificial Sequence
  Description of Artificial Sequence: Synthetic oligonucleotide
  Antisense Strand to SEQ ID NO: 446883
acuugucaagcuuuauaca

SEQ ID NO: 446885 - RNA, 19 nt, Artificial Sequence
  Description of Artificial Sequence: Synthetic oligonucleotide
  Sense strand starting at position 514 of SEQ ID NO: 316874
agauuucuauuccauguau

SEQ ID NO: 446886 - RNA, 19 nt, Artificial Sequence
  Description of Artificial Sequence: Synthetic oligonucleotide
  Antisense Strand to SEQ ID NO: 446885
auacauggaauagaaaucu

SEQ ID NO: 446887 - RNA, 19 nt, Artificial Sequence
  Description of Artificial Sequence: Synthetic oligonucleotide
  Sense strand starting at position 593 of SEQ ID NO: 316874
ugguuucugucccucagau

SEQ ID NO: 446888 - RNA, 19 nt, Artificial Sequence
  Description of Artificial Sequence: Synthetic oligonucleotide
  Antisense Strand to SEQ ID NO: 446887
aucugagggacagaaacca

SEQ ID NO: 446889 - RNA, 19 nt, Artificial Sequence
  Description of Artificial Sequence: Synthetic oligonucleotide
  Sense strand starting at position 595 of SEQ ID NO: 316874
guuucugucccucagauau

SEQ ID NO: 446890 - RNA, 19 nt, Artificial Sequence
  Description of Artificial Sequence: Synthetic oligonucleotide
  Antisense Strand to SEQ ID NO: 446889
auaucugagggacagaaac

SEQ ID NO: 446891 - RNA, 19 nt, Artificial Sequence
  Description of Artificial Sequence: Synthetic oligonucleotide
  Sense strand starting at position 606 of SEQ ID NO: 316874
ucagauauuuacugaauug

SEQ ID NO: 446892 - RNA, 19 nt, Artificial Sequence
  Description of Artificial Sequence: Synthetic oligonucleotide
  Antisense Strand to SEQ ID NO: 446891
caauucaguaaauaucuga

SEQ ID NO: 446893 - RNA, 19 nt, Artificial Sequence
  Description of Artificial Sequence: Synthetic oligonucleotide
  Sense strand starting at position 624 of SEQ ID NO: 316874
gaaauacauuguguuugau

SEQ ID NO: 446894 - RNA, 19 nt, Artificial Sequence
  Description of Artificial Sequence: Synthetic oligonucleotide
  Antisense Strand to SEQ ID NO: 446893
aucaaacacaauguauuuc

SEQ ID NO: 446895 - RNA, 19 nt, Artificial Sequence
  Description of Artificial Sequence: Synthetic oligonucleotide
  Sense strand starting at position 653 of SEQ ID NO: 316874
gagaaaccauguuugaugu

SEQ ID NO: 446896 - RNA, 19 nt, Artificial Sequence
  Description of Artificial Sequence: Synthetic oligonucleotide
  Antisense Strand to SEQ ID NO: 446895
acaucaaacaugguuucuc

SEQ ID NO: 446897 - RNA, 19 nt, Artificial Sequence
  Description of Artificial Sequence: Synthetic oligonucleotide
  Sense strand starting at position 654 of SEQ ID NO: 316874
agaaaccauguuugaugua

SEQ ID NO: 446898 - RNA, 19 nt, Artificial Sequence
  Description of Artificial Sequence: Synthetic oligonucleotide
  Antisense Strand to SEQ ID NO: 446897
uacaucaaacaugguuucu

SEQ ID NO: 446899 - RNA, 19 nt, Artificial Sequence
  Description of Artificial Sequence: Synthetic oligonucleotide
  Sense strand starting at position 666 of SEQ ID NO: 316874
ugauguaagccuggucaaa

SEQ ID NO: 446900 - RNA, 19 nt, Artificial Sequence
  Description of Artificial Sequence: Synthetic oligonucleotide
  Antisense Strand to SEQ ID NO: 446899
uuugaccaggcuuacauca

SEQ ID NO: 446901 - RNA, 19 nt, Artificial Sequence
  Description of Artificial Sequence: Synthetic oligonucleotide
  Sense strand starting at position 668 of SEQ ID NO: 316874
auguaagccuggucaaaua

SEQ ID NO: 446902 - RNA, 19 nt, Artificial Sequence
  Description of Artificial Sequence: Synthetic oligonucleotide
  Antisense Strand to SEQ ID NO: 446901
uauuugaccaggcuuacau

SEQ ID NO: 446903 - RNA, 19 nt, Artificial Sequence
  Description of Artificial Sequence: Synthetic oligonucleotide
  Sense strand starting at position 711 of SEQ ID NO: 316874
gucugaaucgcucagauuc

SEQ ID NO: 446904 - RNA, 19 nt, Artificial Sequence
  Description of Artificial Sequence: Synthetic oligonucleotide
  Antisense Strand to SEQ ID NO: 446903
gaaucugagcgauucagac

SEQ ID NO: 446905 - RNA, 19 nt, Artificial Sequence
  Description of Artificial Sequence: Synthetic oligonucleotide
  Sense strand starting at position 828 of SEQ ID NO: 316874
guaagaaguuuaucagauu

SEQ ID NO: 446906 - RNA, 19 nt, Artificial Sequence
  Description of Artificial Sequence: Synthetic oligonucleotide
  Antisense Strand to SEQ ID NO: 446905
aaucugauaaacuucuuac

SEQ ID NO: 446907 - RNA, 19 nt, Artificial Sequence
  Description of Artificial Sequence: Synthetic oligonucleotide
  Sense strand starting at position 953 of SEQ ID NO: 316874
gaggauagagccugucuca

SEQ ID NO: 446908 - RNA, 19 nt, Artificial Sequence
  Description of Artificial Sequence: Synthetic oligonucleotide
  Antisense Strand to SEQ ID NO: 446907
ugagacaggcucuauccuc

SEQ ID NO: 446909 - RNA, 19 nt, Artificial Sequence
  Description of Artificial Sequence: Synthetic oligonucleotide
  Sense strand starting at position 956 of SEQ ID NO: 316874
gauagagccugucucauuc

SEQ ID NO: 446910 - RNA, 19 nt, Artificial Sequence
  Description of Artificial Sequence: Synthetic oligonucleotide
  Antisense Strand to SEQ ID NO: 446909
gaaugagacaggcucuauc

SEQ ID NO: 446911 - RNA, 19 nt, Artificial Sequence
  Description of Artificial Sequence: Synthetic oligonucleotide
  Sense strand starting at position 1074 of SEQ ID NO: 316874
augggaucaguagggcaua

SEQ ID NO: 446912 - RNA, 19 nt, Artificial Sequence
  Description of Artificial Sequence: Synthetic oligonucleotide
  Antisense Strand to SEQ ID NO: 446911
uaugcccuacugaucccau

SEQ ID NO: 446913 - RNA, 19 nt, Artificial Sequence
  Description of Artificial Sequence: Synthetic oligonucleotide
  Sense strand starting at position 1116 of SEQ ID NO: 316874
agagaugucuuccuacuua

SEQ ID NO: 446914 - RNA, 19 nt, Artificial Sequence
  Description of Artificial Sequence: Synthetic oligonucleotide
  Antisense Strand to SEQ ID NO: 446913
uaaguaggaagacaucucu

SEQ ID NO: 446915 - RNA, 19 nt, Artificial Sequence
  Description of Artificial Sequence: Synthetic oligonucleotide
  Sense strand starting at position 1163 of SEQ ID NO: 316874
gucugaggugccuggaaau

SEQ ID NO: 446916 - RNA, 19 nt, Artificial Sequence
  Description of Artificial Sequence: Synthetic oligonucleotide
  Antisense Strand to SEQ ID NO: 446915
auuuccaggcaccucagac

SEQ ID NO: 446917 - RNA, 19 nt, Artificial Sequence
  Description of Artificial Sequence: Synthetic oligonucleotide
  Sense strand starting at position 1175 of SEQ ID NO: 316874
uggaaauacucaccggaug

SEQ ID NO: 446918 - RNA, 19 nt, Artificial Sequence
  Description of Artificial Sequence: Synthetic oligonucleotide
  Antisense Strand to SEQ ID NO: 446917
cauccggugaguauuucca

SEQ ID NO: 446919 - RNA, 19 nt, Artificial Sequence
  Description of Artificial Sequence: Synthetic oligonucleotide
  Sense strand starting at position 2091 of SEQ ID NO: 316874
gcgagucuccuggaaacuu

SEQ ID NO: 446920 - RNA, 19 nt, Artificial Sequence
  Description of Artificial Sequence: Synthetic oligonucleotide
  Antisense Strand to SEQ ID NO: 446919
aaguuuccaggagacucgc

SEQ ID NO: 446921 - RNA, 19 nt, Artificial Sequence
  Description of Artificial Sequence: Synthetic oligonucleotide
  Sense strand starting at position 2102 of SEQ ID NO: 316874
ggaaacuuggcuuguccca

SEQ ID NO: 446922 - RNA, 19 nt, Artificial Sequence
  Description of Artificial Sequence: Synthetic oligonucleotide
  Antisense Strand to SEQ ID NO: 446921
ugggacaagccaaguuucc

SEQ ID NO: 446923 - RNA, 19 nt, Artificial Sequence
  Description of Artificial Sequence: Synthetic oligonucleotide
  Sense strand starting at position 2273 of SEQ ID NO: 316874
guuugaucuccugauucug

SEQ ID NO: 446924 - RNA, 19 nt, Artificial Sequence
  Description of Artificial Sequence: Synthetic oligonucleotide
  Antisense Strand to SEQ ID NO: 446923
cagaaucaggagaucaaac

SEQ ID NO: 446925 - RNA, 19 nt, Artificial Sequence
  Description of Artificial Sequence: Synthetic oligonucleotide
  Sense strand starting at position 2320 of SEQ ID NO: 316874
gugggagugugauagauuu

SEQ ID NO: 446926 - RNA, 19 nt, Artificial Sequence
  Description of Artificial Sequence: Synthetic oligonucleotide
  Antisense Strand to SEQ ID NO: 446925
aaaucuaucacacucccac

SEQ ID NO: 446927 - RNA, 19 nt, Artificial Sequence
  Description of Artificial Sequence: Synthetic oligonucleotide
  Sense strand starting at position 2391 of SEQ ID NO: 316874
uuuggagcuguggguuaaa

SEQ ID NO: 446928 - RNA, 19 nt, Artificial Sequence
  Description of Artificial Sequence: Synthetic oligonucleotide
  Antisense Strand to SEQ ID NO: 446927
uuuaacccacagcuccaaa

SEQ ID NO: 446929 - RNA, 19 nt, Artificial Sequence
  Description of Artificial Sequence: Synthetic oligonucleotide
  Sense strand starting at position 2421 of SEQ ID NO: 316874
uuagcuuuggccuaggaau

SEQ ID NO: 446930 - RNA, 19 nt, Artificial Sequence
  Description of Artificial Sequence: Synthetic oligonucleotide
  Antisense Strand to SEQ ID NO: 446929
auuccuaggccaaagcuaa

SEQ ID NO: 446931 - RNA, 19 nt, Artificial Sequence
  Description of Artificial Sequence: Synthetic oligonucleotide
  Sense strand starting at position 2447 of SEQ ID NO: 316874
uugugaauuuguccuaagu

SEQ ID NO: 446932 - RNA, 19 nt, Artificial Sequence
  Description of Artificial Sequence: Synthetic oligonucleotide
  Antisense Strand to SEQ ID NO: 446931
acuuaggacaaauucacaa

SEQ ID NO: 446933 - RNA, 19 nt, Artificial Sequence
  Description of Artificial Sequence: Synthetic oligonucleotide
  Sense strand starting at position 2468 of SEQ ID NO: 316874
gcagucaaaugggcaaaua

SEQ ID NO: 446934 - RNA, 19 nt, Artificial Sequence
  Description of Artificial Sequence: Synthetic oligonucleotide
  Antisense Strand to SEQ ID NO: 446933
uauuugcccauuugacugc

SEQ ID NO: 446935 - RNA, 19 nt, Artificial Sequence
  Description of Artificial Sequence: Synthetic oligonucleotide
  Sense strand starting at position 2479 of SEQ ID NO: 316874
ggcaaauauguauguacaa

SEQ ID NO: 446936 - RNA, 19 nt, Artificial Sequence
  Description of Artificial Sequence: Synthetic oligonucleotide
  Antisense Strand to SEQ ID NO: 446935
uuguacauacauauuugcc

SEQ ID NO: 446937 - RNA, 19 nt, Artificial Sequence
  Description of Artificial Sequence: Synthetic oligonucleotide
  Sense strand starting at position 2480 of SEQ ID NO: 316874
gcaaauauguauguacaag

SEQ ID NO: 446938 - RNA, 19 nt, Artificial Sequence
  Description of Artificial Sequence: Synthetic oligonucleotide
  Antisense Strand to SEQ ID NO: 446937
cuuguacauacauauuugc

SEQ ID NO: 446939 - RNA, 19 nt, Artificial Sequence
  Description of Artificial Sequence: Synthetic oligonucleotide
  Sense strand starting at position 2553 of SEQ ID NO: 316874
cccaguaagauuggugaag

SEQ ID NO: 446940 - RNA, 19 nt, Artificial Sequence
  Description of Artificial Sequence: Synthetic oligonucleotide
  Antisense Strand to SEQ ID NO: 446939
cuucaccaaucuuacuggg

SEQ ID NO: 446941 - RNA, 19 nt, Artificial Sequence
  Description of Artificial Sequence: Synthetic oligonucleotide
  Sense strand starting at position 2554 of SEQ ID NO: 316874
ccaguaagauuggugaagu

SEQ ID NO: 446942 - RNA, 19 nt, Artificial Sequence
  Description of Artificial Sequence: Synthetic oligonucleotide
  Antisense Strand to SEQ ID NO: 446941
acuucaccaaucuuacugg

SEQ ID NO: 446943 - RNA, 19 nt, Artificial Sequence
  Description of Artificial Sequence: Synthetic oligonucleotide
  Sense strand starting at position 2565 of SEQ ID NO: 316874
ggugaaguaagcuacagua

SEQ ID NO: 446944 - RNA, 19 nt, Artificial Sequence
  Description of Artificial Sequence: Synthetic oligonucleotide
  Antisense Strand to SEQ ID NO: 446943
uacuguagcuuacuucacc

SEQ ID NO: 446945 - RNA, 19 nt, Artificial Sequence
  Description of Artificial Sequence: Synthetic oligonucleotide
  Sense strand starting at position 2589 of SEQ ID NO: 316874
agacaucgaauauguugua

SEQ ID NO: 446946 - RNA, 19 nt, Artificial Sequence
  Description of Artificial Sequence: Synthetic oligonucleotide
  Antisense Strand to SEQ ID NO: 446945
uacaacauauucgaugucu

SEQ ID NO: 446947 - RNA, 19 nt, Artificial Sequence
  Description of Artificial Sequence: Synthetic oligonucleotide
  Sense strand starting at position 2616 of SEQ ID NO: 316874
aaaugaggauucguugaca

SEQ ID NO: 446948 - RNA, 19 nt, Artificial Sequence
  Description of Artificial Sequence: Synthetic oligonucleotide
  Antisense Strand to SEQ ID NO: 446947
ugucaacgaauccucauuu

SEQ ID NO: 446949 - RNA, 19 nt, Artificial Sequence
  Description of Artificial Sequence: Synthetic oligonucleotide
  Sense strand starting at position 2780 of SEQ ID NO: 316874
aauagugauucuuucugag

SEQ ID NO: 446950 - RNA, 19 nt, Artificial Sequence
  Description of Artificial Sequence: Synthetic oligonucleotide
  Antisense Strand to SEQ ID NO: 446949
cucagaaagaaucacuauu

SEQ ID NO: 446951 - RNA, 19 nt, Artificial Sequence
  Description of Artificial Sequence: Synthetic oligonucleotide
  Sense strand starting at position 2796 of SEQ ID NO: 316874
gagcgauguguuuaaggca

SEQ ID NO: 446952 - RNA, 19 nt, Artificial Sequence
  Description of Artificial Sequence: Synthetic oligonucleotide
  Antisense Strand to SEQ ID NO: 446951
ugccuuaaacacaucgcuc

SEQ ID NO: 446953 - RNA, 19 nt, Artificial Sequence
  Description of Artificial Sequence: Synthetic oligonucleotide
  Sense strand starting at position 3903 of SEQ ID NO: 316874
ccagaaaguuaucuuaaug

SEQ ID NO: 446954 - RNA, 19 nt, Artificial Sequence
  Description of Artificial Sequence: Synthetic oligonucleotide
  Antisense Strand to SEQ ID NO: 446953
cauuaagauaacuuucugg

SEQ ID NO: 446955 - RNA, 19 nt, Artificial Sequence
  Description of Artificial Sequence: Synthetic oligonucleotide
  Sense strand starting at position 3910 of SEQ ID NO: 316874
guuaucuuaaugugagagu

SEQ ID NO: 446956 - RNA, 19 nt, Artificial Sequence
  Description of Artificial Sequence: Synthetic oligonucleotide
  Antisense Strand to SEQ ID NO: 446955
acucucacauuaagauaac

SEQ ID NO: 446957 - RNA, 19 nt, Artificial Sequence
  Description of Artificial Sequence: Synthetic oligonucleotide
  Sense strand starting at position 3930 of SEQ ID NO: 316874
gguggaaacugcuuuaaau

SEQ ID NO: 446958 - RNA, 19 nt, Artificial Sequence
  Description of Artificial Sequence: Synthetic oligonucleotide
  Antisense Strand to SEQ ID NO: 446957
auuuaaagcaguuuccacc

SEQ ID NO: 446959 - RNA, 19 nt, Artificial Sequence
  Description of Artificial Sequence: Synthetic oligonucleotide
  Sense strand starting at position 3965 of SEQ ID NO: 316874
uuugaauugagcgagacuu

SEQ ID NO: 446960 - RNA, 19 nt, Artificial Sequence
  Description of Artificial Sequence: Synthetic oligonucleotide
  Antisense Strand to SEQ ID NO: 446959
aagucucgcucaauucaaa

SEQ ID NO: 446961 - RNA, 19 nt, Artificial Sequence
  Description of Artificial Sequence: Synthetic oligonucleotide
  Sense strand starting at position 218 of SEQ ID NO: 316875
aguaguagccaauauucuu

SEQ ID NO: 446962 - RNA, 19 nt, Artificial Sequence
  Description of Artificial Sequence: Synthetic oligonucleotide
  Antisense Strand to SEQ ID NO: 446961
aagaauauuggcuacuacu

SEQ ID NO: 446963 - RNA, 19 nt, Artificial Sequence
  Description of Artificial Sequence: Synthetic oligonucleotide
  Sense strand starting at position 241 of SEQ ID NO: 316875
agaauacaauucgcuuaaa

SEQ ID NO: 446964 - RNA, 19 nt, Artificial Sequence
  Description of Artificial Sequence: Synthetic oligonucleotide
  Antisense Strand to SEQ ID NO: 446963
uuuaagcgaauuguauucu

SEQ ID NO: 446965 - RNA, 19 nt, Artificial Sequence
  Description of Artificial Sequence: Synthetic oligonucleotide
  Sense strand starting at position 501 of SEQ ID NO: 316875
uuguuaguacagugaagga

SEQ ID NO: 446966 - RNA, 19 nt, Artificial Sequence
  Description of Artificial Sequence: Synthetic oligonucleotide
  Antisense Strand to SEQ ID NO: 446965
uccuucacuguacuaacaa

SEQ ID NO: 446967 - RNA, 19 nt, Artificial Sequence
  Description of Artificial Sequence: Synthetic oligonucleotide
  Sense strand starting at position 536 of SEQ ID NO: 316875
uuuaucucacuguaaguau

SEQ ID NO: 446968 - RNA, 19 nt, Artificial Sequence
  Description of Artificial Sequence: Synthetic oligonucleotide
  Antisense Strand to SEQ ID NO: 446967
auacuuacagugagauaaa

SEQ ID NO: 446969 - RNA, 19 nt, Artificial Sequence
  Description of Artificial Sequence: Synthetic oligonucleotide
  Sense strand starting at position 543 of SEQ ID NO: 316875
cacuguaaguaucuguaga

SEQ ID NO: 446970 - RNA, 19 nt, Artificial Sequence
  Description of Artificial Sequence: Synthetic oligonucleotide
  Antisense Strand to SEQ ID NO: 446969
ucuacagauacuuacagug

SEQ ID NO: 446971 - RNA, 19 nt, Artificial Sequence
  Description of Artificial Sequence: Synthetic oligonucleotide
  Sense strand starting at position 545 of SEQ ID NO: 316875
cuguaaguaucuguagaaa

SEQ ID NO: 446972 - RNA, 19 nt, Artificial Sequence
  Description of Artificial Sequence: Synthetic oligonucleotide
  Antisense Strand to SEQ ID NO: 446971
uuucuacagauacuuacag

SEQ ID NO: 446973 - RNA, 19 nt, Artificial Sequence
  Description of Artificial Sequence: Synthetic oligonucleotide
  Sense strand starting at position 759 of SEQ ID NO: 316875
augaaacauuucuauggaa

SEQ ID NO: 446974 - RNA, 19 nt, Artificial Sequence
  Description of Artificial Sequence: Synthetic oligonucleotide
  Antisense Strand to SEQ ID NO: 446973
uuccauagaaauguuucau

SEQ ID NO: 446975 - RNA, 19 nt, Artificial Sequence
  Description of Artificial Sequence: Synthetic oligonucleotide
  Sense strand starting at position 798 of SEQ ID NO: 316875
agcaguugaaguugaaaua

SEQ ID NO: 446976 - RNA, 19 nt, Artificial Sequence
  Description of Artificial Sequence: Synthetic oligonucleotide
  Antisense Strand to SEQ ID NO: 446975
uauuucaacuucaacugcu

SEQ ID NO: 446977 - RNA, 19 nt, Artificial Sequence
  Description of Artificial Sequence: Synthetic oligonucleotide
  Sense strand starting at position 1085 of SEQ ID NO: 316875
uguaauaaaucugucugga

SEQ ID NO: 446978 - RNA, 19 nt, Artificial Sequence
  Description of Artificial Sequence: Synthetic oligonucleotide
  Antisense Strand to SEQ ID NO: 446977
uccagacagauuuauuaca

SEQ ID NO: 446979 - RNA, 19 nt, Artificial Sequence
  Description of Artificial Sequence: Synthetic oligonucleotide
  Sense strand starting at position 1114 of SEQ ID NO: 316875
gggaaauguuauccuuaac

SEQ ID NO: 446980 - RNA, 19 nt, Artificial Sequence
  Description of Artificial Sequence: Synthetic oligonucleotide
  Antisense Strand to SEQ ID NO: 446979
guuaaggauaacauuuccc

SEQ ID NO: 446981 - RNA, 19 nt, Artificial Sequence
  Description of Artificial Sequence: Synthetic oligonucleotide
  Sense strand starting at position 1548 of SEQ ID NO: 316875
aaaguuauauggcuugaua

SEQ ID NO: 446982 - RNA, 19 nt, Artificial Sequence
  Description of Artificial Sequence: Synthetic oligonucleotide
  Antisense Strand to SEQ ID NO: 446981
uaucaagccauauaacuuu

SEQ ID NO: 446983 - RNA, 19 nt, Artificial Sequence
  Description of Artificial Sequence: Synthetic oligonucleotide
  Sense strand starting at position 1550 of SEQ ID NO: 316875
aguuauauggcuugauaca

SEQ ID NO: 446984 - RNA, 19 nt, Artificial Sequence
  Description of Artificial Sequence: Synthetic oligonucleotide
  Antisense Strand to SEQ ID NO: 446983
uguaucaagccauauaacu

SEQ ID NO: 446985 - RNA, 19 nt, Artificial Sequence
  Description of Artificial Sequence: Synthetic oligonucleotide
  Sense strand starting at position 1551 of SEQ ID NO: 316875
guuauauggcuugauacaa

SEQ ID NO: 446986 - RNA, 19 nt, Artificial Sequence
  Description of Artificial Sequence: Synthetic oligonucleotide
  Antisense Strand to SEQ ID NO: 446985
uuguaucaagccauauaac

SEQ ID NO: 446987 - RNA, 19 nt, Artificial Sequence
  Description of Artificial Sequence: Synthetic oligonucleotide
  Sense strand starting at position 1649 of SEQ ID NO: 316875
uauguaaauuugcaaggga

SEQ ID NO: 446988 - RNA, 19 nt, Artificial Sequence
  Description of Artificial Sequence: Synthetic oligonucleotide
  Antisense Strand to SEQ ID NO: 446987
ucccuugcaaauuuacaua

SEQ ID NO: 446989 - RNA, 19 nt, Artificial Sequence
  Description of Artificial Sequence: Synthetic oligonucleotide
  Sense strand starting at position 1691 of SEQ ID NO: 316875
gcaaguuuggucgucugua

SEQ ID NO: 446990 - RNA, 19 nt, Artificial Sequence
  Description of Artificial Sequence: Synthetic oligonucleotide
  Antisense Strand to SEQ ID NO: 446989
uacagacgaccaaacuugc

SEQ ID NO: 446991 - RNA, 19 nt, Artificial Sequence
  Description of Artificial Sequence: Synthetic oligonucleotide
  Sense strand starting at position 2068 of SEQ ID NO: 316875
uaguucugguaacuugaaa

SEQ ID NO: 446992 - RNA, 19 nt, Artificial Sequence
  Description of Artificial Sequence: Synthetic oligonucleotide
  Antisense Strand to SEQ ID NO: 446991
uuucaaguuaccagaacua

SEQ ID NO: 446993 - RNA, 19 nt, Artificial Sequence
  Description of Artificial Sequence: Synthetic oligonucleotide
  Sense strand starting at position 2095 of SEQ ID NO: 316875
ugagcaguuccacagacaa

SEQ ID NO: 446994 - RNA, 19 nt, Artificial Sequence
  Description of Artificial Sequence: Synthetic oligonucleotide
  Antisense Strand to SEQ ID NO: 446993
uugucuguggaacugcuca

SEQ ID NO: 446995 - RNA, 19 nt, Artificial Sequence
  Description of Artificial Sequence: Synthetic oligonucleotide
  Sense strand starting at position 2156 of SEQ ID NO: 316875
ccaagaguccuguacuucu

SEQ ID NO: 446996 - RNA, 19 nt, Artificial Sequence
  Description of Artificial Sequence: Synthetic oligonucleotide
  Antisense Strand to SEQ ID NO: 446995
agaaguacaggacucuugg

SEQ ID NO: 446997 - RNA, 19 nt, Artificial Sequence
  Description of Artificial Sequence: Synthetic oligonucleotide
  Sense strand starting at position 2159 of SEQ ID NO: 316875
agaguccuguacuucucaa

SEQ ID NO: 446998 - RNA, 19 nt, Artificial Sequence
  Description of Artificial Sequence: Synthetic oligonucleotide
  Antisense Strand to SEQ ID NO: 446997
uugagaaguacaggacucu

SEQ ID NO: 446999 - RNA, 19 nt, Artificial Sequence
  Description of Artificial Sequence: Synthetic oligonucleotide
  Sense strand starting at position 2200 of SEQ ID NO: 316875
gauuccauuugucaaggaa

SEQ ID NO: 447000 - RNA, 19 nt, Artificial Sequence
  Description of Artificial Sequence: Synthetic oligonucleotide
  Antisense Strand to SEQ ID NO: 446999
uuccuugacaaauggaauc

SEQ ID NO: 447001 - RNA, 19 nt, Artificial Sequence
  Description of Artificial Sequence: Synthetic oligonucleotide
  Sense strand starting at position 2250 of SEQ ID NO: 316875
agcagaaggcaagaguuau

SEQ ID NO: 447002 - RNA, 19 nt, Artificial Sequence
  Description of Artificial Sequence: Synthetic oligonucleotide
  Antisense Strand to SEQ ID NO: 447001
auaacucuugccuucugcu

SEQ ID NO: 447003 - RNA, 19 nt, Artificial Sequence
  Description of Artificial Sequence: Synthetic oligonucleotide
  Sense strand starting at position 2258 of SEQ ID NO: 316875
gcaagaguuauguugcguc

SEQ ID NO: 447004 - RNA, 19 nt, Artificial Sequence
  Description of Artificial Sequence: Synthetic oligonucleotide
  Antisense Strand to SEQ ID NO: 447003
gacgcaacauaacucuugc

SEQ ID NO: 447005 - RNA, 19 nt, Artificial Sequence
  Description of Artificial Sequence: Synthetic oligonucleotide
  Sense strand starting at position 2385 of SEQ ID NO: 316875
guauuuccugcugauguuu

SEQ ID NO: 447006 - RNA, 19 nt, Artificial Sequence
  Description of Artificial Sequence: Synthetic oligonucleotide
  Antisense Strand to SEQ ID NO: 447005
aaacaucagcaggaaauac

SEQ ID NO: 447007 - RNA, 19 nt, Artificial Sequence
  Description of Artificial Sequence: Synthetic oligonucleotide
  Sense strand starting at position 2727 of SEQ ID NO: 316875
ucuucuuugguguagaaua

SEQ ID NO: 447008 - RNA, 19 nt, Artificial Sequence
  Description of Artificial Sequence: Synthetic oligonucleotide
  Antisense Strand to SEQ ID NO: 447007
uauucuacaccaaagaaga

SEQ ID NO: 447009 - RNA, 19 nt, Artificial Sequence
  Description of Artificial Sequence: Synthetic oligonucleotide
  Sense strand starting at position 2737 of SEQ ID NO: 316875
uguagaauaccaggguguu

SEQ ID NO: 447010 - RNA, 19 nt, Artificial Sequence
  Description of Artificial Sequence: Synthetic oligonucleotide
  Antisense Strand to SEQ ID NO: 447009
aacacccugguauucuaca

SEQ ID NO: 447011 - RNA, 19 nt, Artificial Sequence
  Description of Artificial Sequence: Synthetic oligonucleotide
  Sense strand starting at position 2738 of SEQ ID NO: 316875
guagaauaccaggguguua

SEQ ID NO: 447012 - RNA, 19 nt, Artificial Sequence
  Description of Artificial Sequence: Synthetic oligonucleotide
  Antisense Strand to SEQ ID NO: 447011
uaacacccugguauucuac

SEQ ID NO: 447013 - RNA, 19 nt, Artificial Sequence
  Description of Artificial Sequence: Synthetic oligonucleotide
  Sense strand starting at position 2925 of SEQ ID NO: 316875
gcuuguaggcaugagguau

SEQ ID NO: 447014 - RNA, 19 nt, Artificial Sequence
  Description of Artificial Sequence: Synthetic oligonucleotide
  Antisense Strand to SEQ ID NO: 447013
auaccucaugccuacaagc

SEQ ID NO: 447015 - RNA, 19 nt, Artificial Sequence
  Description of Artificial Sequence: Synthetic oligonucleotide
  Sense strand starting at position 3010 of SEQ ID NO: 316875
gguccuauuuauuauaaga

SEQ ID NO: 447016 - RNA, 19 nt, Artificial Sequence
  Description of Artificial Sequence: Synthetic oligonucleotide
  Antisense Strand to SEQ ID NO: 447015
ucuuauaauaaauaggacc

SEQ ID NO: 447017 - RNA, 19 nt, Artificial Sequence
  Description of Artificial Sequence: Synthetic oligonucleotide
  Sense strand starting at position 3616 of SEQ ID NO: 316875
ggauuacuggcuuaagcuu

SEQ ID NO: 447018 - RNA, 19 nt, Artificial Sequence
  Description of Artificial Sequence: Synthetic oligonucleotide
  Antisense Strand to SEQ ID NO: 447017
aagcuuaagccaguaaucc

SEQ ID NO: 447019 - RNA, 19 nt, Artificial Sequence
  Description of Artificial Sequence: Synthetic oligonucleotide
  Sense strand starting at position 3699 of SEQ ID NO: 316875
augaguaaacuugguacua

SEQ ID NO: 447020 - RNA, 19 nt, Artificial Sequence
  Description of Artificial Sequence: Synthetic oligonucleotide
  Antisense Strand to SEQ ID NO: 447019
uaguaccaaguuuacucau

SEQ ID NO: 447021 - RNA, 19 nt, Artificial Sequence
  Description of Artificial Sequence: Synthetic oligonucleotide
  Sense strand starting at position 3700 of SEQ ID NO: 316875
ugaguaaacuugguacuag

SEQ ID NO: 447022 - RNA, 19 nt, Artificial Sequence
  Description of Artificial Sequence: Synthetic oligonucleotide
  Antisense Strand to SEQ ID NO: 447021
cuaguaccaaguuuacuca

SEQ ID NO: 447023 - RNA, 19 nt, Artificial Sequence
  Description of Artificial Sequence: Synthetic oligonucleotide
  Sense strand starting at position 3772 of SEQ ID NO: 316875
aucggaauuucuccugucu

SEQ ID NO: 447024 - RNA, 19 nt, Artificial Sequence
  Description of Artificial Sequence: Synthetic oligonucleotide
  Antisense Strand to SEQ ID NO: 447023
agacaggagaaauuccgau

SEQ ID NO: 447025 - RNA, 19 nt, Artificial Sequence
  Description of Artificial Sequence: Synthetic oligonucleotide
  Sense strand starting at position 3781 of SEQ ID NO: 316875
ucuccugucuauucuggaa

SEQ ID NO: 447026 - RNA, 19 nt, Artificial Sequence
  Description of Artificial Sequence: Synthetic oligonucleotide
  Antisense Strand to SEQ ID NO: 447025
uuccagaauagacaggaga

SEQ ID NO: 447027 - RNA, 19 nt, Artificial Sequence
  Description of Artificial Sequence: Synthetic oligonucleotide
  Sense strand starting at position 3802 of SEQ ID NO: 316875
cgcugcuauauagaggaau

SEQ ID NO: 447028 - RNA, 19 nt, Artificial Sequence
  Description of Artificial Sequence: Synthetic oligonucleotide
  Antisense Strand to SEQ ID NO: 447027
auuccucuauauagcagcg

SEQ ID NO: 447029 - RNA, 19 nt, Artificial Sequence
  Description of Artificial Sequence: Synthetic oligonucleotide
  Sense strand starting at position 3804 of SEQ ID NO: 316875
cugcuauauagaggaauug

SEQ ID NO: 447030 - RNA, 19 nt, Artificial Sequence
  Description of Artificial Sequence: Synthetic oligonucleotide
  Antisense Strand to SEQ ID NO: 447029
caauuccucuauauagcag

SEQ ID NO: 447031 - RNA, 19 nt, Artificial Sequence
  Description of Artificial Sequence: Synthetic oligonucleotide
  Sense strand starting at position 3805 of SEQ ID NO: 316875
ugcuauauagaggaauugu

SEQ ID NO: 447032 - RNA, 19 nt, Artificial Sequence
  Description of Artificial Sequence: Synthetic oligonucleotide
  Antisense Strand to SEQ ID NO: 447031
acaauuccucuauauagca

SEQ ID NO: 447033 - RNA, 19 nt, Artificial Sequence
  Description of Artificial Sequence: Synthetic oligonucleotide
  Sense strand starting at position 3837 of SEQ ID NO: 316875
ugacucuauucugugugaa

SEQ ID NO: 447034 - RNA, 19 nt, Artificial Sequence
  Description of Artificial Sequence: Synthetic oligonucleotide
  Antisense Strand to SEQ ID NO: 447033
uucacacagaauagaguca

SEQ ID NO: 447035 - RNA, 19 nt, Artificial Sequence
  Description of Artificial Sequence: Synthetic oligonucleotide
  Sense strand starting at position 3838 of SEQ ID NO: 316875
gacucuauucugugugaau

SEQ ID NO: 447036 - RNA, 19 nt, Artificial Sequence
  Description of Artificial Sequence: Synthetic oligonucleotide
  Antisense Strand to SEQ ID NO: 447035
auucacacagaauagaguc

SEQ ID NO: 447037 - RNA, 19 nt, Artificial Sequence
  Description of Artificial Sequence: Synthetic oligonucleotide
  Sense strand starting at position 3839 of SEQ ID NO: 316875
acucuauucugugugaauu

SEQ ID NO: 447038 - RNA, 19 nt, Artificial Sequence
  Description of Artificial Sequence: Synthetic oligonucleotide
  Antisense Strand to SEQ ID NO: 447037
aauucacacagaauagagu

SEQ ID NO: 447039 - RNA, 19 nt, Artificial Sequence
  Description of Artificial Sequence: Synthetic oligonucleotide
  Sense strand starting at position 3840 of SEQ ID NO: 316875
cucuauucugugugaauuu

SEQ ID NO: 447040 - RNA, 19 nt, Artificial Sequence
  Description of Artificial Sequence: Synthetic oligonucleotide
  Antisense Strand to SEQ ID NO: 447039
aaauucacacagaauagag

SEQ ID NO: 447041 - RNA, 19 nt, Artificial Sequence
  Description of Artificial Sequence: Synthetic oligonucleotide
  Sense strand starting at position 67 of SEQ ID NO: 316876
ccagauaugcuaugguaca

SEQ ID NO: 447042 - RNA, 19 nt, Artificial Sequence
  Description of Artificial Sequence: Synthetic oligonucleotide
  Antisense Strand to SEQ ID NO: 447041
uguaccauagcauaucugg

SEQ ID NO: 447043 - RNA, 19 nt, Artificial Sequence
  Description of Artificial Sequence: Synthetic oligonucleotide
  Sense strand starting at position 160 of SEQ ID NO: 316876
agaaaugauugagaauuac

SEQ ID NO: 447044 - RNA, 19 nt, Artificial Sequence
  Description of Artificial Sequence: Synthetic oligonucleotide
  Antisense Strand to SEQ ID NO: 447043
guaauucucaaucauuucu

SEQ ID NO: 447045 - RNA, 19 nt, Artificial Sequence
  Description of Artificial Sequence: Synthetic oligonucleotide
  Sense strand starting at position 199 of SEQ ID NO: 316876
ucucuuacacugugugauu

SEQ ID NO: 447046 - RNA, 19 nt, Artificial Sequence
  Description of Artificial Sequence: Synthetic oligonucleotide
  Antisense Strand to SEQ ID NO: 447045
aaucacacaguguaagaga

SEQ ID NO: 447047 - RNA, 19 nt, Artificial Sequence
  Description of Artificial Sequence: Synthetic oligonucleotide
  Sense strand starting at position 200 of SEQ ID NO: 316876
cucuuacacugugugauuu

SEQ ID NO: 447048 - RNA, 19 nt, Artificial Sequence
  Description of Artificial Sequence: Synthetic oligonucleotide
  Antisense Strand to SEQ ID NO: 447047
aaaucacacaguguaagag

SEQ ID NO: 447049 - RNA, 19 nt, Artificial Sequence
  Description of Artificial Sequence: Synthetic oligonucleotide
  Sense strand starting at position 242 of SEQ ID NO: 316876
uuauacaugcuuuggauau

SEQ ID NO: 447050 - RNA, 19 nt, Artificial Sequence
  Description of Artificial Sequence: Synthetic oligonucleotide
  Antisense Strand to SEQ ID NO: 447049
auauccaaagcauguauaa

SEQ ID NO: 447051 - RNA, 19 nt, Artificial Sequence
  Description of Artificial Sequence: Synthetic oligonucleotide
  Sense strand starting at position 300 of SEQ ID NO: 316876
gugcauuccagucaaggua

SEQ ID NO: 447052 - RNA, 19 nt, Artificial Sequence
  Description of Artificial Sequence: Synthetic oligonucleotide
  Antisense Strand to SEQ ID NO: 447051
uaccuugacuggaaugcac

SEQ ID NO: 447053 - RNA, 19 nt, Artificial Sequence
  Description of Artificial Sequence: Synthetic oligonucleotide
  Sense strand starting at position 324 of SEQ ID NO: 316876
caauauauugcaggucaag

SEQ ID NO: 447054 - RNA, 19 nt, Artificial Sequence
  Description of Artificial Sequence: Synthetic oligonucleotide
  Antisense Strand to SEQ ID NO: 447053
cuugaccugcaauauauug

SEQ ID NO: 447055 - RNA, 19 nt, Artificial Sequence
  Description of Artificial Sequence: Synthetic oligonucleotide
  Sense strand starting at position 373 of SEQ ID NO: 316876
agagaugacuaccaaucuu

SEQ ID NO: 447056 - RNA, 19 nt, Artificial Sequence
  Description of Artificial Sequence: Synthetic oligonucleotide
  Antisense Strand to SEQ ID NO: 447055
aagauugguagucaucucu

SEQ ID NO: 447057 - RNA, 19 nt, Artificial Sequence
  Description of Artificial Sequence: Synthetic oligonucleotide
  Sense strand starting at position 467 of SEQ ID NO: 316876
gggccaccucugcaguaaa

SEQ ID NO: 447058 - RNA, 19 nt, Artificial Sequence
  Description of Artificial Sequence: Synthetic oligonucleotide
  Antisense Strand to SEQ ID NO: 447057
uuuacugcagagguggccc

SEQ ID NO: 447059 - RNA, 19 nt, Artificial Sequence
  Description of Artificial Sequence: Synthetic oligonucleotide
  Sense strand starting at position 470 of SEQ ID NO: 316876
ccaccucugcaguaaagua

SEQ ID NO: 447060 - RNA, 19 nt, Artificial Sequence
  Description of Artificial Sequence: Synthetic oligonucleotide
  Antisense Strand to SEQ ID NO: 447059
uacuuuacugcagaggugg

SEQ ID NO: 447061 - RNA, 19 nt, Artificial Sequence
  Description of Artificial Sequence: Synthetic oligonucleotide
  Sense strand starting at position 578 of SEQ ID NO: 316876
gcuacuaagccucagaguu

SEQ ID NO: 447062 - RNA, 19 nt, Artificial Sequence
  Description of Artificial Sequence: Synthetic oligonucleotide
  Antisense Strand to SEQ ID NO: 447061
aacucugaggcuuaguagc

SEQ ID NO: 447063 - RNA, 19 nt, Artificial Sequence
  Description of Artificial Sequence: Synthetic oligonucleotide
  Sense strand starting at position 863 of SEQ ID NO: 316876
agcaguuaaggugauaaua

SEQ ID NO: 447064 - RNA, 19 nt, Artificial Sequence
  Description of Artificial Sequence: Synthetic oligonucleotide
  Antisense Strand to SEQ ID NO: 447063
uauuaucaccuuaacugcu

SEQ ID NO: 447065 - RNA, 19 nt, Artificial Sequence
  Description of Artificial Sequence: Synthetic oligonucleotide
  Sense strand starting at position 871 of SEQ ID NO: 316876
aggugauaauaaggaagaa

SEQ ID NO: 447066 - RNA, 19 nt, Artificial Sequence
  Description of Artificial Sequence: Synthetic oligonucleotide
  Antisense Strand to SEQ ID NO: 447065
uucuuccuuauuaucaccu

SEQ ID NO: 447067 - RNA, 19 nt, Artificial Sequence
  Description of Artificial Sequence: Synthetic oligonucleotide
  Sense strand starting at position 1384 of SEQ ID NO: 316876
ucaagcuagccacaagauu

SEQ ID NO: 447068 - RNA, 19 nt, Artificial Sequence
  Description of Artificial Sequence: Synthetic oligonucleotide
  Antisense Strand to SEQ ID NO: 447067
aaucuuguggcuagcuuga

SEQ ID NO: 447069 - RNA, 19 nt, Artificial Sequence
  Description of Artificial Sequence: Synthetic oligonucleotide
  Sense strand starting at position 1466 of SEQ ID NO: 316876
uugaaagugcucuacuuua

SEQ ID NO: 447070 - RNA, 19 nt, Artificial Sequence
  Description of Artificial Sequence: Synthetic oligonucleotide
  Antisense Strand to SEQ ID NO: 447069
uaaaguagagcacuuucaa

SEQ ID NO: 447071 - RNA, 19 nt, Artificial Sequence
  Description of Artificial Sequence: Synthetic oligonucleotide
  Sense strand starting at position 1490 of SEQ ID NO: 316876
aguugacuuaacggaauaa

SEQ ID NO: 447072 - RNA, 19 nt, Artificial Sequence
  Description of Artificial Sequence: Synthetic oligonucleotide
  Antisense Strand to SEQ ID NO: 447071
uuauuccguuaagucaacu

SEQ ID NO: 447073 - RNA, 19 nt, Artificial Sequence
  Description of Artificial Sequence: Synthetic oligonucleotide
  Sense strand starting at position 1501 of SEQ ID NO: 316876
cggaauaaaucagcaugca

SEQ ID NO: 447074 - RNA, 19 nt, Artificial Sequence
  Description of Artificial Sequence: Synthetic oligonucleotide
  Antisense Strand to SEQ ID NO: 447073
ugcaugcugauuuauuccg

SEQ ID NO: 447075 - RNA, 19 nt, Artificial Sequence
  Description of Artificial Sequence: Synthetic oligonucleotide
  Sense strand starting at position 1502 of SEQ ID NO: 316876
ggaauaaaucagcaugcau

SEQ ID NO: 447076 - RNA, 19 nt, Artificial Sequence
  Description of Artificial Sequence: Synthetic oligonucleotide
  Antisense Strand to SEQ ID NO: 447075
augcaugcugauuuauucc

SEQ ID NO: 447077 - RNA, 19 nt, Artificial Sequence
  Description of Artificial Sequence: Synthetic oligonucleotide
  Sense strand starting at position 1774 of SEQ ID NO: 316876
ucagaaagcgucuggaaga

SEQ ID NO: 447078 - RNA, 19 nt, Artificial Sequence
  Description of Artificial Sequence: Synthetic oligonucleotide
  Antisense Strand to SEQ ID NO: 447077
ucuuccagacgcuuucuga

SEQ ID NO: 447079 - RNA, 19 nt, Artificial Sequence
  Description of Artificial Sequence: Synthetic oligonucleotide
  Sense strand starting at position 1851 of SEQ ID NO: 316876
gcacauauucuuugaugug

SEQ ID NO: 447080 - RNA, 19 nt, Artificial Sequence
  Description of Artificial Sequence: Synthetic oligonucleotide
  Antisense Strand to SEQ ID NO: 447079
cacaucaaagaauaugugc

SEQ ID NO: 447081 - RNA, 19 nt, Artificial Sequence
  Description of Artificial Sequence: Synthetic oligonucleotide
  Sense strand starting at position 1978 of SEQ ID NO: 316876
acugccuggaguugaaauu

SEQ ID NO: 447082 - RNA, 19 nt, Artificial Sequence
  Description of Artificial Sequence: Synthetic oligonucleotide
  Antisense Strand to SEQ ID NO: 447081
aauuucaacuccaggcagu

SEQ ID NO: 447083 - RNA, 19 nt, Artificial Sequence
  Description of Artificial Sequence: Synthetic oligonucleotide
  Sense strand starting at position 2006 of SEQ ID NO: 316876
gccucagugcuggcaagua

SEQ ID NO: 447084 - RNA, 19 nt, Artificial Sequence
  Description of Artificial Sequence: Synthetic oligonucleotide
  Antisense Strand to SEQ ID NO: 447083
uacuugccagcacugaggc

SEQ ID NO: 447085 - RNA, 19 nt, Artificial Sequence
  Description of Artificial Sequence: Synthetic oligonucleotide
  Sense strand starting at position 2032 of SEQ ID NO: 316876
ucacgugacacgggucuua

SEQ ID NO: 447086 - RNA, 19 nt, Artificial Sequence
  Description of Artificial Sequence: Synthetic oligonucleotide
  Antisense Strand to SEQ ID NO: 447085
uaagacccgugucacguga

SEQ ID NO: 447087 - RNA, 19 nt, Artificial Sequence
  Description of Artificial Sequence: Synthetic oligonucleotide
  Sense strand starting at position 2046 of SEQ ID NO: 316876
ucuuaagucgcugacaucu

SEQ ID NO: 447088 - RNA, 19 nt, Artificial Sequence
  Description of Artificial Sequence: Synthetic oligonucleotide
  Antisense Strand to SEQ ID NO: 447087
agaugucagcgacuuaaga

SEQ ID NO: 447089 - RNA, 19 nt, Artificial Sequence
  Description of Artificial Sequence: Synthetic oligonucleotide
  Sense strand starting at position 2099 of SEQ ID NO: 316876
aggcuucuuugacuccgaa

SEQ ID NO: 447090 - RNA, 19 nt, Artificial Sequence
  Description of Artificial Sequence: Synthetic oligonucleotide
  Antisense Strand to SEQ ID NO: 447089
uucggagucaaagaagccu

SEQ ID NO: 447091 - RNA, 19 nt, Artificial Sequence
  Description of Artificial Sequence: Synthetic oligonucleotide
  Sense strand starting at position 2377 of SEQ ID NO: 316876
uuauguagccguuacuacu

SEQ ID NO: 447092 - RNA, 19 nt, Artificial Sequence
  Description of Artificial Sequence: Synthetic oligonucleotide
  Antisense Strand to SEQ ID NO: 447091
aguaguaacggcuacauaa

SEQ ID NO: 447093 - RNA, 19 nt, Artificial Sequence
  Description of Artificial Sequence: Synthetic oligonucleotide
  Sense strand starting at position 2383 of SEQ ID NO: 316876
agccguuacuacuucuaau

SEQ ID NO: 447094 - RNA, 19 nt, Artificial Sequence
  Description of Artificial Sequence: Synthetic oligonucleotide
  Antisense Strand to SEQ ID NO: 447093
auuagaaguaguaacggcu

SEQ ID NO: 447095 - RNA, 19 nt, Artificial Sequence
  Description of Artificial Sequence: Synthetic oligonucleotide
  Sense strand starting at position 2396 of SEQ ID NO: 316876
ucuaauuauguaugaguug

SEQ ID NO: 447096 - RNA, 19 nt, Artificial Sequence
  Description of Artificial Sequence: Synthetic oligonucleotide
  Antisense Strand to SEQ ID NO: 447095
caacucauacauaauuaga

SEQ ID NO: 447097 - RNA, 19 nt, Artificial Sequence
  Description of Artificial Sequence: Synthetic oligonucleotide
  Sense strand starting at position 2401 of SEQ ID NO: 316876
uuauguaugaguugucuua

SEQ ID NO: 447098 - RNA, 19 nt, Artificial Sequence
  Description of Artificial Sequence: Synthetic oligonucleotide
  Antisense Strand to SEQ ID NO: 447097
uaagacaacucauacauaa

SEQ ID NO: 447099 - RNA, 19 nt, Artificial Sequence
  Description of Artificial Sequence: Synthetic oligonucleotide
  Sense strand starting at position 2403 of SEQ ID NO: 316876
auguaugaguugucuuaua

SEQ ID NO: 447100 - RNA, 19 nt, Artificial Sequence
  Description of Artificial Sequence: Synthetic oligonucleotide
  Antisense Strand to SEQ ID NO: 447099
uauaagacaacucauacau

SEQ ID NO: 447101 - RNA, 19 nt, Artificial Sequence
  Description of Artificial Sequence: Synthetic oligonucleotide
  Sense strand starting at position 2897 of SEQ ID NO: 316876
acaugaucuuguuccuuau

SEQ ID NO: 447102 - RNA, 19 nt, Artificial Sequence
  Description of Artificial Sequence: Synthetic oligonucleotide
  Antisense Strand to SEQ ID NO: 447101
auaaggaacaagaucaugu

SEQ ID NO: 447103 - RNA, 19 nt, Artificial Sequence
  Description of Artificial Sequence: Synthetic oligonucleotide
  Sense strand starting at position 2899 of SEQ ID NO: 316876
augaucuuguuccuuauua

SEQ ID NO: 447104 - RNA, 19 nt, Artificial Sequence
  Description of Artificial Sequence: Synthetic oligonucleotide
  Antisense Strand to SEQ ID NO: 447103
uaauaaggaacaagaucau

SEQ ID NO: 447105 - RNA, 19 nt, Artificial Sequence
  Description of Artificial Sequence: Synthetic oligonucleotide
  Sense strand starting at position 2900 of SEQ ID NO: 316876
ugaucuuguuccuuauuau

SEQ ID NO: 447106 - RNA, 19 nt, Artificial Sequence
  Description of Artificial Sequence: Synthetic oligonucleotide
  Antisense Strand to SEQ ID NO: 447105
auaauaaggaacaagauca

SEQ ID NO: 447107 - RNA, 19 nt, Artificial Sequence
  Description of Artificial Sequence: Synthetic oligonucleotide
  Sense strand starting at position 2982 of SEQ ID NO: 316876
gcauuugaguggguuccau

SEQ ID NO: 447108 - RNA, 19 nt, Artificial Sequence
  Description of Artificial Sequence: Synthetic oligonucleotide
  Antisense Strand to SEQ ID NO: 447107
auggaacccacucaaaugc

SEQ ID NO: 447109 - RNA, 19 nt, Artificial Sequence
  Description of Artificial Sequence: Synthetic oligonucleotide
  Sense strand starting at position 3026 of SEQ ID NO: 316876
cgauaaacauaugugugua

SEQ ID NO: 447110 - RNA, 19 nt, Artificial Sequence
  Description of Artificial Sequence: Synthetic oligonucleotide
  Antisense Strand to SEQ ID NO: 447109
uacacacauauguuuaucg

SEQ ID NO: 447111 - RNA, 19 nt, Artificial Sequence
  Description of Artificial Sequence: Synthetic oligonucleotide
  Sense strand starting at position 3236 of SEQ ID NO: 316876
guuguuuccugacuucuca

SEQ ID NO: 447112 - RNA, 19 nt, Artificial Sequence
  Description of Artificial Sequence: Synthetic oligonucleotide
  Antisense Strand to SEQ ID NO: 447111
ugagaagucaggaaacaac

SEQ ID NO: 447113 - RNA, 19 nt, Artificial Sequence
  Description of Artificial Sequence: Synthetic oligonucleotide
  Sense strand starting at position 3265 of SEQ ID NO: 316876
uucuaacuggcucgagaua

SEQ ID NO: 447114 - RNA, 19 nt, Artificial Sequence
  Description of Artificial Sequence: Synthetic oligonucleotide
  Antisense Strand to SEQ ID NO: 447113
uaucucgagccaguuagaa

SEQ ID NO: 447115 - RNA, 19 nt, Artificial Sequence
  Description of Artificial Sequence: Synthetic oligonucleotide
  Sense strand starting at position 3276 of SEQ ID NO: 316876
ucgagauaguaucucauug

SEQ ID NO: 447116 - RNA, 19 nt, Artificial Sequence
  Description of Artificial Sequence: Synthetic oligonucleotide
  Antisense Strand to SEQ ID NO: 447115
caaugagauacuaucucga

SEQ ID NO: 447117 - RNA, 19 nt, Artificial Sequence
  Description of Artificial Sequence: Synthetic oligonucleotide
  Sense strand starting at position 3861 of SEQ ID NO: 316876
cgaagauuagauuguugua

SEQ ID NO: 447118 - RNA, 19 nt, Artificial Sequence
  Description of Artificial Sequence: Synthetic oligonucleotide
  Antisense Strand to SEQ ID NO: 447117
uacaacaaucuaaucuucg

SEQ ID NO: 447119 - RNA, 19 nt, Artificial Sequence
  Description of Artificial Sequence: Synthetic oligonucleotide
  Sense strand starting at position 3868 of SEQ ID NO: 316876
uagauuguuguagacaugu

SEQ ID NO: 447120 - RNA, 19 nt, Artificial Sequence
  Description of Artificial Sequence: Synthetic oligonucleotide
  Antisense Strand to SEQ ID NO: 447119
acaugucuacaacaaucua

SEQ ID NO: 447121 - RNA, 19 nt, Artificial Sequence
  Description of Artificial Sequence: Synthetic oligonucleotide
  Sense strand starting at position 884 of SEQ ID NO: 316877
ggcuguguccugggaucca

SEQ ID NO: 447122 - RNA, 19 nt, Artificial Sequence
  Description of Artificial Sequence: Synthetic oligonucleotide
  Antisense Strand to SEQ ID NO: 447121
uggaucccaggacacagcc

SEQ ID NO: 447123 - RNA, 19 nt, Artificial Sequence
  Description of Artificial Sequence: Synthetic oligonucleotide
  Sense strand starting at position 1090 of SEQ ID NO: 316877
ggaguucucuaaucacagu

SEQ ID NO: 447124 - RNA, 19 nt, Artificial Sequence
  Description of Artificial Sequence: Synthetic oligonucleotide
  Antisense Strand to SEQ ID NO: 447123
acugugauuagagaacucc

SEQ ID NO: 447125 - RNA, 19 nt, Artificial Sequence
  Description of Artificial Sequence: Synthetic oligonucleotide
  Sense strand starting at position 1293 of SEQ ID NO: 316877
cacgguucgugaucuauua

SEQ ID NO: 447126 - RNA, 19 nt, Artificial Sequence
  Description of Artificial Sequence: Synthetic oligonucleotide
  Antisense Strand to SEQ ID NO: 447125
uaauagaucacgaaccgug

SEQ ID NO: 447127 - RNA, 19 nt, Artificial Sequence
  Description of Artificial Sequence: Synthetic oligonucleotide
  Sense strand starting at position 1295 of SEQ ID NO: 316877
cgguucgugaucuauuauu

SEQ ID NO: 447128 - RNA, 19 nt, Artificial Sequence
  Description of Artificial Sequence: Synthetic oligonucleotide
  Antisense Strand to SEQ ID NO: 447127
aauaauagaucacgaaccg

SEQ ID NO: 447129 - RNA, 19 nt, Artificial Sequence
  Description of Artificial Sequence: Synthetic oligonucleotide
  Sense strand starting at position 1347 of SEQ ID NO: 316877
uguacauguauguaugcaa

SEQ ID NO: 447130 - RNA, 19 nt, Artificial Sequence
  Description of Artificial Sequence: Synthetic oligonucleotide
  Antisense Strand to SEQ ID NO: 447129
uugcauacauacauguaca

SEQ ID NO: 447131 - RNA, 19 nt, Artificial Sequence
  Description of Artificial Sequence: Synthetic oligonucleotide
  Sense strand starting at position 1354 of SEQ ID NO: 316877
guauguaugcaauagguca

SEQ ID NO: 447132 - RNA, 19 nt, Artificial Sequence
  Description of Artificial Sequence: Synthetic oligonucleotide
  Antisense Strand to SEQ ID NO: 447131
ugaccuauugcauacauac

SEQ ID NO: 447133 - RNA, 19 nt, Artificial Sequence
  Description of Artificial Sequence: Synthetic oligonucleotide
  Sense strand starting at position 1755 of SEQ ID NO: 316877
cagugugauguuuacacua

SEQ ID NO: 447134 - RNA, 19 nt, Artificial Sequence
  Description of Artificial Sequence: Synthetic oligonucleotide
  Antisense Strand to SEQ ID NO: 447133
uaguguaaacaucacacug

SEQ ID NO: 447135 - RNA, 19 nt, Artificial Sequence
  Description of Artificial Sequence: Synthetic oligonucleotide
  Sense strand starting at position 1760 of SEQ ID NO: 316877
ugauguuuacacuagguua

SEQ ID NO: 447136 - RNA, 19 nt, Artificial Sequence
  Description of Artificial Sequence: Synthetic oligonucleotide
  Antisense Strand to SEQ ID NO: 447135
uaaccuaguguaaacauca

SEQ ID NO: 447137 - RNA, 19 nt, Artificial Sequence
  Description of Artificial Sequence: Synthetic oligonucleotide
  Sense strand starting at position 1762 of SEQ ID NO: 316877
auguuuacacuagguuaaa

SEQ ID NO: 447138 - RNA, 19 nt, Artificial Sequence
  Description of Artificial Sequence: Synthetic oligonucleotide
  Antisense Strand to SEQ ID NO: 447137
uuuaaccuaguguaaacau

SEQ ID NO: 447139 - RNA, 19 nt, Artificial Sequence
  Description of Artificial Sequence: Synthetic oligonucleotide
  Sense strand starting at position 1878 of SEQ ID NO: 316877
ggugaauucuuaccaggua

SEQ ID NO: 447140 - RNA, 19 nt, Artificial Sequence
  Description of Artificial Sequence: Synthetic oligonucleotide
  Antisense Strand to SEQ ID NO: 447139
uaccugguaagaauucacc

SEQ ID NO: 447141 - RNA, 19 nt, Artificial Sequence
  Description of Artificial Sequence: Synthetic oligonucleotide
  Sense strand starting at position 1879 of SEQ ID NO: 316877
gugaauucuuaccagguau

SEQ ID NO: 447142 - RNA, 19 nt, Artificial Sequence
  Description of Artificial Sequence: Synthetic oligonucleotide
  Antisense Strand to SEQ ID NO: 447141
auaccugguaagaauucac

SEQ ID NO: 447143 - RNA, 19 nt, Artificial Sequence
  Description of Artificial Sequence: Synthetic oligonucleotide
  Sense strand starting at position 2019 of SEQ ID NO: 316877
caugacgagucucccuaau

SEQ ID NO: 447144 - RNA, 19 nt, Artificial Sequence
  Description of Artificial Sequence: Synthetic oligonucleotide
  Antisense Strand to SEQ ID NO: 447143
auuagggagacucgucaug

SEQ ID NO: 447145 - RNA, 19 nt, Artificial Sequence
  Description of Artificial Sequence: Synthetic oligonucleotide
  Sense strand starting at position 2021 of SEQ ID NO: 316877
ugacgagucucccuaaugu

SEQ ID NO: 447146 - RNA, 19 nt, Artificial Sequence
  Description of Artificial Sequence: Synthetic oligonucleotide
  Antisense Strand to SEQ ID NO: 447145
acauuagggagacucguca

SEQ ID NO: 447147 - RNA, 19 nt, Artificial Sequence
  Description of Artificial Sequence: Synthetic oligonucleotide
  Sense strand starting at position 2194 of SEQ ID NO: 316877
gacuuaggaugucaucauu

SEQ ID NO: 447148 - RNA, 19 nt, Artificial Sequence
  Description of Artificial Sequence: Synthetic oligonucleotide
  Antisense Strand to SEQ ID NO: 447147
aaugaugacauccuaaguc

SEQ ID NO: 447149 - RNA, 19 nt, Artificial Sequence
  Description of Artificial Sequence: Synthetic oligonucleotide
  Sense strand starting at position 2252 of SEQ ID NO: 316877
guaccuuuaugugaacuga

SEQ ID NO: 447150 - RNA, 19 nt, Artificial Sequence
  Description of Artificial Sequence: Synthetic oligonucleotide
  Antisense Strand to SEQ ID NO: 447149
ucaguucacauaaagguac

SEQ ID NO: 447151 - RNA, 19 nt, Artificial Sequence
  Description of Artificial Sequence: Synthetic oligonucleotide
  Sense strand starting at position 2287 of SEQ ID NO: 316877
uugugacucagccagagaa

SEQ ID NO: 447152 - RNA, 19 nt, Artificial Sequence
  Description of Artificial Sequence: Synthetic oligonucleotide
  Antisense Strand to SEQ ID NO: 447151
uucucuggcugagucacaa

SEQ ID NO: 447153 - RNA, 19 nt, Artificial Sequence
  Description of Artificial Sequence: Synthetic oligonucleotide
  Sense strand starting at position 2353 of SEQ ID NO: 316877
ccaguugucccuugaccag

SEQ ID NO: 447154 - RNA, 19 nt, Artificial Sequence
  Description of Artificial Sequence: Synthetic oligonucleotide
  Antisense Strand to SEQ ID NO: 447153
cuggucaagggacaacugg

SEQ ID NO: 447155 - RNA, 19 nt, Artificial Sequence
  Description of Artificial Sequence: Synthetic oligonucleotide
  Sense strand starting at position 2504 of SEQ ID NO: 316877
ugcuguuuguggguauacu

SEQ ID NO: 447156 - RNA, 19 nt, Artificial Sequence
  Description of Artificial Sequence: Synthetic oligonucleotide
  Antisense Strand to SEQ ID NO: 447155
aguauacccacaaacagca

SEQ ID NO: 447157 - RNA, 19 nt, Artificial Sequence
  Description of Artificial Sequence: Synthetic oligonucleotide
  Sense strand starting at position 2616 of SEQ ID NO: 316877
guagcacaguuccuguuaa

SEQ ID NO: 447158 - RNA, 19 nt, Artificial Sequence
  Description of Artificial Sequence: Synthetic oligonucleotide
  Antisense Strand to SEQ ID NO: 447157
uuaacaggaacugugcuac

SEQ ID NO: 447159 - RNA, 19 nt, Artificial Sequence
  Description of Artificial Sequence: Synthetic oligonucleotide
  Sense strand starting at position 2623 of SEQ ID NO: 316877
aguuccuguuaaucauuga

SEQ ID NO: 447160 - RNA, 19 nt, Artificial Sequence
  Description of Artificial Sequence: Synthetic oligonucleotide
  Antisense Strand to SEQ ID NO: 447159
ucaaugauuaacaggaacu

SEQ ID NO: 447161 - RNA, 19 nt, Artificial Sequence
  Description of Artificial Sequence: Synthetic oligonucleotide
  Sense strand starting at position 2627 of SEQ ID NO: 316877
ccuguuaaucauugaaaug

SEQ ID NO: 447162 - RNA, 19 nt, Artificial Sequence
  Description of Artificial Sequence: Synthetic oligonucleotide
  Antisense Strand to SEQ ID NO: 447161
cauuucaaugauuaacagg

SEQ ID NO: 447163 - RNA, 19 nt, Artificial Sequence
  Description of Artificial Sequence: Synthetic oligonucleotide
  Sense strand starting at position 2776 of SEQ ID NO: 316877
aagauauggucaugaauca

SEQ ID NO: 447164 - RNA, 19 nt, Artificial Sequence
  Description of Artificial Sequence: Synthetic oligonucleotide
  Antisense Strand to SEQ ID NO: 447163
ugauucaugaccauaucuu

SEQ ID NO: 447165 - RNA, 19 nt, Artificial Sequence
  Description of Artificial Sequence: Synthetic oligonucleotide
  Sense strand starting at position 2872 of SEQ ID NO: 316877
cgauuauaaggcuaccuaa

SEQ ID NO: 447166 - RNA, 19 nt, Artificial Sequence
  Description of Artificial Sequence: Synthetic oligonucleotide
  Antisense Strand to SEQ ID NO: 447165
uuagguagccuuauaaucg

SEQ ID NO: 447167 - RNA, 19 nt, Artificial Sequence
  Description of Artificial Sequence: Synthetic oligonucleotide
  Sense strand starting at position 3198 of SEQ ID NO: 316877
auacgucucaugcaagaga

SEQ ID NO: 447168 - RNA, 19 nt, Artificial Sequence
  Description of Artificial Sequence: Synthetic oligonucleotide
  Antisense Strand to SEQ ID NO: 447167
ucucuugcaugagacguau

SEQ ID NO: 447169 - RNA, 19 nt, Artificial Sequence
  Description of Artificial Sequence: Synthetic oligonucleotide
  Sense strand starting at position 3201 of SEQ ID NO: 316877
cgucucaugcaagagagaa

SEQ ID NO: 447170 - RNA, 19 nt, Artificial Sequence
  Description of Artificial Sequence: Synthetic oligonucleotide
  Antisense Strand to SEQ ID NO: 447169
uucucucuugcaugagacg

SEQ ID NO: 447171 - RNA, 19 nt, Artificial Sequence
  Description of Artificial Sequence: Synthetic oligonucleotide
  Sense strand starting at position 3246 of SEQ ID NO: 316877
ucucuuuguugcuuaggua

SEQ ID NO: 447172 - RNA, 19 nt, Artificial Sequence
  Description of Artificial Sequence: Synthetic oligonucleotide
  Antisense Strand to SEQ ID NO: 447171
uaccuaagcaacaaagaga

SEQ ID NO: 447173 - RNA, 19 nt, Artificial Sequence
  Description of Artificial Sequence: Synthetic oligonucleotide
  Sense strand starting at position 3247 of SEQ ID NO: 316877
cucuuuguugcuuagguau

SEQ ID NO: 447174 - RNA, 19 nt, Artificial Sequence
  Description of Artificial Sequence: Synthetic oligonucleotide
  Antisense Strand to SEQ ID NO: 447173
auaccuaagcaacaaagag

SEQ ID NO: 447175 - RNA, 19 nt, Artificial Sequence
  Description of Artificial Sequence: Synthetic oligonucleotide
  Sense strand starting at position 3277 of SEQ ID NO: 316877
ccagguaacucugaggaua

SEQ ID NO: 447176 - RNA, 19 nt, Artificial Sequence
  Description of Artificial Sequence: Synthetic oligonucleotide
  Antisense Strand to SEQ ID NO: 447175
uauccucagaguuaccugg

SEQ ID NO: 447177 - RNA, 19 nt, Artificial Sequence
  Description of Artificial Sequence: Synthetic oligonucleotide
  Sense strand starting at position 3279 of SEQ ID NO: 316877
agguaacucugaggauaaa

SEQ ID NO: 447178 - RNA, 19 nt, Artificial Sequence
  Description of Artificial Sequence: Synthetic oligonucleotide
  Antisense Strand to SEQ ID NO: 447177
uuuauccucagaguuaccu

SEQ ID NO: 447179 - RNA, 19 nt, Artificial Sequence
  Description of Artificial Sequence: Synthetic oligonucleotide
  Sense strand starting at position 3291 of SEQ ID NO: 316877
ggauaaagauguuaaagaa

SEQ ID NO: 447180 - RNA, 19 nt, Artificial Sequence
  Description of Artificial Sequence: Synthetic oligonucleotide
  Antisense Strand to SEQ ID NO: 447179
uucuuuaacaucuuuaucc

SEQ ID NO: 447181 - RNA, 19 nt, Artificial Sequence
  Description of Artificial Sequence: Synthetic oligonucleotide
  Sense strand starting at position 3337 of SEQ ID NO: 316877
acgcuuuaugcugacaaac

SEQ ID NO: 447182 - RNA, 19 nt, Artificial Sequence
  Description of Artificial Sequence: Synthetic oligonucleotide
  Antisense Strand to SEQ ID NO: 447181
guuugucagcauaaagcgu

SEQ ID NO: 447183 - RNA, 19 nt, Artificial Sequence
  Description of Artificial Sequence: Synthetic oligonucleotide
  Sense strand starting at position 3407 of SEQ ID NO: 316877
guuuacaugugacucagua

SEQ ID NO: 447184 - RNA, 19 nt, Artificial Sequence
  Description of Artificial Sequence: Synthetic oligonucleotide
  Antisense Strand to SEQ ID NO: 447183
uacugagucacauguaaac

SEQ ID NO: 447185 - RNA, 19 nt, Artificial Sequence
  Description of Artificial Sequence: Synthetic oligonucleotide
  Sense strand starting at position 3411 of SEQ ID NO: 316877
acaugugacucaguaacuu

SEQ ID NO: 447186 - RNA, 19 nt, Artificial Sequence
  Description of Artificial Sequence: Synthetic oligonucleotide
  Antisense Strand to SEQ ID NO: 447185
aaguuacugagucacaugu

SEQ ID NO: 447187 - RNA, 19 nt, Artificial Sequence
  Description of Artificial Sequence: Synthetic oligonucleotide
  Sense strand starting at position 3595 of SEQ ID NO: 316877
ugugauacauaucuacaga

SEQ ID NO: 447188 - RNA, 19 nt, Artificial Sequence
  Description of Artificial Sequence: Synthetic oligonucleotide
  Antisense Strand to SEQ ID NO: 447187
ucuguagauauguaucaca

SEQ ID NO: 447189 - RNA, 19 nt, Artificial Sequence
  Description of Artificial Sequence: Synthetic oligonucleotide
  Sense strand starting at position 3647 of SEQ ID NO: 316877
ugaggcuuuaagcaaguua

SEQ ID NO: 447190 - RNA, 19 nt, Artificial Sequence
  Description of Artificial Sequence: Synthetic oligonucleotide
  Antisense Strand to SEQ ID NO: 447189
uaacuugcuuaaagccuca

SEQ ID NO: 447191 - RNA, 19 nt, Artificial Sequence
  Description of Artificial Sequence: Synthetic oligonucleotide
  Sense strand starting at position 3686 of SEQ ID NO: 316877
aguguccacaucuguagau

SEQ ID NO: 447192 - RNA, 19 nt, Artificial Sequence
  Description of Artificial Sequence: Synthetic oligonucleotide
  Antisense Strand to SEQ ID NO: 447191
aucuacagauguggacacu

SEQ ID NO: 447193 - RNA, 19 nt, Artificial Sequence
  Description of Artificial Sequence: Synthetic oligonucleotide
  Sense strand starting at position 3687 of SEQ ID NO: 316877
guguccacaucuguagaua

SEQ ID NO: 447194 - RNA, 19 nt, Artificial Sequence
  Description of Artificial Sequence: Synthetic oligonucleotide
  Antisense Strand to SEQ ID NO: 447193
uaucuacagauguggacac

SEQ ID NO: 447195 - RNA, 19 nt, Artificial Sequence
  Description of Artificial Sequence: Synthetic oligonucleotide
  Sense strand starting at position 3688 of SEQ ID NO: 316877
uguccacaucuguagauaa

SEQ ID NO: 447196 - RNA, 19 nt, Artificial Sequence
  Description of Artificial Sequence: Synthetic oligonucleotide
  Antisense Strand to SEQ ID NO: 447195
uuaucuacagauguggaca

SEQ ID NO: 447197 - RNA, 19 nt, Artificial Sequence
  Description of Artificial Sequence: Synthetic oligonucleotide
  Sense strand starting at position 3716 of SEQ ID NO: 316877
agugucagucagugcuaca

SEQ ID NO: 447198 - RNA, 19 nt, Artificial Sequence
  Description of Artificial Sequence: Synthetic oligonucleotide
  Antisense Strand to SEQ ID NO: 447197
uguagcacugacugacacu

SEQ ID NO: 447199 - RNA, 19 nt, Artificial Sequence
  Description of Artificial Sequence: Synthetic oligonucleotide
  Sense strand starting at position 3729 of SEQ ID NO: 316877
gcuacauaaaucggguuua

SEQ ID NO: 447200 - RNA, 19 nt, Artificial Sequence
  Description of Artificial Sequence: Synthetic oligonucleotide
  Antisense Strand to SEQ ID NO: 447199
uaaacccgauuuauguagc

SEQ ID NO: 447201 - RNA, 19 nt, Artificial Sequence
  Description of Artificial Sequence: Synthetic oligonucleotide
  Sense strand starting at position 3 of SEQ ID NO: 316878
cugaauguuuaugccugaa

SEQ ID NO: 447202 - RNA, 19 nt, Artificial Sequence
  Description of Artificial Sequence: Synthetic oligonucleotide
  Antisense Strand to SEQ ID NO: 447201
uucaggcauaaacauucag

SEQ ID NO: 447203 - RNA, 19 nt, Artificial Sequence
  Description of Artificial Sequence: Synthetic oligonucleotide
  Sense strand starting at position 5 of SEQ ID NO: 316878
gaauguuuaugccugaaac

SEQ ID NO: 447204 - RNA, 19 nt, Artificial Sequence
  Description of Artificial Sequence: Synthetic oligonucleotide
  Antisense Strand to SEQ ID NO: 447203
guuucaggcauaaacauuc

SEQ ID NO: 447205 - RNA, 19 nt, Artificial Sequence
  Description of Artificial Sequence: Synthetic oligonucleotide
  Sense strand starting at position 7 of SEQ ID NO: 316878
auguuuaugccugaaacau

SEQ ID NO: 447206 - RNA, 19 nt, Artificial Sequence
  Description of Artificial Sequence: Synthetic oligonucleotide
  Antisense Strand to SEQ ID NO: 447205
auguuucaggcauaaacau

SEQ ID NO: 447207 - RNA, 19 nt, Artificial Sequence
  Description of Artificial Sequence: Synthetic oligonucleotide
  Sense strand starting at position 27 of SEQ ID NO: 316878
ggauuacaucgugaccuga

SEQ ID NO: 447208 - RNA, 19 nt, Artificial Sequence
  Description of Artificial Sequence: Synthetic oligonucleotide
  Antisense Strand to SEQ ID NO: 447207
ucaggucacgauguaaucc

SEQ ID NO: 447209 - RNA, 19 nt, Artificial Sequence
  Description of Artificial Sequence: Synthetic oligonucleotide
  Sense strand starting at position 29 of SEQ ID NO: 316878
auuacaucgugaccugaca

SEQ ID NO: 447210 - RNA, 19 nt, Artificial Sequence
  Description of Artificial Sequence: Synthetic oligonucleotide
  Antisense Strand to SEQ ID NO: 447209
ugucaggucacgauguaau

SEQ ID NO: 447211 - RNA, 19 nt, Artificial Sequence
  Description of Artificial Sequence: Synthetic oligonucleotide
  Sense strand starting at position 70 of SEQ ID NO: 316878
gacacuauuggauaacguu

SEQ ID NO: 447212 - RNA, 19 nt, Artificial Sequence
  Description of Artificial Sequence: Synthetic oligonucleotide
  Antisense Strand to SEQ ID NO: 447211
aacguuauccaauaguguc

SEQ ID NO: 447213 - RNA, 19 nt, Artificial Sequence
  Description of Artificial Sequence: Synthetic oligonucleotide
  Sense strand starting at position 245 of SEQ ID NO: 316878
ggacgcaugcgaguuuguu

SEQ ID NO: 447214 - RNA, 19 nt, Artificial Sequence
  Description of Artificial Sequence: Synthetic oligonucleotide
  Antisense Strand to SEQ ID NO: 447213
aacaaacucgcaugcgucc

SEQ ID NO: 447215 - RNA, 19 nt, Artificial Sequence
  Description of Artificial Sequence: Synthetic oligonucleotide
  Sense strand starting at position 246 of SEQ ID NO: 316878
gacgcaugcgaguuuguuu

SEQ ID NO: 447216 - RNA, 19 nt, Artificial Sequence
  Description of Artificial Sequence: Synthetic oligonucleotide
  Antisense Strand to SEQ ID NO: 447215
aaacaaacucgcaugcguc

SEQ ID NO: 447217 - RNA, 19 nt, Artificial Sequence
  Description of Artificial Sequence: Synthetic oligonucleotide
  Sense strand starting at position 471 of SEQ ID NO: 316878
ugggaaguuggguaacagu

SEQ ID NO: 447218 - RNA, 19 nt, Artificial Sequence
  Description of Artificial Sequence: Synthetic oligonucleotide
  Antisense Strand to SEQ ID NO: 447217
acuguuacccaacuuccca

SEQ ID NO: 447219 - RNA, 19 nt, Artificial Sequence
  Description of Artificial Sequence: Synthetic oligonucleotide
  Sense strand starting at position 720 of SEQ ID NO: 316878
gacagaguuucuucgagga

SEQ ID NO: 447220 - RNA, 19 nt, Artificial Sequence
  Description of Artificial Sequence: Synthetic oligonucleotide
  Antisense Strand to SEQ ID NO: 447219
uccucgaagaaacucuguc

SEQ ID NO: 447221 - RNA, 19 nt, Artificial Sequence
  Description of Artificial Sequence: Synthetic oligonucleotide
  Sense strand starting at position 724 of SEQ ID NO: 316878
gaguuucuucgaggaacca

SEQ ID NO: 447222 - RNA, 19 nt, Artificial Sequence
  Description of Artificial Sequence: Synthetic oligonucleotide
  Antisense Strand to SEQ ID NO: 447221
ugguuccucgaagaaacuc

SEQ ID NO: 447223 - RNA, 19 nt, Artificial Sequence
  Description of Artificial Sequence: Synthetic oligonucleotide
  Sense strand starting at position 953 of SEQ ID NO: 316878
ggacuaguucuguauccua

SEQ ID NO: 447224 - RNA, 19 nt, Artificial Sequence
  Description of Artificial Sequence: Synthetic oligonucleotide
  Antisense Strand to SEQ ID NO: 447223
uaggauacagaacuagucc

SEQ ID NO: 447225 - RNA, 19 nt, Artificial Sequence
  Description of Artificial Sequence: Synthetic oligonucleotide
  Sense strand starting at position 1002 of SEQ ID NO: 316878
ggaugcaucccacagguau

SEQ ID NO: 447226 - RNA, 19 nt, Artificial Sequence
  Description of Artificial Sequence: Synthetic oligonucleotide
  Antisense Strand to SEQ ID NO: 447225
auaccugugggaugcaucc

SEQ ID NO: 447227 - RNA, 19 nt, Artificial Sequence
  Description of Artificial Sequence: Synthetic oligonucleotide
  Sense strand starting at position 1039 of SEQ ID NO: 316878
uggcauguccaugaagcuu

SEQ ID NO: 447228 - RNA, 19 nt, Artificial Sequence
  Description of Artificial Sequence: Synthetic oligonucleotide
  Antisense Strand to SEQ ID NO: 447227
aagcuucauggacaugcca

SEQ ID NO: 447229 - RNA, 19 nt, Artificial Sequence
  Description of Artificial Sequence: Synthetic oligonucleotide
  Sense strand starting at position 1070 of SEQ ID NO: 316878
augcaaguucuauacuagu

SEQ ID NO: 447230 - RNA, 19 nt, Artificial Sequence
  Description of Artificial Sequence: Synthetic oligonucleotide
  Antisense Strand to SEQ ID NO: 447229
acuaguauagaacuugcau

SEQ ID NO: 447231 - RNA, 19 nt, Artificial Sequence
  Description of Artificial Sequence: Synthetic oligonucleotide
  Sense strand starting at position 1092 of SEQ ID NO: 316878
uguccauacuguuuaaaua

SEQ ID NO: 447232 - RNA, 19 nt, Artificial Sequence
  Description of Artificial Sequence: Synthetic oligonucleotide
  Antisense Strand to SEQ ID NO: 447231
uauuuaaacaguauggaca

SEQ ID NO: 447233 - RNA, 19 nt, Artificial Sequence
  Description of Artificial Sequence: Synthetic oligonucleotide
  Sense strand starting at position 1093 of SEQ ID NO: 316878
guccauacuguuuaaauag

SEQ ID NO: 447234 - RNA, 19 nt, Artificial Sequence
  Description of Artificial Sequence: Synthetic oligonucleotide
  Antisense Strand to SEQ ID NO: 447233
cuauuuaaacaguauggac

SEQ ID NO: 447235 - RNA, 19 nt, Artificial Sequence
  Description of Artificial Sequence: Synthetic oligonucleotide
  Sense strand starting at position 1202 of SEQ ID NO: 316878
gguuaagggugaguuccaa

SEQ ID NO: 447236 - RNA, 19 nt, Artificial Sequence
  Description of Artificial Sequence: Synthetic oligonucleotide
  Antisense Strand to SEQ ID NO: 447235
uuggaacucacccuuaacc

SEQ ID NO: 447237 - RNA, 19 nt, Artificial Sequence
  Description of Artificial Sequence: Synthetic oligonucleotide
  Sense strand starting at position 1307 of SEQ ID NO: 316878
ccacacugcuuuguagaaa

SEQ ID NO: 447238 - RNA, 19 nt, Artificial Sequence
  Description of Artificial Sequence: Synthetic oligonucleotide
  Antisense Strand to SEQ ID NO: 447237
uuucuacaaagcagugugg

SEQ ID NO: 447239 - RNA, 19 nt, Artificial Sequence
  Description of Artificial Sequence: Synthetic oligonucleotide
  Sense strand starting at position 1325 of SEQ ID NO: 316878
auucuaaugucagugacag

SEQ ID NO: 447240 - RNA, 19 nt, Artificial Sequence
  Description of Artificial Sequence: Synthetic oligonucleotide
  Antisense Strand to SEQ ID NO: 447239
cugucacugacauuagaau

SEQ ID NO: 447241 - RNA, 19 nt, Artificial Sequence
  Description of Artificial Sequence: Synthetic oligonucleotide
  Sense strand starting at position 1396 of SEQ ID NO: 316878
uguacucugaacggguuaa

SEQ ID NO: 447242 - RNA, 19 nt, Artificial Sequence
  Description of Artificial Sequence: Synthetic oligonucleotide
  Antisense Strand to SEQ ID NO: 447241
uuaacccguucagaguaca

SEQ ID NO: 447243 - RNA, 19 nt, Artificial Sequence
  Description of Artificial Sequence: Synthetic oligonucleotide
  Sense strand starting at position 1397 of SEQ ID NO: 316878
guacucugaacggguuaaa

SEQ ID NO: 447244 - RNA, 19 nt, Artificial Sequence
  Description of Artificial Sequence: Synthetic oligonucleotide
  Antisense Strand to SEQ ID NO: 447243
uuuaacccguucagaguac

SEQ ID NO: 447245 - RNA, 19 nt, Artificial Sequence
  Description of Artificial Sequence: Synthetic oligonucleotide
  Sense strand starting at position 1717 of SEQ ID NO: 316878
ggaugagacucacccgauu

SEQ ID NO: 447246 - RNA, 19 nt, Artificial Sequence
  Description of Artificial Sequence: Synthetic oligonucleotide
  Antisense Strand to SEQ ID NO: 447245
aaucgggugagucucaucc

SEQ ID NO: 447247 - RNA, 19 nt, Artificial Sequence
  Description of Artificial Sequence: Synthetic oligonucleotide
  Sense strand starting at position 2410 of SEQ ID NO: 316878
ggaucuggucaaugcgaga

SEQ ID NO: 447248 - RNA, 19 nt, Artificial Sequence
  Description of Artificial Sequence: Synthetic oligonucleotide
  Antisense Strand to SEQ ID NO: 447247
ucucgcauugaccagaucc

SEQ ID NO: 447249 - RNA, 19 nt, Artificial Sequence
  Description of Artificial Sequence: Synthetic oligonucleotide
  Sense strand starting at position 2415 of SEQ ID NO: 316878
uggucaaugcgagaaccau

SEQ ID NO: 447250 - RNA, 19 nt, Artificial Sequence
  Description of Artificial Sequence: Synthetic oligonucleotide
  Antisense Strand to SEQ ID NO: 447249
augguucucgcauugacca

SEQ ID NO: 447251 - RNA, 19 nt, Artificial Sequence
  Description of Artificial Sequence: Synthetic oligonucleotide
  Sense strand starting at position 2569 of SEQ ID NO: 316878
ccaugugcucguuucaguu

SEQ ID NO: 447252 - RNA, 19 nt, Artificial Sequence
  Description of Artificial Sequence: Synthetic oligonucleotide
  Antisense Strand to SEQ ID NO: 447251
aacugaaacgagcacaugg

SEQ ID NO: 447253 - RNA, 19 nt, Artificial Sequence
  Description of Artificial Sequence: Synthetic oligonucleotide
  Sense strand starting at position 2587 of SEQ ID NO: 316878
uuuggaggcccaggauuau

SEQ ID NO: 447254 - RNA, 19 nt, Artificial Sequence
  Description of Artificial Sequence: Synthetic oligonucleotide
  Antisense Strand to SEQ ID NO: 447253
auaauccugggccuccaaa

SEQ ID NO: 447255 - RNA, 19 nt, Artificial Sequence
  Description of Artificial Sequence: Synthetic oligonucleotide
  Sense strand starting at position 2843 of SEQ ID NO: 316878
gagagcugaggccaucuaa

SEQ ID NO: 447256 - RNA, 19 nt, Artificial Sequence
  Description of Artificial Sequence: Synthetic oligonucleotide
  Antisense Strand to SEQ ID NO: 447255
uuagauggccucagcucuc

SEQ ID NO: 447257 - RNA, 19 nt, Artificial Sequence
  Description of Artificial Sequence: Synthetic oligonucleotide
  Sense strand starting at position 2871 of SEQ ID NO: 316878
gguacaauuucuccugcca

SEQ ID NO: 447258 - RNA, 19 nt, Artificial Sequence
  Description of Artificial Sequence: Synthetic oligonucleotide
  Antisense Strand to SEQ ID NO: 447257
uggcaggagaaauuguacc

SEQ ID NO: 447259 - RNA, 19 nt, Artificial Sequence
  Description of Artificial Sequence: Synthetic oligonucleotide
  Sense strand starting at position 2913 of SEQ ID NO: 316878
aaccauguauuuccgaguu

SEQ ID NO: 447260 - RNA, 19 nt, Artificial Sequence
  Description of Artificial Sequence: Synthetic oligonucleotide
  Antisense Strand to SEQ ID NO: 447259
aacucggaaauacaugguu

SEQ ID NO: 447261 - RNA, 19 nt, Artificial Sequence
  Description of Artificial Sequence: Synthetic oligonucleotide
  Sense strand starting at position 2942 of SEQ ID NO: 316878
agcccaguuuauuucugau

SEQ ID NO: 447262 - RNA, 19 nt, Artificial Sequence
  Description of Artificial Sequence: Synthetic oligonucleotide
  Antisense Strand to SEQ ID NO: 447261
aucagaaauaaacugggcu

SEQ ID NO: 447263 - RNA, 19 nt, Artificial Sequence
  Description of Artificial Sequence: Synthetic oligonucleotide
  Sense strand starting at position 3299 of SEQ ID NO: 316878
acaguaauccauuguugaa

SEQ ID NO: 447264 - RNA, 19 nt, Artificial Sequence
  Description of Artificial Sequence: Synthetic oligonucleotide
  Antisense Strand to SEQ ID NO: 447263
uucaacaauggauuacugu

SEQ ID NO: 447265 - RNA, 19 nt, Artificial Sequence
  Description of Artificial Sequence: Synthetic oligonucleotide
  Sense strand starting at position 3301 of SEQ ID NO: 316878
aguaauccauuguugaacu

SEQ ID NO: 447266 - RNA, 19 nt, Artificial Sequence
  Description of Artificial Sequence: Synthetic oligonucleotide
  Antisense Strand to SEQ ID NO: 447265
aguucaacaauggauuacu

SEQ ID NO: 447267 - RNA, 19 nt, Artificial Sequence
  Description of Artificial Sequence: Synthetic oligonucleotide
  Sense strand starting at position 3352 of SEQ ID NO: 316878
agugguaagugguuauaaa

SEQ ID NO: 447268 - RNA, 19 nt, Artificial Sequence
  Description of Artificial Sequence: Synthetic oligonucleotide
  Antisense Strand to SEQ ID NO: 447267
uuuauaaccacuuaccacu

SEQ ID NO: 447269 - RNA, 19 nt, Artificial Sequence
  Description of Artificial Sequence: Synthetic oligonucleotide
  Sense strand starting at position 3353 of SEQ ID NO: 316878
gugguaagugguuauaaau

SEQ ID NO: 447270 - RNA, 19 nt, Artificial Sequence
  Description of Artificial Sequence: Synthetic oligonucleotide
  Antisense Strand to SEQ ID NO: 447269
auuuauaaccacuuaccac

SEQ ID NO: 447271 - RNA, 19 nt, Artificial Sequence
  Description of Artificial Sequence: Synthetic oligonucleotide
  Sense strand starting at position 3880 of SEQ ID NO: 316878
cuaggauguauauguguga

SEQ ID NO: 447272 - RNA, 19 nt, Artificial Sequence
  Description of Artificial Sequence: Synthetic oligonucleotide
  Antisense Strand to SEQ ID NO: 447271
ucacacauauacauccuag

SEQ ID NO: 447273 - RNA, 19 nt, Artificial Sequence
  Description of Artificial Sequence: Synthetic oligonucleotide
  Sense strand starting at position 3881 of SEQ ID NO: 316878
uaggauguauaugugugaa

SEQ ID NO: 447274 - RNA, 19 nt, Artificial Sequence
  Description of Artificial Sequence: Synthetic oligonucleotide
  Antisense Strand to SEQ ID NO: 447273
uucacacauauacauccua

SEQ ID NO: 447275 - RNA, 19 nt, Artificial Sequence
  Description of Artificial Sequence: Synthetic oligonucleotide
  Sense strand starting at position 3883 of SEQ ID NO: 316878
ggauguauaugugugaaug

SEQ ID NO: 447276 - RNA, 19 nt, Artificial Sequence
  Description of Artificial Sequence: Synthetic oligonucleotide
  Antisense Strand to SEQ ID NO: 447275
cauucacacauauacaucc

SEQ ID NO: 447277 - RNA, 19 nt, Artificial Sequence
  Description of Artificial Sequence: Synthetic oligonucleotide
  Sense strand starting at position 3897 of SEQ ID NO: 316878
gaaugugucccagauaucu

SEQ ID NO: 447278 - RNA, 19 nt, Artificial Sequence
  Description of Artificial Sequence: Synthetic oligonucleotide
  Antisense Strand to SEQ ID NO: 447277
agauaucugggacacauuc

SEQ ID NO: 447279 - RNA, 19 nt, Artificial Sequence
  Description of Artificial Sequence: Synthetic oligonucleotide
  Sense strand starting at position 3963 of SEQ ID NO: 316878
uguuguuaugcucauaauc

SEQ ID NO: 447280 - RNA, 19 nt, Artificial Sequence
  Description of Artificial Sequence: Synthetic oligonucleotide
  Antisense Strand to SEQ ID NO: 447279
gauuaugagcauaacaaca

SEQ ID NO: 447281 - RNA, 19 nt, Artificial Sequence
  Description of Artificial Sequence: Synthetic oligonucleotide
  Sense strand starting at position 485 of SEQ ID NO: 316879
agaguaaauuuauggacua

SEQ ID NO: 447282 - RNA, 19 nt, Artificial Sequence
  Description of Artificial Sequence: Synthetic oligonucleotide
  Antisense Strand to SEQ ID NO: 447281
uaguccauaaauuuacucu

SEQ ID NO: 447283 - RNA, 19 nt, Artificial Sequence
  Description of Artificial Sequence: Synthetic oligonucleotide
  Sense strand starting at position 486 of SEQ ID NO: 316879
gaguaaauuuauggacuaa

SEQ ID NO: 447284 - RNA, 19 nt, Artificial Sequence
  Description of Artificial Sequence: Synthetic oligonucleotide
  Antisense Strand to SEQ ID NO: 447283
uuaguccauaaauuuacuc

SEQ ID NO: 447285 - RNA, 19 nt, Artificial Sequence
  Description of Artificial Sequence: Synthetic oligonucleotide
  Sense strand starting at position 511 of SEQ ID NO: 316879
ugcucaauuucgguccaaa

SEQ ID NO: 447286 - RNA, 19 nt, Artificial Sequence
  Description of Artificial Sequence: Synthetic oligonucleotide
  Antisense Strand to SEQ ID NO: 447285
uuuggaccgaaauugagca

SEQ ID NO: 447287 - RNA, 19 nt, Artificial Sequence
  Description of Artificial Sequence: Synthetic oligonucleotide
  Sense strand starting at position 537 of SEQ ID NO: 316879
uuugaaguucuccaaacgu

SEQ ID NO: 447288 - RNA, 19 nt, Artificial Sequence
  Description of Artificial Sequence: Synthetic oligonucleotide
  Antisense Strand to SEQ ID NO: 447287
acguuuggagaacuucaaa

SEQ ID NO: 447289 - RNA, 19 nt, Artificial Sequence
  Description of Artificial Sequence: Synthetic oligonucleotide
  Sense strand starting at position 710 of SEQ ID NO: 316879
ggauaaagguaauuaagca

SEQ ID NO: 447290 - RNA, 19 nt, Artificial Sequence
  Description of Artificial Sequence: Synthetic oligonucleotide
  Antisense Strand to SEQ ID NO: 447289
ugcuuaauuaccuuuaucc

SEQ ID NO: 447291 - RNA, 19 nt, Artificial Sequence
  Description of Artificial Sequence: Synthetic oligonucleotide
  Sense strand starting at position 717 of SEQ ID NO: 316879
gguaauuaagcaggaauua

SEQ ID NO: 447292 - RNA, 19 nt, Artificial Sequence
  Description of Artificial Sequence: Synthetic oligonucleotide
  Antisense Strand to SEQ ID NO: 447291
uaauuccugcuuaauuacc

SEQ ID NO: 447293 - RNA, 19 nt, Artificial Sequence
  Description of Artificial Sequence: Synthetic oligonucleotide
  Sense strand starting at position 805 of SEQ ID NO: 316879
ugagaugaauuugauagca

SEQ ID NO: 447294 - RNA, 19 nt, Artificial Sequence
  Description of Artificial Sequence: Synthetic oligonucleotide
  Antisense Strand to SEQ ID NO: 447293
ugcuaucaaauucaucuca

SEQ ID NO: 447295 - RNA, 19 nt, Artificial Sequence
  Description of Artificial Sequence: Synthetic oligonucleotide
  Sense strand starting at position 1123 of SEQ ID NO: 316879
ucugaccaggccugaaaua

SEQ ID NO: 447296 - RNA, 19 nt, Artificial Sequence
  Description of Artificial Sequence: Synthetic oligonucleotide
  Antisense Strand to SEQ ID NO: 447295
uauuucaggccuggucaga

SEQ ID NO: 447297 - RNA, 19 nt, Artificial Sequence
  Description of Artificial Sequence: Synthetic oligonucleotide
  Sense strand starting at position 1303 of SEQ ID NO: 316879
ccaguaaguccuuacacca

SEQ ID NO: 447298 - RNA, 19 nt, Artificial Sequence
  Description of Artificial Sequence: Synthetic oligonucleotide
  Antisense Strand to SEQ ID NO: 447297
ugguguaaggacuuacugg

SEQ ID NO: 447299 - RNA, 19 nt, Artificial Sequence
  Description of Artificial Sequence: Synthetic oligonucleotide
  Sense strand starting at position 1365 of SEQ ID NO: 316879
guguaagcaaguugauuua

SEQ ID NO: 447300 - RNA, 19 nt, Artificial Sequence
  Description of Artificial Sequence: Synthetic oligonucleotide
  Antisense Strand to SEQ ID NO: 447299
uaaaucaacuugcuuacac

SEQ ID NO: 447301 - RNA, 19 nt, Artificial Sequence
  Description of Artificial Sequence: Synthetic oligonucleotide
  Sense strand starting at position 1471 of SEQ ID NO: 316879
augacauauuccuucguca

SEQ ID NO: 447302 - RNA, 19 nt, Artificial Sequence
  Description of Artificial Sequence: Synthetic oligonucleotide
  Antisense Strand to SEQ ID NO: 447301
ugacgaaggaauaugucau

SEQ ID NO: 447303 - RNA, 19 nt, Artificial Sequence
  Description of Artificial Sequence: Synthetic oligonucleotide
  Sense strand starting at position 1992 of SEQ ID NO: 316879
ggaagaauguaggucguga

SEQ ID NO: 447304 - RNA, 19 nt, Artificial Sequence
  Description of Artificial Sequence: Synthetic oligonucleotide
  Antisense Strand to SEQ ID NO: 447303
ucacgaccuacauucuucc

SEQ ID NO: 447305 - RNA, 19 nt, Artificial Sequence
  Description of Artificial Sequence: Synthetic oligonucleotide
  Sense strand starting at position 1994 of SEQ ID NO: 316879
aagaauguaggucgugaga

SEQ ID NO: 447306 - RNA, 19 nt, Artificial Sequence
  Description of Artificial Sequence: Synthetic oligonucleotide
  Antisense Strand to SEQ ID NO: 447305
ucucacgaccuacauucuu

SEQ ID NO: 447307 - RNA, 19 nt, Artificial Sequence
  Description of Artificial Sequence: Synthetic oligonucleotide
  Sense strand starting at position 2314 of SEQ ID NO: 316879
gagccucugagggaaaguu

SEQ ID NO: 447308 - RNA, 19 nt, Artificial Sequence
  Description of Artificial Sequence: Synthetic oligonucleotide
  Antisense Strand to SEQ ID NO: 447307
aacuuucccucagaggcuc

SEQ ID NO: 447309 - RNA, 19 nt, Artificial Sequence
  Description of Artificial Sequence: Synthetic oligonucleotide
  Sense strand starting at position 2476 of SEQ ID NO: 316879
cggguucugccuaguggaa

SEQ ID NO: 447310 - RNA, 19 nt, Artificial Sequence
  Description of Artificial Sequence: Synthetic oligonucleotide
  Antisense Strand to SEQ ID NO: 447309
uuccacuaggcagaacccg

SEQ ID NO: 447311 - RNA, 19 nt, Artificial Sequence
  Description of Artificial Sequence: Synthetic oligonucleotide
  Sense strand starting at position 2527 of SEQ ID NO: 316879
ucggauuucuugcuuccca

SEQ ID NO: 447312 - RNA, 19 nt, Artificial Sequence
  Description of Artificial Sequence: Synthetic oligonucleotide
  Antisense Strand to SEQ ID NO: 447311
ugggaagcaagaaauccga

SEQ ID NO: 447313 - RNA, 19 nt, Artificial Sequence
  Description of Artificial Sequence: Synthetic oligonucleotide
  Sense strand starting at position 2528 of SEQ ID NO: 316879
cggauuucuugcuucccaa

SEQ ID NO: 447314 - RNA, 19 nt, Artificial Sequence
  Description of Artificial Sequence: Synthetic oligonucleotide
  Antisense Strand to SEQ ID NO: 447313
uugggaagcaagaaauccg

SEQ ID NO: 447315 - RNA, 19 nt, Artificial Sequence
  Description of Artificial Sequence: Synthetic oligonucleotide
  Sense strand starting at position 2677 of SEQ ID NO: 316879
uguuguucuccugacagac

SEQ ID NO: 447316 - RNA, 19 nt, Artificial Sequence
  Description of Artificial Sequence: Synthetic oligonucleotide
  Antisense Strand to SEQ ID NO: 447315
gucugucaggagaacaaca

SEQ ID NO: 447317 - RNA, 19 nt, Artificial Sequence
  Description of Artificial Sequence: Synthetic oligonucleotide
  Sense strand starting at position 2893 of SEQ ID NO: 316879
ccaagaaaugaaggcucua

SEQ ID NO: 447318 - RNA, 19 nt, Artificial Sequence
  Description of Artificial Sequence: Synthetic oligonucleotide
  Antisense Strand to SEQ ID NO: 447317
uagagccuucauuucuugg

SEQ ID NO: 447319 - RNA, 19 nt, Artificial Sequence
  Description of Artificial Sequence: Synthetic oligonucleotide
  Sense strand starting at position 2915 of SEQ ID NO: 316879
ugggcaguucugcaacaaa

SEQ ID NO: 447320 - RNA, 19 nt, Artificial Sequence
  Description of Artificial Sequence: Synthetic oligonucleotide
  Antisense Strand to SEQ ID NO: 447319
uuuguugcagaacugccca

SEQ ID NO: 447321 - RNA, 19 nt, Artificial Sequence
  Description of Artificial Sequence: Synthetic oligonucleotide
  Sense strand starting at position 2918 of SEQ ID NO: 316879
gcaguucugcaacaaaggu

SEQ ID NO: 447322 - RNA, 19 nt, Artificial Sequence
  Description of Artificial Sequence: Synthetic oligonucleotide
  Antisense Strand to SEQ ID NO: 447321
accuuuguugcagaacugc

SEQ ID NO: 447323 - RNA, 19 nt, Artificial Sequence
  Description of Artificial Sequence: Synthetic oligonucleotide
  Sense strand starting at position 2998 of SEQ ID NO: 316879
cacuaucacgcuugagaug

SEQ ID NO: 447324 - RNA, 19 nt, Artificial Sequence
  Description of Artificial Sequence: Synthetic oligonucleotide
  Antisense Strand to SEQ ID NO: 447323
caucucaagcgugauagug

SEQ ID NO: 447325 - RNA, 19 nt, Artificial Sequence
  Description of Artificial Sequence: Synthetic oligonucleotide
  Sense strand starting at position 3180 of SEQ ID NO: 316879
gccucuugcguguuugagu

SEQ ID NO: 447326 - RNA, 19 nt, Artificial Sequence
  Description of Artificial Sequence: Synthetic oligonucleotide
  Antisense Strand to SEQ ID NO: 447325
acucaaacacgcaagaggc

SEQ ID NO: 447327 - RNA, 19 nt, Artificial Sequence
  Description of Artificial Sequence: Synthetic oligonucleotide
  Sense strand starting at position 3188 of SEQ ID NO: 316879
cguguuugagucgcgaagu

SEQ ID NO: 447328 - RNA, 19 nt, Artificial Sequence
  Description of Artificial Sequence: Synthetic oligonucleotide
  Antisense Strand to SEQ ID NO: 447327
acuucgcgacucaaacacg

SEQ ID NO: 447329 - RNA, 19 nt, Artificial Sequence
  Description of Artificial Sequence: Synthetic oligonucleotide
  Sense strand starting at position 3191 of SEQ ID NO: 316879
guuugagucgcgaagugau

SEQ ID NO: 447330 - RNA, 19 nt, Artificial Sequence
  Description of Artificial Sequence: Synthetic oligonucleotide
  Antisense Strand to SEQ ID NO: 447329
aucacuucgcgacucaaac

SEQ ID NO: 447331 - RNA, 19 nt, Artificial Sequence
  Description of Artificial Sequence: Synthetic oligonucleotide
  Sense strand starting at position 3199 of SEQ ID NO: 316879
cgcgaagugauggacuuua

SEQ ID NO: 447332 - RNA, 19 nt, Artificial Sequence
  Description of Artificial Sequence: Synthetic oligonucleotide
  Antisense Strand to SEQ ID NO: 447331
uaaaguccaucacuucgcg

SEQ ID NO: 447333 - RNA, 19 nt, Artificial Sequence
  Description of Artificial Sequence: Synthetic oligonucleotide
  Sense strand starting at position 3233 of SEQ ID NO: 316879
augagaaacuugguuagug

SEQ ID NO: 447334 - RNA, 19 nt, Artificial Sequence
  Description of Artificial Sequence: Synthetic oligonucleotide
  Antisense Strand to SEQ ID NO: 447333
cacuaaccaaguuucucau

SEQ ID NO: 447335 - RNA, 19 nt, Artificial Sequence
  Description of Artificial Sequence: Synthetic oligonucleotide
  Sense strand starting at position 3391 of SEQ ID NO: 316879
aucagauucuccuuuggag

SEQ ID NO: 447336 - RNA, 19 nt, Artificial Sequence
  Description of Artificial Sequence: Synthetic oligonucleotide
  Antisense Strand to SEQ ID NO: 447335
cuccaaaggagaaucugau

SEQ ID NO: 447337 - RNA, 19 nt, Artificial Sequence
  Description of Artificial Sequence: Synthetic oligonucleotide
  Sense strand starting at position 3393 of SEQ ID NO: 316879
cagauucuccuuuggagga

SEQ ID NO: 447338 - RNA, 19 nt, Artificial Sequence
  Description of Artificial Sequence: Synthetic oligonucleotide
  Antisense Strand to SEQ ID NO: 447337
uccuccaaaggagaaucug

SEQ ID NO: 447339 - RNA, 19 nt, Artificial Sequence
  Description of Artificial Sequence: Synthetic oligonucleotide
  Sense strand starting at position 3489 of SEQ ID NO: 316879
ucuugcaaccgugauaauu

SEQ ID NO: 447340 - RNA, 19 nt, Artificial Sequence
  Description of Artificial Sequence: Synthetic oligonucleotide
  Antisense Strand to SEQ ID NO: 447339
aauuaucacgguugcaaga

SEQ ID NO: 447341 - RNA, 19 nt, Artificial Sequence
  Description of Artificial Sequence: Synthetic oligonucleotide
  Sense strand starting at position 3495 of SEQ ID NO: 316879
aaccgugauaauuggagga

SEQ ID NO: 447342 - RNA, 19 nt, Artificial Sequence
  Description of Artificial Sequence: Synthetic oligonucleotide
  Antisense Strand to SEQ ID NO: 447341
uccuccaauuaucacgguu

SEQ ID NO: 447343 - RNA, 19 nt, Artificial Sequence
  Description of Artificial Sequence: Synthetic oligonucleotide
  Sense strand starting at position 3499 of SEQ ID NO: 316879
gugauaauuggaggaugca

SEQ ID NO: 447344 - RNA, 19 nt, Artificial Sequence
  Description of Artificial Sequence: Synthetic oligonucleotide
  Antisense Strand to SEQ ID NO: 447343
ugcauccuccaauuaucac

SEQ ID NO: 447345 - RNA, 19 nt, Artificial Sequence
  Description of Artificial Sequence: Synthetic oligonucleotide
  Sense strand starting at position 3585 of SEQ ID NO: 316879
ggguacuugccacaaguau

SEQ ID NO: 447346 - RNA, 19 nt, Artificial Sequence
  Description of Artificial Sequence: Synthetic oligonucleotide
  Antisense Strand to SEQ ID NO: 447345
auacuuguggcaaguaccc

SEQ ID NO: 447347 - RNA, 19 nt, Artificial Sequence
  Description of Artificial Sequence: Synthetic oligonucleotide
  Sense strand starting at position 3631 of SEQ ID NO: 316879
gugacaagcucagucaaga

SEQ ID NO: 447348 - RNA, 19 nt, Artificial Sequence
  Description of Artificial Sequence: Synthetic oligonucleotide
  Antisense Strand to SEQ ID NO: 447347
ucuugacugagcuugucac

SEQ ID NO: 447349 - RNA, 19 nt, Artificial Sequence
  Description of Artificial Sequence: Synthetic oligonucleotide
  Sense strand starting at position 3697 of SEQ ID NO: 316879
agaguagaaagcugugaag

SEQ ID NO: 447350 - RNA, 19 nt, Artificial Sequence
  Description of Artificial Sequence: Synthetic oligonucleotide
  Antisense Strand to SEQ ID NO: 447349
cuucacagcuuucuacucu

SEQ ID NO: 447351 - RNA, 19 nt, Artificial Sequence
  Description of Artificial Sequence: Synthetic oligonucleotide
  Sense strand starting at position 3709 of SEQ ID NO: 316879
ugugaaguucugcacaaca

SEQ ID NO: 447352 - RNA, 19 nt, Artificial Sequence
  Description of Artificial Sequence: Synthetic oligonucleotide
  Antisense Strand to SEQ ID NO: 447351
uguugugcagaacuucaca

SEQ ID NO: 447353 - RNA, 19 nt, Artificial Sequence
  Description of Artificial Sequence: Synthetic oligonucleotide
  Sense strand starting at position 3882 of SEQ ID NO: 316879
accucuuccacgugggaaa

SEQ ID NO: 447354 - RNA, 19 nt, Artificial Sequence
  Description of Artificial Sequence: Synthetic oligonucleotide
  Antisense Strand to SEQ ID NO: 447353
uuucccacguggaagaggu

SEQ ID NO: 447355 - RNA, 19 nt, Artificial Sequence
  Description of Artificial Sequence: Synthetic oligonucleotide
  Sense strand starting at position 3924 of SEQ ID NO: 316879
caauauauggacugcugua

SEQ ID NO: 447356 - RNA, 19 nt, Artificial Sequence
  Description of Artificial Sequence: Synthetic oligonucleotide
  Antisense Strand to SEQ ID NO: 447355
uacagcaguccauauauug

SEQ ID NO: 447357 - RNA, 19 nt, Artificial Sequence
  Description of Artificial Sequence: Synthetic oligonucleotide
  Sense strand starting at position 3929 of SEQ ID NO: 316879
uauggacugcuguaugauu

SEQ ID NO: 447358 - RNA, 19 nt, Artificial Sequence
  Description of Artificial Sequence: Synthetic oligonucleotide
  Antisense Strand to SEQ ID NO: 447357
aaucauacagcaguccaua

SEQ ID NO: 447359 - RNA, 19 nt, Artificial Sequence
  Description of Artificial Sequence: Synthetic oligonucleotide
  Sense strand starting at position 3934 of SEQ ID NO: 316879
acugcuguaugauuagaaa

SEQ ID NO: 447360 - RNA, 19 nt, Artificial Sequence
  Description of Artificial Sequence: Synthetic oligonucleotide
  Antisense Strand to SEQ ID NO: 447359
uuucuaaucauacagcagu

SEQ ID NO: 447361 - RNA, 19 nt, Artificial Sequence
  Description of Artificial Sequence: Synthetic oligonucleotide
  Sense strand starting at position 107 of SEQ ID NO: 316880
gacccaaugugcuugacaa

SEQ ID NO: 447362 - RNA, 19 nt, Artificial Sequence
  Description of Artificial Sequence: Synthetic oligonucleotide
  Antisense Strand to SEQ ID NO: 447361
uugucaagcacauuggguc

SEQ ID NO: 447363 - RNA, 19 nt, Artificial Sequence
  Description of Artificial Sequence: Synthetic oligonucleotide
  Sense strand starting at position 108 of SEQ ID NO: 316880
acccaaugugcuugacaau

SEQ ID NO: 447364 - RNA, 19 nt, Artificial Sequence
  Description of Artificial Sequence: Synthetic oligonucleotide
  Antisense Strand to SEQ ID NO: 447363
auugucaagcacauugggu

SEQ ID NO: 447365 - RNA, 19 nt, Artificial Sequence
  Description of Artificial Sequence: Synthetic oligonucleotide
  Sense strand starting at position 109 of SEQ ID NO: 316880
cccaaugugcuugacaaug

SEQ ID NO: 447366 - RNA, 19 nt, Artificial Sequence
  Description of Artificial Sequence: Synthetic oligonucleotide
  Antisense Strand to SEQ ID NO: 447365
cauugucaagcacauuggg

SEQ ID NO: 447367 - RNA, 19 nt, Artificial Sequence
  Description of Artificial Sequence: Synthetic oligonucleotide
  Sense strand starting at position 114 of SEQ ID NO: 316880
ugugcuugacaaugaagau

SEQ ID NO: 447368 - RNA, 19 nt, Artificial Sequence
  Description of Artificial Sequence: Synthetic oligonucleotide
  Antisense Strand to SEQ ID NO: 447367
aucuucauugucaagcaca

SEQ ID NO: 447369 - RNA, 19 nt, Artificial Sequence
  Description of Artificial Sequence: Synthetic oligonucleotide
  Sense strand starting at position 115 of SEQ ID NO: 316880
gugcuugacaaugaagauu

SEQ ID NO: 447370 - RNA, 19 nt, Artificial Sequence
  Description of Artificial Sequence: Synthetic oligonucleotide
  Antisense Strand to SEQ ID NO: 447369
aaucuucauugucaagcac

SEQ ID NO: 447371 - RNA, 19 nt, Artificial Sequence
  Description of Artificial Sequence: Synthetic oligonucleotide
  Sense strand starting at position 487 of SEQ ID NO: 316880
uccauaaugugagucuuua

SEQ ID NO: 447372 - RNA, 19 nt, Artificial Sequence
  Description of Artificial Sequence: Synthetic oligonucleotide
  Antisense Strand to SEQ ID NO: 447371
uaaagacucacauuaugga

SEQ ID NO: 447373 - RNA, 19 nt, Artificial Sequence
  Description of Artificial Sequence: Synthetic oligonucleotide
  Sense strand starting at position 530 of SEQ ID NO: 316880
agaaucuaguguucuugau

SEQ ID NO: 447374 - RNA, 19 nt, Artificial Sequence
  Description of Artificial Sequence: Synthetic oligonucleotide
  Antisense Strand to SEQ ID NO: 447373
aucaagaacacuagauucu

SEQ ID NO: 447375 - RNA, 19 nt, Artificial Sequence
  Description of Artificial Sequence: Synthetic oligonucleotide
  Sense strand starting at position 677 of SEQ ID NO: 316880
gguacuucccaagggcuaa

SEQ ID NO: 447376 - RNA, 19 nt, Artificial Sequence
  Description of Artificial Sequence: Synthetic oligonucleotide
  Antisense Strand to SEQ ID NO: 447375
uuagcccuugggaaguacc

SEQ ID NO: 447377 - RNA, 19 nt, Artificial Sequence
  Description of Artificial Sequence: Synthetic oligonucleotide
  Sense strand starting at position 698 of SEQ ID NO: 316880
guuuaagcuaccgaggauu

SEQ ID NO: 447378 - RNA, 19 nt, Artificial Sequence
  Description of Artificial Sequence: Synthetic oligonucleotide
  Antisense Strand to SEQ ID NO: 447377
aauccucgguagcuuaaac

SEQ ID NO: 447379 - RNA, 19 nt, Artificial Sequence
  Description of Artificial Sequence: Synthetic oligonucleotide
  Sense strand starting at position 786 of SEQ ID NO: 316880
ggucauauauuuguucuuu

SEQ ID NO: 447380 - RNA, 19 nt, Artificial Sequence
  Description of Artificial Sequence: Synthetic oligonucleotide
  Antisense Strand to SEQ ID NO: 447379
aaagaacaaauauaugacc

SEQ ID NO: 447381 - RNA, 19 nt, Artificial Sequence
  Description of Artificial Sequence: Synthetic oligonucleotide
  Sense strand starting at position 807 of SEQ ID NO: 316880
uagguauuacuuuguaagg

SEQ ID NO: 447382 - RNA, 19 nt, Artificial Sequence
  Description of Artificial Sequence: Synthetic oligonucleotide
  Antisense Strand to SEQ ID NO: 447381
ccuuacaaaguaauaccua

SEQ ID NO: 447383 - RNA, 19 nt, Artificial Sequence
  Description of Artificial Sequence: Synthetic oligonucleotide
  Sense strand starting at position 808 of SEQ ID NO: 316880
agguauuacuuuguaaggu

SEQ ID NO: 447384 - RNA, 19 nt, Artificial Sequence
  Description of Artificial Sequence: Synthetic oligonucleotide
  Antisense Strand to SEQ ID NO: 447383
accuuacaaaguaauaccu

SEQ ID NO: 447385 - RNA, 19 nt, Artificial Sequence
  Description of Artificial Sequence: Synthetic oligonucleotide
  Sense strand starting at position 817 of SEQ ID NO: 316880
uuuguaagguuaucugaaa

SEQ ID NO: 447386 - RNA, 19 nt, Artificial Sequence
  Description of Artificial Sequence: Synthetic oligonucleotide
  Antisense Strand to SEQ ID NO: 447385
uuucagauaaccuuacaaa

SEQ ID NO: 447387 - RNA, 19 nt, Artificial Sequence
  Description of Artificial Sequence: Synthetic oligonucleotide
  Sense strand starting at position 818 of SEQ ID NO: 316880
uuguaagguuaucugaaau

SEQ ID NO: 447388 - RNA, 19 nt, Artificial Sequence
  Description of Artificial Sequence: Synthetic oligonucleotide
  Antisense Strand to SEQ ID NO: 447387
auuucagauaaccuuacaa

SEQ ID NO: 447389 - RNA, 19 nt, Artificial Sequence
  Description of Artificial Sequence: Synthetic oligonucleotide
  Sense strand starting at position 1085 of SEQ ID NO: 316880
agaaauuacuaggcauugu

SEQ ID NO: 447390 - RNA, 19 nt, Artificial Sequence
  Description of Artificial Sequence: Synthetic oligonucleotide
  Antisense Strand to SEQ ID NO: 447389
acaaugccuaguaauuucu

SEQ ID NO: 447391 - RNA, 19 nt, Artificial Sequence
  Description of Artificial Sequence: Synthetic oligonucleotide
  Sense strand starting at position 1651 of SEQ ID NO: 316880
gcuaaugcuggagaagacu

SEQ ID NO: 447392 - RNA, 19 nt, Artificial Sequence
  Description of Artificial Sequence: Synthetic oligonucleotide
  Antisense Strand to SEQ ID NO: 447391
agucuucuccagcauuagc

SEQ ID NO: 447393 - RNA, 19 nt, Artificial Sequence
  Description of Artificial Sequence: Synthetic oligonucleotide
  Sense strand starting at position 2428 of SEQ ID NO: 316880
gggauugucuuugcuagaa

SEQ ID NO: 447394 - RNA, 19 nt, Artificial Sequence
  Description of Artificial Sequence: Synthetic oligonucleotide
  Antisense Strand to SEQ ID NO: 447393
uucuagcaaagacaauccc

SEQ ID NO: 447395 - RNA, 19 nt, Artificial Sequence
  Description of Artificial Sequence: Synthetic oligonucleotide
  Sense strand starting at position 2432 of SEQ ID NO: 316880
uugucuuugcuagaacucu

SEQ ID NO: 447396 - RNA, 19 nt, Artificial Sequence
  Description of Artificial Sequence: Synthetic oligonucleotide
  Antisense Strand to SEQ ID NO: 447395
agaguucuagcaaagacaa

SEQ ID NO: 447397 - RNA, 19 nt, Artificial Sequence
  Description of Artificial Sequence: Synthetic oligonucleotide
  Sense strand starting at position 2440 of SEQ ID NO: 316880
gcuagaacucucuagccau

SEQ ID NO: 447398 - RNA, 19 nt, Artificial Sequence
  Description of Artificial Sequence: Synthetic oligonucleotide
  Antisense Strand to SEQ ID NO: 447397
auggcuagagaguucuagc

SEQ ID NO: 447399 - RNA, 19 nt, Artificial Sequence
  Description of Artificial Sequence: Synthetic oligonucleotide
  Sense strand starting at position 2443 of SEQ ID NO: 316880
agaacucucuagccauguu

SEQ ID NO: 447400 - RNA, 19 nt, Artificial Sequence
  Description of Artificial Sequence: Synthetic oligonucleotide
  Antisense Strand to SEQ ID NO: 447399
aacauggcuagagaguucu

SEQ ID NO: 447401 - RNA, 19 nt, Artificial Sequence
  Description of Artificial Sequence: Synthetic oligonucleotide
  Sense strand starting at position 2561 of SEQ ID NO: 316880
guuuaaugauaggcauaau

SEQ ID NO: 447402 - RNA, 19 nt, Artificial Sequence
  Description of Artificial Sequence: Synthetic oligonucleotide
  Antisense Strand to SEQ ID NO: 447401
auuaugccuaucauuaaac

SEQ ID NO: 447403 - RNA, 19 nt, Artificial Sequence
  Description of Artificial Sequence: Synthetic oligonucleotide
  Sense strand starting at position 2627 of SEQ ID NO: 316880
gggcuuggcaaauguauuu

SEQ ID NO: 447404 - RNA, 19 nt, Artificial Sequence
  Description of Artificial Sequence: Synthetic oligonucleotide
  Antisense Strand to SEQ ID NO: 447403
aaauacauuugccaagccc

SEQ ID NO: 447405 - RNA, 19 nt, Artificial Sequence
  Description of Artificial Sequence: Synthetic oligonucleotide
  Sense strand starting at position 2676 of SEQ ID NO: 316880
aagguauguuucuuaaaug

SEQ ID NO: 447406 - RNA, 19 nt, Artificial Sequence
  Description of Artificial Sequence: Synthetic oligonucleotide
  Antisense Strand to SEQ ID NO: 447405
cauuuaagaaacauaccuu

SEQ ID NO: 447407 - RNA, 19 nt, Artificial Sequence
  Description of Artificial Sequence: Synthetic oligonucleotide
  Sense strand starting at position 2685 of SEQ ID NO: 316880
uucuuaaaugacugaaagu

SEQ ID NO: 447408 - RNA, 19 nt, Artificial Sequence
  Description of Artificial Sequence: Synthetic oligonucleotide
  Antisense Strand to SEQ ID NO: 447407
acuuucagucauuuaagaa

SEQ ID NO: 447409 - RNA, 19 nt, Artificial Sequence
  Description of Artificial Sequence: Synthetic oligonucleotide
  Sense strand starting at position 2721 of SEQ ID NO: 316880
acugaauuaguguggcaca

SEQ ID NO: 447410 - RNA, 19 nt, Artificial Sequence
  Description of Artificial Sequence: Synthetic oligonucleotide
  Antisense Strand to SEQ ID NO: 447409
ugugccacacuaauucagu

SEQ ID NO: 447411 - RNA, 19 nt, Artificial Sequence
  Description of Artificial Sequence: Synthetic oligonucleotide
  Sense strand starting at position 2886 of SEQ ID NO: 316880
gguucacuggagugaacua

SEQ ID NO: 447412 - RNA, 19 nt, Artificial Sequence
  Description of Artificial Sequence: Synthetic oligonucleotide
  Antisense Strand to SEQ ID NO: 447411
uaguucacuccagugaacc

SEQ ID NO: 447413 - RNA, 19 nt, Artificial Sequence
  Description of Artificial Sequence: Synthetic oligonucleotide
  Sense strand starting at position 3241 of SEQ ID NO: 316880
ucccgacuggcauacaaau

SEQ ID NO: 447414 - RNA, 19 nt, Artificial Sequence
  Description of Artificial Sequence: Synthetic oligonucleotide
  Antisense Strand to SEQ ID NO: 447413
auuuguaugccagucggga

SEQ ID NO: 447415 - RNA, 19 nt, Artificial Sequence
  Description of Artificial Sequence: Synthetic oligonucleotide
  Sense strand starting at position 3262 of SEQ ID NO: 316880
auuaaugugcccuggagaa

SEQ ID NO: 447416 - RNA, 19 nt, Artificial Sequence
  Description of Artificial Sequence: Synthetic oligonucleotide
  Antisense Strand to SEQ ID NO: 447415
uucuccagggcacauuaau

SEQ ID NO: 447417 - RNA, 19 nt, Artificial Sequence
  Description of Artificial Sequence: Synthetic oligonucleotide
  Sense strand starting at position 3301 of SEQ ID NO: 316880
ccaauaauccaaugagguu

SEQ ID NO: 447418 - RNA, 19 nt, Artificial Sequence
  Description of Artificial Sequence: Synthetic oligonucleotide
  Antisense Strand to SEQ ID NO: 447417
aaccucauuggauuauugg

SEQ ID NO: 447419 - RNA, 19 nt, Artificial Sequence
  Description of Artificial Sequence: Synthetic oligonucleotide
  Sense strand starting at position 3387 of SEQ ID NO: 316880
acaauugauucuuuggaug

SEQ ID NO: 447420 - RNA, 19 nt, Artificial Sequence
  Description of Artificial Sequence: Synthetic oligonucleotide
  Antisense Strand to SEQ ID NO: 447419
cauccaaagaaucaauugu

SEQ ID NO: 447421 - RNA, 19 nt, Artificial Sequence
  Description of Artificial Sequence: Synthetic oligonucleotide
  Sense strand starting at position 3392 of SEQ ID NO: 316880
ugauucuuuggaugagcuu

SEQ ID NO: 447422 - RNA, 19 nt, Artificial Sequence
  Description of Artificial Sequence: Synthetic oligonucleotide
  Antisense Strand to SEQ ID NO: 447421
aagcucauccaaagaauca

SEQ ID NO: 447423 - RNA, 19 nt, Artificial Sequence
  Description of Artificial Sequence: Synthetic oligonucleotide
  Sense strand starting at position 3460 of SEQ ID NO: 316880
agcagucaauaacuuagua

SEQ ID NO: 447424 - RNA, 19 nt, Artificial Sequence
  Description of Artificial Sequence: Synthetic oligonucleotide
  Antisense Strand to SEQ ID NO: 447423
uacuaaguuauugacugcu

SEQ ID NO: 447425 - RNA, 19 nt, Artificial Sequence
  Description of Artificial Sequence: Synthetic oligonucleotide
  Sense strand starting at position 3525 of SEQ ID NO: 316880
uuuccacagucaguagaua

SEQ ID NO: 447426 - RNA, 19 nt, Artificial Sequence
  Description of Artificial Sequence: Synthetic oligonucleotide
  Antisense Strand to SEQ ID NO: 447425
uaucuacugacuguggaaa

SEQ ID NO: 447427 - RNA, 19 nt, Artificial Sequence
  Description of Artificial Sequence: Synthetic oligonucleotide
  Sense strand starting at position 3526 of SEQ ID NO: 316880
uuccacagucaguagauaa

SEQ ID NO: 447428 - RNA, 19 nt, Artificial Sequence
  Description of Artificial Sequence: Synthetic oligonucleotide
  Antisense Strand to SEQ ID NO: 447427
uuaucuacugacuguggaa

SEQ ID NO: 447429 - RNA, 19 nt, Artificial Sequence
  Description of Artificial Sequence: Synthetic oligonucleotide
  Sense strand starting at position 3575 of SEQ ID NO: 316880
ugucguaggguugauaaag

SEQ ID NO: 447430 - RNA, 19 nt, Artificial Sequence
  Description of Artificial Sequence: Synthetic oligonucleotide
  Antisense Strand to SEQ ID NO: 447429
cuuuaucaacccuacgaca

SEQ ID NO: 447431 - RNA, 19 nt, Artificial Sequence
  Description of Artificial Sequence: Synthetic oligonucleotide
  Sense strand starting at position 3607 of SEQ ID NO: 316880
gcaggaguaugauuacaca

SEQ ID NO: 447432 - RNA, 19 nt, Artificial Sequence
  Description of Artificial Sequence: Synthetic oligonucleotide
  Antisense Strand to SEQ ID NO: 447431
uguguaaucauacuccugc

SEQ ID NO: 447433 - RNA, 19 nt, Artificial Sequence
  Description of Artificial Sequence: Synthetic oligonucleotide
  Sense strand starting at position 3628 of SEQ ID NO: 316880
gggaguaugauguaauggu

SEQ ID NO: 447434 - RNA, 19 nt, Artificial Sequence
  Description of Artificial Sequence: Synthetic oligonucleotide
  Antisense Strand to SEQ ID NO: 447433
accauuacaucauacuccc

SEQ ID NO: 447435 - RNA, 19 nt, Artificial Sequence
  Description of Artificial Sequence: Synthetic oligonucleotide
  Sense strand starting at position 3753 of SEQ ID NO: 316880
cucucaaaugauggucuua

SEQ ID NO: 447436 - RNA, 19 nt, Artificial Sequence
  Description of Artificial Sequence: Synthetic oligonucleotide
  Antisense Strand to SEQ ID NO: 447435
uaagaccaucauuugagag

SEQ ID NO: 447437 - RNA, 19 nt, Artificial Sequence
  Description of Artificial Sequence: Synthetic oligonucleotide
  Sense strand starting at position 3755 of SEQ ID NO: 316880
cucaaaugauggucuuaug

SEQ ID NO: 447438 - RNA, 19 nt, Artificial Sequence
  Description of Artificial Sequence: Synthetic oligonucleotide
  Antisense Strand to SEQ ID NO: 447437
cauaagaccaucauuugag

SEQ ID NO: 447439 - RNA, 19 nt, Artificial Sequence
  Description of Artificial Sequence: Synthetic oligonucleotide
  Sense strand starting at position 3828 of SEQ ID NO: 316880
agaguauucuuucuauggu

SEQ ID NO: 447440 - RNA, 19 nt, Artificial Sequence
  Description of Artificial Sequence: Synthetic oligonucleotide
  Antisense Strand to SEQ ID NO: 447439
accauagaaagaauacucu

SEQ ID NO: 447441 - RNA, 19 nt, Artificial Sequence
  Description of Artificial Sequence: Synthetic oligonucleotide
  Sense strand starting at position 41 of SEQ ID NO: 316881
uugaaaugaucuguuuaug

SEQ ID NO: 447442 - RNA, 19 nt, Artificial Sequence
  Description of Artificial Sequence: Synthetic oligonucleotide
  Antisense Strand to SEQ ID NO: 447441
cauaaacagaucauuucaa

SEQ ID NO: 447443 - RNA, 19 nt, Artificial Sequence
  Description of Artificial Sequence: Synthetic oligonucleotide
  Sense strand starting at position 44 of SEQ ID NO: 316881
aaaugaucuguuuaugugu

SEQ ID NO: 447444 - RNA, 19 nt, Artificial Sequence
  Description of Artificial Sequence: Synthetic oligonucleotide
  Antisense Strand to SEQ ID NO: 447443
acacauaaacagaucauuu

SEQ ID NO: 447445 - RNA, 19 nt, Artificial Sequence
  Description of Artificial Sequence: Synthetic oligonucleotide
  Sense strand starting at position 139 of SEQ ID NO: 316881
guaggaauuccauaagucc

SEQ ID NO: 447446 - RNA, 19 nt, Artificial Sequence
  Description of Artificial Sequence: Synthetic oligonucleotide
  Antisense Strand to SEQ ID NO: 447445
ggacuuauggaauuccuac

SEQ ID NO: 447447 - RNA, 19 nt, Artificial Sequence
  Description of Artificial Sequence: Synthetic oligonucleotide
  Sense strand starting at position 201 of SEQ ID NO: 316881
cuguuccucccauacugau

SEQ ID NO: 447448 - RNA, 19 nt, Artificial Sequence
  Description of Artificial Sequence: Synthetic oligonucleotide
  Antisense Strand to SEQ ID NO: 447447
aucaguaugggaggaacag

SEQ ID NO: 447449 - RNA, 19 nt, Artificial Sequence
  Description of Artificial Sequence: Synthetic oligonucleotide
  Sense strand starting at position 214 of SEQ ID NO: 316881
acugauuuguccuuuguuu

SEQ ID NO: 447450 - RNA, 19 nt, Artificial Sequence
  Description of Artificial Sequence: Synthetic oligonucleotide
  Antisense Strand to SEQ ID NO: 447449
aaacaaaggacaaaucagu

SEQ ID NO: 447451 - RNA, 19 nt, Artificial Sequence
  Description of Artificial Sequence: Synthetic oligonucleotide
  Sense strand starting at position 216 of SEQ ID NO: 316881
ugauuuguccuuuguuucu

SEQ ID NO: 447452 - RNA, 19 nt, Artificial Sequence
  Description of Artificial Sequence: Synthetic oligonucleotide
  Antisense Strand to SEQ ID NO: 447451
agaaacaaaggacaaauca

SEQ ID NO: 447453 - RNA, 19 nt, Artificial Sequence
  Description of Artificial Sequence: Synthetic oligonucleotide
  Sense strand starting at position 242 of SEQ ID NO: 316881
uagcacucguaauuggaaa

SEQ ID NO: 447454 - RNA, 19 nt, Artificial Sequence
  Description of Artificial Sequence: Synthetic oligonucleotide
  Antisense Strand to SEQ ID NO: 447453
uuuccaauuacgagugcua

SEQ ID NO: 447455 - RNA, 19 nt, Artificial Sequence
  Description of Artificial Sequence: Synthetic oligonucleotide
  Sense strand starting at position 244 of SEQ ID NO: 316881
gcacucguaauuggaaaca

SEQ ID NO: 447456 - RNA, 19 nt, Artificial Sequence
  Description of Artificial Sequence: Synthetic oligonucleotide
  Antisense Strand to SEQ ID NO: 447455
uguuuccaauuacgagugc

SEQ ID NO: 447457 - RNA, 19 nt, Artificial Sequence
  Description of Artificial Sequence: Synthetic oligonucleotide
  Sense strand starting at position 436 of SEQ ID NO: 316881
acaugaauguagguuagau

SEQ ID NO: 447458 - RNA, 19 nt, Artificial Sequence
  Description of Artificial Sequence: Synthetic oligonucleotide
  Antisense Strand to SEQ ID NO: 447457
aucuaaccuacauucaugu

SEQ ID NO: 447459 - RNA, 19 nt, Artificial Sequence
  Description of Artificial Sequence: Synthetic oligonucleotide
  Sense strand starting at position 554 of SEQ ID NO: 316881
gugcaaagaaugugaaguu

SEQ ID NO: 447460 - RNA, 19 nt, Artificial Sequence
  Description of Artificial Sequence: Synthetic oligonucleotide
  Antisense Strand to SEQ ID NO: 447459
aacuucacauucuuugcac

SEQ ID NO: 447461 - RNA, 19 nt, Artificial Sequence
  Description of Artificial Sequence: Synthetic oligonucleotide
  Sense strand starting at position 586 of SEQ ID NO: 316881
ggagaaggcggcuaguguu

SEQ ID NO: 447462 - RNA, 19 nt, Artificial Sequence
  Description of Artificial Sequence: Synthetic oligonucleotide
  Antisense Strand to SEQ ID NO: 447461
aacacuagccgccuucucc

SEQ ID NO: 447463 - RNA, 19 nt, Artificial Sequence
  Description of Artificial Sequence: Synthetic oligonucleotide
  Sense strand starting at position 671 of SEQ ID NO: 316881
gaaugucugugaucccaca

SEQ ID NO: 447464 - RNA, 19 nt, Artificial Sequence
  Description of Artificial Sequence: Synthetic oligonucleotide
  Antisense Strand to SEQ ID NO: 447463
ugugggaucacagacauuc

SEQ ID NO: 447465 - RNA, 19 nt, Artificial Sequence
  Description of Artificial Sequence: Synthetic oligonucleotide
  Sense strand starting at position 731 of SEQ ID NO: 316881
gagcauguuccagacgcua

SEQ ID NO: 447466 - RNA, 19 nt, Artificial Sequence
  Description of Artificial Sequence: Synthetic oligonucleotide
  Antisense Strand to SEQ ID NO: 447465
uagcgucuggaacaugcuc

SEQ ID NO: 447467 - RNA, 19 nt, Artificial Sequence
  Description of Artificial Sequence: Synthetic oligonucleotide
  Sense strand starting at position 869 of SEQ ID NO: 316881
gacagugagggauguuguu

SEQ ID NO: 447468 - RNA, 19 nt, Artificial Sequence
  Description of Artificial Sequence: Synthetic oligonucleotide
  Antisense Strand to SEQ ID NO: 447467
aacaacaucccucacuguc

SEQ ID NO: 447469 - RNA, 19 nt, Artificial Sequence
  Description of Artificial Sequence: Synthetic oligonucleotide
  Sense strand starting at position 944 of SEQ ID NO: 316881
gcugcagaggguuaacaaa

SEQ ID NO: 447470 - RNA, 19 nt, Artificial Sequence
  Description of Artificial Sequence: Synthetic oligonucleotide
  Antisense Strand to SEQ ID NO: 447469
uuuguuaacccucugcagc

SEQ ID NO: 447471 - RNA, 19 nt, Artificial Sequence
  Description of Artificial Sequence: Synthetic oligonucleotide
  Sense strand starting at position 1001 of SEQ ID NO: 316881
agacauagucugggaaggu

SEQ ID NO: 447472 - RNA, 19 nt, Artificial Sequence
  Description of Artificial Sequence: Synthetic oligonucleotide
  Antisense Strand to SEQ ID NO: 447471
accuucccagacuaugucu

SEQ ID NO: 447473 - RNA, 19 nt, Artificial Sequence
  Description of Artificial Sequence: Synthetic oligonucleotide
  Sense strand starting at position 1301 of SEQ ID NO: 316881
auggcaguugaaugaaauc

SEQ ID NO: 447474 - RNA, 19 nt, Artificial Sequence
  Description of Artificial Sequence: Synthetic oligonucleotide
  Antisense Strand to SEQ ID NO: 447473
gauuucauucaacugccau

SEQ ID NO: 447475 - RNA, 19 nt, Artificial Sequence
  Description of Artificial Sequence: Synthetic oligonucleotide
  Sense strand starting at position 1424 of SEQ ID NO: 316881
gugggaguuuccuuggcaa

SEQ ID NO: 447476 - RNA, 19 nt, Artificial Sequence
  Description of Artificial Sequence: Synthetic oligonucleotide
  Antisense Strand to SEQ ID NO: 447475
uugccaaggaaacucccac

SEQ ID NO: 447477 - RNA, 19 nt, Artificial Sequence
  Description of Artificial Sequence: Synthetic oligonucleotide
  Sense strand starting at position 1426 of SEQ ID NO: 316881
gggaguuuccuuggcaagg

SEQ ID NO: 447478 - RNA, 19 nt, Artificial Sequence
  Description of Artificial Sequence: Synthetic oligonucleotide
  Antisense Strand to SEQ ID NO: 447477
ccuugccaaggaaacuccc

SEQ ID NO: 447479 - RNA, 19 nt, Artificial Sequence
  Description of Artificial Sequence: Synthetic oligonucleotide
  Sense strand starting at position 1427 of SEQ ID NO: 316881
ggaguuuccuuggcaagga

SEQ ID NO: 447480 - RNA, 19 nt, Artificial Sequence
  Description of Artificial Sequence: Synthetic oligonucleotide
  Antisense Strand to SEQ ID NO: 447479
uccuugccaaggaaacucc

SEQ ID NO: 447481 - RNA, 19 nt, Artificial Sequence
  Description of Artificial Sequence: Synthetic oligonucleotide
  Sense strand starting at position 1464 of SEQ ID NO: 316881
uuaggauggugccucuaga

SEQ ID NO: 447482 - RNA, 19 nt, Artificial Sequence
  Description of Artificial Sequence: Synthetic oligonucleotide
  Antisense Strand to SEQ ID NO: 447481
ucuagaggcaccauccuaa

SEQ ID NO: 447483 - RNA, 19 nt, Artificial Sequence
  Description of Artificial Sequence: Synthetic oligonucleotide
  Sense strand starting at position 1534 of SEQ ID NO: 316881
gacaaaguuucugucugga

SEQ ID NO: 447484 - RNA, 19 nt, Artificial Sequence
  Description of Artificial Sequence: Synthetic oligonucleotide
  Antisense Strand to SEQ ID NO: 447483
uccagacagaaacuuuguc

SEQ ID NO: 447485 - RNA, 19 nt, Artificial Sequence
  Description of Artificial Sequence: Synthetic oligonucleotide
  Sense strand starting at position 1536 of SEQ ID NO: 316881
caaaguuucugucuggauu

SEQ ID NO: 447486 - RNA, 19 nt, Artificial Sequence
  Description of Artificial Sequence: Synthetic oligonucleotide
  Antisense Strand to SEQ ID NO: 447485
aauccagacagaaacuuug

SEQ ID NO: 447487 - RNA, 19 nt, Artificial Sequence
  Description of Artificial Sequence: Synthetic oligonucleotide
  Sense strand starting at position 1875 of SEQ ID NO: 316881
uggguuucucgggagaggu

SEQ ID NO: 447488 - RNA, 19 nt, Artificial Sequence
  Description of Artificial Sequence: Synthetic oligonucleotide
  Antisense Strand to SEQ ID NO: 447487
accucucccgagaaaccca

SEQ ID NO: 447489 - RNA, 19 nt, Artificial Sequence
  Description of Artificial Sequence: Synthetic oligonucleotide
  Sense strand starting at position 2662 of SEQ ID NO: 316881
aagacaaagucguuaggga

SEQ ID NO: 447490 - RNA, 19 nt, Artificial Sequence
  Description of Artificial Sequence: Synthetic oligonucleotide
  Antisense Strand to SEQ ID NO: 447489
ucccuaacgacuuugucuu

SEQ ID NO: 447491 - RNA, 19 nt, Artificial Sequence
  Description of Artificial Sequence: Synthetic oligonucleotide
  Sense strand starting at position 2669 of SEQ ID NO: 316881
agucguuagggagguagaa

SEQ ID NO: 447492 - RNA, 19 nt, Artificial Sequence
  Description of Artificial Sequence: Synthetic oligonucleotide
  Antisense Strand to SEQ ID NO: 447491
uucuaccucccuaacgacu

SEQ ID NO: 447493 - RNA, 19 nt, Artificial Sequence
  Description of Artificial Sequence: Synthetic oligonucleotide
  Sense strand starting at position 2730 of SEQ ID NO: 316881
ggagcaguuagaugaguaa

SEQ ID NO: 447494 - RNA, 19 nt, Artificial Sequence
  Description of Artificial Sequence: Synthetic oligonucleotide
  Antisense Strand to SEQ ID NO: 447493
uuacucaucuaacugcucc

SEQ ID NO: 447495 - RNA, 19 nt, Artificial Sequence
  Description of Artificial Sequence: Synthetic oligonucleotide
  Sense strand starting at position 2791 of SEQ ID NO: 316881
uaaagugagucguccaaau

SEQ ID NO: 447496 - RNA, 19 nt, Artificial Sequence
  Description of Artificial Sequence: Synthetic oligonucleotide
  Antisense Strand to SEQ ID NO: 447495
auuuggacgacucacuuua

SEQ ID NO: 447497 - RNA, 19 nt, Artificial Sequence
  Description of Artificial Sequence: Synthetic oligonucleotide
  Sense strand starting at position 2924 of SEQ ID NO: 316881
gcguguucucugguuucag

SEQ ID NO: 447498 - RNA, 19 nt, Artificial Sequence
  Description of Artificial Sequence: Synthetic oligonucleotide
  Antisense Strand to SEQ ID NO: 447497
cugaaaccagagaacacgc

SEQ ID NO: 447499 - RNA, 19 nt, Artificial Sequence
  Description of Artificial Sequence: Synthetic oligonucleotide
  Sense strand starting at position 2946 of SEQ ID NO: 316881
guggacuuuaagggaaagu

SEQ ID NO: 447500 - RNA, 19 nt, Artificial Sequence
  Description of Artificial Sequence: Synthetic oligonucleotide
  Antisense Strand to SEQ ID NO: 447499
acuuucccuuaaaguccac

SEQ ID NO: 447501 - RNA, 19 nt, Artificial Sequence
  Description of Artificial Sequence: Synthetic oligonucleotide
  Sense strand starting at position 2984 of SEQ ID NO: 316881
uuuccuaaagcucgaauaa

SEQ ID NO: 447502 - RNA, 19 nt, Artificial Sequence
  Description of Artificial Sequence: Synthetic oligonucleotide
  Antisense Strand to SEQ ID NO: 447501
uuauucgagcuuuaggaaa

SEQ ID NO: 447503 - RNA, 19 nt, Artificial Sequence
  Description of Artificial Sequence: Synthetic oligonucleotide
  Sense strand starting at position 2985 of SEQ ID NO: 316881
uuccuaaagcucgaauaau

SEQ ID NO: 447504 - RNA, 19 nt, Artificial Sequence
  Description of Artificial Sequence: Synthetic oligonucleotide
  Antisense Strand to SEQ ID NO: 447503
auuauucgagcuuuaggaa

SEQ ID NO: 447505 - RNA, 19 nt, Artificial Sequence
  Description of Artificial Sequence: Synthetic oligonucleotide
  Sense strand starting at position 3210 of SEQ ID NO: 316881
guagaacuguuucugaaau

SEQ ID NO: 447506 - RNA, 19 nt, Artificial Sequence
  Description of Artificial Sequence: Synthetic oligonucleotide
  Antisense Strand to SEQ ID NO: 447505
auuucagaaacaguucuac

SEQ ID NO: 447507 - RNA, 19 nt, Artificial Sequence
  Description of Artificial Sequence: Synthetic oligonucleotide
  Sense strand starting at position 3349 of SEQ ID NO: 316881
agacaaagccucugaggau

SEQ ID NO: 447508 - RNA, 19 nt, Artificial Sequence
  Description of Artificial Sequence: Synthetic oligonucleotide
  Antisense Strand to SEQ ID NO: 447507
auccucagaggcuuugucu

SEQ ID NO: 447509 - RNA, 19 nt, Artificial Sequence
  Description of Artificial Sequence: Synthetic oligonucleotide
  Sense strand starting at position 3586 of SEQ ID NO: 316881
uuugguugccaauacaaca

SEQ ID NO: 447510 - RNA, 19 nt, Artificial Sequence
  Description of Artificial Sequence: Synthetic oligonucleotide
  Antisense Strand to SEQ ID NO: 447509
uguuguauuggcaaccaaa

SEQ ID NO: 447511 - RNA, 19 nt, Artificial Sequence
  Description of Artificial Sequence: Synthetic oligonucleotide
  Sense strand starting at position 3698 of SEQ ID NO: 316881
cuucuacuuccugaguuua

SEQ ID NO: 447512 - RNA, 19 nt, Artificial Sequence
  Description of Artificial Sequence: Synthetic oligonucleotide
  Antisense Strand to SEQ ID NO: 447511
uaaacucaggaaguagaag

SEQ ID NO: 447513 - RNA, 19 nt, Artificial Sequence
  Description of Artificial Sequence: Synthetic oligonucleotide
  Sense strand starting at position 3933 of SEQ ID NO: 316881
ugccauauugauggugagu

SEQ ID NO: 447514 - RNA, 19 nt, Artificial Sequence
  Description of Artificial Sequence: Synthetic oligonucleotide
  Antisense Strand to SEQ ID NO: 447513
acucaccaucaauauggca

SEQ ID NO: 447515 - RNA, 19 nt, Artificial Sequence
  Description of Artificial Sequence: Synthetic oligonucleotide
  Sense strand starting at position 3936 of SEQ ID NO: 316881
cauauugauggugagucua

SEQ ID NO: 447516 - RNA, 19 nt, Artificial Sequence
  Description of Artificial Sequence: Synthetic oligonucleotide
  Antisense Strand to SEQ ID NO: 447515
uagacucaccaucaauaug

SEQ ID NO: 447517 - RNA, 19 nt, Artificial Sequence
  Description of Artificial Sequence: Synthetic oligonucleotide
  Sense strand starting at position 3948 of SEQ ID NO: 316881
gagucuaccuaugcaagca

SEQ ID NO: 447518 - RNA, 19 nt, Artificial Sequence
  Description of Artificial Sequence: Synthetic oligonucleotide
  Antisense Strand to SEQ ID NO: 447517
ugcuugcauagguagacuc

SEQ ID NO: 447519 - RNA, 19 nt, Artificial Sequence
  Description of Artificial Sequence: Synthetic oligonucleotide
  Sense strand starting at position 3960 of SEQ ID NO: 316881
gcaagcaucugauuacuac

SEQ ID NO: 447520 - RNA, 19 nt, Artificial Sequence
  Description of Artificial Sequence: Synthetic oligonucleotide
  Antisense Strand to SEQ ID NO: 447519
guaguaaucagaugcuugc

SEQ ID NO: 447521 - RNA, 19 nt, Artificial Sequence
  Description of Artificial Sequence: Synthetic oligonucleotide
  Sense strand starting at position 41 of SEQ ID NO: 316882
uggauuauguuagagacca

SEQ ID NO: 447522 - RNA, 19 nt, Artificial Sequence
  Description of Artificial Sequence: Synthetic oligonucleotide
  Antisense Strand to SEQ ID NO: 447521
uggucucuaacauaaucca

SEQ ID NO: 447523 - RNA, 19 nt, Artificial Sequence
  Description of Artificial Sequence: Synthetic oligonucleotide
  Sense strand starting at position 146 of SEQ ID NO: 316882
ucuggaggcugagacauaa

SEQ ID NO: 447524 - RNA, 19 nt, Artificial Sequence
  Description of Artificial Sequence: Synthetic oligonucleotide
  Antisense Strand to SEQ ID NO: 447523
uuaugucucagccuccaga

SEQ ID NO: 447525 - RNA, 19 nt, Artificial Sequence
  Description of Artificial Sequence: Synthetic oligonucleotide
  Sense strand starting at position 313 of SEQ ID NO: 316882
ccucaaauucugugugguu

SEQ ID NO: 447526 - RNA, 19 nt, Artificial Sequence
  Description of Artificial Sequence: Synthetic oligonucleotide
  Antisense Strand to SEQ ID NO: 447525
aaccacacagaauuugagg

SEQ ID NO: 447527 - RNA, 19 nt, Artificial Sequence
  Description of Artificial Sequence: Synthetic oligonucleotide
  Sense strand starting at position 314 of SEQ ID NO: 316882
cucaaauucugugugguua

SEQ ID NO: 447528 - RNA, 19 nt, Artificial Sequence
  Description of Artificial Sequence: Synthetic oligonucleotide
  Antisense Strand to SEQ ID NO: 447527
uaaccacacagaauuugag

SEQ ID NO: 447529 - RNA, 19 nt, Artificial Sequence
  Description of Artificial Sequence: Synthetic oligonucleotide
  Sense strand starting at position 315 of SEQ ID NO: 316882
ucaaauucugugugguuac

SEQ ID NO: 447530 - RNA, 19 nt, Artificial Sequence
  Description of Artificial Sequence: Synthetic oligonucleotide
  Antisense Strand to SEQ ID NO: 447529
guaaccacacagaauuuga

SEQ ID NO: 447531 - RNA, 19 nt, Artificial Sequence
  Description of Artificial Sequence: Synthetic oligonucleotide
  Sense strand starting at position 325 of SEQ ID NO: 316882
ugugguuacugagcauaag

SEQ ID NO: 447532 - RNA, 19 nt, Artificial Sequence
  Description of Artificial Sequence: Synthetic oligonucleotide
  Antisense Strand to SEQ ID NO: 447531
cuuaugcucaguaaccaca

SEQ ID NO: 447533 - RNA, 19 nt, Artificial Sequence
  Description of Artificial Sequence: Synthetic oligonucleotide
  Sense strand starting at position 328 of SEQ ID NO: 316882
gguuacugagcauaaggua

SEQ ID NO: 447534 - RNA, 19 nt, Artificial Sequence
  Description of Artificial Sequence: Synthetic oligonucleotide
  Antisense Strand to SEQ ID NO: 447533
uaccuuaugcucaguaacc

SEQ ID NO: 447535 - RNA, 19 nt, Artificial Sequence
  Description of Artificial Sequence: Synthetic oligonucleotide
  Sense strand starting at position 337 of SEQ ID NO: 316882
gcauaagguaucugcugaa

SEQ ID NO: 447536 - RNA, 19 nt, Artificial Sequence
  Description of Artificial Sequence: Synthetic oligonucleotide
  Antisense Strand to SEQ ID NO: 447535
uucagcagauaccuuaugc

SEQ ID NO: 447537 - RNA, 19 nt, Artificial Sequence
  Description of Artificial Sequence: Synthetic oligonucleotide
  Sense strand starting at position 406 of SEQ ID NO: 316882
cugucuuggccucaugaac

SEQ ID NO: 447538 - RNA, 19 nt, Artificial Sequence
  Description of Artificial Sequence: Synthetic oligonucleotide
  Antisense Strand to SEQ ID NO: 447537
guucaugaggccaagacag

SEQ ID NO: 447539 - RNA, 19 nt, Artificial Sequence
  Description of Artificial Sequence: Synthetic oligonucleotide
  Sense strand starting at position 498 of SEQ ID NO: 316882
cuuucuccuuggguugaua

SEQ ID NO: 447540 - RNA, 19 nt, Artificial Sequence
  Description of Artificial Sequence: Synthetic oligonucleotide
  Antisense Strand to SEQ ID NO: 447539
uaucaacccaaggagaaag

SEQ ID NO: 447541 - RNA, 19 nt, Artificial Sequence
  Description of Artificial Sequence: Synthetic oligonucleotide
  Sense strand starting at position 500 of SEQ ID NO: 316882
uucuccuuggguugauaaa

SEQ ID NO: 447542 - RNA, 19 nt, Artificial Sequence
  Description of Artificial Sequence: Synthetic oligonucleotide
  Antisense Strand to SEQ ID NO: 447541
uuuaucaacccaaggagaa

SEQ ID NO: 447543 - RNA, 19 nt, Artificial Sequence
  Description of Artificial Sequence: Synthetic oligonucleotide
  Sense strand starting at position 509 of SEQ ID NO: 316882
gguugauaaaggcaagagu

SEQ ID NO: 447544 - RNA, 19 nt, Artificial Sequence
  Description of Artificial Sequence: Synthetic oligonucleotide
  Antisense Strand to SEQ ID NO: 447543
acucuugccuuuaucaacc

SEQ ID NO: 447545 - RNA, 19 nt, Artificial Sequence
  Description of Artificial Sequence: Synthetic oligonucleotide
  Sense strand starting at position 518 of SEQ ID NO: 316882
aggcaagagugcuuguaaa

SEQ ID NO: 447546 - RNA, 19 nt, Artificial Sequence
  Description of Artificial Sequence: Synthetic oligonucleotide
  Antisense Strand to SEQ ID NO: 447545
uuuacaagcacucuugccu

SEQ ID NO: 447547 - RNA, 19 nt, Artificial Sequence
  Description of Artificial Sequence: Synthetic oligonucleotide
  Sense strand starting at position 573 of SEQ ID NO: 316882
aaaggaagguauuauuauc

SEQ ID NO: 447548 - RNA, 19 nt, Artificial Sequence
  Description of Artificial Sequence: Synthetic oligonucleotide
  Antisense Strand to SEQ ID NO: 447547
gauaauaauaccuuccuuu

SEQ ID NO: 447549 - RNA, 19 nt, Artificial Sequence
  Description of Artificial Sequence: Synthetic oligonucleotide
  Sense strand starting at position 614 of SEQ ID NO: 316882
agaaacauuucuuguguaa

SEQ ID NO: 447550 - RNA, 19 nt, Artificial Sequence
  Description of Artificial Sequence: Synthetic oligonucleotide
  Antisense Strand to SEQ ID NO: 447549
uuacacaagaaauguuucu

SEQ ID NO: 447551 - RNA, 19 nt, Artificial Sequence
  Description of Artificial Sequence: Synthetic oligonucleotide
  Sense strand starting at position 752 of SEQ ID NO: 316882
agcugagcacuguaaggaa

SEQ ID NO: 447552 - RNA, 19 nt, Artificial Sequence
  Description of Artificial Sequence: Synthetic oligonucleotide
  Antisense Strand to SEQ ID NO: 447551
uuccuuacagugcucagcu

SEQ ID NO: 447553 - RNA, 19 nt, Artificial Sequence
  Description of Artificial Sequence: Synthetic oligonucleotide
  Sense strand starting at position 844 of SEQ ID NO: 316882
ggcaguauguaccuaucca

SEQ ID NO: 447554 - RNA, 19 nt, Artificial Sequence
  Description of Artificial Sequence: Synthetic oligonucleotide
  Antisense Strand to SEQ ID NO: 447553
uggauagguacauacugcc

SEQ ID NO: 447555 - RNA, 19 nt, Artificial Sequence
  Description of Artificial Sequence: Synthetic oligonucleotide
  Sense strand starting at position 1011 of SEQ ID NO: 316882
ugccgaaauuucucuguga

SEQ ID NO: 447556 - RNA, 19 nt, Artificial Sequence
  Description of Artificial Sequence: Synthetic oligonucleotide
  Antisense Strand to SEQ ID NO: 447555
ucacagagaaauuucggca

SEQ ID NO: 447557 - RNA, 19 nt, Artificial Sequence
  Description of Artificial Sequence: Synthetic oligonucleotide
  Sense strand starting at position 1012 of SEQ ID NO: 316882
gccgaaauuucucugugag

SEQ ID NO: 447558 - RNA, 19 nt, Artificial Sequence
  Description of Artificial Sequence: Synthetic oligonucleotide
  Antisense Strand to SEQ ID NO: 447557
cucacagagaaauuucggc

SEQ ID NO: 447559 - RNA, 19 nt, Artificial Sequence
  Description of Artificial Sequence: Synthetic oligonucleotide
  Sense strand starting at position 1018 of SEQ ID NO: 316882
auuucucugugagacaaca

SEQ ID NO: 447560 - RNA, 19 nt, Artificial Sequence
  Description of Artificial Sequence: Synthetic oligonucleotide
  Antisense Strand to SEQ ID NO: 447559
uguugucucacagagaaau

SEQ ID NO: 447561 - RNA, 19 nt, Artificial Sequence
  Description of Artificial Sequence: Synthetic oligonucleotide
  Sense strand starting at position 1044 of SEQ ID NO: 316882
guuagaaagucaccacaau

SEQ ID NO: 447562 - RNA, 19 nt, Artificial Sequence
  Description of Artificial Sequence: Synthetic oligonucleotide
  Antisense Strand to SEQ ID NO: 447561
auuguggugacuuucuaac

SEQ ID NO: 447563 - RNA, 19 nt, Artificial Sequence
  Description of Artificial Sequence: Synthetic oligonucleotide
  Sense strand starting at position 1199 of SEQ ID NO: 316882
gugcacucugcguaagauc

SEQ ID NO: 447564 - RNA, 19 nt, Artificial Sequence
  Description of Artificial Sequence: Synthetic oligonucleotide
  Antisense Strand to SEQ ID NO: 447563
gaucuuacgcagagugcac

SEQ ID NO: 447565 - RNA, 19 nt, Artificial Sequence
  Description of Artificial Sequence: Synthetic oligonucleotide
  Sense strand starting at position 1248 of SEQ ID NO: 316882
guggcuaauguccacaauu

SEQ ID NO: 447566 - RNA, 19 nt, Artificial Sequence
  Description of Artificial Sequence: Synthetic oligonucleotide
  Antisense Strand to SEQ ID NO: 447565
aauuguggacauuagccac

SEQ ID NO: 447567 - RNA, 19 nt, Artificial Sequence
  Description of Artificial Sequence: Synthetic oligonucleotide
  Sense strand starting at position 1250 of SEQ ID NO: 316882
ggcuaauguccacaauuag

SEQ ID NO: 447568 - RNA, 19 nt, Artificial Sequence
  Description of Artificial Sequence: Synthetic oligonucleotide
  Antisense Strand to SEQ ID NO: 447567
cuaauuguggacauuagcc

SEQ ID NO: 447569 - RNA, 19 nt, Artificial Sequence
  Description of Artificial Sequence: Synthetic oligonucleotide
  Sense strand starting at position 1461 of SEQ ID NO: 316882
acgggcuaaucguuugagu

SEQ ID NO: 447570 - RNA, 19 nt, Artificial Sequence
  Description of Artificial Sequence: Synthetic oligonucleotide
  Antisense Strand to SEQ ID NO: 447569
acucaaacgauuagcccgu

SEQ ID NO: 447571 - RNA, 19 nt, Artificial Sequence
  Description of Artificial Sequence: Synthetic oligonucleotide
  Sense strand starting at position 1787 of SEQ ID NO: 316882
cacugaggcugcucuuaga

SEQ ID NO: 447572 - RNA, 19 nt, Artificial Sequence
  Description of Artificial Sequence: Synthetic oligonucleotide
  Antisense Strand to SEQ ID NO: 447571
ucuaagagcagccucagug

SEQ ID NO: 447573 - RNA, 19 nt, Artificial Sequence
  Description of Artificial Sequence: Synthetic oligonucleotide
  Sense strand starting at position 1830 of SEQ ID NO: 316882
ucuuguucugaggaugcuu

SEQ ID NO: 447574 - RNA, 19 nt, Artificial Sequence
  Description of Artificial Sequence: Synthetic oligonucleotide
  Antisense Strand to SEQ ID NO: 447573
aagcauccucagaacaaga

SEQ ID NO: 447575 - RNA, 19 nt, Artificial Sequence
  Description of Artificial Sequence: Synthetic oligonucleotide
  Sense strand starting at position 1985 of SEQ ID NO: 316882
gucugcaugucauugugga

SEQ ID NO: 447576 - RNA, 19 nt, Artificial Sequence
  Description of Artificial Sequence: Synthetic oligonucleotide
  Antisense Strand to SEQ ID NO: 447575
uccacaaugacaugcagac

SEQ ID NO: 447577 - RNA, 19 nt, Artificial Sequence
  Description of Artificial Sequence: Synthetic oligonucleotide
  Sense strand starting at position 2061 of SEQ ID NO: 316882
cgagcaugcggugucugaa

SEQ ID NO: 447578 - RNA, 19 nt, Artificial Sequence
  Description of Artificial Sequence: Synthetic oligonucleotide
  Antisense Strand to SEQ ID NO: 447577
uucagacaccgcaugcucg

SEQ ID NO: 447579 - RNA, 19 nt, Artificial Sequence
  Description of Artificial Sequence: Synthetic oligonucleotide
  Sense strand starting at position 2289 of SEQ ID NO: 316882
agaaacuaucuuggccaga

SEQ ID NO: 447580 - RNA, 19 nt, Artificial Sequence
  Description of Artificial Sequence: Synthetic oligonucleotide
  Antisense Strand to SEQ ID NO: 447579
ucuggccaagauaguuucu

SEQ ID NO: 447581 - RNA, 19 nt, Artificial Sequence
  Description of Artificial Sequence: Synthetic oligonucleotide
  Sense strand starting at position 2496 of SEQ ID NO: 316882
uauagucagccgugaucau

SEQ ID NO: 447582 - RNA, 19 nt, Artificial Sequence
  Description of Artificial Sequence: Synthetic oligonucleotide
  Antisense Strand to SEQ ID NO: 447581
augaucacggcugacuaua

SEQ ID NO: 447583 - RNA, 19 nt, Artificial Sequence
  Description of Artificial Sequence: Synthetic oligonucleotide
  Sense strand starting at position 2543 of SEQ ID NO: 316882
gagacauugucacacagac

SEQ ID NO: 447584 - RNA, 19 nt, Artificial Sequence
  Description of Artificial Sequence: Synthetic oligonucleotide
  Antisense Strand to SEQ ID NO: 447583
gucugugugacaaugucuc

SEQ ID NO: 447585 - RNA, 19 nt, Artificial Sequence
  Description of Artificial Sequence: Synthetic oligonucleotide
  Sense strand starting at position 2583 of SEQ ID NO: 316882
aaacaauucggcugggcau

SEQ ID NO: 447586 - RNA, 19 nt, Artificial Sequence
  Description of Artificial Sequence: Synthetic oligonucleotide
  Antisense Strand to SEQ ID NO: 447585
augcccagccgaauuguuu

SEQ ID NO: 447587 - RNA, 19 nt, Artificial Sequence
  Description of Artificial Sequence: Synthetic oligonucleotide
  Sense strand starting at position 2878 of SEQ ID NO: 316882
cucucugagccuugcauca

SEQ ID NO: 447588 - RNA, 19 nt, Artificial Sequence
  Description of Artificial Sequence: Synthetic oligonucleotide
  Antisense Strand to SEQ ID NO: 447587
ugaugcaaggcucagagag

SEQ ID NO: 447589 - RNA, 19 nt, Artificial Sequence
  Description of Artificial Sequence: Synthetic oligonucleotide
  Sense strand starting at position 3092 of SEQ ID NO: 316882
ugaaauccgucucuucuaa

SEQ ID NO: 447590 - RNA, 19 nt, Artificial Sequence
  Description of Artificial Sequence: Synthetic oligonucleotide
  Antisense Strand to SEQ ID NO: 447589
uuagaagagacggauuuca

SEQ ID NO: 447591 - RNA, 19 nt, Artificial Sequence
  Description of Artificial Sequence: Synthetic oligonucleotide
  Sense strand starting at position 3277 of SEQ ID NO: 316882
uccuaugucccacgccaaa

SEQ ID NO: 447592 - RNA, 19 nt, Artificial Sequence
  Description of Artificial Sequence: Synthetic oligonucleotide
  Antisense Strand to SEQ ID NO: 447591
uuuggcgugggacauagga

SEQ ID NO: 447593 - RNA, 19 nt, Artificial Sequence
  Description of Artificial Sequence: Synthetic oligonucleotide
  Sense strand starting at position 3405 of SEQ ID NO: 316882
ggacucugcuccuugggaa

SEQ ID NO: 447594 - RNA, 19 nt, Artificial Sequence
  Description of Artificial Sequence: Synthetic oligonucleotide
  Antisense Strand to SEQ ID NO: 447593
uucccaaggagcagagucc

SEQ ID NO: 447595 - RNA, 19 nt, Artificial Sequence
  Description of Artificial Sequence: Synthetic oligonucleotide
  Sense strand starting at position 3565 of SEQ ID NO: 316882
gaaauacagucacaagaga

SEQ ID NO: 447596 - RNA, 19 nt, Artificial Sequence
  Description of Artificial Sequence: Synthetic oligonucleotide
  Antisense Strand to SEQ ID NO: 447595
ucucuugugacuguauuuc

SEQ ID NO: 447597 - RNA, 19 nt, Artificial Sequence
  Description of Artificial Sequence: Synthetic oligonucleotide
  Sense strand starting at position 3605 of SEQ ID NO: 316882
cuaagucuugaguauugca

SEQ ID NO: 447598 - RNA, 19 nt, Artificial Sequence
  Description of Artificial Sequence: Synthetic oligonucleotide
  Antisense Strand to SEQ ID NO: 447597
ugcaauacucaagacuuag

SEQ ID NO: 447599 - RNA, 19 nt, Artificial Sequence
  Description of Artificial Sequence: Synthetic oligonucleotide
  Sense strand starting at position 3769 of SEQ ID NO: 316882
uuggcaaggucuguucaga

SEQ ID NO: 447600 - RNA, 19 nt, Artificial Sequence
  Description of Artificial Sequence: Synthetic oligonucleotide
  Antisense Strand to SEQ ID NO: 447599
ucugaacagaccuugccaa

SEQ ID NO: 447601 - RNA, 19 nt, Artificial Sequence
  Description of Artificial Sequence: Synthetic oligonucleotide
  Sense strand starting at position 341 of SEQ ID NO: 316883
acauguugaacggaguuua

SEQ ID NO: 447602 - RNA, 19 nt, Artificial Sequence
  Description of Artificial Sequence: Synthetic oligonucleotide
  Antisense Strand to SEQ ID NO: 447601
uaaacuccguucaacaugu

SEQ ID NO: 447603 - RNA, 19 nt, Artificial Sequence
  Description of Artificial Sequence: Synthetic oligonucleotide
  Sense strand starting at position 365 of SEQ ID NO: 316883
ugcaguuggcuccugcuaa

SEQ ID NO: 447604 - RNA, 19 nt, Artificial Sequence
  Description of Artificial Sequence: Synthetic oligonucleotide
  Antisense Strand to SEQ ID NO: 447603
uuagcaggagccaacugca

SEQ ID NO: 447605 - RNA, 19 nt, Artificial Sequence
  Description of Artificial Sequence: Synthetic oligonucleotide
  Sense strand starting at position 427 of SEQ ID NO: 316883
ggauauaaguggucuccag

SEQ ID NO: 447606 - RNA, 19 nt, Artificial Sequence
  Description of Artificial Sequence: Synthetic oligonucleotide
  Antisense Strand to SEQ ID NO: 447605
cuggagaccacuuauaucc

SEQ ID NO: 447607 - RNA, 19 nt, Artificial Sequence
  Description of Artificial Sequence: Synthetic oligonucleotide
  Sense strand starting at position 470 of SEQ ID NO: 316883
uggugaugaagcugggaau

SEQ ID NO: 447608 - RNA, 19 nt, Artificial Sequence
  Description of Artificial Sequence: Synthetic oligonucleotide
  Antisense Strand to SEQ ID NO: 447607
auucccagcuucaucacca

SEQ ID NO: 447609 - RNA, 19 nt, Artificial Sequence
  Description of Artificial Sequence: Synthetic oligonucleotide
  Sense strand starting at position 481 of SEQ ID NO: 316883
cugggaauguuucugacac

SEQ ID NO: 447610 - RNA, 19 nt, Artificial Sequence
  Description of Artificial Sequence: Synthetic oligonucleotide
  Antisense Strand to SEQ ID NO: 447609
gugucagaaacauucccag

SEQ ID NO: 447611 - RNA, 19 nt, Artificial Sequence
  Description of Artificial Sequence: Synthetic oligonucleotide
  Sense strand starting at position 568 of SEQ ID NO: 316883
agaguuaacugagucacaa

SEQ ID NO: 447612 - RNA, 19 nt, Artificial Sequence
  Description of Artificial Sequence: Synthetic oligonucleotide
  Antisense Strand to SEQ ID NO: 447611
uugugacucaguuaacucu

SEQ ID NO: 447613 - RNA, 19 nt, Artificial Sequence
  Description of Artificial Sequence: Synthetic oligonucleotide
  Sense strand starting at position 602 of SEQ ID NO: 316883
guuccucuacaagagucaa

SEQ ID NO: 447614 - RNA, 19 nt, Artificial Sequence
  Description of Artificial Sequence: Synthetic oligonucleotide
  Antisense Strand to SEQ ID NO: 447613
uugacucuuguagaggaac

SEQ ID NO: 447615 - RNA, 19 nt, Artificial Sequence
  Description of Artificial Sequence: Synthetic oligonucleotide
  Sense strand starting at position 687 of SEQ ID NO: 316883
gcaugcaaacgagauagau

SEQ ID NO: 447616 - RNA, 19 nt, Artificial Sequence
  Description of Artificial Sequence: Synthetic oligonucleotide
  Antisense Strand to SEQ ID NO: 447615
aucuaucucguuugcaugc

SEQ ID NO: 447617 - RNA, 19 nt, Artificial Sequence
  Description of Artificial Sequence: Synthetic oligonucleotide
  Sense strand starting at position 691 of SEQ ID NO: 316883
gcaaacgagauagauguau

SEQ ID NO: 447618 - RNA, 19 nt, Artificial Sequence
  Description of Artificial Sequence: Synthetic oligonucleotide
  Antisense Strand to SEQ ID NO: 447617
auacaucuaucucguuugc

SEQ ID NO: 447619 - RNA, 19 nt, Artificial Sequence
  Description of Artificial Sequence: Synthetic oligonucleotide
  Sense strand starting at position 720 of SEQ ID NO: 316883
gucacuugaaaguagugaa

SEQ ID NO: 447620 - RNA, 19 nt, Artificial Sequence
  Description of Artificial Sequence: Synthetic oligonucleotide
  Antisense Strand to SEQ ID NO: 447619
uucacuacuuucaagugac

SEQ ID NO: 447621 - RNA, 19 nt, Artificial Sequence
  Description of Artificial Sequence: Synthetic oligonucleotide
  Sense strand starting at position 979 of SEQ ID NO: 316883
auucucuuagucuaaaggu

SEQ ID NO: 447622 - RNA, 19 nt, Artificial Sequence
  Description of Artificial Sequence: Synthetic oligonucleotide
  Antisense Strand to SEQ ID NO: 447621
accuuuagacuaagagaau

SEQ ID NO: 447623 - RNA, 19 nt, Artificial Sequence
  Description of Artificial Sequence: Synthetic oligonucleotide
  Sense strand starting at position 1066 of SEQ ID NO: 316883
auguccauauaucuuggaa

SEQ ID NO: 447624 - RNA, 19 nt, Artificial Sequence
  Description of Artificial Sequence: Synthetic oligonucleotide
  Antisense Strand to SEQ ID NO: 447623
uuccaagauauauggacau

SEQ ID NO: 447625 - RNA, 19 nt, Artificial Sequence
  Description of Artificial Sequence: Synthetic oligonucleotide
  Sense strand starting at position 1069 of SEQ ID NO: 316883
uccauauaucuuggaagca

SEQ ID NO: 447626 - RNA, 19 nt, Artificial Sequence
  Description of Artificial Sequence: Synthetic oligonucleotide
  Antisense Strand to SEQ ID NO: 447625
ugcuuccaagauauaugga

SEQ ID NO: 447627 - RNA, 19 nt, Artificial Sequence
  Description of Artificial Sequence: Synthetic oligonucleotide
  Sense strand starting at position 1195 of SEQ ID NO: 316883
accgaagucagcugaaaga

SEQ ID NO: 447628 - RNA, 19 nt, Artificial Sequence
  Description of Artificial Sequence: Synthetic oligonucleotide
  Antisense Strand to SEQ ID NO: 447627
ucuuucagcugacuucggu

SEQ ID NO: 447629 - RNA, 19 nt, Artificial Sequence
  Description of Artificial Sequence: Synthetic oligonucleotide
  Sense strand starting at position 1625 of SEQ ID NO: 316883
ucuaguguccuguucgcaa

SEQ ID NO: 447630 - RNA, 19 nt, Artificial Sequence
  Description of Artificial Sequence: Synthetic oligonucleotide
  Antisense Strand to SEQ ID NO: 447629
uugcgaacaggacacuaga

SEQ ID NO: 447631 - RNA, 19 nt, Artificial Sequence
  Description of Artificial Sequence: Synthetic oligonucleotide
  Sense strand starting at position 1762 of SEQ ID NO: 316883
guguccaucccacauaacu

SEQ ID NO: 447632 - RNA, 19 nt, Artificial Sequence
  Description of Artificial Sequence: Synthetic oligonucleotide
  Antisense Strand to SEQ ID NO: 447631
aguuaugugggauggacac

SEQ ID NO: 447633 - RNA, 19 nt, Artificial Sequence
  Description of Artificial Sequence: Synthetic oligonucleotide
  Sense strand starting at position 1964 of SEQ ID NO: 316883
cauuuauagugugcaauug

SEQ ID NO: 447634 - RNA, 19 nt, Artificial Sequence
  Description of Artificial Sequence: Synthetic oligonucleotide
  Antisense Strand to SEQ ID NO: 447633
caauugcacacuauaaaug

SEQ ID NO: 447635 - RNA, 19 nt, Artificial Sequence
  Description of Artificial Sequence: Synthetic oligonucleotide
  Sense strand starting at position 2072 of SEQ ID NO: 316883
uugcguguccuagcacaaa

SEQ ID NO: 447636 - RNA, 19 nt, Artificial Sequence
  Description of Artificial Sequence: Synthetic oligonucleotide
  Antisense Strand to SEQ ID NO: 447635
uuugugcuaggacacgcaa

SEQ ID NO: 447637 - RNA, 19 nt, Artificial Sequence
  Description of Artificial Sequence: Synthetic oligonucleotide
  Sense strand starting at position 2114 of SEQ ID NO: 316883
ugucaauuagacuauggca

SEQ ID NO: 447638 - RNA, 19 nt, Artificial Sequence
  Description of Artificial Sequence: Synthetic oligonucleotide
  Antisense Strand to SEQ ID NO: 447637
ugccauagucuaauugaca

SEQ ID NO: 447639 - RNA, 19 nt, Artificial Sequence
  Description of Artificial Sequence: Synthetic oligonucleotide
  Sense strand starting at position 2116 of SEQ ID NO: 316883
ucaauuagacuauggcaaa

SEQ ID NO: 447640 - RNA, 19 nt, Artificial Sequence
  Description of Artificial Sequence: Synthetic oligonucleotide
  Antisense Strand to SEQ ID NO: 447639
uuugccauagucuaauuga

SEQ ID NO: 447641 - RNA, 19 nt, Artificial Sequence
  Description of Artificial Sequence: Synthetic oligonucleotide
  Sense strand starting at position 2197 of SEQ ID NO: 316883
aguugugauacugaagagu

SEQ ID NO: 447642 - RNA, 19 nt, Artificial Sequence
  Description of Artificial Sequence: Synthetic oligonucleotide
  Antisense Strand to SEQ ID NO: 447641
acucuucaguaucacaacu

SEQ ID NO: 447643 - RNA, 19 nt, Artificial Sequence
  Description of Artificial Sequence: Synthetic oligonucleotide
  Sense strand starting at position 2203 of SEQ ID NO: 316883
gauacugaagaguggguaa

SEQ ID NO: 447644 - RNA, 19 nt, Artificial Sequence
  Description of Artificial Sequence: Synthetic oligonucleotide
  Antisense Strand to SEQ ID NO: 447643
uuacccacucuucaguauc

SEQ ID NO: 447645 - RNA, 19 nt, Artificial Sequence
  Description of Artificial Sequence: Synthetic oligonucleotide
  Sense strand starting at position 2227 of SEQ ID NO: 316883
uagcauaugguguauaauc

SEQ ID NO: 447646 - RNA, 19 nt, Artificial Sequence
  Description of Artificial Sequence: Synthetic oligonucleotide
  Antisense Strand to SEQ ID NO: 447645
gauuauacaccauaugcua

SEQ ID NO: 447647 - RNA, 19 nt, Artificial Sequence
  Description of Artificial Sequence: Synthetic oligonucleotide
  Sense strand starting at position 2276 of SEQ ID NO: 316883
gagcaaggaguuggaauau

SEQ ID NO: 447648 - RNA, 19 nt, Artificial Sequence
  Description of Artificial Sequence: Synthetic oligonucleotide
  Antisense Strand to SEQ ID NO: 447647
auauuccaacuccuugcuc

SEQ ID NO: 447649 - RNA, 19 nt, Artificial Sequence
  Description of Artificial Sequence: Synthetic oligonucleotide
  Sense strand starting at position 2447 of SEQ ID NO: 316883
ccuggaaguaccuggauau

SEQ ID NO: 447650 - RNA, 19 nt, Artificial Sequence
  Description of Artificial Sequence: Synthetic oligonucleotide
  Antisense Strand to SEQ ID NO: 447649
auauccagguacuuccagg

SEQ ID NO: 447651 - RNA, 19 nt, Artificial Sequence
  Description of Artificial Sequence: Synthetic oligonucleotide
  Sense strand starting at position 2448 of SEQ ID NO: 316883
cuggaaguaccuggauauu

SEQ ID NO: 447652 - RNA, 19 nt, Artificial Sequence
  Description of Artificial Sequence: Synthetic oligonucleotide
  Antisense Strand to SEQ ID NO: 447651
aauauccagguacuuccag

SEQ ID NO: 447653 - RNA, 19 nt, Artificial Sequence
  Description of Artificial Sequence: Synthetic oligonucleotide
  Sense strand starting at position 2468 of SEQ ID NO: 316883
uggcuaaacuuugugagaa

SEQ ID NO: 447654 - RNA, 19 nt, Artificial Sequence
  Description of Artificial Sequence: Synthetic oligonucleotide
  Antisense Strand to SEQ ID NO: 447653
uucucacaaaguuuagcca

SEQ ID NO: 447655 - RNA, 19 nt, Artificial Sequence
  Description of Artificial Sequence: Synthetic oligonucleotide
  Sense strand starting at position 2650 of SEQ ID NO: 316883
cugaccuggcucuauaaca

SEQ ID NO: 447656 - RNA, 19 nt, Artificial Sequence
  Description of Artificial Sequence: Synthetic oligonucleotide
  Antisense Strand to SEQ ID NO: 447655
uguuauagagccaggucag

SEQ ID NO: 447657 - RNA, 19 nt, Artificial Sequence
  Description of Artificial Sequence: Synthetic oligonucleotide
  Sense strand starting at position 2750 of SEQ ID NO: 316883
gagaaaugccuacgagaua

SEQ ID NO: 447658 - RNA, 19 nt, Artificial Sequence
  Description of Artificial Sequence: Synthetic oligonucleotide
  Antisense Strand to SEQ ID NO: 447657
uaucucguaggcauuucuc

SEQ ID NO: 447659 - RNA, 19 nt, Artificial Sequence
  Description of Artificial Sequence: Synthetic oligonucleotide
  Sense strand starting at position 2785 of SEQ ID NO: 316883
uuaguaaauuucguugacu

SEQ ID NO: 447660 - RNA, 19 nt, Artificial Sequence
  Description of Artificial Sequence: Synthetic oligonucleotide
  Antisense Strand to SEQ ID NO: 447659
agucaacgaaauuuacuaa

SEQ ID NO: 447661 - RNA, 19 nt, Artificial Sequence
  Description of Artificial Sequence: Synthetic oligonucleotide
  Sense strand starting at position 2875 of SEQ ID NO: 316883
uagggauucguggaggcua

SEQ ID NO: 447662 - RNA, 19 nt, Artificial Sequence
  Description of Artificial Sequence: Synthetic oligonucleotide
  Antisense Strand to SEQ ID NO: 447661
uagccuccacgaaucccua

SEQ ID NO: 447663 - RNA, 19 nt, Artificial Sequence
  Description of Artificial Sequence: Synthetic oligonucleotide
  Sense strand starting at position 2940 of SEQ ID NO: 316883
gaggcagacuggcuuuaaa

SEQ ID NO: 447664 - RNA, 19 nt, Artificial Sequence
  Description of Artificial Sequence: Synthetic oligonucleotide
  Antisense Strand to SEQ ID NO: 447663
uuuaaagccagucugccuc

SEQ ID NO: 447665 - RNA, 19 nt, Artificial Sequence
  Description of Artificial Sequence: Synthetic oligonucleotide
  Sense strand starting at position 2943 of SEQ ID NO: 316883
gcagacuggcuuuaaauuc

SEQ ID NO: 447666 - RNA, 19 nt, Artificial Sequence
  Description of Artificial Sequence: Synthetic oligonucleotide
  Antisense Strand to SEQ ID NO: 447665
gaauuuaaagccagucugc

SEQ ID NO: 447667 - RNA, 19 nt, Artificial Sequence
  Description of Artificial Sequence: Synthetic oligonucleotide
  Sense strand starting at position 3071 of SEQ ID NO: 316883
guuucuucugaugacugaa

SEQ ID NO: 447668 - RNA, 19 nt, Artificial Sequence
  Description of Artificial Sequence: Synthetic oligonucleotide
  Antisense Strand to SEQ ID NO: 447667
uucagucaucagaagaaac

SEQ ID NO: 447669 - RNA, 19 nt, Artificial Sequence
  Description of Artificial Sequence: Synthetic oligonucleotide
  Sense strand starting at position 3074 of SEQ ID NO: 316883
ucuucugaugacugaauga

SEQ ID NO: 447670 - RNA, 19 nt, Artificial Sequence
  Description of Artificial Sequence: Synthetic oligonucleotide
  Antisense Strand to SEQ ID NO: 447669
ucauucagucaucagaaga

SEQ ID NO: 447671 - RNA, 19 nt, Artificial Sequence
  Description of Artificial Sequence: Synthetic oligonucleotide
  Sense strand starting at position 3093 of SEQ ID NO: 316883
gauagcagccuuggaauga

SEQ ID NO: 447672 - RNA, 19 nt, Artificial Sequence
  Description of Artificial Sequence: Synthetic oligonucleotide
  Antisense Strand to SEQ ID NO: 447671
ucauuccaaggcugcuauc

SEQ ID NO: 447673 - RNA, 19 nt, Artificial Sequence
  Description of Artificial Sequence: Synthetic oligonucleotide
  Sense strand starting at position 3251 of SEQ ID NO: 316883
ggacaagcacacugaauua

SEQ ID NO: 447674 - RNA, 19 nt, Artificial Sequence
  Description of Artificial Sequence: Synthetic oligonucleotide
  Antisense Strand to SEQ ID NO: 447673
uaauucagugugcuugucc

SEQ ID NO: 447675 - RNA, 19 nt, Artificial Sequence
  Description of Artificial Sequence: Synthetic oligonucleotide
  Sense strand starting at position 3313 of SEQ ID NO: 316883
gggcuugucagauauaauc

SEQ ID NO: 447676 - RNA, 19 nt, Artificial Sequence
  Description of Artificial Sequence: Synthetic oligonucleotide
  Antisense Strand to SEQ ID NO: 447675
gauuauaucugacaagccc

SEQ ID NO: 447677 - RNA, 19 nt, Artificial Sequence
  Description of Artificial Sequence: Synthetic oligonucleotide
  Sense strand starting at position 3474 of SEQ ID NO: 316883
aguuguuagccauagacau

SEQ ID NO: 447678 - RNA, 19 nt, Artificial Sequence
  Description of Artificial Sequence: Synthetic oligonucleotide
  Antisense Strand to SEQ ID NO: 447677
augucuauggcuaacaacu

SEQ ID NO: 447679 - RNA, 19 nt, Artificial Sequence
  Description of Artificial Sequence: Synthetic oligonucleotide
  Sense strand starting at position 3945 of SEQ ID NO: 316883
cccuguucuguugagauca

SEQ ID NO: 447680 - RNA, 19 nt, Artificial Sequence
  Description of Artificial Sequence: Synthetic oligonucleotide
  Antisense Strand to SEQ ID NO: 447679
ugaucucaacagaacaggg

SEQ ID NO: 447681 - RNA, 19 nt, Artificial Sequence
  Description of Artificial Sequence: Synthetic oligonucleotide
  Sense strand starting at position 825 of SEQ ID NO: 316884
acauguugaacggaguuua

SEQ ID NO: 447682 - RNA, 19 nt, Artificial Sequence
  Description of Artificial Sequence: Synthetic oligonucleotide
  Antisense Strand to SEQ ID NO: 447681
uaaacuccguucaacaugu

SEQ ID NO: 447683 - RNA, 19 nt, Artificial Sequence
  Description of Artificial Sequence: Synthetic oligonucleotide
  Sense strand starting at position 849 of SEQ ID NO: 316884
ugcaguuggcuccugcuaa

SEQ ID NO: 447684 - RNA, 19 nt, Artificial Sequence
  Description of Artificial Sequence: Synthetic oligonucleotide
  Antisense Strand to SEQ ID NO: 447683
uuagcaggagccaacugca

SEQ ID NO: 447685 - RNA, 19 nt, Artificial Sequence
  Description of Artificial Sequence: Synthetic oligonucleotide
  Sense strand starting at position 911 of SEQ ID NO: 316884
ggauauaaguggucuccag

SEQ ID NO: 447686 - RNA, 19 nt, Artificial Sequence
  Description of Artificial Sequence: Synthetic oligonucleotide
  Antisense Strand to SEQ ID NO: 447685
cuggagaccacuuauaucc

SEQ ID NO: 447687 - RNA, 19 nt, Artificial Sequence
  Description of Artificial Sequence: Synthetic oligonucleotide
  Sense strand starting at position 954 of SEQ ID NO: 316884
uggugaugaagcugggaau

SEQ ID NO: 447688 - RNA, 19 nt, Artificial Sequence
  Description of Artificial Sequence: Synthetic oligonucleotide
  Antisense Strand to SEQ ID NO: 447687
auucccagcuucaucacca

SEQ ID NO: 447689 - RNA, 19 nt, Artificial Sequence
  Description of Artificial Sequence: Synthetic oligonucleotide
  Sense strand starting at position 965 of SEQ ID NO: 316884
cugggaauguuucugacac

SEQ ID NO: 447690 - RNA, 19 nt, Artificial Sequence
  Description of Artificial Sequence: Synthetic oligonucleotide
  Antisense Strand to SEQ ID NO: 447689
gugucagaaacauucccag

SEQ ID NO: 447691 - RNA, 19 nt, Artificial Sequence
  Description of Artificial Sequence: Synthetic oligonucleotide
  Sense strand starting at position 1052 of SEQ ID NO: 316884
agaguuaacugagucacaa

SEQ ID NO: 447692 - RNA, 19 nt, Artificial Sequence
  Description of Artificial Sequence: Synthetic oligonucleotide
  Antisense Strand to SEQ ID NO: 447691
uugugacucaguuaacucu

SEQ ID NO: 447693 - RNA, 19 nt, Artificial Sequence
  Description of Artificial Sequence: Synthetic oligonucleotide
  Sense strand starting at position 1086 of SEQ ID NO: 316884
guuccucuacaagagucaa

SEQ ID NO: 447694 - RNA, 19 nt, Artificial Sequence
  Description of Artificial Sequence: Synthetic oligonucleotide
  Antisense Strand to SEQ ID NO: 447693
uugacucuuguagaggaac

SEQ ID NO: 447695 - RNA, 19 nt, Artificial Sequence
  Description of Artificial Sequence: Synthetic oligonucleotide
  Sense strand starting at position 1171 of SEQ ID NO: 316884
gcaugcaaacgagauagau

SEQ ID NO: 447696 - RNA, 19 nt, Artificial Sequence
  Description of Artificial Sequence: Synthetic oligonucleotide
  Antisense Strand to SEQ ID NO: 447695
aucuaucucguuugcaugc

SEQ ID NO: 447697 - RNA, 19 nt, Artificial Sequence
  Description of Artificial Sequence: Synthetic oligonucleotide
  Sense strand starting at position 1175 of SEQ ID NO: 316884
gcaaacgagauagauguau

SEQ ID NO: 447698 - RNA, 19 nt, Artificial Sequence
  Description of Artificial Sequence: Synthetic oligonucleotide
  Antisense Strand to SEQ ID NO: 447697
auacaucuaucucguuugc

SEQ ID NO: 447699 - RNA, 19 nt, Artificial Sequence
  Description of Artificial Sequence: Synthetic oligonucleotide
  Sense strand starting at position 1204 of SEQ ID NO: 316884
gucacuugaaaguagugaa

SEQ ID NO: 447700 - RNA, 19 nt, Artificial Sequence
  Description of Artificial Sequence: Synthetic oligonucleotide
  Antisense Strand to SEQ ID NO: 447699
uucacuacuuucaagugac

SEQ ID NO: 447701 - RNA, 19 nt, Artificial Sequence
  Description of Artificial Sequence: Synthetic oligonucleotide
  Sense strand starting at position 1463 of SEQ ID NO: 316884
auucucuuagucuaaaggu

SEQ ID NO: 447702 - RNA, 19 nt, Artificial Sequence
  Description of Artificial Sequence: Synthetic oligonucleotide
  Antisense Strand to SEQ ID NO: 447701
accuuuagacuaagagaau

SEQ ID NO: 447703 - RNA, 19 nt, Artificial Sequence
  Description of Artificial Sequence: Synthetic oligonucleotide
  Sense strand starting at position 1550 of SEQ ID NO: 316884
auguccauauaucuuggaa

SEQ ID NO: 447704 - RNA, 19 nt, Artificial Sequence
  Description of Artificial Sequence: Synthetic oligonucleotide
  Antisense Strand to SEQ ID NO: 447703
uuccaagauauauggacau

SEQ ID NO: 447705 - RNA, 19 nt, Artificial Sequence
  Description of Artificial Sequence: Synthetic oligonucleotide
  Sense strand starting at position 1553 of SEQ ID NO: 316884
uccauauaucuuggaagca

SEQ ID NO: 447706 - RNA, 19 nt, Artificial Sequence
  Description of Artificial Sequence: Synthetic oligonucleotide
  Antisense Strand to SEQ ID NO: 447705
ugcuuccaagauauaugga

SEQ ID NO: 447707 - RNA, 19 nt, Artificial Sequence
  Description of Artificial Sequence: Synthetic oligonucleotide
  Sense strand starting at position 1679 of SEQ ID NO: 316884
accgaagucagcugaaaga

SEQ ID NO: 447708 - RNA, 19 nt, Artificial Sequence
  Description of Artificial Sequence: Synthetic oligonucleotide
  Antisense Strand to SEQ ID NO: 447707
ucuuucagcugacuucggu

SEQ ID NO: 447709 - RNA, 19 nt, Artificial Sequence
  Description of Artificial Sequence: Synthetic oligonucleotide
  Sense strand starting at position 2109 of SEQ ID NO: 316884
ucuaguguccuguucgcaa

SEQ ID NO: 447710 - RNA, 19 nt, Artificial Sequence
  Description of Artificial Sequence: Synthetic oligonucleotide
  Antisense Strand to SEQ ID NO: 447709
uugcgaacaggacacuaga

SEQ ID NO: 447711 - RNA, 19 nt, Artificial Sequence
  Description of Artificial Sequence: Synthetic oligonucleotide
  Sense strand starting at position 2134 of SEQ ID NO: 316884
ucagaaaugucagucucau

SEQ ID NO: 447712 - RNA, 19 nt, Artificial Sequence
  Description of Artificial Sequence: Synthetic oligonucleotide
  Antisense Strand to SEQ ID NO: 447711
augagacugacauuucuga

SEQ ID NO: 447713 - RNA, 19 nt, Artificial Sequence
  Description of Artificial Sequence: Synthetic oligonucleotide
  Sense strand starting at position 2246 of SEQ ID NO: 316884
guguccaucccacauaacu

SEQ ID NO: 447714 - RNA, 19 nt, Artificial Sequence
  Description of Artificial Sequence: Synthetic oligonucleotide
  Antisense Strand to SEQ ID NO: 447713
aguuaugugggauggacac

SEQ ID NO: 447715 - RNA, 19 nt, Artificial Sequence
  Description of Artificial Sequence: Synthetic oligonucleotide
  Sense strand starting at position 2448 of SEQ ID NO: 316884
cauuuauagugugcaauug

SEQ ID NO: 447716 - RNA, 19 nt, Artificial Sequence
  Description of Artificial Sequence: Synthetic oligonucleotide
  Antisense Strand to SEQ ID NO: 447715
caauugcacacuauaaaug

SEQ ID NO: 447717 - RNA, 19 nt, Artificial Sequence
  Description of Artificial Sequence: Synthetic oligonucleotide
  Sense strand starting at position 2556 of SEQ ID NO: 316884
uugcguguccuagcacaaa

SEQ ID NO: 447718 - RNA, 19 nt, Artificial Sequence
  Description of Artificial Sequence: Synthetic oligonucleotide
  Antisense Strand to SEQ ID NO: 447717
uuugugcuaggacacgcaa

SEQ ID NO: 447719 - RNA, 19 nt, Artificial Sequence
  Description of Artificial Sequence: Synthetic oligonucleotide
  Sense strand starting at position 2598 of SEQ ID NO: 316884
ugucaauuagacuauggca

SEQ ID NO: 447720 - RNA, 19 nt, Artificial Sequence
  Description of Artificial Sequence: Synthetic oligonucleotide
  Antisense Strand to SEQ ID NO: 447719
ugccauagucuaauugaca

SEQ ID NO: 447721 - RNA, 19 nt, Artificial Sequence
  Description of Artificial Sequence: Synthetic oligonucleotide
  Sense strand starting at position 2600 of SEQ ID NO: 316884
ucaauuagacuauggcaaa

SEQ ID NO: 447722 - RNA, 19 nt, Artificial Sequence
  Description of Artificial Sequence: Synthetic oligonucleotide
  Antisense Strand to SEQ ID NO: 447721
uuugccauagucuaauuga

SEQ ID NO: 447723 - RNA, 19 nt, Artificial Sequence
  Description of Artificial Sequence: Synthetic oligonucleotide
  Sense strand starting at position 2681 of SEQ ID NO: 316884
aguugugauacugaagagu

SEQ ID NO: 447724 - RNA, 19 nt, Artificial Sequence
  Description of Artificial Sequence: Synthetic oligonucleotide
  Antisense Strand to SEQ ID NO: 447723
acucuucaguaucacaacu

SEQ ID NO: 447725 - RNA, 19 nt, Artificial Sequence
  Description of Artificial Sequence: Synthetic oligonucleotide
  Sense strand starting at position 2687 of SEQ ID NO: 316884
gauacugaagaguggguaa

SEQ ID NO: 447726 - RNA, 19 nt, Artificial Sequence
  Description of Artificial Sequence: Synthetic oligonucleotide
  Antisense Strand to SEQ ID NO: 447725
uuacccacucuucaguauc

SEQ ID NO: 447727 - RNA, 19 nt, Artificial Sequence
  Description of Artificial Sequence: Synthetic oligonucleotide
  Sense strand starting at position 2711 of SEQ ID NO: 316884
uagcauaugguguauaauc

SEQ ID NO: 447728 - RNA, 19 nt, Artificial Sequence
  Description of Artificial Sequence: Synthetic oligonucleotide
  Antisense Strand to SEQ ID NO: 447727
gauuauacaccauaugcua

SEQ ID NO: 447729 - RNA, 19 nt, Artificial Sequence
  Description of Artificial Sequence: Synthetic oligonucleotide
  Sense strand starting at position 2760 of SEQ ID NO: 316884
gagcaaggaguuggaauau

SEQ ID NO: 447730 - RNA, 19 nt, Artificial Sequence
  Description of Artificial Sequence: Synthetic oligonucleotide
  Antisense Strand to SEQ ID NO: 447729
auauuccaacuccuugcuc

SEQ ID NO: 447731 - RNA, 19 nt, Artificial Sequence
  Description of Artificial Sequence: Synthetic oligonucleotide
  Sense strand starting at position 2931 of SEQ ID NO: 316884
ccuggaaguaccuggauau

SEQ ID NO: 447732 - RNA, 19 nt, Artificial Sequence
  Description of Artificial Sequence: Synthetic oligonucleotide
  Antisense Strand to SEQ ID NO: 447731
auauccagguacuuccagg

SEQ ID NO: 447733 - RNA, 19 nt, Artificial Sequence
  Description of Artificial Sequence: Synthetic oligonucleotide
  Sense strand starting at position 2932 of SEQ ID NO: 316884
cuggaaguaccuggauauu

SEQ ID NO: 447734 - RNA, 19 nt, Artificial Sequence
  Description of Artificial Sequence: Synthetic oligonucleotide
  Antisense Strand to SEQ ID NO: 447733
aauauccagguacuuccag

SEQ ID NO: 447735 - RNA, 19 nt, Artificial Sequence
  Description of Artificial Sequence: Synthetic oligonucleotide
  Sense strand starting at position 2952 of SEQ ID NO: 316884
uggcuaaacuuugugagaa

SEQ ID NO: 447736 - RNA, 19 nt, Artificial Sequence
  Description of Artificial Sequence: Synthetic oligonucleotide
  Antisense Strand to SEQ ID NO: 447735
uucucacaaaguuuagcca

SEQ ID NO: 447737 - RNA, 19 nt, Artificial Sequence
  Description of Artificial Sequence: Synthetic oligonucleotide
  Sense strand starting at position 3134 of SEQ ID NO: 316884
cugaccuggcucuauaaca

SEQ ID NO: 447738 - RNA, 19 nt, Artificial Sequence
  Description of Artificial Sequence: Synthetic oligonucleotide
  Antisense Strand to SEQ ID NO: 447737
uguuauagagccaggucag

SEQ ID NO: 447739 - RNA, 19 nt, Artificial Sequence
  Description of Artificial Sequence: Synthetic oligonucleotide
  Sense strand starting at position 3234 of SEQ ID NO: 316884
gagaaaugccuacgagaua

SEQ ID NO: 447740 - RNA, 19 nt, Artificial Sequence
  Description of Artificial Sequence: Synthetic oligonucleotide
  Antisense Strand to SEQ ID NO: 447739
uaucucguaggcauuucuc

SEQ ID NO: 447741 - RNA, 19 nt, Artificial Sequence
  Description of Artificial Sequence: Synthetic oligonucleotide
  Sense strand starting at position 3269 of SEQ ID NO: 316884
uuaguaaauuucguugacu

SEQ ID NO: 447742 - RNA, 19 nt, Artificial Sequence
  Description of Artificial Sequence: Synthetic oligonucleotide
  Antisense Strand to SEQ ID NO: 447741
agucaacgaaauuuacuaa

SEQ ID NO: 447743 - RNA, 19 nt, Artificial Sequence
  Description of Artificial Sequence: Synthetic oligonucleotide
  Sense strand starting at position 3359 of SEQ ID NO: 316884
uagggauucguggaggcua

SEQ ID NO: 447744 - RNA, 19 nt, Artificial Sequence
  Description of Artificial Sequence: Synthetic oligonucleotide
  Antisense Strand to SEQ ID NO: 447743
uagccuccacgaaucccua

SEQ ID NO: 447745 - RNA, 19 nt, Artificial Sequence
  Description of Artificial Sequence: Synthetic oligonucleotide
  Sense strand starting at position 3424 of SEQ ID NO: 316884
gaggcagacuggcuuuaaa

SEQ ID NO: 447746 - RNA, 19 nt, Artificial Sequence
  Description of Artificial Sequence: Synthetic oligonucleotide
  Antisense Strand to SEQ ID NO: 447745
uuuaaagccagucugccuc

SEQ ID NO: 447747 - RNA, 19 nt, Artificial Sequence
  Description of Artificial Sequence: Synthetic oligonucleotide
  Sense strand starting at position 3427 of SEQ ID NO: 316884
gcagacuggcuuuaaauuc

SEQ ID NO: 447748 - RNA, 19 nt, Artificial Sequence
  Description of Artificial Sequence: Synthetic oligonucleotide
  Antisense Strand to SEQ ID NO: 447747
gaauuuaaagccagucugc

SEQ ID NO: 447749 - RNA, 19 nt, Artificial Sequence
  Description of Artificial Sequence: Synthetic oligonucleotide
  Sense strand starting at position 3555 of SEQ ID NO: 316884
guuucuucugaugacugaa

SEQ ID NO: 447750 - RNA, 19 nt, Artificial Sequence
  Description of Artificial Sequence: Synthetic oligonucleotide
  Antisense Strand to SEQ ID NO: 447749
uucagucaucagaagaaac

SEQ ID NO: 447751 - RNA, 19 nt, Artificial Sequence
  Description of Artificial Sequence: Synthetic oligonucleotide
  Sense strand starting at position 3558 of SEQ ID NO: 316884
ucuucugaugacugaauga

SEQ ID NO: 447752 - RNA, 19 nt, Artificial Sequence
  Description of Artificial Sequence: Synthetic oligonucleotide
  Antisense Strand to SEQ ID NO: 447751
ucauucagucaucagaaga

SEQ ID NO: 447753 - RNA, 19 nt, Artificial Sequence
  Description of Artificial Sequence: Synthetic oligonucleotide
  Sense strand starting at position 3577 of SEQ ID NO: 316884
gauagcagccuuggaauga

SEQ ID NO: 447754 - RNA, 19 nt, Artificial Sequence
  Description of Artificial Sequence: Synthetic oligonucleotide
  Antisense Strand to SEQ ID NO: 447753
ucauuccaaggcugcuauc

SEQ ID NO: 447755 - RNA, 19 nt, Artificial Sequence
  Description of Artificial Sequence: Synthetic oligonucleotide
  Sense strand starting at position 3735 of SEQ ID NO: 316884
ggacaagcacacugaauua

SEQ ID NO: 447756 - RNA, 19 nt, Artificial Sequence
  Description of Artificial Sequence: Synthetic oligonucleotide
  Antisense Strand to SEQ ID NO: 447755
uaauucagugugcuugucc

SEQ ID NO: 447757 - RNA, 19 nt, Artificial Sequence
  Description of Artificial Sequence: Synthetic oligonucleotide
  Sense strand starting at position 3797 of SEQ ID NO: 316884
gggcuugucagauauaauc

SEQ ID NO: 447758 - RNA, 19 nt, Artificial Sequence
  Description of Artificial Sequence: Synthetic oligonucleotide
  Antisense Strand to SEQ ID NO: 447757
gauuauaucugacaagccc

SEQ ID NO: 447759 - RNA, 19 nt, Artificial Sequence
  Description of Artificial Sequence: Synthetic oligonucleotide
  Sense strand starting at position 3958 of SEQ ID NO: 316884
aguuguuagccauagacau

SEQ ID NO: 447760 - RNA, 19 nt, Artificial Sequence
  Description of Artificial Sequence: Synthetic oligonucleotide
  Antisense Strand to SEQ ID NO: 447759
augucuauggcuaacaacu

SEQ ID NO: 447761 - RNA, 19 nt, Artificial Sequence
  Description of Artificial Sequence: Synthetic oligonucleotide
  Sense strand starting at position 256 of SEQ ID NO: 316885
ccuugaaaguuuguaacac

SEQ ID NO: 447762 - RNA, 19 nt, Artificial Sequence
  Description of Artificial Sequence: Synthetic oligonucleotide
  Antisense Strand to SEQ ID NO: 447761
guguuacaaacuuucaagg

SEQ ID NO: 447763 - RNA, 19 nt, Artificial Sequence
  Description of Artificial Sequence: Synthetic oligonucleotide
  Sense strand starting at position 428 of SEQ ID NO: 316885
cucaauaggaugugaggua

SEQ ID NO: 447764 - RNA, 19 nt, Artificial Sequence
  Description of Artificial Sequence: Synthetic oligonucleotide
  Antisense Strand to SEQ ID NO: 447763
uaccucacauccuauugag

SEQ ID NO: 447765 - RNA, 19 nt, Artificial Sequence
  Description of Artificial Sequence: Synthetic oligonucleotide
  Sense strand starting at position 433 of SEQ ID NO: 316885
uaggaugugagguaucauc

SEQ ID NO: 447766 - RNA, 19 nt, Artificial Sequence
  Description of Artificial Sequence: Synthetic oligonucleotide
  Antisense Strand to SEQ ID NO: 447765
gaugauaccucacauccua

SEQ ID NO: 447767 - RNA, 19 nt, Artificial Sequence
  Description of Artificial Sequence: Synthetic oligonucleotide
  Sense strand starting at position 443 of SEQ ID NO: 316885
gguaucaucuaaguaagag

SEQ ID NO: 447768 - RNA, 19 nt, Artificial Sequence
  Description of Artificial Sequence: Synthetic oligonucleotide
  Antisense Strand to SEQ ID NO: 447767
cucuuacuuagaugauacc

SEQ ID NO: 447769 - RNA, 19 nt, Artificial Sequence
  Description of Artificial Sequence: Synthetic oligonucleotide
  Sense strand starting at position 515 of SEQ ID NO: 316885
auuguuaaggaaugugaua

SEQ ID NO: 447770 - RNA, 19 nt, Artificial Sequence
  Description of Artificial Sequence: Synthetic oligonucleotide
  Antisense Strand to SEQ ID NO: 447769
uaucacauuccuuaacaau

SEQ ID NO: 447771 - RNA, 19 nt, Artificial Sequence
  Description of Artificial Sequence: Synthetic oligonucleotide
  Sense strand starting at position 517 of SEQ ID NO: 316885
uguuaaggaaugugauaau

SEQ ID NO: 447772 - RNA, 19 nt, Artificial Sequence
  Description of Artificial Sequence: Synthetic oligonucleotide
  Antisense Strand to SEQ ID NO: 447771
auuaucacauuccuuaaca

SEQ ID NO: 447773 - RNA, 19 nt, Artificial Sequence
  Description of Artificial Sequence: Synthetic oligonucleotide
  Sense strand starting at position 610 of SEQ ID NO: 316885
uuguuacaaugcuugauag

SEQ ID NO: 447774 - RNA, 19 nt, Artificial Sequence
  Description of Artificial Sequence: Synthetic oligonucleotide
  Antisense Strand to SEQ ID NO: 447773
cuaucaagcauuguaacaa

SEQ ID NO: 447775 - RNA, 19 nt, Artificial Sequence
  Description of Artificial Sequence: Synthetic oligonucleotide
  Sense strand starting at position 612 of SEQ ID NO: 316885
guuacaaugcuugauaguc

SEQ ID NO: 447776 - RNA, 19 nt, Artificial Sequence
  Description of Artificial Sequence: Synthetic oligonucleotide
  Antisense Strand to SEQ ID NO: 447775
gacuaucaagcauuguaac

SEQ ID NO: 447777 - RNA, 19 nt, Artificial Sequence
  Description of Artificial Sequence: Synthetic oligonucleotide
  Sense strand starting at position 769 of SEQ ID NO: 316885
aggauaauauccuuuaagc

SEQ ID NO: 447778 - RNA, 19 nt, Artificial Sequence
  Description of Artificial Sequence: Synthetic oligonucleotide
  Antisense Strand to SEQ ID NO: 447777
gcuuaaaggauauuauccu

SEQ ID NO: 447779 - RNA, 19 nt, Artificial Sequence
  Description of Artificial Sequence: Synthetic oligonucleotide
  Sense strand starting at position 926 of SEQ ID NO: 316885
ggaauacucuuguuggguc

SEQ ID NO: 447780 - RNA, 19 nt, Artificial Sequence
  Description of Artificial Sequence: Synthetic oligonucleotide
  Antisense Strand to SEQ ID NO: 447779
gacccaacaagaguauucc

SEQ ID NO: 447781 - RNA, 19 nt, Artificial Sequence
  Description of Artificial Sequence: Synthetic oligonucleotide
  Sense strand starting at position 1037 of SEQ ID NO: 316885
augucaggcacuggagaua

SEQ ID NO: 447782 - RNA, 19 nt, Artificial Sequence
  Description of Artificial Sequence: Synthetic oligonucleotide
  Antisense Strand to SEQ ID NO: 447781
uaucuccagugccugacau

SEQ ID NO: 447783 - RNA, 19 nt, Artificial Sequence
  Description of Artificial Sequence: Synthetic oligonucleotide
  Sense strand starting at position 1109 of SEQ ID NO: 316885
agaugaauaagguggaguu

SEQ ID NO: 447784 - RNA, 19 nt, Artificial Sequence
  Description of Artificial Sequence: Synthetic oligonucleotide
  Antisense Strand to SEQ ID NO: 447783
aacuccaccuuauucaucu

SEQ ID NO: 447785 - RNA, 19 nt, Artificial Sequence
  Description of Artificial Sequence: Synthetic oligonucleotide
  Sense strand starting at position 1110 of SEQ ID NO: 316885
gaugaauaagguggaguua

SEQ ID NO: 447786 - RNA, 19 nt, Artificial Sequence
  Description of Artificial Sequence: Synthetic oligonucleotide
  Antisense Strand to SEQ ID NO: 447785
uaacuccaccuuauucauc

SEQ ID NO: 447787 - RNA, 19 nt, Artificial Sequence
  Description of Artificial Sequence: Synthetic oligonucleotide
  Sense strand starting at position 1213 of SEQ ID NO: 316885
uuaggagagugguuuccuu

SEQ ID NO: 447788 - RNA, 19 nt, Artificial Sequence
  Description of Artificial Sequence: Synthetic oligonucleotide
  Antisense Strand to SEQ ID NO: 447787
aaggaaaccacucuccuaa

SEQ ID NO: 447789 - RNA, 19 nt, Artificial Sequence
  Description of Artificial Sequence: Synthetic oligonucleotide
  Sense strand starting at position 1318 of SEQ ID NO: 316885
ugaguacacauguguuaua

SEQ ID NO: 447790 - RNA, 19 nt, Artificial Sequence
  Description of Artificial Sequence: Synthetic oligonucleotide
  Antisense Strand to SEQ ID NO: 447789
uauaacacauguguacuca

SEQ ID NO: 447791 - RNA, 19 nt, Artificial Sequence
  Description of Artificial Sequence: Synthetic oligonucleotide
  Sense strand starting at position 1406 of SEQ ID NO: 316885
uccugaaggcacuggaaau

SEQ ID NO: 447792 - RNA, 19 nt, Artificial Sequence
  Description of Artificial Sequence: Synthetic oligonucleotide
  Antisense Strand to SEQ ID NO: 447791
auuuccagugccuucagga

SEQ ID NO: 447793 - RNA, 19 nt, Artificial Sequence
  Description of Artificial Sequence: Synthetic oligonucleotide
  Sense strand starting at position 1489 of SEQ ID NO: 316885
ugacauugcgcacacauua

SEQ ID NO: 447794 - RNA, 19 nt, Artificial Sequence
  Description of Artificial Sequence: Synthetic oligonucleotide
  Antisense Strand to SEQ ID NO: 447793
uaaugugugcgcaauguca

SEQ ID NO: 447795 - RNA, 19 nt, Artificial Sequence
  Description of Artificial Sequence: Synthetic oligonucleotide
  Sense strand starting at position 1513 of SEQ ID NO: 316885
uacacuaggccuuaagagu

SEQ ID NO: 447796 - RNA, 19 nt, Artificial Sequence
  Description of Artificial Sequence: Synthetic oligonucleotide
  Antisense Strand to SEQ ID NO: 447795
acucuuaaggccuagugua

SEQ ID NO: 447797 - RNA, 19 nt, Artificial Sequence
  Description of Artificial Sequence: Synthetic oligonucleotide
  Sense strand starting at position 1520 of SEQ ID NO: 316885
ggccuuaagaguggaaacu

SEQ ID NO: 447798 - RNA, 19 nt, Artificial Sequence
  Description of Artificial Sequence: Synthetic oligonucleotide
  Antisense Strand to SEQ ID NO: 447797
aguuuccacucuuaaggcc

SEQ ID NO: 447799 - RNA, 19 nt, Artificial Sequence
  Description of Artificial Sequence: Synthetic oligonucleotide
  Sense strand starting at position 1742 of SEQ ID NO: 316885
cuguauuucccgcaacgaa

SEQ ID NO: 447800 - RNA, 19 nt, Artificial Sequence
  Description of Artificial Sequence: Synthetic oligonucleotide
  Antisense Strand to SEQ ID NO: 447799
uucguugcgggaaauacag

SEQ ID NO: 447801 - RNA, 19 nt, Artificial Sequence
  Description of Artificial Sequence: Synthetic oligonucleotide
  Sense strand starting at position 2097 of SEQ ID NO: 316885
gccucucgcgggaguuauu

SEQ ID NO: 447802 - RNA, 19 nt, Artificial Sequence
  Description of Artificial Sequence: Synthetic oligonucleotide
  Antisense Strand to SEQ ID NO: 447801
aauaacucccgcgagaggc

SEQ ID NO: 447803 - RNA, 19 nt, Artificial Sequence
  Description of Artificial Sequence: Synthetic oligonucleotide
  Sense strand starting at position 2186 of SEQ ID NO: 316885
ggagaacucugccucugag

SEQ ID NO: 447804 - RNA, 19 nt, Artificial Sequence
  Description of Artificial Sequence: Synthetic oligonucleotide
  Antisense Strand to SEQ ID NO: 447803
cucagaggcagaguucucc

SEQ ID NO: 447805 - RNA, 19 nt, Artificial Sequence
  Description of Artificial Sequence: Synthetic oligonucleotide
  Sense strand starting at position 2251 of SEQ ID NO: 316885
gacagagucccagagccau

SEQ ID NO: 447806 - RNA, 19 nt, Artificial Sequence
  Description of Artificial Sequence: Synthetic oligonucleotide
  Antisense Strand to SEQ ID NO: 447805
auggcucugggacucuguc

SEQ ID NO: 447807 - RNA, 19 nt, Artificial Sequence
  Description of Artificial Sequence: Synthetic oligonucleotide
  Sense strand starting at position 2279 of SEQ ID NO: 316885
aagagacugcugcggauua

SEQ ID NO: 447808 - RNA, 19 nt, Artificial Sequence
  Description of Artificial Sequence: Synthetic oligonucleotide
  Antisense Strand to SEQ ID NO: 447807
uaauccgcagcagucucuu

SEQ ID NO: 447809 - RNA, 19 nt, Artificial Sequence
  Description of Artificial Sequence: Synthetic oligonucleotide
  Sense strand starting at position 2463 of SEQ ID NO: 316885
gucuuuguggaagaauuag

SEQ ID NO: 447810 - RNA, 19 nt, Artificial Sequence
  Description of Artificial Sequence: Synthetic oligonucleotide
  Antisense Strand to SEQ ID NO: 447809
cuaauucuuccacaaagac

SEQ ID NO: 447811 - RNA, 19 nt, Artificial Sequence
  Description of Artificial Sequence: Synthetic oligonucleotide
  Sense strand starting at position 2506 of SEQ ID NO: 316885
gcacguguuuacuuauuua

SEQ ID NO: 447812 - RNA, 19 nt, Artificial Sequence
  Description of Artificial Sequence: Synthetic oligonucleotide
  Antisense Strand to SEQ ID NO: 447811
uaaauaaguaaacacgugc

SEQ ID NO: 447813 - RNA, 19 nt, Artificial Sequence
  Description of Artificial Sequence: Synthetic oligonucleotide
  Sense strand starting at position 2509 of SEQ ID NO: 316885
cguguuuacuuauuuagag

SEQ ID NO: 447814 - RNA, 19 nt, Artificial Sequence
  Description of Artificial Sequence: Synthetic oligonucleotide
  Antisense Strand to SEQ ID NO: 447813
cucuaaauaaguaaacacg

SEQ ID NO: 447815 - RNA, 19 nt, Artificial Sequence
  Description of Artificial Sequence: Synthetic oligonucleotide
  Sense strand starting at position 2565 of SEQ ID NO: 316885
gacucuuuagguuagcaga

SEQ ID NO: 447816 - RNA, 19 nt, Artificial Sequence
  Description of Artificial Sequence: Synthetic oligonucleotide
  Antisense Strand to SEQ ID NO: 447815
ucugcuaaccuaaagaguc

SEQ ID NO: 447817 - RNA, 19 nt, Artificial Sequence
  Description of Artificial Sequence: Synthetic oligonucleotide
  Sense strand starting at position 2573 of SEQ ID NO: 316885
agguuagcagaucauugau

SEQ ID NO: 447818 - RNA, 19 nt, Artificial Sequence
  Description of Artificial Sequence: Synthetic oligonucleotide
  Antisense Strand to SEQ ID NO: 447817
aucaaugaucugcuaaccu

SEQ ID NO: 447819 - RNA, 19 nt, Artificial Sequence
  Description of Artificial Sequence: Synthetic oligonucleotide
  Sense strand starting at position 2647 of SEQ ID NO: 316885
guccucuaaugauuguaac

SEQ ID NO: 447820 - RNA, 19 nt, Artificial Sequence
  Description of Artificial Sequence: Synthetic oligonucleotide
  Antisense Strand to SEQ ID NO: 447819
guuacaaucauuagaggac

SEQ ID NO: 447821 - RNA, 19 nt, Artificial Sequence
  Description of Artificial Sequence: Synthetic oligonucleotide
  Sense strand starting at position 2688 of SEQ ID NO: 316885
acaagauagguucgugcaa

SEQ ID NO: 447822 - RNA, 19 nt, Artificial Sequence
  Description of Artificial Sequence: Synthetic oligonucleotide
  Antisense Strand to SEQ ID NO: 447821
uugcacgaaccuaucuugu

SEQ ID NO: 447823 - RNA, 19 nt, Artificial Sequence
  Description of Artificial Sequence: Synthetic oligonucleotide
  Sense strand starting at position 2689 of SEQ ID NO: 316885
caagauagguucgugcaaa

SEQ ID NO: 447824 - RNA, 19 nt, Artificial Sequence
  Description of Artificial Sequence: Synthetic oligonucleotide
  Antisense Strand to SEQ ID NO: 447823
uuugcacgaaccuaucuug

SEQ ID NO: 447825 - RNA, 19 nt, Artificial Sequence
  Description of Artificial Sequence: Synthetic oligonucleotide
  Sense strand starting at position 2945 of SEQ ID NO: 316885
gcgacuuuaucagcauuuc

SEQ ID NO: 447826 - RNA, 19 nt, Artificial Sequence
  Description of Artificial Sequence: Synthetic oligonucleotide
  Antisense Strand to SEQ ID NO: 447825
gaaaugcugauaaagucgc

SEQ ID NO: 447827 - RNA, 19 nt, Artificial Sequence
  Description of Artificial Sequence: Synthetic oligonucleotide
  Sense strand starting at position 3444 of SEQ ID NO: 316885
gucccuauccaguaccauu

SEQ ID NO: 447828 - RNA, 19 nt, Artificial Sequence
  Description of Artificial Sequence: Synthetic oligonucleotide
  Antisense Strand to SEQ ID NO: 447827
aaugguacuggauagggac

SEQ ID NO: 447829 - RNA, 19 nt, Artificial Sequence
  Description of Artificial Sequence: Synthetic oligonucleotide
  Sense strand starting at position 3622 of SEQ ID NO: 316885
cuguauauucuggauauuc

SEQ ID NO: 447830 - RNA, 19 nt, Artificial Sequence
  Description of Artificial Sequence: Synthetic oligonucleotide
  Antisense Strand to SEQ ID NO: 447829
gaauauccagaauauacag

SEQ ID NO: 447831 - RNA, 19 nt, Artificial Sequence
  Description of Artificial Sequence: Synthetic oligonucleotide
  Sense strand starting at position 3624 of SEQ ID NO: 316885
guauauucuggauauuccu

SEQ ID NO: 447832 - RNA, 19 nt, Artificial Sequence
  Description of Artificial Sequence: Synthetic oligonucleotide
  Antisense Strand to SEQ ID NO: 447831
aggaauauccagaauauac

SEQ ID NO: 447833 - RNA, 19 nt, Artificial Sequence
  Description of Artificial Sequence: Synthetic oligonucleotide
  Sense strand starting at position 3633 of SEQ ID NO: 316885
ggauauuccuccuuaucag

SEQ ID NO: 447834 - RNA, 19 nt, Artificial Sequence
  Description of Artificial Sequence: Synthetic oligonucleotide
  Antisense Strand to SEQ ID NO: 447833
cugauaaggaggaauaucc

SEQ ID NO: 447835 - RNA, 19 nt, Artificial Sequence
  Description of Artificial Sequence: Synthetic oligonucleotide
  Sense strand starting at position 3694 of SEQ ID NO: 316885
guagauauacuccaguuua

SEQ ID NO: 447836 - RNA, 19 nt, Artificial Sequence
  Description of Artificial Sequence: Synthetic oligonucleotide
  Antisense Strand to SEQ ID NO: 447835
uaaacuggaguauaucuac

SEQ ID NO: 447837 - RNA, 19 nt, Artificial Sequence
  Description of Artificial Sequence: Synthetic oligonucleotide
  Sense strand starting at position 3851 of SEQ ID NO: 316885
gaggaaauguguuugcaaa

SEQ ID NO: 447838 - RNA, 19 nt, Artificial Sequence
  Description of Artificial Sequence: Synthetic oligonucleotide
  Antisense Strand to SEQ ID NO: 447837
uuugcaaacacauuuccuc

SEQ ID NO: 447839 - RNA, 19 nt, Artificial Sequence
  Description of Artificial Sequence: Synthetic oligonucleotide
  Sense strand starting at position 3853 of SEQ ID NO: 316885
ggaaauguguuugcaaaua

SEQ ID NO: 447840 - RNA, 19 nt, Artificial Sequence
  Description of Artificial Sequence: Synthetic oligonucleotide
  Antisense Strand to SEQ ID NO: 447839
uauuugcaaacacauuucc

SEQ ID NO: 447841 - RNA, 19 nt, Artificial Sequence
  Description of Artificial Sequence: Synthetic oligonucleotide
  Sense strand starting at position 2111 of SEQ ID NO: 316886
ccuugagagccuuguguuc

SEQ ID NO: 447842 - RNA, 19 nt, Artificial Sequence
  Description of Artificial Sequence: Synthetic oligonucleotide
  Antisense Strand to SEQ ID NO: 447841
gaacacaaggcucucaagg

SEQ ID NO: 447843 - RNA, 19 nt, Artificial Sequence
  Description of Artificial Sequence: Synthetic oligonucleotide
  Sense strand starting at position 2116 of SEQ ID NO: 316886
agagccuuguguucuguga

SEQ ID NO: 447844 - RNA, 19 nt, Artificial Sequence
  Description of Artificial Sequence: Synthetic oligonucleotide
  Antisense Strand to SEQ ID NO: 447843
ucacagaacacaaggcucu

SEQ ID NO: 447845 - RNA, 19 nt, Artificial Sequence
  Description of Artificial Sequence: Synthetic oligonucleotide
  Sense strand starting at position 2149 of SEQ ID NO: 316886
gaaggaaccucagcuguuu

SEQ ID NO: 447846 - RNA, 19 nt, Artificial Sequence
  Description of Artificial Sequence: Synthetic oligonucleotide
  Antisense Strand to SEQ ID NO: 447845
aaacagcugagguuccuuc

SEQ ID NO: 447847 - RNA, 19 nt, Artificial Sequence
  Description of Artificial Sequence: Synthetic oligonucleotide
  Sense strand starting at position 2275 of SEQ ID NO: 316886
uuuauaacugguuggagaa

SEQ ID NO: 447848 - RNA, 19 nt, Artificial Sequence
  Description of Artificial Sequence: Synthetic oligonucleotide
  Antisense Strand to SEQ ID NO: 447847
uucuccaaccaguuauaaa

SEQ ID NO: 447849 - RNA, 19 nt, Artificial Sequence
  Description of Artificial Sequence: Synthetic oligonucleotide
  Sense strand starting at position 2299 of SEQ ID NO: 316886
ugguuauaauucccacuga

SEQ ID NO: 447850 - RNA, 19 nt, Artificial Sequence
  Description of Artificial Sequence: Synthetic oligonucleotide
  Antisense Strand to SEQ ID NO: 447849
ucagugggaauuauaacca

SEQ ID NO: 447851 - RNA, 19 nt, Artificial Sequence
  Description of Artificial Sequence: Synthetic oligonucleotide
  Sense strand starting at position 2300 of SEQ ID NO: 316886
gguuauaauucccacugaa

SEQ ID NO: 447852 - RNA, 19 nt, Artificial Sequence
  Description of Artificial Sequence: Synthetic oligonucleotide
  Antisense Strand to SEQ ID NO: 447851
uucagugggaauuauaacc

SEQ ID NO: 447853 - RNA, 19 nt, Artificial Sequence
  Description of Artificial Sequence: Synthetic oligonucleotide
  Sense strand starting at position 2338 of SEQ ID NO: 316886
guaacacuaugauaauuga

SEQ ID NO: 447854 - RNA, 19 nt, Artificial Sequence
  Description of Artificial Sequence: Synthetic oligonucleotide
  Antisense Strand to SEQ ID NO: 447853
ucaauuaucauaguguuac

SEQ ID NO: 447855 - RNA, 19 nt, Artificial Sequence
  Description of Artificial Sequence: Synthetic oligonucleotide
  Sense strand starting at position 2414 of SEQ ID NO: 316886
uuauaagaugucugggaau

SEQ ID NO: 447856 - RNA, 19 nt, Artificial Sequence
  Description of Artificial Sequence: Synthetic oligonucleotide
  Antisense Strand to SEQ ID NO: 447855
auucccagacaucuuauaa

SEQ ID NO: 447857 - RNA, 19 nt, Artificial Sequence
  Description of Artificial Sequence: Synthetic oligonucleotide
  Sense strand starting at position 2417 of SEQ ID NO: 316886
uaagaugucugggaauuua

SEQ ID NO: 447858 - RNA, 19 nt, Artificial Sequence
  Description of Artificial Sequence: Synthetic oligonucleotide
  Antisense Strand to SEQ ID NO: 447857
uaaauucccagacaucuua

SEQ ID NO: 447859 - RNA, 19 nt, Artificial Sequence
  Description of Artificial Sequence: Synthetic oligonucleotide
  Sense strand starting at position 2436 of SEQ ID NO: 316886
cuccauuggcaggagaagu

SEQ ID NO: 447860 - RNA, 19 nt, Artificial Sequence
  Description of Artificial Sequence: Synthetic oligonucleotide
  Antisense Strand to SEQ ID NO: 447859
acuucuccugccaauggag

SEQ ID NO: 447861 - RNA, 19 nt, Artificial Sequence
  Description of Artificial Sequence: Synthetic oligonucleotide
  Sense strand starting at position 2486 of SEQ ID NO: 316886
gauagaaauugguuucuuu

SEQ ID NO: 447862 - RNA, 19 nt, Artificial Sequence
  Description of Artificial Sequence: Synthetic oligonucleotide
  Antisense Strand to SEQ ID NO: 447861
aaagaaaccaauuucuauc

SEQ ID NO: 447863 - RNA, 19 nt, Artificial Sequence
  Description of Artificial Sequence: Synthetic oligonucleotide
  Sense strand starting at position 2535 of SEQ ID NO: 316886
uacuauuauggauguauga

SEQ ID NO: 447864 - RNA, 19 nt, Artificial Sequence
  Description of Artificial Sequence: Synthetic oligonucleotide
  Antisense Strand to SEQ ID NO: 447863
ucauacauccauaauagua

SEQ ID NO: 447865 - RNA, 19 nt, Artificial Sequence
  Description of Artificial Sequence: Synthetic oligonucleotide
  Sense strand starting at position 2644 of SEQ ID NO: 316886
ucacaugagcucuggaguu

SEQ ID NO: 447866 - RNA, 19 nt, Artificial Sequence
  Description of Artificial Sequence: Synthetic oligonucleotide
  Antisense Strand to SEQ ID NO: 447865
aacuccagagcucauguga

SEQ ID NO: 447867 - RNA, 19 nt, Artificial Sequence
  Description of Artificial Sequence: Synthetic oligonucleotide
  Sense strand starting at position 2916 of SEQ ID NO: 316886
gcguuaucaaugccucguu

SEQ ID NO: 447868 - RNA, 19 nt, Artificial Sequence
  Description of Artificial Sequence: Synthetic oligonucleotide
  Antisense Strand to SEQ ID NO: 447867
aacgaggcauugauaacgc

SEQ ID NO: 447869 - RNA, 19 nt, Artificial Sequence
  Description of Artificial Sequence: Synthetic oligonucleotide
  Sense strand starting at position 2919 of SEQ ID NO: 316886
uuaucaaugccucguucca

SEQ ID NO: 447870 - RNA, 19 nt, Artificial Sequence
  Description of Artificial Sequence: Synthetic oligonucleotide
  Antisense Strand to SEQ ID NO: 447869
uggaacgaggcauugauaa

SEQ ID NO: 447871 - RNA, 19 nt, Artificial Sequence
  Description of Artificial Sequence: Synthetic oligonucleotide
  Sense strand starting at position 2921 of SEQ ID NO: 316886
aucaaugccucguuccaga

SEQ ID NO: 447872 - RNA, 19 nt, Artificial Sequence
  Description of Artificial Sequence: Synthetic oligonucleotide
  Antisense Strand to SEQ ID NO: 447871
ucuggaacgaggcauugau

SEQ ID NO: 447873 - RNA, 19 nt, Artificial Sequence
  Description of Artificial Sequence: Synthetic oligonucleotide
  Sense strand starting at position 3003 of SEQ ID NO: 316886
cucagauucugucuccuuu

SEQ ID NO: 447874 - RNA, 19 nt, Artificial Sequence
  Description of Artificial Sequence: Synthetic oligonucleotide
  Antisense Strand to SEQ ID NO: 447873
aaaggagacagaaucugag

SEQ ID NO: 447875 - RNA, 19 nt, Artificial Sequence
  Description of Artificial Sequence: Synthetic oligonucleotide
  Sense strand starting at position 3020 of SEQ ID NO: 316886
uugucuuccuccucacagu

SEQ ID NO: 447876 - RNA, 19 nt, Artificial Sequence
  Description of Artificial Sequence: Synthetic oligonucleotide
  Antisense Strand to SEQ ID NO: 447875
acugugaggaggaagacaa

SEQ ID NO: 447877 - RNA, 19 nt, Artificial Sequence
  Description of Artificial Sequence: Synthetic oligonucleotide
  Sense strand starting at position 3030 of SEQ ID NO: 316886
ccucacaguugucccuaau

SEQ ID NO: 447878 - RNA, 19 nt, Artificial Sequence
  Description of Artificial Sequence: Synthetic oligonucleotide
  Antisense Strand to SEQ ID NO: 447877
auuagggacaacugugagg

SEQ ID NO: 447879 - RNA, 19 nt, Artificial Sequence
  Description of Artificial Sequence: Synthetic oligonucleotide
  Sense strand starting at position 3036 of SEQ ID NO: 316886
aguugucccuaaucuuaau

SEQ ID NO: 447880 - RNA, 19 nt, Artificial Sequence
  Description of Artificial Sequence: Synthetic oligonucleotide
  Antisense Strand to SEQ ID NO: 447879
auuaagauuagggacaacu

SEQ ID NO: 447881 - RNA, 19 nt, Artificial Sequence
  Description of Artificial Sequence: Synthetic oligonucleotide
  Sense strand starting at position 3116 of SEQ ID NO: 316886
auuaguuuaaaucgggauu

SEQ ID NO: 447882 - RNA, 19 nt, Artificial Sequence
  Description of Artificial Sequence: Synthetic oligonucleotide
  Antisense Strand to SEQ ID NO: 447881
aaucccgauuuaaacuaau

SEQ ID NO: 447883 - RNA, 19 nt, Artificial Sequence
  Description of Artificial Sequence: Synthetic oligonucleotide
  Sense strand starting at position 3146 of SEQ ID NO: 316886
gagacuaggcauugugcuu

SEQ ID NO: 447884 - RNA, 19 nt, Artificial Sequence
  Description of Artificial Sequence: Synthetic oligonucleotide
  Antisense Strand to SEQ ID NO: 447883
aagcacaaugccuagucuc

SEQ ID NO: 447885 - RNA, 19 nt, Artificial Sequence
  Description of Artificial Sequence: Synthetic oligonucleotide
  Sense strand starting at position 3208 of SEQ ID NO: 316886
cucagauuaccugagucau

SEQ ID NO: 447886 - RNA, 19 nt, Artificial Sequence
  Description of Artificial Sequence: Synthetic oligonucleotide
  Antisense Strand to SEQ ID NO: 447885
augacucagguaaucugag

SEQ ID NO: 447887 - RNA, 19 nt, Artificial Sequence
  Description of Artificial Sequence: Synthetic oligonucleotide
  Sense strand starting at position 3498 of SEQ ID NO: 316886
gguugcagucuugagccau

SEQ ID NO: 447888 - RNA, 19 nt, Artificial Sequence
  Description of Artificial Sequence: Synthetic oligonucleotide
  Antisense Strand to SEQ ID NO: 447887
auggcucaagacugcaacc

SEQ ID NO: 447889 - RNA, 19 nt, Artificial Sequence
  Description of Artificial Sequence: Synthetic oligonucleotide
  Sense strand starting at position 3582 of SEQ ID NO: 316886
ccaagaaugguuuguguuu

SEQ ID NO: 447890 - RNA, 19 nt, Artificial Sequence
  Description of Artificial Sequence: Synthetic oligonucleotide
  Antisense Strand to SEQ ID NO: 447889
aaacacaaaccauucuugg

SEQ ID NO: 447891 - RNA, 19 nt, Artificial Sequence
  Description of Artificial Sequence: Synthetic oligonucleotide
  Sense strand starting at position 3583 of SEQ ID NO: 316886
caagaaugguuuguguuuc

SEQ ID NO: 447892 - RNA, 19 nt, Artificial Sequence
  Description of Artificial Sequence: Synthetic oligonucleotide
  Antisense Strand to SEQ ID NO: 447891
gaaacacaaaccauucuug

SEQ ID NO: 447893 - RNA, 19 nt, Artificial Sequence
  Description of Artificial Sequence: Synthetic oligonucleotide
  Sense strand starting at position 3587 of SEQ ID NO: 316886
aaugguuuguguuucugau

SEQ ID NO: 447894 - RNA, 19 nt, Artificial Sequence
  Description of Artificial Sequence: Synthetic oligonucleotide
  Antisense Strand to SEQ ID NO: 447893
aucagaaacacaaaccauu

SEQ ID NO: 447895 - RNA, 19 nt, Artificial Sequence
  Description of Artificial Sequence: Synthetic oligonucleotide
  Sense strand starting at position 3600 of SEQ ID NO: 316886
ucugauucuucuguugacu

SEQ ID NO: 447896 - RNA, 19 nt, Artificial Sequence
  Description of Artificial Sequence: Synthetic oligonucleotide
  Antisense Strand to SEQ ID NO: 447895
agucaacagaagaaucaga

SEQ ID NO: 447897 - RNA, 19 nt, Artificial Sequence
  Description of Artificial Sequence: Synthetic oligonucleotide
  Sense strand starting at position 3623 of SEQ ID NO: 316886
aaugguagauaugcugauu

SEQ ID NO: 447898 - RNA, 19 nt, Artificial Sequence
  Description of Artificial Sequence: Synthetic oligonucleotide
  Antisense Strand to SEQ ID NO: 447897
aaucagcauaucuaccauu

SEQ ID NO: 447899 - RNA, 19 nt, Artificial Sequence
  Description of Artificial Sequence: Synthetic oligonucleotide
  Sense strand starting at position 3626 of SEQ ID NO: 316886
gguagauaugcugauuaug

SEQ ID NO: 447900 - RNA, 19 nt, Artificial Sequence
  Description of Artificial Sequence: Synthetic oligonucleotide
  Antisense Strand to SEQ ID NO: 447899
cauaaucagcauaucuacc

SEQ ID NO: 447901 - RNA, 19 nt, Artificial Sequence
  Description of Artificial Sequence: Synthetic oligonucleotide
  Sense strand starting at position 3628 of SEQ ID NO: 316886
uagauaugcugauuaugca

SEQ ID NO: 447902 - RNA, 19 nt, Artificial Sequence
  Description of Artificial Sequence: Synthetic oligonucleotide
  Antisense Strand to SEQ ID NO: 447901
ugcauaaucagcauaucua

SEQ ID NO: 447903 - RNA, 19 nt, Artificial Sequence
  Description of Artificial Sequence: Synthetic oligonucleotide
  Sense strand starting at position 3635 of SEQ ID NO: 316886
gcugauuaugcagaacagu

SEQ ID NO: 447904 - RNA, 19 nt, Artificial Sequence
  Description of Artificial Sequence: Synthetic oligonucleotide
  Antisense Strand to SEQ ID NO: 447903
acuguucugcauaaucagc

SEQ ID NO: 447905 - RNA, 19 nt, Artificial Sequence
  Description of Artificial Sequence: Synthetic oligonucleotide
  Sense strand starting at position 3707 of SEQ ID NO: 316886
aguccaaaucugugauugu

SEQ ID NO: 447906 - RNA, 19 nt, Artificial Sequence
  Description of Artificial Sequence: Synthetic oligonucleotide
  Antisense Strand to SEQ ID NO: 447905
acaaucacagauuuggacu

SEQ ID NO: 447907 - RNA, 19 nt, Artificial Sequence
  Description of Artificial Sequence: Synthetic oligonucleotide
  Sense strand starting at position 3710 of SEQ ID NO: 316886
ccaaaucugugauugucau

SEQ ID NO: 447908 - RNA, 19 nt, Artificial Sequence
  Description of Artificial Sequence: Synthetic oligonucleotide
  Antisense Strand to SEQ ID NO: 447907
augacaaucacagauuugg

SEQ ID NO: 447909 - RNA, 19 nt, Artificial Sequence
  Description of Artificial Sequence: Synthetic oligonucleotide
  Sense strand starting at position 3748 of SEQ ID NO: 316886
ucucauauacgaugucaga

SEQ ID NO: 447910 - RNA, 19 nt, Artificial Sequence
  Description of Artificial Sequence: Synthetic oligonucleotide
  Antisense Strand to SEQ ID NO: 447909
ucugacaucguauaugaga

SEQ ID NO: 447911 - RNA, 19 nt, Artificial Sequence
  Description of Artificial Sequence: Synthetic oligonucleotide
  Sense strand starting at position 3783 of SEQ ID NO: 316886
auagguuauguguaggaca

SEQ ID NO: 447912 - RNA, 19 nt, Artificial Sequence
  Description of Artificial Sequence: Synthetic oligonucleotide
  Antisense Strand to SEQ ID NO: 447911
uguccuacacauaaccuau

SEQ ID NO: 447913 - RNA, 19 nt, Artificial Sequence
  Description of Artificial Sequence: Synthetic oligonucleotide
  Sense strand starting at position 3785 of SEQ ID NO: 316886
agguuauguguaggacaug

SEQ ID NO: 447914 - RNA, 19 nt, Artificial Sequence
  Description of Artificial Sequence: Synthetic oligonucleotide
  Antisense Strand to SEQ ID NO: 447913
cauguccuacacauaaccu

SEQ ID NO: 447915 - RNA, 19 nt, Artificial Sequence
  Description of Artificial Sequence: Synthetic oligonucleotide
  Sense strand starting at position 3790 of SEQ ID NO: 316886
auguguaggacauguguau

SEQ ID NO: 447916 - RNA, 19 nt, Artificial Sequence
  Description of Artificial Sequence: Synthetic oligonucleotide
  Antisense Strand to SEQ ID NO: 447915
auacacauguccuacacau

SEQ ID NO: 447917 - RNA, 19 nt, Artificial Sequence
  Description of Artificial Sequence: Synthetic oligonucleotide
  Sense strand starting at position 3794 of SEQ ID NO: 316886
guaggacauguguauacua

SEQ ID NO: 447918 - RNA, 19 nt, Artificial Sequence
  Description of Artificial Sequence: Synthetic oligonucleotide
  Antisense Strand to SEQ ID NO: 447917
uaguauacacauguccuac

SEQ ID NO: 447919 - RNA, 19 nt, Artificial Sequence
  Description of Artificial Sequence: Synthetic oligonucleotide
  Sense strand starting at position 3796 of SEQ ID NO: 316886
aggacauguguauacuacu

SEQ ID NO: 447920 - RNA, 19 nt, Artificial Sequence
  Description of Artificial Sequence: Synthetic oligonucleotide
  Antisense Strand to SEQ ID NO: 447919
aguaguauacacauguccu

SEQ ID NO: 447921 - RNA, 19 nt, Artificial Sequence
  Description of Artificial Sequence: Synthetic oligonucleotide
  Sense strand starting at position 134 of SEQ ID NO: 316887
ggccucucauaguuaauaa

SEQ ID NO: 447922 - RNA, 19 nt, Artificial Sequence
  Description of Artificial Sequence: Synthetic oligonucleotide
  Antisense Strand to SEQ ID NO: 447921
uuauuaacuaugagaggcc

SEQ ID NO: 447923 - RNA, 19 nt, Artificial Sequence
  Description of Artificial Sequence: Synthetic oligonucleotide
  Sense strand starting at position 157 of SEQ ID NO: 316887
accauucugcauuauguua

SEQ ID NO: 447924 - RNA, 19 nt, Artificial Sequence
  Description of Artificial Sequence: Synthetic oligonucleotide
  Antisense Strand to SEQ ID NO: 447923
uaacauaaugcagaauggu

SEQ ID NO: 447925 - RNA, 19 nt, Artificial Sequence
  Description of Artificial Sequence: Synthetic oligonucleotide
  Sense strand starting at position 633 of SEQ ID NO: 316887
cagcuuagcgauugacaag

SEQ ID NO: 447926 - RNA, 19 nt, Artificial Sequence
  Description of Artificial Sequence: Synthetic oligonucleotide
  Antisense Strand to SEQ ID NO: 447925
cuugucaaucgcuaagcug

SEQ ID NO: 447927 - RNA, 19 nt, Artificial Sequence
  Description of Artificial Sequence: Synthetic oligonucleotide
  Sense strand starting at position 775 of SEQ ID NO: 316887
gcaaguaagagcugauaaa

SEQ ID NO: 447928 - RNA, 19 nt, Artificial Sequence
  Description of Artificial Sequence: Synthetic oligonucleotide
  Antisense Strand to SEQ ID NO: 447927
uuuaucagcucuuacuugc

SEQ ID NO: 447929 - RNA, 19 nt, Artificial Sequence
  Description of Artificial Sequence: Synthetic oligonucleotide
  Sense strand starting at position 797 of SEQ ID NO: 316887
caaguaaggucucuaguuc

SEQ ID NO: 447930 - RNA, 19 nt, Artificial Sequence
  Description of Artificial Sequence: Synthetic oligonucleotide
  Antisense Strand to SEQ ID NO: 447929
gaacuagagaccuuacuug

SEQ ID NO: 447931 - RNA, 19 nt, Artificial Sequence
  Description of Artificial Sequence: Synthetic oligonucleotide
  Sense strand starting at position 851 of SEQ ID NO: 316887
ggcaaugugcuaucguuau

SEQ ID NO: 447932 - RNA, 19 nt, Artificial Sequence
  Description of Artificial Sequence: Synthetic oligonucleotide
  Antisense Strand to SEQ ID NO: 447931
auaacgauagcacauugcc

SEQ ID NO: 447933 - RNA, 19 nt, Artificial Sequence
  Description of Artificial Sequence: Synthetic oligonucleotide
  Sense strand starting at position 909 of SEQ ID NO: 316887
augggaccucuguacuauu

SEQ ID NO: 447934 - RNA, 19 nt, Artificial Sequence
  Description of Artificial Sequence: Synthetic oligonucleotide
  Antisense Strand to SEQ ID NO: 447933
aauaguacagaggucccau

SEQ ID NO: 447935 - RNA, 19 nt, Artificial Sequence
  Description of Artificial Sequence: Synthetic oligonucleotide
  Sense strand starting at position 931 of SEQ ID NO: 316887
gcaacuucuggugagccua

SEQ ID NO: 447936 - RNA, 19 nt, Artificial Sequence
  Description of Artificial Sequence: Synthetic oligonucleotide
  Antisense Strand to SEQ ID NO: 447935
uaggcucaccagaaguugc

SEQ ID NO: 447937 - RNA, 19 nt, Artificial Sequence
  Description of Artificial Sequence: Synthetic oligonucleotide
  Sense strand starting at position 1040 of SEQ ID NO: 316887
ugcuaacauguacacgaua

SEQ ID NO: 447938 - RNA, 19 nt, Artificial Sequence
  Description of Artificial Sequence: Synthetic oligonucleotide
  Antisense Strand to SEQ ID NO: 447937
uaucguguacauguuagca

SEQ ID NO: 447939 - RNA, 19 nt, Artificial Sequence
  Description of Artificial Sequence: Synthetic oligonucleotide
  Sense strand starting at position 1118 of SEQ ID NO: 316887
uuagaaagcugauuccuaa

SEQ ID NO: 447940 - RNA, 19 nt, Artificial Sequence
  Description of Artificial Sequence: Synthetic oligonucleotide
  Antisense Strand to SEQ ID NO: 447939
uuaggaaucagcuuucuaa

SEQ ID NO: 447941 - RNA, 19 nt, Artificial Sequence
  Description of Artificial Sequence: Synthetic oligonucleotide
  Sense strand starting at position 1121 of SEQ ID NO: 316887
gaaagcugauuccuaaguu

SEQ ID NO: 447942 - RNA, 19 nt, Artificial Sequence
  Description of Artificial Sequence: Synthetic oligonucleotide
  Antisense Strand to SEQ ID NO: 447941
aacuuaggaaucagcuuuc

SEQ ID NO: 447943 - RNA, 19 nt, Artificial Sequence
  Description of Artificial Sequence: Synthetic oligonucleotide
  Sense strand starting at position 1125 of SEQ ID NO: 316887
gcugauuccuaaguuauug

SEQ ID NO: 447944 - RNA, 19 nt, Artificial Sequence
  Description of Artificial Sequence: Synthetic oligonucleotide
  Antisense Strand to SEQ ID NO: 447943
caauaacuuaggaaucagc

SEQ ID NO: 447945 - RNA, 19 nt, Artificial Sequence
  Description of Artificial Sequence: Synthetic oligonucleotide
  Sense strand starting at position 1318 of SEQ ID NO: 316887
uugucaaggagucgguaaa

SEQ ID NO: 447946 - RNA, 19 nt, Artificial Sequence
  Description of Artificial Sequence: Synthetic oligonucleotide
  Antisense Strand to SEQ ID NO: 447945
uuuaccgacuccuugacaa

SEQ ID NO: 447947 - RNA, 19 nt, Artificial Sequence
  Description of Artificial Sequence: Synthetic oligonucleotide
  Sense strand starting at position 1448 of SEQ ID NO: 316887
ccgccaucuggauaccaaa

SEQ ID NO: 447948 - RNA, 19 nt, Artificial Sequence
  Description of Artificial Sequence: Synthetic oligonucleotide
  Antisense Strand to SEQ ID NO: 447947
uuugguauccagauggcgg

SEQ ID NO: 447949 - RNA, 19 nt, Artificial Sequence
  Description of Artificial Sequence: Synthetic oligonucleotide
  Sense strand starting at position 1733 of SEQ ID NO: 316887
gcguauuauguuguacgua

SEQ ID NO: 447950 - RNA, 19 nt, Artificial Sequence
  Description of Artificial Sequence: Synthetic oligonucleotide
  Antisense Strand to SEQ ID NO: 447949
uacguacaacauaauacgc

SEQ ID NO: 447951 - RNA, 19 nt, Artificial Sequence
  Description of Artificial Sequence: Synthetic oligonucleotide
  Sense strand starting at position 1738 of SEQ ID NO: 316887
uuauguuguacguacagga

SEQ ID NO: 447952 - RNA, 19 nt, Artificial Sequence
  Description of Artificial Sequence: Synthetic oligonucleotide
  Antisense Strand to SEQ ID NO: 447951
uccuguacguacaacauaa

SEQ ID NO: 447953 - RNA, 19 nt, Artificial Sequence
  Description of Artificial Sequence: Synthetic oligonucleotide
  Sense strand starting at position 1871 of SEQ ID NO: 316887
gaguguuuaccuggaccug

SEQ ID NO: 447954 - RNA, 19 nt, Artificial Sequence
  Description of Artificial Sequence: Synthetic oligonucleotide
  Antisense Strand to SEQ ID NO: 447953
cagguccagguaaacacuc

SEQ ID NO: 447955 - RNA, 19 nt, Artificial Sequence
  Description of Artificial Sequence: Synthetic oligonucleotide
  Sense strand starting at position 2347 of SEQ ID NO: 316887
ugaauagauuucuaaaggu

SEQ ID NO: 447956 - RNA, 19 nt, Artificial Sequence
  Description of Artificial Sequence: Synthetic oligonucleotide
  Antisense Strand to SEQ ID NO: 447955
accuuuagaaaucuauuca

SEQ ID NO: 447957 - RNA, 19 nt, Artificial Sequence
  Description of Artificial Sequence: Synthetic oligonucleotide
  Sense strand starting at position 2521 of SEQ ID NO: 316887
ucacuucuagcagacaagu

SEQ ID NO: 447958 - RNA, 19 nt, Artificial Sequence
  Description of Artificial Sequence: Synthetic oligonucleotide
  Antisense Strand to SEQ ID NO: 447957
acuugucugcuagaaguga

SEQ ID NO: 447959 - RNA, 19 nt, Artificial Sequence
  Description of Artificial Sequence: Synthetic oligonucleotide
  Sense strand starting at position 2625 of SEQ ID NO: 316887
acuucugaguguuucugau

SEQ ID NO: 447960 - RNA, 19 nt, Artificial Sequence
  Description of Artificial Sequence: Synthetic oligonucleotide
  Antisense Strand to SEQ ID NO: 447959
aucagaaacacucagaagu

SEQ ID NO: 447961 - RNA, 19 nt, Artificial Sequence
  Description of Artificial Sequence: Synthetic oligonucleotide
  Sense strand starting at position 2627 of SEQ ID NO: 316887
uucugaguguuucugauuu

SEQ ID NO: 447962 - RNA, 19 nt, Artificial Sequence
  Description of Artificial Sequence: Synthetic oligonucleotide
  Antisense Strand to SEQ ID NO: 447961
aaaucagaaacacucagaa

SEQ ID NO: 447963 - RNA, 19 nt, Artificial Sequence
  Description of Artificial Sequence: Synthetic oligonucleotide
  Sense strand starting at position 2658 of SEQ ID NO: 316887
ugguucugcuacuuaauaa

SEQ ID NO: 447964 - RNA, 19 nt, Artificial Sequence
  Description of Artificial Sequence: Synthetic oligonucleotide
  Antisense Strand to SEQ ID NO: 447963
uuauuaaguagcagaacca

SEQ ID NO: 447965 - RNA, 19 nt, Artificial Sequence
  Description of Artificial Sequence: Synthetic oligonucleotide
  Sense strand starting at position 2720 of SEQ ID NO: 316887
uuaauuaccuggccugaaa

SEQ ID NO: 447966 - RNA, 19 nt, Artificial Sequence
  Description of Artificial Sequence: Synthetic oligonucleotide
  Antisense Strand to SEQ ID NO: 447965
uuucaggccagguaauuaa

SEQ ID NO: 447967 - RNA, 19 nt, Artificial Sequence
  Description of Artificial Sequence: Synthetic oligonucleotide
  Sense strand starting at position 2907 of SEQ ID NO: 316887
agagcuguugugaguuagu

SEQ ID NO: 447968 - RNA, 19 nt, Artificial Sequence
  Description of Artificial Sequence: Synthetic oligonucleotide
  Antisense Strand to SEQ ID NO: 447967
acuaacucacaacagcucu

SEQ ID NO: 447969 - RNA, 19 nt, Artificial Sequence
  Description of Artificial Sequence: Synthetic oligonucleotide
  Sense strand starting at position 2914 of SEQ ID NO: 316887
uugugaguuaguuaaugga

SEQ ID NO: 447970 - RNA, 19 nt, Artificial Sequence
  Description of Artificial Sequence: Synthetic oligonucleotide
  Antisense Strand to SEQ ID NO: 447969
uccauuaacuaacucacaa

SEQ ID NO: 447971 - RNA, 19 nt, Artificial Sequence
  Description of Artificial Sequence: Synthetic oligonucleotide
  Sense strand starting at position 2929 of SEQ ID NO: 316887
uggagaaagcuauguaggu

SEQ ID NO: 447972 - RNA, 19 nt, Artificial Sequence
  Description of Artificial Sequence: Synthetic oligonucleotide
  Antisense Strand to SEQ ID NO: 447971
accuacauagcuuucucca

SEQ ID NO: 447973 - RNA, 19 nt, Artificial Sequence
  Description of Artificial Sequence: Synthetic oligonucleotide
  Sense strand starting at position 2930 of SEQ ID NO: 316887
ggagaaagcuauguaggua

SEQ ID NO: 447974 - RNA, 19 nt, Artificial Sequence
  Description of Artificial Sequence: Synthetic oligonucleotide
  Antisense Strand to SEQ ID NO: 447973
uaccuacauagcuuucucc

SEQ ID NO: 447975 - RNA, 19 nt, Artificial Sequence
  Description of Artificial Sequence: Synthetic oligonucleotide
  Sense strand starting at position 2933 of SEQ ID NO: 316887
gaaagcuauguagguaauc

SEQ ID NO: 447976 - RNA, 19 nt, Artificial Sequence
  Description of Artificial Sequence: Synthetic oligonucleotide
  Antisense Strand to SEQ ID NO: 447975
gauuaccuacauagcuuuc

SEQ ID NO: 447977 - RNA, 19 nt, Artificial Sequence
  Description of Artificial Sequence: Synthetic oligonucleotide
  Sense strand starting at position 2934 of SEQ ID NO: 316887
aaagcuauguagguaauca

SEQ ID NO: 447978 - RNA, 19 nt, Artificial Sequence
  Description of Artificial Sequence: Synthetic oligonucleotide
  Antisense Strand to SEQ ID NO: 447977
ugauuaccuacauagcuuu

SEQ ID NO: 447979 - RNA, 19 nt, Artificial Sequence
  Description of Artificial Sequence: Synthetic oligonucleotide
  Sense strand starting at position 2938 of SEQ ID NO: 316887
cuauguagguaaucauuau

SEQ ID NO: 447980 - RNA, 19 nt, Artificial Sequence
  Description of Artificial Sequence: Synthetic oligonucleotide
  Antisense Strand to SEQ ID NO: 447979
auaaugauuaccuacauag

SEQ ID NO: 447981 - RNA, 19 nt, Artificial Sequence
  Description of Artificial Sequence: Synthetic oligonucleotide
  Sense strand starting at position 2984 of SEQ ID NO: 316887
cuuugauauuaguccgauu

SEQ ID NO: 447982 - RNA, 19 nt, Artificial Sequence
  Description of Artificial Sequence: Synthetic oligonucleotide
  Antisense Strand to SEQ ID NO: 447981
aaucggacuaauaucaaag

SEQ ID NO: 447983 - RNA, 19 nt, Artificial Sequence
  Description of Artificial Sequence: Synthetic oligonucleotide
  Sense strand starting at position 3035 of SEQ ID NO: 316887
aggguuucuguagaaauuc

SEQ ID NO: 447984 - RNA, 19 nt, Artificial Sequence
  Description of Artificial Sequence: Synthetic oligonucleotide
  Antisense Strand to SEQ ID NO: 447983
gaauuucuacagaaacccu

SEQ ID NO: 447985 - RNA, 19 nt, Artificial Sequence
  Description of Artificial Sequence: Synthetic oligonucleotide
  Sense strand starting at position 3043 of SEQ ID NO: 316887
uguagaaauucugugagaa

SEQ ID NO: 447986 - RNA, 19 nt, Artificial Sequence
  Description of Artificial Sequence: Synthetic oligonucleotide
  Antisense Strand to SEQ ID NO: 447985
uucucacagaauuucuaca

SEQ ID NO: 447987 - RNA, 19 nt, Artificial Sequence
  Description of Artificial Sequence: Synthetic oligonucleotide
  Sense strand starting at position 3044 of SEQ ID NO: 316887
guagaaauucugugagaac

SEQ ID NO: 447988 - RNA, 19 nt, Artificial Sequence
  Description of Artificial Sequence: Synthetic oligonucleotide
  Antisense Strand to SEQ ID NO: 447987
guucucacagaauuucuac

SEQ ID NO: 447989 - RNA, 19 nt, Artificial Sequence
  Description of Artificial Sequence: Synthetic oligonucleotide
  Sense strand starting at position 3074 of SEQ ID NO: 316887
uaugguuaucuaggcugaa

SEQ ID NO: 447990 - RNA, 19 nt, Artificial Sequence
  Description of Artificial Sequence: Synthetic oligonucleotide
  Antisense Strand to SEQ ID NO: 447989
uucagccuagauaaccaua

SEQ ID NO: 447991 - RNA, 19 nt, Artificial Sequence
  Description of Artificial Sequence: Synthetic oligonucleotide
  Sense strand starting at position 3075 of SEQ ID NO: 316887
augguuaucuaggcugaau

SEQ ID NO: 447992 - RNA, 19 nt, Artificial Sequence
  Description of Artificial Sequence: Synthetic oligonucleotide
  Antisense Strand to SEQ ID NO: 447991
auucagccuagauaaccau

SEQ ID NO: 447993 - RNA, 19 nt, Artificial Sequence
  Description of Artificial Sequence: Synthetic oligonucleotide
  Sense strand starting at position 3078 of SEQ ID NO: 316887
guuaucuaggcugaaugga

SEQ ID NO: 447994 - RNA, 19 nt, Artificial Sequence
  Description of Artificial Sequence: Synthetic oligonucleotide
  Antisense Strand to SEQ ID NO: 447993
uccauucagccuagauaac

SEQ ID NO: 447995 - RNA, 19 nt, Artificial Sequence
  Description of Artificial Sequence: Synthetic oligonucleotide
  Sense strand starting at position 3093 of SEQ ID NO: 316887
uggaguccugcaggaauga

SEQ ID NO: 447996 - RNA, 19 nt, Artificial Sequence
  Description of Artificial Sequence: Synthetic oligonucleotide
  Antisense Strand to SEQ ID NO: 447995
ucauuccugcaggacucca

SEQ ID NO: 447997 - RNA, 19 nt, Artificial Sequence
  Description of Artificial Sequence: Synthetic oligonucleotide
  Sense strand starting at position 3094 of SEQ ID NO: 316887
ggaguccugcaggaaugau

SEQ ID NO: 447998 - RNA, 19 nt, Artificial Sequence
  Description of Artificial Sequence: Synthetic oligonucleotide
  Antisense Strand to SEQ ID NO: 447997
aucauuccugcaggacucc

SEQ ID NO: 447999 - RNA, 19 nt, Artificial Sequence
  Description of Artificial Sequence: Synthetic oligonucleotide
  Sense strand starting at position 3104 of SEQ ID NO: 316887
aggaaugauuuguaacaau

SEQ ID NO: 448000 - RNA, 19 nt, Artificial Sequence
  Description of Artificial Sequence: Synthetic oligonucleotide
  Antisense Strand to SEQ ID NO: 447999
auuguuacaaaucauuccu

SEQ ID NO: 448001 - RNA, 19 nt, Artificial Sequence
  Description of Artificial Sequence: Synthetic oligonucleotide
  Sense strand starting at position 29 of SEQ ID NO: 316888
ugaagagcuuugguagcua

SEQ ID NO: 448002 - RNA, 19 nt, Artificial Sequence
  Description of Artificial Sequence: Synthetic oligonucleotide
  Antisense Strand to SEQ ID NO: 448001
uagcuaccaaagcucuuca

SEQ ID NO: 448003 - RNA, 19 nt, Artificial Sequence
  Description of Artificial Sequence: Synthetic oligonucleotide
  Sense strand starting at position 33 of SEQ ID NO: 316888
gagcuuugguagcuacaaa

SEQ ID NO: 448004 - RNA, 19 nt, Artificial Sequence
  Description of Artificial Sequence: Synthetic oligonucleotide
  Antisense Strand to SEQ ID NO: 448003
uuuguagcuaccaaagcuc

SEQ ID NO: 448005 - RNA, 19 nt, Artificial Sequence
  Description of Artificial Sequence: Synthetic oligonucleotide
  Sense strand starting at position 90 of SEQ ID NO: 316888
guuaucuacugaguaaccu

SEQ ID NO: 448006 - RNA, 19 nt, Artificial Sequence
  Description of Artificial Sequence: Synthetic oligonucleotide
  Antisense Strand to SEQ ID NO: 448005
agguuacucaguagauaac

SEQ ID NO: 448007 - RNA, 19 nt, Artificial Sequence
  Description of Artificial Sequence: Synthetic oligonucleotide
  Sense strand starting at position 428 of SEQ ID NO: 316888
ggucauuuccacuguauuc

SEQ ID NO: 448008 - RNA, 19 nt, Artificial Sequence
  Description of Artificial Sequence: Synthetic oligonucleotide
  Antisense Strand to SEQ ID NO: 448007
gaauacaguggaaaugacc

SEQ ID NO: 448009 - RNA, 19 nt, Artificial Sequence
  Description of Artificial Sequence: Synthetic oligonucleotide
  Sense strand starting at position 441 of SEQ ID NO: 316888
guauucuauugguuuaaca

SEQ ID NO: 448010 - RNA, 19 nt, Artificial Sequence
  Description of Artificial Sequence: Synthetic oligonucleotide
  Antisense Strand to SEQ ID NO: 448009
uguuaaaccaauagaauac

SEQ ID NO: 448011 - RNA, 19 nt, Artificial Sequence
  Description of Artificial Sequence: Synthetic oligonucleotide
  Sense strand starting at position 593 of SEQ ID NO: 316888
cugauuugcuguccucaga

SEQ ID NO: 448012 - RNA, 19 nt, Artificial Sequence
  Description of Artificial Sequence: Synthetic oligonucleotide
  Antisense Strand to SEQ ID NO: 448011
ucugaggacagcaaaucag

SEQ ID NO: 448013 - RNA, 19 nt, Artificial Sequence
  Description of Artificial Sequence: Synthetic oligonucleotide
  Sense strand starting at position 606 of SEQ ID NO: 316888
cucagauucucauuaguga

SEQ ID NO: 448014 - RNA, 19 nt, Artificial Sequence
  Description of Artificial Sequence: Synthetic oligonucleotide
  Antisense Strand to SEQ ID NO: 448013
ucacuaaugagaaucugag

SEQ ID NO: 448015 - RNA, 19 nt, Artificial Sequence
  Description of Artificial Sequence: Synthetic oligonucleotide
  Sense strand starting at position 607 of SEQ ID NO: 316888
ucagauucucauuagugac

SEQ ID NO: 448016 - RNA, 19 nt, Artificial Sequence
  Description of Artificial Sequence: Synthetic oligonucleotide
  Antisense Strand to SEQ ID NO: 448015
gucacuaaugagaaucuga

SEQ ID NO: 448017 - RNA, 19 nt, Artificial Sequence
  Description of Artificial Sequence: Synthetic oligonucleotide
  Sense strand starting at position 637 of SEQ ID NO: 316888
cagcaaugcgcagaguaga

SEQ ID NO: 448018 - RNA, 19 nt, Artificial Sequence
  Description of Artificial Sequence: Synthetic oligonucleotide
  Antisense Strand to SEQ ID NO: 448017
ucuacucugcgcauugcug

SEQ ID NO: 448019 - RNA, 19 nt, Artificial Sequence
  Description of Artificial Sequence: Synthetic oligonucleotide
  Sense strand starting at position 792 of SEQ ID NO: 316888
acacuauaguugccaagaa

SEQ ID NO: 448020 - RNA, 19 nt, Artificial Sequence
  Description of Artificial Sequence: Synthetic oligonucleotide
  Antisense Strand to SEQ ID NO: 448019
uucuuggcaacuauagugu

SEQ ID NO: 448021 - RNA, 19 nt, Artificial Sequence
  Description of Artificial Sequence: Synthetic oligonucleotide
  Sense strand starting at position 984 of SEQ ID NO: 316888
ggccucuuucugggagaug

SEQ ID NO: 448022 - RNA, 19 nt, Artificial Sequence
  Description of Artificial Sequence: Synthetic oligonucleotide
  Antisense Strand to SEQ ID NO: 448021
caucucccagaaagaggcc

SEQ ID NO: 448023 - RNA, 19 nt, Artificial Sequence
  Description of Artificial Sequence: Synthetic oligonucleotide
  Sense strand starting at position 1002 of SEQ ID NO: 316888
gccagacuucugggacaag

SEQ ID NO: 448024 - RNA, 19 nt, Artificial Sequence
  Description of Artificial Sequence: Synthetic oligonucleotide
  Antisense Strand to SEQ ID NO: 448023
cuugucccagaagucuggc

SEQ ID NO: 448025 - RNA, 19 nt, Artificial Sequence
  Description of Artificial Sequence: Synthetic oligonucleotide
  Sense strand starting at position 1068 of SEQ ID NO: 316888
uuauacauggacuguauau

SEQ ID NO: 448026 - RNA, 19 nt, Artificial Sequence
  Description of Artificial Sequence: Synthetic oligonucleotide
  Antisense Strand to SEQ ID NO: 448025
auauacaguccauguauaa

SEQ ID NO: 448027 - RNA, 19 nt, Artificial Sequence
  Description of Artificial Sequence: Synthetic oligonucleotide
  Sense strand starting at position 1272 of SEQ ID NO: 316888
gguauuaaaugaguagaac

SEQ ID NO: 448028 - RNA, 19 nt, Artificial Sequence
  Description of Artificial Sequence: Synthetic oligonucleotide
  Antisense Strand to SEQ ID NO: 448027
guucuacucauuuaauacc

SEQ ID NO: 448029 - RNA, 19 nt, Artificial Sequence
  Description of Artificial Sequence: Synthetic oligonucleotide
  Sense strand starting at position 1281 of SEQ ID NO: 316888
ugaguagaacugugcaaag

SEQ ID NO: 448030 - RNA, 19 nt, Artificial Sequence
  Description of Artificial Sequence: Synthetic oligonucleotide
  Antisense Strand to SEQ ID NO: 448029
cuuugcacaguucuacuca

SEQ ID NO: 448031 - RNA, 19 nt, Artificial Sequence
  Description of Artificial Sequence: Synthetic oligonucleotide
  Sense strand starting at position 2678 of SEQ ID NO: 316888
cuacaucuuguaugggaaa

SEQ ID NO: 448032 - RNA, 19 nt, Artificial Sequence
  Description of Artificial Sequence: Synthetic oligonucleotide
  Antisense Strand to SEQ ID NO: 448031
uuucccauacaagauguag

SEQ ID NO: 448033 - RNA, 19 nt, Artificial Sequence
  Description of Artificial Sequence: Synthetic oligonucleotide
  Sense strand starting at position 2723 of SEQ ID NO: 316888
gcuagagcucuucuugcgu

SEQ ID NO: 448034 - RNA, 19 nt, Artificial Sequence
  Description of Artificial Sequence: Synthetic oligonucleotide
  Antisense Strand to SEQ ID NO: 448033
acgcaagaagagcucuagc

SEQ ID NO: 448035 - RNA, 19 nt, Artificial Sequence
  Description of Artificial Sequence: Synthetic oligonucleotide
  Sense strand starting at position 2758 of SEQ ID NO: 316888
uugguaggcgaggguuaaa

SEQ ID NO: 448036 - RNA, 19 nt, Artificial Sequence
  Description of Artificial Sequence: Synthetic oligonucleotide
  Antisense Strand to SEQ ID NO: 448035
uuuaacccucgccuaccaa

SEQ ID NO: 448037 - RNA, 19 nt, Artificial Sequence
  Description of Artificial Sequence: Synthetic oligonucleotide
  Sense strand starting at position 2761 of SEQ ID NO: 316888
guaggcgaggguuaaagaa

SEQ ID NO: 448038 - RNA, 19 nt, Artificial Sequence
  Description of Artificial Sequence: Synthetic oligonucleotide
  Antisense Strand to SEQ ID NO: 448037
uucuuuaacccucgccuac

SEQ ID NO: 448039 - RNA, 19 nt, Artificial Sequence
  Description of Artificial Sequence: Synthetic oligonucleotide
  Sense strand starting at position 2807 of SEQ ID NO: 316888
uucccuuuacagugauaag

SEQ ID NO: 448040 - RNA, 19 nt, Artificial Sequence
  Description of Artificial Sequence: Synthetic oligonucleotide
  Antisense Strand to SEQ ID NO: 448039
cuuaucacuguaaagggaa

SEQ ID NO: 448041 - RNA, 19 nt, Artificial Sequence
  Description of Artificial Sequence: Synthetic oligonucleotide
  Sense strand starting at position 2863 of SEQ ID NO: 316888
uuguguucugucguuugca

SEQ ID NO: 448042 - RNA, 19 nt, Artificial Sequence
  Description of Artificial Sequence: Synthetic oligonucleotide
  Antisense Strand to SEQ ID NO: 448041
ugcaaacgacagaacacaa

SEQ ID NO: 448043 - RNA, 19 nt, Artificial Sequence
  Description of Artificial Sequence: Synthetic oligonucleotide
  Sense strand starting at position 3004 of SEQ ID NO: 316888
gcuugcuguagccuuugaa

SEQ ID NO: 448044 - RNA, 19 nt, Artificial Sequence
  Description of Artificial Sequence: Synthetic oligonucleotide
  Antisense Strand to SEQ ID NO: 448043
uucaaaggcuacagcaagc

SEQ ID NO: 448045 - RNA, 19 nt, Artificial Sequence
  Description of Artificial Sequence: Synthetic oligonucleotide
  Sense strand starting at position 3115 of SEQ ID NO: 316888
ccuuuaggcugggugacaa

SEQ ID NO: 448046 - RNA, 19 nt, Artificial Sequence
  Description of Artificial Sequence: Synthetic oligonucleotide
  Antisense Strand to SEQ ID NO: 448045
uugucacccagccuaaagg

SEQ ID NO: 448047 - RNA, 19 nt, Artificial Sequence
  Description of Artificial Sequence: Synthetic oligonucleotide
  Sense strand starting at position 3227 of SEQ ID NO: 316888
uucucaaacggccauaauu

SEQ ID NO: 448048 - RNA, 19 nt, Artificial Sequence
  Description of Artificial Sequence: Synthetic oligonucleotide
  Antisense Strand to SEQ ID NO: 448047
aauuauggccguuugagaa

SEQ ID NO: 448049 - RNA, 19 nt, Artificial Sequence
  Description of Artificial Sequence: Synthetic oligonucleotide
  Sense strand starting at position 3286 of SEQ ID NO: 316888
acuugucucuuccucuaga

SEQ ID NO: 448050 - RNA, 19 nt, Artificial Sequence
  Description of Artificial Sequence: Synthetic oligonucleotide
  Antisense Strand to SEQ ID NO: 448049
ucuagaggaagagacaagu

SEQ ID NO: 448051 - RNA, 19 nt, Artificial Sequence
  Description of Artificial Sequence: Synthetic oligonucleotide
  Sense strand starting at position 3316 of SEQ ID NO: 316888
gagagccaguccuuuaaga

SEQ ID NO: 448052 - RNA, 19 nt, Artificial Sequence
  Description of Artificial Sequence: Synthetic oligonucleotide
  Antisense Strand to SEQ ID NO: 448051
ucuuaaaggacuggcucuc

SEQ ID NO: 448053 - RNA, 19 nt, Artificial Sequence
  Description of Artificial Sequence: Synthetic oligonucleotide
  Sense strand starting at position 3318 of SEQ ID NO: 316888
gagccaguccuuuaagaag

SEQ ID NO: 448054 - RNA, 19 nt, Artificial Sequence
  Description of Artificial Sequence: Synthetic oligonucleotide
  Antisense Strand to SEQ ID NO: 448053
cuucuuaaaggacuggcuc

SEQ ID NO: 448055 - RNA, 19 nt, Artificial Sequence
  Description of Artificial Sequence: Synthetic oligonucleotide
  Sense strand starting at position 3554 of SEQ ID NO: 316888
ggccuagucuacuuugaau

SEQ ID NO: 448056 - RNA, 19 nt, Artificial Sequence
  Description of Artificial Sequence: Synthetic oligonucleotide
  Antisense Strand to SEQ ID NO: 448055
auucaaaguagacuaggcc

SEQ ID NO: 448057 - RNA, 19 nt, Artificial Sequence
  Description of Artificial Sequence: Synthetic oligonucleotide
  Sense strand starting at position 3653 of SEQ ID NO: 316888
uuaagugaguaccugaaau

SEQ ID NO: 448058 - RNA, 19 nt, Artificial Sequence
  Description of Artificial Sequence: Synthetic oligonucleotide
  Antisense Strand to SEQ ID NO: 448057
auuucagguacucacuuaa

SEQ ID NO: 448059 - RNA, 19 nt, Artificial Sequence
  Description of Artificial Sequence: Synthetic oligonucleotide
  Sense strand starting at position 3661 of SEQ ID NO: 316888
guaccugaaaucuggcagu

SEQ ID NO: 448060 - RNA, 19 nt, Artificial Sequence
  Description of Artificial Sequence: Synthetic oligonucleotide
  Antisense Strand to SEQ ID NO: 448059
acugccagauuucagguac

SEQ ID NO: 448061 - RNA, 19 nt, Artificial Sequence
  Description of Artificial Sequence: Synthetic oligonucleotide
  Sense strand starting at position 3734 of SEQ ID NO: 316888
ucacauugccaagggaaga

SEQ ID NO: 448062 - RNA, 19 nt, Artificial Sequence
  Description of Artificial Sequence: Synthetic oligonucleotide
  Antisense Strand to SEQ ID NO: 448061
ucuucccuuggcaauguga

SEQ ID NO: 448063 - RNA, 19 nt, Artificial Sequence
  Description of Artificial Sequence: Synthetic oligonucleotide
  Sense strand starting at position 3777 of SEQ ID NO: 316888
gagggucaguuuccuuuga

SEQ ID NO: 448064 - RNA, 19 nt, Artificial Sequence
  Description of Artificial Sequence: Synthetic oligonucleotide
  Antisense Strand to SEQ ID NO: 448063
ucaaaggaaacugacccuc

SEQ ID NO: 448065 - RNA, 19 nt, Artificial Sequence
  Description of Artificial Sequence: Synthetic oligonucleotide
  Sense strand starting at position 3784 of SEQ ID NO: 316888
aguuuccuuugagcaauca

SEQ ID NO: 448066 - RNA, 19 nt, Artificial Sequence
  Description of Artificial Sequence: Synthetic oligonucleotide
  Antisense Strand to SEQ ID NO: 448065
ugauugcucaaaggaaacu

SEQ ID NO: 448067 - RNA, 19 nt, Artificial Sequence
  Description of Artificial Sequence: Synthetic oligonucleotide
  Sense strand starting at position 3785 of SEQ ID NO: 316888
guuuccuuugagcaaucau

SEQ ID NO: 448068 - RNA, 19 nt, Artificial Sequence
  Description of Artificial Sequence: Synthetic oligonucleotide
  Antisense Strand to SEQ ID NO: 448067
augauugcucaaaggaaac

SEQ ID NO: 448069 - RNA, 19 nt, Artificial Sequence
  Description of Artificial Sequence: Synthetic oligonucleotide
  Sense strand starting at position 3868 of SEQ ID NO: 316888
uguguuugaggauguaaac

SEQ ID NO: 448070 - RNA, 19 nt, Artificial Sequence
  Description of Artificial Sequence: Synthetic oligonucleotide
  Antisense Strand to SEQ ID NO: 448069
guuuacauccucaaacaca

SEQ ID NO: 448071 - RNA, 19 nt, Artificial Sequence
  Description of Artificial Sequence: Synthetic oligonucleotide
  Sense strand starting at position 3888 of SEQ ID NO: 316888
cuugcuuugggugacuaga

SEQ ID NO: 448072 - RNA, 19 nt, Artificial Sequence
  Description of Artificial Sequence: Synthetic oligonucleotide
  Antisense Strand to SEQ ID NO: 448071
ucuagucacccaaagcaag

SEQ ID NO: 448073 - RNA, 19 nt, Artificial Sequence
  Description of Artificial Sequence: Synthetic oligonucleotide
  Sense strand starting at position 3940 of SEQ ID NO: 316888
uuucuuauauggccuugaa

SEQ ID NO: 448074 - RNA, 19 nt, Artificial Sequence
  Description of Artificial Sequence: Synthetic oligonucleotide
  Antisense Strand to SEQ ID NO: 448073
uucaaggccauauaagaaa

SEQ ID NO: 448075 - RNA, 19 nt, Artificial Sequence
  Description of Artificial Sequence: Synthetic oligonucleotide
  Sense strand starting at position 3943 of SEQ ID NO: 316888
cuuauauggccuugaaagg

SEQ ID NO: 448076 - RNA, 19 nt, Artificial Sequence
  Description of Artificial Sequence: Synthetic oligonucleotide
  Antisense Strand to SEQ ID NO: 448075
ccuuucaaggccauauaag

SEQ ID NO: 448077 - RNA, 19 nt, Artificial Sequence
  Description of Artificial Sequence: Synthetic oligonucleotide
  Sense strand starting at position 3973 of SEQ ID NO: 316888
agcccuauaggaugaguga

SEQ ID NO: 448078 - RNA, 19 nt, Artificial Sequence
  Description of Artificial Sequence: Synthetic oligonucleotide
  Antisense Strand to SEQ ID NO: 448077
ucacucauccuauagggcu

SEQ ID NO: 448079 - RNA, 19 nt, Artificial Sequence
  Description of Artificial Sequence: Synthetic oligonucleotide
  Sense strand starting at position 3974 of SEQ ID NO: 316888
gcccuauaggaugagugau

SEQ ID NO: 448080 - RNA, 19 nt, Artificial Sequence
  Description of Artificial Sequence: Synthetic oligonucleotide
  Antisense Strand to SEQ ID NO: 448079
aucacucauccuauagggc

SEQ ID NO: 448081 - RNA, 19 nt, Artificial Sequence
  Description of Artificial Sequence: Synthetic oligonucleotide
  Sense strand starting at position 134 of SEQ ID NO: 316889
ggccucucauaguuaauaa

SEQ ID NO: 448082 - RNA, 19 nt, Artificial Sequence
  Description of Artificial Sequence: Synthetic oligonucleotide
  Antisense Strand to SEQ ID NO: 448081
uuauuaacuaugagaggcc

SEQ ID NO: 448083 - RNA, 19 nt, Artificial Sequence
  Description of Artificial Sequence: Synthetic oligonucleotide
  Sense strand starting at position 157 of SEQ ID NO: 316889
accauucugcauuauguua

SEQ ID NO: 448084 - RNA, 19 nt, Artificial Sequence
  Description of Artificial Sequence: Synthetic oligonucleotide
  Antisense Strand to SEQ ID NO: 448083
uaacauaaugcagaauggu

SEQ ID NO: 448085 - RNA, 19 nt, Artificial Sequence
  Description of Artificial Sequence: Synthetic oligonucleotide
  Sense strand starting at position 633 of SEQ ID NO: 316889
cagcuuagcgauugacaag

SEQ ID NO: 448086 - RNA, 19 nt, Artificial Sequence
  Description of Artificial Sequence: Synthetic oligonucleotide
  Antisense Strand to SEQ ID NO: 448085
cuugucaaucgcuaagcug

SEQ ID NO: 448087 - RNA, 19 nt, Artificial Sequence
  Description of Artificial Sequence: Synthetic oligonucleotide
  Sense strand starting at position 775 of SEQ ID NO: 316889
gcaaguaagagcugauaaa

SEQ ID NO: 448088 - RNA, 19 nt, Artificial Sequence
  Description of Artificial Sequence: Synthetic oligonucleotide
  Antisense Strand to SEQ ID NO: 448087
uuuaucagcucuuacuugc

SEQ ID NO: 448089 - RNA, 19 nt, Artificial Sequence
  Description of Artificial Sequence: Synthetic oligonucleotide
  Sense strand starting at position 797 of SEQ ID NO: 316889
caaguaaggucucuaguuc

SEQ ID NO: 448090 - RNA, 19 nt, Artificial Sequence
  Description of Artificial Sequence: Synthetic oligonucleotide
  Antisense Strand to SEQ ID NO: 448089
gaacuagagaccuuacuug

SEQ ID NO: 448091 - RNA, 19 nt, Artificial Sequence
  Description of Artificial Sequence: Synthetic oligonucleotide
  Sense strand starting at position 851 of SEQ ID NO: 316889
ggcaaugugcuaucguuau

SEQ ID NO: 448092 - RNA, 19 nt, Artificial Sequence
  Description of Artificial Sequence: Synthetic oligonucleotide
  Antisense Strand to SEQ ID NO: 448091
auaacgauagcacauugcc

SEQ ID NO: 448093 - RNA, 19 nt, Artificial Sequence
  Description of Artificial Sequence: Synthetic oligonucleotide
  Sense strand starting at position 909 of SEQ ID NO: 316889
augggaccucuguacuauu

SEQ ID NO: 448094 - RNA, 19 nt, Artificial Sequence
  Description of Artificial Sequence: Synthetic oligonucleotide
  Antisense Strand to SEQ ID NO: 448093
aauaguacagaggucccau

SEQ ID NO: 448095 - RNA, 19 nt, Artificial Sequence
  Description of Artificial Sequence: Synthetic oligonucleotide
  Sense strand starting at position 931 of SEQ ID NO: 316889
gcaacuucuggugagccua

SEQ ID NO: 448096 - RNA, 19 nt, Artificial Sequence
  Description of Artificial Sequence: Synthetic oligonucleotide
  Antisense Strand to SEQ ID NO: 448095
uaggcucaccagaaguugc

SEQ ID NO: 448097 - RNA, 19 nt, Artificial Sequence
  Description of Artificial Sequence: Synthetic oligonucleotide
  Sense strand starting at position 1040 of SEQ ID NO: 316889
ugcuaacauguacacgaua

SEQ ID NO: 448098 - RNA, 19 nt, Artificial Sequence
  Description of Artificial Sequence: Synthetic oligonucleotide
  Antisense Strand to SEQ ID NO: 448097
uaucguguacauguuagca

SEQ ID NO: 448099 - RNA, 19 nt, Artificial Sequence
  Description of Artificial Sequence: Synthetic oligonucleotide
  Sense strand starting at position 1118 of SEQ ID NO: 316889
uuagaaagcugauuccuaa

SEQ ID NO: 448100 - RNA, 19 nt, Artificial Sequence
  Description of Artificial Sequence: Synthetic oligonucleotide
  Antisense Strand to SEQ ID NO: 448099
uuaggaaucagcuuucuaa

SEQ ID NO: 448101 - RNA, 19 nt, Artificial Sequence
  Description of Artificial Sequence: Synthetic oligonucleotide
  Sense strand starting at position 1121 of SEQ ID NO: 316889
gaaagcugauuccuaaguu

SEQ ID NO: 448102 - RNA, 19 nt, Artificial Sequence
  Description of Artificial Sequence: Synthetic oligonucleotide
  Antisense Strand to SEQ ID NO: 448101
aacuuaggaaucagcuuuc

SEQ ID NO: 448103 - RNA, 19 nt, Artificial Sequence
  Description of Artificial Sequence: Synthetic oligonucleotide
  Sense strand starting at position 1125 of SEQ ID NO: 316889
gcugauuccuaaguuauug

SEQ ID NO: 448104 - RNA, 19 nt, Artificial Sequence
  Description of Artificial Sequence: Synthetic oligonucleotide
  Antisense Strand to SEQ ID NO: 448103
caauaacuuaggaaucagc

SEQ ID NO: 448105 - RNA, 19 nt, Artificial Sequence
  Description of Artificial Sequence: Synthetic oligonucleotide
  Sense strand starting at position 1318 of SEQ ID NO: 316889
uugucaaggagucgguaaa

SEQ ID NO: 448106 - RNA, 19 nt, Artificial Sequence
  Description of Artificial Sequence: Synthetic oligonucleotide
  Antisense Strand to SEQ ID NO: 448105
uuuaccgacuccuugacaa

SEQ ID NO: 448107 - RNA, 19 nt, Artificial Sequence
  Description of Artificial Sequence: Synthetic oligonucleotide
  Sense strand starting at position 1448 of SEQ ID NO: 316889
ccgccaucuggauaccaaa

SEQ ID NO: 448108 - RNA, 19 nt, Artificial Sequence
  Description of Artificial Sequence: Synthetic oligonucleotide
  Antisense Strand to SEQ ID NO: 448107
uuugguauccagauggcgg

SEQ ID NO: 448109 - RNA, 19 nt, Artificial Sequence
  Description of Artificial Sequence: Synthetic oligonucleotide
  Sense strand starting at position 1733 of SEQ ID NO: 316889
gcguauuauguuguacgua

SEQ ID NO: 448110 - RNA, 19 nt, Artificial Sequence
  Description of Artificial Sequence: Synthetic oligonucleotide
  Antisense Strand to SEQ ID NO: 448109
uacguacaacauaauacgc

SEQ ID NO: 448111 - RNA, 19 nt, Artificial Sequence
  Description of Artificial Sequence: Synthetic oligonucleotide
  Sense strand starting at position 1738 of SEQ ID NO: 316889
uuauguuguacguacagga

SEQ ID NO: 448112 - RNA, 19 nt, Artificial Sequence
  Description of Artificial Sequence: Synthetic oligonucleotide
  Antisense Strand to SEQ ID NO: 448111
uccuguacguacaacauaa

SEQ ID NO: 448113 - RNA, 19 nt, Artificial Sequence
  Description of Artificial Sequence: Synthetic oligonucleotide
  Sense strand starting at position 1871 of SEQ ID NO: 316889
gaguguuuaccuggaccug

SEQ ID NO: 448114 - RNA, 19 nt, Artificial Sequence
  Description of Artificial Sequence: Synthetic oligonucleotide
  Antisense Strand to SEQ ID NO: 448113
cagguccagguaaacacuc

SEQ ID NO: 448115 - RNA, 19 nt, Artificial Sequence
  Description of Artificial Sequence: Synthetic oligonucleotide
  Sense strand starting at position 2347 of SEQ ID NO: 316889
ugaauagauuucuaaaggu

SEQ ID NO: 448116 - RNA, 19 nt, Artificial Sequence
  Description of Artificial Sequence: Synthetic oligonucleotide
  Antisense Strand to SEQ ID NO: 448115
accuuuagaaaucuauuca

SEQ ID NO: 448117 - RNA, 19 nt, Artificial Sequence
  Description of Artificial Sequence: Synthetic oligonucleotide
  Sense strand starting at position 2521 of SEQ ID NO: 316889
ucacuucuagcagacaagu

SEQ ID NO: 448118 - RNA, 19 nt, Artificial Sequence
  Description of Artificial Sequence: Synthetic oligonucleotide
  Antisense Strand to SEQ ID NO: 448117
acuugucugcuagaaguga

SEQ ID NO: 448119 - RNA, 19 nt, Artificial Sequence
  Description of Artificial Sequence: Synthetic oligonucleotide
  Sense strand starting at position 2625 of SEQ ID NO: 316889
acuucugaguguuucugau

SEQ ID NO: 448120 - RNA, 19 nt, Artificial Sequence
  Description of Artificial Sequence: Synthetic oligonucleotide
  Antisense Strand to SEQ ID NO: 448119
aucagaaacacucagaagu

SEQ ID NO: 448121 - RNA, 19 nt, Artificial Sequence
  Description of Artificial Sequence: Synthetic oligonucleotide
  Sense strand starting at position 2627 of SEQ ID NO: 316889
uucugaguguuucugauuu

SEQ ID NO: 448122 - RNA, 19 nt, Artificial Sequence
  Description of Artificial Sequence: Synthetic oligonucleotide
  Antisense Strand to SEQ ID NO: 448121
aaaucagaaacacucagaa

SEQ ID NO: 448123 - RNA, 19 nt, Artificial Sequence
  Description of Artificial Sequence: Synthetic oligonucleotide
  Sense strand starting at position 2658 of SEQ ID NO: 316889
ugguucugcuacuuaauaa

SEQ ID NO: 448124 - RNA, 19 nt, Artificial Sequence
  Description of Artificial Sequence: Synthetic oligonucleotide
  Antisense Strand to SEQ ID NO: 448123
uuauuaaguagcagaacca

SEQ ID NO: 448125 - RNA, 19 nt, Artificial Sequence
  Description of Artificial Sequence: Synthetic oligonucleotide
  Sense strand starting at position 2720 of SEQ ID NO: 316889
uuaauuaccuggccugaaa

SEQ ID NO: 448126 - RNA, 19 nt, Artificial Sequence
  Description of Artificial Sequence: Synthetic oligonucleotide
  Antisense Strand to SEQ ID NO: 448125
uuucaggccagguaauuaa

SEQ ID NO: 448127 - RNA, 19 nt, Artificial Sequence
  Description of Artificial Sequence: Synthetic oligonucleotide
  Sense strand starting at position 2907 of SEQ ID NO: 316889
agagcuguugugaguuagu

SEQ ID NO: 448128 - RNA, 19 nt, Artificial Sequence
  Description of Artificial Sequence: Synthetic oligonucleotide
  Antisense Strand to SEQ ID NO: 448127
acuaacucacaacagcucu

SEQ ID NO: 448129 - RNA, 19 nt, Artificial Sequence
  Description of Artificial Sequence: Synthetic oligonucleotide
  Sense strand starting at position 2914 of SEQ ID NO: 316889
uugugaguuaguuaaugga

SEQ ID NO: 448130 - RNA, 19 nt, Artificial Sequence
  Description of Artificial Sequence: Synthetic oligonucleotide
  Antisense Strand to SEQ ID NO: 448129
uccauuaacuaacucacaa

SEQ ID NO: 448131 - RNA, 19 nt, Artificial Sequence
  Description of Artificial Sequence: Synthetic oligonucleotide
  Sense strand starting at position 2929 of SEQ ID NO: 316889
uggagaaagcuauguaggu

SEQ ID NO: 448132 - RNA, 19 nt, Artificial Sequence
  Description of Artificial Sequence: Synthetic oligonucleotide
  Antisense Strand to SEQ ID NO: 448131
accuacauagcuuucucca

SEQ ID NO: 448133 - RNA, 19 nt, Artificial Sequence
  Description of Artificial Sequence: Synthetic oligonucleotide
  Sense strand starting at position 2930 of SEQ ID NO: 316889
ggagaaagcuauguaggua

SEQ ID NO: 448134 - RNA, 19 nt, Artificial Sequence
  Description of Artificial Sequence: Synthetic oligonucleotide
  Antisense Strand to SEQ ID NO: 448133
uaccuacauagcuuucucc

SEQ ID NO: 448135 - RNA, 19 nt, Artificial Sequence
  Description of Artificial Sequence: Synthetic oligonucleotide
  Sense strand starting at position 2933 of SEQ ID NO: 316889
gaaagcuauguagguaauc

SEQ ID NO: 448136 - RNA, 19 nt, Artificial Sequence
  Description of Artificial Sequence: Synthetic oligonucleotide
  Antisense Strand to SEQ ID NO: 448135
gauuaccuacauagcuuuc

SEQ ID NO: 448137 - RNA, 19 nt, Artificial Sequence
  Description of Artificial Sequence: Synthetic oligonucleotide
  Sense strand starting at position 2934 of SEQ ID NO: 316889
aaagcuauguagguaauca

SEQ ID NO: 448138 - RNA, 19 nt, Artificial Sequence
  Description of Artificial Sequence: Synthetic oligonucleotide
  Antisense Strand to SEQ ID NO: 448137
ugauuaccuacauagcuuu

SEQ ID NO: 448139 - RNA, 19 nt, Artificial Sequence
  Description of Artificial Sequence: Synthetic oligonucleotide
  Sense strand starting at position 2938 of SEQ ID NO: 316889
cuauguagguaaucauuau

SEQ ID NO: 448140 - RNA, 19 nt, Artificial Sequence
  Description of Artificial Sequence: Synthetic oligonucleotide
  Antisense Strand to SEQ ID NO: 448139
auaaugauuaccuacauag

SEQ ID NO: 448141 - RNA, 19 nt, Artificial Sequence
  Description of Artificial Sequence: Synthetic oligonucleotide
  Sense strand starting at position 2984 of SEQ ID NO: 316889
cuuugauauuaguccgauu

SEQ ID NO: 448142 - RNA, 19 nt, Artificial Sequence
  Description of Artificial Sequence: Synthetic oligonucleotide
  Antisense Strand to SEQ ID NO: 448141
aaucggacuaauaucaaag

SEQ ID NO: 448143 - RNA, 19 nt, Artificial Sequence
  Description of Artificial Sequence: Synthetic oligonucleotide
  Sense strand starting at position 3035 of SEQ ID NO: 316889
aggguuucuguagaaauuc

SEQ ID NO: 448144 - RNA, 19 nt, Artificial Sequence
  Description of Artificial Sequence: Synthetic oligonucleotide
  Antisense Strand to SEQ ID NO: 448143
gaauuucuacagaaacccu

SEQ ID NO: 448145 - RNA, 19 nt, Artificial Sequence
  Description of Artificial Sequence: Synthetic oligonucleotide
  Sense strand starting at position 3043 of SEQ ID NO: 316889
uguagaaauucugugagaa

SEQ ID NO: 448146 - RNA, 19 nt, Artificial Sequence
  Description of Artificial Sequence: Synthetic oligonucleotide
  Antisense Strand to SEQ ID NO: 448145
uucucacagaauuucuaca

SEQ ID NO: 448147 - RNA, 19 nt, Artificial Sequence
  Description of Artificial Sequence: Synthetic oligonucleotide
  Sense strand starting at position 3044 of SEQ ID NO: 316889
guagaaauucugugagaac

SEQ ID NO: 448148 - RNA, 19 nt, Artificial Sequence
  Description of Artificial Sequence: Synthetic oligonucleotide
  Antisense Strand to SEQ ID NO: 448147
guucucacagaauuucuac

SEQ ID NO: 448149 - RNA, 19 nt, Artificial Sequence
  Description of Artificial Sequence: Synthetic oligonucleotide
  Sense strand starting at position 3074 of SEQ ID NO: 316889
uaugguuaucuaggcugaa

SEQ ID NO: 448150 - RNA, 19 nt, Artificial Sequence
  Description of Artificial Sequence: Synthetic oligonucleotide
  Antisense Strand to SEQ ID NO: 448149
uucagccuagauaaccaua

SEQ ID NO: 448151 - RNA, 19 nt, Artificial Sequence
  Description of Artificial Sequence: Synthetic oligonucleotide
  Sense strand starting at position 3075 of SEQ ID NO: 316889
augguuaucuaggcugaau

SEQ ID NO: 448152 - RNA, 19 nt, Artificial Sequence
  Description of Artificial Sequence: Synthetic oligonucleotide
  Antisense Strand to SEQ ID NO: 448151
auucagccuagauaaccau

SEQ ID NO: 448153 - RNA, 19 nt, Artificial Sequence
  Description of Artificial Sequence: Synthetic oligonucleotide
  Sense strand starting at position 3078 of SEQ ID NO: 316889
guuaucuaggcugaaugga

SEQ ID NO: 448154 - RNA, 19 nt, Artificial Sequence
  Description of Artificial Sequence: Synthetic oligonucleotide
  Antisense Strand to SEQ ID NO: 448153
uccauucagccuagauaac

SEQ ID NO: 448155 - RNA, 19 nt, Artificial Sequence
  Description of Artificial Sequence: Synthetic oligonucleotide
  Sense strand starting at position 3093 of SEQ ID NO: 316889
uggaguccugcaggaauga

SEQ ID NO: 448156 - RNA, 19 nt, Artificial Sequence
  Description of Artificial Sequence: Synthetic oligonucleotide
  Antisense Strand to SEQ ID NO: 448155
ucauuccugcaggacucca

SEQ ID NO: 448157 - RNA, 19 nt, Artificial Sequence
  Description of Artificial Sequence: Synthetic oligonucleotide
  Sense strand starting at position 3094 of SEQ ID NO: 316889
ggaguccugcaggaaugau

SEQ ID NO: 448158 - RNA, 19 nt, Artificial Sequence
  Description of Artificial Sequence: Synthetic oligonucleotide
  Antisense Strand to SEQ ID NO: 448157
aucauuccugcaggacucc

SEQ ID NO: 448159 - RNA, 19 nt, Artificial Sequence
  Description of Artificial Sequence: Synthetic oligonucleotide
  Sense strand starting at position 3104 of SEQ ID NO: 316889
aggaaugauuuguaacaau

SEQ ID NO: 448160 - RNA, 19 nt, Artificial Sequence
  Description of Artificial Sequence: Synthetic oligonucleotide
  Antisense Strand to SEQ ID NO: 448159
auuguuacaaaucauuccu

SEQ ID NO: 448161 - RNA, 19 nt, Artificial Sequence
  Description of Artificial Sequence: Synthetic oligonucleotide
  Sense strand starting at position 189 of SEQ ID NO: 316890
ugcuuaacagauugugaaa

SEQ ID NO: 448162 - RNA, 19 nt, Artificial Sequence
  Description of Artificial Sequence: Synthetic oligonucleotide
  Antisense Strand to SEQ ID NO: 448161
uuucacaaucuguuaagca

SEQ ID NO: 448163 - RNA, 19 nt, Artificial Sequence
  Description of Artificial Sequence: Synthetic oligonucleotide
  Sense strand starting at position 192 of SEQ ID NO: 316890
uuaacagauugugaaauuc

SEQ ID NO: 448164 - RNA, 19 nt, Artificial Sequence
  Description of Artificial Sequence: Synthetic oligonucleotide
  Antisense Strand to SEQ ID NO: 448163
gaauuucacaaucuguuaa

SEQ ID NO: 448165 - RNA, 19 nt, Artificial Sequence
  Description of Artificial Sequence: Synthetic oligonucleotide
  Sense strand starting at position 604 of SEQ ID NO: 316890
ucccaaugcaccggugaaa

SEQ ID NO: 448166 - RNA, 19 nt, Artificial Sequence
  Description of Artificial Sequence: Synthetic oligonucleotide
  Antisense Strand to SEQ ID NO: 448165
uuucaccggugcauuggga

SEQ ID NO: 448167 - RNA, 19 nt, Artificial Sequence
  Description of Artificial Sequence: Synthetic oligonucleotide
  Sense strand starting at position 700 of SEQ ID NO: 316890
guuuccugugcacaucauu

SEQ ID NO: 448168 - RNA, 19 nt, Artificial Sequence
  Description of Artificial Sequence: Synthetic oligonucleotide
  Antisense Strand to SEQ ID NO: 448167
aaugaugugcacaggaaac

SEQ ID NO: 448169 - RNA, 19 nt, Artificial Sequence
  Description of Artificial Sequence: Synthetic oligonucleotide
  Sense strand starting at position 715 of SEQ ID NO: 316890
cauugcaugugagcaacua

SEQ ID NO: 448170 - RNA, 19 nt, Artificial Sequence
  Description of Artificial Sequence: Synthetic oligonucleotide
  Antisense Strand to SEQ ID NO: 448169
uaguugcucacaugcaaug

SEQ ID NO: 448171 - RNA, 19 nt, Artificial Sequence
  Description of Artificial Sequence: Synthetic oligonucleotide
  Sense strand starting at position 723 of SEQ ID NO: 316890
gugagcaacuaccucuaua

SEQ ID NO: 448172 - RNA, 19 nt, Artificial Sequence
  Description of Artificial Sequence: Synthetic oligonucleotide
  Antisense Strand to SEQ ID NO: 448171
uauagagguaguugcucac

SEQ ID NO: 448173 - RNA, 19 nt, Artificial Sequence
  Description of Artificial Sequence: Synthetic oligonucleotide
  Sense strand starting at position 779 of SEQ ID NO: 316890
acuagaaaugcaugcacua

SEQ ID NO: 448174 - RNA, 19 nt, Artificial Sequence
  Description of Artificial Sequence: Synthetic oligonucleotide
  Antisense Strand to SEQ ID NO: 448173
uagugcaugcauuucuagu

SEQ ID NO: 448175 - RNA, 19 nt, Artificial Sequence
  Description of Artificial Sequence: Synthetic oligonucleotide
  Sense strand starting at position 937 of SEQ ID NO: 316890
gagugugacccucaaaguc

SEQ ID NO: 448176 - RNA, 19 nt, Artificial Sequence
  Description of Artificial Sequence: Synthetic oligonucleotide
  Antisense Strand to SEQ ID NO: 448175
gacuuugagggucacacuc

SEQ ID NO: 448177 - RNA, 19 nt, Artificial Sequence
  Description of Artificial Sequence: Synthetic oligonucleotide
  Sense strand starting at position 1124 of SEQ ID NO: 316890
cuacaauugucugaaagaa

SEQ ID NO: 448178 - RNA, 19 nt, Artificial Sequence
  Description of Artificial Sequence: Synthetic oligonucleotide
  Antisense Strand to SEQ ID NO: 448177
uucuuucagacaauuguag

SEQ ID NO: 448179 - RNA, 19 nt, Artificial Sequence
  Description of Artificial Sequence: Synthetic oligonucleotide
  Sense strand starting at position 1194 of SEQ ID NO: 316890
guuucuaaacaaugucagu

SEQ ID NO: 448180 - RNA, 19 nt, Artificial Sequence
  Description of Artificial Sequence: Synthetic oligonucleotide
  Antisense Strand to SEQ ID NO: 448179
acugacauuguuuagaaac

SEQ ID NO: 448181 - RNA, 19 nt, Artificial Sequence
  Description of Artificial Sequence: Synthetic oligonucleotide
  Sense strand starting at position 1332 of SEQ ID NO: 316890
gcgacaggaggguguuuaa

SEQ ID NO: 448182 - RNA, 19 nt, Artificial Sequence
  Description of Artificial Sequence: Synthetic oligonucleotide
  Antisense Strand to SEQ ID NO: 448181
uuaaacacccuccugucgc

SEQ ID NO: 448183 - RNA, 19 nt, Artificial Sequence
  Description of Artificial Sequence: Synthetic oligonucleotide
  Sense strand starting at position 1344 of SEQ ID NO: 316890
uguuuaaagcagcaucaau

SEQ ID NO: 448184 - RNA, 19 nt, Artificial Sequence
  Description of Artificial Sequence: Synthetic oligonucleotide
  Antisense Strand to SEQ ID NO: 448183
auugaugcugcuuuaaaca

SEQ ID NO: 448185 - RNA, 19 nt, Artificial Sequence
  Description of Artificial Sequence: Synthetic oligonucleotide
  Sense strand starting at position 1476 of SEQ ID NO: 316890
aggaguucgaucuguaaug

SEQ ID NO: 448186 - RNA, 19 nt, Artificial Sequence
  Description of Artificial Sequence: Synthetic oligonucleotide
  Antisense Strand to SEQ ID NO: 448185
cauuacagaucgaacuccu

SEQ ID NO: 448187 - RNA, 19 nt, Artificial Sequence
  Description of Artificial Sequence: Synthetic oligonucleotide
  Sense strand starting at position 1478 of SEQ ID NO: 316890
gaguucgaucuguaaugga

SEQ ID NO: 448188 - RNA, 19 nt, Artificial Sequence
  Description of Artificial Sequence: Synthetic oligonucleotide
  Antisense Strand to SEQ ID NO: 448187
uccauuacagaucgaacuc

SEQ ID NO: 448189 - RNA, 19 nt, Artificial Sequence
  Description of Artificial Sequence: Synthetic oligonucleotide
  Sense strand starting at position 1482 of SEQ ID NO: 316890
ucgaucuguaauggacuga

SEQ ID NO: 448190 - RNA, 19 nt, Artificial Sequence
  Description of Artificial Sequence: Synthetic oligonucleotide
  Antisense Strand to SEQ ID NO: 448189
ucaguccauuacagaucga

SEQ ID NO: 448191 - RNA, 19 nt, Artificial Sequence
  Description of Artificial Sequence: Synthetic oligonucleotide
  Sense strand starting at position 1486 of SEQ ID NO: 316890
ucuguaauggacugaacaa

SEQ ID NO: 448192 - RNA, 19 nt, Artificial Sequence
  Description of Artificial Sequence: Synthetic oligonucleotide
  Antisense Strand to SEQ ID NO: 448191
uuguucaguccauuacaga

SEQ ID NO: 448193 - RNA, 19 nt, Artificial Sequence
  Description of Artificial Sequence: Synthetic oligonucleotide
  Sense strand starting at position 1567 of SEQ ID NO: 316890
ccauccguacugggagaua

SEQ ID NO: 448194 - RNA, 19 nt, Artificial Sequence
  Description of Artificial Sequence: Synthetic oligonucleotide
  Antisense Strand to SEQ ID NO: 448193
uaucucccaguacggaugg

SEQ ID NO: 448195 - RNA, 19 nt, Artificial Sequence
  Description of Artificial Sequence: Synthetic oligonucleotide
  Sense strand starting at position 1570 of SEQ ID NO: 316890
uccguacugggagauagau

SEQ ID NO: 448196 - RNA, 19 nt, Artificial Sequence
  Description of Artificial Sequence: Synthetic oligonucleotide
  Antisense Strand to SEQ ID NO: 448195
aucuaucucccaguacgga

SEQ ID NO: 448197 - RNA, 19 nt, Artificial Sequence
  Description of Artificial Sequence: Synthetic oligonucleotide
  Sense strand starting at position 1595 of SEQ ID NO: 316890
agaaacaucaagugugagu

SEQ ID NO: 448198 - RNA, 19 nt, Artificial Sequence
  Description of Artificial Sequence: Synthetic oligonucleotide
  Antisense Strand to SEQ ID NO: 448197
acucacacuugauguuucu

SEQ ID NO: 448199 - RNA, 19 nt, Artificial Sequence
  Description of Artificial Sequence: Synthetic oligonucleotide
  Sense strand starting at position 1608 of SEQ ID NO: 316890
gugagucugguuugaguuu

SEQ ID NO: 448200 - RNA, 19 nt, Artificial Sequence
  Description of Artificial Sequence: Synthetic oligonucleotide
  Antisense Strand to SEQ ID NO: 448199
aaacucaaaccagacucac

SEQ ID NO: 448201 - RNA, 19 nt, Artificial Sequence
  Description of Artificial Sequence: Synthetic oligonucleotide
  Sense strand starting at position 1637 of SEQ ID NO: 316890
gugcuuuagaguuauggaa

SEQ ID NO: 448202 - RNA, 19 nt, Artificial Sequence
  Description of Artificial Sequence: Synthetic oligonucleotide
  Antisense Strand to SEQ ID NO: 448201
uuccauaacucuaaagcac

SEQ ID NO: 448203 - RNA, 19 nt, Artificial Sequence
  Description of Artificial Sequence: Synthetic oligonucleotide
  Sense strand starting at position 1741 of SEQ ID NO: 316890
ccgcgacugcgcucagauu

SEQ ID NO: 448204 - RNA, 19 nt, Artificial Sequence
  Description of Artificial Sequence: Synthetic oligonucleotide
  Antisense Strand to SEQ ID NO: 448203
aaucugagcgcagucgcgg

SEQ ID NO: 448205 - RNA, 19 nt, Artificial Sequence
  Description of Artificial Sequence: Synthetic oligonucleotide
  Sense strand starting at position 2815 of SEQ ID NO: 316890
gcaccugcacagugugaau

SEQ ID NO: 448206 - RNA, 19 nt, Artificial Sequence
  Description of Artificial Sequence: Synthetic oligonucleotide
  Antisense Strand to SEQ ID NO: 448205
auucacacugugcaggugc

SEQ ID NO: 448207 - RNA, 19 nt, Artificial Sequence
  Description of Artificial Sequence: Synthetic oligonucleotide
  Sense strand starting at position 2817 of SEQ ID NO: 316890
accugcacagugugaauua

SEQ ID NO: 448208 - RNA, 19 nt, Artificial Sequence
  Description of Artificial Sequence: Synthetic oligonucleotide
  Antisense Strand to SEQ ID NO: 448207
uaauucacacugugcaggu

SEQ ID NO: 448209 - RNA, 19 nt, Artificial Sequence
  Description of Artificial Sequence: Synthetic oligonucleotide
  Sense strand starting at position 2830 of SEQ ID NO: 316890
gaauuaggcccucgcucau

SEQ ID NO: 448210 - RNA, 19 nt, Artificial Sequence
  Description of Artificial Sequence: Synthetic oligonucleotide
  Antisense Strand to SEQ ID NO: 448209
augagcgagggccuaauuc

SEQ ID NO: 448211 - RNA, 19 nt, Artificial Sequence
  Description of Artificial Sequence: Synthetic oligonucleotide
  Sense strand starting at position 3186 of SEQ ID NO: 316890
uggagauuccacugaggua

SEQ ID NO: 448212 - RNA, 19 nt, Artificial Sequence
  Description of Artificial Sequence: Synthetic oligonucleotide
  Antisense Strand to SEQ ID NO: 448211
uaccucaguggaaucucca

SEQ ID NO: 448213 - RNA, 19 nt, Artificial Sequence
  Description of Artificial Sequence: Synthetic oligonucleotide
  Sense strand starting at position 3367 of SEQ ID NO: 316890
ggguggucugacgggagaa

SEQ ID NO: 448214 - RNA, 19 nt, Artificial Sequence
  Description of Artificial Sequence: Synthetic oligonucleotide
  Antisense Strand to SEQ ID NO: 448213
uucucccgucagaccaccc

SEQ ID NO: 448215 - RNA, 19 nt, Artificial Sequence
  Description of Artificial Sequence: Synthetic oligonucleotide
  Sense strand starting at position 3368 of SEQ ID NO: 316890
gguggucugacgggagaaa

SEQ ID NO: 448216 - RNA, 19 nt, Artificial Sequence
  Description of Artificial Sequence: Synthetic oligonucleotide
  Antisense Strand to SEQ ID NO: 448215
uuucucccgucagaccacc

SEQ ID NO: 448217 - RNA, 19 nt, Artificial Sequence
  Description of Artificial Sequence: Synthetic oligonucleotide
  Sense strand starting at position 3482 of SEQ ID NO: 316890
gggaauaggcuauggguga

SEQ ID NO: 448218 - RNA, 19 nt, Artificial Sequence
  Description of Artificial Sequence: Synthetic oligonucleotide
  Antisense Strand to SEQ ID NO: 448217
ucacccauagccuauuccc

SEQ ID NO: 448219 - RNA, 19 nt, Artificial Sequence
  Description of Artificial Sequence: Synthetic oligonucleotide
  Sense strand starting at position 3654 of SEQ ID NO: 316890
gccucaccugucuggaaga

SEQ ID NO: 448220 - RNA, 19 nt, Artificial Sequence
  Description of Artificial Sequence: Synthetic oligonucleotide
  Antisense Strand to SEQ ID NO: 448219
ucuuccagacaggugaggc

SEQ ID NO: 448221 - RNA, 19 nt, Artificial Sequence
  Description of Artificial Sequence: Synthetic oligonucleotide
  Sense strand starting at position 3656 of SEQ ID NO: 316890
cucaccugucuggaagagu

SEQ ID NO: 448222 - RNA, 19 nt, Artificial Sequence
  Description of Artificial Sequence: Synthetic oligonucleotide
  Antisense Strand to SEQ ID NO: 448221
acucuuccagacaggugag

SEQ ID NO: 448223 - RNA, 19 nt, Artificial Sequence
  Description of Artificial Sequence: Synthetic oligonucleotide
  Sense strand starting at position 3797 of SEQ ID NO: 316890
agacaagugucuuugugac

SEQ ID NO: 448224 - RNA, 19 nt, Artificial Sequence
  Description of Artificial Sequence: Synthetic oligonucleotide
  Antisense Strand to SEQ ID NO: 448223
gucacaaagacacuugucu

SEQ ID NO: 448225 - RNA, 19 nt, Artificial Sequence
  Description of Artificial Sequence: Synthetic oligonucleotide
  Sense strand starting at position 3799 of SEQ ID NO: 316890
acaagugucuuugugacau

SEQ ID NO: 448226 - RNA, 19 nt, Artificial Sequence
  Description of Artificial Sequence: Synthetic oligonucleotide
  Antisense Strand to SEQ ID NO: 448225
augucacaaagacacuugu

SEQ ID NO: 448227 - RNA, 19 nt, Artificial Sequence
  Description of Artificial Sequence: Synthetic oligonucleotide
  Sense strand starting at position 3805 of SEQ ID NO: 316890
gucuuugugacauggacca

SEQ ID NO: 448228 - RNA, 19 nt, Artificial Sequence
  Description of Artificial Sequence: Synthetic oligonucleotide
  Antisense Strand to SEQ ID NO: 448227
ugguccaugucacaaagac

SEQ ID NO: 448229 - RNA, 19 nt, Artificial Sequence
  Description of Artificial Sequence: Synthetic oligonucleotide
  Sense strand starting at position 3951 of SEQ ID NO: 316890
aaacgucagagcuguguga

SEQ ID NO: 448230 - RNA, 19 nt, Artificial Sequence
  Description of Artificial Sequence: Synthetic oligonucleotide
  Antisense Strand to SEQ ID NO: 448229
ucacacagcucugacguuu

SEQ ID NO: 448231 - RNA, 19 nt, Artificial Sequence
  Description of Artificial Sequence: Synthetic oligonucleotide
  Sense strand starting at position 3955 of SEQ ID NO: 316890
gucagagcugugugacuga

SEQ ID NO: 448232 - RNA, 19 nt, Artificial Sequence
  Description of Artificial Sequence: Synthetic oligonucleotide
  Antisense Strand to SEQ ID NO: 448231
ucagucacacagcucugac

SEQ ID NO: 448233 - RNA, 19 nt, Artificial Sequence
  Description of Artificial Sequence: Synthetic oligonucleotide
  Sense strand starting at position 3958 of SEQ ID NO: 316890
agagcugugugacugauua

SEQ ID NO: 448234 - RNA, 19 nt, Artificial Sequence
  Description of Artificial Sequence: Synthetic oligonucleotide
  Antisense Strand to SEQ ID NO: 448233
uaaucagucacacagcucu

SEQ ID NO: 448235 - RNA, 19 nt, Artificial Sequence
  Description of Artificial Sequence: Synthetic oligonucleotide
  Sense strand starting at position 3960 of SEQ ID NO: 316890
agcugugugacugauuaac

SEQ ID NO: 448236 - RNA, 19 nt, Artificial Sequence
  Description of Artificial Sequence: Synthetic oligonucleotide
  Antisense Strand to SEQ ID NO: 448235
guuaaucagucacacagcu

SEQ ID NO: 448237 - RNA, 19 nt, Artificial Sequence
  Description of Artificial Sequence: Synthetic oligonucleotide
  Sense strand starting at position 3962 of SEQ ID NO: 316890
cugugugacugauuaacuu

SEQ ID NO: 448238 - RNA, 19 nt, Artificial Sequence
  Description of Artificial Sequence: Synthetic oligonucleotide
  Antisense Strand to SEQ ID NO: 448237
aaguuaaucagucacacag

SEQ ID NO: 448239 - RNA, 19 nt, Artificial Sequence
  Description of Artificial Sequence: Synthetic oligonucleotide
  Sense strand starting at position 3966 of SEQ ID NO: 316890
gugacugauuaacuuauau

SEQ ID NO: 448240 - RNA, 19 nt, Artificial Sequence
  Description of Artificial Sequence: Synthetic oligonucleotide
  Antisense Strand to SEQ ID NO: 448239
auauaaguuaaucagucac

SEQ ID NO: 448241 - RNA, 19 nt, Artificial Sequence
  Description of Artificial Sequence: Synthetic oligonucleotide
  Sense strand starting at position 282 of SEQ ID NO: 316891
ucccaaugcaccggugaaa

SEQ ID NO: 448242 - RNA, 19 nt, Artificial Sequence
  Description of Artificial Sequence: Synthetic oligonucleotide
  Antisense Strand to SEQ ID NO: 448241
uuucaccggugcauuggga

SEQ ID NO: 448243 - RNA, 19 nt, Artificial Sequence
  Description of Artificial Sequence: Synthetic oligonucleotide
  Sense strand starting at position 378 of SEQ ID NO: 316891
guuuccugugcacaucauu

SEQ ID NO: 448244 - RNA, 19 nt, Artificial Sequence
  Description of Artificial Sequence: Synthetic oligonucleotide
  Antisense Strand to SEQ ID NO: 448243
aaugaugugcacaggaaac

SEQ ID NO: 448245 - RNA, 19 nt, Artificial Sequence
  Description of Artificial Sequence: Synthetic oligonucleotide
  Sense strand starting at position 393 of SEQ ID NO: 316891
cauugcaugugagcaacua

SEQ ID NO: 448246 - RNA, 19 nt, Artificial Sequence
  Description of Artificial Sequence: Synthetic oligonucleotide
  Antisense Strand to SEQ ID NO: 448245
uaguugcucacaugcaaug

SEQ ID NO: 448247 - RNA, 19 nt, Artificial Sequence
  Description of Artificial Sequence: Synthetic oligonucleotide
  Sense strand starting at position 401 of SEQ ID NO: 316891
gugagcaacuaccucuaua

SEQ ID NO: 448248 - RNA, 19 nt, Artificial Sequence
  Description of Artificial Sequence: Synthetic oligonucleotide
  Antisense Strand to SEQ ID NO: 448247
uauagagguaguugcucac

SEQ ID NO: 448249 - RNA, 19 nt, Artificial Sequence
  Description of Artificial Sequence: Synthetic oligonucleotide
  Sense strand starting at position 457 of SEQ ID NO: 316891
acuagaaaugcaugcacua

SEQ ID NO: 448250 - RNA, 19 nt, Artificial Sequence
  Description of Artificial Sequence: Synthetic oligonucleotide
  Antisense Strand to SEQ ID NO: 448249
uagugcaugcauuucuagu

SEQ ID NO: 448251 - RNA, 19 nt, Artificial Sequence
  Description of Artificial Sequence: Synthetic oligonucleotide
  Sense strand starting at position 615 of SEQ ID NO: 316891
gagugugacccucaaaguc

SEQ ID NO: 448252 - RNA, 19 nt, Artificial Sequence
  Description of Artificial Sequence: Synthetic oligonucleotide
  Antisense Strand to SEQ ID NO: 448251
gacuuugagggucacacuc

SEQ ID NO: 448253 - RNA, 19 nt, Artificial Sequence
  Description of Artificial Sequence: Synthetic oligonucleotide
  Sense strand starting at position 802 of SEQ ID NO: 316891
cuacaauugucugaaagaa

SEQ ID NO: 448254 - RNA, 19 nt, Artificial Sequence
  Description of Artificial Sequence: Synthetic oligonucleotide
  Antisense Strand to SEQ ID NO: 448253
uucuuucagacaauuguag

SEQ ID NO: 448255 - RNA, 19 nt, Artificial Sequence
  Description of Artificial Sequence: Synthetic oligonucleotide
  Sense strand starting at position 872 of SEQ ID NO: 316891
guuucuaaacaaugucagu

SEQ ID NO: 448256 - RNA, 19 nt, Artificial Sequence
  Description of Artificial Sequence: Synthetic oligonucleotide
  Antisense Strand to SEQ ID NO: 448255
acugacauuguuuagaaac

SEQ ID NO: 448257 - RNA, 19 nt, Artificial Sequence
  Description of Artificial Sequence: Synthetic oligonucleotide
  Sense strand starting at position 1010 of SEQ ID NO: 316891
gcgacaggaggguguuuaa

SEQ ID NO: 448258 - RNA, 19 nt, Artificial Sequence
  Description of Artificial Sequence: Synthetic oligonucleotide
  Antisense Strand to SEQ ID NO: 448257
uuaaacacccuccugucgc

SEQ ID NO: 448259 - RNA, 19 nt, Artificial Sequence
  Description of Artificial Sequence: Synthetic oligonucleotide
  Sense strand starting at position 1022 of SEQ ID NO: 316891
uguuuaaagcagcaucaau

SEQ ID NO: 448260 - RNA, 19 nt, Artificial Sequence
  Description of Artificial Sequence: Synthetic oligonucleotide
  Antisense Strand to SEQ ID NO: 448259
auugaugcugcuuuaaaca

SEQ ID NO: 448261 - RNA, 19 nt, Artificial Sequence
  Description of Artificial Sequence: Synthetic oligonucleotide
  Sense strand starting at position 1154 of SEQ ID NO: 316891
aggaguucgaucuguaaug

SEQ ID NO: 448262 - RNA, 19 nt, Artificial Sequence
  Description of Artificial Sequence: Synthetic oligonucleotide
  Antisense Strand to SEQ ID NO: 448261
cauuacagaucgaacuccu

SEQ ID NO: 448263 - RNA, 19 nt, Artificial Sequence
  Description of Artificial Sequence: Synthetic oligonucleotide
  Sense strand starting at position 1156 of SEQ ID NO: 316891
gaguucgaucuguaaugga

SEQ ID NO: 448264 - RNA, 19 nt, Artificial Sequence
  Description of Artificial Sequence: Synthetic oligonucleotide
  Antisense Strand to SEQ ID NO: 448263
uccauuacagaucgaacuc

SEQ ID NO: 448265 - RNA, 19 nt, Artificial Sequence
  Description of Artificial Sequence: Synthetic oligonucleotide
  Sense strand starting at position 1160 of SEQ ID NO: 316891
ucgaucuguaauggacuga

SEQ ID NO: 448266 - RNA, 19 nt, Artificial Sequence
  Description of Artificial Sequence: Synthetic oligonucleotide
  Antisense Strand to SEQ ID NO: 448265
ucaguccauuacagaucga

SEQ ID NO: 448267 - RNA, 19 nt, Artificial Sequence
  Description of Artificial Sequence: Synthetic oligonucleotide
  Sense strand starting at position 1164 of SEQ ID NO: 316891
ucuguaauggacugaacaa

SEQ ID NO: 448268 - RNA, 19 nt, Artificial Sequence
  Description of Artificial Sequence: Synthetic oligonucleotide
  Antisense Strand to SEQ ID NO: 448267
uuguucaguccauuacaga

SEQ ID NO: 448269 - RNA, 19 nt, Artificial Sequence
  Description of Artificial Sequence: Synthetic oligonucleotide
  Sense strand starting at position 1245 of SEQ ID NO: 316891
ccauccguacugggagaua

SEQ ID NO: 448270 - RNA, 19 nt, Artificial Sequence
  Description of Artificial Sequence: Synthetic oligonucleotide
  Antisense Strand to SEQ ID NO: 448269
uaucucccaguacggaugg

SEQ ID NO: 448271 - RNA, 19 nt, Artificial Sequence
  Description of Artificial Sequence: Synthetic oligonucleotide
  Sense strand starting at position 1248 of SEQ ID NO: 316891
uccguacugggagauagau

SEQ ID NO: 448272 - RNA, 19 nt, Artificial Sequence
  Description of Artificial Sequence: Synthetic oligonucleotide
  Antisense Strand to SEQ ID NO: 448271
aucuaucucccaguacgga

SEQ ID NO: 448273 - RNA, 19 nt, Artificial Sequence
  Description of Artificial Sequence: Synthetic oligonucleotide
  Sense strand starting at position 1273 of SEQ ID NO: 316891
agaaacaucaagugugagu

SEQ ID NO: 448274 - RNA, 19 nt, Artificial Sequence
  Description of Artificial Sequence: Synthetic oligonucleotide
  Antisense Strand to SEQ ID NO: 448273
acucacacuugauguuucu

SEQ ID NO: 448275 - RNA, 19 nt, Artificial Sequence
  Description of Artificial Sequence: Synthetic oligonucleotide
  Sense strand starting at position 1286 of SEQ ID NO: 316891
gugagucugguuugaguuu

SEQ ID NO: 448276 - RNA, 19 nt, Artificial Sequence
  Description of Artificial Sequence: Synthetic oligonucleotide
  Antisense Strand to SEQ ID NO: 448275
aaacucaaaccagacucac

SEQ ID NO: 448277 - RNA, 19 nt, Artificial Sequence
  Description of Artificial Sequence: Synthetic oligonucleotide
  Sense strand starting at position 1315 of SEQ ID NO: 316891
gugcuuuagaguuauggaa

SEQ ID NO: 448278 - RNA, 19 nt, Artificial Sequence
  Description of Artificial Sequence: Synthetic oligonucleotide
  Antisense Strand to SEQ ID NO: 448277
uuccauaacucuaaagcac

SEQ ID NO: 448279 - RNA, 19 nt, Artificial Sequence
  Description of Artificial Sequence: Synthetic oligonucleotide
  Sense strand starting at position 1419 of SEQ ID NO: 316891
ccgcgacugcgcucagauu

SEQ ID NO: 448280 - RNA, 19 nt, Artificial Sequence
  Description of Artificial Sequence: Synthetic oligonucleotide
  Antisense Strand to SEQ ID NO: 448279
aaucugagcgcagucgcgg

SEQ ID NO: 448281 - RNA, 19 nt, Artificial Sequence
  Description of Artificial Sequence: Synthetic oligonucleotide
  Sense strand starting at position 2493 of SEQ ID NO: 316891
gcaccugcacagugugaau

SEQ ID NO: 448282 - RNA, 19 nt, Artificial Sequence
  Description of Artificial Sequence: Synthetic oligonucleotide
  Antisense Strand to SEQ ID NO: 448281
auucacacugugcaggugc

SEQ ID NO: 448283 - RNA, 19 nt, Artificial Sequence
  Description of Artificial Sequence: Synthetic oligonucleotide
  Sense strand starting at position 2495 of SEQ ID NO: 316891
accugcacagugugaauua

SEQ ID NO: 448284 - RNA, 19 nt, Artificial Sequence
  Description of Artificial Sequence: Synthetic oligonucleotide
  Antisense Strand to SEQ ID NO: 448283
uaauucacacugugcaggu

SEQ ID NO: 448285 - RNA, 19 nt, Artificial Sequence
  Description of Artificial Sequence: Synthetic oligonucleotide
  Sense strand starting at position 2508 of SEQ ID NO: 316891
gaauuaggcccucgcucau

SEQ ID NO: 448286 - RNA, 19 nt, Artificial Sequence
  Description of Artificial Sequence: Synthetic oligonucleotide
  Antisense Strand to SEQ ID NO: 448285
augagcgagggccuaauuc

SEQ ID NO: 448287 - RNA, 19 nt, Artificial Sequence
  Description of Artificial Sequence: Synthetic oligonucleotide
  Sense strand starting at position 2864 of SEQ ID NO: 316891
uggagauuccacugaggua

SEQ ID NO: 448288 - RNA, 19 nt, Artificial Sequence
  Description of Artificial Sequence: Synthetic oligonucleotide
  Antisense Strand to SEQ ID NO: 448287
uaccucaguggaaucucca

SEQ ID NO: 448289 - RNA, 19 nt, Artificial Sequence
  Description of Artificial Sequence: Synthetic oligonucleotide
  Sense strand starting at position 3045 of SEQ ID NO: 316891
ggguggucugacgggagaa

SEQ ID NO: 448290 - RNA, 19 nt, Artificial Sequence
  Description of Artificial Sequence: Synthetic oligonucleotide
  Antisense Strand to SEQ ID NO: 448289
uucucccgucagaccaccc

SEQ ID NO: 448291 - RNA, 19 nt, Artificial Sequence
  Description of Artificial Sequence: Synthetic oligonucleotide
  Sense strand starting at position 3046 of SEQ ID NO: 316891
gguggucugacgggagaaa

SEQ ID NO: 448292 - RNA, 19 nt, Artificial Sequence
  Description of Artificial Sequence: Synthetic oligonucleotide
  Antisense Strand to SEQ ID NO: 448291
uuucucccgucagaccacc

SEQ ID NO: 448293 - RNA, 19 nt, Artificial Sequence
  Description of Artificial Sequence: Synthetic oligonucleotide
  Sense strand starting at position 3160 of SEQ ID NO: 316891
gggaauaggcuauggguga

SEQ ID NO: 448294 - RNA, 19 nt, Artificial Sequence
  Description of Artificial Sequence: Synthetic oligonucleotide
  Antisense Strand to SEQ ID NO: 448293
ucacccauagccuauuccc

SEQ ID NO: 448295 - RNA, 19 nt, Artificial Sequence
  Description of Artificial Sequence: Synthetic oligonucleotide
  Sense strand starting at position 3332 of SEQ ID NO: 316891
gccucaccugucuggaaga

SEQ ID NO: 448296 - RNA, 19 nt, Artificial Sequence
  Description of Artificial Sequence: Synthetic oligonucleotide
  Antisense Strand to SEQ ID NO: 448295
ucuuccagacaggugaggc

SEQ ID NO: 448297 - RNA, 19 nt, Artificial Sequence
  Description of Artificial Sequence: Synthetic oligonucleotide
  Sense strand starting at position 3334 of SEQ ID NO: 316891
cucaccugucuggaagagu

SEQ ID NO: 448298 - RNA, 19 nt, Artificial Sequence
  Description of Artificial Sequence: Synthetic oligonucleotide
  Antisense Strand to SEQ ID NO: 448297
acucuuccagacaggugag

SEQ ID NO: 448299 - RNA, 19 nt, Artificial Sequence
  Description of Artificial Sequence: Synthetic oligonucleotide
  Sense strand starting at position 3475 of SEQ ID NO: 316891
agacaagugucuuugugac

SEQ ID NO: 448300 - RNA, 19 nt, Artificial Sequence
  Description of Artificial Sequence: Synthetic oligonucleotide
  Antisense Strand to SEQ ID NO: 448299
gucacaaagacacuugucu

SEQ ID NO: 448301 - RNA, 19 nt, Artificial Sequence
  Description of Artificial Sequence: Synthetic oligonucleotide
  Sense strand starting at position 3477 of SEQ ID NO: 316891
acaagugucuuugugacau

SEQ ID NO: 448302 - RNA, 19 nt, Artificial Sequence
  Description of Artificial Sequence: Synthetic oligonucleotide
  Antisense Strand to SEQ ID NO: 448301
augucacaaagacacuugu

SEQ ID NO: 448303 - RNA, 19 nt, Artificial Sequence
  Description of Artificial Sequence: Synthetic oligonucleotide
  Sense strand starting at position 3483 of SEQ ID NO: 316891
gucuuugugacauggacca

SEQ ID NO: 448304 - RNA, 19 nt, Artificial Sequence
  Description of Artificial Sequence: Synthetic oligonucleotide
  Antisense Strand to SEQ ID NO: 448303
ugguccaugucacaaagac

SEQ ID NO: 448305 - RNA, 19 nt, Artificial Sequence
  Description of Artificial Sequence: Synthetic oligonucleotide
  Sense strand starting at position 3629 of SEQ ID NO: 316891
aaacgucagagcuguguga

SEQ ID NO: 448306 - RNA, 19 nt, Artificial Sequence
  Description of Artificial Sequence: Synthetic oligonucleotide
  Antisense Strand to SEQ ID NO: 448305
ucacacagcucugacguuu

SEQ ID NO: 448307 - RNA, 19 nt, Artificial Sequence
  Description of Artificial Sequence: Synthetic oligonucleotide
  Sense strand starting at position 3633 of SEQ ID NO: 316891
gucagagcugugugacuga

SEQ ID NO: 448308 - RNA, 19 nt, Artificial Sequence
  Description of Artificial Sequence: Synthetic oligonucleotide
  Antisense Strand to SEQ ID NO: 448307
ucagucacacagcucugac

SEQ ID NO: 448309 - RNA, 19 nt, Artificial Sequence
  Description of Artificial Sequence: Synthetic oligonucleotide
  Sense strand starting at position 3636 of SEQ ID NO: 316891
agagcugugugacugauua

SEQ ID NO: 448310 - RNA, 19 nt, Artificial Sequence
  Description of Artificial Sequence: Synthetic oligonucleotide
  Antisense Strand to SEQ ID NO: 448309
uaaucagucacacagcucu

SEQ ID NO: 448311 - RNA, 19 nt, Artificial Sequence
  Description of Artificial Sequence: Synthetic oligonucleotide
  Sense strand starting at position 3638 of SEQ ID NO: 316891
agcugugugacugauuaac

SEQ ID NO: 448312 - RNA, 19 nt, Artificial Sequence
  Description of Artificial Sequence: Synthetic oligonucleotide
  Antisense Strand to SEQ ID NO: 448311
guuaaucagucacacagcu

SEQ ID NO: 448313 - RNA, 19 nt, Artificial Sequence
  Description of Artificial Sequence: Synthetic oligonucleotide
  Sense strand starting at position 3640 of SEQ ID NO: 316891
cugugugacugauuaacuu

SEQ ID NO: 448314 - RNA, 19 nt, Artificial Sequence
  Description of Artificial Sequence: Synthetic oligonucleotide
  Antisense Strand to SEQ ID NO: 448313
aaguuaaucagucacacag

SEQ ID NO: 448315 - RNA, 19 nt, Artificial Sequence
  Description of Artificial Sequence: Synthetic oligonucleotide
  Sense strand starting at position 3644 of SEQ ID NO: 316891
gugacugauuaacuuauau

SEQ ID NO: 448316 - RNA, 19 nt, Artificial Sequence
  Description of Artificial Sequence: Synthetic oligonucleotide
  Antisense Strand to SEQ ID NO: 448315
auauaaguuaaucagucac

SEQ ID NO: 448317 - RNA, 19 nt, Artificial Sequence
  Description of Artificial Sequence: Synthetic oligonucleotide
  Sense strand starting at position 3675 of SEQ ID NO: 316891
cucagccauuacuuggaua

SEQ ID NO: 448318 - RNA, 19 nt, Artificial Sequence
  Description of Artificial Sequence: Synthetic oligonucleotide
  Antisense Strand to SEQ ID NO: 448317
uauccaaguaauggcugag

SEQ ID NO: 448319 - RNA, 19 nt, Artificial Sequence
  Description of Artificial Sequence: Synthetic oligonucleotide
  Sense strand starting at position 3720 of SEQ ID NO: 316891
gaaauagagucagccggau

SEQ ID NO: 448320 - RNA, 19 nt, Artificial Sequence
  Description of Artificial Sequence: Synthetic oligonucleotide
  Antisense Strand to SEQ ID NO: 448319
auccggcugacucuauuuc

SEQ ID NO: 448321 - RNA, 19 nt, Artificial Sequence
  Description of Artificial Sequence: Synthetic oligonucleotide
  Sense strand starting at position 53 of SEQ ID NO: 316892
ugcuuaacagauugugaaa

SEQ ID NO: 448322 - RNA, 19 nt, Artificial Sequence
  Description of Artificial Sequence: Synthetic oligonucleotide
  Antisense Strand to SEQ ID NO: 448321
uuucacaaucuguuaagca

SEQ ID NO: 448323 - RNA, 19 nt, Artificial Sequence
  Description of Artificial Sequence: Synthetic oligonucleotide
  Sense strand starting at position 468 of SEQ ID NO: 316892
ucccaaugcaccggugaaa

SEQ ID NO: 448324 - RNA, 19 nt, Artificial Sequence
  Description of Artificial Sequence: Synthetic oligonucleotide
  Antisense Strand to SEQ ID NO: 448323
uuucaccggugcauuggga

SEQ ID NO: 448325 - RNA, 19 nt, Artificial Sequence
  Description of Artificial Sequence: Synthetic oligonucleotide
  Sense strand starting at position 564 of SEQ ID NO: 316892
guuuccugugcacaucauu

SEQ ID NO: 448326 - RNA, 19 nt, Artificial Sequence
  Description of Artificial Sequence: Synthetic oligonucleotide
  Antisense Strand to SEQ ID NO: 448325
aaugaugugcacaggaaac

SEQ ID NO: 448327 - RNA, 19 nt, Artificial Sequence
  Description of Artificial Sequence: Synthetic oligonucleotide
  Sense strand starting at position 579 of SEQ ID NO: 316892
cauugcaugugagcaacua

SEQ ID NO: 448328 - RNA, 19 nt, Artificial Sequence
  Description of Artificial Sequence: Synthetic oligonucleotide
  Antisense Strand to SEQ ID NO: 448327
uaguugcucacaugcaaug

SEQ ID NO: 448329 - RNA, 19 nt, Artificial Sequence
  Description of Artificial Sequence: Synthetic oligonucleotide
  Sense strand starting at position 587 of SEQ ID NO: 316892
gugagcaacuaccucuaua

SEQ ID NO: 448330 - RNA, 19 nt, Artificial Sequence
  Description of Artificial Sequence: Synthetic oligonucleotide
  Antisense Strand to SEQ ID NO: 448329
uauagagguaguugcucac

SEQ ID NO: 448331 - RNA, 19 nt, Artificial Sequence
  Description of Artificial Sequence: Synthetic oligonucleotide
  Sense strand starting at position 643 of SEQ ID NO: 316892
acuagaaaugcaugcacua

SEQ ID NO: 448332 - RNA, 19 nt, Artificial Sequence
  Description of Artificial Sequence: Synthetic oligonucleotide
  Antisense Strand to SEQ ID NO: 448331
uagugcaugcauuucuagu

SEQ ID NO: 448333 - RNA, 19 nt, Artificial Sequence
  Description of Artificial Sequence: Synthetic oligonucleotide
  Sense strand starting at position 801 of SEQ ID NO: 316892
gagugugacccucaaaguc

SEQ ID NO: 448334 - RNA, 19 nt, Artificial Sequence
  Description of Artificial Sequence: Synthetic oligonucleotide
  Antisense Strand to SEQ ID NO: 448333
gacuuugagggucacacuc

SEQ ID NO: 448335 - RNA, 19 nt, Artificial Sequence
  Description of Artificial Sequence: Synthetic oligonucleotide
  Sense strand starting at position 988 of SEQ ID NO: 316892
cuacaauugucugaaagaa

SEQ ID NO: 448336 - RNA, 19 nt, Artificial Sequence
  Description of Artificial Sequence: Synthetic oligonucleotide
  Antisense Strand to SEQ ID NO: 448335
uucuuucagacaauuguag

SEQ ID NO: 448337 - RNA, 19 nt, Artificial Sequence
  Description of Artificial Sequence: Synthetic oligonucleotide
  Sense strand starting at position 1058 of SEQ ID NO: 316892
guuucuaaacaaugucagu

SEQ ID NO: 448338 - RNA, 19 nt, Artificial Sequence
  Description of Artificial Sequence: Synthetic oligonucleotide
  Antisense Strand to SEQ ID NO: 448337
acugacauuguuuagaaac

SEQ ID NO: 448339 - RNA, 19 nt, Artificial Sequence
  Description of Artificial Sequence: Synthetic oligonucleotide
  Sense strand starting at position 1196 of SEQ ID NO: 316892
gcgacaggaggguguuuaa

SEQ ID NO: 448340 - RNA, 19 nt, Artificial Sequence
  Description of Artificial Sequence: Synthetic oligonucleotide
  Antisense Strand to SEQ ID NO: 448339
uuaaacacccuccugucgc

SEQ ID NO: 448341 - RNA, 19 nt, Artificial Sequence
  Description of Artificial Sequence: Synthetic oligonucleotide
  Sense strand starting at position 1208 of SEQ ID NO: 316892
uguuuaaagcagcaucaau

SEQ ID NO: 448342 - RNA, 19 nt, Artificial Sequence
  Description of Artificial Sequence: Synthetic oligonucleotide
  Antisense Strand to SEQ ID NO: 448341
auugaugcugcuuuaaaca

SEQ ID NO: 448343 - RNA, 19 nt, Artificial Sequence
  Description of Artificial Sequence: Synthetic oligonucleotide
  Sense strand starting at position 1340 of SEQ ID NO: 316892
aggaguucgaucuguaaug

SEQ ID NO: 448344 - RNA, 19 nt, Artificial Sequence
  Description of Artificial Sequence: Synthetic oligonucleotide
  Antisense Strand to SEQ ID NO: 448343
cauuacagaucgaacuccu

SEQ ID NO: 448345 - RNA, 19 nt, Artificial Sequence
  Description of Artificial Sequence: Synthetic oligonucleotide
  Sense strand starting at position 1342 of SEQ ID NO: 316892
gaguucgaucuguaaugga

SEQ ID NO: 448346 - RNA, 19 nt, Artificial Sequence
  Description of Artificial Sequence: Synthetic oligonucleotide
  Antisense Strand to SEQ ID NO: 448345
uccauuacagaucgaacuc

SEQ ID NO: 448347 - RNA, 19 nt, Artificial Sequence
  Description of Artificial Sequence: Synthetic oligonucleotide
  Sense strand starting at position 1346 of SEQ ID NO: 316892
ucgaucuguaauggacuga

SEQ ID NO: 448348 - RNA, 19 nt, Artificial Sequence
  Description of Artificial Sequence: Synthetic oligonucleotide
  Antisense Strand to SEQ ID NO: 448347
ucaguccauuacagaucga

SEQ ID NO: 448349 - RNA, 19 nt, Artificial Sequence
  Description of Artificial Sequence: Synthetic oligonucleotide
  Sense strand starting at position 1350 of SEQ ID NO: 316892
ucuguaauggacugaacaa

SEQ ID NO: 448350 - RNA, 19 nt, Artificial Sequence
  Description of Artificial Sequence: Synthetic oligonucleotide
  Antisense Strand to SEQ ID NO: 448349
uuguucaguccauuacaga

SEQ ID NO: 448351 - RNA, 19 nt, Artificial Sequence
  Description of Artificial Sequence: Synthetic oligonucleotide
  Sense strand starting at position 1431 of SEQ ID NO: 316892
ccauccguacugggagaua

SEQ ID NO: 448352 - RNA, 19 nt, Artificial Sequence
  Description of Artificial Sequence: Synthetic oligonucleotide
  Antisense Strand to SEQ ID NO: 448351
uaucucccaguacggaugg

SEQ ID NO: 448353 - RNA, 19 nt, Artificial Sequence
  Description of Artificial Sequence: Synthetic oligonucleotide
  Sense strand starting at position 1434 of SEQ ID NO: 316892
uccguacugggagauagau

SEQ ID NO: 448354 - RNA, 19 nt, Artificial Sequence
  Description of Artificial Sequence: Synthetic oligonucleotide
  Antisense Strand to SEQ ID NO: 448353
aucuaucucccaguacgga

SEQ ID NO: 448355 - RNA, 19 nt, Artificial Sequence
  Description of Artificial Sequence: Synthetic oligonucleotide
  Sense strand starting at position 1459 of SEQ ID NO: 316892
agaaacaucaagugugagu

SEQ ID NO: 448356 - RNA, 19 nt, Artificial Sequence
  Description of Artificial Sequence: Synthetic oligonucleotide
  Antisense Strand to SEQ ID NO: 448355
acucacacuugauguuucu

SEQ ID NO: 448357 - RNA, 19 nt, Artificial Sequence
  Description of Artificial Sequence: Synthetic oligonucleotide
  Sense strand starting at position 1501 of SEQ ID NO: 316892
gugcuuuagaguuauggaa

SEQ ID NO: 448358 - RNA, 19 nt, Artificial Sequence
  Description of Artificial Sequence: Synthetic oligonucleotide
  Antisense Strand to SEQ ID NO: 448357
uuccauaacucuaaagcac

SEQ ID NO: 448359 - RNA, 19 nt, Artificial Sequence
  Description of Artificial Sequence: Synthetic oligonucleotide
  Sense strand starting at position 1605 of SEQ ID NO: 316892
ccgcgacugcgcucagauu

SEQ ID NO: 448360 - RNA, 19 nt, Artificial Sequence
  Description of Artificial Sequence: Synthetic oligonucleotide
  Antisense Strand to SEQ ID NO: 448359
aaucugagcgcagucgcgg

SEQ ID NO: 448361 - RNA, 19 nt, Artificial Sequence
  Description of Artificial Sequence: Synthetic oligonucleotide
  Sense strand starting at position 2679 of SEQ ID NO: 316892
gcaccugcacagugugaau

SEQ ID NO: 448362 - RNA, 19 nt, Artificial Sequence
  Description of Artificial Sequence: Synthetic oligonucleotide
  Antisense Strand to SEQ ID NO: 448361
auucacacugugcaggugc

SEQ ID NO: 448363 - RNA, 19 nt, Artificial Sequence
  Description of Artificial Sequence: Synthetic oligonucleotide
  Sense strand starting at position 2681 of SEQ ID NO: 316892
accugcacagugugaauua

SEQ ID NO: 448364 - RNA, 19 nt, Artificial Sequence
  Description of Artificial Sequence: Synthetic oligonucleotide
  Antisense Strand to SEQ ID NO: 448363
uaauucacacugugcaggu

SEQ ID NO: 448365 - RNA, 19 nt, Artificial Sequence
  Description of Artificial Sequence: Synthetic oligonucleotide
  Sense strand starting at position 2694 of SEQ ID NO: 316892
gaauuaggcccucgcucau

SEQ ID NO: 448366 - RNA, 19 nt, Artificial Sequence
  Description of Artificial Sequence: Synthetic oligonucleotide
  Antisense Strand to SEQ ID NO: 448365
augagcgagggccuaauuc

SEQ ID NO: 448367 - RNA, 19 nt, Artificial Sequence
  Description of Artificial Sequence: Synthetic oligonucleotide
  Sense strand starting at position 3050 of SEQ ID NO: 316892
uggagauuccacugaggua

SEQ ID NO: 448368 - RNA, 19 nt, Artificial Sequence
  Description of Artificial Sequence: Synthetic oligonucleotide
  Antisense Strand to SEQ ID NO: 448367
uaccucaguggaaucucca

SEQ ID NO: 448369 - RNA, 19 nt, Artificial Sequence
  Description of Artificial Sequence: Synthetic oligonucleotide
  Sense strand starting at position 3231 of SEQ ID NO: 316892
ggguggucugacgggagaa

SEQ ID NO: 448370 - RNA, 19 nt, Artificial Sequence
  Description of Artificial Sequence: Synthetic oligonucleotide
  Antisense Strand to SEQ ID NO: 448369
uucucccgucagaccaccc

SEQ ID NO: 448371 - RNA, 19 nt, Artificial Sequence
  Description of Artificial Sequence: Synthetic oligonucleotide
  Sense strand starting at position 3232 of SEQ ID NO: 316892
gguggucugacgggagaaa

SEQ ID NO: 448372 - RNA, 19 nt, Artificial Sequence
  Description of Artificial Sequence: Synthetic oligonucleotide
  Antisense Strand to SEQ ID NO: 448371
uuucucccgucagaccacc

SEQ ID NO: 448373 - RNA, 19 nt, Artificial Sequence
  Description of Artificial Sequence: Synthetic oligonucleotide
  Sense strand starting at position 3346 of SEQ ID NO: 316892
gggaauaggcuauggguga

SEQ ID NO: 448374 - RNA, 19 nt, Artificial Sequence
  Description of Artificial Sequence: Synthetic oligonucleotide
  Antisense Strand to SEQ ID NO: 448373
ucacccauagccuauuccc

SEQ ID NO: 448375 - RNA, 19 nt, Artificial Sequence
  Description of Artificial Sequence: Synthetic oligonucleotide
  Sense strand starting at position 3518 of SEQ ID NO: 316892
gccucaccugucuggaaga

SEQ ID NO: 448376 - RNA, 19 nt, Artificial Sequence
  Description of Artificial Sequence: Synthetic oligonucleotide
  Antisense Strand to SEQ ID NO: 448375
ucuuccagacaggugaggc

SEQ ID NO: 448377 - RNA, 19 nt, Artificial Sequence
  Description of Artificial Sequence: Synthetic oligonucleotide
  Sense strand starting at position 3520 of SEQ ID NO: 316892
cucaccugucuggaagagu

SEQ ID NO: 448378 - RNA, 19 nt, Artificial Sequence
  Description of Artificial Sequence: Synthetic oligonucleotide
  Antisense Strand to SEQ ID NO: 448377
acucuuccagacaggugag

SEQ ID NO: 448379 - RNA, 19 nt, Artificial Sequence
  Description of Artificial Sequence: Synthetic oligonucleotide
  Sense strand starting at position 3661 of SEQ ID NO: 316892
agacaagugucuuugugac

SEQ ID NO: 448380 - RNA, 19 nt, Artificial Sequence
  Description of Artificial Sequence: Synthetic oligonucleotide
  Antisense Strand to SEQ ID NO: 448379
gucacaaagacacuugucu

SEQ ID NO: 448381 - RNA, 19 nt, Artificial Sequence
  Description of Artificial Sequence: Synthetic oligonucleotide
  Sense strand starting at position 3663 of SEQ ID NO: 316892
acaagugucuuugugacau

SEQ ID NO: 448382 - RNA, 19 nt, Artificial Sequence
  Description of Artificial Sequence: Synthetic oligonucleotide
  Antisense Strand to SEQ ID NO: 448381
augucacaaagacacuugu

SEQ ID NO: 448383 - RNA, 19 nt, Artificial Sequence
  Description of Artificial Sequence: Synthetic oligonucleotide
  Sense strand starting at position 3669 of SEQ ID NO: 316892
gucuuugugacauggacca

SEQ ID NO: 448384 - RNA, 19 nt, Artificial Sequence
  Description of Artificial Sequence: Synthetic oligonucleotide
  Antisense Strand to SEQ ID NO: 448383
ugguccaugucacaaagac

SEQ ID NO: 448385 - RNA, 19 nt, Artificial Sequence
  Description of Artificial Sequence: Synthetic oligonucleotide
  Sense strand starting at position 3815 of SEQ ID NO: 316892
aaacgucagagcuguguga

SEQ ID NO: 448386 - RNA, 19 nt, Artificial Sequence
  Description of Artificial Sequence: Synthetic oligonucleotide
  Antisense Strand to SEQ ID NO: 448385
ucacacagcucugacguuu

SEQ ID NO: 448387 - RNA, 19 nt, Artificial Sequence
  Description of Artificial Sequence: Synthetic oligonucleotide
  Sense strand starting at position 3819 of SEQ ID NO: 316892
gucagagcugugugacuga

SEQ ID NO: 448388 - RNA, 19 nt, Artificial Sequence
  Description of Artificial Sequence: Synthetic oligonucleotide
  Antisense Strand to SEQ ID NO: 448387
ucagucacacagcucugac

SEQ ID NO: 448389 - RNA, 19 nt, Artificial Sequence
  Description of Artificial Sequence: Synthetic oligonucleotide
  Sense strand starting at position 3822 of SEQ ID NO: 316892
agagcugugugacugauua

SEQ ID NO: 448390 - RNA, 19 nt, Artificial Sequence
  Description of Artificial Sequence: Synthetic oligonucleotide
  Antisense Strand to SEQ ID NO: 448389
uaaucagucacacagcucu

SEQ ID NO: 448391 - RNA, 19 nt, Artificial Sequence
  Description of Artificial Sequence: Synthetic oligonucleotide
  Sense strand starting at position 3824 of SEQ ID NO: 316892
agcugugugacugauuaac

SEQ ID NO: 448392 - RNA, 19 nt, Artificial Sequence
  Description of Artificial Sequence: Synthetic oligonucleotide
  Antisense Strand to SEQ ID NO: 448391
guuaaucagucacacagcu

SEQ ID NO: 448393 - RNA, 19 nt, Artificial Sequence
  Description of Artificial Sequence: Synthetic oligonucleotide
  Sense strand starting at position 3826 of SEQ ID NO: 316892
cugugugacugauuaacuu

SEQ ID NO: 448394 - RNA, 19 nt, Artificial Sequence
  Description of Artificial Sequence: Synthetic oligonucleotide
  Antisense Strand to SEQ ID NO: 448393
aaguuaaucagucacacag

SEQ ID NO: 448395 - RNA, 19 nt, Artificial Sequence
  Description of Artificial Sequence: Synthetic oligonucleotide
  Sense strand starting at position 3830 of SEQ ID NO: 316892
gugacugauuaacuuauau

SEQ ID NO: 448396 - RNA, 19 nt, Artificial Sequence
  Description of Artificial Sequence: Synthetic oligonucleotide
  Antisense Strand to SEQ ID NO: 448395
auauaaguuaaucagucac

SEQ ID NO: 448397 - RNA, 19 nt, Artificial Sequence
  Description of Artificial Sequence: Synthetic oligonucleotide
  Sense strand starting at position 3861 of SEQ ID NO: 316892
cucagccauuacuuggaua

SEQ ID NO: 448398 - RNA, 19 nt, Artificial Sequence
  Description of Artificial Sequence: Synthetic oligonucleotide
  Antisense Strand to SEQ ID NO: 448397
uauccaaguaauggcugag

SEQ ID NO: 448399 - RNA, 19 nt, Artificial Sequence
  Description of Artificial Sequence: Synthetic oligonucleotide
  Sense strand starting at position 3906 of SEQ ID NO: 316892
gaaauagagucagccggau

SEQ ID NO: 448400 - RNA, 19 nt, Artificial Sequence
  Description of Artificial Sequence: Synthetic oligonucleotide
  Antisense Strand to SEQ ID NO: 448399
auccggcugacucuauuuc

SEQ ID NO: 448401 - RNA, 19 nt, Artificial Sequence
  Description of Artificial Sequence: Synthetic oligonucleotide
  Sense strand starting at position 453 of SEQ ID NO: 316893
ccacacuucuuuccagagu

SEQ ID NO: 448402 - RNA, 19 nt, Artificial Sequence
  Description of Artificial Sequence: Synthetic oligonucleotide
  Antisense Strand to SEQ ID NO: 448401
acucuggaaagaagugugg

SEQ ID NO: 448403 - RNA, 19 nt, Artificial Sequence
  Description of Artificial Sequence: Synthetic oligonucleotide
  Sense strand starting at position 459 of SEQ ID NO: 316893
uucuuuccagagugccaaa

SEQ ID NO: 448404 - RNA, 19 nt, Artificial Sequence
  Description of Artificial Sequence: Synthetic oligonucleotide
  Antisense Strand to SEQ ID NO: 448403
uuuggcacucuggaaagaa

SEQ ID NO: 448405 - RNA, 19 nt, Artificial Sequence
  Description of Artificial Sequence: Synthetic oligonucleotide
  Sense strand starting at position 551 of SEQ ID NO: 316893
uuaccuugagcuuguuaaa

SEQ ID NO: 448406 - RNA, 19 nt, Artificial Sequence
  Description of Artificial Sequence: Synthetic oligonucleotide
  Antisense Strand to SEQ ID NO: 448405
uuuaacaagcucaagguaa

SEQ ID NO: 448407 - RNA, 19 nt, Artificial Sequence
  Description of Artificial Sequence: Synthetic oligonucleotide
  Sense strand starting at position 619 of SEQ ID NO: 316893
auuacauagugcuuuaagu

SEQ ID NO: 448408 - RNA, 19 nt, Artificial Sequence
  Description of Artificial Sequence: Synthetic oligonucleotide
  Antisense Strand to SEQ ID NO: 448407
acuuaaagcacuauguaau

SEQ ID NO: 448409 - RNA, 19 nt, Artificial Sequence
  Description of Artificial Sequence: Synthetic oligonucleotide
  Sense strand starting at position 683 of SEQ ID NO: 316893
agagcugucuuccuaagac

SEQ ID NO: 448410 - RNA, 19 nt, Artificial Sequence
  Description of Artificial Sequence: Synthetic oligonucleotide
  Antisense Strand to SEQ ID NO: 448409
gucuuaggaagacagcucu

SEQ ID NO: 448411 - RNA, 19 nt, Artificial Sequence
  Description of Artificial Sequence: Synthetic oligonucleotide
  Sense strand starting at position 775 of SEQ ID NO: 316893
ggauguguuggacagcaua

SEQ ID NO: 448412 - RNA, 19 nt, Artificial Sequence
  Description of Artificial Sequence: Synthetic oligonucleotide
  Antisense Strand to SEQ ID NO: 448411
uaugcuguccaacacaucc

SEQ ID NO: 448413 - RNA, 19 nt, Artificial Sequence
  Description of Artificial Sequence: Synthetic oligonucleotide
  Sense strand starting at position 866 of SEQ ID NO: 316893
uaucgaaaccuguaucuga

SEQ ID NO: 448414 - RNA, 19 nt, Artificial Sequence
  Description of Artificial Sequence: Synthetic oligonucleotide
  Antisense Strand to SEQ ID NO: 448413
ucagauacagguuucgaua

SEQ ID NO: 448415 - RNA, 19 nt, Artificial Sequence
  Description of Artificial Sequence: Synthetic oligonucleotide
  Sense strand starting at position 869 of SEQ ID NO: 316893
cgaaaccuguaucugaaua

SEQ ID NO: 448416 - RNA, 19 nt, Artificial Sequence
  Description of Artificial Sequence: Synthetic oligonucleotide
  Antisense Strand to SEQ ID NO: 448415
uauucagauacagguuucg

SEQ ID NO: 448417 - RNA, 19 nt, Artificial Sequence
  Description of Artificial Sequence: Synthetic oligonucleotide
  Sense strand starting at position 874 of SEQ ID NO: 316893
ccuguaucugaauauacga

SEQ ID NO: 448418 - RNA, 19 nt, Artificial Sequence
  Description of Artificial Sequence: Synthetic oligonucleotide
  Antisense Strand to SEQ ID NO: 448417
ucguauauucagauacagg

SEQ ID NO: 448419 - RNA, 19 nt, Artificial Sequence
  Description of Artificial Sequence: Synthetic oligonucleotide
  Sense strand starting at position 923 of SEQ ID NO: 316893
ugaauaucugaaggucauu

SEQ ID NO: 448420 - RNA, 19 nt, Artificial Sequence
  Description of Artificial Sequence: Synthetic oligonucleotide
  Antisense Strand to SEQ ID NO: 448419
aaugaccuucagauauuca

SEQ ID NO: 448421 - RNA, 19 nt, Artificial Sequence
  Description of Artificial Sequence: Synthetic oligonucleotide
  Sense strand starting at position 1015 of SEQ ID NO: 316893
ccgggaauugcuuaacaaa

SEQ ID NO: 448422 - RNA, 19 nt, Artificial Sequence
  Description of Artificial Sequence: Synthetic oligonucleotide
  Antisense Strand to SEQ ID NO: 448421
uuuguuaagcaauucccgg

SEQ ID NO: 448423 - RNA, 19 nt, Artificial Sequence
  Description of Artificial Sequence: Synthetic oligonucleotide
  Sense strand starting at position 1093 of SEQ ID NO: 316893
uuaugaguuuacuuuccua

SEQ ID NO: 448424 - RNA, 19 nt, Artificial Sequence
  Description of Artificial Sequence: Synthetic oligonucleotide
  Antisense Strand to SEQ ID NO: 448423
uaggaaaguaaacucauaa

SEQ ID NO: 448425 - RNA, 19 nt, Artificial Sequence
  Description of Artificial Sequence: Synthetic oligonucleotide
  Sense strand starting at position 2075 of SEQ ID NO: 316893
ucauuucucgggcgcggaa

SEQ ID NO: 448426 - RNA, 19 nt, Artificial Sequence
  Description of Artificial Sequence: Synthetic oligonucleotide
  Antisense Strand to SEQ ID NO: 448425
uuccgcgcccgagaaauga

SEQ ID NO: 448427 - RNA, 19 nt, Artificial Sequence
  Description of Artificial Sequence: Synthetic oligonucleotide
  Sense strand starting at position 2310 of SEQ ID NO: 316893
gggaaagcucccugccaag

SEQ ID NO: 448428 - RNA, 19 nt, Artificial Sequence
  Description of Artificial Sequence: Synthetic oligonucleotide
  Antisense Strand to SEQ ID NO: 448427
cuuggcagggagcuuuccc

SEQ ID NO: 448429 - RNA, 19 nt, Artificial Sequence
  Description of Artificial Sequence: Synthetic oligonucleotide
  Sense strand starting at position 2389 of SEQ ID NO: 316893
gaaagcuucccagaggcau

SEQ ID NO: 448430 - RNA, 19 nt, Artificial Sequence
  Description of Artificial Sequence: Synthetic oligonucleotide
  Antisense Strand to SEQ ID NO: 448429
augccucugggaagcuuuc

SEQ ID NO: 448431 - RNA, 19 nt, Artificial Sequence
  Description of Artificial Sequence: Synthetic oligonucleotide
  Sense strand starting at position 2401 of SEQ ID NO: 316893
gaggcaucccuuuagcuuu

SEQ ID NO: 448432 - RNA, 19 nt, Artificial Sequence
  Description of Artificial Sequence: Synthetic oligonucleotide
  Antisense Strand to SEQ ID NO: 448431
aaagcuaaagggaugccuc

SEQ ID NO: 448433 - RNA, 19 nt, Artificial Sequence
  Description of Artificial Sequence: Synthetic oligonucleotide
  Sense strand starting at position 2478 of SEQ ID NO: 316893
gaagguuuggugggcugaa

SEQ ID NO: 448434 - RNA, 19 nt, Artificial Sequence
  Description of Artificial Sequence: Synthetic oligonucleotide
  Antisense Strand to SEQ ID NO: 448433
uucagcccaccaaaccuuc

SEQ ID NO: 448435 - RNA, 19 nt, Artificial Sequence
  Description of Artificial Sequence: Synthetic oligonucleotide
  Sense strand starting at position 2962 of SEQ ID NO: 316893
ggacuugaucucggaaagu

SEQ ID NO: 448436 - RNA, 19 nt, Artificial Sequence
  Description of Artificial Sequence: Synthetic oligonucleotide
  Antisense Strand to SEQ ID NO: 448435
acuuuccgagaucaagucc

SEQ ID NO: 448437 - RNA, 19 nt, Artificial Sequence
  Description of Artificial Sequence: Synthetic oligonucleotide
  Sense strand starting at position 3072 of SEQ ID NO: 316893
agggcagucaagugugaaa

SEQ ID NO: 448438 - RNA, 19 nt, Artificial Sequence
  Description of Artificial Sequence: Synthetic oligonucleotide
  Antisense Strand to SEQ ID NO: 448437
uuucacacuugacugcccu

SEQ ID NO: 448439 - RNA, 19 nt, Artificial Sequence
  Description of Artificial Sequence: Synthetic oligonucleotide
  Sense strand starting at position 3074 of SEQ ID NO: 316893
ggcagucaagugugaaaga

SEQ ID NO: 448440 - RNA, 19 nt, Artificial Sequence
  Description of Artificial Sequence: Synthetic oligonucleotide
  Antisense Strand to SEQ ID NO: 448439
ucuuucacacuugacugcc

SEQ ID NO: 448441 - RNA, 19 nt, Artificial Sequence
  Description of Artificial Sequence: Synthetic oligonucleotide
  Sense strand starting at position 3089 of SEQ ID NO: 316893
aagagaauuuccuggguuc

SEQ ID NO: 448442 - RNA, 19 nt, Artificial Sequence
  Description of Artificial Sequence: Synthetic oligonucleotide
  Antisense Strand to SEQ ID NO: 448441
gaacccaggaaauucucuu

SEQ ID NO: 448443 - RNA, 19 nt, Artificial Sequence
  Description of Artificial Sequence: Synthetic oligonucleotide
  Sense strand starting at position 3224 of SEQ ID NO: 316893
ugccgauucguagcccuau

SEQ ID NO: 448444 - RNA, 19 nt, Artificial Sequence
  Description of Artificial Sequence: Synthetic oligonucleotide
  Antisense Strand to SEQ ID NO: 448443
auagggcuacgaaucggca

SEQ ID NO: 448445 - RNA, 19 nt, Artificial Sequence
  Description of Artificial Sequence: Synthetic oligonucleotide
  Sense strand starting at position 3315 of SEQ ID NO: 316893
guguuugucccggccauaa

SEQ ID NO: 448446 - RNA, 19 nt, Artificial Sequence
  Description of Artificial Sequence: Synthetic oligonucleotide
  Antisense Strand to SEQ ID NO: 448445
uuauggccgggacaaacac

SEQ ID NO: 448447 - RNA, 19 nt, Artificial Sequence
  Description of Artificial Sequence: Synthetic oligonucleotide
  Sense strand starting at position 3365 of SEQ ID NO: 316893
cauggaacaccucgaaagu

SEQ ID NO: 448448 - RNA, 19 nt, Artificial Sequence
  Description of Artificial Sequence: Synthetic oligonucleotide
  Antisense Strand to SEQ ID NO: 448447
acuuucgagguguuccaug

SEQ ID NO: 448449 - RNA, 19 nt, Artificial Sequence
  Description of Artificial Sequence: Synthetic oligonucleotide
  Sense strand starting at position 3418 of SEQ ID NO: 316893
ccgcuugccgaauuguaaa

SEQ ID NO: 448450 - RNA, 19 nt, Artificial Sequence
  Description of Artificial Sequence: Synthetic oligonucleotide
  Antisense Strand to SEQ ID NO: 448449
uuuacaauucggcaagcgg

SEQ ID NO: 448451 - RNA, 19 nt, Artificial Sequence
  Description of Artificial Sequence: Synthetic oligonucleotide
  Sense strand starting at position 3483 of SEQ ID NO: 316893
gcgaggaagcgggaguaau

SEQ ID NO: 448452 - RNA, 19 nt, Artificial Sequence
  Description of Artificial Sequence: Synthetic oligonucleotide
  Antisense Strand to SEQ ID NO: 448451
auuacucccgcuuccucgc

SEQ ID NO: 448453 - RNA, 19 nt, Artificial Sequence
  Description of Artificial Sequence: Synthetic oligonucleotide
  Sense strand starting at position 3541 of SEQ ID NO: 316893
gauaccauucccugacgua

SEQ ID NO: 448454 - RNA, 19 nt, Artificial Sequence
  Description of Artificial Sequence: Synthetic oligonucleotide
  Antisense Strand to SEQ ID NO: 448453
uacgucagggaaugguauc

SEQ ID NO: 448455 - RNA, 19 nt, Artificial Sequence
  Description of Artificial Sequence: Synthetic oligonucleotide
  Sense strand starting at position 3542 of SEQ ID NO: 316893
auaccauucccugacguaa

SEQ ID NO: 448456 - RNA, 19 nt, Artificial Sequence
  Description of Artificial Sequence: Synthetic oligonucleotide
  Antisense Strand to SEQ ID NO: 448455
uuacgucagggaaugguau

SEQ ID NO: 448457 - RNA, 19 nt, Artificial Sequence
  Description of Artificial Sequence: Synthetic oligonucleotide
  Sense strand starting at position 3600 of SEQ ID NO: 316893
ggagaagauuaccauuaau

SEQ ID NO: 448458 - RNA, 19 nt, Artificial Sequence
  Description of Artificial Sequence: Synthetic oligonucleotide
  Antisense Strand to SEQ ID NO: 448457
auuaaugguaaucuucucc

SEQ ID NO: 448459 - RNA, 19 nt, Artificial Sequence
  Description of Artificial Sequence: Synthetic oligonucleotide
  Sense strand starting at position 3634 of SEQ ID NO: 316893
cuuccuagggcuuacuaga

SEQ ID NO: 448460 - RNA, 19 nt, Artificial Sequence
  Description of Artificial Sequence: Synthetic oligonucleotide
  Antisense Strand to SEQ ID NO: 448459
ucuaguaagcccuaggaag

SEQ ID NO: 448461 - RNA, 19 nt, Artificial Sequence
  Description of Artificial Sequence: Synthetic oligonucleotide
  Sense strand starting at position 3639 of SEQ ID NO: 316893
uagggcuuacuagauguuu

SEQ ID NO: 448462 - RNA, 19 nt, Artificial Sequence
  Description of Artificial Sequence: Synthetic oligonucleotide
  Antisense Strand to SEQ ID NO: 448461
aaacaucuaguaagcccua

SEQ ID NO: 448463 - RNA, 19 nt, Artificial Sequence
  Description of Artificial Sequence: Synthetic oligonucleotide
  Sense strand starting at position 3656 of SEQ ID NO: 316893
uuuacaucugucugggaau

SEQ ID NO: 448464 - RNA, 19 nt, Artificial Sequence
  Description of Artificial Sequence: Synthetic oligonucleotide
  Antisense Strand to SEQ ID NO: 448463
auucccagacagauguaaa

SEQ ID NO: 448465 - RNA, 19 nt, Artificial Sequence
  Description of Artificial Sequence: Synthetic oligonucleotide
  Sense strand starting at position 3694 of SEQ ID NO: 316893
ugagaaaucuaucugccug

SEQ ID NO: 448466 - RNA, 19 nt, Artificial Sequence
  Description of Artificial Sequence: Synthetic oligonucleotide
  Antisense Strand to SEQ ID NO: 448465
caggcagauagauuucuca

SEQ ID NO: 448467 - RNA, 19 nt, Artificial Sequence
  Description of Artificial Sequence: Synthetic oligonucleotide
  Sense strand starting at position 3696 of SEQ ID NO: 316893
agaaaucuaucugccugga

SEQ ID NO: 448468 - RNA, 19 nt, Artificial Sequence
  Description of Artificial Sequence: Synthetic oligonucleotide
  Antisense Strand to SEQ ID NO: 448467
uccaggcagauagauuucu

SEQ ID NO: 448469 - RNA, 19 nt, Artificial Sequence
  Description of Artificial Sequence: Synthetic oligonucleotide
  Sense strand starting at position 3700 of SEQ ID NO: 316893
aucuaucugccuggaagaa

SEQ ID NO: 448470 - RNA, 19 nt, Artificial Sequence
  Description of Artificial Sequence: Synthetic oligonucleotide
  Antisense Strand to SEQ ID NO: 448469
uucuuccaggcagauagau

SEQ ID NO: 448471 - RNA, 19 nt, Artificial Sequence
  Description of Artificial Sequence: Synthetic oligonucleotide
  Sense strand starting at position 3776 of SEQ ID NO: 316893
ggacucugccacgauucua

SEQ ID NO: 448472 - RNA, 19 nt, Artificial Sequence
  Description of Artificial Sequence: Synthetic oligonucleotide
  Antisense Strand to SEQ ID NO: 448471
uagaaucguggcagagucc

SEQ ID NO: 448473 - RNA, 19 nt, Artificial Sequence
  Description of Artificial Sequence: Synthetic oligonucleotide
  Sense strand starting at position 3787 of SEQ ID NO: 316893
cgauucuacugauccuuaa

SEQ ID NO: 448474 - RNA, 19 nt, Artificial Sequence
  Description of Artificial Sequence: Synthetic oligonucleotide
  Antisense Strand to SEQ ID NO: 448473
uuaaggaucaguagaaucg

SEQ ID NO: 448475 - RNA, 19 nt, Artificial Sequence
  Description of Artificial Sequence: Synthetic oligonucleotide
  Sense strand starting at position 3817 of SEQ ID NO: 316893
acgaaauggacaugccuau

SEQ ID NO: 448476 - RNA, 19 nt, Artificial Sequence
  Description of Artificial Sequence: Synthetic oligonucleotide
  Antisense Strand to SEQ ID NO: 448475
auaggcauguccauuucgu

SEQ ID NO: 448477 - RNA, 19 nt, Artificial Sequence
  Description of Artificial Sequence: Synthetic oligonucleotide
  Sense strand starting at position 3870 of SEQ ID NO: 316893
agagaaaugugguucaagu

SEQ ID NO: 448478 - RNA, 19 nt, Artificial Sequence
  Description of Artificial Sequence: Synthetic oligonucleotide
  Antisense Strand to SEQ ID NO: 448477
acuugaaccacauuucucu

SEQ ID NO: 448479 - RNA, 19 nt, Artificial Sequence
  Description of Artificial Sequence: Synthetic oligonucleotide
  Sense strand starting at position 3887 of SEQ ID NO: 316893
guuccacauuuguccuuua

SEQ ID NO: 448480 - RNA, 19 nt, Artificial Sequence
  Description of Artificial Sequence: Synthetic oligonucleotide
  Antisense Strand to SEQ ID NO: 448479
uaaaggacaaauguggaac

SEQ ID NO: 448481 - RNA, 19 nt, Artificial Sequence
  Description of Artificial Sequence: Synthetic oligonucleotide
  Sense strand starting at position 2110 of SEQ ID NO: 316894
gucugagaccucugcuauu

SEQ ID NO: 448482 - RNA, 19 nt, Artificial Sequence
  Description of Artificial Sequence: Synthetic oligonucleotide
  Antisense Strand to SEQ ID NO: 448481
aauagcagaggucucagac

SEQ ID NO: 448483 - RNA, 19 nt, Artificial Sequence
  Description of Artificial Sequence: Synthetic oligonucleotide
  Sense strand starting at position 2206 of SEQ ID NO: 316894
gagagaugcuguggcgaaa

SEQ ID NO: 448484 - RNA, 19 nt, Artificial Sequence
  Description of Artificial Sequence: Synthetic oligonucleotide
  Antisense Strand to SEQ ID NO: 448483
uuucgccacagcaucucuc

SEQ ID NO: 448485 - RNA, 19 nt, Artificial Sequence
  Description of Artificial Sequence: Synthetic oligonucleotide
  Sense strand starting at position 2255 of SEQ ID NO: 316894
ugagcugaguucccagaaa

SEQ ID NO: 448486 - RNA, 19 nt, Artificial Sequence
  Description of Artificial Sequence: Synthetic oligonucleotide
  Antisense Strand to SEQ ID NO: 448485
uuucugggaacucagcuca

SEQ ID NO: 448487 - RNA, 19 nt, Artificial Sequence
  Description of Artificial Sequence: Synthetic oligonucleotide
  Sense strand starting at position 2321 of SEQ ID NO: 316894
uccagauagucugagcguu

SEQ ID NO: 448488 - RNA, 19 nt, Artificial Sequence
  Description of Artificial Sequence: Synthetic oligonucleotide
  Antisense Strand to SEQ ID NO: 448487
aacgcucagacuaucugga

SEQ ID NO: 448489 - RNA, 19 nt, Artificial Sequence
  Description of Artificial Sequence: Synthetic oligonucleotide
  Sense strand starting at position 2349 of SEQ ID NO: 316894
guggaugagaguugggaga

SEQ ID NO: 448490 - RNA, 19 nt, Artificial Sequence
  Description of Artificial Sequence: Synthetic oligonucleotide
  Antisense Strand to SEQ ID NO: 448489
ucucccaacucucauccac

SEQ ID NO: 448491 - RNA, 19 nt, Artificial Sequence
  Description of Artificial Sequence: Synthetic oligonucleotide
  Sense strand starting at position 2362 of SEQ ID NO: 316894
gggagaaguugccuguauc

SEQ ID NO: 448492 - RNA, 19 nt, Artificial Sequence
  Description of Artificial Sequence: Synthetic oligonucleotide
  Antisense Strand to SEQ ID NO: 448491
gauacaggcaacuucuccc

SEQ ID NO: 448493 - RNA, 19 nt, Artificial Sequence
  Description of Artificial Sequence: Synthetic oligonucleotide
  Sense strand starting at position 2363 of SEQ ID NO: 316894
ggagaaguugccuguaucu

SEQ ID NO: 448494 - RNA, 19 nt, Artificial Sequence
  Description of Artificial Sequence: Synthetic oligonucleotide
  Antisense Strand to SEQ ID NO: 448493
agauacaggcaacuucucc

SEQ ID NO: 448495 - RNA, 19 nt, Artificial Sequence
  Description of Artificial Sequence: Synthetic oligonucleotide
  Sense strand starting at position 2365 of SEQ ID NO: 316894
agaaguugccuguaucuaa

SEQ ID NO: 448496 - RNA, 19 nt, Artificial Sequence
  Description of Artificial Sequence: Synthetic oligonucleotide
  Antisense Strand to SEQ ID NO: 448495
uuagauacaggcaacuucu

SEQ ID NO: 448497 - RNA, 19 nt, Artificial Sequence
  Description of Artificial Sequence: Synthetic oligonucleotide
  Sense strand starting at position 2369 of SEQ ID NO: 316894
guugccuguaucuaaggua

SEQ ID NO: 448498 - RNA, 19 nt, Artificial Sequence
  Description of Artificial Sequence: Synthetic oligonucleotide
  Antisense Strand to SEQ ID NO: 448497
uaccuuagauacaggcaac

SEQ ID NO: 448499 - RNA, 19 nt, Artificial Sequence
  Description of Artificial Sequence: Synthetic oligonucleotide
  Sense strand starting at position 2372 of SEQ ID NO: 316894
gccuguaucuaagguauau

SEQ ID NO: 448500 - RNA, 19 nt, Artificial Sequence
  Description of Artificial Sequence: Synthetic oligonucleotide
  Antisense Strand to SEQ ID NO: 448499
auauaccuuagauacaggc

SEQ ID NO: 448501 - RNA, 19 nt, Artificial Sequence
  Description of Artificial Sequence: Synthetic oligonucleotide
  Sense strand starting at position 2381 of SEQ ID NO: 316894
uaagguauaugaggaauca

SEQ ID NO: 448502 - RNA, 19 nt, Artificial Sequence
  Description of Artificial Sequence: Synthetic oligonucleotide
  Antisense Strand to SEQ ID NO: 448501
ugauuccucauauaccuua

SEQ ID NO: 448503 - RNA, 19 nt, Artificial Sequence
  Description of Artificial Sequence: Synthetic oligonucleotide
  Sense strand starting at position 2391 of SEQ ID NO: 316894
gaggaaucauugcaaagaa

SEQ ID NO: 448504 - RNA, 19 nt, Artificial Sequence
  Description of Artificial Sequence: Synthetic oligonucleotide
  Antisense Strand to SEQ ID NO: 448503
uucuuugcaaugauuccuc

SEQ ID NO: 448505 - RNA, 19 nt, Artificial Sequence
  Description of Artificial Sequence: Synthetic oligonucleotide
  Sense strand starting at position 2777 of SEQ ID NO: 316894
gcccgugguccggcacaaa

SEQ ID NO: 448506 - RNA, 19 nt, Artificial Sequence
  Description of Artificial Sequence: Synthetic oligonucleotide
  Antisense Strand to SEQ ID NO: 448505
uuugugccggaccacgggc

SEQ ID NO: 448507 - RNA, 19 nt, Artificial Sequence
  Description of Artificial Sequence: Synthetic oligonucleotide
  Sense strand starting at position 3034 of SEQ ID NO: 316894
uuuauugucccgugucagu

SEQ ID NO: 448508 - RNA, 19 nt, Artificial Sequence
  Description of Artificial Sequence: Synthetic oligonucleotide
  Antisense Strand to SEQ ID NO: 448507
acugacacgggacaauaaa

SEQ ID NO: 448509 - RNA, 19 nt, Artificial Sequence
  Description of Artificial Sequence: Synthetic oligonucleotide
  Sense strand starting at position 3057 of SEQ ID NO: 316894
cuuuguaauccacaaggcu

SEQ ID NO: 448510 - RNA, 19 nt, Artificial Sequence
  Description of Artificial Sequence: Synthetic oligonucleotide
  Antisense Strand to SEQ ID NO: 448509
agccuuguggauuacaaag

SEQ ID NO: 448511 - RNA, 19 nt, Artificial Sequence
  Description of Artificial Sequence: Synthetic oligonucleotide
  Sense strand starting at position 3415 of SEQ ID NO: 316894
ucagaaacuuugcucgaca

SEQ ID NO: 448512 - RNA, 19 nt, Artificial Sequence
  Description of Artificial Sequence: Synthetic oligonucleotide
  Antisense Strand to SEQ ID NO: 448511
ugucgagcaaaguuucuga

SEQ ID NO: 448513 - RNA, 19 nt, Artificial Sequence
  Description of Artificial Sequence: Synthetic oligonucleotide
  Sense strand starting at position 3417 of SEQ ID NO: 316894
agaaacuuugcucgacacu

SEQ ID NO: 448514 - RNA, 19 nt, Artificial Sequence
  Description of Artificial Sequence: Synthetic oligonucleotide
  Antisense Strand to SEQ ID NO: 448513
agugucgagcaaaguuucu

SEQ ID NO: 448515 - RNA, 19 nt, Artificial Sequence
  Description of Artificial Sequence: Synthetic oligonucleotide
  Sense strand starting at position 3593 of SEQ ID NO: 316894
ggcuucucgggaugcuaau

SEQ ID NO: 448516 - RNA, 19 nt, Artificial Sequence
  Description of Artificial Sequence: Synthetic oligonucleotide
  Antisense Strand to SEQ ID NO: 448515
auuagcaucccgagaagcc

SEQ ID NO: 448517 - RNA, 19 nt, Artificial Sequence
  Description of Artificial Sequence: Synthetic oligonucleotide
  Sense strand starting at position 3740 of SEQ ID NO: 316894
gccggcgucagagcaauaa

SEQ ID NO: 448518 - RNA, 19 nt, Artificial Sequence
  Description of Artificial Sequence: Synthetic oligonucleotide
  Antisense Strand to SEQ ID NO: 448517
uuauugcucugacgccggc

SEQ ID NO: 448519 - RNA, 19 nt, Artificial Sequence
  Description of Artificial Sequence: Synthetic oligonucleotide
  Sense strand starting at position 3792 of SEQ ID NO: 316894
gggucagguuugcagauaa

SEQ ID NO: 448520 - RNA, 19 nt, Artificial Sequence
  Description of Artificial Sequence: Synthetic oligonucleotide
  Antisense Strand to SEQ ID NO: 448519
uuaucugcaaaccugaccc

SEQ ID NO: 448521 - RNA, 19 nt, Artificial Sequence
  Description of Artificial Sequence: Synthetic oligonucleotide
  Sense strand starting at position 3803 of SEQ ID NO: 316894
gcagauaaauaacuuuagu

SEQ ID NO: 448522 - RNA, 19 nt, Artificial Sequence
  Description of Artificial Sequence: Synthetic oligonucleotide
  Antisense Strand to SEQ ID NO: 448521
acuaaaguuauuuaucugc

SEQ ID NO: 448523 - RNA, 19 nt, Artificial Sequence
  Description of Artificial Sequence: Synthetic oligonucleotide
  Sense strand starting at position 3841 of SEQ ID NO: 316894
ccguuagguuguuaugcua

SEQ ID NO: 448524 - RNA, 19 nt, Artificial Sequence
  Description of Artificial Sequence: Synthetic oligonucleotide
  Antisense Strand to SEQ ID NO: 448523
uagcauaacaaccuaacgg

SEQ ID NO: 448525 - RNA, 19 nt, Artificial Sequence
  Description of Artificial Sequence: Synthetic oligonucleotide
  Sense strand starting at position 3844 of SEQ ID NO: 316894
uuagguuguuaugcuagua

SEQ ID NO: 448526 - RNA, 19 nt, Artificial Sequence
  Description of Artificial Sequence: Synthetic oligonucleotide
  Antisense Strand to SEQ ID NO: 448525
uacuagcauaacaaccuaa

SEQ ID NO: 448527 - RNA, 19 nt, Artificial Sequence
  Description of Artificial Sequence: Synthetic oligonucleotide
  Sense strand starting at position 3849 of SEQ ID NO: 316894
uuguuaugcuaguaauaac

SEQ ID NO: 448528 - RNA, 19 nt, Artificial Sequence
  Description of Artificial Sequence: Synthetic oligonucleotide
  Antisense Strand to SEQ ID NO: 448527
guuauuacuagcauaacaa

SEQ ID NO: 448529 - RNA, 19 nt, Artificial Sequence
  Description of Artificial Sequence: Synthetic oligonucleotide
  Sense strand starting at position 3908 of SEQ ID NO: 316894
gggugagggucuguuaaag

SEQ ID NO: 448530 - RNA, 19 nt, Artificial Sequence
  Description of Artificial Sequence: Synthetic oligonucleotide
  Antisense Strand to SEQ ID NO: 448529
cuuuaacagacccucaccc

SEQ ID NO: 448531 - RNA, 19 nt, Artificial Sequence
  Description of Artificial Sequence: Synthetic oligonucleotide
  Sense strand starting at position 3966 of SEQ ID NO: 316894
cagugcagauuugcuuuaa

SEQ ID NO: 448532 - RNA, 19 nt, Artificial Sequence
  Description of Artificial Sequence: Synthetic oligonucleotide
  Antisense Strand to SEQ ID NO: 448531
uuaaagcaaaucugcacug

SEQ ID NO: 448533 - RNA, 19 nt, Artificial Sequence
  Description of Artificial Sequence: Synthetic oligonucleotide
  Sense strand starting at position 57 of SEQ ID NO: 316895
aggucacaaucaucuggaa

SEQ ID NO: 448534 - RNA, 19 nt, Artificial Sequence
  Description of Artificial Sequence: Synthetic oligonucleotide
  Antisense Strand to SEQ ID NO: 448533
uuccagaugauugugaccu

SEQ ID NO: 448535 - RNA, 19 nt, Artificial Sequence
  Description of Artificial Sequence: Synthetic oligonucleotide
  Sense strand starting at position 255 of SEQ ID NO: 316895
aaagaauggugucugaaug

SEQ ID NO: 448536 - RNA, 19 nt, Artificial Sequence
  Description of Artificial Sequence: Synthetic oligonucleotide
  Antisense Strand to SEQ ID NO: 448535
cauucagacaccauucuuu

SEQ ID NO: 448537 - RNA, 19 nt, Artificial Sequence
  Description of Artificial Sequence: Synthetic oligonucleotide
  Sense strand starting at position 256 of SEQ ID NO: 316895
aagaauggugucugaauga

SEQ ID NO: 448538 - RNA, 19 nt, Artificial Sequence
  Description of Artificial Sequence: Synthetic oligonucleotide
  Antisense Strand to SEQ ID NO: 448537
ucauucagacaccauucuu

SEQ ID NO: 448539 - RNA, 19 nt, Artificial Sequence
  Description of Artificial Sequence: Synthetic oligonucleotide
  Sense strand starting at position 261 of SEQ ID NO: 316895
uggugucugaaugaacgau

SEQ ID NO: 448540 - RNA, 19 nt, Artificial Sequence
  Description of Artificial Sequence: Synthetic oligonucleotide
  Antisense Strand to SEQ ID NO: 448539
aucguucauucagacacca

SEQ ID NO: 448541 - RNA, 19 nt, Artificial Sequence
  Description of Artificial Sequence: Synthetic oligonucleotide
  Sense strand starting at position 265 of SEQ ID NO: 316895
gucugaaugaacgauauuc

SEQ ID NO: 448542 - RNA, 19 nt, Artificial Sequence
  Description of Artificial Sequence: Synthetic oligonucleotide
  Antisense Strand to SEQ ID NO: 448541
gaauaucguucauucagac

SEQ ID NO: 448543 - RNA, 19 nt, Artificial Sequence
  Description of Artificial Sequence: Synthetic oligonucleotide
  Sense strand starting at position 348 of SEQ ID NO: 316895
ugcuuaauggcuuaaccau

SEQ ID NO: 448544 - RNA, 19 nt, Artificial Sequence
  Description of Artificial Sequence: Synthetic oligonucleotide
  Antisense Strand to SEQ ID NO: 448543
augguuaagccauuaagca

SEQ ID NO: 448545 - RNA, 19 nt, Artificial Sequence
  Description of Artificial Sequence: Synthetic oligonucleotide
  Sense strand starting at position 372 of SEQ ID NO: 316895
augcuucuccuagaugagu

SEQ ID NO: 448546 - RNA, 19 nt, Artificial Sequence
  Description of Artificial Sequence: Synthetic oligonucleotide
  Antisense Strand to SEQ ID NO: 448545
acucaucuaggagaagcau

SEQ ID NO: 448547 - RNA, 19 nt, Artificial Sequence
  Description of Artificial Sequence: Synthetic oligonucleotide
  Sense strand starting at position 443 of SEQ ID NO: 316895
auaccugaugucuggguga

SEQ ID NO: 448548 - RNA, 19 nt, Artificial Sequence
  Description of Artificial Sequence: Synthetic oligonucleotide
  Antisense Strand to SEQ ID NO: 448547
ucacccagacaucagguau

SEQ ID NO: 448549 - RNA, 19 nt, Artificial Sequence
  Description of Artificial Sequence: Synthetic oligonucleotide
  Sense strand starting at position 445 of SEQ ID NO: 316895
accugaugucugggugaaa

SEQ ID NO: 448550 - RNA, 19 nt, Artificial Sequence
  Description of Artificial Sequence: Synthetic oligonucleotide
  Antisense Strand to SEQ ID NO: 448549
uuucacccagacaucaggu

SEQ ID NO: 448551 - RNA, 19 nt, Artificial Sequence
  Description of Artificial Sequence: Synthetic oligonucleotide
  Sense strand starting at position 446 of SEQ ID NO: 316895
ccugaugucugggugaaau

SEQ ID NO: 448552 - RNA, 19 nt, Artificial Sequence
  Description of Artificial Sequence: Synthetic oligonucleotide
  Antisense Strand to SEQ ID NO: 448551
auuucacccagacaucagg

SEQ ID NO: 448553 - RNA, 19 nt, Artificial Sequence
  Description of Artificial Sequence: Synthetic oligonucleotide
  Sense strand starting at position 506 of SEQ ID NO: 316895
uuaguuuaaggcuaauaag

SEQ ID NO: 448554 - RNA, 19 nt, Artificial Sequence
  Description of Artificial Sequence: Synthetic oligonucleotide
  Antisense Strand to SEQ ID NO: 448553
cuuauuagccuuaaacuaa

SEQ ID NO: 448555 - RNA, 19 nt, Artificial Sequence
  Description of Artificial Sequence: Synthetic oligonucleotide
  Sense strand starting at position 578 of SEQ ID NO: 316895
ugaacuggguguuucuaaa

SEQ ID NO: 448556 - RNA, 19 nt, Artificial Sequence
  Description of Artificial Sequence: Synthetic oligonucleotide
  Antisense Strand to SEQ ID NO: 448555
uuuagaaacacccaguuca

SEQ ID NO: 448557 - RNA, 19 nt, Artificial Sequence
  Description of Artificial Sequence: Synthetic oligonucleotide
  Sense strand starting at position 614 of SEQ ID NO: 316895
gggagaagauggagugcua

SEQ ID NO: 448558 - RNA, 19 nt, Artificial Sequence
  Description of Artificial Sequence: Synthetic oligonucleotide
  Antisense Strand to SEQ ID NO: 448557
uagcacuccaucuucuccc

SEQ ID NO: 448559 - RNA, 19 nt, Artificial Sequence
  Description of Artificial Sequence: Synthetic oligonucleotide
  Sense strand starting at position 717 of SEQ ID NO: 316895
cuggcugagcuaugaaaca

SEQ ID NO: 448560 - RNA, 19 nt, Artificial Sequence
  Description of Artificial Sequence: Synthetic oligonucleotide
  Antisense Strand to SEQ ID NO: 448559
uguuucauagcucagccag

SEQ ID NO: 448561 - RNA, 19 nt, Artificial Sequence
  Description of Artificial Sequence: Synthetic oligonucleotide
  Sense strand starting at position 751 of SEQ ID NO: 316895
gacaaugguucugcauaau

SEQ ID NO: 448562 - RNA, 19 nt, Artificial Sequence
  Description of Artificial Sequence: Synthetic oligonucleotide
  Antisense Strand to SEQ ID NO: 448561
auuaugcagaaccauuguc

SEQ ID NO: 448563 - RNA, 19 nt, Artificial Sequence
  Description of Artificial Sequence: Synthetic oligonucleotide
  Sense strand starting at position 763 of SEQ ID NO: 316895
gcauaaugcuaugcaauuu

SEQ ID NO: 448564 - RNA, 19 nt, Artificial Sequence
  Description of Artificial Sequence: Synthetic oligonucleotide
  Antisense Strand to SEQ ID NO: 448563
aaauugcauagcauuaugc

SEQ ID NO: 448565 - RNA, 19 nt, Artificial Sequence
  Description of Artificial Sequence: Synthetic oligonucleotide
  Sense strand starting at position 808 of SEQ ID NO: 316895
augcuuaaacaguagucau

SEQ ID NO: 448566 - RNA, 19 nt, Artificial Sequence
  Description of Artificial Sequence: Synthetic oligonucleotide
  Antisense Strand to SEQ ID NO: 448565
augacuacuguuuaagcau

SEQ ID NO: 448567 - RNA, 19 nt, Artificial Sequence
  Description of Artificial Sequence: Synthetic oligonucleotide
  Sense strand starting at position 844 of SEQ ID NO: 316895
uuggaucauuuccacaaga

SEQ ID NO: 448568 - RNA, 19 nt, Artificial Sequence
  Description of Artificial Sequence: Synthetic oligonucleotide
  Antisense Strand to SEQ ID NO: 448567
ucuuguggaaaugauccaa

SEQ ID NO: 448569 - RNA, 19 nt, Artificial Sequence
  Description of Artificial Sequence: Synthetic oligonucleotide
  Sense strand starting at position 883 of SEQ ID NO: 316895
gcagauauccaugacuuuc

SEQ ID NO: 448570 - RNA, 19 nt, Artificial Sequence
  Description of Artificial Sequence: Synthetic oligonucleotide
  Antisense Strand to SEQ ID NO: 448569
gaaagucauggauaucugc

SEQ ID NO: 448571 - RNA, 19 nt, Artificial Sequence
  Description of Artificial Sequence: Synthetic oligonucleotide
  Sense strand starting at position 913 of SEQ ID NO: 316895
cugacaaauacguggaaug

SEQ ID NO: 448572 - RNA, 19 nt, Artificial Sequence
  Description of Artificial Sequence: Synthetic oligonucleotide
  Antisense Strand to SEQ ID NO: 448571
cauuccacguauuugucag

SEQ ID NO: 448573 - RNA, 19 nt, Artificial Sequence
  Description of Artificial Sequence: Synthetic oligonucleotide
  Sense strand starting at position 914 of SEQ ID NO: 316895
ugacaaauacguggaaugu

SEQ ID NO: 448574 - RNA, 19 nt, Artificial Sequence
  Description of Artificial Sequence: Synthetic oligonucleotide
  Antisense Strand to SEQ ID NO: 448573
acauuccacguauuuguca

SEQ ID NO: 448575 - RNA, 19 nt, Artificial Sequence
  Description of Artificial Sequence: Synthetic oligonucleotide
  Sense strand starting at position 915 of SEQ ID NO: 316895
gacaaauacguggaauguu

SEQ ID NO: 448576 - RNA, 19 nt, Artificial Sequence
  Description of Artificial Sequence: Synthetic oligonucleotide
  Antisense Strand to SEQ ID NO: 448575
aacauuccacguauuuguc

SEQ ID NO: 448577 - RNA, 19 nt, Artificial Sequence
  Description of Artificial Sequence: Synthetic oligonucleotide
  Sense strand starting at position 918 of SEQ ID NO: 316895
aaauacguggaauguuaau

SEQ ID NO: 448578 - RNA, 19 nt, Artificial Sequence
  Description of Artificial Sequence: Synthetic oligonucleotide
  Antisense Strand to SEQ ID NO: 448577
auuaacauuccacguauuu

SEQ ID NO: 448579 - RNA, 19 nt, Artificial Sequence
  Description of Artificial Sequence: Synthetic oligonucleotide
  Sense strand starting at position 1063 of SEQ ID NO: 316895
uuuauucgagcucauauaa

SEQ ID NO: 448580 - RNA, 19 nt, Artificial Sequence
  Description of Artificial Sequence: Synthetic oligonucleotide
  Antisense Strand to SEQ ID NO: 448579
uuauaugagcucgaauaaa

SEQ ID NO: 448581 - RNA, 19 nt, Artificial Sequence
  Description of Artificial Sequence: Synthetic oligonucleotide
  Sense strand starting at position 1117 of SEQ ID NO: 316895
aucuacauccaguaagugu

SEQ ID NO: 448582 - RNA, 19 nt, Artificial Sequence
  Description of Artificial Sequence: Synthetic oligonucleotide
  Antisense Strand to SEQ ID NO: 448581
acacuuacuggauguagau

SEQ ID NO: 448583 - RNA, 19 nt, Artificial Sequence
  Description of Artificial Sequence: Synthetic oligonucleotide
  Sense strand starting at position 2592 of SEQ ID NO: 316895
gagaguucucgugaaauuc

SEQ ID NO: 448584 - RNA, 19 nt, Artificial Sequence
  Description of Artificial Sequence: Synthetic oligonucleotide
  Antisense Strand to SEQ ID NO: 448583
gaauuucacgagaacucuc

SEQ ID NO: 448585 - RNA, 19 nt, Artificial Sequence
  Description of Artificial Sequence: Synthetic oligonucleotide
  Sense strand starting at position 2601 of SEQ ID NO: 316895
cgugaaauucgggagacuc

SEQ ID NO: 448586 - RNA, 19 nt, Artificial Sequence
  Description of Artificial Sequence: Synthetic oligonucleotide
  Antisense Strand to SEQ ID NO: 448585
gagucucccgaauuucacg

SEQ ID NO: 448587 - RNA, 19 nt, Artificial Sequence
  Description of Artificial Sequence: Synthetic oligonucleotide
  Sense strand starting at position 2921 of SEQ ID NO: 316895
uggaguacugcuggacaga

SEQ ID NO: 448588 - RNA, 19 nt, Artificial Sequence
  Description of Artificial Sequence: Synthetic oligonucleotide
  Antisense Strand to SEQ ID NO: 448587
ucuguccagcaguacucca

SEQ ID NO: 448589 - RNA, 19 nt, Artificial Sequence
  Description of Artificial Sequence: Synthetic oligonucleotide
  Sense strand starting at position 2922 of SEQ ID NO: 316895
ggaguacugcuggacagau

SEQ ID NO: 448590 - RNA, 19 nt, Artificial Sequence
  Description of Artificial Sequence: Synthetic oligonucleotide
  Antisense Strand to SEQ ID NO: 448589
aucuguccagcaguacucc

SEQ ID NO: 448591 - RNA, 19 nt, Artificial Sequence
  Description of Artificial Sequence: Synthetic oligonucleotide
  Sense strand starting at position 3134 of SEQ ID NO: 316895
agaacuuugcaguggaaug

SEQ ID NO: 448592 - RNA, 19 nt, Artificial Sequence
  Description of Artificial Sequence: Synthetic oligonucleotide
  Antisense Strand to SEQ ID NO: 448591
cauuccacugcaaaguucu

SEQ ID NO: 448593 - RNA, 19 nt, Artificial Sequence
  Description of Artificial Sequence: Synthetic oligonucleotide
  Sense strand starting at position 3189 of SEQ ID NO: 316895
uauuauagacagugugaac

SEQ ID NO: 448594 - RNA, 19 nt, Artificial Sequence
  Description of Artificial Sequence: Synthetic oligonucleotide
  Antisense Strand to SEQ ID NO: 448593
guucacacugucuauaaua

SEQ ID NO: 448595 - RNA, 19 nt, Artificial Sequence
  Description of Artificial Sequence: Synthetic oligonucleotide
  Sense strand starting at position 3202 of SEQ ID NO: 316895
gugaacagugguuaaacca

SEQ ID NO: 448596 - RNA, 19 nt, Artificial Sequence
  Description of Artificial Sequence: Synthetic oligonucleotide
  Antisense Strand to SEQ ID NO: 448595
ugguuuaaccacuguucac

SEQ ID NO: 448597 - RNA, 19 nt, Artificial Sequence
  Description of Artificial Sequence: Synthetic oligonucleotide
  Sense strand starting at position 3231 of SEQ ID NO: 316895
aaguuaagauuccugguuu

SEQ ID NO: 448598 - RNA, 19 nt, Artificial Sequence
  Description of Artificial Sequence: Synthetic oligonucleotide
  Antisense Strand to SEQ ID NO: 448597
aaaccaggaaucuuaacuu

SEQ ID NO: 448599 - RNA, 19 nt, Artificial Sequence
  Description of Artificial Sequence: Synthetic oligonucleotide
  Sense strand starting at position 3273 of SEQ ID NO: 316895
guuaacaagcuauaugacu

SEQ ID NO: 448600 - RNA, 19 nt, Artificial Sequence
  Description of Artificial Sequence: Synthetic oligonucleotide
  Antisense Strand to SEQ ID NO: 448599
agucauauagcuuguuaac

SEQ ID NO: 448601 - RNA, 19 nt, Artificial Sequence
  Description of Artificial Sequence: Synthetic oligonucleotide
  Sense strand starting at position 3430 of SEQ ID NO: 316895
gagguagugcugcaggaaa

SEQ ID NO: 448602 - RNA, 19 nt, Artificial Sequence
  Description of Artificial Sequence: Synthetic oligonucleotide
  Antisense Strand to SEQ ID NO: 448601
uuuccugcagcacuaccuc

SEQ ID NO: 448603 - RNA, 19 nt, Artificial Sequence
  Description of Artificial Sequence: Synthetic oligonucleotide
  Sense strand starting at position 3560 of SEQ ID NO: 316895
gggauacagagauggcuua

SEQ ID NO: 448604 - RNA, 19 nt, Artificial Sequence
  Description of Artificial Sequence: Synthetic oligonucleotide
  Antisense Strand to SEQ ID NO: 448603
uaagccaucucuguauccc

SEQ ID NO: 448605 - RNA, 19 nt, Artificial Sequence
  Description of Artificial Sequence: Synthetic oligonucleotide
  Sense strand starting at position 3793 of SEQ ID NO: 316895
gcuaucuuggaaugcagaa

SEQ ID NO: 448606 - RNA, 19 nt, Artificial Sequence
  Description of Artificial Sequence: Synthetic oligonucleotide
  Antisense Strand to SEQ ID NO: 448605
uucugcauuccaagauagc

SEQ ID NO: 448607 - RNA, 19 nt, Artificial Sequence
  Description of Artificial Sequence: Synthetic oligonucleotide
  Sense strand starting at position 3886 of SEQ ID NO: 316895
uuagaaugaugucugucau

SEQ ID NO: 448608 - RNA, 19 nt, Artificial Sequence
  Description of Artificial Sequence: Synthetic oligonucleotide
  Antisense Strand to SEQ ID NO: 448607
augacagacaucauucuaa

SEQ ID NO: 448609 - RNA, 19 nt, Artificial Sequence
  Description of Artificial Sequence: Synthetic oligonucleotide
  Sense strand starting at position 3887 of SEQ ID NO: 316895
uagaaugaugucugucaua

SEQ ID NO: 448610 - RNA, 19 nt, Artificial Sequence
  Description of Artificial Sequence: Synthetic oligonucleotide
  Antisense Strand to SEQ ID NO: 448609
uaugacagacaucauucua

SEQ ID NO: 448611 - RNA, 19 nt, Artificial Sequence
  Description of Artificial Sequence: Synthetic oligonucleotide
  Sense strand starting at position 3898 of SEQ ID NO: 316895
cugucauaaagugaguauu

SEQ ID NO: 448612 - RNA, 19 nt, Artificial Sequence
  Description of Artificial Sequence: Synthetic oligonucleotide
  Antisense Strand to SEQ ID NO: 448611
aauacucacuuuaugacag

SEQ ID NO: 448613 - RNA, 19 nt, Artificial Sequence
  Description of Artificial Sequence: Synthetic oligonucleotide
  Sense strand starting at position 181 of SEQ ID NO: 316896
ugaaguaccucaucagaca

SEQ ID NO: 448614 - RNA, 19 nt, Artificial Sequence
  Description of Artificial Sequence: Synthetic oligonucleotide
  Antisense Strand to SEQ ID NO: 448613
ugucugaugagguacuuca

SEQ ID NO: 448615 - RNA, 19 nt, Artificial Sequence
  Description of Artificial Sequence: Synthetic oligonucleotide
  Sense strand starting at position 193 of SEQ ID NO: 316896
ucagacauauugucagguu

SEQ ID NO: 448616 - RNA, 19 nt, Artificial Sequence
  Description of Artificial Sequence: Synthetic oligonucleotide
  Antisense Strand to SEQ ID NO: 448615
aaccugacaauaugucuga

SEQ ID NO: 448617 - RNA, 19 nt, Artificial Sequence
  Description of Artificial Sequence: Synthetic oligonucleotide
  Sense strand starting at position 206 of SEQ ID NO: 316896
cagguuaauuggcuaaaga

SEQ ID NO: 448618 - RNA, 19 nt, Artificial Sequence
  Description of Artificial Sequence: Synthetic oligonucleotide
  Antisense Strand to SEQ ID NO: 448617
ucuuuagccaauuaaccug

SEQ ID NO: 448619 - RNA, 19 nt, Artificial Sequence
  Description of Artificial Sequence: Synthetic oligonucleotide
  Sense strand starting at position 615 of SEQ ID NO: 316896
gagaaccuucuacguaaga

SEQ ID NO: 448620 - RNA, 19 nt, Artificial Sequence
  Description of Artificial Sequence: Synthetic oligonucleotide
  Antisense Strand to SEQ ID NO: 448619
ucuuacguagaagguucuc

SEQ ID NO: 448621 - RNA, 19 nt, Artificial Sequence
  Description of Artificial Sequence: Synthetic oligonucleotide
  Sense strand starting at position 639 of SEQ ID NO: 316896
gaacccagucgcugagaaa

SEQ ID NO: 448622 - RNA, 19 nt, Artificial Sequence
  Description of Artificial Sequence: Synthetic oligonucleotide
  Antisense Strand to SEQ ID NO: 448621
uuucucagcgacuggguuc

SEQ ID NO: 448623 - RNA, 19 nt, Artificial Sequence
  Description of Artificial Sequence: Synthetic oligonucleotide
  Sense strand starting at position 646 of SEQ ID NO: 316896
gucgcugagaaacaaauaa

SEQ ID NO: 448624 - RNA, 19 nt, Artificial Sequence
  Description of Artificial Sequence: Synthetic oligonucleotide
  Antisense Strand to SEQ ID NO: 448623
uuauuuguuucucagcgac

SEQ ID NO: 448625 - RNA, 19 nt, Artificial Sequence
  Description of Artificial Sequence: Synthetic oligonucleotide
  Sense strand starting at position 758 of SEQ ID NO: 316896
auuacuggaaagugguaaa

SEQ ID NO: 448626 - RNA, 19 nt, Artificial Sequence
  Description of Artificial Sequence: Synthetic oligonucleotide
  Antisense Strand to SEQ ID NO: 448625
uuuaccacuuuccaguaau

SEQ ID NO: 448627 - RNA, 19 nt, Artificial Sequence
  Description of Artificial Sequence: Synthetic oligonucleotide
  Sense strand starting at position 849 of SEQ ID NO: 316896
ccuugucauuucucagguu

SEQ ID NO: 448628 - RNA, 19 nt, Artificial Sequence
  Description of Artificial Sequence: Synthetic oligonucleotide
  Antisense Strand to SEQ ID NO: 448627
aaccugagaaaugacaagg

SEQ ID NO: 448629 - RNA, 19 nt, Artificial Sequence
  Description of Artificial Sequence: Synthetic oligonucleotide
  Sense strand starting at position 1144 of SEQ ID NO: 316896
gguugacuccuguaccuga

SEQ ID NO: 448630 - RNA, 19 nt, Artificial Sequence
  Description of Artificial Sequence: Synthetic oligonucleotide
  Antisense Strand to SEQ ID NO: 448629
ucagguacaggagucaacc

SEQ ID NO: 448631 - RNA, 19 nt, Artificial Sequence
  Description of Artificial Sequence: Synthetic oligonucleotide
  Sense strand starting at position 1301 of SEQ ID NO: 316896
agaggugaccgcgaugaga

SEQ ID NO: 448632 - RNA, 19 nt, Artificial Sequence
  Description of Artificial Sequence: Synthetic oligonucleotide
  Antisense Strand to SEQ ID NO: 448631
ucucaucgcggucaccucu

SEQ ID NO: 448633 - RNA, 19 nt, Artificial Sequence
  Description of Artificial Sequence: Synthetic oligonucleotide
  Sense strand starting at position 1304 of SEQ ID NO: 316896
ggugaccgcgaugagaaua

SEQ ID NO: 448634 - RNA, 19 nt, Artificial Sequence
  Description of Artificial Sequence: Synthetic oligonucleotide
  Antisense Strand to SEQ ID NO: 448633
uauucucaucgcggucacc

SEQ ID NO: 448635 - RNA, 19 nt, Artificial Sequence
  Description of Artificial Sequence: Synthetic oligonucleotide
  Sense strand starting at position 1309 of SEQ ID NO: 316896
ccgcgaugagaauaccaga

SEQ ID NO: 448636 - RNA, 19 nt, Artificial Sequence
  Description of Artificial Sequence: Synthetic oligonucleotide
  Antisense Strand to SEQ ID NO: 448635
ucugguauucucaucgcgg

SEQ ID NO: 448637 - RNA, 19 nt, Artificial Sequence
  Description of Artificial Sequence: Synthetic oligonucleotide
  Sense strand starting at position 2026 of SEQ ID NO: 316896
gggagccuugcuuauauac

SEQ ID NO: 448638 - RNA, 19 nt, Artificial Sequence
  Description of Artificial Sequence: Synthetic oligonucleotide
  Antisense Strand to SEQ ID NO: 448637
guauauaagcaaggcuccc

SEQ ID NO: 448639 - RNA, 19 nt, Artificial Sequence
  Description of Artificial Sequence: Synthetic oligonucleotide
  Sense strand starting at position 2104 of SEQ ID NO: 316896
ucagaauuagguugugacu

SEQ ID NO: 448640 - RNA, 19 nt, Artificial Sequence
  Description of Artificial Sequence: Synthetic oligonucleotide
  Antisense Strand to SEQ ID NO: 448639
agucacaaccuaauucuga

SEQ ID NO: 448641 - RNA, 19 nt, Artificial Sequence
  Description of Artificial Sequence: Synthetic oligonucleotide
  Sense strand starting at position 2111 of SEQ ID NO: 316896
uagguugugacuuaggguu

SEQ ID NO: 448642 - RNA, 19 nt, Artificial Sequence
  Description of Artificial Sequence: Synthetic oligonucleotide
  Antisense Strand to SEQ ID NO: 448641
aacccuaagucacaaccua

SEQ ID NO: 448643 - RNA, 19 nt, Artificial Sequence
  Description of Artificial Sequence: Synthetic oligonucleotide
  Sense strand starting at position 2117 of SEQ ID NO: 316896
gugacuuaggguuggaaag

SEQ ID NO: 448644 - RNA, 19 nt, Artificial Sequence
  Description of Artificial Sequence: Synthetic oligonucleotide
  Antisense Strand to SEQ ID NO: 448643
cuuuccaacccuaagucac

SEQ ID NO: 448645 - RNA, 19 nt, Artificial Sequence
  Description of Artificial Sequence: Synthetic oligonucleotide
  Sense strand starting at position 2118 of SEQ ID NO: 316896
ugacuuaggguuggaaagu

SEQ ID NO: 448646 - RNA, 19 nt, Artificial Sequence
  Description of Artificial Sequence: Synthetic oligonucleotide
  Antisense Strand to SEQ ID NO: 448645
acuuuccaacccuaaguca

SEQ ID NO: 448647 - RNA, 19 nt, Artificial Sequence
  Description of Artificial Sequence: Synthetic oligonucleotide
  Sense strand starting at position 2133 of SEQ ID NO: 316896
aaguuauaggcuuacugau

SEQ ID NO: 448648 - RNA, 19 nt, Artificial Sequence
  Description of Artificial Sequence: Synthetic oligonucleotide
  Antisense Strand to SEQ ID NO: 448647
aucaguaagccuauaacuu

SEQ ID NO: 448649 - RNA, 19 nt, Artificial Sequence
  Description of Artificial Sequence: Synthetic oligonucleotide
  Sense strand starting at position 2299 of SEQ ID NO: 316896
guaacaaguuaaucuugaa

SEQ ID NO: 448650 - RNA, 19 nt, Artificial Sequence
  Description of Artificial Sequence: Synthetic oligonucleotide
  Antisense Strand to SEQ ID NO: 448649
uucaagauuaacuuguuac

SEQ ID NO: 448651 - RNA, 19 nt, Artificial Sequence
  Description of Artificial Sequence: Synthetic oligonucleotide
  Sense strand starting at position 2303 of SEQ ID NO: 316896
caaguuaaucuugaaguug

SEQ ID NO: 448652 - RNA, 19 nt, Artificial Sequence
  Description of Artificial Sequence: Synthetic oligonucleotide
  Antisense Strand to SEQ ID NO: 448651
caacuucaagauuaacuug

SEQ ID NO: 448653 - RNA, 19 nt, Artificial Sequence
  Description of Artificial Sequence: Synthetic oligonucleotide
  Sense strand starting at position 2338 of SEQ ID NO: 316896
uggaauuauggccaugcua

SEQ ID NO: 448654 - RNA, 19 nt, Artificial Sequence
  Description of Artificial Sequence: Synthetic oligonucleotide
  Antisense Strand to SEQ ID NO: 448653
uagcauggccauaauucca

SEQ ID NO: 448655 - RNA, 19 nt, Artificial Sequence
  Description of Artificial Sequence: Synthetic oligonucleotide
  Sense strand starting at position 2340 of SEQ ID NO: 316896
gaauuauggccaugcuaga

SEQ ID NO: 448656 - RNA, 19 nt, Artificial Sequence
  Description of Artificial Sequence: Synthetic oligonucleotide
  Antisense Strand to SEQ ID NO: 448655
ucuagcauggccauaauuc

SEQ ID NO: 448657 - RNA, 19 nt, Artificial Sequence
  Description of Artificial Sequence: Synthetic oligonucleotide
  Sense strand starting at position 2370 of SEQ ID NO: 316896
ccgaauuaucugcagaccu

SEQ ID NO: 448658 - RNA, 19 nt, Artificial Sequence
  Description of Artificial Sequence: Synthetic oligonucleotide
  Antisense Strand to SEQ ID NO: 448657
aggucugcagauaauucgg

SEQ ID NO: 448659 - RNA, 19 nt, Artificial Sequence
  Description of Artificial Sequence: Synthetic oligonucleotide
  Sense strand starting at position 2592 of SEQ ID NO: 316896
gauaauaucgagcauuaug

SEQ ID NO: 448660 - RNA, 19 nt, Artificial Sequence
  Description of Artificial Sequence: Synthetic oligonucleotide
  Antisense Strand to SEQ ID NO: 448659
cauaaugcucgauauuauc

SEQ ID NO: 448661 - RNA, 19 nt, Artificial Sequence
  Description of Artificial Sequence: Synthetic oligonucleotide
  Sense strand starting at position 2633 of SEQ ID NO: 316896
cauugacuguuauuagagu

SEQ ID NO: 448662 - RNA, 19 nt, Artificial Sequence
  Description of Artificial Sequence: Synthetic oligonucleotide
  Antisense Strand to SEQ ID NO: 448661
acucuaauaacagucaaug

SEQ ID NO: 448663 - RNA, 19 nt, Artificial Sequence
  Description of Artificial Sequence: Synthetic oligonucleotide
  Sense strand starting at position 2728 of SEQ ID NO: 316896
cucuaacagcaaugagauu

SEQ ID NO: 448664 - RNA, 19 nt, Artificial Sequence
  Description of Artificial Sequence: Synthetic oligonucleotide
  Antisense Strand to SEQ ID NO: 448663
aaucucauugcuguuagag

SEQ ID NO: 448665 - RNA, 19 nt, Artificial Sequence
  Description of Artificial Sequence: Synthetic oligonucleotide
  Sense strand starting at position 2737 of SEQ ID NO: 316896
caaugagauugagcgaugu

SEQ ID NO: 448666 - RNA, 19 nt, Artificial Sequence
  Description of Artificial Sequence: Synthetic oligonucleotide
  Antisense Strand to SEQ ID NO: 448665
acaucgcucaaucucauug

SEQ ID NO: 448667 - RNA, 19 nt, Artificial Sequence
  Description of Artificial Sequence: Synthetic oligonucleotide
  Sense strand starting at position 2739 of SEQ ID NO: 316896
augagauugagcgauguug

SEQ ID NO: 448668 - RNA, 19 nt, Artificial Sequence
  Description of Artificial Sequence: Synthetic oligonucleotide
  Antisense Strand to SEQ ID NO: 448667
caacaucgcucaaucucau

SEQ ID NO: 448669 - RNA, 19 nt, Artificial Sequence
  Description of Artificial Sequence: Synthetic oligonucleotide
  Sense strand starting at position 2741 of SEQ ID NO: 316896
gagauugagcgauguugaa

SEQ ID NO: 448670 - RNA, 19 nt, Artificial Sequence
  Description of Artificial Sequence: Synthetic oligonucleotide
  Antisense Strand to SEQ ID NO: 448669
uucaacaucgcucaaucuc

SEQ ID NO: 448671 - RNA, 19 nt, Artificial Sequence
  Description of Artificial Sequence: Synthetic oligonucleotide
  Sense strand starting at position 2862 of SEQ ID NO: 316896
agagcuucuuuauuauuga

SEQ ID NO: 448672 - RNA, 19 nt, Artificial Sequence
  Description of Artificial Sequence: Synthetic oligonucleotide
  Antisense Strand to SEQ ID NO: 448671
ucaauaauaaagaagcucu

SEQ ID NO: 448673 - RNA, 19 nt, Artificial Sequence
  Description of Artificial Sequence: Synthetic oligonucleotide
  Sense strand starting at position 2930 of SEQ ID NO: 316896
ugaucagugcuauaaguug

SEQ ID NO: 448674 - RNA, 19 nt, Artificial Sequence
  Description of Artificial Sequence: Synthetic oligonucleotide
  Antisense Strand to SEQ ID NO: 448673
caacuuauagcacugauca

SEQ ID NO: 448675 - RNA, 19 nt, Artificial Sequence
  Description of Artificial Sequence: Synthetic oligonucleotide
  Sense strand starting at position 2982 of SEQ ID NO: 316896
augaaaguaagguguuaaa

SEQ ID NO: 448676 - RNA, 19 nt, Artificial Sequence
  Description of Artificial Sequence: Synthetic oligonucleotide
  Antisense Strand to SEQ ID NO: 448675
uuuaacaccuuacuuucau

SEQ ID NO: 448677 - RNA, 19 nt, Artificial Sequence
  Description of Artificial Sequence: Synthetic oligonucleotide
  Sense strand starting at position 3176 of SEQ ID NO: 316896
ucacgagcucugcuuguau

SEQ ID NO: 448678 - RNA, 19 nt, Artificial Sequence
  Description of Artificial Sequence: Synthetic oligonucleotide
  Antisense Strand to SEQ ID NO: 448677
auacaagcagagcucguga

SEQ ID NO: 448679 - RNA, 19 nt, Artificial Sequence
  Description of Artificial Sequence: Synthetic oligonucleotide
  Sense strand starting at position 3230 of SEQ ID NO: 316896
gagacauaacuuuguuguc

SEQ ID NO: 448680 - RNA, 19 nt, Artificial Sequence
  Description of Artificial Sequence: Synthetic oligonucleotide
  Antisense Strand to SEQ ID NO: 448679
gacaacaaaguuaugucuc

SEQ ID NO: 448681 - RNA, 19 nt, Artificial Sequence
  Description of Artificial Sequence: Synthetic oligonucleotide
  Sense strand starting at position 3231 of SEQ ID NO: 316896
agacauaacuuuguuguca

SEQ ID NO: 448682 - RNA, 19 nt, Artificial Sequence
  Description of Artificial Sequence: Synthetic oligonucleotide
  Antisense Strand to SEQ ID NO: 448681
ugacaacaaaguuaugucu

SEQ ID NO: 448683 - RNA, 19 nt, Artificial Sequence
  Description of Artificial Sequence: Synthetic oligonucleotide
  Sense strand starting at position 3235 of SEQ ID NO: 316896
auaacuuuguugucagaaa

SEQ ID NO: 448684 - RNA, 19 nt, Artificial Sequence
  Description of Artificial Sequence: Synthetic oligonucleotide
  Antisense Strand to SEQ ID NO: 448683
uuucugacaacaaaguuau

SEQ ID NO: 448685 - RNA, 19 nt, Artificial Sequence
  Description of Artificial Sequence: Synthetic oligonucleotide
  Sense strand starting at position 3316 of SEQ ID NO: 316896
aaggaaaggugagaagaua

SEQ ID NO: 448686 - RNA, 19 nt, Artificial Sequence
  Description of Artificial Sequence: Synthetic oligonucleotide
  Antisense Strand to SEQ ID NO: 448685
uaucuucucaccuuuccuu

SEQ ID NO: 448687 - RNA, 19 nt, Artificial Sequence
  Description of Artificial Sequence: Synthetic oligonucleotide
  Sense strand starting at position 3600 of SEQ ID NO: 316896
aaggcuuaucuugggaaau

SEQ ID NO: 448688 - RNA, 19 nt, Artificial Sequence
  Description of Artificial Sequence: Synthetic oligonucleotide
  Antisense Strand to SEQ ID NO: 448687
auuucccaagauaagccuu

SEQ ID NO: 448689 - RNA, 19 nt, Artificial Sequence
  Description of Artificial Sequence: Synthetic oligonucleotide
  Sense strand starting at position 3840 of SEQ ID NO: 316896
ugcacaagucuauaaagua

SEQ ID NO: 448690 - RNA, 19 nt, Artificial Sequence
  Description of Artificial Sequence: Synthetic oligonucleotide
  Antisense Strand to SEQ ID NO: 448689
uacuuuauagacuugugca

SEQ ID NO: 448691 - RNA, 19 nt, Artificial Sequence
  Description of Artificial Sequence: Synthetic oligonucleotide
  Sense strand starting at position 3948 of SEQ ID NO: 316896
gggaaauggcuguggaaau

SEQ ID NO: 448692 - RNA, 19 nt, Artificial Sequence
  Description of Artificial Sequence: Synthetic oligonucleotide
  Antisense Strand to SEQ ID NO: 448691
auuuccacagccauuuccc

SEQ ID NO: 448693 - RNA, 19 nt, Artificial Sequence
  Description of Artificial Sequence: Synthetic oligonucleotide
  Sense strand starting at position 82 of SEQ ID NO: 316897
ucaggaaagccuuacaguu

SEQ ID NO: 448694 - RNA, 19 nt, Artificial Sequence
  Description of Artificial Sequence: Synthetic oligonucleotide
  Antisense Strand to SEQ ID NO: 448693
aacuguaaggcuuuccuga

SEQ ID NO: 448695 - RNA, 19 nt, Artificial Sequence
  Description of Artificial Sequence: Synthetic oligonucleotide
  Sense strand starting at position 144 of SEQ ID NO: 316897
acuuaauguccauguuaga

SEQ ID NO: 448696 - RNA, 19 nt, Artificial Sequence
  Description of Artificial Sequence: Synthetic oligonucleotide
  Antisense Strand to SEQ ID NO: 448695
ucuaacauggacauuaagu

SEQ ID NO: 448697 - RNA, 19 nt, Artificial Sequence
  Description of Artificial Sequence: Synthetic oligonucleotide
  Sense strand starting at position 199 of SEQ ID NO: 316897
ggcaaucucccauauguac

SEQ ID NO: 448698 - RNA, 19 nt, Artificial Sequence
  Description of Artificial Sequence: Synthetic oligonucleotide
  Antisense Strand to SEQ ID NO: 448697
guacauaugggagauugcc

SEQ ID NO: 448699 - RNA, 19 nt, Artificial Sequence
  Description of Artificial Sequence: Synthetic oligonucleotide
  Sense strand starting at position 610 of SEQ ID NO: 316897
cuuguuuggcguagaagug

SEQ ID NO: 448700 - RNA, 19 nt, Artificial Sequence
  Description of Artificial Sequence: Synthetic oligonucleotide
  Antisense Strand to SEQ ID NO: 448699
cacuucuacgccaaacaag

SEQ ID NO: 448701 - RNA, 19 nt, Artificial Sequence
  Description of Artificial Sequence: Synthetic oligonucleotide
  Sense strand starting at position 734 of SEQ ID NO: 316897
aguguuauggauuauucua

SEQ ID NO: 448702 - RNA, 19 nt, Artificial Sequence
  Description of Artificial Sequence: Synthetic oligonucleotide
  Antisense Strand to SEQ ID NO: 448701
uagaauaauccauaacacu

SEQ ID NO: 448703 - RNA, 19 nt, Artificial Sequence
  Description of Artificial Sequence: Synthetic oligonucleotide
  Sense strand starting at position 852 of SEQ ID NO: 316897
gaacccuaacaguguugau

SEQ ID NO: 448704 - RNA, 19 nt, Artificial Sequence
  Description of Artificial Sequence: Synthetic oligonucleotide
  Antisense Strand to SEQ ID NO: 448703
aucaacacuguuaggguuc

SEQ ID NO: 448705 - RNA, 19 nt, Artificial Sequence
  Description of Artificial Sequence: Synthetic oligonucleotide
  Sense strand starting at position 1018 of SEQ ID NO: 316897
ucauguuaacaggguuaaa

SEQ ID NO: 448706 - RNA, 19 nt, Artificial Sequence
  Description of Artificial Sequence: Synthetic oligonucleotide
  Antisense Strand to SEQ ID NO: 448705
uuuaacccuguuaacauga

SEQ ID NO: 448707 - RNA, 19 nt, Artificial Sequence
  Description of Artificial Sequence: Synthetic oligonucleotide
  Sense strand starting at position 1058 of SEQ ID NO: 316897
guacguaauccugagaaac

SEQ ID NO: 448708 - RNA, 19 nt, Artificial Sequence
  Description of Artificial Sequence: Synthetic oligonucleotide
  Antisense Strand to SEQ ID NO: 448707
guuucucaggauuacguac

SEQ ID NO: 448709 - RNA, 19 nt, Artificial Sequence
  Description of Artificial Sequence: Synthetic oligonucleotide
  Sense strand starting at position 1143 of SEQ ID NO: 316897
ucguaacugccacacaaua

SEQ ID NO: 448710 - RNA, 19 nt, Artificial Sequence
  Description of Artificial Sequence: Synthetic oligonucleotide
  Antisense Strand to SEQ ID NO: 448709
uauuguguggcaguuacga

SEQ ID NO: 448711 - RNA, 19 nt, Artificial Sequence
  Description of Artificial Sequence: Synthetic oligonucleotide
  Sense strand starting at position 1199 of SEQ ID NO: 316897
uguuccuauuaaguuugaa

SEQ ID NO: 448712 - RNA, 19 nt, Artificial Sequence
  Description of Artificial Sequence: Synthetic oligonucleotide
  Antisense Strand to SEQ ID NO: 448711
uucaaacuuaauaggaaca

SEQ ID NO: 448713 - RNA, 19 nt, Artificial Sequence
  Description of Artificial Sequence: Synthetic oligonucleotide
  Sense strand starting at position 1202 of SEQ ID NO: 316897
uccuauuaaguuugaaugu

SEQ ID NO: 448714 - RNA, 19 nt, Artificial Sequence
  Description of Artificial Sequence: Synthetic oligonucleotide
  Antisense Strand to SEQ ID NO: 448713
acauucaaacuuaauagga

SEQ ID NO: 448715 - RNA, 19 nt, Artificial Sequence
  Description of Artificial Sequence: Synthetic oligonucleotide
  Sense strand starting at position 1375 of SEQ ID NO: 316897
ugcuaauauuugucaacgu

SEQ ID NO: 448716 - RNA, 19 nt, Artificial Sequence
  Description of Artificial Sequence: Synthetic oligonucleotide
  Antisense Strand to SEQ ID NO: 448715
acguugacaaauauuagca

SEQ ID NO: 448717 - RNA, 19 nt, Artificial Sequence
  Description of Artificial Sequence: Synthetic oligonucleotide
  Sense strand starting at position 1427 of SEQ ID NO: 316897
uuagauaaaucugcaggau

SEQ ID NO: 448718 - RNA, 19 nt, Artificial Sequence
  Description of Artificial Sequence: Synthetic oligonucleotide
  Antisense Strand to SEQ ID NO: 448717
auccugcagauuuaucuaa

SEQ ID NO: 448719 - RNA, 19 nt, Artificial Sequence
  Description of Artificial Sequence: Synthetic oligonucleotide
  Sense strand starting at position 1734 of SEQ ID NO: 316897
cacaguuugaugugguaga

SEQ ID NO: 448720 - RNA, 19 nt, Artificial Sequence
  Description of Artificial Sequence: Synthetic oligonucleotide
  Antisense Strand to SEQ ID NO: 448719
ucuaccacaucaaacugug

SEQ ID NO: 448721 - RNA, 19 nt, Artificial Sequence
  Description of Artificial Sequence: Synthetic oligonucleotide
  Sense strand starting at position 1780 of SEQ ID NO: 316897
ggaaccaagccaugguuua

SEQ ID NO: 448722 - RNA, 19 nt, Artificial Sequence
  Description of Artificial Sequence: Synthetic oligonucleotide
  Antisense Strand to SEQ ID NO: 448721
uaaaccauggcuugguucc

SEQ ID NO: 448723 - RNA, 19 nt, Artificial Sequence
  Description of Artificial Sequence: Synthetic oligonucleotide
  Sense strand starting at position 1785 of SEQ ID NO: 316897
caagccaugguuuagagua

SEQ ID NO: 448724 - RNA, 19 nt, Artificial Sequence
  Description of Artificial Sequence: Synthetic oligonucleotide
  Antisense Strand to SEQ ID NO: 448723
uacucuaaaccauggcuug

SEQ ID NO: 448725 - RNA, 19 nt, Artificial Sequence
  Description of Artificial Sequence: Synthetic oligonucleotide
  Sense strand starting at position 1790 of SEQ ID NO: 316897
caugguuuagaguagguuu

SEQ ID NO: 448726 - RNA, 19 nt, Artificial Sequence
  Description of Artificial Sequence: Synthetic oligonucleotide
  Antisense Strand to SEQ ID NO: 448725
aaaccuacucuaaaccaug

SEQ ID NO: 448727 - RNA, 19 nt, Artificial Sequence
  Description of Artificial Sequence: Synthetic oligonucleotide
  Sense strand starting at position 1830 of SEQ ID NO: 316897
acuccucuugguugacgaa

SEQ ID NO: 448728 - RNA, 19 nt, Artificial Sequence
  Description of Artificial Sequence: Synthetic oligonucleotide
  Antisense Strand to SEQ ID NO: 448727
uucgucaaccaagaggagu

SEQ ID NO: 448729 - RNA, 19 nt, Artificial Sequence
  Description of Artificial Sequence: Synthetic oligonucleotide
  Sense strand starting at position 1831 of SEQ ID NO: 316897
cuccucuugguugacgaau

SEQ ID NO: 448730 - RNA, 19 nt, Artificial Sequence
  Description of Artificial Sequence: Synthetic oligonucleotide
  Antisense Strand to SEQ ID NO: 448729
auucgucaaccaagaggag

SEQ ID NO: 448731 - RNA, 19 nt, Artificial Sequence
  Description of Artificial Sequence: Synthetic oligonucleotide
  Sense strand starting at position 1844 of SEQ ID NO: 316897
acgaauacucucuacaugu

SEQ ID NO: 448732 - RNA, 19 nt, Artificial Sequence
  Description of Artificial Sequence: Synthetic oligonucleotide
  Antisense Strand to SEQ ID NO: 448731
acauguagagaguauucgu

SEQ ID NO: 448733 - RNA, 19 nt, Artificial Sequence
  Description of Artificial Sequence: Synthetic oligonucleotide
  Sense strand starting at position 2013 of SEQ ID NO: 316897
agugcaaacuauccuagaa

SEQ ID NO: 448734 - RNA, 19 nt, Artificial Sequence
  Description of Artificial Sequence: Synthetic oligonucleotide
  Antisense Strand to SEQ ID NO: 448733
uucuaggauaguuugcacu

SEQ ID NO: 448735 - RNA, 19 nt, Artificial Sequence
  Description of Artificial Sequence: Synthetic oligonucleotide
  Sense strand starting at position 2180 of SEQ ID NO: 316897
aucuaagaguguuuccuag

SEQ ID NO: 448736 - RNA, 19 nt, Artificial Sequence
  Description of Artificial Sequence: Synthetic oligonucleotide
  Antisense Strand to SEQ ID NO: 448735
cuaggaaacacucuuagau

SEQ ID NO: 448737 - RNA, 19 nt, Artificial Sequence
  Description of Artificial Sequence: Synthetic oligonucleotide
  Sense strand starting at position 2182 of SEQ ID NO: 316897
cuaagaguguuuccuagaa

SEQ ID NO: 448738 - RNA, 19 nt, Artificial Sequence
  Description of Artificial Sequence: Synthetic oligonucleotide
  Antisense Strand to SEQ ID NO: 448737
uucuaggaaacacucuuag

SEQ ID NO: 448739 - RNA, 19 nt, Artificial Sequence
  Description of Artificial Sequence: Synthetic oligonucleotide
  Sense strand starting at position 2186 of SEQ ID NO: 316897
gaguguuuccuagaaagug

SEQ ID NO: 448740 - RNA, 19 nt, Artificial Sequence
  Description of Artificial Sequence: Synthetic oligonucleotide
  Antisense Strand to SEQ ID NO: 448739
cacuuucuaggaaacacuc

SEQ ID NO: 448741 - RNA, 19 nt, Artificial Sequence
  Description of Artificial Sequence: Synthetic oligonucleotide
  Sense strand starting at position 2248 of SEQ ID NO: 316897
auuguaucuugaguaucua

SEQ ID NO: 448742 - RNA, 19 nt, Artificial Sequence
  Description of Artificial Sequence: Synthetic oligonucleotide
  Antisense Strand to SEQ ID NO: 448741
uagauacucaagauacaau

SEQ ID NO: 448743 - RNA, 19 nt, Artificial Sequence
  Description of Artificial Sequence: Synthetic oligonucleotide
  Sense strand starting at position 2249 of SEQ ID NO: 316897
uuguaucuugaguaucuau

SEQ ID NO: 448744 - RNA, 19 nt, Artificial Sequence
  Description of Artificial Sequence: Synthetic oligonucleotide
  Antisense Strand to SEQ ID NO: 448743
auagauacucaagauacaa

SEQ ID NO: 448745 - RNA, 19 nt, Artificial Sequence
  Description of Artificial Sequence: Synthetic oligonucleotide
  Sense strand starting at position 2397 of SEQ ID NO: 316897
uuuguucuaccuuagauau

SEQ ID NO: 448746 - RNA, 19 nt, Artificial Sequence
  Description of Artificial Sequence: Synthetic oligonucleotide
  Antisense Strand to SEQ ID NO: 448745
auaucuaagguagaacaaa

SEQ ID NO: 448747 - RNA, 19 nt, Artificial Sequence
  Description of Artificial Sequence: Synthetic oligonucleotide
  Sense strand starting at position 2673 of SEQ ID NO: 316897
guaaucuaugaugggaagu

SEQ ID NO: 448748 - RNA, 19 nt, Artificial Sequence
  Description of Artificial Sequence: Synthetic oligonucleotide
  Antisense Strand to SEQ ID NO: 448747
acuucccaucauagauuac

SEQ ID NO: 448749 - RNA, 19 nt, Artificial Sequence
  Description of Artificial Sequence: Synthetic oligonucleotide
  Sense strand starting at position 2810 of SEQ ID NO: 316897
ccguuuacuccucaagaac

SEQ ID NO: 448750 - RNA, 19 nt, Artificial Sequence
  Description of Artificial Sequence: Synthetic oligonucleotide
  Antisense Strand to SEQ ID NO: 448749
guucuugaggaguaaacgg

SEQ ID NO: 448751 - RNA, 19 nt, Artificial Sequence
  Description of Artificial Sequence: Synthetic oligonucleotide
  Sense strand starting at position 2838 of SEQ ID NO: 316897
uucuccacggccuaagaua

SEQ ID NO: 448752 - RNA, 19 nt, Artificial Sequence
  Description of Artificial Sequence: Synthetic oligonucleotide
  Antisense Strand to SEQ ID NO: 448751
uaucuuaggccguggagaa

SEQ ID NO: 448753 - RNA, 19 nt, Artificial Sequence
  Description of Artificial Sequence: Synthetic oligonucleotide
  Sense strand starting at position 2992 of SEQ ID NO: 316897
aguagauaaugauugugaa

SEQ ID NO: 448754 - RNA, 19 nt, Artificial Sequence
  Description of Artificial Sequence: Synthetic oligonucleotide
  Antisense Strand to SEQ ID NO: 448753
uucacaaucauuaucuacu

SEQ ID NO: 448755 - RNA, 19 nt, Artificial Sequence
  Description of Artificial Sequence: Synthetic oligonucleotide
  Sense strand starting at position 2993 of SEQ ID NO: 316897
guagauaaugauugugaac

SEQ ID NO: 448756 - RNA, 19 nt, Artificial Sequence
  Description of Artificial Sequence: Synthetic oligonucleotide
  Antisense Strand to SEQ ID NO: 448755
guucacaaucauuaucuac

SEQ ID NO: 448757 - RNA, 19 nt, Artificial Sequence
  Description of Artificial Sequence: Synthetic oligonucleotide
  Sense strand starting at position 3214 of SEQ ID NO: 316897
agauuagcauugcuaaaua

SEQ ID NO: 448758 - RNA, 19 nt, Artificial Sequence
  Description of Artificial Sequence: Synthetic oligonucleotide
  Antisense Strand to SEQ ID NO: 448757
uauuuagcaaugcuaaucu

SEQ ID NO: 448759 - RNA, 19 nt, Artificial Sequence
  Description of Artificial Sequence: Synthetic oligonucleotide
  Sense strand starting at position 3289 of SEQ ID NO: 316897
aguagaccuuucucuuaua

SEQ ID NO: 448760 - RNA, 19 nt, Artificial Sequence
  Description of Artificial Sequence: Synthetic oligonucleotide
  Antisense Strand to SEQ ID NO: 448759
uauaagagaaaggucuacu

SEQ ID NO: 448761 - RNA, 19 nt, Artificial Sequence
  Description of Artificial Sequence: Synthetic oligonucleotide
  Sense strand starting at position 3564 of SEQ ID NO: 316897
ggcaaugugaaaugaauga

SEQ ID NO: 448762 - RNA, 19 nt, Artificial Sequence
  Description of Artificial Sequence: Synthetic oligonucleotide
  Antisense Strand to SEQ ID NO: 448761
ucauucauuucacauugcc

SEQ ID NO: 448763 - RNA, 19 nt, Artificial Sequence
  Description of Artificial Sequence: Synthetic oligonucleotide
  Sense strand starting at position 3699 of SEQ ID NO: 316897
uugaacagauaccuguaua

SEQ ID NO: 448764 - RNA, 19 nt, Artificial Sequence
  Description of Artificial Sequence: Synthetic oligonucleotide
  Antisense Strand to SEQ ID NO: 448763
uauacagguaucuguucaa

SEQ ID NO: 448765 - RNA, 19 nt, Artificial Sequence
  Description of Artificial Sequence: Synthetic oligonucleotide
  Sense strand starting at position 3918 of SEQ ID NO: 316897
aaggauaguguaugaucca

SEQ ID NO: 448766 - RNA, 19 nt, Artificial Sequence
  Description of Artificial Sequence: Synthetic oligonucleotide
  Antisense Strand to SEQ ID NO: 448765
uggaucauacacuauccuu

SEQ ID NO: 448767 - RNA, 19 nt, Artificial Sequence
  Description of Artificial Sequence: Synthetic oligonucleotide
  Sense strand starting at position 3921 of SEQ ID NO: 316897
gauaguguaugauccacuu

SEQ ID NO: 448768 - RNA, 19 nt, Artificial Sequence
  Description of Artificial Sequence: Synthetic oligonucleotide
  Antisense Strand to SEQ ID NO: 448767
aaguggaucauacacuauc

SEQ ID NO: 448769 - RNA, 19 nt, Artificial Sequence
  Description of Artificial Sequence: Synthetic oligonucleotide
  Sense strand starting at position 3939 of SEQ ID NO: 316897
uauauaagguacuuggaau

SEQ ID NO: 448770 - RNA, 19 nt, Artificial Sequence
  Description of Artificial Sequence: Synthetic oligonucleotide
  Antisense Strand to SEQ ID NO: 448769
auuccaaguaccuuauaua

SEQ ID NO: 448771 - RNA, 19 nt, Artificial Sequence
  Description of Artificial Sequence: Synthetic oligonucleotide
  Sense strand starting at position 3982 of SEQ ID NO: 316897
cagaaucaugguugucuga

SEQ ID NO: 448772 - RNA, 19 nt, Artificial Sequence
  Description of Artificial Sequence: Synthetic oligonucleotide
  Antisense Strand to SEQ ID NO: 448771
ucagacaaccaugauucug

SEQ ID NO: 448773 - RNA, 19 nt, Artificial Sequence
  Description of Artificial Sequence: Synthetic oligonucleotide
  Sense strand starting at position 2 of SEQ ID NO: 316898
guccuaaaguuaguaagca

SEQ ID NO: 448774 - RNA, 19 nt, Artificial Sequence
  Description of Artificial Sequence: Synthetic oligonucleotide
  Antisense Strand to SEQ ID NO: 448773
ugcuuacuaacuuuaggac

SEQ ID NO: 448775 - RNA, 19 nt, Artificial Sequence
  Description of Artificial Sequence: Synthetic oligonucleotide
  Sense strand starting at position 18 of SEQ ID NO: 316898
gcaacuuugacagagugca

SEQ ID NO: 448776 - RNA, 19 nt, Artificial Sequence
  Description of Artificial Sequence: Synthetic oligonucleotide
  Antisense Strand to SEQ ID NO: 448775
ugcacucugucaaaguugc

SEQ ID NO: 448777 - RNA, 19 nt, Artificial Sequence
  Description of Artificial Sequence: Synthetic oligonucleotide
  Sense strand starting at position 168 of SEQ ID NO: 316898
cagaauacgugacucugau

SEQ ID NO: 448778 - RNA, 19 nt, Artificial Sequence
  Description of Artificial Sequence: Synthetic oligonucleotide
  Antisense Strand to SEQ ID NO: 448777
aucagagucacguauucug

SEQ ID NO: 448779 - RNA, 19 nt, Artificial Sequence
  Description of Artificial Sequence: Synthetic oligonucleotide
  Sense strand starting at position 174 of SEQ ID NO: 316898
acgugacucugauucuaac

SEQ ID NO: 448780 - RNA, 19 nt, Artificial Sequence
  Description of Artificial Sequence: Synthetic oligonucleotide
  Antisense Strand to SEQ ID NO: 448779
guuagaaucagagucacgu

SEQ ID NO: 448781 - RNA, 19 nt, Artificial Sequence
  Description of Artificial Sequence: Synthetic oligonucleotide
  Sense strand starting at position 298 of SEQ ID NO: 316898
gggagaaguuccagaggag

SEQ ID NO: 448782 - RNA, 19 nt, Artificial Sequence
  Description of Artificial Sequence: Synthetic oligonucleotide
  Antisense Strand to SEQ ID NO: 448781
cuccucuggaacuucuccc

SEQ ID NO: 448783 - RNA, 19 nt, Artificial Sequence
  Description of Artificial Sequence: Synthetic oligonucleotide
  Sense strand starting at position 359 of SEQ ID NO: 316898
uggagaaacugaugguaga

SEQ ID NO: 448784 - RNA, 19 nt, Artificial Sequence
  Description of Artificial Sequence: Synthetic oligonucleotide
  Antisense Strand to SEQ ID NO: 448783
ucuaccaucaguuucucca

SEQ ID NO: 448785 - RNA, 19 nt, Artificial Sequence
  Description of Artificial Sequence: Synthetic oligonucleotide
  Sense strand starting at position 362 of SEQ ID NO: 316898
agaaacugaugguagaaau

SEQ ID NO: 448786 - RNA, 19 nt, Artificial Sequence
  Description of Artificial Sequence: Synthetic oligonucleotide
  Antisense Strand to SEQ ID NO: 448785
auuucuaccaucaguuucu

SEQ ID NO: 448787 - RNA, 19 nt, Artificial Sequence
  Description of Artificial Sequence: Synthetic oligonucleotide
  Sense strand starting at position 411 of SEQ ID NO: 316898
aacugaggcuuguccugau

SEQ ID NO: 448788 - RNA, 19 nt, Artificial Sequence
  Description of Artificial Sequence: Synthetic oligonucleotide
  Antisense Strand to SEQ ID NO: 448787
aucaggacaagccucaguu

SEQ ID NO: 448789 - RNA, 19 nt, Artificial Sequence
  Description of Artificial Sequence: Synthetic oligonucleotide
  Sense strand starting at position 415 of SEQ ID NO: 316898
gaggcuuguccugauaauu

SEQ ID NO: 448790 - RNA, 19 nt, Artificial Sequence
  Description of Artificial Sequence: Synthetic oligonucleotide
  Antisense Strand to SEQ ID NO: 448789
aauuaucaggacaagccuc

SEQ ID NO: 448791 - RNA, 19 nt, Artificial Sequence
  Description of Artificial Sequence: Synthetic oligonucleotide
  Sense strand starting at position 447 of SEQ ID NO: 316898
cucugacuguguccugaaa

SEQ ID NO: 448792 - RNA, 19 nt, Artificial Sequence
  Description of Artificial Sequence: Synthetic oligonucleotide
  Antisense Strand to SEQ ID NO: 448791
uuucaggacacagucagag

SEQ ID NO: 448793 - RNA, 19 nt, Artificial Sequence
  Description of Artificial Sequence: Synthetic oligonucleotide
  Sense strand starting at position 563 of SEQ ID NO: 316898
cauuguuaaguuugagaaa

SEQ ID NO: 448794 - RNA, 19 nt, Artificial Sequence
  Description of Artificial Sequence: Synthetic oligonucleotide
  Antisense Strand to SEQ ID NO: 448793
uuucucaaacuuaacaaug

SEQ ID NO: 448795 - RNA, 19 nt, Artificial Sequence
  Description of Artificial Sequence: Synthetic oligonucleotide
  Sense strand starting at position 564 of SEQ ID NO: 316898
auuguuaaguuugagaaag

SEQ ID NO: 448796 - RNA, 19 nt, Artificial Sequence
  Description of Artificial Sequence: Synthetic oligonucleotide
  Antisense Strand to SEQ ID NO: 448795
cuuucucaaacuuaacaau

SEQ ID NO: 448797 - RNA, 19 nt, Artificial Sequence
  Description of Artificial Sequence: Synthetic oligonucleotide
  Sense strand starting at position 714 of SEQ ID NO: 316898
ggaccacaauucucaguau

SEQ ID NO: 448798 - RNA, 19 nt, Artificial Sequence
  Description of Artificial Sequence: Synthetic oligonucleotide
  Antisense Strand to SEQ ID NO: 448797
auacugagaauuguggucc

SEQ ID NO: 448799 - RNA, 19 nt, Artificial Sequence
  Description of Artificial Sequence: Synthetic oligonucleotide
  Sense strand starting at position 737 of SEQ ID NO: 316898
cugucuaugucuucuuaca

SEQ ID NO: 448800 - RNA, 19 nt, Artificial Sequence
  Description of Artificial Sequence: Synthetic oligonucleotide
  Antisense Strand to SEQ ID NO: 448799
uguaagaagacauagacag

SEQ ID NO: 448801 - RNA, 19 nt, Artificial Sequence
  Description of Artificial Sequence: Synthetic oligonucleotide
  Sense strand starting at position 739 of SEQ ID NO: 316898
gucuaugucuucuuacaua

SEQ ID NO: 448802 - RNA, 19 nt, Artificial Sequence
  Description of Artificial Sequence: Synthetic oligonucleotide
  Antisense Strand to SEQ ID NO: 448801
uauguaagaagacauagac

SEQ ID NO: 448803 - RNA, 19 nt, Artificial Sequence
  Description of Artificial Sequence: Synthetic oligonucleotide
  Sense strand starting at position 777 of SEQ ID NO: 316898
acccuuaaggucuguauau

SEQ ID NO: 448804 - RNA, 19 nt, Artificial Sequence
  Description of Artificial Sequence: Synthetic oligonucleotide
  Antisense Strand to SEQ ID NO: 448803
auauacagaccuuaagggu

SEQ ID NO: 448805 - RNA, 19 nt, Artificial Sequence
  Description of Artificial Sequence: Synthetic oligonucleotide
  Sense strand starting at position 778 of SEQ ID NO: 316898
cccuuaaggucuguauaug

SEQ ID NO: 448806 - RNA, 19 nt, Artificial Sequence
  Description of Artificial Sequence: Synthetic oligonucleotide
  Antisense Strand to SEQ ID NO: 448805
cauauacagaccuuaaggg

SEQ ID NO: 448807 - RNA, 19 nt, Artificial Sequence
  Description of Artificial Sequence: Synthetic oligonucleotide
  Sense strand starting at position 779 of SEQ ID NO: 316898
ccuuaaggucuguauauga

SEQ ID NO: 448808 - RNA, 19 nt, Artificial Sequence
  Description of Artificial Sequence: Synthetic oligonucleotide
  Antisense Strand to SEQ ID NO: 448807
ucauauacagaccuuaagg

SEQ ID NO: 448809 - RNA, 19 nt, Artificial Sequence
  Description of Artificial Sequence: Synthetic oligonucleotide
  Sense strand starting at position 827 of SEQ ID NO: 316898
uugguacucugacaagaua

SEQ ID NO: 448810 - RNA, 19 nt, Artificial Sequence
  Description of Artificial Sequence: Synthetic oligonucleotide
  Antisense Strand to SEQ ID NO: 448809
uaucuugucagaguaccaa

SEQ ID NO: 448811 - RNA, 19 nt, Artificial Sequence
  Description of Artificial Sequence: Synthetic oligonucleotide
  Sense strand starting at position 997 of SEQ ID NO: 316898
ugcuguaauuuguuacucu

SEQ ID NO: 448812 - RNA, 19 nt, Artificial Sequence
  Description of Artificial Sequence: Synthetic oligonucleotide
  Antisense Strand to SEQ ID NO: 448811
agaguaacaaauuacagca

SEQ ID NO: 448813 - RNA, 19 nt, Artificial Sequence
  Description of Artificial Sequence: Synthetic oligonucleotide
  Sense strand starting at position 1115 of SEQ ID NO: 316898
acucaaguuccugaguaac

SEQ ID NO: 448814 - RNA, 19 nt, Artificial Sequence
  Description of Artificial Sequence: Synthetic oligonucleotide
  Antisense Strand to SEQ ID NO: 448813
guuacucaggaacuugagu

SEQ ID NO: 448815 - RNA, 19 nt, Artificial Sequence
  Description of Artificial Sequence: Synthetic oligonucleotide
  Sense strand starting at position 1117 of SEQ ID NO: 316898
ucaaguuccugaguaacug

SEQ ID NO: 448816 - RNA, 19 nt, Artificial Sequence
  Description of Artificial Sequence: Synthetic oligonucleotide
  Antisense Strand to SEQ ID NO: 448815
caguuacucaggaacuuga

SEQ ID NO: 448817 - RNA, 19 nt, Artificial Sequence
  Description of Artificial Sequence: Synthetic oligonucleotide
  Sense strand starting at position 1118 of SEQ ID NO: 316898
caaguuccugaguaacuga

SEQ ID NO: 448818 - RNA, 19 nt, Artificial Sequence
  Description of Artificial Sequence: Synthetic oligonucleotide
  Antisense Strand to SEQ ID NO: 448817
ucaguuacucaggaacuug

SEQ ID NO: 448819 - RNA, 19 nt, Artificial Sequence
  Description of Artificial Sequence: Synthetic oligonucleotide
  Sense strand starting at position 1191 of SEQ ID NO: 316898
gguuaacuccuguaccaau

SEQ ID NO: 448820 - RNA, 19 nt, Artificial Sequence
  Description of Artificial Sequence: Synthetic oligonucleotide
  Antisense Strand to SEQ ID NO: 448819
auugguacaggaguuaacc

SEQ ID NO: 448821 - RNA, 19 nt, Artificial Sequence
  Description of Artificial Sequence: Synthetic oligonucleotide
  Sense strand starting at position 1286 of SEQ ID NO: 316898
cagguuaaguaguucucau

SEQ ID NO: 448822 - RNA, 19 nt, Artificial Sequence
  Description of Artificial Sequence: Synthetic oligonucleotide
  Antisense Strand to SEQ ID NO: 448821
augagaacuacuuaaccug

SEQ ID NO: 448823 - RNA, 19 nt, Artificial Sequence
  Description of Artificial Sequence: Synthetic oligonucleotide
  Sense strand starting at position 1294 of SEQ ID NO: 316898
guaguucucauucgggaac

SEQ ID NO: 448824 - RNA, 19 nt, Artificial Sequence
  Description of Artificial Sequence: Synthetic oligonucleotide
  Antisense Strand to SEQ ID NO: 448823
guucccgaaugagaacuac

SEQ ID NO: 448825 - RNA, 19 nt, Artificial Sequence
  Description of Artificial Sequence: Synthetic oligonucleotide
  Sense strand starting at position 1297 of SEQ ID NO: 316898
guucucauucgggaaccua

SEQ ID NO: 448826 - RNA, 19 nt, Artificial Sequence
  Description of Artificial Sequence: Synthetic oligonucleotide
  Antisense Strand to SEQ ID NO: 448825
uagguucccgaaugagaac

SEQ ID NO: 448827 - RNA, 19 nt, Artificial Sequence
  Description of Artificial Sequence: Synthetic oligonucleotide
  Sense strand starting at position 1306 of SEQ ID NO: 316898
cgggaaccuauaugagagu

SEQ ID NO: 448828 - RNA, 19 nt, Artificial Sequence
  Description of Artificial Sequence: Synthetic oligonucleotide
  Antisense Strand to SEQ ID NO: 448827
acucucauauagguucccg

SEQ ID NO: 448829 - RNA, 19 nt, Artificial Sequence
  Description of Artificial Sequence: Synthetic oligonucleotide
  Sense strand starting at position 1307 of SEQ ID NO: 316898
gggaaccuauaugagagua

SEQ ID NO: 448830 - RNA, 19 nt, Artificial Sequence
  Description of Artificial Sequence: Synthetic oligonucleotide
  Antisense Strand to SEQ ID NO: 448829
uacucucauauagguuccc

SEQ ID NO: 448831 - RNA, 19 nt, Artificial Sequence
  Description of Artificial Sequence: Synthetic oligonucleotide
  Sense strand starting at position 1407 of SEQ ID NO: 316898
ugcucuggcuuccucaauu

SEQ ID NO: 448832 - RNA, 19 nt, Artificial Sequence
  Description of Artificial Sequence: Synthetic oligonucleotide
  Antisense Strand to SEQ ID NO: 448831
aauugaggaagccagagca

SEQ ID NO: 448833 - RNA, 19 nt, Artificial Sequence
  Description of Artificial Sequence: Synthetic oligonucleotide
  Sense strand starting at position 1433 of SEQ ID NO: 316898
gccaacugcuggccagaaa

SEQ ID NO: 448834 - RNA, 19 nt, Artificial Sequence
  Description of Artificial Sequence: Synthetic oligonucleotide
  Antisense Strand to SEQ ID NO: 448833
uuucuggccagcaguuggc

SEQ ID NO: 448835 - RNA, 19 nt, Artificial Sequence
  Description of Artificial Sequence: Synthetic oligonucleotide
  Sense strand starting at position 1444 of SEQ ID NO: 316898
gccagaaaggugcgaguau

SEQ ID NO: 448836 - RNA, 19 nt, Artificial Sequence
  Description of Artificial Sequence: Synthetic oligonucleotide
  Antisense Strand to SEQ ID NO: 448835
auacucgcaccuuucuggc

SEQ ID NO: 448837 - RNA, 19 nt, Artificial Sequence
  Description of Artificial Sequence: Synthetic oligonucleotide
  Sense strand starting at position 1451 of SEQ ID NO: 316898
aggugcgaguauucacuuu

SEQ ID NO: 448838 - RNA, 19 nt, Artificial Sequence
  Description of Artificial Sequence: Synthetic oligonucleotide
  Antisense Strand to SEQ ID NO: 448837
aaagugaauacucgcaccu

SEQ ID NO: 448839 - RNA, 19 nt, Artificial Sequence
  Description of Artificial Sequence: Synthetic oligonucleotide
  Sense strand starting at position 1506 of SEQ ID NO: 316898
gcauuacucguacaaagag

SEQ ID NO: 448840 - RNA, 19 nt, Artificial Sequence
  Description of Artificial Sequence: Synthetic oligonucleotide
  Antisense Strand to SEQ ID NO: 448839
cucuuuguacgaguaaugc

SEQ ID NO: 448841 - RNA, 19 nt, Artificial Sequence
  Description of Artificial Sequence: Synthetic oligonucleotide
  Sense strand starting at position 1580 of SEQ ID NO: 316898
gcuagacucccucauugau

SEQ ID NO: 448842 - RNA, 19 nt, Artificial Sequence
  Description of Artificial Sequence: Synthetic oligonucleotide
  Antisense Strand to SEQ ID NO: 448841
aucaaugagggagucuagc

SEQ ID NO: 448843 - RNA, 19 nt, Artificial Sequence
  Description of Artificial Sequence: Synthetic oligonucleotide
  Sense strand starting at position 1583 of SEQ ID NO: 316898
agacucccucauugauaga

SEQ ID NO: 448844 - RNA, 19 nt, Artificial Sequence
  Description of Artificial Sequence: Synthetic oligonucleotide
  Antisense Strand to SEQ ID NO: 448843
ucuaucaaugagggagucu

SEQ ID NO: 448845 - RNA, 19 nt, Artificial Sequence
  Description of Artificial Sequence: Synthetic oligonucleotide
  Sense strand starting at position 1723 of SEQ ID NO: 316898
ccgagaaaguggguugguu

SEQ ID NO: 448846 - RNA, 19 nt, Artificial Sequence
  Description of Artificial Sequence: Synthetic oligonucleotide
  Antisense Strand to SEQ ID NO: 448845
aaccaacccacuuucucgg

SEQ ID NO: 448847 - RNA, 19 nt, Artificial Sequence
  Description of Artificial Sequence: Synthetic oligonucleotide
  Sense strand starting at position 1941 of SEQ ID NO: 316898
ccacuucucccgggacagu

SEQ ID NO: 448848 - RNA, 19 nt, Artificial Sequence
  Description of Artificial Sequence: Synthetic oligonucleotide
  Antisense Strand to SEQ ID NO: 448847
acugucccgggagaagugg

SEQ ID NO: 448849 - RNA, 19 nt, Artificial Sequence
  Description of Artificial Sequence: Synthetic oligonucleotide
  Sense strand starting at position 1954 of SEQ ID NO: 316898
gacagucagguuugggaga

SEQ ID NO: 448850 - RNA, 19 nt, Artificial Sequence
  Description of Artificial Sequence: Synthetic oligonucleotide
  Antisense Strand to SEQ ID NO: 448849
ucucccaaaccugacuguc

SEQ ID NO: 448851 - RNA, 19 nt, Artificial Sequence
  Description of Artificial Sequence: Synthetic oligonucleotide
  Sense strand starting at position 1989 of SEQ ID NO: 316898
uguaaaguuuccucugggu

SEQ ID NO: 448852 - RNA, 19 nt, Artificial Sequence
  Description of Artificial Sequence: Synthetic oligonucleotide
  Antisense Strand to SEQ ID NO: 448851
acccagaggaaacuuuaca

SEQ ID NO: 448853 - RNA, 19 nt, Artificial Sequence
  Description of Artificial Sequence: Synthetic oligonucleotide
  Sense strand starting at position 99 of SEQ ID NO: 316899
uguguccacuaauuaauca

SEQ ID NO: 448854 - RNA, 19 nt, Artificial Sequence
  Description of Artificial Sequence: Synthetic oligonucleotide
  Antisense Strand to SEQ ID NO: 448853
ugauuaauuaguggacaca

SEQ ID NO: 448855 - RNA, 19 nt, Artificial Sequence
  Description of Artificial Sequence: Synthetic oligonucleotide
  Sense strand starting at position 117 of SEQ ID NO: 316899
acuguauuacugcaaguua

SEQ ID NO: 448856 - RNA, 19 nt, Artificial Sequence
  Description of Artificial Sequence: Synthetic oligonucleotide
  Antisense Strand to SEQ ID NO: 448855
uaacuugcaguaauacagu

SEQ ID NO: 448857 - RNA, 19 nt, Artificial Sequence
  Description of Artificial Sequence: Synthetic oligonucleotide
  Sense strand starting at position 126 of SEQ ID NO: 316899
cugcaaguuauaggaggaa

SEQ ID NO: 448858 - RNA, 19 nt, Artificial Sequence
  Description of Artificial Sequence: Synthetic oligonucleotide
  Antisense Strand to SEQ ID NO: 448857
uuccuccuauaacuugcag

SEQ ID NO: 448859 - RNA, 19 nt, Artificial Sequence
  Description of Artificial Sequence: Synthetic oligonucleotide
  Sense strand starting at position 163 of SEQ ID NO: 316899
gagagcuauccucauguuu

SEQ ID NO: 448860 - RNA, 19 nt, Artificial Sequence
  Description of Artificial Sequence: Synthetic oligonucleotide
  Antisense Strand to SEQ ID NO: 448859
aaacaugaggauagcucuc

SEQ ID NO: 448861 - RNA, 19 nt, Artificial Sequence
  Description of Artificial Sequence: Synthetic oligonucleotide
  Sense strand starting at position 174 of SEQ ID NO: 316899
ucauguuuauaaguaggua

SEQ ID NO: 448862 - RNA, 19 nt, Artificial Sequence
  Description of Artificial Sequence: Synthetic oligonucleotide
  Antisense Strand to SEQ ID NO: 448861
uaccuacuuauaaacauga

SEQ ID NO: 448863 - RNA, 19 nt, Artificial Sequence
  Description of Artificial Sequence: Synthetic oligonucleotide
  Sense strand starting at position 473 of SEQ ID NO: 316899
guuucuucccuuuagaagu

SEQ ID NO: 448864 - RNA, 19 nt, Artificial Sequence
  Description of Artificial Sequence: Synthetic oligonucleotide
  Antisense Strand to SEQ ID NO: 448863
acuucuaaagggaagaaac

SEQ ID NO: 448865 - RNA, 19 nt, Artificial Sequence
  Description of Artificial Sequence: Synthetic oligonucleotide
  Sense strand starting at position 609 of SEQ ID NO: 316899
acguguuuccguguauaua

SEQ ID NO: 448866 - RNA, 19 nt, Artificial Sequence
  Description of Artificial Sequence: Synthetic oligonucleotide
  Antisense Strand to SEQ ID NO: 448865
uauauacacggaaacacgu

SEQ ID NO: 448867 - RNA, 19 nt, Artificial Sequence
  Description of Artificial Sequence: Synthetic oligonucleotide
  Sense strand starting at position 681 of SEQ ID NO: 316899
gaaggucagucaguacaga

SEQ ID NO: 448868 - RNA, 19 nt, Artificial Sequence
  Description of Artificial Sequence: Synthetic oligonucleotide
  Antisense Strand to SEQ ID NO: 448867
ucuguacugacugaccuuc

SEQ ID NO: 448869 - RNA, 19 nt, Artificial Sequence
  Description of Artificial Sequence: Synthetic oligonucleotide
  Sense strand starting at position 689 of SEQ ID NO: 316899
gucaguacagacuauguua

SEQ ID NO: 448870 - RNA, 19 nt, Artificial Sequence
  Description of Artificial Sequence: Synthetic oligonucleotide
  Antisense Strand to SEQ ID NO: 448869
uaacauagucuguacugac

SEQ ID NO: 448871 - RNA, 19 nt, Artificial Sequence
  Description of Artificial Sequence: Synthetic oligonucleotide
  Sense strand starting at position 754 of SEQ ID NO: 316899
aggagaaacuuugauauuu

SEQ ID NO: 448872 - RNA, 19 nt, Artificial Sequence
  Description of Artificial Sequence: Synthetic oligonucleotide
  Antisense Strand to SEQ ID NO: 448871
aaauaucaaaguuucuccu

SEQ ID NO: 448873 - RNA, 19 nt, Artificial Sequence
  Description of Artificial Sequence: Synthetic oligonucleotide
  Sense strand starting at position 976 of SEQ ID NO: 316899
ccuucuguaugacuauaga

SEQ ID NO: 448874 - RNA, 19 nt, Artificial Sequence
  Description of Artificial Sequence: Synthetic oligonucleotide
  Antisense Strand to SEQ ID NO: 448873
ucuauagucauacagaagg

SEQ ID NO: 448875 - RNA, 19 nt, Artificial Sequence
  Description of Artificial Sequence: Synthetic oligonucleotide
  Sense strand starting at position 979 of SEQ ID NO: 316899
ucuguaugacuauagaagu

SEQ ID NO: 448876 - RNA, 19 nt, Artificial Sequence
  Description of Artificial Sequence: Synthetic oligonucleotide
  Antisense Strand to SEQ ID NO: 448875
acuucuauagucauacaga

SEQ ID NO: 448877 - RNA, 19 nt, Artificial Sequence
  Description of Artificial Sequence: Synthetic oligonucleotide
  Sense strand starting at position 1111 of SEQ ID NO: 316899
auagucucaugauucuaua

SEQ ID NO: 448878 - RNA, 19 nt, Artificial Sequence
  Description of Artificial Sequence: Synthetic oligonucleotide
  Antisense Strand to SEQ ID NO: 448877
uauagaaucaugagacuau

SEQ ID NO: 448879 - RNA, 19 nt, Artificial Sequence
  Description of Artificial Sequence: Synthetic oligonucleotide
  Sense strand starting at position 1349 of SEQ ID NO: 316899
uuccguuauuugcuuacau

SEQ ID NO: 448880 - RNA, 19 nt, Artificial Sequence
  Description of Artificial Sequence: Synthetic oligonucleotide
  Antisense Strand to SEQ ID NO: 448879
auguaagcaaauaacggaa

SEQ ID NO: 448881 - RNA, 19 nt, Artificial Sequence
  Description of Artificial Sequence: Synthetic oligonucleotide
  Sense strand starting at position 1350 of SEQ ID NO: 316899
uccguuauuugcuuacauu

SEQ ID NO: 448882 - RNA, 19 nt, Artificial Sequence
  Description of Artificial Sequence: Synthetic oligonucleotide
  Antisense Strand to SEQ ID NO: 448881
aauguaagcaaauaacgga

SEQ ID NO: 448883 - RNA, 19 nt, Artificial Sequence
  Description of Artificial Sequence: Synthetic oligonucleotide
  Sense strand starting at position 1351 of SEQ ID NO: 316899
ccguuauuugcuuacauuc

SEQ ID NO: 448884 - RNA, 19 nt, Artificial Sequence
  Description of Artificial Sequence: Synthetic oligonucleotide
  Antisense Strand to SEQ ID NO: 448883
gaauguaagcaaauaacgg

SEQ ID NO: 448885 - RNA, 19 nt, Artificial Sequence
  Description of Artificial Sequence: Synthetic oligonucleotide
  Sense strand starting at position 1780 of SEQ ID NO: 316899
ugcagcuugacugagaaga

SEQ ID NO: 448886 - RNA, 19 nt, Artificial Sequence
  Description of Artificial Sequence: Synthetic oligonucleotide
  Antisense Strand to SEQ ID NO: 448885
ucuucucagucaagcugca

SEQ ID NO: 448887 - RNA, 19 nt, Artificial Sequence
  Description of Artificial Sequence: Synthetic oligonucleotide
  Sense strand starting at position 1826 of SEQ ID NO: 316899
agaagauuauuggaggaga

SEQ ID NO: 448888 - RNA, 19 nt, Artificial Sequence
  Description of Artificial Sequence: Synthetic oligonucleotide
  Antisense Strand to SEQ ID NO: 448887
ucuccuccaauaaucuucu

SEQ ID NO: 448889 - RNA, 19 nt, Artificial Sequence
  Description of Artificial Sequence: Synthetic oligonucleotide
  Sense strand starting at position 1841 of SEQ ID NO: 316899
gagacuaugcccugucaaa

SEQ ID NO: 448890 - RNA, 19 nt, Artificial Sequence
  Description of Artificial Sequence: Synthetic oligonucleotide
  Antisense Strand to SEQ ID NO: 448889
uuugacagggcauagucuc

SEQ ID NO: 448891 - RNA, 19 nt, Artificial Sequence
  Description of Artificial Sequence: Synthetic oligonucleotide
  Sense strand starting at position 1853 of SEQ ID NO: 316899
ugucaaagccuugacugaa

SEQ ID NO: 448892 - RNA, 19 nt, Artificial Sequence
  Description of Artificial Sequence: Synthetic oligonucleotide
  Antisense Strand to SEQ ID NO: 448891
uucagucaaggcuuugaca

SEQ ID NO: 448893 - RNA, 19 nt, Artificial Sequence
  Description of Artificial Sequence: Synthetic oligonucleotide
  Sense strand starting at position 2259 of SEQ ID NO: 316899
ggcacagacuaaucagauu

SEQ ID NO: 448894 - RNA, 19 nt, Artificial Sequence
  Description of Artificial Sequence: Synthetic oligonucleotide
  Antisense Strand to SEQ ID NO: 448893
aaucugauuagucugugcc

SEQ ID NO: 448895 - RNA, 19 nt, Artificial Sequence
  Description of Artificial Sequence: Synthetic oligonucleotide
  Sense strand starting at position 2384 of SEQ ID NO: 316899
ugcagaaauuauguaaucu

SEQ ID NO: 448896 - RNA, 19 nt, Artificial Sequence
  Description of Artificial Sequence: Synthetic oligonucleotide
  Antisense Strand to SEQ ID NO: 448895
agauuacauaauuucugca

SEQ ID NO: 448897 - RNA, 19 nt, Artificial Sequence
  Description of Artificial Sequence: Synthetic oligonucleotide
  Sense strand starting at position 2569 of SEQ ID NO: 316899
uaccuaaguguguaaaguu

SEQ ID NO: 448898 - RNA, 19 nt, Artificial Sequence
  Description of Artificial Sequence: Synthetic oligonucleotide
  Antisense Strand to SEQ ID NO: 448897
aacuuuacacacuuaggua

SEQ ID NO: 448899 - RNA, 19 nt, Artificial Sequence
  Description of Artificial Sequence: Synthetic oligonucleotide
  Sense strand starting at position 2764 of SEQ ID NO: 316899
caaaguuugccagaaggca

SEQ ID NO: 448900 - RNA, 19 nt, Artificial Sequence
  Description of Artificial Sequence: Synthetic oligonucleotide
  Antisense Strand to SEQ ID NO: 448899
ugccuucuggcaaacuuug

SEQ ID NO: 448901 - RNA, 19 nt, Artificial Sequence
  Description of Artificial Sequence: Synthetic oligonucleotide
  Sense strand starting at position 2862 of SEQ ID NO: 316899
uuauaagauuccuugagcu

SEQ ID NO: 448902 - RNA, 19 nt, Artificial Sequence
  Description of Artificial Sequence: Synthetic oligonucleotide
  Antisense Strand to SEQ ID NO: 448901
agcucaaggaaucuuauaa

SEQ ID NO: 448903 - RNA, 19 nt, Artificial Sequence
  Description of Artificial Sequence: Synthetic oligonucleotide
  Sense strand starting at position 2979 of SEQ ID NO: 316899
cgaaguaaguuucuccaga

SEQ ID NO: 448904 - RNA, 19 nt, Artificial Sequence
  Description of Artificial Sequence: Synthetic oligonucleotide
  Antisense Strand to SEQ ID NO: 448903
ucuggagaaacuuacuucg

SEQ ID NO: 448905 - RNA, 19 nt, Artificial Sequence
  Description of Artificial Sequence: Synthetic oligonucleotide
  Sense strand starting at position 2980 of SEQ ID NO: 316899
gaaguaaguuucuccagaa

SEQ ID NO: 448906 - RNA, 19 nt, Artificial Sequence
  Description of Artificial Sequence: Synthetic oligonucleotide
  Antisense Strand to SEQ ID NO: 448905
uucuggagaaacuuacuuc

SEQ ID NO: 448907 - RNA, 19 nt, Artificial Sequence
  Description of Artificial Sequence: Synthetic oligonucleotide
  Sense strand starting at position 3143 of SEQ ID NO: 316899
cuaagacauuaugucaaug

SEQ ID NO: 448908 - RNA, 19 nt, Artificial Sequence
  Description of Artificial Sequence: Synthetic oligonucleotide
  Antisense Strand to SEQ ID NO: 448907
cauugacauaaugucuuag

SEQ ID NO: 448909 - RNA, 19 nt, Artificial Sequence
  Description of Artificial Sequence: Synthetic oligonucleotide
  Sense strand starting at position 3218 of SEQ ID NO: 316899
gauguacaucuugagucuu

SEQ ID NO: 448910 - RNA, 19 nt, Artificial Sequence
  Description of Artificial Sequence: Synthetic oligonucleotide
  Antisense Strand to SEQ ID NO: 448909
aagacucaagauguacauc

SEQ ID NO: 448911 - RNA, 19 nt, Artificial Sequence
  Description of Artificial Sequence: Synthetic oligonucleotide
  Sense strand starting at position 3326 of SEQ ID NO: 316899
auauguacucagcagaagu

SEQ ID NO: 448912 - RNA, 19 nt, Artificial Sequence
  Description of Artificial Sequence: Synthetic oligonucleotide
  Antisense Strand to SEQ ID NO: 448911
acuucugcugaguacauau

SEQ ID NO: 448913 - RNA, 19 nt, Artificial Sequence
  Description of Artificial Sequence: Synthetic oligonucleotide
  Sense strand starting at position 3328 of SEQ ID NO: 316899
auguacucagcagaaguua

SEQ ID NO: 448914 - RNA, 19 nt, Artificial Sequence
  Description of Artificial Sequence: Synthetic oligonucleotide
  Antisense Strand to SEQ ID NO: 448913
uaacuucugcugaguacau

SEQ ID NO: 448915 - RNA, 19 nt, Artificial Sequence
  Description of Artificial Sequence: Synthetic oligonucleotide
  Sense strand starting at position 3336 of SEQ ID NO: 316899
agcagaaguuaguuaucua

SEQ ID NO: 448916 - RNA, 19 nt, Artificial Sequence
  Description of Artificial Sequence: Synthetic oligonucleotide
  Antisense Strand to SEQ ID NO: 448915
uagauaacuaacuucugcu

SEQ ID NO: 448917 - RNA, 19 nt, Artificial Sequence
  Description of Artificial Sequence: Synthetic oligonucleotide
  Sense strand starting at position 3485 of SEQ ID NO: 316899
aauguucugggcuaugaga

SEQ ID NO: 448918 - RNA, 19 nt, Artificial Sequence
  Description of Artificial Sequence: Synthetic oligonucleotide
  Antisense Strand to SEQ ID NO: 448917
ucucauagcccagaacauu

SEQ ID NO: 448919 - RNA, 19 nt, Artificial Sequence
  Description of Artificial Sequence: Synthetic oligonucleotide
  Sense strand starting at position 3487 of SEQ ID NO: 316899
uguucugggcuaugagaac

SEQ ID NO: 448920 - RNA, 19 nt, Artificial Sequence
  Description of Artificial Sequence: Synthetic oligonucleotide
  Antisense Strand to SEQ ID NO: 448919
guucucauagcccagaaca

SEQ ID NO: 448921 - RNA, 19 nt, Artificial Sequence
  Description of Artificial Sequence: Synthetic oligonucleotide
  Sense strand starting at position 3550 of SEQ ID NO: 316899
auaagacacguguaauacu

SEQ ID NO: 448922 - RNA, 19 nt, Artificial Sequence
  Description of Artificial Sequence: Synthetic oligonucleotide
  Antisense Strand to SEQ ID NO: 448921
aguauuacacgugucuuau

SEQ ID NO: 448923 - RNA, 19 nt, Artificial Sequence
  Description of Artificial Sequence: Synthetic oligonucleotide
  Sense strand starting at position 3564 of SEQ ID NO: 316899
auacuagugcuauaauagu

SEQ ID NO: 448924 - RNA, 19 nt, Artificial Sequence
  Description of Artificial Sequence: Synthetic oligonucleotide
  Antisense Strand to SEQ ID NO: 448923
acuauuauagcacuaguau

SEQ ID NO: 448925 - RNA, 19 nt, Artificial Sequence
  Description of Artificial Sequence: Synthetic oligonucleotide
  Sense strand starting at position 3943 of SEQ ID NO: 316899
guucccauuugggaaugau

SEQ ID NO: 448926 - RNA, 19 nt, Artificial Sequence
  Description of Artificial Sequence: Synthetic oligonucleotide
  Antisense Strand to SEQ ID NO: 448925
aucauucccaaaugggaac

SEQ ID NO: 448927 - RNA, 19 nt, Artificial Sequence
  Description of Artificial Sequence: Synthetic oligonucleotide
  Sense strand starting at position 3967 of SEQ ID NO: 316899
uuguuuauccuuuaaguga

SEQ ID NO: 448928 - RNA, 19 nt, Artificial Sequence
  Description of Artificial Sequence: Synthetic oligonucleotide
  Antisense Strand to SEQ ID NO: 448927
ucacuuaaaggauaaacaa

SEQ ID NO: 448929 - RNA, 19 nt, Artificial Sequence
  Description of Artificial Sequence: Synthetic oligonucleotide
  Sense strand starting at position 3970 of SEQ ID NO: 316899
uuuauccuuuaagugagaa

SEQ ID NO: 448930 - RNA, 19 nt, Artificial Sequence
  Description of Artificial Sequence: Synthetic oligonucleotide
  Antisense Strand to SEQ ID NO: 448929
uucucacuuaaaggauaaa

SEQ ID NO: 448931 - RNA, 19 nt, Artificial Sequence
  Description of Artificial Sequence: Synthetic oligonucleotide
  Sense strand starting at position 3978 of SEQ ID NO: 316899
uuaagugagaaaugcgaau

SEQ ID NO: 448932 - RNA, 19 nt, Artificial Sequence
  Description of Artificial Sequence: Synthetic oligonucleotide
  Antisense Strand to SEQ ID NO: 448931
auucgcauuucucacuuaa

SEQ ID NO: 448933 - RNA, 19 nt, Artificial Sequence
  Description of Artificial Sequence: Synthetic oligonucleotide
  Sense strand starting at position 210 of SEQ ID NO: 316900
guccuaaaguuaguaagca

SEQ ID NO: 448934 - RNA, 19 nt, Artificial Sequence
  Description of Artificial Sequence: Synthetic oligonucleotide
  Antisense Strand to SEQ ID NO: 448933
ugcuuacuaacuuuaggac

SEQ ID NO: 448935 - RNA, 19 nt, Artificial Sequence
  Description of Artificial Sequence: Synthetic oligonucleotide
  Sense strand starting at position 226 of SEQ ID NO: 316900
gcaacuuugacagagugca

SEQ ID NO: 448936 - RNA, 19 nt, Artificial Sequence
  Description of Artificial Sequence: Synthetic oligonucleotide
  Antisense Strand to SEQ ID NO: 448935
ugcacucugucaaaguugc

SEQ ID NO: 448937 - RNA, 19 nt, Artificial Sequence
  Description of Artificial Sequence: Synthetic oligonucleotide
  Sense strand starting at position 376 of SEQ ID NO: 316900
cagaauacgugacucugau

SEQ ID NO: 448938 - RNA, 19 nt, Artificial Sequence
  Description of Artificial Sequence: Synthetic oligonucleotide
  Antisense Strand to SEQ ID NO: 448937
aucagagucacguauucug

SEQ ID NO: 448939 - RNA, 19 nt, Artificial Sequence
  Description of Artificial Sequence: Synthetic oligonucleotide
  Sense strand starting at position 382 of SEQ ID NO: 316900
acgugacucugauucuaac

SEQ ID NO: 448940 - RNA, 19 nt, Artificial Sequence
  Description of Artificial Sequence: Synthetic oligonucleotide
  Antisense Strand to SEQ ID NO: 448939
guuagaaucagagucacgu

SEQ ID NO: 448941 - RNA, 19 nt, Artificial Sequence
  Description of Artificial Sequence: Synthetic oligonucleotide
  Sense strand starting at position 506 of SEQ ID NO: 316900
gggagaaguuccagaggag

SEQ ID NO: 448942 - RNA, 19 nt, Artificial Sequence
  Description of Artificial Sequence: Synthetic oligonucleotide
  Antisense Strand to SEQ ID NO: 448941
cuccucuggaacuucuccc

SEQ ID NO: 448943 - RNA, 19 nt, Artificial Sequence
  Description of Artificial Sequence: Synthetic oligonucleotide
  Sense strand starting at position 567 of SEQ ID NO: 316900
uggagaaacugaugguaga

SEQ ID NO: 448944 - RNA, 19 nt, Artificial Sequence
  Description of Artificial Sequence: Synthetic oligonucleotide
  Antisense Strand to SEQ ID NO: 448943
ucuaccaucaguuucucca

SEQ ID NO: 448945 - RNA, 19 nt, Artificial Sequence
  Description of Artificial Sequence: Synthetic oligonucleotide
  Sense strand starting at position 570 of SEQ ID NO: 316900
agaaacugaugguagaaau

SEQ ID NO: 448946 - RNA, 19 nt, Artificial Sequence
  Description of Artificial Sequence: Synthetic oligonucleotide
  Antisense Strand to SEQ ID NO: 448945
auuucuaccaucaguuucu

SEQ ID NO: 448947 - RNA, 19 nt, Artificial Sequence
  Description of Artificial Sequence: Synthetic oligonucleotide
  Sense strand starting at position 619 of SEQ ID NO: 316900
aacugaggcuuguccugau

SEQ ID NO: 448948 - RNA, 19 nt, Artificial Sequence
  Description of Artificial Sequence: Synthetic oligonucleotide
  Antisense Strand to SEQ ID NO: 448947
aucaggacaagccucaguu

SEQ ID NO: 448949 - RNA, 19 nt, Artificial Sequence
  Description of Artificial Sequence: Synthetic oligonucleotide
  Sense strand starting at position 623 of SEQ ID NO: 316900
gaggcuuguccugauaauu

SEQ ID NO: 448950 - RNA, 19 nt, Artificial Sequence
  Description of Artificial Sequence: Synthetic oligonucleotide
  Antisense Strand to SEQ ID NO: 448949
aauuaucaggacaagccuc

SEQ ID NO: 448951 - RNA, 19 nt, Artificial Sequence
  Description of Artificial Sequence: Synthetic oligonucleotide
  Sense strand starting at position 655 of SEQ ID NO: 316900
cucugacuguguccugaaa

SEQ ID NO: 448952 - RNA, 19 nt, Artificial Sequence
  Description of Artificial Sequence: Synthetic oligonucleotide
  Antisense Strand to SEQ ID NO: 448951
uuucaggacacagucagag

SEQ ID NO: 448953 - RNA, 19 nt, Artificial Sequence
  Description of Artificial Sequence: Synthetic oligonucleotide
  Sense strand starting at position 771 of SEQ ID NO: 316900
cauuguuaaguuugagaaa

SEQ ID NO: 448954 - RNA, 19 nt, Artificial Sequence
  Description of Artificial Sequence: Synthetic oligonucleotide
  Antisense Strand to SEQ ID NO: 448953
uuucucaaacuuaacaaug

SEQ ID NO: 448955 - RNA, 19 nt, Artificial Sequence
  Description of Artificial Sequence: Synthetic oligonucleotide
  Sense strand starting at position 772 of SEQ ID NO: 316900
auuguuaaguuugagaaag

SEQ ID NO: 448956 - RNA, 19 nt, Artificial Sequence
  Description of Artificial Sequence: Synthetic oligonucleotide
  Antisense Strand to SEQ ID NO: 448955
cuuucucaaacuuaacaau

SEQ ID NO: 448957 - RNA, 19 nt, Artificial Sequence
  Description of Artificial Sequence: Synthetic oligonucleotide
  Sense strand starting at position 922 of SEQ ID NO: 316900
ggaccacaauucucaguau

SEQ ID NO: 448958 - RNA, 19 nt, Artificial Sequence
  Description of Artificial Sequence: Synthetic oligonucleotide
  Antisense Strand to SEQ ID NO: 448957
auacugagaauuguggucc

SEQ ID NO: 448959 - RNA, 19 nt, Artificial Sequence
  Description of Artificial Sequence: Synthetic oligonucleotide
  Sense strand starting at position 945 of SEQ ID NO: 316900
cugucuaugucuucuuaca

SEQ ID NO: 448960 - RNA, 19 nt, Artificial Sequence
  Description of Artificial Sequence: Synthetic oligonucleotide
  Antisense Strand to SEQ ID NO: 448959
uguaagaagacauagacag

SEQ ID NO: 448961 - RNA, 19 nt, Artificial Sequence
  Description of Artificial Sequence: Synthetic oligonucleotide
  Sense strand starting at position 947 of SEQ ID NO: 316900
gucuaugucuucuuacaua

SEQ ID NO: 448962 - RNA, 19 nt, Artificial Sequence
  Description of Artificial Sequence: Synthetic oligonucleotide
  Antisense Strand to SEQ ID NO: 448961
uauguaagaagacauagac

SEQ ID NO: 448963 - RNA, 19 nt, Artificial Sequence
  Description of Artificial Sequence: Synthetic oligonucleotide
  Sense strand starting at position 985 of SEQ ID NO: 316900
acccuuaaggucuguauau

SEQ ID NO: 448964 - RNA, 19 nt, Artificial Sequence
  Description of Artificial Sequence: Synthetic oligonucleotide
  Antisense Strand to SEQ ID NO: 448963
auauacagaccuuaagggu

SEQ ID NO: 448965 - RNA, 19 nt, Artificial Sequence
  Description of Artificial Sequence: Synthetic oligonucleotide
  Sense strand starting at position 986 of SEQ ID NO: 316900
cccuuaaggucuguauaug

SEQ ID NO: 448966 - RNA, 19 nt, Artificial Sequence
  Description of Artificial Sequence: Synthetic oligonucleotide
  Antisense Strand to SEQ ID NO: 448965
cauauacagaccuuaaggg

SEQ ID NO: 448967 - RNA, 19 nt, Artificial Sequence
  Description of Artificial Sequence: Synthetic oligonucleotide
  Sense strand starting at position 987 of SEQ ID NO: 316900
ccuuaaggucuguauauga

SEQ ID NO: 448968 - RNA, 19 nt, Artificial Sequence
  Description of Artificial Sequence: Synthetic oligonucleotide
  Antisense Strand to SEQ ID NO: 448967
ucauauacagaccuuaagg

SEQ ID NO: 448969 - RNA, 19 nt, Artificial Sequence
  Description of Artificial Sequence: Synthetic oligonucleotide
  Sense strand starting at position 1035 of SEQ ID NO: 316900
uugguacucugacaagaua

SEQ ID NO: 448970 - RNA, 19 nt, Artificial Sequence
  Description of Artificial Sequence: Synthetic oligonucleotide
  Antisense Strand to SEQ ID NO: 448969
uaucuugucagaguaccaa

SEQ ID NO: 448971 - RNA, 19 nt, Artificial Sequence
  Description of Artificial Sequence: Synthetic oligonucleotide
  Sense strand starting at position 1205 of SEQ ID NO: 316900
ugcuguaauuuguuacucu

SEQ ID NO: 448972 - RNA, 19 nt, Artificial Sequence
  Description of Artificial Sequence: Synthetic oligonucleotide
  Antisense Strand to SEQ ID NO: 448971
agaguaacaaauuacagca

SEQ ID NO: 448973 - RNA, 19 nt, Artificial Sequence
  Description of Artificial Sequence: Synthetic oligonucleotide
  Sense strand starting at position 1323 of SEQ ID NO: 316900
acucaaguuccugaguaac

SEQ ID NO: 448974 - RNA, 19 nt, Artificial Sequence
  Description of Artificial Sequence: Synthetic oligonucleotide
  Antisense Strand to SEQ ID NO: 448973
guuacucaggaacuugagu

SEQ ID NO: 448975 - RNA, 19 nt, Artificial Sequence
  Description of Artificial Sequence: Synthetic oligonucleotide
  Sense strand starting at position 1325 of SEQ ID NO: 316900
ucaaguuccugaguaacug

SEQ ID NO: 448976 - RNA, 19 nt, Artificial Sequence
  Description of Artificial Sequence: Synthetic oligonucleotide
  Antisense Strand to SEQ ID NO: 448975
caguuacucaggaacuuga

SEQ ID NO: 448977 - RNA, 19 nt, Artificial Sequence
  Description of Artificial Sequence: Synthetic oligonucleotide
  Sense strand starting at position 1326 of SEQ ID NO: 316900
caaguuccugaguaacuga

SEQ ID NO: 448978 - RNA, 19 nt, Artificial Sequence
  Description of Artificial Sequence: Synthetic oligonucleotide
  Antisense Strand to SEQ ID NO: 448977
ucaguuacucaggaacuug

SEQ ID NO: 448979 - RNA, 19 nt, Artificial Sequence
  Description of Artificial Sequence: Synthetic oligonucleotide
  Sense strand starting at position 1399 of SEQ ID NO: 316900
gguuaacuccuguaccaau

SEQ ID NO: 448980 - RNA, 19 nt, Artificial Sequence
  Description of Artificial Sequence: Synthetic oligonucleotide
  Antisense Strand to SEQ ID NO: 448979
auugguacaggaguuaacc

SEQ ID NO: 448981 - RNA, 19 nt, Artificial Sequence
  Description of Artificial Sequence: Synthetic oligonucleotide
  Sense strand starting at position 1494 of SEQ ID NO: 316900
cagguuaaguaguucucau

SEQ ID NO: 448982 - RNA, 19 nt, Artificial Sequence
  Description of Artificial Sequence: Synthetic oligonucleotide
  Antisense Strand to SEQ ID NO: 448981
augagaacuacuuaaccug

SEQ ID NO: 448983 - RNA, 19 nt, Artificial Sequence
  Description of Artificial Sequence: Synthetic oligonucleotide
  Sense strand starting at position 1502 of SEQ ID NO: 316900
guaguucucauucgggaac

SEQ ID NO: 448984 - RNA, 19 nt, Artificial Sequence
  Description of Artificial Sequence: Synthetic oligonucleotide
  Antisense Strand to SEQ ID NO: 448983
guucccgaaugagaacuac

SEQ ID NO: 448985 - RNA, 19 nt, Artificial Sequence
  Description of Artificial Sequence: Synthetic oligonucleotide
  Sense strand starting at position 1505 of SEQ ID NO: 316900
guucucauucgggaaccua

SEQ ID NO: 448986 - RNA, 19 nt, Artificial Sequence
  Description of Artificial Sequence: Synthetic oligonucleotide
  Antisense Strand to SEQ ID NO: 448985
uagguucccgaaugagaac

SEQ ID NO: 448987 - RNA, 19 nt, Artificial Sequence
  Description of Artificial Sequence: Synthetic oligonucleotide
  Sense strand starting at position 1514 of SEQ ID NO: 316900
cgggaaccuauaugagagu

SEQ ID NO: 448988 - RNA, 19 nt, Artificial Sequence
  Description of Artificial Sequence: Synthetic oligonucleotide
  Antisense Strand to SEQ ID NO: 448987
acucucauauagguucccg

SEQ ID NO: 448989 - RNA, 19 nt, Artificial Sequence
  Description of Artificial Sequence: Synthetic oligonucleotide
  Sense strand starting at position 1515 of SEQ ID NO: 316900
gggaaccuauaugagagua

SEQ ID NO: 448990 - RNA, 19 nt, Artificial Sequence
  Description of Artificial Sequence: Synthetic oligonucleotide
  Antisense Strand to SEQ ID NO: 448989
uacucucauauagguuccc

SEQ ID NO: 448991 - RNA, 19 nt, Artificial Sequence
  Description of Artificial Sequence: Synthetic oligonucleotide
  Sense strand starting at position 1615 of SEQ ID NO: 316900
ugcucuggcuuccucaauu

SEQ ID NO: 448992 - RNA, 19 nt, Artificial Sequence
  Description of Artificial Sequence: Synthetic oligonucleotide
  Antisense Strand to SEQ ID NO: 448991
aauugaggaagccagagca

SEQ ID NO: 448993 - RNA, 19 nt, Artificial Sequence
  Description of Artificial Sequence: Synthetic oligonucleotide
  Sense strand starting at position 1641 of SEQ ID NO: 316900
gccaacugcuggccagaaa

SEQ ID NO: 448994 - RNA, 19 nt, Artificial Sequence
  Description of Artificial Sequence: Synthetic oligonucleotide
  Antisense Strand to SEQ ID NO: 448993
uuucuggccagcaguuggc

SEQ ID NO: 448995 - RNA, 19 nt, Artificial Sequence
  Description of Artificial Sequence: Synthetic oligonucleotide
  Sense strand starting at position 1652 of SEQ ID NO: 316900
gccagaaaggugcgaguau

SEQ ID NO: 448996 - RNA, 19 nt, Artificial Sequence
  Description of Artificial Sequence: Synthetic oligonucleotide
  Antisense Strand to SEQ ID NO: 448995
auacucgcaccuuucuggc

SEQ ID NO: 448997 - RNA, 19 nt, Artificial Sequence
  Description of Artificial Sequence: Synthetic oligonucleotide
  Sense strand starting at position 1659 of SEQ ID NO: 316900
aggugcgaguauucacuuu

SEQ ID NO: 448998 - RNA, 19 nt, Artificial Sequence
  Description of Artificial Sequence: Synthetic oligonucleotide
  Antisense Strand to SEQ ID NO: 448997
aaagugaauacucgcaccu

SEQ ID NO: 448999 - RNA, 19 nt, Artificial Sequence
  Description of Artificial Sequence: Synthetic oligonucleotide
  Sense strand starting at position 1714 of SEQ ID NO: 316900
gcauuacucguacaaagag

SEQ ID NO: 449000 - RNA, 19 nt, Artificial Sequence
  Description of Artificial Sequence: Synthetic oligonucleotide
  Antisense Strand to SEQ ID NO: 448999
cucuuuguacgaguaaugc

SEQ ID NO: 449001 - RNA, 19 nt, Artificial Sequence
  Description of Artificial Sequence: Synthetic oligonucleotide
  Sense strand starting at position 1788 of SEQ ID NO: 316900
gcuagacucccucauugau

SEQ ID NO: 449002 - RNA, 19 nt, Artificial Sequence
  Description of Artificial Sequence: Synthetic oligonucleotide
  Antisense Strand to SEQ ID NO: 449001
aucaaugagggagucuagc

SEQ ID NO: 449003 - RNA, 19 nt, Artificial Sequence
  Description of Artificial Sequence: Synthetic oligonucleotide
  Sense strand starting at position 1791 of SEQ ID NO: 316900
agacucccucauugauaga

SEQ ID NO: 449004 - RNA, 19 nt, Artificial Sequence
  Description of Artificial Sequence: Synthetic oligonucleotide
  Antisense Strand to SEQ ID NO: 449003
ucuaucaaugagggagucu

SEQ ID NO: 449005 - RNA, 19 nt, Artificial Sequence
  Description of Artificial Sequence: Synthetic oligonucleotide
  Sense strand starting at position 1931 of SEQ ID NO: 316900
ccgagaaaguggguugguu

SEQ ID NO: 449006 - RNA, 19 nt, Artificial Sequence
  Description of Artificial Sequence: Synthetic oligonucleotide
  Antisense Strand to SEQ ID NO: 449005
aaccaacccacuuucucgg

SEQ ID NO: 449007 - RNA, 19 nt, Artificial Sequence
  Description of Artificial Sequence: Synthetic oligonucleotide
  Sense strand starting at position 2149 of SEQ ID NO: 316900
ccacuucucccgggacagu

SEQ ID NO: 449008 - RNA, 19 nt, Artificial Sequence
  Description of Artificial Sequence: Synthetic oligonucleotide
  Antisense Strand to SEQ ID NO: 449007
acugucccgggagaagugg

SEQ ID NO: 449009 - RNA, 19 nt, Artificial Sequence
  Description of Artificial Sequence: Synthetic oligonucleotide
  Sense strand starting at position 2162 of SEQ ID NO: 316900
gacagucagguuugggaga

SEQ ID NO: 449010 - RNA, 19 nt, Artificial Sequence
  Description of Artificial Sequence: Synthetic oligonucleotide
  Antisense Strand to SEQ ID NO: 449009
ucucccaaaccugacuguc

SEQ ID NO: 449011 - RNA, 19 nt, Artificial Sequence
  Description of Artificial Sequence: Synthetic oligonucleotide
  Sense strand starting at position 2197 of SEQ ID NO: 316900
uguaaaguuuccucugggu

SEQ ID NO: 449012 - RNA, 19 nt, Artificial Sequence
  Description of Artificial Sequence: Synthetic oligonucleotide
  Antisense Strand to SEQ ID NO: 449011
acccagaggaaacuuuaca

SEQ ID NO: 449013 - RNA, 19 nt, Artificial Sequence
  Description of Artificial Sequence: Synthetic oligonucleotide
  Sense strand starting at position 176 of SEQ ID NO: 316901
cugagauaauuguuagcau

SEQ ID NO: 449014 - RNA, 19 nt, Artificial Sequence
  Description of Artificial Sequence: Synthetic oligonucleotide
  Antisense Strand to SEQ ID NO: 449013
augcuaacaauuaucucag

SEQ ID NO: 449015 - RNA, 19 nt, Artificial Sequence
  Description of Artificial Sequence: Synthetic oligonucleotide
  Sense strand starting at position 357 of SEQ ID NO: 316901
ggugguggucaagaacuga

SEQ ID NO: 449016 - RNA, 19 nt, Artificial Sequence
  Description of Artificial Sequence: Synthetic oligonucleotide
  Antisense Strand to SEQ ID NO: 449015
ucaguucuugaccaccacc

SEQ ID NO: 449017 - RNA, 19 nt, Artificial Sequence
  Description of Artificial Sequence: Synthetic oligonucleotide
  Sense strand starting at position 399 of SEQ ID NO: 316901
ccuguaauaucaguuugga

SEQ ID NO: 449018 - RNA, 19 nt, Artificial Sequence
  Description of Artificial Sequence: Synthetic oligonucleotide
  Antisense Strand to SEQ ID NO: 449017
uccaaacugauauuacagg

SEQ ID NO: 449019 - RNA, 19 nt, Artificial Sequence
  Description of Artificial Sequence: Synthetic oligonucleotide
  Sense strand starting at position 402 of SEQ ID NO: 316901
guaauaucaguuuggaaag

SEQ ID NO: 449020 - RNA, 19 nt, Artificial Sequence
  Description of Artificial Sequence: Synthetic oligonucleotide
  Antisense Strand to SEQ ID NO: 449019
cuuuccaaacugauauuac

SEQ ID NO: 449021 - RNA, 19 nt, Artificial Sequence
  Description of Artificial Sequence: Synthetic oligonucleotide
  Sense strand starting at position 448 of SEQ ID NO: 316901
acuguuacauuguuauaag

SEQ ID NO: 449022 - RNA, 19 nt, Artificial Sequence
  Description of Artificial Sequence: Synthetic oligonucleotide
  Antisense Strand to SEQ ID NO: 449021
cuuauaacaauguaacagu

SEQ ID NO: 449023 - RNA, 19 nt, Artificial Sequence
  Description of Artificial Sequence: Synthetic oligonucleotide
  Sense strand starting at position 557 of SEQ ID NO: 316901
guaccuuugagauagugga

SEQ ID NO: 449024 - RNA, 19 nt, Artificial Sequence
  Description of Artificial Sequence: Synthetic oligonucleotide
  Antisense Strand to SEQ ID NO: 449023
uccacuaucucaaagguac

SEQ ID NO: 449025 - RNA, 19 nt, Artificial Sequence
  Description of Artificial Sequence: Synthetic oligonucleotide
  Sense strand starting at position 561 of SEQ ID NO: 316901
cuuugagauaguggagauu

SEQ ID NO: 449026 - RNA, 19 nt, Artificial Sequence
  Description of Artificial Sequence: Synthetic oligonucleotide
  Antisense Strand to SEQ ID NO: 449025
aaucuccacuaucucaaag

SEQ ID NO: 449027 - RNA, 19 nt, Artificial Sequence
  Description of Artificial Sequence: Synthetic oligonucleotide
  Sense strand starting at position 602 of SEQ ID NO: 316901
ugauguuuccuauacaucu

SEQ ID NO: 449028 - RNA, 19 nt, Artificial Sequence
  Description of Artificial Sequence: Synthetic oligonucleotide
  Antisense Strand to SEQ ID NO: 449027
agauguauaggaaacauca

SEQ ID NO: 449029 - RNA, 19 nt, Artificial Sequence
  Description of Artificial Sequence: Synthetic oligonucleotide
  Sense strand starting at position 791 of SEQ ID NO: 316901
auuguuaauguaggaaauc

SEQ ID NO: 449030 - RNA, 19 nt, Artificial Sequence
  Description of Artificial Sequence: Synthetic oligonucleotide
  Antisense Strand to SEQ ID NO: 449029
gauuuccuacauuaacaau

SEQ ID NO: 449031 - RNA, 19 nt, Artificial Sequence
  Description of Artificial Sequence: Synthetic oligonucleotide
  Sense strand starting at position 918 of SEQ ID NO: 316901
gggugcuuucagggauaca

SEQ ID NO: 449032 - RNA, 19 nt, Artificial Sequence
  Description of Artificial Sequence: Synthetic oligonucleotide
  Antisense Strand to SEQ ID NO: 449031
uguaucccugaaagcaccc

SEQ ID NO: 449033 - RNA, 19 nt, Artificial Sequence
  Description of Artificial Sequence: Synthetic oligonucleotide
  Sense strand starting at position 1118 of SEQ ID NO: 316901
gggccuuuacaauauaauu

SEQ ID NO: 449034 - RNA, 19 nt, Artificial Sequence
  Description of Artificial Sequence: Synthetic oligonucleotide
  Antisense Strand to SEQ ID NO: 449033
aauuauauuguaaaggccc

SEQ ID NO: 449035 - RNA, 19 nt, Artificial Sequence
  Description of Artificial Sequence: Synthetic oligonucleotide
  Sense strand starting at position 1310 of SEQ ID NO: 316901
cgugcuguagaauaaauga

SEQ ID NO: 449036 - RNA, 19 nt, Artificial Sequence
  Description of Artificial Sequence: Synthetic oligonucleotide
  Antisense Strand to SEQ ID NO: 449035
ucauuuauucuacagcacg

SEQ ID NO: 449037 - RNA, 19 nt, Artificial Sequence
  Description of Artificial Sequence: Synthetic oligonucleotide
  Sense strand starting at position 1342 of SEQ ID NO: 316901
ucagaugcaucuuccuaga

SEQ ID NO: 449038 - RNA, 19 nt, Artificial Sequence
  Description of Artificial Sequence: Synthetic oligonucleotide
  Antisense Strand to SEQ ID NO: 449037
ucuaggaagaugcaucuga

SEQ ID NO: 449039 - RNA, 19 nt, Artificial Sequence
  Description of Artificial Sequence: Synthetic oligonucleotide
  Sense strand starting at position 1344 of SEQ ID NO: 316901
agaugcaucuuccuagaua

SEQ ID NO: 449040 - RNA, 19 nt, Artificial Sequence
  Description of Artificial Sequence: Synthetic oligonucleotide
  Antisense Strand to SEQ ID NO: 449039
uaucuaggaagaugcaucu

SEQ ID NO: 449041 - RNA, 19 nt, Artificial Sequence
  Description of Artificial Sequence: Synthetic oligonucleotide
  Sense strand starting at position 1435 of SEQ ID NO: 316901
auggaauguaaguacugua

SEQ ID NO: 449042 - RNA, 19 nt, Artificial Sequence
  Description of Artificial Sequence: Synthetic oligonucleotide
  Antisense Strand to SEQ ID NO: 449041
uacaguacuuacauuccau

SEQ ID NO: 449043 - RNA, 19 nt, Artificial Sequence
  Description of Artificial Sequence: Synthetic oligonucleotide
  Sense strand starting at position 1523 of SEQ ID NO: 316901
gggcguauucccucuguuu

SEQ ID NO: 449044 - RNA, 19 nt, Artificial Sequence
  Description of Artificial Sequence: Synthetic oligonucleotide
  Antisense Strand to SEQ ID NO: 449043
aaacagagggaauacgccc

SEQ ID NO: 449045 - RNA, 19 nt, Artificial Sequence
  Description of Artificial Sequence: Synthetic oligonucleotide
  Sense strand starting at position 1620 of SEQ ID NO: 316901
gcuccacuccuagaaagau

SEQ ID NO: 449046 - RNA, 19 nt, Artificial Sequence
  Description of Artificial Sequence: Synthetic oligonucleotide
  Antisense Strand to SEQ ID NO: 449045
aucuuucuaggaguggagc

SEQ ID NO: 449047 - RNA, 19 nt, Artificial Sequence
  Description of Artificial Sequence: Synthetic oligonucleotide
  Sense strand starting at position 1997 of SEQ ID NO: 316901
uggagaaaucuguggcuua

SEQ ID NO: 449048 - RNA, 19 nt, Artificial Sequence
  Description of Artificial Sequence: Synthetic oligonucleotide
  Antisense Strand to SEQ ID NO: 449047
uaagccacagauuucucca

SEQ ID NO: 449049 - RNA, 19 nt, Artificial Sequence
  Description of Artificial Sequence: Synthetic oligonucleotide
  Sense strand starting at position 2000 of SEQ ID NO: 316901
agaaaucuguggcuuaaag

SEQ ID NO: 449050 - RNA, 19 nt, Artificial Sequence
  Description of Artificial Sequence: Synthetic oligonucleotide
  Antisense Strand to SEQ ID NO: 449049
cuuuaagccacagauuucu

SEQ ID NO: 449051 - RNA, 19 nt, Artificial Sequence
  Description of Artificial Sequence: Synthetic oligonucleotide
  Sense strand starting at position 2085 of SEQ ID NO: 316901
auguuuaguuuccuagaaa

SEQ ID NO: 449052 - RNA, 19 nt, Artificial Sequence
  Description of Artificial Sequence: Synthetic oligonucleotide
  Antisense Strand to SEQ ID NO: 449051
uuucuaggaaacuaaacau

SEQ ID NO: 449053 - RNA, 19 nt, Artificial Sequence
  Description of Artificial Sequence: Synthetic oligonucleotide
  Sense strand starting at position 2149 of SEQ ID NO: 316901
ugucuuguauauuugaagu

SEQ ID NO: 449054 - RNA, 19 nt, Artificial Sequence
  Description of Artificial Sequence: Synthetic oligonucleotide
  Antisense Strand to SEQ ID NO: 449053
acuucaaauauacaagaca

SEQ ID NO: 449055 - RNA, 19 nt, Artificial Sequence
  Description of Artificial Sequence: Synthetic oligonucleotide
  Sense strand starting at position 2165 of SEQ ID NO: 316901
aguuuaucacuuuacaugu

SEQ ID NO: 449056 - RNA, 19 nt, Artificial Sequence
  Description of Artificial Sequence: Synthetic oligonucleotide
  Antisense Strand to SEQ ID NO: 449055
acauguaaagugauaaacu

SEQ ID NO: 449057 - RNA, 19 nt, Artificial Sequence
  Description of Artificial Sequence: Synthetic oligonucleotide
  Sense strand starting at position 2182 of SEQ ID NO: 316901
guuguugcuccauugucua

SEQ ID NO: 449058 - RNA, 19 nt, Artificial Sequence
  Description of Artificial Sequence: Synthetic oligonucleotide
  Antisense Strand to SEQ ID NO: 449057
uagacaauggagcaacaac

SEQ ID NO: 449059 - RNA, 19 nt, Artificial Sequence
  Description of Artificial Sequence: Synthetic oligonucleotide
  Sense strand starting at position 2289 of SEQ ID NO: 316901
uugauagugcuggaaucuu

SEQ ID NO: 449060 - RNA, 19 nt, Artificial Sequence
  Description of Artificial Sequence: Synthetic oligonucleotide
  Antisense Strand to SEQ ID NO: 449059
aagauuccagcacuaucaa

SEQ ID NO: 449061 - RNA, 19 nt, Artificial Sequence
  Description of Artificial Sequence: Synthetic oligonucleotide
  Sense strand starting at position 2329 of SEQ ID NO: 316901
auuguuuaagaugggauua

SEQ ID NO: 449062 - RNA, 19 nt, Artificial Sequence
  Description of Artificial Sequence: Synthetic oligonucleotide
  Antisense Strand to SEQ ID NO: 449061
uaaucccaucuuaaacaau

SEQ ID NO: 449063 - RNA, 19 nt, Artificial Sequence
  Description of Artificial Sequence: Synthetic oligonucleotide
  Sense strand starting at position 2330 of SEQ ID NO: 316901
uuguuuaagaugggauuaa

SEQ ID NO: 449064 - RNA, 19 nt, Artificial Sequence
  Description of Artificial Sequence: Synthetic oligonucleotide
  Antisense Strand to SEQ ID NO: 449063
uuaaucccaucuuaaacaa

SEQ ID NO: 449065 - RNA, 19 nt, Artificial Sequence
  Description of Artificial Sequence: Synthetic oligonucleotide
  Sense strand starting at position 2444 of SEQ ID NO: 316901
ucuuguuuaccuuauggaa

SEQ ID NO: 449066 - RNA, 19 nt, Artificial Sequence
  Description of Artificial Sequence: Synthetic oligonucleotide
  Antisense Strand to SEQ ID NO: 449065
uuccauaagguaaacaaga

SEQ ID NO: 449067 - RNA, 19 nt, Artificial Sequence
  Description of Artificial Sequence: Synthetic oligonucleotide
  Sense strand starting at position 2506 of SEQ ID NO: 316901
aagguaucauuauuaagug

SEQ ID NO: 449068 - RNA, 19 nt, Artificial Sequence
  Description of Artificial Sequence: Synthetic oligonucleotide
  Antisense Strand to SEQ ID NO: 449067
cacuuaauaaugauaccuu

SEQ ID NO: 449069 - RNA, 19 nt, Artificial Sequence
  Description of Artificial Sequence: Synthetic oligonucleotide
  Sense strand starting at position 2618 of SEQ ID NO: 316901
agcuuuaacuaauucgaga

SEQ ID NO: 449070 - RNA, 19 nt, Artificial Sequence
  Description of Artificial Sequence: Synthetic oligonucleotide
  Antisense Strand to SEQ ID NO: 449069
ucucgaauuaguuaaagcu

SEQ ID NO: 449071 - RNA, 19 nt, Artificial Sequence
  Description of Artificial Sequence: Synthetic oligonucleotide
  Sense strand starting at position 2653 of SEQ ID NO: 316901
uguuauugaguucgauuuc

SEQ ID NO: 449072 - RNA, 19 nt, Artificial Sequence
  Description of Artificial Sequence: Synthetic oligonucleotide
  Antisense Strand to SEQ ID NO: 449071
gaaaucgaacucaauaaca

SEQ ID NO: 449073 - RNA, 19 nt, Artificial Sequence
  Description of Artificial Sequence: Synthetic oligonucleotide
  Sense strand starting at position 2682 of SEQ ID NO: 316901
gagguuauauaguccagau

SEQ ID NO: 449074 - RNA, 19 nt, Artificial Sequence
  Description of Artificial Sequence: Synthetic oligonucleotide
  Antisense Strand to SEQ ID NO: 449073
aucuggacuauauaaccuc

SEQ ID NO: 449075 - RNA, 19 nt, Artificial Sequence
  Description of Artificial Sequence: Synthetic oligonucleotide
  Sense strand starting at position 2684 of SEQ ID NO: 316901
gguuauauaguccagauug

SEQ ID NO: 449076 - RNA, 19 nt, Artificial Sequence
  Description of Artificial Sequence: Synthetic oligonucleotide
  Antisense Strand to SEQ ID NO: 449075
caaucuggacuauauaacc

SEQ ID NO: 449077 - RNA, 19 nt, Artificial Sequence
  Description of Artificial Sequence: Synthetic oligonucleotide
  Sense strand starting at position 2686 of SEQ ID NO: 316901
uuauauaguccagauugua

SEQ ID NO: 449078 - RNA, 19 nt, Artificial Sequence
  Description of Artificial Sequence: Synthetic oligonucleotide
  Antisense Strand to SEQ ID NO: 449077
uacaaucuggacuauauaa

SEQ ID NO: 449079 - RNA, 19 nt, Artificial Sequence
  Description of Artificial Sequence: Synthetic oligonucleotide
  Sense strand starting at position 2938 of SEQ ID NO: 316901
uaaucagucuggguauuac

SEQ ID NO: 449080 - RNA, 19 nt, Artificial Sequence
  Description of Artificial Sequence: Synthetic oligonucleotide
  Antisense Strand to SEQ ID NO: 449079
guaauacccagacugauua

SEQ ID NO: 449081 - RNA, 19 nt, Artificial Sequence
  Description of Artificial Sequence: Synthetic oligonucleotide
  Sense strand starting at position 2962 of SEQ ID NO: 316901
gucucuggcagauauugaa

SEQ ID NO: 449082 - RNA, 19 nt, Artificial Sequence
  Description of Artificial Sequence: Synthetic oligonucleotide
  Antisense Strand to SEQ ID NO: 449081
uucaauaucugccagagac

SEQ ID NO: 449083 - RNA, 19 nt, Artificial Sequence
  Description of Artificial Sequence: Synthetic oligonucleotide
  Sense strand starting at position 2977 of SEQ ID NO: 316901
ugaauugagcaccagcaau

SEQ ID NO: 449084 - RNA, 19 nt, Artificial Sequence
  Description of Artificial Sequence: Synthetic oligonucleotide
  Antisense Strand to SEQ ID NO: 449083
auugcuggugcucaauuca

SEQ ID NO: 449085 - RNA, 19 nt, Artificial Sequence
  Description of Artificial Sequence: Synthetic oligonucleotide
  Sense strand starting at position 3040 of SEQ ID NO: 316901
cuguuaacagaagguuaga

SEQ ID NO: 449086 - RNA, 19 nt, Artificial Sequence
  Description of Artificial Sequence: Synthetic oligonucleotide
  Antisense Strand to SEQ ID NO: 449085
ucuaaccuucuguuaacag

SEQ ID NO: 449087 - RNA, 19 nt, Artificial Sequence
  Description of Artificial Sequence: Synthetic oligonucleotide
  Sense strand starting at position 3779 of SEQ ID NO: 316901
ucagcugaugaccaucaau

SEQ ID NO: 449088 - RNA, 19 nt, Artificial Sequence
  Description of Artificial Sequence: Synthetic oligonucleotide
  Antisense Strand to SEQ ID NO: 449087
auugauggucaucagcuga

SEQ ID NO: 449089 - RNA, 19 nt, Artificial Sequence
  Description of Artificial Sequence: Synthetic oligonucleotide
  Sense strand starting at position 3887 of SEQ ID NO: 316901
uucuuauaaugcucuggaa

SEQ ID NO: 449090 - RNA, 19 nt, Artificial Sequence
  Description of Artificial Sequence: Synthetic oligonucleotide
  Antisense Strand to SEQ ID NO: 449089
uuccagagcauuauaagaa

SEQ ID NO: 449091 - RNA, 19 nt, Artificial Sequence
  Description of Artificial Sequence: Synthetic oligonucleotide
  Sense strand starting at position 3889 of SEQ ID NO: 316901
cuuauaaugcucuggaaua

SEQ ID NO: 449092 - RNA, 19 nt, Artificial Sequence
  Description of Artificial Sequence: Synthetic oligonucleotide
  Antisense Strand to SEQ ID NO: 449091
uauuccagagcauuauaag

SEQ ID NO: 449093 - RNA, 19 nt, Artificial Sequence
  Description of Artificial Sequence: Synthetic oligonucleotide
  Sense strand starting at position 43 of SEQ ID NO: 316902
cuuacuauuggcugaggaa

SEQ ID NO: 449094 - RNA, 19 nt, Artificial Sequence
  Description of Artificial Sequence: Synthetic oligonucleotide
  Antisense Strand to SEQ ID NO: 449093
uuccucagccaauaguaag

SEQ ID NO: 449095 - RNA, 19 nt, Artificial Sequence
  Description of Artificial Sequence: Synthetic oligonucleotide
  Sense strand starting at position 85 of SEQ ID NO: 316902
uauauuaguggucaacgaa

SEQ ID NO: 449096 - RNA, 19 nt, Artificial Sequence
  Description of Artificial Sequence: Synthetic oligonucleotide
  Antisense Strand to SEQ ID NO: 449095
uucguugaccacuaauaua

SEQ ID NO: 449097 - RNA, 19 nt, Artificial Sequence
  Description of Artificial Sequence: Synthetic oligonucleotide
  Sense strand starting at position 88 of SEQ ID NO: 316902
auuaguggucaacgaauga

SEQ ID NO: 449098 - RNA, 19 nt, Artificial Sequence
  Description of Artificial Sequence: Synthetic oligonucleotide
  Antisense Strand to SEQ ID NO: 449097
ucauucguugaccacuaau

SEQ ID NO: 449099 - RNA, 19 nt, Artificial Sequence
  Description of Artificial Sequence: Synthetic oligonucleotide
  Sense strand starting at position 92 of SEQ ID NO: 316902
guggucaacgaaugagaau

SEQ ID NO: 449100 - RNA, 19 nt, Artificial Sequence
  Description of Artificial Sequence: Synthetic oligonucleotide
  Antisense Strand to SEQ ID NO: 449099
auucucauucguugaccac

SEQ ID NO: 449101 - RNA, 19 nt, Artificial Sequence
  Description of Artificial Sequence: Synthetic oligonucleotide
  Sense strand starting at position 101 of SEQ ID NO: 316902
gaaugagaauccuuauugu

SEQ ID NO: 449102 - RNA, 19 nt, Artificial Sequence
  Description of Artificial Sequence: Synthetic oligonucleotide
  Antisense Strand to SEQ ID NO: 449101
acaauaaggauucucauuc

SEQ ID NO: 449103 - RNA, 19 nt, Artificial Sequence
  Description of Artificial Sequence: Synthetic oligonucleotide
  Sense strand starting at position 104 of SEQ ID NO: 316902
ugagaauccuuauuguucu

SEQ ID NO: 449104 - RNA, 19 nt, Artificial Sequence
  Description of Artificial Sequence: Synthetic oligonucleotide
  Antisense Strand to SEQ ID NO: 449103
agaacaauaaggauucuca

SEQ ID NO: 449105 - RNA, 19 nt, Artificial Sequence
  Description of Artificial Sequence: Synthetic oligonucleotide
  Sense strand starting at position 333 of SEQ ID NO: 316902
uccagauaaguuggcuuaa

SEQ ID NO: 449106 - RNA, 19 nt, Artificial Sequence
  Description of Artificial Sequence: Synthetic oligonucleotide
  Antisense Strand to SEQ ID NO: 449105
uuaagccaacuuaucugga

SEQ ID NO: 449107 - RNA, 19 nt, Artificial Sequence
  Description of Artificial Sequence: Synthetic oligonucleotide
  Sense strand starting at position 334 of SEQ ID NO: 316902
ccagauaaguuggcuuaaa

SEQ ID NO: 449108 - RNA, 19 nt, Artificial Sequence
  Description of Artificial Sequence: Synthetic oligonucleotide
  Antisense Strand to SEQ ID NO: 449107
uuuaagccaacuuaucugg

SEQ ID NO: 449109 - RNA, 19 nt, Artificial Sequence
  Description of Artificial Sequence: Synthetic oligonucleotide
  Sense strand starting at position 400 of SEQ ID NO: 316902
ggguccacuuagccauaaa

SEQ ID NO: 449110 - RNA, 19 nt, Artificial Sequence
  Description of Artificial Sequence: Synthetic oligonucleotide
  Antisense Strand to SEQ ID NO: 449109
uuuauggcuaaguggaccc

SEQ ID NO: 449111 - RNA, 19 nt, Artificial Sequence
  Description of Artificial Sequence: Synthetic oligonucleotide
  Sense strand starting at position 560 of SEQ ID NO: 316902
cuuuauuugcuauguaggu

SEQ ID NO: 449112 - RNA, 19 nt, Artificial Sequence
  Description of Artificial Sequence: Synthetic oligonucleotide
  Antisense Strand to SEQ ID NO: 449111
accuacauagcaaauaaag

SEQ ID NO: 449113 - RNA, 19 nt, Artificial Sequence
  Description of Artificial Sequence: Synthetic oligonucleotide
  Sense strand starting at position 561 of SEQ ID NO: 316902
uuuauuugcuauguaggua

SEQ ID NO: 449114 - RNA, 19 nt, Artificial Sequence
  Description of Artificial Sequence: Synthetic oligonucleotide
  Antisense Strand to SEQ ID NO: 449113
uaccuacauagcaaauaaa

SEQ ID NO: 449115 - RNA, 19 nt, Artificial Sequence
  Description of Artificial Sequence: Synthetic oligonucleotide
  Sense strand starting at position 809 of SEQ ID NO: 316902
aucugcagucuuuaaagau

SEQ ID NO: 449116 - RNA, 19 nt, Artificial Sequence
  Description of Artificial Sequence: Synthetic oligonucleotide
  Antisense Strand to SEQ ID NO: 449115
aucuuuaaagacugcagau

SEQ ID NO: 449117 - RNA, 19 nt, Artificial Sequence
  Description of Artificial Sequence: Synthetic oligonucleotide
  Sense strand starting at position 855 of SEQ ID NO: 316902
agcaauguuagccagaaga

SEQ ID NO: 449118 - RNA, 19 nt, Artificial Sequence
  Description of Artificial Sequence: Synthetic oligonucleotide
  Antisense Strand to SEQ ID NO: 449117
ucuucuggcuaacauugcu

SEQ ID NO: 449119 - RNA, 19 nt, Artificial Sequence
  Description of Artificial Sequence: Synthetic oligonucleotide
  Sense strand starting at position 1474 of SEQ ID NO: 316902
gcuuauuauggacaaguag

SEQ ID NO: 449120 - RNA, 19 nt, Artificial Sequence
  Description of Artificial Sequence: Synthetic oligonucleotide
  Antisense Strand to SEQ ID NO: 449119
cuacuuguccauaauaagc

SEQ ID NO: 449121 - RNA, 19 nt, Artificial Sequence
  Description of Artificial Sequence: Synthetic oligonucleotide
  Sense strand starting at position 1571 of SEQ ID NO: 316902
gcuuuauagguacaaggau

SEQ ID NO: 449122 - RNA, 19 nt, Artificial Sequence
  Description of Artificial Sequence: Synthetic oligonucleotide
  Antisense Strand to SEQ ID NO: 449121
auccuuguaccuauaaagc

SEQ ID NO: 449123 - RNA, 19 nt, Artificial Sequence
  Description of Artificial Sequence: Synthetic oligonucleotide
  Sense strand starting at position 1774 of SEQ ID NO: 316902
gggucauaaagcuaagagu

SEQ ID NO: 449124 - RNA, 19 nt, Artificial Sequence
  Description of Artificial Sequence: Synthetic oligonucleotide
  Antisense Strand to SEQ ID NO: 449123
acucuuagcuuuaugaccc

SEQ ID NO: 449125 - RNA, 19 nt, Artificial Sequence
  Description of Artificial Sequence: Synthetic oligonucleotide
  Sense strand starting at position 2024 of SEQ ID NO: 316902
uuaaaucugcaagagguuu

SEQ ID NO: 449126 - RNA, 19 nt, Artificial Sequence
  Description of Artificial Sequence: Synthetic oligonucleotide
  Antisense Strand to SEQ ID NO: 449125
aaaccucuugcagauuuaa

SEQ ID NO: 449127 - RNA, 19 nt, Artificial Sequence
  Description of Artificial Sequence: Synthetic oligonucleotide
  Sense strand starting at position 2148 of SEQ ID NO: 316902
gcuuguuugcuuccgauaa

SEQ ID NO: 449128 - RNA, 19 nt, Artificial Sequence
  Description of Artificial Sequence: Synthetic oligonucleotide
  Antisense Strand to SEQ ID NO: 449127
uuaucggaagcaaacaagc

SEQ ID NO: 449129 - RNA, 19 nt, Artificial Sequence
  Description of Artificial Sequence: Synthetic oligonucleotide
  Sense strand starting at position 2182 of SEQ ID NO: 316902
gcauuugauucuccaguca

SEQ ID NO: 449130 - RNA, 19 nt, Artificial Sequence
  Description of Artificial Sequence: Synthetic oligonucleotide
  Antisense Strand to SEQ ID NO: 449129
ugacuggagaaucaaaugc

SEQ ID NO: 449131 - RNA, 19 nt, Artificial Sequence
  Description of Artificial Sequence: Synthetic oligonucleotide
  Sense strand starting at position 2297 of SEQ ID NO: 316902
auagaaggugcuuagguaa

SEQ ID NO: 449132 - RNA, 19 nt, Artificial Sequence
  Description of Artificial Sequence: Synthetic oligonucleotide
  Antisense Strand to SEQ ID NO: 449131
uuaccuaagcaccuucuau

SEQ ID NO: 449133 - RNA, 19 nt, Artificial Sequence
  Description of Artificial Sequence: Synthetic oligonucleotide
  Sense strand starting at position 2370 of SEQ ID NO: 316902
agaaauuaggguuggguga

SEQ ID NO: 449134 - RNA, 19 nt, Artificial Sequence
  Description of Artificial Sequence: Synthetic oligonucleotide
  Antisense Strand to SEQ ID NO: 449133
ucacccaacccuaauuucu

SEQ ID NO: 449135 - RNA, 19 nt, Artificial Sequence
  Description of Artificial Sequence: Synthetic oligonucleotide
  Sense strand starting at position 2371 of SEQ ID NO: 316902
gaaauuaggguugggugau

SEQ ID NO: 449136 - RNA, 19 nt, Artificial Sequence
  Description of Artificial Sequence: Synthetic oligonucleotide
  Antisense Strand to SEQ ID NO: 449135
aucacccaacccuaauuuc

SEQ ID NO: 449137 - RNA, 19 nt, Artificial Sequence
  Description of Artificial Sequence: Synthetic oligonucleotide
  Sense strand starting at position 2415 of SEQ ID NO: 316902
gggauaagcuggcccugaa

SEQ ID NO: 449138 - RNA, 19 nt, Artificial Sequence
  Description of Artificial Sequence: Synthetic oligonucleotide
  Antisense Strand to SEQ ID NO: 449137
uucagggccagcuuauccc

SEQ ID NO: 449139 - RNA, 19 nt, Artificial Sequence
  Description of Artificial Sequence: Synthetic oligonucleotide
  Sense strand starting at position 2428 of SEQ ID NO: 316902
ccugaaggcuuucuauaag

SEQ ID NO: 449140 - RNA, 19 nt, Artificial Sequence
  Description of Artificial Sequence: Synthetic oligonucleotide
  Antisense Strand to SEQ ID NO: 449139
cuuauagaaagccuucagg

SEQ ID NO: 449141 - RNA, 19 nt, Artificial Sequence
  Description of Artificial Sequence: Synthetic oligonucleotide
  Sense strand starting at position 2431 of SEQ ID NO: 316902
gaaggcuuucuauaaguuu

SEQ ID NO: 449142 - RNA, 19 nt, Artificial Sequence
  Description of Artificial Sequence: Synthetic oligonucleotide
  Antisense Strand to SEQ ID NO: 449141
aaacuuauagaaagccuuc

SEQ ID NO: 449143 - RNA, 19 nt, Artificial Sequence
  Description of Artificial Sequence: Synthetic oligonucleotide
  Sense strand starting at position 2551 of SEQ ID NO: 316902
cucuauguucuuggacaag

SEQ ID NO: 449144 - RNA, 19 nt, Artificial Sequence
  Description of Artificial Sequence: Synthetic oligonucleotide
  Antisense Strand to SEQ ID NO: 449143
cuuguccaagaacauagag

SEQ ID NO: 449145 - RNA, 19 nt, Artificial Sequence
  Description of Artificial Sequence: Synthetic oligonucleotide
  Sense strand starting at position 2756 of SEQ ID NO: 316902
ccuguuucugugcuagcaa

SEQ ID NO: 449146 - RNA, 19 nt, Artificial Sequence
  Description of Artificial Sequence: Synthetic oligonucleotide
  Antisense Strand to SEQ ID NO: 449145
uugcuagcacagaaacagg

SEQ ID NO: 449147 - RNA, 19 nt, Artificial Sequence
  Description of Artificial Sequence: Synthetic oligonucleotide
  Sense strand starting at position 2759 of SEQ ID NO: 316902
guuucugugcuagcaaucu

SEQ ID NO: 449148 - RNA, 19 nt, Artificial Sequence
  Description of Artificial Sequence: Synthetic oligonucleotide
  Antisense Strand to SEQ ID NO: 449147
agauugcuagcacagaaac

SEQ ID NO: 449149 - RNA, 19 nt, Artificial Sequence
  Description of Artificial Sequence: Synthetic oligonucleotide
  Sense strand starting at position 2775 of SEQ ID NO: 316902
ucucauuucugaguguauu

SEQ ID NO: 449150 - RNA, 19 nt, Artificial Sequence
  Description of Artificial Sequence: Synthetic oligonucleotide
  Antisense Strand to SEQ ID NO: 449149
aauacacucagaaaugaga

SEQ ID NO: 449151 - RNA, 19 nt, Artificial Sequence
  Description of Artificial Sequence: Synthetic oligonucleotide
  Sense strand starting at position 2857 of SEQ ID NO: 316902
auugacaauagccgagaua

SEQ ID NO: 449152 - RNA, 19 nt, Artificial Sequence
  Description of Artificial Sequence: Synthetic oligonucleotide
  Antisense Strand to SEQ ID NO: 449151
uaucucggcuauugucaau

SEQ ID NO: 449153 - RNA, 19 nt, Artificial Sequence
  Description of Artificial Sequence: Synthetic oligonucleotide
  Sense strand starting at position 2858 of SEQ ID NO: 316902
uugacaauagccgagauau

SEQ ID NO: 449154 - RNA, 19 nt, Artificial Sequence
  Description of Artificial Sequence: Synthetic oligonucleotide
  Antisense Strand to SEQ ID NO: 449153
auaucucggcuauugucaa

SEQ ID NO: 449155 - RNA, 19 nt, Artificial Sequence
  Description of Artificial Sequence: Synthetic oligonucleotide
  Sense strand starting at position 2884 of SEQ ID NO: 316902
accuguuuccacugaugga

SEQ ID NO: 449156 - RNA, 19 nt, Artificial Sequence
  Description of Artificial Sequence: Synthetic oligonucleotide
  Antisense Strand to SEQ ID NO: 449155
uccaucaguggaaacaggu

SEQ ID NO: 449157 - RNA, 19 nt, Artificial Sequence
  Description of Artificial Sequence: Synthetic oligonucleotide
  Sense strand starting at position 3004 of SEQ ID NO: 316902
ccuagagggcauuauccua

SEQ ID NO: 449158 - RNA, 19 nt, Artificial Sequence
  Description of Artificial Sequence: Synthetic oligonucleotide
  Antisense Strand to SEQ ID NO: 449157
uaggauaaugcccucuagg

SEQ ID NO: 449159 - RNA, 19 nt, Artificial Sequence
  Description of Artificial Sequence: Synthetic oligonucleotide
  Sense strand starting at position 3249 of SEQ ID NO: 316902
guaugaucuuucuuacaug

SEQ ID NO: 449160 - RNA, 19 nt, Artificial Sequence
  Description of Artificial Sequence: Synthetic oligonucleotide
  Antisense Strand to SEQ ID NO: 449159
cauguaagaaagaucauac

SEQ ID NO: 449161 - RNA, 19 nt, Artificial Sequence
  Description of Artificial Sequence: Synthetic oligonucleotide
  Sense strand starting at position 3281 of SEQ ID NO: 316902
agucaaacucacggaagaa

SEQ ID NO: 449162 - RNA, 19 nt, Artificial Sequence
  Description of Artificial Sequence: Synthetic oligonucleotide
  Antisense Strand to SEQ ID NO: 449161
uucuuccgugaguuugacu

SEQ ID NO: 449163 - RNA, 19 nt, Artificial Sequence
  Description of Artificial Sequence: Synthetic oligonucleotide
  Sense strand starting at position 3324 of SEQ ID NO: 316902
gccugaggcauaggagaaa

SEQ ID NO: 449164 - RNA, 19 nt, Artificial Sequence
  Description of Artificial Sequence: Synthetic oligonucleotide
  Antisense Strand to SEQ ID NO: 449163
uuucuccuaugccucaggc

SEQ ID NO: 449165 - RNA, 19 nt, Artificial Sequence
  Description of Artificial Sequence: Synthetic oligonucleotide
  Sense strand starting at position 3346 of SEQ ID NO: 316902
gggagauguugguuagagg

SEQ ID NO: 449166 - RNA, 19 nt, Artificial Sequence
  Description of Artificial Sequence: Synthetic oligonucleotide
  Antisense Strand to SEQ ID NO: 449165
ccucuaaccaacaucuccc

SEQ ID NO: 449167 - RNA, 19 nt, Artificial Sequence
  Description of Artificial Sequence: Synthetic oligonucleotide
  Sense strand starting at position 3375 of SEQ ID NO: 316902
ugagcuaugcaauauaaau

SEQ ID NO: 449168 - RNA, 19 nt, Artificial Sequence
  Description of Artificial Sequence: Synthetic oligonucleotide
  Antisense Strand to SEQ ID NO: 449167
auuuauauugcauagcuca

SEQ ID NO: 449169 - RNA, 19 nt, Artificial Sequence
  Description of Artificial Sequence: Synthetic oligonucleotide
  Sense strand starting at position 3746 of SEQ ID NO: 316902
aaauaagagugucccaguu

SEQ ID NO: 449170 - RNA, 19 nt, Artificial Sequence
  Description of Artificial Sequence: Synthetic oligonucleotide
  Antisense Strand to SEQ ID NO: 449169
aacugggacacucuuauuu

SEQ ID NO: 449171 - RNA, 19 nt, Artificial Sequence
  Description of Artificial Sequence: Synthetic oligonucleotide
  Sense strand starting at position 3875 of SEQ ID NO: 316902
cuggacauccuguacuuua

SEQ ID NO: 449172 - RNA, 19 nt, Artificial Sequence
  Description of Artificial Sequence: Synthetic oligonucleotide
  Antisense Strand to SEQ ID NO: 449171
uaaaguacaggauguccag

SEQ ID NO: 449173 - RNA, 19 nt, Artificial Sequence
  Description of Artificial Sequence: Synthetic oligonucleotide
  Sense strand starting at position 163 of SEQ ID NO: 316903
uacgcauugcaauaggaaa

SEQ ID NO: 449174 - RNA, 19 nt, Artificial Sequence
  Description of Artificial Sequence: Synthetic oligonucleotide
  Antisense Strand to SEQ ID NO: 449173
uuuccuauugcaaugcgua

SEQ ID NO: 449175 - RNA, 19 nt, Artificial Sequence
  Description of Artificial Sequence: Synthetic oligonucleotide
  Sense strand starting at position 239 of SEQ ID NO: 316903
uuuggagcuuaauuacaaa

SEQ ID NO: 449176 - RNA, 19 nt, Artificial Sequence
  Description of Artificial Sequence: Synthetic oligonucleotide
  Antisense Strand to SEQ ID NO: 449175
uuuguaauuaagcuccaaa

SEQ ID NO: 449177 - RNA, 19 nt, Artificial Sequence
  Description of Artificial Sequence: Synthetic oligonucleotide
  Sense strand starting at position 351 of SEQ ID NO: 316903
auugcauugucauuuauuc

SEQ ID NO: 449178 - RNA, 19 nt, Artificial Sequence
  Description of Artificial Sequence: Synthetic oligonucleotide
  Antisense Strand to SEQ ID NO: 449177
gaauaaaugacaaugcaau

SEQ ID NO: 449179 - RNA, 19 nt, Artificial Sequence
  Description of Artificial Sequence: Synthetic oligonucleotide
  Sense strand starting at position 449 of SEQ ID NO: 316903
guuuaaccaguugacuaua

SEQ ID NO: 449180 - RNA, 19 nt, Artificial Sequence
  Description of Artificial Sequence: Synthetic oligonucleotide
  Antisense Strand to SEQ ID NO: 449179
uauagucaacugguuaaac

SEQ ID NO: 449181 - RNA, 19 nt, Artificial Sequence
  Description of Artificial Sequence: Synthetic oligonucleotide
  Sense strand starting at position 479 of SEQ ID NO: 316903
uauguaaagauucggagga

SEQ ID NO: 449182 - RNA, 19 nt, Artificial Sequence
  Description of Artificial Sequence: Synthetic oligonucleotide
  Antisense Strand to SEQ ID NO: 449181
uccuccgaaucuuuacaua

SEQ ID NO: 449183 - RNA, 19 nt, Artificial Sequence
  Description of Artificial Sequence: Synthetic oligonucleotide
  Sense strand starting at position 657 of SEQ ID NO: 316903
auggucuggcuuuacuaga

SEQ ID NO: 449184 - RNA, 19 nt, Artificial Sequence
  Description of Artificial Sequence: Synthetic oligonucleotide
  Antisense Strand to SEQ ID NO: 449183
ucuaguaaagccagaccau

SEQ ID NO: 449185 - RNA, 19 nt, Artificial Sequence
  Description of Artificial Sequence: Synthetic oligonucleotide
  Sense strand starting at position 743 of SEQ ID NO: 316903
gaaggccacuuguugaaua

SEQ ID NO: 449186 - RNA, 19 nt, Artificial Sequence
  Description of Artificial Sequence: Synthetic oligonucleotide
  Antisense Strand to SEQ ID NO: 449185
uauucaacaaguggccuuc

SEQ ID NO: 449187 - RNA, 19 nt, Artificial Sequence
  Description of Artificial Sequence: Synthetic oligonucleotide
  Sense strand starting at position 745 of SEQ ID NO: 316903
aggccacuuguugaauaau

SEQ ID NO: 449188 - RNA, 19 nt, Artificial Sequence
  Description of Artificial Sequence: Synthetic oligonucleotide
  Antisense Strand to SEQ ID NO: 449187
auuauucaacaaguggccu

SEQ ID NO: 449189 - RNA, 19 nt, Artificial Sequence
  Description of Artificial Sequence: Synthetic oligonucleotide
  Sense strand starting at position 809 of SEQ ID NO: 316903
uuuaguugauaagcagaaa

SEQ ID NO: 449190 - RNA, 19 nt, Artificial Sequence
  Description of Artificial Sequence: Synthetic oligonucleotide
  Antisense Strand to SEQ ID NO: 449189
uuucugcuuaucaacuaaa

SEQ ID NO: 449191 - RNA, 19 nt, Artificial Sequence
  Description of Artificial Sequence: Synthetic oligonucleotide
  Sense strand starting at position 812 of SEQ ID NO: 316903
aguugauaagcagaaaugu

SEQ ID NO: 449192 - RNA, 19 nt, Artificial Sequence
  Description of Artificial Sequence: Synthetic oligonucleotide
  Antisense Strand to SEQ ID NO: 449191
acauuucugcuuaucaacu

SEQ ID NO: 449193 - RNA, 19 nt, Artificial Sequence
  Description of Artificial Sequence: Synthetic oligonucleotide
  Sense strand starting at position 969 of SEQ ID NO: 316903
acauguagagucugauaag

SEQ ID NO: 449194 - RNA, 19 nt, Artificial Sequence
  Description of Artificial Sequence: Synthetic oligonucleotide
  Antisense Strand to SEQ ID NO: 449193
cuuaucagacucuacaugu

SEQ ID NO: 449195 - RNA, 19 nt, Artificial Sequence
  Description of Artificial Sequence: Synthetic oligonucleotide
  Sense strand starting at position 978 of SEQ ID NO: 316903
gucugauaaguacaacacu

SEQ ID NO: 449196 - RNA, 19 nt, Artificial Sequence
  Description of Artificial Sequence: Synthetic oligonucleotide
  Antisense Strand to SEQ ID NO: 449195
aguguuguacuuaucagac

SEQ ID NO: 449197 - RNA, 19 nt, Artificial Sequence
  Description of Artificial Sequence: Synthetic oligonucleotide
  Sense strand starting at position 1054 of SEQ ID NO: 316903
uguguauucuuauuucuag

SEQ ID NO: 449198 - RNA, 19 nt, Artificial Sequence
  Description of Artificial Sequence: Synthetic oligonucleotide
  Antisense Strand to SEQ ID NO: 449197
cuagaaauaagaauacaca

SEQ ID NO: 449199 - RNA, 19 nt, Artificial Sequence
  Description of Artificial Sequence: Synthetic oligonucleotide
  Sense strand starting at position 1055 of SEQ ID NO: 316903
guguauucuuauuucuagu

SEQ ID NO: 449200 - RNA, 19 nt, Artificial Sequence
  Description of Artificial Sequence: Synthetic oligonucleotide
  Antisense Strand to SEQ ID NO: 449199
acuagaaauaagaauacac

SEQ ID NO: 449201 - RNA, 19 nt, Artificial Sequence
  Description of Artificial Sequence: Synthetic oligonucleotide
  Sense strand starting at position 1540 of SEQ ID NO: 316903
ccuguauugcuagaaguaa

SEQ ID NO: 449202 - RNA, 19 nt, Artificial Sequence
  Description of Artificial Sequence: Synthetic oligonucleotide
  Antisense Strand to SEQ ID NO: 449201
uuacuucuagcaauacagg

SEQ ID NO: 449203 - RNA, 19 nt, Artificial Sequence
  Description of Artificial Sequence: Synthetic oligonucleotide
  Sense strand starting at position 2033 of SEQ ID NO: 316903
guuaccuuuccuuaguuaa

SEQ ID NO: 449204 - RNA, 19 nt, Artificial Sequence
  Description of Artificial Sequence: Synthetic oligonucleotide
  Antisense Strand to SEQ ID NO: 449203
uuaacuaaggaaagguaac

SEQ ID NO: 449205 - RNA, 19 nt, Artificial Sequence
  Description of Artificial Sequence: Synthetic oligonucleotide
  Sense strand starting at position 2151 of SEQ ID NO: 316903
guuggucuaguuuagaaac

SEQ ID NO: 449206 - RNA, 19 nt, Artificial Sequence
  Description of Artificial Sequence: Synthetic oligonucleotide
  Antisense Strand to SEQ ID NO: 449205
guuucuaaacuagaccaac

SEQ ID NO: 449207 - RNA, 19 nt, Artificial Sequence
  Description of Artificial Sequence: Synthetic oligonucleotide
  Sense strand starting at position 2225 of SEQ ID NO: 316903
cucaaagagagauguguau

SEQ ID NO: 449208 - RNA, 19 nt, Artificial Sequence
  Description of Artificial Sequence: Synthetic oligonucleotide
  Antisense Strand to SEQ ID NO: 449207
auacacaucucucuuugag

SEQ ID NO: 449209 - RNA, 19 nt, Artificial Sequence
  Description of Artificial Sequence: Synthetic oligonucleotide
  Sense strand starting at position 2253 of SEQ ID NO: 316903
gguaaauuaauguggaaac

SEQ ID NO: 449210 - RNA, 19 nt, Artificial Sequence
  Description of Artificial Sequence: Synthetic oligonucleotide
  Antisense Strand to SEQ ID NO: 449209
guuuccacauuaauuuacc

SEQ ID NO: 449211 - RNA, 19 nt, Artificial Sequence
  Description of Artificial Sequence: Synthetic oligonucleotide
  Sense strand starting at position 2281 of SEQ ID NO: 316903
uccgaaagaauaugugaga

SEQ ID NO: 449212 - RNA, 19 nt, Artificial Sequence
  Description of Artificial Sequence: Synthetic oligonucleotide
  Antisense Strand to SEQ ID NO: 449211
ucucacauauucuuucgga

SEQ ID NO: 449213 - RNA, 19 nt, Artificial Sequence
  Description of Artificial Sequence: Synthetic oligonucleotide
  Sense strand starting at position 2350 of SEQ ID NO: 316903
aaucgugacucauuaauga

SEQ ID NO: 449214 - RNA, 19 nt, Artificial Sequence
  Description of Artificial Sequence: Synthetic oligonucleotide
  Antisense Strand to SEQ ID NO: 449213
ucauuaaugagucacgauu

SEQ ID NO: 449215 - RNA, 19 nt, Artificial Sequence
  Description of Artificial Sequence: Synthetic oligonucleotide
  Sense strand starting at position 2555 of SEQ ID NO: 316903
gcugaauagcuuuaauauu

SEQ ID NO: 449216 - RNA, 19 nt, Artificial Sequence
  Description of Artificial Sequence: Synthetic oligonucleotide
  Antisense Strand to SEQ ID NO: 449215
aauauuaaagcuauucagc

SEQ ID NO: 449217 - RNA, 19 nt, Artificial Sequence
  Description of Artificial Sequence: Synthetic oligonucleotide
  Sense strand starting at position 2852 of SEQ ID NO: 316903
gucuguucacuuguguguu

SEQ ID NO: 449218 - RNA, 19 nt, Artificial Sequence
  Description of Artificial Sequence: Synthetic oligonucleotide
  Antisense Strand to SEQ ID NO: 449217
aacacacaagugaacagac

SEQ ID NO: 449219 - RNA, 19 nt, Artificial Sequence
  Description of Artificial Sequence: Synthetic oligonucleotide
  Sense strand starting at position 2867 of SEQ ID NO: 316903
uguugcaaucaggauuaau

SEQ ID NO: 449220 - RNA, 19 nt, Artificial Sequence
  Description of Artificial Sequence: Synthetic oligonucleotide
  Antisense Strand to SEQ ID NO: 449219
auuaauccugauugcaaca

SEQ ID NO: 449221 - RNA, 19 nt, Artificial Sequence
  Description of Artificial Sequence: Synthetic oligonucleotide
  Sense strand starting at position 2911 of SEQ ID NO: 316903
accagucaguaauccaaau

SEQ ID NO: 449222 - RNA, 19 nt, Artificial Sequence
  Description of Artificial Sequence: Synthetic oligonucleotide
  Antisense Strand to SEQ ID NO: 449221
auuuggauuacugacuggu

SEQ ID NO: 449223 - RNA, 19 nt, Artificial Sequence
  Description of Artificial Sequence: Synthetic oligonucleotide
  Sense strand starting at position 2968 of SEQ ID NO: 316903
uuguauggaaagugaaaca

SEQ ID NO: 449224 - RNA, 19 nt, Artificial Sequence
  Description of Artificial Sequence: Synthetic oligonucleotide
  Antisense Strand to SEQ ID NO: 449223
uguuucacuuuccauacaa

SEQ ID NO: 449225 - RNA, 19 nt, Artificial Sequence
  Description of Artificial Sequence: Synthetic oligonucleotide
  Sense strand starting at position 3029 of SEQ ID NO: 316903
guuaucaggguuuggauca

SEQ ID NO: 449226 - RNA, 19 nt, Artificial Sequence
  Description of Artificial Sequence: Synthetic oligonucleotide
  Antisense Strand to SEQ ID NO: 449225
ugauccaaacccugauaac

SEQ ID NO: 449227 - RNA, 19 nt, Artificial Sequence
  Description of Artificial Sequence: Synthetic oligonucleotide
  Sense strand starting at position 3039 of SEQ ID NO: 316903
uuuggaucagcguauugaa

SEQ ID NO: 449228 - RNA, 19 nt, Artificial Sequence
  Description of Artificial Sequence: Synthetic oligonucleotide
  Antisense Strand to SEQ ID NO: 449227
uucaauacgcugauccaaa

SEQ ID NO: 449229 - RNA, 19 nt, Artificial Sequence
  Description of Artificial Sequence: Synthetic oligonucleotide
  Sense strand starting at position 3228 of SEQ ID NO: 316903
gagacaaaguacucaguuu

SEQ ID NO: 449230 - RNA, 19 nt, Artificial Sequence
  Description of Artificial Sequence: Synthetic oligonucleotide
  Antisense Strand to SEQ ID NO: 449229
aaacugaguacuuugucuc

SEQ ID NO: 449231 - RNA, 19 nt, Artificial Sequence
  Description of Artificial Sequence: Synthetic oligonucleotide
  Sense strand starting at position 3278 of SEQ ID NO: 316903
ccaaauuuguguucccuuu

SEQ ID NO: 449232 - RNA, 19 nt, Artificial Sequence
  Description of Artificial Sequence: Synthetic oligonucleotide
  Antisense Strand to SEQ ID NO: 449231
aaagggaacacaaauuugg

SEQ ID NO: 449233 - RNA, 19 nt, Artificial Sequence
  Description of Artificial Sequence: Synthetic oligonucleotide
  Sense strand starting at position 3293 of SEQ ID NO: 316903
cuuuauuagcaaugaguaa

SEQ ID NO: 449234 - RNA, 19 nt, Artificial Sequence
  Description of Artificial Sequence: Synthetic oligonucleotide
  Antisense Strand to SEQ ID NO: 449233
uuacucauugcuaauaaag

SEQ ID NO: 449235 - RNA, 19 nt, Artificial Sequence
  Description of Artificial Sequence: Synthetic oligonucleotide
  Sense strand starting at position 3492 of SEQ ID NO: 316903
acguacagauucuuacaga

SEQ ID NO: 449236 - RNA, 19 nt, Artificial Sequence
  Description of Artificial Sequence: Synthetic oligonucleotide
  Antisense Strand to SEQ ID NO: 449235
ucuguaagaaucuguacgu

SEQ ID NO: 449237 - RNA, 19 nt, Artificial Sequence
  Description of Artificial Sequence: Synthetic oligonucleotide
  Sense strand starting at position 3586 of SEQ ID NO: 316903
augacugauguuugaucaa

SEQ ID NO: 449238 - RNA, 19 nt, Artificial Sequence
  Description of Artificial Sequence: Synthetic oligonucleotide
  Antisense Strand to SEQ ID NO: 449237
uugaucaaacaucagucau

SEQ ID NO: 449239 - RNA, 19 nt, Artificial Sequence
  Description of Artificial Sequence: Synthetic oligonucleotide
  Sense strand starting at position 3589 of SEQ ID NO: 316903
acugauguuugaucaacua

SEQ ID NO: 449240 - RNA, 19 nt, Artificial Sequence
  Description of Artificial Sequence: Synthetic oligonucleotide
  Antisense Strand to SEQ ID NO: 449239
uaguugaucaaacaucagu

SEQ ID NO: 449241 - RNA, 19 nt, Artificial Sequence
  Description of Artificial Sequence: Synthetic oligonucleotide
  Sense strand starting at position 3637 of SEQ ID NO: 316903
gucuguaaauuuguaaagu

SEQ ID NO: 449242 - RNA, 19 nt, Artificial Sequence
  Description of Artificial Sequence: Synthetic oligonucleotide
  Antisense Strand to SEQ ID NO: 449241
acuuuacaaauuuacagac

SEQ ID NO: 449243 - RNA, 19 nt, Artificial Sequence
  Description of Artificial Sequence: Synthetic oligonucleotide
  Sense strand starting at position 3692 of SEQ ID NO: 316903
aagugaagguuccuuuacu

SEQ ID NO: 449244 - RNA, 19 nt, Artificial Sequence
  Description of Artificial Sequence: Synthetic oligonucleotide
  Antisense Strand to SEQ ID NO: 449243
aguaaaggaaccuucacuu

SEQ ID NO: 449245 - RNA, 19 nt, Artificial Sequence
  Description of Artificial Sequence: Synthetic oligonucleotide
  Sense strand starting at position 3816 of SEQ ID NO: 316903
uacaaauaguucuugagag

SEQ ID NO: 449246 - RNA, 19 nt, Artificial Sequence
  Description of Artificial Sequence: Synthetic oligonucleotide
  Antisense Strand to SEQ ID NO: 449245
cucucaagaacuauuugua

SEQ ID NO: 449247 - RNA, 19 nt, Artificial Sequence
  Description of Artificial Sequence: Synthetic oligonucleotide
  Sense strand starting at position 3818 of SEQ ID NO: 316903
caaauaguucuugagaguc

SEQ ID NO: 449248 - RNA, 19 nt, Artificial Sequence
  Description of Artificial Sequence: Synthetic oligonucleotide
  Antisense Strand to SEQ ID NO: 449247
gacucucaagaacuauuug

SEQ ID NO: 449249 - RNA, 19 nt, Artificial Sequence
  Description of Artificial Sequence: Synthetic oligonucleotide
  Sense strand starting at position 3872 of SEQ ID NO: 316903
ugcauuggugagcaagaca

SEQ ID NO: 449250 - RNA, 19 nt, Artificial Sequence
  Description of Artificial Sequence: Synthetic oligonucleotide
  Antisense Strand to SEQ ID NO: 449249
ugucuugcucaccaaugca

SEQ ID NO: 449251 - RNA, 19 nt, Artificial Sequence
  Description of Artificial Sequence: Synthetic oligonucleotide
  Sense strand starting at position 3974 of SEQ ID NO: 316903
gguagucauuuaucguauu

SEQ ID NO: 449252 - RNA, 19 nt, Artificial Sequence
  Description of Artificial Sequence: Synthetic oligonucleotide
  Antisense Strand to SEQ ID NO: 449251
aauacgauaaaugacuacc

SEQ ID NO: 449253 - RNA, 19 nt, Artificial Sequence
  Description of Artificial Sequence: Synthetic oligonucleotide
  Sense strand starting at position 208 of SEQ ID NO: 316904
uuucucaggcaaugagaga

SEQ ID NO: 449254 - RNA, 19 nt, Artificial Sequence
  Description of Artificial Sequence: Synthetic oligonucleotide
  Antisense Strand to SEQ ID NO: 449253
ucucucauugccugagaaa

SEQ ID NO: 449255 - RNA, 19 nt, Artificial Sequence
  Description of Artificial Sequence: Synthetic oligonucleotide
  Sense strand starting at position 368 of SEQ ID NO: 316904
uguaaaucggcucaucuua

SEQ ID NO: 449256 - RNA, 19 nt, Artificial Sequence
  Description of Artificial Sequence: Synthetic oligonucleotide
  Antisense Strand to SEQ ID NO: 449255
uaagaugagccgauuuaca

SEQ ID NO: 449257 - RNA, 19 nt, Artificial Sequence
  Description of Artificial Sequence: Synthetic oligonucleotide
  Sense strand starting at position 425 of SEQ ID NO: 316904
caaagugugaugugaucag

SEQ ID NO: 449258 - RNA, 19 nt, Artificial Sequence
  Description of Artificial Sequence: Synthetic oligonucleotide
  Antisense Strand to SEQ ID NO: 449257
cugaucacaucacacuuug

SEQ ID NO: 449259 - RNA, 19 nt, Artificial Sequence
  Description of Artificial Sequence: Synthetic oligonucleotide
  Sense strand starting at position 429 of SEQ ID NO: 316904
gugugaugugaucagcauc

SEQ ID NO: 449260 - RNA, 19 nt, Artificial Sequence
  Description of Artificial Sequence: Synthetic oligonucleotide
  Antisense Strand to SEQ ID NO: 449259
gaugcugaucacaucacac

SEQ ID NO: 449261 - RNA, 19 nt, Artificial Sequence
  Description of Artificial Sequence: Synthetic oligonucleotide
  Sense strand starting at position 526 of SEQ ID NO: 316904
uauuuaggccaguguucuu

SEQ ID NO: 449262 - RNA, 19 nt, Artificial Sequence
  Description of Artificial Sequence: Synthetic oligonucleotide
  Antisense Strand to SEQ ID NO: 449261
aagaacacuggccuaaaua

SEQ ID NO: 449263 - RNA, 19 nt, Artificial Sequence
  Description of Artificial Sequence: Synthetic oligonucleotide
  Sense strand starting at position 636 of SEQ ID NO: 316904
ccacgugagcgaugaggaa

SEQ ID NO: 449264 - RNA, 19 nt, Artificial Sequence
  Description of Artificial Sequence: Synthetic oligonucleotide
  Antisense Strand to SEQ ID NO: 449263
uuccucaucgcucacgugg

SEQ ID NO: 449265 - RNA, 19 nt, Artificial Sequence
  Description of Artificial Sequence: Synthetic oligonucleotide
  Sense strand starting at position 712 of SEQ ID NO: 316904
agauuaaaguguuugcacu

SEQ ID NO: 449266 - RNA, 19 nt, Artificial Sequence
  Description of Artificial Sequence: Synthetic oligonucleotide
  Antisense Strand to SEQ ID NO: 449265
agugcaaacacuuuaaucu

SEQ ID NO: 449267 - RNA, 19 nt, Artificial Sequence
  Description of Artificial Sequence: Synthetic oligonucleotide
  Sense strand starting at position 713 of SEQ ID NO: 316904
gauuaaaguguuugcacuu

SEQ ID NO: 449268 - RNA, 19 nt, Artificial Sequence
  Description of Artificial Sequence: Synthetic oligonucleotide
  Antisense Strand to SEQ ID NO: 449267
aagugcaaacacuuuaauc

SEQ ID NO: 449269 - RNA, 19 nt, Artificial Sequence
  Description of Artificial Sequence: Synthetic oligonucleotide
  Sense strand starting at position 886 of SEQ ID NO: 316904
ggucgucccgagucggaau

SEQ ID NO: 449270 - RNA, 19 nt, Artificial Sequence
  Description of Artificial Sequence: Synthetic oligonucleotide
  Antisense Strand to SEQ ID NO: 449269
auuccgacucgggacgacc

SEQ ID NO: 449271 - RNA, 19 nt, Artificial Sequence
  Description of Artificial Sequence: Synthetic oligonucleotide
  Sense strand starting at position 914 of SEQ ID NO: 316904
ggacucuagaaagguguuu

SEQ ID NO: 449272 - RNA, 19 nt, Artificial Sequence
  Description of Artificial Sequence: Synthetic oligonucleotide
  Antisense Strand to SEQ ID NO: 449271
aaacaccuuucuagagucc

SEQ ID NO: 449273 - RNA, 19 nt, Artificial Sequence
  Description of Artificial Sequence: Synthetic oligonucleotide
  Sense strand starting at position 1117 of SEQ ID NO: 316904
acugguuuacagggcaaau

SEQ ID NO: 449274 - RNA, 19 nt, Artificial Sequence
  Description of Artificial Sequence: Synthetic oligonucleotide
  Antisense Strand to SEQ ID NO: 449273
auuugcccuguaaaccagu

SEQ ID NO: 449275 - RNA, 19 nt, Artificial Sequence
  Description of Artificial Sequence: Synthetic oligonucleotide
  Sense strand starting at position 2365 of SEQ ID NO: 316904
ggaagagucugugucagag

SEQ ID NO: 449276 - RNA, 19 nt, Artificial Sequence
  Description of Artificial Sequence: Synthetic oligonucleotide
  Antisense Strand to SEQ ID NO: 449275
cucugacacagacucuucc

SEQ ID NO: 449277 - RNA, 19 nt, Artificial Sequence
  Description of Artificial Sequence: Synthetic oligonucleotide
  Sense strand starting at position 2461 of SEQ ID NO: 316904
gcugaagucgucuaccaac

SEQ ID NO: 449278 - RNA, 19 nt, Artificial Sequence
  Description of Artificial Sequence: Synthetic oligonucleotide
  Antisense Strand to SEQ ID NO: 449277
guugguagacgacuucagc

SEQ ID NO: 449279 - RNA, 19 nt, Artificial Sequence
  Description of Artificial Sequence: Synthetic oligonucleotide
  Sense strand starting at position 2509 of SEQ ID NO: 316904
agcagauuggguugcuaaa

SEQ ID NO: 449280 - RNA, 19 nt, Artificial Sequence
  Description of Artificial Sequence: Synthetic oligonucleotide
  Antisense Strand to SEQ ID NO: 449279
uuuagcaacccaaucugcu

SEQ ID NO: 449281 - RNA, 19 nt, Artificial Sequence
  Description of Artificial Sequence: Synthetic oligonucleotide
  Sense strand starting at position 2554 of SEQ ID NO: 316904
ucuugaauuagacgacgca

SEQ ID NO: 449282 - RNA, 19 nt, Artificial Sequence
  Description of Artificial Sequence: Synthetic oligonucleotide
  Antisense Strand to SEQ ID NO: 449281
ugcgucgucuaauucaaga

SEQ ID NO: 449283 - RNA, 19 nt, Artificial Sequence
  Description of Artificial Sequence: Synthetic oligonucleotide
  Sense strand starting at position 2557 of SEQ ID NO: 316904
ugaauuagacgacgcagaa

SEQ ID NO: 449284 - RNA, 19 nt, Artificial Sequence
  Description of Artificial Sequence: Synthetic oligonucleotide
  Antisense Strand to SEQ ID NO: 449283
uucugcgucgucuaauuca

SEQ ID NO: 449285 - RNA, 19 nt, Artificial Sequence
  Description of Artificial Sequence: Synthetic oligonucleotide
  Sense strand starting at position 2595 of SEQ ID NO: 316904
gauaaauccuuaucgcgau

SEQ ID NO: 449286 - RNA, 19 nt, Artificial Sequence
  Description of Artificial Sequence: Synthetic oligonucleotide
  Antisense Strand to SEQ ID NO: 449285
aucgcgauaaggauuuauc

SEQ ID NO: 449287 - RNA, 19 nt, Artificial Sequence
  Description of Artificial Sequence: Synthetic oligonucleotide
  Sense strand starting at position 2599 of SEQ ID NO: 316904
aauccuuaucgcgaucgaa

SEQ ID NO: 449288 - RNA, 19 nt, Artificial Sequence
  Description of Artificial Sequence: Synthetic oligonucleotide
  Antisense Strand to SEQ ID NO: 449287
uucgaucgcgauaaggauu

SEQ ID NO: 449289 - RNA, 19 nt, Artificial Sequence
  Description of Artificial Sequence: Synthetic oligonucleotide
  Sense strand starting at position 2643 of SEQ ID NO: 316904
uggcauuugcccuagcuaa

SEQ ID NO: 449290 - RNA, 19 nt, Artificial Sequence
  Description of Artificial Sequence: Synthetic oligonucleotide
  Antisense Strand to SEQ ID NO: 449289
uuagcuagggcaaaugcca

SEQ ID NO: 449291 - RNA, 19 nt, Artificial Sequence
  Description of Artificial Sequence: Synthetic oligonucleotide
  Sense strand starting at position 2668 of SEQ ID NO: 316904
augcauuucuuggagagag

SEQ ID NO: 449292 - RNA, 19 nt, Artificial Sequence
  Description of Artificial Sequence: Synthetic oligonucleotide
  Antisense Strand to SEQ ID NO: 449291
cucucuccaagaaaugcau

SEQ ID NO: 449293 - RNA, 19 nt, Artificial Sequence
  Description of Artificial Sequence: Synthetic oligonucleotide
  Sense strand starting at position 2833 of SEQ ID NO: 316904
uaauguugaguguguggga

SEQ ID NO: 449294 - RNA, 19 nt, Artificial Sequence
  Description of Artificial Sequence: Synthetic oligonucleotide
  Antisense Strand to SEQ ID NO: 449293
ucccacacacucaacauua

SEQ ID NO: 449295 - RNA, 19 nt, Artificial Sequence
  Description of Artificial Sequence: Synthetic oligonucleotide
  Sense strand starting at position 2889 of SEQ ID NO: 316904
gagauaagauggguagcau

SEQ ID NO: 449296 - RNA, 19 nt, Artificial Sequence
  Description of Artificial Sequence: Synthetic oligonucleotide
  Antisense Strand to SEQ ID NO: 449295
augcuacccaucuuaucuc

SEQ ID NO: 449297 - RNA, 19 nt, Artificial Sequence
  Description of Artificial Sequence: Synthetic oligonucleotide
  Sense strand starting at position 2951 of SEQ ID NO: 316904
gacuaagugcugugacauu

SEQ ID NO: 449298 - RNA, 19 nt, Artificial Sequence
  Description of Artificial Sequence: Synthetic oligonucleotide
  Antisense Strand to SEQ ID NO: 449297
aaugucacagcacuuaguc

SEQ ID NO: 449299 - RNA, 19 nt, Artificial Sequence
  Description of Artificial Sequence: Synthetic oligonucleotide
  Sense strand starting at position 3019 of SEQ ID NO: 316904
ucuagaaggaguugcaagu

SEQ ID NO: 449300 - RNA, 19 nt, Artificial Sequence
  Description of Artificial Sequence: Synthetic oligonucleotide
  Antisense Strand to SEQ ID NO: 449299
acuugcaacuccuucuaga

SEQ ID NO: 449301 - RNA, 19 nt, Artificial Sequence
  Description of Artificial Sequence: Synthetic oligonucleotide
  Sense strand starting at position 3045 of SEQ ID NO: 316904
ugccuccuuguagaaacau

SEQ ID NO: 449302 - RNA, 19 nt, Artificial Sequence
  Description of Artificial Sequence: Synthetic oligonucleotide
  Antisense Strand to SEQ ID NO: 449301
auguuucuacaaggaggca

SEQ ID NO: 449303 - RNA, 19 nt, Artificial Sequence
  Description of Artificial Sequence: Synthetic oligonucleotide
  Sense strand starting at position 3084 of SEQ ID NO: 316904
auaagugcauuuguucuua

SEQ ID NO: 449304 - RNA, 19 nt, Artificial Sequence
  Description of Artificial Sequence: Synthetic oligonucleotide
  Antisense Strand to SEQ ID NO: 449303
uaagaacaaaugcacuuau

SEQ ID NO: 449305 - RNA, 19 nt, Artificial Sequence
  Description of Artificial Sequence: Synthetic oligonucleotide
  Sense strand starting at position 3088 of SEQ ID NO: 316904
gugcauuuguucuuaaguc

SEQ ID NO: 449306 - RNA, 19 nt, Artificial Sequence
  Description of Artificial Sequence: Synthetic oligonucleotide
  Antisense Strand to SEQ ID NO: 449305
gacuuaagaacaaaugcac

SEQ ID NO: 449307 - RNA, 19 nt, Artificial Sequence
  Description of Artificial Sequence: Synthetic oligonucleotide
  Sense strand starting at position 3096 of SEQ ID NO: 316904
guucuuaagucuccaagaa

SEQ ID NO: 449308 - RNA, 19 nt, Artificial Sequence
  Description of Artificial Sequence: Synthetic oligonucleotide
  Antisense Strand to SEQ ID NO: 449307
uucuuggagacuuaagaac

SEQ ID NO: 449309 - RNA, 19 nt, Artificial Sequence
  Description of Artificial Sequence: Synthetic oligonucleotide
  Sense strand starting at position 3116 of SEQ ID NO: 316904
gcuuuaacuccagaugcau

SEQ ID NO: 449310 - RNA, 19 nt, Artificial Sequence
  Description of Artificial Sequence: Synthetic oligonucleotide
  Antisense Strand to SEQ ID NO: 449309
augcaucuggaguuaaagc

SEQ ID NO: 449311 - RNA, 19 nt, Artificial Sequence
  Description of Artificial Sequence: Synthetic oligonucleotide
  Sense strand starting at position 3159 of SEQ ID NO: 316904
augaguaaauucuuugaag

SEQ ID NO: 449312 - RNA, 19 nt, Artificial Sequence
  Description of Artificial Sequence: Synthetic oligonucleotide
  Antisense Strand to SEQ ID NO: 449311
cuucaaagaauuuacucau

SEQ ID NO: 449313 - RNA, 19 nt, Artificial Sequence
  Description of Artificial Sequence: Synthetic oligonucleotide
  Sense strand starting at position 3160 of SEQ ID NO: 316904
ugaguaaauucuuugaagc

SEQ ID NO: 449314 - RNA, 19 nt, Artificial Sequence
  Description of Artificial Sequence: Synthetic oligonucleotide
  Antisense Strand to SEQ ID NO: 449313
gcuucaaagaauuuacuca

SEQ ID NO: 449315 - RNA, 19 nt, Artificial Sequence
  Description of Artificial Sequence: Synthetic oligonucleotide
  Sense strand starting at position 3161 of SEQ ID NO: 316904
gaguaaauucuuugaagcu

SEQ ID NO: 449316 - RNA, 19 nt, Artificial Sequence
  Description of Artificial Sequence: Synthetic oligonucleotide
  Antisense Strand to SEQ ID NO: 449315
agcuucaaagaauuuacuc

SEQ ID NO: 449317 - RNA, 19 nt, Artificial Sequence
  Description of Artificial Sequence: Synthetic oligonucleotide
  Sense strand starting at position 3547 of SEQ ID NO: 316904
guugguauauguucuauag

SEQ ID NO: 449318 - RNA, 19 nt, Artificial Sequence
  Description of Artificial Sequence: Synthetic oligonucleotide
  Antisense Strand to SEQ ID NO: 449317
cuauagaacauauaccaac

SEQ ID NO: 449319 - RNA, 19 nt, Artificial Sequence
  Description of Artificial Sequence: Synthetic oligonucleotide
  Sense strand starting at position 3783 of SEQ ID NO: 316904
uggacaaaucugugaucua

SEQ ID NO: 449320 - RNA, 19 nt, Artificial Sequence
  Description of Artificial Sequence: Synthetic oligonucleotide
  Antisense Strand to SEQ ID NO: 449319
uagaucacagauuugucca

SEQ ID NO: 449321 - RNA, 19 nt, Artificial Sequence
  Description of Artificial Sequence: Synthetic oligonucleotide
  Sense strand starting at position 3786 of SEQ ID NO: 316904
acaaaucugugaucuaaug

SEQ ID NO: 449322 - RNA, 19 nt, Artificial Sequence
  Description of Artificial Sequence: Synthetic oligonucleotide
  Antisense Strand to SEQ ID NO: 449321
cauuagaucacagauuugu

SEQ ID NO: 449323 - RNA, 19 nt, Artificial Sequence
  Description of Artificial Sequence: Synthetic oligonucleotide
  Sense strand starting at position 3833 of SEQ ID NO: 316904
aggccuauuugcucagauu

SEQ ID NO: 449324 - RNA, 19 nt, Artificial Sequence
  Description of Artificial Sequence: Synthetic oligonucleotide
  Antisense Strand to SEQ ID NO: 449323
aaucugagcaaauaggccu

SEQ ID NO: 449325 - RNA, 19 nt, Artificial Sequence
  Description of Artificial Sequence: Synthetic oligonucleotide
  Sense strand starting at position 3874 of SEQ ID NO: 316904
cagagauaaggaugucugu

SEQ ID NO: 449326 - RNA, 19 nt, Artificial Sequence
  Description of Artificial Sequence: Synthetic oligonucleotide
  Antisense Strand to SEQ ID NO: 449325
acagacauccuuaucucug

SEQ ID NO: 449327 - RNA, 19 nt, Artificial Sequence
  Description of Artificial Sequence: Synthetic oligonucleotide
  Sense strand starting at position 3887 of SEQ ID NO: 316904
gucuguuuccuccagguau

SEQ ID NO: 449328 - RNA, 19 nt, Artificial Sequence
  Description of Artificial Sequence: Synthetic oligonucleotide
  Antisense Strand to SEQ ID NO: 449327
auaccuggaggaaacagac

SEQ ID NO: 449329 - RNA, 19 nt, Artificial Sequence
  Description of Artificial Sequence: Synthetic oligonucleotide
  Sense strand starting at position 3889 of SEQ ID NO: 316904
cuguuuccuccagguauag

SEQ ID NO: 449330 - RNA, 19 nt, Artificial Sequence
  Description of Artificial Sequence: Synthetic oligonucleotide
  Antisense Strand to SEQ ID NO: 449329
cuauaccuggaggaaacag

SEQ ID NO: 449331 - RNA, 19 nt, Artificial Sequence
  Description of Artificial Sequence: Synthetic oligonucleotide
  Sense strand starting at position 3934 of SEQ ID NO: 316904
uauggucugccucagaaga

SEQ ID NO: 449332 - RNA, 19 nt, Artificial Sequence
  Description of Artificial Sequence: Synthetic oligonucleotide
  Antisense Strand to SEQ ID NO: 449331
ucuucugaggcagaccaua

SEQ ID NO: 449333 - RNA, 19 nt, Artificial Sequence
  Description of Artificial Sequence: Synthetic oligonucleotide
  Sense strand starting at position 31 of SEQ ID NO: 316905
aaguaucaggguuguaaca

SEQ ID NO: 449334 - RNA, 19 nt, Artificial Sequence
  Description of Artificial Sequence: Synthetic oligonucleotide
  Antisense Strand to SEQ ID NO: 449333
uguuacaacccugauacuu

SEQ ID NO: 449335 - RNA, 19 nt, Artificial Sequence
  Description of Artificial Sequence: Synthetic oligonucleotide
  Sense strand starting at position 149 of SEQ ID NO: 316905
agccucucuuaggagauuu

SEQ ID NO: 449336 - RNA, 19 nt, Artificial Sequence
  Description of Artificial Sequence: Synthetic oligonucleotide
  Antisense Strand to SEQ ID NO: 449335
aaaucuccuaagagaggcu

SEQ ID NO: 449337 - RNA, 19 nt, Artificial Sequence
  Description of Artificial Sequence: Synthetic oligonucleotide
  Sense strand starting at position 202 of SEQ ID NO: 316905
uggccaacaccuuaguuua

SEQ ID NO: 449338 - RNA, 19 nt, Artificial Sequence
  Description of Artificial Sequence: Synthetic oligonucleotide
  Antisense Strand to SEQ ID NO: 449337
uaaacuaagguguuggcca

SEQ ID NO: 449339 - RNA, 19 nt, Artificial Sequence
  Description of Artificial Sequence: Synthetic oligonucleotide
  Sense strand starting at position 313 of SEQ ID NO: 316905
auggcagagauccauguua

SEQ ID NO: 449340 - RNA, 19 nt, Artificial Sequence
  Description of Artificial Sequence: Synthetic oligonucleotide
  Antisense Strand to SEQ ID NO: 449339
uaacauggaucucugccau

SEQ ID NO: 449341 - RNA, 19 nt, Artificial Sequence
  Description of Artificial Sequence: Synthetic oligonucleotide
  Sense strand starting at position 315 of SEQ ID NO: 316905
ggcagagauccauguuaaa

SEQ ID NO: 449342 - RNA, 19 nt, Artificial Sequence
  Description of Artificial Sequence: Synthetic oligonucleotide
  Antisense Strand to SEQ ID NO: 449341
uuuaacauggaucucugcc

SEQ ID NO: 449343 - RNA, 19 nt, Artificial Sequence
  Description of Artificial Sequence: Synthetic oligonucleotide
  Sense strand starting at position 346 of SEQ ID NO: 316905
augcaaauucugcauugau

SEQ ID NO: 449344 - RNA, 19 nt, Artificial Sequence
  Description of Artificial Sequence: Synthetic oligonucleotide
  Antisense Strand to SEQ ID NO: 449343
aucaaugcagaauuugcau

SEQ ID NO: 449345 - RNA, 19 nt, Artificial Sequence
  Description of Artificial Sequence: Synthetic oligonucleotide
  Sense strand starting at position 435 of SEQ ID NO: 316905
uuugaauauuugcuaugcu

SEQ ID NO: 449346 - RNA, 19 nt, Artificial Sequence
  Description of Artificial Sequence: Synthetic oligonucleotide
  Antisense Strand to SEQ ID NO: 449345
agcauagcaaauauucaaa

SEQ ID NO: 449347 - RNA, 19 nt, Artificial Sequence
  Description of Artificial Sequence: Synthetic oligonucleotide
  Sense strand starting at position 513 of SEQ ID NO: 316905
auaucaugcuuagugagau

SEQ ID NO: 449348 - RNA, 19 nt, Artificial Sequence
  Description of Artificial Sequence: Synthetic oligonucleotide
  Antisense Strand to SEQ ID NO: 449347
aucucacuaagcaugauau

SEQ ID NO: 449349 - RNA, 19 nt, Artificial Sequence
  Description of Artificial Sequence: Synthetic oligonucleotide
  Sense strand starting at position 519 of SEQ ID NO: 316905
ugcuuagugagauagguau

SEQ ID NO: 449350 - RNA, 19 nt, Artificial Sequence
  Description of Artificial Sequence: Synthetic oligonucleotide
  Antisense Strand to SEQ ID NO: 449349
auaccuaucucacuaagca

SEQ ID NO: 449351 - RNA, 19 nt, Artificial Sequence
  Description of Artificial Sequence: Synthetic oligonucleotide
  Sense strand starting at position 521 of SEQ ID NO: 316905
cuuagugagauagguaucu

SEQ ID NO: 449352 - RNA, 19 nt, Artificial Sequence
  Description of Artificial Sequence: Synthetic oligonucleotide
  Antisense Strand to SEQ ID NO: 449351
agauaccuaucucacuaag

SEQ ID NO: 449353 - RNA, 19 nt, Artificial Sequence
  Description of Artificial Sequence: Synthetic oligonucleotide
  Sense strand starting at position 526 of SEQ ID NO: 316905
ugagauagguaucuuauau

SEQ ID NO: 449354 - RNA, 19 nt, Artificial Sequence
  Description of Artificial Sequence: Synthetic oligonucleotide
  Antisense Strand to SEQ ID NO: 449353
auauaagauaccuaucuca

SEQ ID NO: 449355 - RNA, 19 nt, Artificial Sequence
  Description of Artificial Sequence: Synthetic oligonucleotide
  Sense strand starting at position 605 of SEQ ID NO: 316905
ucugaaagguuauuguaaa

SEQ ID NO: 449356 - RNA, 19 nt, Artificial Sequence
  Description of Artificial Sequence: Synthetic oligonucleotide
  Antisense Strand to SEQ ID NO: 449355
uuuacaauaaccuuucaga

SEQ ID NO: 449357 - RNA, 19 nt, Artificial Sequence
  Description of Artificial Sequence: Synthetic oligonucleotide
  Sense strand starting at position 676 of SEQ ID NO: 316905
aggaaacaucccuguucuc

SEQ ID NO: 449358 - RNA, 19 nt, Artificial Sequence
  Description of Artificial Sequence: Synthetic oligonucleotide
  Antisense Strand to SEQ ID NO: 449357
gagaacagggauguuuccu

SEQ ID NO: 449359 - RNA, 19 nt, Artificial Sequence
  Description of Artificial Sequence: Synthetic oligonucleotide
  Sense strand starting at position 688 of SEQ ID NO: 316905
uguucucuuguagauaucu

SEQ ID NO: 449360 - RNA, 19 nt, Artificial Sequence
  Description of Artificial Sequence: Synthetic oligonucleotide
  Antisense Strand to SEQ ID NO: 449359
agauaucuacaagagaaca

SEQ ID NO: 449361 - RNA, 19 nt, Artificial Sequence
  Description of Artificial Sequence: Synthetic oligonucleotide
  Sense strand starting at position 875 of SEQ ID NO: 316905
agugucuucguagagaaga

SEQ ID NO: 449362 - RNA, 19 nt, Artificial Sequence
  Description of Artificial Sequence: Synthetic oligonucleotide
  Antisense Strand to SEQ ID NO: 449361
ucuucucuacgaagacacu

SEQ ID NO: 449363 - RNA, 19 nt, Artificial Sequence
  Description of Artificial Sequence: Synthetic oligonucleotide
  Sense strand starting at position 895 of SEQ ID NO: 316905
ggugaauauccugggaaug

SEQ ID NO: 449364 - RNA, 19 nt, Artificial Sequence
  Description of Artificial Sequence: Synthetic oligonucleotide
  Antisense Strand to SEQ ID NO: 449363
cauucccaggauauucacc

SEQ ID NO: 449365 - RNA, 19 nt, Artificial Sequence
  Description of Artificial Sequence: Synthetic oligonucleotide
  Sense strand starting at position 923 of SEQ ID NO: 316905
uucugagaucucuagcaca

SEQ ID NO: 449366 - RNA, 19 nt, Artificial Sequence
  Description of Artificial Sequence: Synthetic oligonucleotide
  Antisense Strand to SEQ ID NO: 449365
ugugcuagagaucucagaa

SEQ ID NO: 449367 - RNA, 19 nt, Artificial Sequence
  Description of Artificial Sequence: Synthetic oligonucleotide
  Sense strand starting at position 1047 of SEQ ID NO: 316905
guuggugcucugucaugua

SEQ ID NO: 449368 - RNA, 19 nt, Artificial Sequence
  Description of Artificial Sequence: Synthetic oligonucleotide
  Antisense Strand to SEQ ID NO: 449367
uacaugacagagcaccaac

SEQ ID NO: 449369 - RNA, 19 nt, Artificial Sequence
  Description of Artificial Sequence: Synthetic oligonucleotide
  Sense strand starting at position 1059 of SEQ ID NO: 316905
ucauguacccagggagagu

SEQ ID NO: 449370 - RNA, 19 nt, Artificial Sequence
  Description of Artificial Sequence: Synthetic oligonucleotide
  Antisense Strand to SEQ ID NO: 449369
acucucccuggguacauga

SEQ ID NO: 449371 - RNA, 19 nt, Artificial Sequence
  Description of Artificial Sequence: Synthetic oligonucleotide
  Sense strand starting at position 1184 of SEQ ID NO: 316905
acgggucguuacaagaaga

SEQ ID NO: 449372 - RNA, 19 nt, Artificial Sequence
  Description of Artificial Sequence: Synthetic oligonucleotide
  Antisense Strand to SEQ ID NO: 449371
ucuucuuguaacgacccgu

SEQ ID NO: 449373 - RNA, 19 nt, Artificial Sequence
  Description of Artificial Sequence: Synthetic oligonucleotide
  Sense strand starting at position 1252 of SEQ ID NO: 316905
gugggaauaagcugugaug

SEQ ID NO: 449374 - RNA, 19 nt, Artificial Sequence
  Description of Artificial Sequence: Synthetic oligonucleotide
  Antisense Strand to SEQ ID NO: 449373
caucacagcuuauucccac

SEQ ID NO: 449375 - RNA, 19 nt, Artificial Sequence
  Description of Artificial Sequence: Synthetic oligonucleotide
  Sense strand starting at position 1261 of SEQ ID NO: 316905
agcugugauggcugaugga

SEQ ID NO: 449376 - RNA, 19 nt, Artificial Sequence
  Description of Artificial Sequence: Synthetic oligonucleotide
  Antisense Strand to SEQ ID NO: 449375
uccaucagccaucacagcu

SEQ ID NO: 449377 - RNA, 19 nt, Artificial Sequence
  Description of Artificial Sequence: Synthetic oligonucleotide
  Sense strand starting at position 1401 of SEQ ID NO: 316905
augagcaguuauucgauga

SEQ ID NO: 449378 - RNA, 19 nt, Artificial Sequence
  Description of Artificial Sequence: Synthetic oligonucleotide
  Antisense Strand to SEQ ID NO: 449377
ucaucgaauaacugcucau

SEQ ID NO: 449379 - RNA, 19 nt, Artificial Sequence
  Description of Artificial Sequence: Synthetic oligonucleotide
  Sense strand starting at position 1402 of SEQ ID NO: 316905
ugagcaguuauucgaugag

SEQ ID NO: 449380 - RNA, 19 nt, Artificial Sequence
  Description of Artificial Sequence: Synthetic oligonucleotide
  Antisense Strand to SEQ ID NO: 449379
cucaucgaauaacugcuca

SEQ ID NO: 449381 - RNA, 19 nt, Artificial Sequence
  Description of Artificial Sequence: Synthetic oligonucleotide
  Sense strand starting at position 1406 of SEQ ID NO: 316905
caguuauucgaugagugaa

SEQ ID NO: 449382 - RNA, 19 nt, Artificial Sequence
  Description of Artificial Sequence: Synthetic oligonucleotide
  Antisense Strand to SEQ ID NO: 449381
uucacucaucgaauaacug

SEQ ID NO: 449383 - RNA, 19 nt, Artificial Sequence
  Description of Artificial Sequence: Synthetic oligonucleotide
  Sense strand starting at position 1408 of SEQ ID NO: 316905
guuauucgaugagugaaau

SEQ ID NO: 449384 - RNA, 19 nt, Artificial Sequence
  Description of Artificial Sequence: Synthetic oligonucleotide
  Antisense Strand to SEQ ID NO: 449383
auuucacucaucgaauaac

SEQ ID NO: 449385 - RNA, 19 nt, Artificial Sequence
  Description of Artificial Sequence: Synthetic oligonucleotide
  Sense strand starting at position 1409 of SEQ ID NO: 316905
uuauucgaugagugaaaua

SEQ ID NO: 449386 - RNA, 19 nt, Artificial Sequence
  Description of Artificial Sequence: Synthetic oligonucleotide
  Antisense Strand to SEQ ID NO: 449385
uauuucacucaucgaauaa

SEQ ID NO: 449387 - RNA, 19 nt, Artificial Sequence
  Description of Artificial Sequence: Synthetic oligonucleotide
  Sense strand starting at position 1556 of SEQ ID NO: 316905
ugcugaaucagcgcgauca

SEQ ID NO: 449388 - RNA, 19 nt, Artificial Sequence
  Description of Artificial Sequence: Synthetic oligonucleotide
  Antisense Strand to SEQ ID NO: 449387
ugaucgcgcugauucagca

SEQ ID NO: 449389 - RNA, 19 nt, Artificial Sequence
  Description of Artificial Sequence: Synthetic oligonucleotide
  Sense strand starting at position 1558 of SEQ ID NO: 316905
cugaaucagcgcgaucaga

SEQ ID NO: 449390 - RNA, 19 nt, Artificial Sequence
  Description of Artificial Sequence: Synthetic oligonucleotide
  Antisense Strand to SEQ ID NO: 449389
ucugaucgcgcugauucag

SEQ ID NO: 449391 - RNA, 19 nt, Artificial Sequence
  Description of Artificial Sequence: Synthetic oligonucleotide
  Sense strand starting at position 2100 of SEQ ID NO: 316905
ugcgauggucuggaaacau

SEQ ID NO: 449392 - RNA, 19 nt, Artificial Sequence
  Description of Artificial Sequence: Synthetic oligonucleotide
  Antisense Strand to SEQ ID NO: 449391
auguuuccagaccaucgca

SEQ ID NO: 449393 - RNA, 19 nt, Artificial Sequence
  Description of Artificial Sequence: Synthetic oligonucleotide
  Sense strand starting at position 2318 of SEQ ID NO: 316905
ccuaauacgguguagucau

SEQ ID NO: 449394 - RNA, 19 nt, Artificial Sequence
  Description of Artificial Sequence: Synthetic oligonucleotide
  Antisense Strand to SEQ ID NO: 449393
augacuacaccguauuagg

SEQ ID NO: 449395 - RNA, 19 nt, Artificial Sequence
  Description of Artificial Sequence: Synthetic oligonucleotide
  Sense strand starting at position 2407 of SEQ ID NO: 316905
ucucuaaacgcguccaguu

SEQ ID NO: 449396 - RNA, 19 nt, Artificial Sequence
  Description of Artificial Sequence: Synthetic oligonucleotide
  Antisense Strand to SEQ ID NO: 449395
aacuggacgcguuuagaga

SEQ ID NO: 449397 - RNA, 19 nt, Artificial Sequence
  Description of Artificial Sequence: Synthetic oligonucleotide
  Sense strand starting at position 2408 of SEQ ID NO: 316905
cucuaaacgcguccaguuu

SEQ ID NO: 449398 - RNA, 19 nt, Artificial Sequence
  Description of Artificial Sequence: Synthetic oligonucleotide
  Antisense Strand to SEQ ID NO: 449397
aaacuggacgcguuuagag

SEQ ID NO: 449399 - RNA, 19 nt, Artificial Sequence
  Description of Artificial Sequence: Synthetic oligonucleotide
  Sense strand starting at position 2526 of SEQ ID NO: 316905
cuaucuaccuauguguaua

SEQ ID NO: 449400 - RNA, 19 nt, Artificial Sequence
  Description of Artificial Sequence: Synthetic oligonucleotide
  Antisense Strand to SEQ ID NO: 449399
uauacacauagguagauag

SEQ ID NO: 449401 - RNA, 19 nt, Artificial Sequence
  Description of Artificial Sequence: Synthetic oligonucleotide
  Sense strand starting at position 2692 of SEQ ID NO: 316905
gccuuugaugccuaaugaa

SEQ ID NO: 449402 - RNA, 19 nt, Artificial Sequence
  Description of Artificial Sequence: Synthetic oligonucleotide
  Antisense Strand to SEQ ID NO: 449401
uucauuaggcaucaaaggc

SEQ ID NO: 449403 - RNA, 19 nt, Artificial Sequence
  Description of Artificial Sequence: Synthetic oligonucleotide
  Sense strand starting at position 2744 of SEQ ID NO: 316905
caaauugagugagaagaaa

SEQ ID NO: 449404 - RNA, 19 nt, Artificial Sequence
  Description of Artificial Sequence: Synthetic oligonucleotide
  Antisense Strand to SEQ ID NO: 449403
uuucuucucacucaauuug

SEQ ID NO: 449405 - RNA, 19 nt, Artificial Sequence
  Description of Artificial Sequence: Synthetic oligonucleotide
  Sense strand starting at position 3001 of SEQ ID NO: 316905
gccugugucccggcgaaua

SEQ ID NO: 449406 - RNA, 19 nt, Artificial Sequence
  Description of Artificial Sequence: Synthetic oligonucleotide
  Antisense Strand to SEQ ID NO: 449405
uauucgccgggacacaggc

SEQ ID NO: 449407 - RNA, 19 nt, Artificial Sequence
  Description of Artificial Sequence: Synthetic oligonucleotide
  Sense strand starting at position 3074 of SEQ ID NO: 316905
gcgaguaacuuacuuaaca

SEQ ID NO: 449408 - RNA, 19 nt, Artificial Sequence
  Description of Artificial Sequence: Synthetic oligonucleotide
  Antisense Strand to SEQ ID NO: 449407
uguuaaguaaguuacucgc

SEQ ID NO: 449409 - RNA, 19 nt, Artificial Sequence
  Description of Artificial Sequence: Synthetic oligonucleotide
  Sense strand starting at position 3075 of SEQ ID NO: 316905
cgaguaacuuacuuaacau

SEQ ID NO: 449410 - RNA, 19 nt, Artificial Sequence
  Description of Artificial Sequence: Synthetic oligonucleotide
  Antisense Strand to SEQ ID NO: 449409
auguuaaguaaguuacucg

SEQ ID NO: 449411 - RNA, 19 nt, Artificial Sequence
  Description of Artificial Sequence: Synthetic oligonucleotide
  Sense strand starting at position 3964 of SEQ ID NO: 316905
aggguugaaauguggaaau

SEQ ID NO: 449412 - RNA, 19 nt, Artificial Sequence
  Description of Artificial Sequence: Synthetic oligonucleotide
  Antisense Strand to SEQ ID NO: 449411
auuuccacauuucaacccu

SEQ ID NO: 449413 - RNA, 19 nt, Artificial Sequence
  Description of Artificial Sequence: Synthetic oligonucleotide
  Sense strand starting at position 423 of SEQ ID NO: 316906
ugcgauggucuggaaacau

SEQ ID NO: 449414 - RNA, 19 nt, Artificial Sequence
  Description of Artificial Sequence: Synthetic oligonucleotide
  Antisense Strand to SEQ ID NO: 449413
auguuuccagaccaucgca

SEQ ID NO: 449415 - RNA, 19 nt, Artificial Sequence
  Description of Artificial Sequence: Synthetic oligonucleotide
  Sense strand starting at position 730 of SEQ ID NO: 316906
ucucuaaacgcguccaguu

SEQ ID NO: 449416 - RNA, 19 nt, Artificial Sequence
  Description of Artificial Sequence: Synthetic oligonucleotide
  Antisense Strand to SEQ ID NO: 449415
aacuggacgcguuuagaga

SEQ ID NO: 449417 - RNA, 19 nt, Artificial Sequence
  Description of Artificial Sequence: Synthetic oligonucleotide
  Sense strand starting at position 731 of SEQ ID NO: 316906
cucuaaacgcguccaguuu

SEQ ID NO: 449418 - RNA, 19 nt, Artificial Sequence
  Description of Artificial Sequence: Synthetic oligonucleotide
  Antisense Strand to SEQ ID NO: 449417
aaacuggacgcguuuagag

SEQ ID NO: 449419 - RNA, 19 nt, Artificial Sequence
  Description of Artificial Sequence: Synthetic oligonucleotide
  Sense strand starting at position 1015 of SEQ ID NO: 316906
gccuuugaugccuaaugaa

SEQ ID NO: 449420 - RNA, 19 nt, Artificial Sequence
  Description of Artificial Sequence: Synthetic oligonucleotide
  Antisense Strand to SEQ ID NO: 449419
uucauuaggcaucaaaggc

SEQ ID NO: 449421 - RNA, 19 nt, Artificial Sequence
  Description of Artificial Sequence: Synthetic oligonucleotide
  Sense strand starting at position 1067 of SEQ ID NO: 316906
caaauugagugagaagaaa

SEQ ID NO: 449422 - RNA, 19 nt, Artificial Sequence
  Description of Artificial Sequence: Synthetic oligonucleotide
  Antisense Strand to SEQ ID NO: 449421
uuucuucucacucaauuug

SEQ ID NO: 449423 - RNA, 19 nt, Artificial Sequence
  Description of Artificial Sequence: Synthetic oligonucleotide
  Sense strand starting at position 1324 of SEQ ID NO: 316906
gccugugucccggcgaaua

SEQ ID NO: 449424 - RNA, 19 nt, Artificial Sequence
  Description of Artificial Sequence: Synthetic oligonucleotide
  Antisense Strand to SEQ ID NO: 449423
uauucgccgggacacaggc

SEQ ID NO: 449425 - RNA, 19 nt, Artificial Sequence
  Description of Artificial Sequence: Synthetic oligonucleotide
  Sense strand starting at position 1398 of SEQ ID NO: 316906
cgaguaacuuacuuaacau

SEQ ID NO: 449426 - RNA, 19 nt, Artificial Sequence
  Description of Artificial Sequence: Synthetic oligonucleotide
  Antisense Strand to SEQ ID NO: 449425
auguuaaguaaguuacucg

SEQ ID NO: 449427 - RNA, 19 nt, Artificial Sequence
  Description of Artificial Sequence: Synthetic oligonucleotide
  Sense strand starting at position 2287 of SEQ ID NO: 316906
aggguugaaauguggaaau

SEQ ID NO: 449428 - RNA, 19 nt, Artificial Sequence
  Description of Artificial Sequence: Synthetic oligonucleotide
  Antisense Strand to SEQ ID NO: 449427
auuuccacauuucaacccu

SEQ ID NO: 449429 - RNA, 19 nt, Artificial Sequence
  Description of Artificial Sequence: Synthetic oligonucleotide
  Sense strand starting at position 2334 of SEQ ID NO: 316906
cacacuugugacugggcaa

SEQ ID NO: 449430 - RNA, 19 nt, Artificial Sequence
  Description of Artificial Sequence: Synthetic oligonucleotide
  Antisense Strand to SEQ ID NO: 449429
uugcccagucacaagugug

SEQ ID NO: 449431 - RNA, 19 nt, Artificial Sequence
  Description of Artificial Sequence: Synthetic oligonucleotide
  Sense strand starting at position 2479 of SEQ ID NO: 316906
acgucuuucggcguuggaa

SEQ ID NO: 449432 - RNA, 19 nt, Artificial Sequence
  Description of Artificial Sequence: Synthetic oligonucleotide
  Antisense Strand to SEQ ID NO: 449431
uuccaacgccgaaagacgu

SEQ ID NO: 449433 - RNA, 19 nt, Artificial Sequence
  Description of Artificial Sequence: Synthetic oligonucleotide
  Sense strand starting at position 2480 of SEQ ID NO: 316906
cgucuuucggcguuggaaa

SEQ ID NO: 449434 - RNA, 19 nt, Artificial Sequence
  Description of Artificial Sequence: Synthetic oligonucleotide
  Antisense Strand to SEQ ID NO: 449433
uuuccaacgccgaaagacg

SEQ ID NO: 449435 - RNA, 19 nt, Artificial Sequence
  Description of Artificial Sequence: Synthetic oligonucleotide
  Sense strand starting at position 2570 of SEQ ID NO: 316906
gcuguuauuagcgauuuau

SEQ ID NO: 449436 - RNA, 19 nt, Artificial Sequence
  Description of Artificial Sequence: Synthetic oligonucleotide
  Antisense Strand to SEQ ID NO: 449435
auaaaucgcuaauaacagc

SEQ ID NO: 449437 - RNA, 19 nt, Artificial Sequence
  Description of Artificial Sequence: Synthetic oligonucleotide
  Sense strand starting at position 2593 of SEQ ID NO: 316906
gagcuaaggaauggguuua

SEQ ID NO: 449438 - RNA, 19 nt, Artificial Sequence
  Description of Artificial Sequence: Synthetic oligonucleotide
  Antisense Strand to SEQ ID NO: 449437
uaaacccauuccuuagcuc

SEQ ID NO: 449439 - RNA, 19 nt, Artificial Sequence
  Description of Artificial Sequence: Synthetic oligonucleotide
  Sense strand starting at position 2917 of SEQ ID NO: 316906
gaccgaccucagugaauga

SEQ ID NO: 449440 - RNA, 19 nt, Artificial Sequence
  Description of Artificial Sequence: Synthetic oligonucleotide
  Antisense Strand to SEQ ID NO: 449439
ucauucacugaggucgguc

SEQ ID NO: 449441 - RNA, 19 nt, Artificial Sequence
  Description of Artificial Sequence: Synthetic oligonucleotide
  Sense strand starting at position 2918 of SEQ ID NO: 316906
accgaccucagugaaugau

SEQ ID NO: 449442 - RNA, 19 nt, Artificial Sequence
  Description of Artificial Sequence: Synthetic oligonucleotide
  Antisense Strand to SEQ ID NO: 449441
aucauucacugaggucggu

SEQ ID NO: 449443 - RNA, 19 nt, Artificial Sequence
  Description of Artificial Sequence: Synthetic oligonucleotide
  Sense strand starting at position 2921 of SEQ ID NO: 316906
gaccucagugaaugauuaa

SEQ ID NO: 449444 - RNA, 19 nt, Artificial Sequence
  Description of Artificial Sequence: Synthetic oligonucleotide
  Antisense Strand to SEQ ID NO: 449443
uuaaucauucacugagguc

SEQ ID NO: 449445 - RNA, 19 nt, Artificial Sequence
  Description of Artificial Sequence: Synthetic oligonucleotide
  Sense strand starting at position 2924 of SEQ ID NO: 316906
cucagugaaugauuaauga

SEQ ID NO: 449446 - RNA, 19 nt, Artificial Sequence
  Description of Artificial Sequence: Synthetic oligonucleotide
  Antisense Strand to SEQ ID NO: 449445
ucauuaaucauucacugag

SEQ ID NO: 449447 - RNA, 19 nt, Artificial Sequence
  Description of Artificial Sequence: Synthetic oligonucleotide
  Sense strand starting at position 3036 of SEQ ID NO: 316906
uuauuuaucugggaaauac

SEQ ID NO: 449448 - RNA, 19 nt, Artificial Sequence
  Description of Artificial Sequence: Synthetic oligonucleotide
  Antisense Strand to SEQ ID NO: 449447
guauuucccagauaaauaa

SEQ ID NO: 449449 - RNA, 19 nt, Artificial Sequence
  Description of Artificial Sequence: Synthetic oligonucleotide
  Sense strand starting at position 3071 of SEQ ID NO: 316906
uggaauguuucugucuaaa

SEQ ID NO: 449450 - RNA, 19 nt, Artificial Sequence
  Description of Artificial Sequence: Synthetic oligonucleotide
  Antisense Strand to SEQ ID NO: 449449
uuuagacagaaacauucca

SEQ ID NO: 449451 - RNA, 19 nt, Artificial Sequence
  Description of Artificial Sequence: Synthetic oligonucleotide
  Sense strand starting at position 3156 of SEQ ID NO: 316906
gugcuauugacugauaagg

SEQ ID NO: 449452 - RNA, 19 nt, Artificial Sequence
  Description of Artificial Sequence: Synthetic oligonucleotide
  Antisense Strand to SEQ ID NO: 449451
ccuuaucagucaauagcac

SEQ ID NO: 449453 - RNA, 19 nt, Artificial Sequence
  Description of Artificial Sequence: Synthetic oligonucleotide
  Sense strand starting at position 3210 of SEQ ID NO: 316906
ggccuuacccauuauugag

SEQ ID NO: 449454 - RNA, 19 nt, Artificial Sequence
  Description of Artificial Sequence: Synthetic oligonucleotide
  Antisense Strand to SEQ ID NO: 449453
cucaauaauggguaaggcc

SEQ ID NO: 449455 - RNA, 19 nt, Artificial Sequence
  Description of Artificial Sequence: Synthetic oligonucleotide
  Sense strand starting at position 3216 of SEQ ID NO: 316906
acccauuauugaguaccua

SEQ ID NO: 449456 - RNA, 19 nt, Artificial Sequence
  Description of Artificial Sequence: Synthetic oligonucleotide
  Antisense Strand to SEQ ID NO: 449455
uagguacucaauaaugggu

SEQ ID NO: 449457 - RNA, 19 nt, Artificial Sequence
  Description of Artificial Sequence: Synthetic oligonucleotide
  Sense strand starting at position 3220 of SEQ ID NO: 316906
auuauugaguaccuacuua

SEQ ID NO: 449458 - RNA, 19 nt, Artificial Sequence
  Description of Artificial Sequence: Synthetic oligonucleotide
  Antisense Strand to SEQ ID NO: 449457
uaaguagguacucaauaau

SEQ ID NO: 449459 - RNA, 19 nt, Artificial Sequence
  Description of Artificial Sequence: Synthetic oligonucleotide
  Sense strand starting at position 3224 of SEQ ID NO: 316906
uugaguaccuacuuaaggu

SEQ ID NO: 449460 - RNA, 19 nt, Artificial Sequence
  Description of Artificial Sequence: Synthetic oligonucleotide
  Antisense Strand to SEQ ID NO: 449459
accuuaaguagguacucaa

SEQ ID NO: 449461 - RNA, 19 nt, Artificial Sequence
  Description of Artificial Sequence: Synthetic oligonucleotide
  Sense strand starting at position 3295 of SEQ ID NO: 316906
ggaaucuuccaccgccaga

SEQ ID NO: 449462 - RNA, 19 nt, Artificial Sequence
  Description of Artificial Sequence: Synthetic oligonucleotide
  Antisense Strand to SEQ ID NO: 449461
ucuggcgguggaagauucc

SEQ ID NO: 449463 - RNA, 19 nt, Artificial Sequence
  Description of Artificial Sequence: Synthetic oligonucleotide
  Sense strand starting at position 3317 of SEQ ID NO: 316906
acaucaaaguacuuguaaa

SEQ ID NO: 449464 - RNA, 19 nt, Artificial Sequence
  Description of Artificial Sequence: Synthetic oligonucleotide
  Antisense Strand to SEQ ID NO: 449463
uuuacaaguacuuugaugu

SEQ ID NO: 449465 - RNA, 19 nt, Artificial Sequence
  Description of Artificial Sequence: Synthetic oligonucleotide
  Sense strand starting at position 3395 of SEQ ID NO: 316906
cauagaugugcauaacaug

SEQ ID NO: 449466 - RNA, 19 nt, Artificial Sequence
  Description of Artificial Sequence: Synthetic oligonucleotide
  Antisense Strand to SEQ ID NO: 449465
cauguuaugcacaucuaug

SEQ ID NO: 449467 - RNA, 19 nt, Artificial Sequence
  Description of Artificial Sequence: Synthetic oligonucleotide
  Sense strand starting at position 3413 of SEQ ID NO: 316906
gggcacacuacaugagaua

SEQ ID NO: 449468 - RNA, 19 nt, Artificial Sequence
  Description of Artificial Sequence: Synthetic oligonucleotide
  Antisense Strand to SEQ ID NO: 449467
uaucucauguagugugccc

SEQ ID NO: 449469 - RNA, 19 nt, Artificial Sequence
  Description of Artificial Sequence: Synthetic oligonucleotide
  Sense strand starting at position 3425 of SEQ ID NO: 316906
ugagauacuguccagagcu

SEQ ID NO: 449470 - RNA, 19 nt, Artificial Sequence
  Description of Artificial Sequence: Synthetic oligonucleotide
  Antisense Strand to SEQ ID NO: 449469
agcucuggacaguaucuca

SEQ ID NO: 449471 - RNA, 19 nt, Artificial Sequence
  Description of Artificial Sequence: Synthetic oligonucleotide
  Sense strand starting at position 3427 of SEQ ID NO: 316906
agauacuguccagagcuga

SEQ ID NO: 449472 - RNA, 19 nt, Artificial Sequence
  Description of Artificial Sequence: Synthetic oligonucleotide
  Antisense Strand to SEQ ID NO: 449471
ucagcucuggacaguaucu

SEQ ID NO: 449473 - RNA, 19 nt, Artificial Sequence
  Description of Artificial Sequence: Synthetic oligonucleotide
  Sense strand starting at position 3462 of SEQ ID NO: 316906
cuguucuaggcucaaguua

SEQ ID NO: 449474 - RNA, 19 nt, Artificial Sequence
  Description of Artificial Sequence: Synthetic oligonucleotide
  Antisense Strand to SEQ ID NO: 449473
uaacuugagccuagaacag

SEQ ID NO: 449475 - RNA, 19 nt, Artificial Sequence
  Description of Artificial Sequence: Synthetic oligonucleotide
  Sense strand starting at position 3553 of SEQ ID NO: 316906
gucacaguaucucucagaa

SEQ ID NO: 449476 - RNA, 19 nt, Artificial Sequence
  Description of Artificial Sequence: Synthetic oligonucleotide
  Antisense Strand to SEQ ID NO: 449475
uucugagagauacugugac

SEQ ID NO: 449477 - RNA, 19 nt, Artificial Sequence
  Description of Artificial Sequence: Synthetic oligonucleotide
  Sense strand starting at position 3563 of SEQ ID NO: 316906
cucucagaauggucuacuu

SEQ ID NO: 449478 - RNA, 19 nt, Artificial Sequence
  Description of Artificial Sequence: Synthetic oligonucleotide
  Antisense Strand to SEQ ID NO: 449477
aaguagaccauucugagag

SEQ ID NO: 449479 - RNA, 19 nt, Artificial Sequence
  Description of Artificial Sequence: Synthetic oligonucleotide
  Sense strand starting at position 3572 of SEQ ID NO: 316906
uggucuacuugacugaaau

SEQ ID NO: 449480 - RNA, 19 nt, Artificial Sequence
  Description of Artificial Sequence: Synthetic oligonucleotide
  Antisense Strand to SEQ ID NO: 449479
auuucagucaaguagacca

SEQ ID NO: 449481 - RNA, 19 nt, Artificial Sequence
  Description of Artificial Sequence: Synthetic oligonucleotide
  Sense strand starting at position 3573 of SEQ ID NO: 316906
ggucuacuugacugaaauc

SEQ ID NO: 449482 - RNA, 19 nt, Artificial Sequence
  Description of Artificial Sequence: Synthetic oligonucleotide
  Antisense Strand to SEQ ID NO: 449481
gauuucagucaaguagacc

SEQ ID NO: 449483 - RNA, 19 nt, Artificial Sequence
  Description of Artificial Sequence: Synthetic oligonucleotide
  Sense strand starting at position 3612 of SEQ ID NO: 316906
auuguaggaugguucugaa

SEQ ID NO: 449484 - RNA, 19 nt, Artificial Sequence
  Description of Artificial Sequence: Synthetic oligonucleotide
  Antisense Strand to SEQ ID NO: 449483
uucagaaccauccuacaau

SEQ ID NO: 449485 - RNA, 19 nt, Artificial Sequence
  Description of Artificial Sequence: Synthetic oligonucleotide
  Sense strand starting at position 3675 of SEQ ID NO: 316906
caaagcugucaggguuuaa

SEQ ID NO: 449486 - RNA, 19 nt, Artificial Sequence
  Description of Artificial Sequence: Synthetic oligonucleotide
  Antisense Strand to SEQ ID NO: 449485
uuaaacccugacagcuuug

SEQ ID NO: 449487 - RNA, 19 nt, Artificial Sequence
  Description of Artificial Sequence: Synthetic oligonucleotide
  Sense strand starting at position 3686 of SEQ ID NO: 316906
ggguuuaagccacauugau

SEQ ID NO: 449488 - RNA, 19 nt, Artificial Sequence
  Description of Artificial Sequence: Synthetic oligonucleotide
  Antisense Strand to SEQ ID NO: 449487
aucaauguggcuuaaaccc

SEQ ID NO: 449489 - RNA, 19 nt, Artificial Sequence
  Description of Artificial Sequence: Synthetic oligonucleotide
  Sense strand starting at position 3758 of SEQ ID NO: 316906
uccucaagugacgaagauu

SEQ ID NO: 449490 - RNA, 19 nt, Artificial Sequence
  Description of Artificial Sequence: Synthetic oligonucleotide
  Antisense Strand to SEQ ID NO: 449489
aaucuucgucacuugagga

SEQ ID NO: 449491 - RNA, 19 nt, Artificial Sequence
  Description of Artificial Sequence: Synthetic oligonucleotide
  Sense strand starting at position 3766 of SEQ ID NO: 316906
ugacgaagauucuccaaag

SEQ ID NO: 449492 - RNA, 19 nt, Artificial Sequence
  Description of Artificial Sequence: Synthetic oligonucleotide
  Antisense Strand to SEQ ID NO: 449491
cuuuggagaaucuucguca

SEQ ID NO: 449493 - RNA, 19 nt, Artificial Sequence
  Description of Artificial Sequence: Synthetic oligonucleotide
  Sense strand starting at position 275 of SEQ ID NO: 316907
gagaaagccucagauuuga

SEQ ID NO: 449494 - RNA, 19 nt, Artificial Sequence
  Description of Artificial Sequence: Synthetic oligonucleotide
  Antisense Strand to SEQ ID NO: 449493
ucaaaucugaggcuuucuc

SEQ ID NO: 449495 - RNA, 19 nt, Artificial Sequence
  Description of Artificial Sequence: Synthetic oligonucleotide
  Sense strand starting at position 323 of SEQ ID NO: 316907
uuuaaauagcauugaucag

SEQ ID NO: 449496 - RNA, 19 nt, Artificial Sequence
  Description of Artificial Sequence: Synthetic oligonucleotide
  Antisense Strand to SEQ ID NO: 449495
cugaucaaugcuauuuaaa

SEQ ID NO: 449497 - RNA, 19 nt, Artificial Sequence
  Description of Artificial Sequence: Synthetic oligonucleotide
  Sense strand starting at position 330 of SEQ ID NO: 316907
agcauugaucagggaaucu

SEQ ID NO: 449498 - RNA, 19 nt, Artificial Sequence
  Description of Artificial Sequence: Synthetic oligonucleotide
  Antisense Strand to SEQ ID NO: 449497
agauucccugaucaaugcu

SEQ ID NO: 449499 - RNA, 19 nt, Artificial Sequence
  Description of Artificial Sequence: Synthetic oligonucleotide
  Sense strand starting at position 339 of SEQ ID NO: 316907
cagggaaucuaucccguca

SEQ ID NO: 449500 - RNA, 19 nt, Artificial Sequence
  Description of Artificial Sequence: Synthetic oligonucleotide
  Antisense Strand to SEQ ID NO: 449499
ugacgggauagauucccug

SEQ ID NO: 449501 - RNA, 19 nt, Artificial Sequence
  Description of Artificial Sequence: Synthetic oligonucleotide
  Sense strand starting at position 517 of SEQ ID NO: 316907
gauguugacccagaguuga

SEQ ID NO: 449502 - RNA, 19 nt, Artificial Sequence
  Description of Artificial Sequence: Synthetic oligonucleotide
  Antisense Strand to SEQ ID NO: 449501
ucaacucugggucaacauc

SEQ ID NO: 449503 - RNA, 19 nt, Artificial Sequence
  Description of Artificial Sequence: Synthetic oligonucleotide
  Sense strand starting at position 635 of SEQ ID NO: 316907
gucugauuugccugggcaa

SEQ ID NO: 449504 - RNA, 19 nt, Artificial Sequence
  Description of Artificial Sequence: Synthetic oligonucleotide
  Antisense Strand to SEQ ID NO: 449503
uugcccaggcaaaucagac

SEQ ID NO: 449505 - RNA, 19 nt, Artificial Sequence
  Description of Artificial Sequence: Synthetic oligonucleotide
  Sense strand starting at position 638 of SEQ ID NO: 316907
ugauuugccugggcaaagu

SEQ ID NO: 449506 - RNA, 19 nt, Artificial Sequence
  Description of Artificial Sequence: Synthetic oligonucleotide
  Antisense Strand to SEQ ID NO: 449505
acuuugcccaggcaaauca

SEQ ID NO: 449507 - RNA, 19 nt, Artificial Sequence
  Description of Artificial Sequence: Synthetic oligonucleotide
  Sense strand starting at position 773 of SEQ ID NO: 316907
caugaaucugaucaugugu

SEQ ID NO: 449508 - RNA, 19 nt, Artificial Sequence
  Description of Artificial Sequence: Synthetic oligonucleotide
  Antisense Strand to SEQ ID NO: 449507
acacaugaucagauucaug

SEQ ID NO: 449509 - RNA, 19 nt, Artificial Sequence
  Description of Artificial Sequence: Synthetic oligonucleotide
  Sense strand starting at position 778 of SEQ ID NO: 316907
aucugaucauguguacaau

SEQ ID NO: 449510 - RNA, 19 nt, Artificial Sequence
  Description of Artificial Sequence: Synthetic oligonucleotide
  Antisense Strand to SEQ ID NO: 449509
auuguacacaugaucagau

SEQ ID NO: 449511 - RNA, 19 nt, Artificial Sequence
  Description of Artificial Sequence: Synthetic oligonucleotide
  Sense strand starting at position 779 of SEQ ID NO: 316907
ucugaucauguguacaaua

SEQ ID NO: 449512 - RNA, 19 nt, Artificial Sequence
  Description of Artificial Sequence: Synthetic oligonucleotide
  Antisense Strand to SEQ ID NO: 449511
uauuguacacaugaucaga

SEQ ID NO: 449513 - RNA, 19 nt, Artificial Sequence
  Description of Artificial Sequence: Synthetic oligonucleotide
  Sense strand starting at position 822 of SEQ ID NO: 316907
agaagucaguuucuauaug

SEQ ID NO: 449514 - RNA, 19 nt, Artificial Sequence
  Description of Artificial Sequence: Synthetic oligonucleotide
  Antisense Strand to SEQ ID NO: 449513
cauauagaaacugacuucu

SEQ ID NO: 449515 - RNA, 19 nt, Artificial Sequence
  Description of Artificial Sequence: Synthetic oligonucleotide
  Sense strand starting at position 875 of SEQ ID NO: 316907
ugauucccaccuugugaaa

SEQ ID NO: 449516 - RNA, 19 nt, Artificial Sequence
  Description of Artificial Sequence: Synthetic oligonucleotide
  Antisense Strand to SEQ ID NO: 449515
uuucacaaggugggaauca

SEQ ID NO: 449517 - RNA, 19 nt, Artificial Sequence
  Description of Artificial Sequence: Synthetic oligonucleotide
  Sense strand starting at position 959 of SEQ ID NO: 316907
ggcucagacagguaaguaa

SEQ ID NO: 449518 - RNA, 19 nt, Artificial Sequence
  Description of Artificial Sequence: Synthetic oligonucleotide
  Antisense Strand to SEQ ID NO: 449517
uuacuuaccugucugagcc

SEQ ID NO: 449519 - RNA, 19 nt, Artificial Sequence
  Description of Artificial Sequence: Synthetic oligonucleotide
  Sense strand starting at position 962 of SEQ ID NO: 316907
ucagacagguaaguaaauu

SEQ ID NO: 449520 - RNA, 19 nt, Artificial Sequence
  Description of Artificial Sequence: Synthetic oligonucleotide
  Antisense Strand to SEQ ID NO: 449519
aauuuacuuaccugucuga

SEQ ID NO: 449521 - RNA, 19 nt, Artificial Sequence
  Description of Artificial Sequence: Synthetic oligonucleotide
  Sense strand starting at position 971 of SEQ ID NO: 316907
uaaguaaauugcucaggau

SEQ ID NO: 449522 - RNA, 19 nt, Artificial Sequence
  Description of Artificial Sequence: Synthetic oligonucleotide
  Antisense Strand to SEQ ID NO: 449521
auccugagcaauuuacuua

SEQ ID NO: 449523 - RNA, 19 nt, Artificial Sequence
  Description of Artificial Sequence: Synthetic oligonucleotide
  Sense strand starting at position 972 of SEQ ID NO: 316907
aaguaaauugcucaggauc

SEQ ID NO: 449524 - RNA, 19 nt, Artificial Sequence
  Description of Artificial Sequence: Synthetic oligonucleotide
  Antisense Strand to SEQ ID NO: 449523
gauccugagcaauuuacuu

SEQ ID NO: 449525 - RNA, 19 nt, Artificial Sequence
  Description of Artificial Sequence: Synthetic oligonucleotide
  Sense strand starting at position 1181 of SEQ ID NO: 316907
uguauuauuugugcuccau

SEQ ID NO: 449526 - RNA, 19 nt, Artificial Sequence
  Description of Artificial Sequence: Synthetic oligonucleotide
  Antisense Strand to SEQ ID NO: 449525
auggagcacaaauaauaca

SEQ ID NO: 449527 - RNA, 19 nt, Artificial Sequence
  Description of Artificial Sequence: Synthetic oligonucleotide
  Sense strand starting at position 1542 of SEQ ID NO: 316907
ccaggcagugcgagugaau

SEQ ID NO: 449528 - RNA, 19 nt, Artificial Sequence
  Description of Artificial Sequence: Synthetic oligonucleotide
  Antisense Strand to SEQ ID NO: 449527
auucacucgcacugccugg

SEQ ID NO: 449529 - RNA, 19 nt, Artificial Sequence
  Description of Artificial Sequence: Synthetic oligonucleotide
  Sense strand starting at position 1722 of SEQ ID NO: 316907
agggaaagugcuggaugua

SEQ ID NO: 449530 - RNA, 19 nt, Artificial Sequence
  Description of Artificial Sequence: Synthetic oligonucleotide
  Antisense Strand to SEQ ID NO: 449529
uacauccagcacuuucccu

SEQ ID NO: 449531 - RNA, 19 nt, Artificial Sequence
  Description of Artificial Sequence: Synthetic oligonucleotide
  Sense strand starting at position 1871 of SEQ ID NO: 316907
agcagugaugucuauggag

SEQ ID NO: 449532 - RNA, 19 nt, Artificial Sequence
  Description of Artificial Sequence: Synthetic oligonucleotide
  Antisense Strand to SEQ ID NO: 449531
cuccauagacaucacugcu

SEQ ID NO: 449533 - RNA, 19 nt, Artificial Sequence
  Description of Artificial Sequence: Synthetic oligonucleotide
  Sense strand starting at position 1873 of SEQ ID NO: 316907
cagugaugucuauggagga

SEQ ID NO: 449534 - RNA, 19 nt, Artificial Sequence
  Description of Artificial Sequence: Synthetic oligonucleotide
  Antisense Strand to SEQ ID NO: 449533
uccuccauagacaucacug

SEQ ID NO: 449535 - RNA, 19 nt, Artificial Sequence
  Description of Artificial Sequence: Synthetic oligonucleotide
  Sense strand starting at position 1877 of SEQ ID NO: 316907
gaugucuauggaggaguaa

SEQ ID NO: 449536 - RNA, 19 nt, Artificial Sequence
  Description of Artificial Sequence: Synthetic oligonucleotide
  Antisense Strand to SEQ ID NO: 449535
uuacuccuccauagacauc

SEQ ID NO: 449537 - RNA, 19 nt, Artificial Sequence
  Description of Artificial Sequence: Synthetic oligonucleotide
  Sense strand starting at position 2023 of SEQ ID NO: 316907
auugguucuggagauaugu

SEQ ID NO: 449538 - RNA, 19 nt, Artificial Sequence
  Description of Artificial Sequence: Synthetic oligonucleotide
  Antisense Strand to SEQ ID NO: 449537
acauaucuccagaaccaau

SEQ ID NO: 449539 - RNA, 19 nt, Artificial Sequence
  Description of Artificial Sequence: Synthetic oligonucleotide
  Sense strand starting at position 2025 of SEQ ID NO: 316907
ugguucuggagauauguaa

SEQ ID NO: 449540 - RNA, 19 nt, Artificial Sequence
  Description of Artificial Sequence: Synthetic oligonucleotide
  Antisense Strand to SEQ ID NO: 449539
uuacauaucuccagaacca

SEQ ID NO: 449541 - RNA, 19 nt, Artificial Sequence
  Description of Artificial Sequence: Synthetic oligonucleotide
  Sense strand starting at position 2149 of SEQ ID NO: 316907
aucuuuguugaauggguga

SEQ ID NO: 449542 - RNA, 19 nt, Artificial Sequence
  Description of Artificial Sequence: Synthetic oligonucleotide
  Antisense Strand to SEQ ID NO: 449541
ucacccauucaacaaagau

SEQ ID NO: 449543 - RNA, 19 nt, Artificial Sequence
  Description of Artificial Sequence: Synthetic oligonucleotide
  Sense strand starting at position 2229 of SEQ ID NO: 316907
agcagaggauacccuaauu

SEQ ID NO: 449544 - RNA, 19 nt, Artificial Sequence
  Description of Artificial Sequence: Synthetic oligonucleotide
  Antisense Strand to SEQ ID NO: 449543
aauuaggguauccucugcu

SEQ ID NO: 449545 - RNA, 19 nt, Artificial Sequence
  Description of Artificial Sequence: Synthetic oligonucleotide
  Sense strand starting at position 2700 of SEQ ID NO: 316907
agauguggcccucauuaua

SEQ ID NO: 449546 - RNA, 19 nt, Artificial Sequence
  Description of Artificial Sequence: Synthetic oligonucleotide
  Antisense Strand to SEQ ID NO: 449545
uauaaugagggccacaucu

SEQ ID NO: 449547 - RNA, 19 nt, Artificial Sequence
  Description of Artificial Sequence: Synthetic oligonucleotide
  Sense strand starting at position 2829 of SEQ ID NO: 316907
uuggguuugagauaaggca

SEQ ID NO: 449548 - RNA, 19 nt, Artificial Sequence
  Description of Artificial Sequence: Synthetic oligonucleotide
  Antisense Strand to SEQ ID NO: 449547
ugccuuaucucaaacccaa

SEQ ID NO: 449549 - RNA, 19 nt, Artificial Sequence
  Description of Artificial Sequence: Synthetic oligonucleotide
  Sense strand starting at position 2934 of SEQ ID NO: 316907
agggauuaggcucaguauu

SEQ ID NO: 449550 - RNA, 19 nt, Artificial Sequence
  Description of Artificial Sequence: Synthetic oligonucleotide
  Antisense Strand to SEQ ID NO: 449549
aauacugagccuaaucccu

SEQ ID NO: 449551 - RNA, 19 nt, Artificial Sequence
  Description of Artificial Sequence: Synthetic oligonucleotide
  Sense strand starting at position 2951 of SEQ ID NO: 316907
uugucacacugucugauuu

SEQ ID NO: 449552 - RNA, 19 nt, Artificial Sequence
  Description of Artificial Sequence: Synthetic oligonucleotide
  Antisense Strand to SEQ ID NO: 449551
aaaucagacagugugacaa

SEQ ID NO: 449553 - RNA, 19 nt, Artificial Sequence
  Description of Artificial Sequence: Synthetic oligonucleotide
  Sense strand starting at position 2989 of SEQ ID NO: 316907
uccagauguguuuauauga

SEQ ID NO: 449554 - RNA, 19 nt, Artificial Sequence
  Description of Artificial Sequence: Synthetic oligonucleotide
  Antisense Strand to SEQ ID NO: 449553
ucauauaaacacaucugga

SEQ ID NO: 449555 - RNA, 19 nt, Artificial Sequence
  Description of Artificial Sequence: Synthetic oligonucleotide
  Sense strand starting at position 3077 of SEQ ID NO: 316907
uguaacuguguuuggauuu

SEQ ID NO: 449556 - RNA, 19 nt, Artificial Sequence
  Description of Artificial Sequence: Synthetic oligonucleotide
  Antisense Strand to SEQ ID NO: 449555
aaauccaaacacaguuaca

SEQ ID NO: 449557 - RNA, 19 nt, Artificial Sequence
  Description of Artificial Sequence: Synthetic oligonucleotide
  Sense strand starting at position 3102 of SEQ ID NO: 316907
cgauccaccuguuugagaa

SEQ ID NO: 449558 - RNA, 19 nt, Artificial Sequence
  Description of Artificial Sequence: Synthetic oligonucleotide
  Antisense Strand to SEQ ID NO: 449557
uucucaaacagguggaucg

SEQ ID NO: 449559 - RNA, 19 nt, Artificial Sequence
  Description of Artificial Sequence: Synthetic oligonucleotide
  Sense strand starting at position 3103 of SEQ ID NO: 316907
gauccaccuguuugagaau

SEQ ID NO: 449560 - RNA, 19 nt, Artificial Sequence
  Description of Artificial Sequence: Synthetic oligonucleotide
  Antisense Strand to SEQ ID NO: 449559
auucucaaacagguggauc

SEQ ID NO: 449561 - RNA, 19 nt, Artificial Sequence
  Description of Artificial Sequence: Synthetic oligonucleotide
  Sense strand starting at position 3126 of SEQ ID NO: 316907
uggucauagcuauagaugu

SEQ ID NO: 449562 - RNA, 19 nt, Artificial Sequence
  Description of Artificial Sequence: Synthetic oligonucleotide
  Antisense Strand to SEQ ID NO: 449561
acaucuauagcuaugacca

SEQ ID NO: 449563 - RNA, 19 nt, Artificial Sequence
  Description of Artificial Sequence: Synthetic oligonucleotide
  Sense strand starting at position 3134 of SEQ ID NO: 316907
gcuauagauguugaccaau

SEQ ID NO: 449564 - RNA, 19 nt, Artificial Sequence
  Description of Artificial Sequence: Synthetic oligonucleotide
  Antisense Strand to SEQ ID NO: 449563
auuggucaacaucuauagc

SEQ ID NO: 449565 - RNA, 19 nt, Artificial Sequence
  Description of Artificial Sequence: Synthetic oligonucleotide
  Sense strand starting at position 3319 of SEQ ID NO: 316907
ggaggauuauuuggacaua

SEQ ID NO: 449566 - RNA, 19 nt, Artificial Sequence
  Description of Artificial Sequence: Synthetic oligonucleotide
  Antisense Strand to SEQ ID NO: 449565
uauguccaaauaauccucc

SEQ ID NO: 449567 - RNA, 19 nt, Artificial Sequence
  Description of Artificial Sequence: Synthetic oligonucleotide
  Sense strand starting at position 3320 of SEQ ID NO: 316907
gaggauuauuuggacauag

SEQ ID NO: 449568 - RNA, 19 nt, Artificial Sequence
  Description of Artificial Sequence: Synthetic oligonucleotide
  Antisense Strand to SEQ ID NO: 449567
cuauguccaaauaauccuc

SEQ ID NO: 449569 - RNA, 19 nt, Artificial Sequence
  Description of Artificial Sequence: Synthetic oligonucleotide
  Sense strand starting at position 3412 of SEQ ID NO: 316907
caggcagauucuuucugga

SEQ ID NO: 449570 - RNA, 19 nt, Artificial Sequence
  Description of Artificial Sequence: Synthetic oligonucleotide
  Antisense Strand to SEQ ID NO: 449569
uccagaaagaaucugccug

SEQ ID NO: 449571 - RNA, 19 nt, Artificial Sequence
  Description of Artificial Sequence: Synthetic oligonucleotide
  Sense strand starting at position 3419 of SEQ ID NO: 316907
auucuuucuggaggcagau

SEQ ID NO: 449572 - RNA, 19 nt, Artificial Sequence
  Description of Artificial Sequence: Synthetic oligonucleotide
  Antisense Strand to SEQ ID NO: 449571
aucugccuccagaaagaau

SEQ ID NO: 449573 - RNA, 19 nt, Artificial Sequence
  Description of Artificial Sequence: Synthetic oligonucleotide
  Sense strand starting at position 44 of SEQ ID NO: 316908
uuguaugucuuauuuguag

SEQ ID NO: 449574 - RNA, 19 nt, Artificial Sequence
  Description of Artificial Sequence: Synthetic oligonucleotide
  Antisense Strand to SEQ ID NO: 449573
cuacaaauaagacauacaa

SEQ ID NO: 449575 - RNA, 19 nt, Artificial Sequence
  Description of Artificial Sequence: Synthetic oligonucleotide
  Sense strand starting at position 267 of SEQ ID NO: 316908
gccuuauuuguuugguggu

SEQ ID NO: 449576 - RNA, 19 nt, Artificial Sequence
  Description of Artificial Sequence: Synthetic oligonucleotide
  Antisense Strand to SEQ ID NO: 449575
accaccaaacaaauaaggc

SEQ ID NO: 449577 - RNA, 19 nt, Artificial Sequence
  Description of Artificial Sequence: Synthetic oligonucleotide
  Sense strand starting at position 269 of SEQ ID NO: 316908
cuuauuuguuuggugguau

SEQ ID NO: 449578 - RNA, 19 nt, Artificial Sequence
  Description of Artificial Sequence: Synthetic oligonucleotide
  Antisense Strand to SEQ ID NO: 449577
auaccaccaaacaaauaag

SEQ ID NO: 449579 - RNA, 19 nt, Artificial Sequence
  Description of Artificial Sequence: Synthetic oligonucleotide
  Sense strand starting at position 280 of SEQ ID NO: 316908
ggugguauucguuaucaaa

SEQ ID NO: 449580 - RNA, 19 nt, Artificial Sequence
  Description of Artificial Sequence: Synthetic oligonucleotide
  Antisense Strand to SEQ ID NO: 449579
uuugauaacgaauaccacc

SEQ ID NO: 449581 - RNA, 19 nt, Artificial Sequence
  Description of Artificial Sequence: Synthetic oligonucleotide
  Sense strand starting at position 297 of SEQ ID NO: 316908
aagugcuguuuaucaggaa

SEQ ID NO: 449582 - RNA, 19 nt, Artificial Sequence
  Description of Artificial Sequence: Synthetic oligonucleotide
  Antisense Strand to SEQ ID NO: 449581
uuccugauaaacagcacuu

SEQ ID NO: 449583 - RNA, 19 nt, Artificial Sequence
  Description of Artificial Sequence: Synthetic oligonucleotide
  Sense strand starting at position 301 of SEQ ID NO: 316908
gcuguuuaucaggaaaucu

SEQ ID NO: 449584 - RNA, 19 nt, Artificial Sequence
  Description of Artificial Sequence: Synthetic oligonucleotide
  Antisense Strand to SEQ ID NO: 449583
agauuuccugauaaacagc

SEQ ID NO: 449585 - RNA, 19 nt, Artificial Sequence
  Description of Artificial Sequence: Synthetic oligonucleotide
  Sense strand starting at position 310 of SEQ ID NO: 316908
caggaaaucugcuuuguuc

SEQ ID NO: 449586 - RNA, 19 nt, Artificial Sequence
  Description of Artificial Sequence: Synthetic oligonucleotide
  Antisense Strand to SEQ ID NO: 449585
gaacaaagcagauuuccug

SEQ ID NO: 449587 - RNA, 19 nt, Artificial Sequence
  Description of Artificial Sequence: Synthetic oligonucleotide
  Sense strand starting at position 784 of SEQ ID NO: 316908
aacguuacccggcagaauu

SEQ ID NO: 449588 - RNA, 19 nt, Artificial Sequence
  Description of Artificial Sequence: Synthetic oligonucleotide
  Antisense Strand to SEQ ID NO: 449587
aauucugccggguaacguu

SEQ ID NO: 449589 - RNA, 19 nt, Artificial Sequence
  Description of Artificial Sequence: Synthetic oligonucleotide
  Sense strand starting at position 831 of SEQ ID NO: 316908
guuccaucacaaggagauu

SEQ ID NO: 449590 - RNA, 19 nt, Artificial Sequence
  Description of Artificial Sequence: Synthetic oligonucleotide
  Antisense Strand to SEQ ID NO: 449589
aaucuccuugugauggaac

SEQ ID NO: 449591 - RNA, 19 nt, Artificial Sequence
  Description of Artificial Sequence: Synthetic oligonucleotide
  Sense strand starting at position 984 of SEQ ID NO: 316908
aggugauuccuaugcaacu

SEQ ID NO: 449592 - RNA, 19 nt, Artificial Sequence
  Description of Artificial Sequence: Synthetic oligonucleotide
  Antisense Strand to SEQ ID NO: 449591
aguugcauaggaaucaccu

SEQ ID NO: 449593 - RNA, 19 nt, Artificial Sequence
  Description of Artificial Sequence: Synthetic oligonucleotide
  Sense strand starting at position 1139 of SEQ ID NO: 316908
guagucucuguauauaagu

SEQ ID NO: 449594 - RNA, 19 nt, Artificial Sequence
  Description of Artificial Sequence: Synthetic oligonucleotide
  Antisense Strand to SEQ ID NO: 449593
acuuauauacagagacuac

SEQ ID NO: 449595 - RNA, 19 nt, Artificial Sequence
  Description of Artificial Sequence: Synthetic oligonucleotide
  Sense strand starting at position 1166 of SEQ ID NO: 316908
guagucucuguauaugagu

SEQ ID NO: 449596 - RNA, 19 nt, Artificial Sequence
  Description of Artificial Sequence: Synthetic oligonucleotide
  Antisense Strand to SEQ ID NO: 449595
acucauauacagagacuac

SEQ ID NO: 449597 - RNA, 19 nt, Artificial Sequence
  Description of Artificial Sequence: Synthetic oligonucleotide
  Sense strand starting at position 1168 of SEQ ID NO: 316908
agucucuguauaugaguaa

SEQ ID NO: 449598 - RNA, 19 nt, Artificial Sequence
  Description of Artificial Sequence: Synthetic oligonucleotide
  Antisense Strand to SEQ ID NO: 449597
uuacucauauacagagacu

SEQ ID NO: 449599 - RNA, 19 nt, Artificial Sequence
  Description of Artificial Sequence: Synthetic oligonucleotide
  Sense strand starting at position 1217 of SEQ ID NO: 316908
accugucacccucggaaga

SEQ ID NO: 449600 - RNA, 19 nt, Artificial Sequence
  Description of Artificial Sequence: Synthetic oligonucleotide
  Antisense Strand to SEQ ID NO: 449599
ucuuccgagggugacaggu

SEQ ID NO: 449601 - RNA, 19 nt, Artificial Sequence
  Description of Artificial Sequence: Synthetic oligonucleotide
  Sense strand starting at position 1218 of SEQ ID NO: 316908
ccugucacccucggaagaa

SEQ ID NO: 449602 - RNA, 19 nt, Artificial Sequence
  Description of Artificial Sequence: Synthetic oligonucleotide
  Antisense Strand to SEQ ID NO: 449601
uucuuccgagggugacagg

SEQ ID NO: 449603 - RNA, 19 nt, Artificial Sequence
  Description of Artificial Sequence: Synthetic oligonucleotide
  Sense strand starting at position 1261 of SEQ ID NO: 316908
cuggaaggguuuccaacaa

SEQ ID NO: 449604 - RNA, 19 nt, Artificial Sequence
  Description of Artificial Sequence: Synthetic oligonucleotide
  Antisense Strand to SEQ ID NO: 449603
uuguuggaaacccuuccag

SEQ ID NO: 449605 - RNA, 19 nt, Artificial Sequence
  Description of Artificial Sequence: Synthetic oligonucleotide
  Sense strand starting at position 1265 of SEQ ID NO: 316908
aaggguuuccaacaauguu

SEQ ID NO: 449606 - RNA, 19 nt, Artificial Sequence
  Description of Artificial Sequence: Synthetic oligonucleotide
  Antisense Strand to SEQ ID NO: 449605
aacauuguuggaaacccuu

SEQ ID NO: 449607 - RNA, 19 nt, Artificial Sequence
  Description of Artificial Sequence: Synthetic oligonucleotide
  Sense strand starting at position 1403 of SEQ ID NO: 316908
agcuguguugcuucuguga

SEQ ID NO: 449608 - RNA, 19 nt, Artificial Sequence
  Description of Artificial Sequence: Synthetic oligonucleotide
  Antisense Strand to SEQ ID NO: 449607
ucacagaagcaacacagcu

SEQ ID NO: 449609 - RNA, 19 nt, Artificial Sequence
  Description of Artificial Sequence: Synthetic oligonucleotide
  Sense strand starting at position 1432 of SEQ ID NO: 316908
ggccuugggccucagagau

SEQ ID NO: 449610 - RNA, 19 nt, Artificial Sequence
  Description of Artificial Sequence: Synthetic oligonucleotide
  Antisense Strand to SEQ ID NO: 449609
aucucugaggcccaaggcc

SEQ ID NO: 449611 - RNA, 19 nt, Artificial Sequence
  Description of Artificial Sequence: Synthetic oligonucleotide
  Sense strand starting at position 1610 of SEQ ID NO: 316908
gcuugauuccaguaagguu

SEQ ID NO: 449612 - RNA, 19 nt, Artificial Sequence
  Description of Artificial Sequence: Synthetic oligonucleotide
  Antisense Strand to SEQ ID NO: 449611
aaccuuacuggaaucaagc

SEQ ID NO: 449613 - RNA, 19 nt, Artificial Sequence
  Description of Artificial Sequence: Synthetic oligonucleotide
  Sense strand starting at position 1765 of SEQ ID NO: 316908
gcaggaaucucucccucca

SEQ ID NO: 449614 - RNA, 19 nt, Artificial Sequence
  Description of Artificial Sequence: Synthetic oligonucleotide
  Antisense Strand to SEQ ID NO: 449613
uggagggagagauuccugc

SEQ ID NO: 449615 - RNA, 19 nt, Artificial Sequence
  Description of Artificial Sequence: Synthetic oligonucleotide
  Sense strand starting at position 1775 of SEQ ID NO: 316908
cucccuccagucuggaaau

SEQ ID NO: 449616 - RNA, 19 nt, Artificial Sequence
  Description of Artificial Sequence: Synthetic oligonucleotide
  Antisense Strand to SEQ ID NO: 449615
auuuccagacuggagggag

SEQ ID NO: 449617 - RNA, 19 nt, Artificial Sequence
  Description of Artificial Sequence: Synthetic oligonucleotide
  Sense strand starting at position 1781 of SEQ ID NO: 316908
ccagucuggaaauggaauu

SEQ ID NO: 449618 - RNA, 19 nt, Artificial Sequence
  Description of Artificial Sequence: Synthetic oligonucleotide
  Antisense Strand to SEQ ID NO: 449617
aauuccauuuccagacugg

SEQ ID NO: 449619 - RNA, 19 nt, Artificial Sequence
  Description of Artificial Sequence: Synthetic oligonucleotide
  Sense strand starting at position 1895 of SEQ ID NO: 316908
gcgauacuccgauaaacuu

SEQ ID NO: 449620 - RNA, 19 nt, Artificial Sequence
  Description of Artificial Sequence: Synthetic oligonucleotide
  Antisense Strand to SEQ ID NO: 449619
aaguuuaucggaguaucgc

SEQ ID NO: 449621 - RNA, 19 nt, Artificial Sequence
  Description of Artificial Sequence: Synthetic oligonucleotide
  Sense strand starting at position 2290 of SEQ ID NO: 316908
agugguauucuggaaagug

SEQ ID NO: 449622 - RNA, 19 nt, Artificial Sequence
  Description of Artificial Sequence: Synthetic oligonucleotide
  Antisense Strand to SEQ ID NO: 449621
cacuuuccagaauaccacu

SEQ ID NO: 449623 - RNA, 19 nt, Artificial Sequence
  Description of Artificial Sequence: Synthetic oligonucleotide
  Sense strand starting at position 2376 of SEQ ID NO: 316908
ggaccauggguuuaguuaa

SEQ ID NO: 449624 - RNA, 19 nt, Artificial Sequence
  Description of Artificial Sequence: Synthetic oligonucleotide
  Antisense Strand to SEQ ID NO: 449623
uuaacuaaacccauggucc

SEQ ID NO: 449625 - RNA, 19 nt, Artificial Sequence
  Description of Artificial Sequence: Synthetic oligonucleotide
  Sense strand starting at position 2383 of SEQ ID NO: 316908
ggguuuaguuaauccaaag

SEQ ID NO: 449626 - RNA, 19 nt, Artificial Sequence
  Description of Artificial Sequence: Synthetic oligonucleotide
  Antisense Strand to SEQ ID NO: 449625
cuuuggauuaacuaaaccc

SEQ ID NO: 449627 - RNA, 19 nt, Artificial Sequence
  Description of Artificial Sequence: Synthetic oligonucleotide
  Sense strand starting at position 2425 of SEQ ID NO: 316908
aguguuaugagauggccua

SEQ ID NO: 449628 - RNA, 19 nt, Artificial Sequence
  Description of Artificial Sequence: Synthetic oligonucleotide
  Antisense Strand to SEQ ID NO: 449627
uaggccaucucauaacacu

SEQ ID NO: 449629 - RNA, 19 nt, Artificial Sequence
  Description of Artificial Sequence: Synthetic oligonucleotide
  Sense strand starting at position 2839 of SEQ ID NO: 316908
caagaaucauaguuuggua

SEQ ID NO: 449630 - RNA, 19 nt, Artificial Sequence
  Description of Artificial Sequence: Synthetic oligonucleotide
  Antisense Strand to SEQ ID NO: 449629
uaccaaacuaugauucuug

SEQ ID NO: 449631 - RNA, 19 nt, Artificial Sequence
  Description of Artificial Sequence: Synthetic oligonucleotide
  Sense strand starting at position 2958 of SEQ ID NO: 316908
cuaguuugaaugugaggga

SEQ ID NO: 449632 - RNA, 19 nt, Artificial Sequence
  Description of Artificial Sequence: Synthetic oligonucleotide
  Antisense Strand to SEQ ID NO: 449631
ucccucacauucaaacuag

SEQ ID NO: 449633 - RNA, 19 nt, Artificial Sequence
  Description of Artificial Sequence: Synthetic oligonucleotide
  Sense strand starting at position 3032 of SEQ ID NO: 316908
ccuggauauccugaguccu

SEQ ID NO: 449634 - RNA, 19 nt, Artificial Sequence
  Description of Artificial Sequence: Synthetic oligonucleotide
  Antisense Strand to SEQ ID NO: 449633
aggacucaggauauccagg

SEQ ID NO: 449635 - RNA, 19 nt, Artificial Sequence
  Description of Artificial Sequence: Synthetic oligonucleotide
  Sense strand starting at position 3034 of SEQ ID NO: 316908
uggauauccugaguccuga

SEQ ID NO: 449636 - RNA, 19 nt, Artificial Sequence
  Description of Artificial Sequence: Synthetic oligonucleotide
  Antisense Strand to SEQ ID NO: 449635
ucaggacucaggauaucca

SEQ ID NO: 449637 - RNA, 19 nt, Artificial Sequence
  Description of Artificial Sequence: Synthetic oligonucleotide
  Sense strand starting at position 3200 of SEQ ID NO: 316908
ucagucaauuugucagguu

SEQ ID NO: 449638 - RNA, 19 nt, Artificial Sequence
  Description of Artificial Sequence: Synthetic oligonucleotide
  Antisense Strand to SEQ ID NO: 449637
aaccugacaaauugacuga

SEQ ID NO: 449639 - RNA, 19 nt, Artificial Sequence
  Description of Artificial Sequence: Synthetic oligonucleotide
  Sense strand starting at position 3299 of SEQ ID NO: 316908
auugcacugguguaauuau

SEQ ID NO: 449640 - RNA, 19 nt, Artificial Sequence
  Description of Artificial Sequence: Synthetic oligonucleotide
  Antisense Strand to SEQ ID NO: 449639
auaauuacaccagugcaau

SEQ ID NO: 449641 - RNA, 19 nt, Artificial Sequence
  Description of Artificial Sequence: Synthetic oligonucleotide
  Sense strand starting at position 3512 of SEQ ID NO: 316908
ucuggagucacuggaauua

SEQ ID NO: 449642 - RNA, 19 nt, Artificial Sequence
  Description of Artificial Sequence: Synthetic oligonucleotide
  Antisense Strand to SEQ ID NO: 449641
uaauuccagugacuccaga

SEQ ID NO: 449643 - RNA, 19 nt, Artificial Sequence
  Description of Artificial Sequence: Synthetic oligonucleotide
  Sense strand starting at position 3864 of SEQ ID NO: 316908
auucuuaaggcaggauaau

SEQ ID NO: 449644 - RNA, 19 nt, Artificial Sequence
  Description of Artificial Sequence: Synthetic oligonucleotide
  Antisense Strand to SEQ ID NO: 449643
auuauccugccuuaagaau

SEQ ID NO: 449645 - RNA, 19 nt, Artificial Sequence
  Description of Artificial Sequence: Synthetic oligonucleotide
  Sense strand starting at position 3876 of SEQ ID NO: 316908
ggauaaugcuuccuguaaa

SEQ ID NO: 449646 - RNA, 19 nt, Artificial Sequence
  Description of Artificial Sequence: Synthetic oligonucleotide
  Antisense Strand to SEQ ID NO: 449645
uuuacaggaagcauuaucc

SEQ ID NO: 449647 - RNA, 19 nt, Artificial Sequence
  Description of Artificial Sequence: Synthetic oligonucleotide
  Sense strand starting at position 3879 of SEQ ID NO: 316908
uaaugcuuccuguaaagga

SEQ ID NO: 449648 - RNA, 19 nt, Artificial Sequence
  Description of Artificial Sequence: Synthetic oligonucleotide
  Antisense Strand to SEQ ID NO: 449647
uccuuuacaggaagcauua

SEQ ID NO: 449649 - RNA, 19 nt, Artificial Sequence
  Description of Artificial Sequence: Synthetic oligonucleotide
  Sense strand starting at position 3887 of SEQ ID NO: 316908
ccuguaaaggagugauccu

SEQ ID NO: 449650 - RNA, 19 nt, Artificial Sequence
  Description of Artificial Sequence: Synthetic oligonucleotide
  Antisense Strand to SEQ ID NO: 449649
aggaucacuccuuuacagg

SEQ ID NO: 449651 - RNA, 19 nt, Artificial Sequence
  Description of Artificial Sequence: Synthetic oligonucleotide
  Sense strand starting at position 3913 of SEQ ID NO: 316908
agguuuauggacugcugaa

SEQ ID NO: 449652 - RNA, 19 nt, Artificial Sequence
  Description of Artificial Sequence: Synthetic oligonucleotide
  Antisense Strand to SEQ ID NO: 449651
uucagcaguccauaaaccu

SEQ ID NO: 449653 - RNA, 19 nt, Artificial Sequence
  Description of Artificial Sequence: Synthetic oligonucleotide
  Sense strand starting at position 8 of SEQ ID NO: 316909
ggaguaauaucuuuaucug

SEQ ID NO: 449654 - RNA, 19 nt, Artificial Sequence
  Description of Artificial Sequence: Synthetic oligonucleotide
  Antisense Strand to SEQ ID NO: 449653
cagauaaagauauuacucc

SEQ ID NO: 449655 - RNA, 19 nt, Artificial Sequence
  Description of Artificial Sequence: Synthetic oligonucleotide
  Sense strand starting at position 14 of SEQ ID NO: 316909
auaucuuuaucugaaugag

SEQ ID NO: 449656 - RNA, 19 nt, Artificial Sequence
  Description of Artificial Sequence: Synthetic oligonucleotide
  Antisense Strand to SEQ ID NO: 449655
cucauucagauaaagauau

SEQ ID NO: 449657 - RNA, 19 nt, Artificial Sequence
  Description of Artificial Sequence: Synthetic oligonucleotide
  Sense strand starting at position 17 of SEQ ID NO: 316909
ucuuuaucugaaugagaau

SEQ ID NO: 449658 - RNA, 19 nt, Artificial Sequence
  Description of Artificial Sequence: Synthetic oligonucleotide
  Antisense Strand to SEQ ID NO: 449657
auucucauucagauaaaga

SEQ ID NO: 449659 - RNA, 19 nt, Artificial Sequence
  Description of Artificial Sequence: Synthetic oligonucleotide
  Sense strand starting at position 23 of SEQ ID NO: 316909
ucugaaugagaaugcgaaa

SEQ ID NO: 449660 - RNA, 19 nt, Artificial Sequence
  Description of Artificial Sequence: Synthetic oligonucleotide
  Antisense Strand to SEQ ID NO: 449659
uuucgcauucucauucaga

SEQ ID NO: 449661 - RNA, 19 nt, Artificial Sequence
  Description of Artificial Sequence: Synthetic oligonucleotide
  Sense strand starting at position 198 of SEQ ID NO: 316909
gacauuguuccgggaggcu

SEQ ID NO: 449662 - RNA, 19 nt, Artificial Sequence
  Description of Artificial Sequence: Synthetic oligonucleotide
  Antisense Strand to SEQ ID NO: 449661
agccucccggaacaauguc

SEQ ID NO: 449663 - RNA, 19 nt, Artificial Sequence
  Description of Artificial Sequence: Synthetic oligonucleotide
  Sense strand starting at position 1250 of SEQ ID NO: 316909
ccuagugggucccuucuua

SEQ ID NO: 449664 - RNA, 19 nt, Artificial Sequence
  Description of Artificial Sequence: Synthetic oligonucleotide
  Antisense Strand to SEQ ID NO: 449663
uaagaagggacccacuagg

SEQ ID NO: 449665 - RNA, 19 nt, Artificial Sequence
  Description of Artificial Sequence: Synthetic oligonucleotide
  Sense strand starting at position 2289 of SEQ ID NO: 316909
gcaggccuguguuugcaua

SEQ ID NO: 449666 - RNA, 19 nt, Artificial Sequence
  Description of Artificial Sequence: Synthetic oligonucleotide
  Antisense Strand to SEQ ID NO: 449665
uaugcaaacacaggccugc

SEQ ID NO: 449667 - RNA, 19 nt, Artificial Sequence
  Description of Artificial Sequence: Synthetic oligonucleotide
  Sense strand starting at position 2415 of SEQ ID NO: 316909
uguggugugagcggcaauu

SEQ ID NO: 449668 - RNA, 19 nt, Artificial Sequence
  Description of Artificial Sequence: Synthetic oligonucleotide
  Antisense Strand to SEQ ID NO: 449667
aauugccgcucacaccaca

SEQ ID NO: 449669 - RNA, 19 nt, Artificial Sequence
  Description of Artificial Sequence: Synthetic oligonucleotide
  Sense strand starting at position 3510 of SEQ ID NO: 316909
cugccucccugauugaagu

SEQ ID NO: 449670 - RNA, 19 nt, Artificial Sequence
  Description of Artificial Sequence: Synthetic oligonucleotide
  Antisense Strand to SEQ ID NO: 449669
acuucaaucagggaggcag

SEQ ID NO: 449671 - RNA, 19 nt, Artificial Sequence
  Description of Artificial Sequence: Synthetic oligonucleotide
  Sense strand starting at position 3720 of SEQ ID NO: 316909
ccaacuaagucaucagguu

SEQ ID NO: 449672 - RNA, 19 nt, Artificial Sequence
  Description of Artificial Sequence: Synthetic oligonucleotide
  Antisense Strand to SEQ ID NO: 449671
aaccugaugacuuaguugg

SEQ ID NO: 449673 - RNA, 19 nt, Artificial Sequence
  Description of Artificial Sequence: Synthetic oligonucleotide
  Sense strand starting at position 3979 of SEQ ID NO: 316909
auccgugcaucugugaaca

SEQ ID NO: 449674 - RNA, 19 nt, Artificial Sequence
  Description of Artificial Sequence: Synthetic oligonucleotide
  Antisense Strand to SEQ ID NO: 449673
uguucacagaugcacggau

SEQ ID NO: 449675 - RNA, 19 nt, Artificial Sequence
  Description of Artificial Sequence: Synthetic oligonucleotide
  Sense strand starting at position 3981 of SEQ ID NO: 316909
ccgugcaucugugaacaca

SEQ ID NO: 449676 - RNA, 19 nt, Artificial Sequence
  Description of Artificial Sequence: Synthetic oligonucleotide
  Antisense Strand to SEQ ID NO: 449675
uguguucacagaugcacgg

SEQ ID NO: 449677 - RNA, 19 nt, Artificial Sequence
  Description of Artificial Sequence: Synthetic oligonucleotide
  Sense strand starting at position 433 of SEQ ID NO: 316910
ggacaauccugagugguca

SEQ ID NO: 449678 - RNA, 19 nt, Artificial Sequence
  Description of Artificial Sequence: Synthetic oligonucleotide
  Antisense Strand to SEQ ID NO: 449677
ugaccacucaggauugucc

SEQ ID NO: 449679 - RNA, 19 nt, Artificial Sequence
  Description of Artificial Sequence: Synthetic oligonucleotide
  Sense strand starting at position 434 of SEQ ID NO: 316910
gacaauccugaguggucaa

SEQ ID NO: 449680 - RNA, 19 nt, Artificial Sequence
  Description of Artificial Sequence: Synthetic oligonucleotide
  Antisense Strand to SEQ ID NO: 449679
uugaccacucaggauuguc

SEQ ID NO: 449681 - RNA, 19 nt, Artificial Sequence
  Description of Artificial Sequence: Synthetic oligonucleotide
  Sense strand starting at position 537 of SEQ ID NO: 316910
gcaugagucugcgggcaca

SEQ ID NO: 449682 - RNA, 19 nt, Artificial Sequence
  Description of Artificial Sequence: Synthetic oligonucleotide
  Antisense Strand to SEQ ID NO: 449681
ugugcccgcagacucaugc

SEQ ID NO: 449683 - RNA, 19 nt, Artificial Sequence
  Description of Artificial Sequence: Synthetic oligonucleotide
  Sense strand starting at position 614 of SEQ ID NO: 316910
cuuagaugucggugccaug

SEQ ID NO: 449684 - RNA, 19 nt, Artificial Sequence
  Description of Artificial Sequence: Synthetic oligonucleotide
  Antisense Strand to SEQ ID NO: 449683
cauggcaccgacaucuaag

SEQ ID NO: 449685 - RNA, 19 nt, Artificial Sequence
  Description of Artificial Sequence: Synthetic oligonucleotide
  Sense strand starting at position 957 of SEQ ID NO: 316910
cagguacgaguaugaaagu

SEQ ID NO: 449686 - RNA, 19 nt, Artificial Sequence
  Description of Artificial Sequence: Synthetic oligonucleotide
  Antisense Strand to SEQ ID NO: 449685
acuuucauacucguaccug

SEQ ID NO: 449687 - RNA, 19 nt, Artificial Sequence
  Description of Artificial Sequence: Synthetic oligonucleotide
  Sense strand starting at position 960 of SEQ ID NO: 316910
guacgaguaugaaaguguu

SEQ ID NO: 449688 - RNA, 19 nt, Artificial Sequence
  Description of Artificial Sequence: Synthetic oligonucleotide
  Antisense Strand to SEQ ID NO: 449687
aacacuuucauacucguac

SEQ ID NO: 449689 - RNA, 19 nt, Artificial Sequence
  Description of Artificial Sequence: Synthetic oligonucleotide
  Sense strand starting at position 966 of SEQ ID NO: 316910
guaugaaaguguuugcaag

SEQ ID NO: 449690 - RNA, 19 nt, Artificial Sequence
  Description of Artificial Sequence: Synthetic oligonucleotide
  Antisense Strand to SEQ ID NO: 449689
cuugcaaacacuuucauac

SEQ ID NO: 449691 - RNA, 19 nt, Artificial Sequence
  Description of Artificial Sequence: Synthetic oligonucleotide
  Sense strand starting at position 967 of SEQ ID NO: 316910
uaugaaaguguuugcaaga

SEQ ID NO: 449692 - RNA, 19 nt, Artificial Sequence
  Description of Artificial Sequence: Synthetic oligonucleotide
  Antisense Strand to SEQ ID NO: 449691
ucuugcaaacacuuucaua

SEQ ID NO: 449693 - RNA, 19 nt, Artificial Sequence
  Description of Artificial Sequence: Synthetic oligonucleotide
  Sense strand starting at position 968 of SEQ ID NO: 316910
augaaaguguuugcaagac

SEQ ID NO: 449694 - RNA, 19 nt, Artificial Sequence
  Description of Artificial Sequence: Synthetic oligonucleotide
  Antisense Strand to SEQ ID NO: 449693
gucuugcaaacacuuucau

SEQ ID NO: 449695 - RNA, 19 nt, Artificial Sequence
  Description of Artificial Sequence: Synthetic oligonucleotide
  Sense strand starting at position 1374 of SEQ ID NO: 316910
gucacuaacacguggaacu

SEQ ID NO: 449696 - RNA, 19 nt, Artificial Sequence
  Description of Artificial Sequence: Synthetic oligonucleotide
  Antisense Strand to SEQ ID NO: 449695
aguuccacguguuagugac

SEQ ID NO: 449697 - RNA, 19 nt, Artificial Sequence
  Description of Artificial Sequence: Synthetic oligonucleotide
  Sense strand starting at position 1500 of SEQ ID NO: 316910
agaagcuguggguaucaaa

SEQ ID NO: 449698 - RNA, 19 nt, Artificial Sequence
  Description of Artificial Sequence: Synthetic oligonucleotide
  Antisense Strand to SEQ ID NO: 449697
uuugauacccacagcuucu

SEQ ID NO: 449699 - RNA, 19 nt, Artificial Sequence
  Description of Artificial Sequence: Synthetic oligonucleotide
  Sense strand starting at position 1657 of SEQ ID NO: 316910
gcgccauuagcggacaaau

SEQ ID NO: 449700 - RNA, 19 nt, Artificial Sequence
  Description of Artificial Sequence: Synthetic oligonucleotide
  Antisense Strand to SEQ ID NO: 449699
auuuguccgcuaauggcgc

SEQ ID NO: 449701 - RNA, 19 nt, Artificial Sequence
  Description of Artificial Sequence: Synthetic oligonucleotide
  Sense strand starting at position 2552 of SEQ ID NO: 316910
guccucaacucucgagaca

SEQ ID NO: 449702 - RNA, 19 nt, Artificial Sequence
  Description of Artificial Sequence: Synthetic oligonucleotide
  Antisense Strand to SEQ ID NO: 449701
ugucucgagaguugaggac

SEQ ID NO: 449703 - RNA, 19 nt, Artificial Sequence
  Description of Artificial Sequence: Synthetic oligonucleotide
  Sense strand starting at position 2650 of SEQ ID NO: 316910
gcucucugguugcucagaa

SEQ ID NO: 449704 - RNA, 19 nt, Artificial Sequence
  Description of Artificial Sequence: Synthetic oligonucleotide
  Antisense Strand to SEQ ID NO: 449703
uucugagcaaccagagagc

SEQ ID NO: 449705 - RNA, 19 nt, Artificial Sequence
  Description of Artificial Sequence: Synthetic oligonucleotide
  Sense strand starting at position 2860 of SEQ ID NO: 316910
aagguauguucccaccuga

SEQ ID NO: 449706 - RNA, 19 nt, Artificial Sequence
  Description of Artificial Sequence: Synthetic oligonucleotide
  Antisense Strand to SEQ ID NO: 449705
ucaggugggaacauaccuu

SEQ ID NO: 449707 - RNA, 19 nt, Artificial Sequence
  Description of Artificial Sequence: Synthetic oligonucleotide
  Sense strand starting at position 2925 of SEQ ID NO: 316910
uaaucaucguaauagacgu

SEQ ID NO: 449708 - RNA, 19 nt, Artificial Sequence
  Description of Artificial Sequence: Synthetic oligonucleotide
  Antisense Strand to SEQ ID NO: 449707
acgucuauuacgaugauua

SEQ ID NO: 449709 - RNA, 19 nt, Artificial Sequence
  Description of Artificial Sequence: Synthetic oligonucleotide
  Sense strand starting at position 2932 of SEQ ID NO: 316910
cguaauagacgucaacaug

SEQ ID NO: 449710 - RNA, 19 nt, Artificial Sequence
  Description of Artificial Sequence: Synthetic oligonucleotide
  Antisense Strand to SEQ ID NO: 449709
cauguugacgucuauuacg

SEQ ID NO: 449711 - RNA, 19 nt, Artificial Sequence
  Description of Artificial Sequence: Synthetic oligonucleotide
  Sense strand starting at position 3828 of SEQ ID NO: 316910
cugcgagcgugcaaaguau

SEQ ID NO: 449712 - RNA, 19 nt, Artificial Sequence
  Description of Artificial Sequence: Synthetic oligonucleotide
  Antisense Strand to SEQ ID NO: 449711
auacuuugcacgcucgcag

SEQ ID NO: 449713 - RNA, 19 nt, Artificial Sequence
  Description of Artificial Sequence: Synthetic oligonucleotide
  Sense strand starting at position 3830 of SEQ ID NO: 316910
gcgagcgugcaaaguauaa

SEQ ID NO: 449714 - RNA, 19 nt, Artificial Sequence
  Description of Artificial Sequence: Synthetic oligonucleotide
  Antisense Strand to SEQ ID NO: 449713
uuauacuuugcacgcucgc

SEQ ID NO: 449715 - RNA, 19 nt, Artificial Sequence
  Description of Artificial Sequence: Synthetic oligonucleotide
  Sense strand starting at position 583 of SEQ ID NO: 316911
ggacaauccugagugguca

SEQ ID NO: 449716 - RNA, 19 nt, Artificial Sequence
  Description of Artificial Sequence: Synthetic oligonucleotide
  Antisense Strand to SEQ ID NO: 449715
ugaccacucaggauugucc

SEQ ID NO: 449717 - RNA, 19 nt, Artificial Sequence
  Description of Artificial Sequence: Synthetic oligonucleotide
  Sense strand starting at position 584 of SEQ ID NO: 316911
gacaauccugaguggucaa

SEQ ID NO: 449718 - RNA, 19 nt, Artificial Sequence
  Description of Artificial Sequence: Synthetic oligonucleotide
  Antisense Strand to SEQ ID NO: 449717
uugaccacucaggauuguc

SEQ ID NO: 449719 - RNA, 19 nt, Artificial Sequence
  Description of Artificial Sequence: Synthetic oligonucleotide
  Sense strand starting at position 687 of SEQ ID NO: 316911
gcaugagucugcgggcaca

SEQ ID NO: 449720 - RNA, 19 nt, Artificial Sequence
  Description of Artificial Sequence: Synthetic oligonucleotide
  Antisense Strand to SEQ ID NO: 449719
ugugcccgcagacucaugc

SEQ ID NO: 449721 - RNA, 19 nt, Artificial Sequence
  Description of Artificial Sequence: Synthetic oligonucleotide
  Sense strand starting at position 764 of SEQ ID NO: 316911
cuuagaugucggugccaug

SEQ ID NO: 449722 - RNA, 19 nt, Artificial Sequence
  Description of Artificial Sequence: Synthetic oligonucleotide
  Antisense Strand to SEQ ID NO: 449721
cauggcaccgacaucuaag

SEQ ID NO: 449723 - RNA, 19 nt, Artificial Sequence
  Description of Artificial Sequence: Synthetic oligonucleotide
  Sense strand starting at position 1107 of SEQ ID NO: 316911
cagguacgaguaugaaagu

SEQ ID NO: 449724 - RNA, 19 nt, Artificial Sequence
  Description of Artificial Sequence: Synthetic oligonucleotide
  Antisense Strand to SEQ ID NO: 449723
acuuucauacucguaccug

SEQ ID NO: 449725 - RNA, 19 nt, Artificial Sequence
  Description of Artificial Sequence: Synthetic oligonucleotide
  Sense strand starting at position 1110 of SEQ ID NO: 316911
guacgaguaugaaaguguu

SEQ ID NO: 449726 - RNA, 19 nt, Artificial Sequence
  Description of Artificial Sequence: Synthetic oligonucleotide
  Antisense Strand to SEQ ID NO: 449725
aacacuuucauacucguac

SEQ ID NO: 449727 - RNA, 19 nt, Artificial Sequence
  Description of Artificial Sequence: Synthetic oligonucleotide
  Sense strand starting at position 1116 of SEQ ID NO: 316911
guaugaaaguguuugcaag

SEQ ID NO: 449728 - RNA, 19 nt, Artificial Sequence
  Description of Artificial Sequence: Synthetic oligonucleotide
  Antisense Strand to SEQ ID NO: 449727
cuugcaaacacuuucauac

SEQ ID NO: 449729 - RNA, 19 nt, Artificial Sequence
  Description of Artificial Sequence: Synthetic oligonucleotide
  Sense strand starting at position 1117 of SEQ ID NO: 316911
uaugaaaguguuugcaaga

SEQ ID NO: 449730 - RNA, 19 nt, Artificial Sequence
  Description of Artificial Sequence: Synthetic oligonucleotide
  Antisense Strand to SEQ ID NO: 449729
ucuugcaaacacuuucaua

SEQ ID NO: 449731 - RNA, 19 nt, Artificial Sequence
  Description of Artificial Sequence: Synthetic oligonucleotide
  Sense strand starting at position 1118 of SEQ ID NO: 316911
augaaaguguuugcaagac

SEQ ID NO: 449732 - RNA, 19 nt, Artificial Sequence
  Description of Artificial Sequence: Synthetic oligonucleotide
  Antisense Strand to SEQ ID NO: 449731
gucuugcaaacacuuucau

SEQ ID NO: 449733 - RNA, 19 nt, Artificial Sequence
  Description of Artificial Sequence: Synthetic oligonucleotide
  Sense strand starting at position 1524 of SEQ ID NO: 316911
gucacuaacacguggaacu

SEQ ID NO: 449734 - RNA, 19 nt, Artificial Sequence
  Description of Artificial Sequence: Synthetic oligonucleotide
  Antisense Strand to SEQ ID NO: 449733
aguuccacguguuagugac

SEQ ID NO: 449735 - RNA, 19 nt, Artificial Sequence
  Description of Artificial Sequence: Synthetic oligonucleotide
  Sense strand starting at position 1650 of SEQ ID NO: 316911
agaagcuguggguaucaaa

SEQ ID NO: 449736 - RNA, 19 nt, Artificial Sequence
  Description of Artificial Sequence: Synthetic oligonucleotide
  Antisense Strand to SEQ ID NO: 449735
uuugauacccacagcuucu

SEQ ID NO: 449737 - RNA, 19 nt, Artificial Sequence
  Description of Artificial Sequence: Synthetic oligonucleotide
  Sense strand starting at position 1807 of SEQ ID NO: 316911
gcgccauuagcggacaaau

SEQ ID NO: 449738 - RNA, 19 nt, Artificial Sequence
  Description of Artificial Sequence: Synthetic oligonucleotide
  Antisense Strand to SEQ ID NO: 449737
auuuguccgcuaauggcgc

SEQ ID NO: 449739 - RNA, 19 nt, Artificial Sequence
  Description of Artificial Sequence: Synthetic oligonucleotide
  Sense strand starting at position 2702 of SEQ ID NO: 316911
guccucaacucucgagaca

SEQ ID NO: 449740 - RNA, 19 nt, Artificial Sequence
  Description of Artificial Sequence: Synthetic oligonucleotide
  Antisense Strand to SEQ ID NO: 449739
ugucucgagaguugaggac

SEQ ID NO: 449741 - RNA, 19 nt, Artificial Sequence
  Description of Artificial Sequence: Synthetic oligonucleotide
  Sense strand starting at position 2800 of SEQ ID NO: 316911
gcucucugguugcucagaa

SEQ ID NO: 449742 - RNA, 19 nt, Artificial Sequence
  Description of Artificial Sequence: Synthetic oligonucleotide
  Antisense Strand to SEQ ID NO: 449741
uucugagcaaccagagagc

SEQ ID NO: 449743 - RNA, 19 nt, Artificial Sequence
  Description of Artificial Sequence: Synthetic oligonucleotide
  Sense strand starting at position 3010 of SEQ ID NO: 316911
aagguauguucccaccuga

SEQ ID NO: 449744 - RNA, 19 nt, Artificial Sequence
  Description of Artificial Sequence: Synthetic oligonucleotide
  Antisense Strand to SEQ ID NO: 449743
ucaggugggaacauaccuu

SEQ ID NO: 449745 - RNA, 19 nt, Artificial Sequence
  Description of Artificial Sequence: Synthetic oligonucleotide
  Sense strand starting at position 3075 of SEQ ID NO: 316911
uaaucaucguaauagacgu

SEQ ID NO: 449746 - RNA, 19 nt, Artificial Sequence
  Description of Artificial Sequence: Synthetic oligonucleotide
  Antisense Strand to SEQ ID NO: 449745
acgucuauuacgaugauua

SEQ ID NO: 449747 - RNA, 19 nt, Artificial Sequence
  Description of Artificial Sequence: Synthetic oligonucleotide
  Sense strand starting at position 3082 of SEQ ID NO: 316911
cguaauagacgucaacaug

SEQ ID NO: 449748 - RNA, 19 nt, Artificial Sequence
  Description of Artificial Sequence: Synthetic oligonucleotide
  Antisense Strand to SEQ ID NO: 449747
cauguugacgucuauuacg

SEQ ID NO: 449749 - RNA, 19 nt, Artificial Sequence
  Description of Artificial Sequence: Synthetic oligonucleotide
  Sense strand starting at position 3978 of SEQ ID NO: 316911
cugcgagcgugcaaaguau

SEQ ID NO: 449750 - RNA, 19 nt, Artificial Sequence
  Description of Artificial Sequence: Synthetic oligonucleotide
  Antisense Strand to SEQ ID NO: 449749
auacuuugcacgcucgcag

SEQ ID NO: 449751 - RNA, 19 nt, Artificial Sequence
  Description of Artificial Sequence: Synthetic oligonucleotide
  Sense strand starting at position 3980 of SEQ ID NO: 316911
gcgagcgugcaaaguauaa

SEQ ID NO: 449752 - RNA, 19 nt, Artificial Sequence
  Description of Artificial Sequence: Synthetic oligonucleotide
  Antisense Strand to SEQ ID NO: 449751
uuauacuuugcacgcucgc

SEQ ID NO: 449753 - RNA, 19 nt, Artificial Sequence
  Description of Artificial Sequence: Synthetic oligonucleotide
  Sense strand starting at position 41 of SEQ ID NO: 316912
gguggcacuucucagaaag

SEQ ID NO: 449754 - RNA, 19 nt, Artificial Sequence
  Description of Artificial Sequence: Synthetic oligonucleotide
  Antisense Strand to SEQ ID NO: 449753
cuuucugagaagugccacc

SEQ ID NO: 449755 - RNA, 19 nt, Artificial Sequence
  Description of Artificial Sequence: Synthetic oligonucleotide
  Sense strand starting at position 78 of SEQ ID NO: 316912
cagaguuauuugugaaaga

SEQ ID NO: 449756 - RNA, 19 nt, Artificial Sequence
  Description of Artificial Sequence: Synthetic oligonucleotide
  Antisense Strand to SEQ ID NO: 449755
ucuuucacaaauaacucug

SEQ ID NO: 449757 - RNA, 19 nt, Artificial Sequence
  Description of Artificial Sequence: Synthetic oligonucleotide
  Sense strand starting at position 79 of SEQ ID NO: 316912
agaguuauuugugaaagac

SEQ ID NO: 449758 - RNA, 19 nt, Artificial Sequence
  Description of Artificial Sequence: Synthetic oligonucleotide
  Antisense Strand to SEQ ID NO: 449757
gucuuucacaaauaacucu

SEQ ID NO: 449759 - RNA, 19 nt, Artificial Sequence
  Description of Artificial Sequence: Synthetic oligonucleotide
  Sense strand starting at position 115 of SEQ ID NO: 316912
ucaaguucccacugugaga

SEQ ID NO: 449760 - RNA, 19 nt, Artificial Sequence
  Description of Artificial Sequence: Synthetic oligonucleotide
  Antisense Strand to SEQ ID NO: 449759
ucucacagugggaacuuga

SEQ ID NO: 449761 - RNA, 19 nt, Artificial Sequence
  Description of Artificial Sequence: Synthetic oligonucleotide
  Sense strand starting at position 117 of SEQ ID NO: 316912
aaguucccacugugagaaa

SEQ ID NO: 449762 - RNA, 19 nt, Artificial Sequence
  Description of Artificial Sequence: Synthetic oligonucleotide
  Antisense Strand to SEQ ID NO: 449761
uuucucacagugggaacuu

SEQ ID NO: 449763 - RNA, 19 nt, Artificial Sequence
  Description of Artificial Sequence: Synthetic oligonucleotide
  Sense strand starting at position 118 of SEQ ID NO: 316912
aguucccacugugagaaau

SEQ ID NO: 449764 - RNA, 19 nt, Artificial Sequence
  Description of Artificial Sequence: Synthetic oligonucleotide
  Antisense Strand to SEQ ID NO: 449763
auuucucacagugggaacu

SEQ ID NO: 449765 - RNA, 19 nt, Artificial Sequence
  Description of Artificial Sequence: Synthetic oligonucleotide
  Sense strand starting at position 120 of SEQ ID NO: 316912
uucccacugugagaaauaa

SEQ ID NO: 449766 - RNA, 19 nt, Artificial Sequence
  Description of Artificial Sequence: Synthetic oligonucleotide
  Antisense Strand to SEQ ID NO: 449765
uuauuucucacagugggaa

SEQ ID NO: 449767 - RNA, 19 nt, Artificial Sequence
  Description of Artificial Sequence: Synthetic oligonucleotide
  Sense strand starting at position 209 of SEQ ID NO: 316912
ccaccaagauugugaaagu

SEQ ID NO: 449768 - RNA, 19 nt, Artificial Sequence
  Description of Artificial Sequence: Synthetic oligonucleotide
  Antisense Strand to SEQ ID NO: 449767
acuuucacaaucuuggugg

SEQ ID NO: 449769 - RNA, 19 nt, Artificial Sequence
  Description of Artificial Sequence: Synthetic oligonucleotide
  Sense strand starting at position 210 of SEQ ID NO: 316912
caccaagauugugaaaguu

SEQ ID NO: 449770 - RNA, 19 nt, Artificial Sequence
  Description of Artificial Sequence: Synthetic oligonucleotide
  Antisense Strand to SEQ ID NO: 449769
aacuuucacaaucuuggug

SEQ ID NO: 449771 - RNA, 19 nt, Artificial Sequence
  Description of Artificial Sequence: Synthetic oligonucleotide
  Sense strand starting at position 265 of SEQ ID NO: 316912
uagcgaugugccgauucca

SEQ ID NO: 449772 - RNA, 19 nt, Artificial Sequence
  Description of Artificial Sequence: Synthetic oligonucleotide
  Antisense Strand to SEQ ID NO: 449771
uggaaucggcacaucgcua

SEQ ID NO: 449773 - RNA, 19 nt, Artificial Sequence
  Description of Artificial Sequence: Synthetic oligonucleotide
  Sense strand starting at position 288 of SEQ ID NO: 316912
uuaugacccagcgggaaau

SEQ ID NO: 449774 - RNA, 19 nt, Artificial Sequence
  Description of Artificial Sequence: Synthetic oligonucleotide
  Antisense Strand to SEQ ID NO: 449773
auuucccgcugggucauaa

SEQ ID NO: 449775 - RNA, 19 nt, Artificial Sequence
  Description of Artificial Sequence: Synthetic oligonucleotide
  Sense strand starting at position 414 of SEQ ID NO: 316912
ccuaguccacgcuaggaaa

SEQ ID NO: 449776 - RNA, 19 nt, Artificial Sequence
  Description of Artificial Sequence: Synthetic oligonucleotide
  Antisense Strand to SEQ ID NO: 449775
uuuccuagcguggacuagg

SEQ ID NO: 449777 - RNA, 19 nt, Artificial Sequence
  Description of Artificial Sequence: Synthetic oligonucleotide
  Sense strand starting at position 1075 of SEQ ID NO: 316912
ggacaauccugagugguca

SEQ ID NO: 449778 - RNA, 19 nt, Artificial Sequence
  Description of Artificial Sequence: Synthetic oligonucleotide
  Antisense Strand to SEQ ID NO: 449777
ugaccacucaggauugucc

SEQ ID NO: 449779 - RNA, 19 nt, Artificial Sequence
  Description of Artificial Sequence: Synthetic oligonucleotide
  Sense strand starting at position 1076 of SEQ ID NO: 316912
gacaauccugaguggucaa

SEQ ID NO: 449780 - RNA, 19 nt, Artificial Sequence
  Description of Artificial Sequence: Synthetic oligonucleotide
  Antisense Strand to SEQ ID NO: 449779
uugaccacucaggauuguc

SEQ ID NO: 449781 - RNA, 19 nt, Artificial Sequence
  Description of Artificial Sequence: Synthetic oligonucleotide
  Sense strand starting at position 1179 of SEQ ID NO: 316912
gcaugagucugcgggcaca

SEQ ID NO: 449782 - RNA, 19 nt, Artificial Sequence
  Description of Artificial Sequence: Synthetic oligonucleotide
  Antisense Strand to SEQ ID NO: 449781
ugugcccgcagacucaugc

SEQ ID NO: 449783 - RNA, 19 nt, Artificial Sequence
  Description of Artificial Sequence: Synthetic oligonucleotide
  Sense strand starting at position 1256 of SEQ ID NO: 316912
cuuagaugucggugccaug

SEQ ID NO: 449784 - RNA, 19 nt, Artificial Sequence
  Description of Artificial Sequence: Synthetic oligonucleotide
  Antisense Strand to SEQ ID NO: 449783
cauggcaccgacaucuaag

SEQ ID NO: 449785 - RNA, 19 nt, Artificial Sequence
  Description of Artificial Sequence: Synthetic oligonucleotide
  Sense strand starting at position 1599 of SEQ ID NO: 316912
cagguacgaguaugaaagu

SEQ ID NO: 449786 - RNA, 19 nt, Artificial Sequence
  Description of Artificial Sequence: Synthetic oligonucleotide
  Antisense Strand to SEQ ID NO: 449785
acuuucauacucguaccug

SEQ ID NO: 449787 - RNA, 19 nt, Artificial Sequence
  Description of Artificial Sequence: Synthetic oligonucleotide
  Sense strand starting at position 1602 of SEQ ID NO: 316912
guacgaguaugaaaguguu

SEQ ID NO: 449788 - RNA, 19 nt, Artificial Sequence
  Description of Artificial Sequence: Synthetic oligonucleotide
  Antisense Strand to SEQ ID NO: 449787
aacacuuucauacucguac

SEQ ID NO: 449789 - RNA, 19 nt, Artificial Sequence
  Description of Artificial Sequence: Synthetic oligonucleotide
  Sense strand starting at position 1608 of SEQ ID NO: 316912
guaugaaaguguuugcaag

SEQ ID NO: 449790 - RNA, 19 nt, Artificial Sequence
  Description of Artificial Sequence: Synthetic oligonucleotide
  Antisense Strand to SEQ ID NO: 449789
cuugcaaacacuuucauac

SEQ ID NO: 449791 - RNA, 19 nt, Artificial Sequence
  Description of Artificial Sequence: Synthetic oligonucleotide
  Sense strand starting at position 1609 of SEQ ID NO: 316912
uaugaaaguguuugcaaga

SEQ ID NO: 449792 - RNA, 19 nt, Artificial Sequence
  Description of Artificial Sequence: Synthetic oligonucleotide
  Antisense Strand to SEQ ID NO: 449791
ucuugcaaacacuuucaua

SEQ ID NO: 449793 - RNA, 19 nt, Artificial Sequence
  Description of Artificial Sequence: Synthetic oligonucleotide
  Sense strand starting at position 1610 of SEQ ID NO: 316912
augaaaguguuugcaagac

SEQ ID NO: 449794 - RNA, 19 nt, Artificial Sequence
  Description of Artificial Sequence: Synthetic oligonucleotide
  Antisense Strand to SEQ ID NO: 449793
gucuugcaaacacuuucau

SEQ ID NO: 449795 - RNA, 19 nt, Artificial Sequence
  Description of Artificial Sequence: Synthetic oligonucleotide
  Sense strand starting at position 2016 of SEQ ID NO: 316912
gucacuaacacguggaacu

SEQ ID NO: 449796 - RNA, 19 nt, Artificial Sequence
  Description of Artificial Sequence: Synthetic oligonucleotide
  Antisense Strand to SEQ ID NO: 449795
aguuccacguguuagugac

SEQ ID NO: 449797 - RNA, 19 nt, Artificial Sequence
  Description of Artificial Sequence: Synthetic oligonucleotide
  Sense strand starting at position 2142 of SEQ ID NO: 316912
agaagcuguggguaucaaa

SEQ ID NO: 449798 - RNA, 19 nt, Artificial Sequence
  Description of Artificial Sequence: Synthetic oligonucleotide
  Antisense Strand to SEQ ID NO: 449797
uuugauacccacagcuucu

SEQ ID NO: 449799 - RNA, 19 nt, Artificial Sequence
  Description of Artificial Sequence: Synthetic oligonucleotide
  Sense strand starting at position 2299 of SEQ ID NO: 316912
gcgccauuagcggacaaau

SEQ ID NO: 449800 - RNA, 19 nt, Artificial Sequence
  Description of Artificial Sequence: Synthetic oligonucleotide
  Antisense Strand to SEQ ID NO: 449799
auuuguccgcuaauggcgc

SEQ ID NO: 449801 - RNA, 19 nt, Artificial Sequence
  Description of Artificial Sequence: Synthetic oligonucleotide
  Sense strand starting at position 3194 of SEQ ID NO: 316912
guccucaacucucgagaca

SEQ ID NO: 449802 - RNA, 19 nt, Artificial Sequence
  Description of Artificial Sequence: Synthetic oligonucleotide
  Antisense Strand to SEQ ID NO: 449801
ugucucgagaguugaggac

SEQ ID NO: 449803 - RNA, 19 nt, Artificial Sequence
  Description of Artificial Sequence: Synthetic oligonucleotide
  Sense strand starting at position 3292 of SEQ ID NO: 316912
gcucucugguugcucagaa

SEQ ID NO: 449804 - RNA, 19 nt, Artificial Sequence
  Description of Artificial Sequence: Synthetic oligonucleotide
  Antisense Strand to SEQ ID NO: 449803
uucugagcaaccagagagc

SEQ ID NO: 449805 - RNA, 19 nt, Artificial Sequence
  Description of Artificial Sequence: Synthetic oligonucleotide
  Sense strand starting at position 3502 of SEQ ID NO: 316912
aagguauguucccaccuga

SEQ ID NO: 449806 - RNA, 19 nt, Artificial Sequence
  Description of Artificial Sequence: Synthetic oligonucleotide
  Antisense Strand to SEQ ID NO: 449805
ucaggugggaacauaccuu

SEQ ID NO: 449807 - RNA, 19 nt, Artificial Sequence
  Description of Artificial Sequence: Synthetic oligonucleotide
  Sense strand starting at position 3567 of SEQ ID NO: 316912
uaaucaucguaauagacgu

SEQ ID NO: 449808 - RNA, 19 nt, Artificial Sequence
  Description of Artificial Sequence: Synthetic oligonucleotide
  Antisense Strand to SEQ ID NO: 449807
acgucuauuacgaugauua

SEQ ID NO: 449809 - RNA, 19 nt, Artificial Sequence
  Description of Artificial Sequence: Synthetic oligonucleotide
  Sense strand starting at position 3574 of SEQ ID NO: 316912
cguaauagacgucaacaug

SEQ ID NO: 449810 - RNA, 19 nt, Artificial Sequence
  Description of Artificial Sequence: Synthetic oligonucleotide
  Antisense Strand to SEQ ID NO: 449809
cauguugacgucuauuacg

SEQ ID NO: 449811 - RNA, 19 nt, Artificial Sequence
  Description of Artificial Sequence: Synthetic oligonucleotide
  Sense strand starting at position 476 of SEQ ID NO: 316913
guuuaugagucccugagaa

SEQ ID NO: 449812 - RNA, 19 nt, Artificial Sequence
  Description of Artificial Sequence: Synthetic oligonucleotide
  Antisense Strand to SEQ ID NO: 449811
uucucagggacucauaaac

SEQ ID NO: 449813 - RNA, 19 nt, Artificial Sequence
  Description of Artificial Sequence: Synthetic oligonucleotide
  Sense strand starting at position 478 of SEQ ID NO: 316913
uuaugagucccugagaagc

SEQ ID NO: 449814 - RNA, 19 nt, Artificial Sequence
  Description of Artificial Sequence: Synthetic oligonucleotide
  Antisense Strand to SEQ ID NO: 449813
gcuucucagggacucauaa

SEQ ID NO: 449815 - RNA, 19 nt, Artificial Sequence
  Description of Artificial Sequence: Synthetic oligonucleotide
  Sense strand starting at position 589 of SEQ ID NO: 316913
uuagucucucaagacaugu

SEQ ID NO: 449816 - RNA, 19 nt, Artificial Sequence
  Description of Artificial Sequence: Synthetic oligonucleotide
  Antisense Strand to SEQ ID NO: 449815
acaugucuugagagacuaa

SEQ ID NO: 449817 - RNA, 19 nt, Artificial Sequence
  Description of Artificial Sequence: Synthetic oligonucleotide
  Sense strand starting at position 931 of SEQ ID NO: 316913
ggcauaaugucacugggau

SEQ ID NO: 449818 - RNA, 19 nt, Artificial Sequence
  Description of Artificial Sequence: Synthetic oligonucleotide
  Antisense Strand to SEQ ID NO: 449817
aucccagugacauuaugcc

SEQ ID NO: 449819 - RNA, 19 nt, Artificial Sequence
  Description of Artificial Sequence: Synthetic oligonucleotide
  Sense strand starting at position 932 of SEQ ID NO: 316913
gcauaaugucacugggaua

SEQ ID NO: 449820 - RNA, 19 nt, Artificial Sequence
  Description of Artificial Sequence: Synthetic oligonucleotide
  Antisense Strand to SEQ ID NO: 449819
uaucccagugacauuaugc

SEQ ID NO: 449821 - RNA, 19 nt, Artificial Sequence
  Description of Artificial Sequence: Synthetic oligonucleotide
  Sense strand starting at position 1020 of SEQ ID NO: 316913
agucuugcagagcaaauua

SEQ ID NO: 449822 - RNA, 19 nt, Artificial Sequence
  Description of Artificial Sequence: Synthetic oligonucleotide
  Antisense Strand to SEQ ID NO: 449821
uaauuugcucugcaagacu

SEQ ID NO: 449823 - RNA, 19 nt, Artificial Sequence
  Description of Artificial Sequence: Synthetic oligonucleotide
  Sense strand starting at position 1052 of SEQ ID NO: 316913
uaccgaauacuugagucau

SEQ ID NO: 449824 - RNA, 19 nt, Artificial Sequence
  Description of Artificial Sequence: Synthetic oligonucleotide
  Antisense Strand to SEQ ID NO: 449823
augacucaaguauucggua

SEQ ID NO: 449825 - RNA, 19 nt, Artificial Sequence
  Description of Artificial Sequence: Synthetic oligonucleotide
  Sense strand starting at position 1285 of SEQ ID NO: 316913
ucaggauuauaagugaguu

SEQ ID NO: 449826 - RNA, 19 nt, Artificial Sequence
  Description of Artificial Sequence: Synthetic oligonucleotide
  Antisense Strand to SEQ ID NO: 449825
aacucacuuauaauccuga

SEQ ID NO: 449827 - RNA, 19 nt, Artificial Sequence
  Description of Artificial Sequence: Synthetic oligonucleotide
  Sense strand starting at position 1286 of SEQ ID NO: 316913
caggauuauaagugaguug

SEQ ID NO: 449828 - RNA, 19 nt, Artificial Sequence
  Description of Artificial Sequence: Synthetic oligonucleotide
  Antisense Strand to SEQ ID NO: 449827
caacucacuuauaauccug

SEQ ID NO: 449829 - RNA, 19 nt, Artificial Sequence
  Description of Artificial Sequence: Synthetic oligonucleotide
  Sense strand starting at position 1289 of SEQ ID NO: 316913
gauuauaagugaguuggau

SEQ ID NO: 449830 - RNA, 19 nt, Artificial Sequence
  Description of Artificial Sequence: Synthetic oligonucleotide
  Antisense Strand to SEQ ID NO: 449829
auccaacucacuuauaauc

SEQ ID NO: 449831 - RNA, 19 nt, Artificial Sequence
  Description of Artificial Sequence: Synthetic oligonucleotide
  Sense strand starting at position 1352 of SEQ ID NO: 316913
gauguaagaugucuuccaa

SEQ ID NO: 449832 - RNA, 19 nt, Artificial Sequence
  Description of Artificial Sequence: Synthetic oligonucleotide
  Antisense Strand to SEQ ID NO: 449831
uuggaagacaucuuacauc

SEQ ID NO: 449833 - RNA, 19 nt, Artificial Sequence
  Description of Artificial Sequence: Synthetic oligonucleotide
  Sense strand starting at position 1387 of SEQ ID NO: 316913
ucuacuuugguuugauaag

SEQ ID NO: 449834 - RNA, 19 nt, Artificial Sequence
  Description of Artificial Sequence: Synthetic oligonucleotide
  Antisense Strand to SEQ ID NO: 449833
cuuaucaaaccaaaguaga

SEQ ID NO: 449835 - RNA, 19 nt, Artificial Sequence
  Description of Artificial Sequence: Synthetic oligonucleotide
  Sense strand starting at position 1393 of SEQ ID NO: 316913
uugguuugauaaguagaca

SEQ ID NO: 449836 - RNA, 19 nt, Artificial Sequence
  Description of Artificial Sequence: Synthetic oligonucleotide
  Antisense Strand to SEQ ID NO: 449835
ugucuacuuaucaaaccaa

SEQ ID NO: 449837 - RNA, 19 nt, Artificial Sequence
  Description of Artificial Sequence: Synthetic oligonucleotide
  Sense strand starting at position 1412 of SEQ ID NO: 316913
ggaaaucugcaaugccaca

SEQ ID NO: 449838 - RNA, 19 nt, Artificial Sequence
  Description of Artificial Sequence: Synthetic oligonucleotide
  Antisense Strand to SEQ ID NO: 449837
uguggcauugcagauuucc

SEQ ID NO: 449839 - RNA, 19 nt, Artificial Sequence
  Description of Artificial Sequence: Synthetic oligonucleotide
  Sense strand starting at position 1546 of SEQ ID NO: 316913
uuacaagugccagaugaua

SEQ ID NO: 449840 - RNA, 19 nt, Artificial Sequence
  Description of Artificial Sequence: Synthetic oligonucleotide
  Antisense Strand to SEQ ID NO: 449839
uaucaucuggcacuuguaa

SEQ ID NO: 449841 - RNA, 19 nt, Artificial Sequence
  Description of Artificial Sequence: Synthetic oligonucleotide
  Sense strand starting at position 1557 of SEQ ID NO: 316913
agaugauauuuaugaggga

SEQ ID NO: 449842 - RNA, 19 nt, Artificial Sequence
  Description of Artificial Sequence: Synthetic oligonucleotide
  Antisense Strand to SEQ ID NO: 449841
ucccucauaaauaucaucu

SEQ ID NO: 449843 - RNA, 19 nt, Artificial Sequence
  Description of Artificial Sequence: Synthetic oligonucleotide
  Sense strand starting at position 1560 of SEQ ID NO: 316913
ugauauuuaugagggaauu

SEQ ID NO: 449844 - RNA, 19 nt, Artificial Sequence
  Description of Artificial Sequence: Synthetic oligonucleotide
  Antisense Strand to SEQ ID NO: 449843
aauucccucauaaauauca

SEQ ID NO: 449845 - RNA, 19 nt, Artificial Sequence
  Description of Artificial Sequence: Synthetic oligonucleotide
  Sense strand starting at position 1659 of SEQ ID NO: 316913
gcagcaguugucucuggua

SEQ ID NO: 449846 - RNA, 19 nt, Artificial Sequence
  Description of Artificial Sequence: Synthetic oligonucleotide
  Antisense Strand to SEQ ID NO: 449845
uaccagagacaacugcugc

SEQ ID NO: 449847 - RNA, 19 nt, Artificial Sequence
  Description of Artificial Sequence: Synthetic oligonucleotide
  Sense strand starting at position 1933 of SEQ ID NO: 316913
auguaagcuccugggauag

SEQ ID NO: 449848 - RNA, 19 nt, Artificial Sequence
  Description of Artificial Sequence: Synthetic oligonucleotide
  Antisense Strand to SEQ ID NO: 449847
cuaucccaggagcuuacau

SEQ ID NO: 449849 - RNA, 19 nt, Artificial Sequence
  Description of Artificial Sequence: Synthetic oligonucleotide
  Sense strand starting at position 2261 of SEQ ID NO: 316913
cuagucuauccuuaagaug

SEQ ID NO: 449850 - RNA, 19 nt, Artificial Sequence
  Description of Artificial Sequence: Synthetic oligonucleotide
  Antisense Strand to SEQ ID NO: 449849
caucuuaaggauagacuag

SEQ ID NO: 449851 - RNA, 19 nt, Artificial Sequence
  Description of Artificial Sequence: Synthetic oligonucleotide
  Sense strand starting at position 2313 of SEQ ID NO: 316913
acuuucuuagcuuagggau

SEQ ID NO: 449852 - RNA, 19 nt, Artificial Sequence
  Description of Artificial Sequence: Synthetic oligonucleotide
  Antisense Strand to SEQ ID NO: 449851
aucccuaagcuaagaaagu

SEQ ID NO: 449853 - RNA, 19 nt, Artificial Sequence
  Description of Artificial Sequence: Synthetic oligonucleotide
  Sense strand starting at position 2320 of SEQ ID NO: 316913
uagcuuagggaucaguuaa

SEQ ID NO: 449854 - RNA, 19 nt, Artificial Sequence
  Description of Artificial Sequence: Synthetic oligonucleotide
  Antisense Strand to SEQ ID NO: 449853
uuaacugaucccuaagcua

SEQ ID NO: 449855 - RNA, 19 nt, Artificial Sequence
  Description of Artificial Sequence: Synthetic oligonucleotide
  Sense strand starting at position 2350 of SEQ ID NO: 316913
uagccuagggaucaguuaa

SEQ ID NO: 449856 - RNA, 19 nt, Artificial Sequence
  Description of Artificial Sequence: Synthetic oligonucleotide
  Antisense Strand to SEQ ID NO: 449855
uuaacugaucccuaggcua

SEQ ID NO: 449857 - RNA, 19 nt, Artificial Sequence
  Description of Artificial Sequence: Synthetic oligonucleotide
  Sense strand starting at position 2429 of SEQ ID NO: 316913
ucacuauucccaggaauga

SEQ ID NO: 449858 - RNA, 19 nt, Artificial Sequence
  Description of Artificial Sequence: Synthetic oligonucleotide
  Antisense Strand to SEQ ID NO: 449857
ucauuccugggaauaguga

SEQ ID NO: 449859 - RNA, 19 nt, Artificial Sequence
  Description of Artificial Sequence: Synthetic oligonucleotide
  Sense strand starting at position 2784 of SEQ ID NO: 316913
gagauuuaucacugggcgu

SEQ ID NO: 449860 - RNA, 19 nt, Artificial Sequence
  Description of Artificial Sequence: Synthetic oligonucleotide
  Antisense Strand to SEQ ID NO: 449859
acgcccagugauaaaucuc

SEQ ID NO: 449861 - RNA, 19 nt, Artificial Sequence
  Description of Artificial Sequence: Synthetic oligonucleotide
  Sense strand starting at position 2785 of SEQ ID NO: 316913
agauuuaucacugggcguu

SEQ ID NO: 449862 - RNA, 19 nt, Artificial Sequence
  Description of Artificial Sequence: Synthetic oligonucleotide
  Antisense Strand to SEQ ID NO: 449861
aacgcccagugauaaaucu

SEQ ID NO: 449863 - RNA, 19 nt, Artificial Sequence
  Description of Artificial Sequence: Synthetic oligonucleotide
  Sense strand starting at position 2786 of SEQ ID NO: 316913
gauuuaucacugggcguua

SEQ ID NO: 449864 - RNA, 19 nt, Artificial Sequence
  Description of Artificial Sequence: Synthetic oligonucleotide
  Antisense Strand to SEQ ID NO: 449863
uaacgcccagugauaaauc

SEQ ID NO: 449865 - RNA, 19 nt, Artificial Sequence
  Description of Artificial Sequence: Synthetic oligonucleotide
  Sense strand starting at position 2895 of SEQ ID NO: 316913
gagaaaugccuccaguuug

SEQ ID NO: 449866 - RNA, 19 nt, Artificial Sequence
  Description of Artificial Sequence: Synthetic oligonucleotide
  Antisense Strand to SEQ ID NO: 449865
caaacuggaggcauuucuc

SEQ ID NO: 449867 - RNA, 19 nt, Artificial Sequence
  Description of Artificial Sequence: Synthetic oligonucleotide
  Sense strand starting at position 3173 of SEQ ID NO: 316913
ucaaucaagucaguugaau

SEQ ID NO: 449868 - RNA, 19 nt, Artificial Sequence
  Description of Artificial Sequence: Synthetic oligonucleotide
  Antisense Strand to SEQ ID NO: 449867
auucaacugacuugauuga

SEQ ID NO: 449869 - RNA, 19 nt, Artificial Sequence
  Description of Artificial Sequence: Synthetic oligonucleotide
  Sense strand starting at position 3274 of SEQ ID NO: 316913
cuguauccacugcauuaga

SEQ ID NO: 449870 - RNA, 19 nt, Artificial Sequence
  Description of Artificial Sequence: Synthetic oligonucleotide
  Antisense Strand to SEQ ID NO: 449869
ucuaaugcaguggauacag

SEQ ID NO: 449871 - RNA, 19 nt, Artificial Sequence
  Description of Artificial Sequence: Synthetic oligonucleotide
  Sense strand starting at position 3282 of SEQ ID NO: 316913
acugcauuagauuguaaac

SEQ ID NO: 449872 - RNA, 19 nt, Artificial Sequence
  Description of Artificial Sequence: Synthetic oligonucleotide
  Antisense Strand to SEQ ID NO: 449871
guuuacaaucuaaugcagu

SEQ ID NO: 449873 - RNA, 19 nt, Artificial Sequence
  Description of Artificial Sequence: Synthetic oligonucleotide
  Sense strand starting at position 3652 of SEQ ID NO: 316913
uguagcucaauuggagaau

SEQ ID NO: 449874 - RNA, 19 nt, Artificial Sequence
  Description of Artificial Sequence: Synthetic oligonucleotide
  Antisense Strand to SEQ ID NO: 449873
auucuccaauugagcuaca

SEQ ID NO: 449875 - RNA, 19 nt, Artificial Sequence
  Description of Artificial Sequence: Synthetic oligonucleotide
  Sense strand starting at position 3733 of SEQ ID NO: 316913
caauuuacuggcuguguga

SEQ ID NO: 449876 - RNA, 19 nt, Artificial Sequence
  Description of Artificial Sequence: Synthetic oligonucleotide
  Antisense Strand to SEQ ID NO: 449875
ucacacagccaguaaauug

SEQ ID NO: 449877 - RNA, 19 nt, Artificial Sequence
  Description of Artificial Sequence: Synthetic oligonucleotide
  Sense strand starting at position 3755 of SEQ ID NO: 316913
aguacaaguuacucaaucu

SEQ ID NO: 449878 - RNA, 19 nt, Artificial Sequence
  Description of Artificial Sequence: Synthetic oligonucleotide
  Antisense Strand to SEQ ID NO: 449877
agauugaguaacuuguacu

SEQ ID NO: 449879 - RNA, 19 nt, Artificial Sequence
  Description of Artificial Sequence: Synthetic oligonucleotide
  Sense strand starting at position 3832 of SEQ ID NO: 316913
acuuaauagggcuauuacu

SEQ ID NO: 449880 - RNA, 19 nt, Artificial Sequence
  Description of Artificial Sequence: Synthetic oligonucleotide
  Antisense Strand to SEQ ID NO: 449879
aguaauagcccuauuaagu

SEQ ID NO: 449881 - RNA, 19 nt, Artificial Sequence
  Description of Artificial Sequence: Synthetic oligonucleotide
  Sense strand starting at position 3851 of SEQ ID NO: 316913
aagauuuagugggauaaug

SEQ ID NO: 449882 - RNA, 19 nt, Artificial Sequence
  Description of Artificial Sequence: Synthetic oligonucleotide
  Antisense Strand to SEQ ID NO: 449881
cauuaucccacuaaaucuu

SEQ ID NO: 449883 - RNA, 19 nt, Artificial Sequence
  Description of Artificial Sequence: Synthetic oligonucleotide
  Sense strand starting at position 3862 of SEQ ID NO: 316913
ggauaauguguugagcaca

SEQ ID NO: 449884 - RNA, 19 nt, Artificial Sequence
  Description of Artificial Sequence: Synthetic oligonucleotide
  Antisense Strand to SEQ ID NO: 449883
ugugcucaacacauuaucc

SEQ ID NO: 449885 - RNA, 19 nt, Artificial Sequence
  Description of Artificial Sequence: Synthetic oligonucleotide
  Sense strand starting at position 3865 of SEQ ID NO: 316913
uaauguguugagcacauua

SEQ ID NO: 449886 - RNA, 19 nt, Artificial Sequence
  Description of Artificial Sequence: Synthetic oligonucleotide
  Antisense Strand to SEQ ID NO: 449885
uaaugugcucaacacauua

SEQ ID NO: 449887 - RNA, 19 nt, Artificial Sequence
  Description of Artificial Sequence: Synthetic oligonucleotide
  Sense strand starting at position 3912 of SEQ ID NO: 316913
guuuguaagguuuaugaau

SEQ ID NO: 449888 - RNA, 19 nt, Artificial Sequence
  Description of Artificial Sequence: Synthetic oligonucleotide
  Antisense Strand to SEQ ID NO: 449887
auucauaaaccuuacaaac

SEQ ID NO: 449889 - RNA, 19 nt, Artificial Sequence
  Description of Artificial Sequence: Synthetic oligonucleotide
  Sense strand starting at position 3981 of SEQ ID NO: 316913
agagcuauuauugguagau

SEQ ID NO: 449890 - RNA, 19 nt, Artificial Sequence
  Description of Artificial Sequence: Synthetic oligonucleotide
  Antisense Strand to SEQ ID NO: 449889
aucuaccaauaauagcucu

SEQ ID NO: 449891 - RNA, 19 nt, Artificial Sequence
  Description of Artificial Sequence: Synthetic oligonucleotide
  Sense strand starting at position 30 of SEQ ID NO: 316914
agacaauagugagaaauga

SEQ ID NO: 449892 - RNA, 19 nt, Artificial Sequence
  Description of Artificial Sequence: Synthetic oligonucleotide
  Antisense Strand to SEQ ID NO: 449891
ucauuucucacuauugucu

SEQ ID NO: 449893 - RNA, 19 nt, Artificial Sequence
  Description of Artificial Sequence: Synthetic oligonucleotide
  Sense strand starting at position 61 of SEQ ID NO: 316914
uaaagaaccucuguuggga

SEQ ID NO: 449894 - RNA, 19 nt, Artificial Sequence
  Description of Artificial Sequence: Synthetic oligonucleotide
  Antisense Strand to SEQ ID NO: 449893
ucccaacagagguucuuua

SEQ ID NO: 449895 - RNA, 19 nt, Artificial Sequence
  Description of Artificial Sequence: Synthetic oligonucleotide
  Sense strand starting at position 209 of SEQ ID NO: 316914
cacuaaggguucucaugaa

SEQ ID NO: 449896 - RNA, 19 nt, Artificial Sequence
  Description of Artificial Sequence: Synthetic oligonucleotide
  Antisense Strand to SEQ ID NO: 449895
uucaugagaacccuuagug

SEQ ID NO: 449897 - RNA, 19 nt, Artificial Sequence
  Description of Artificial Sequence: Synthetic oligonucleotide
  Sense strand starting at position 356 of SEQ ID NO: 316914
cccagugaauuaguggaga

SEQ ID NO: 449898 - RNA, 19 nt, Artificial Sequence
  Description of Artificial Sequence: Synthetic oligonucleotide
  Antisense Strand to SEQ ID NO: 449897
ucuccacuaauucacuggg

SEQ ID NO: 449899 - RNA, 19 nt, Artificial Sequence
  Description of Artificial Sequence: Synthetic oligonucleotide
  Sense strand starting at position 358 of SEQ ID NO: 316914
cagugaauuaguggagaga

SEQ ID NO: 449900 - RNA, 19 nt, Artificial Sequence
  Description of Artificial Sequence: Synthetic oligonucleotide
  Antisense Strand to SEQ ID NO: 449899
ucucuccacuaauucacug

SEQ ID NO: 449901 - RNA, 19 nt, Artificial Sequence
  Description of Artificial Sequence: Synthetic oligonucleotide
  Sense strand starting at position 360 of SEQ ID NO: 316914
gugaauuaguggagagaag

SEQ ID NO: 449902 - RNA, 19 nt, Artificial Sequence
  Description of Artificial Sequence: Synthetic oligonucleotide
  Antisense Strand to SEQ ID NO: 449901
cuucucuccacuaauucac

SEQ ID NO: 449903 - RNA, 19 nt, Artificial Sequence
  Description of Artificial Sequence: Synthetic oligonucleotide
  Sense strand starting at position 407 of SEQ ID NO: 316914
ucaauauuguuggcucaag

SEQ ID NO: 449904 - RNA, 19 nt, Artificial Sequence
  Description of Artificial Sequence: Synthetic oligonucleotide
  Antisense Strand to SEQ ID NO: 449903
cuugagccaacaauauuga

SEQ ID NO: 449905 - RNA, 19 nt, Artificial Sequence
  Description of Artificial Sequence: Synthetic oligonucleotide
  Sense strand starting at position 408 of SEQ ID NO: 316914
caauauuguuggcucaaga

SEQ ID NO: 449906 - RNA, 19 nt, Artificial Sequence
  Description of Artificial Sequence: Synthetic oligonucleotide
  Antisense Strand to SEQ ID NO: 449905
ucuugagccaacaauauug

SEQ ID NO: 449907 - RNA, 19 nt, Artificial Sequence
  Description of Artificial Sequence: Synthetic oligonucleotide
  Sense strand starting at position 654 of SEQ ID NO: 316914
gguagagguuucuucaagu

SEQ ID NO: 449908 - RNA, 19 nt, Artificial Sequence
  Description of Artificial Sequence: Synthetic oligonucleotide
  Antisense Strand to SEQ ID NO: 449907
acuugaagaaaccucuacc

SEQ ID NO: 449909 - RNA, 19 nt, Artificial Sequence
  Description of Artificial Sequence: Synthetic oligonucleotide
  Sense strand starting at position 716 of SEQ ID NO: 316914
ucuguaauacauggugauc

SEQ ID NO: 449910 - RNA, 19 nt, Artificial Sequence
  Description of Artificial Sequence: Synthetic oligonucleotide
  Antisense Strand to SEQ ID NO: 449909
gaucaccauguauuacaga

SEQ ID NO: 449911 - RNA, 19 nt, Artificial Sequence
  Description of Artificial Sequence: Synthetic oligonucleotide
  Sense strand starting at position 756 of SEQ ID NO: 316914
ucaguuaacuuccuguaau

SEQ ID NO: 449912 - RNA, 19 nt, Artificial Sequence
  Description of Artificial Sequence: Synthetic oligonucleotide
  Antisense Strand to SEQ ID NO: 449911
auuacaggaaguuaacuga

SEQ ID NO: 449913 - RNA, 19 nt, Artificial Sequence
  Description of Artificial Sequence: Synthetic oligonucleotide
  Sense strand starting at position 1106 of SEQ ID NO: 316914
uccggacuugagcagaauu

SEQ ID NO: 449914 - RNA, 19 nt, Artificial Sequence
  Description of Artificial Sequence: Synthetic oligonucleotide
  Antisense Strand to SEQ ID NO: 449913
aauucugcucaaguccgga

SEQ ID NO: 449915 - RNA, 19 nt, Artificial Sequence
  Description of Artificial Sequence: Synthetic oligonucleotide
  Sense strand starting at position 1108 of SEQ ID NO: 316914
cggacuugagcagaauucu

SEQ ID NO: 449916 - RNA, 19 nt, Artificial Sequence
  Description of Artificial Sequence: Synthetic oligonucleotide
  Antisense Strand to SEQ ID NO: 449915
agaauucugcucaaguccg

SEQ ID NO: 449917 - RNA, 19 nt, Artificial Sequence
  Description of Artificial Sequence: Synthetic oligonucleotide
  Sense strand starting at position 1114 of SEQ ID NO: 316914
ugagcagaauucuccaaca

SEQ ID NO: 449918 - RNA, 19 nt, Artificial Sequence
  Description of Artificial Sequence: Synthetic oligonucleotide
  Antisense Strand to SEQ ID NO: 449917
uguuggagaauucugcuca

SEQ ID NO: 449919 - RNA, 19 nt, Artificial Sequence
  Description of Artificial Sequence: Synthetic oligonucleotide
  Sense strand starting at position 1145 of SEQ ID NO: 316914
gcagaugugcuagagauag

SEQ ID NO: 449920 - RNA, 19 nt, Artificial Sequence
  Description of Artificial Sequence: Synthetic oligonucleotide
  Antisense Strand to SEQ ID NO: 449919
cuaucucuagcacaucugc

SEQ ID NO: 449921 - RNA, 19 nt, Artificial Sequence
  Description of Artificial Sequence: Synthetic oligonucleotide
  Sense strand starting at position 1190 of SEQ ID NO: 316914
ucugcaugaggucauaauc

SEQ ID NO: 449922 - RNA, 19 nt, Artificial Sequence
  Description of Artificial Sequence: Synthetic oligonucleotide
  Antisense Strand to SEQ ID NO: 449921
gauuaugaccucaugcaga

SEQ ID NO: 449923 - RNA, 19 nt, Artificial Sequence
  Description of Artificial Sequence: Synthetic oligonucleotide
  Sense strand starting at position 2141 of SEQ ID NO: 316914
cccauaugaguuggauaug

SEQ ID NO: 449924 - RNA, 19 nt, Artificial Sequence
  Description of Artificial Sequence: Synthetic oligonucleotide
  Antisense Strand to SEQ ID NO: 449923
cauauccaacucauauggg

SEQ ID NO: 449925 - RNA, 19 nt, Artificial Sequence
  Description of Artificial Sequence: Synthetic oligonucleotide
  Sense strand starting at position 2335 of SEQ ID NO: 316914
guaaguauugcucacuuua

SEQ ID NO: 449926 - RNA, 19 nt, Artificial Sequence
  Description of Artificial Sequence: Synthetic oligonucleotide
  Antisense Strand to SEQ ID NO: 449925
uaaagugagcaauacuuac

SEQ ID NO: 449927 - RNA, 19 nt, Artificial Sequence
  Description of Artificial Sequence: Synthetic oligonucleotide
  Sense strand starting at position 2435 of SEQ ID NO: 316914
uggagcauuaggcaugagu

SEQ ID NO: 449928 - RNA, 19 nt, Artificial Sequence
  Description of Artificial Sequence: Synthetic oligonucleotide
  Antisense Strand to SEQ ID NO: 449927
acucaugccuaaugcucca

SEQ ID NO: 449929 - RNA, 19 nt, Artificial Sequence
  Description of Artificial Sequence: Synthetic oligonucleotide
  Sense strand starting at position 2437 of SEQ ID NO: 316914
gagcauuaggcaugaguga

SEQ ID NO: 449930 - RNA, 19 nt, Artificial Sequence
  Description of Artificial Sequence: Synthetic oligonucleotide
  Antisense Strand to SEQ ID NO: 449929
ucacucaugccuaaugcuc

SEQ ID NO: 449931 - RNA, 19 nt, Artificial Sequence
  Description of Artificial Sequence: Synthetic oligonucleotide
  Sense strand starting at position 2487 of SEQ ID NO: 316914
uaccaaucagugggucaaa

SEQ ID NO: 449932 - RNA, 19 nt, Artificial Sequence
  Description of Artificial Sequence: Synthetic oligonucleotide
  Antisense Strand to SEQ ID NO: 449931
uuugacccacugauuggua

SEQ ID NO: 449933 - RNA, 19 nt, Artificial Sequence
  Description of Artificial Sequence: Synthetic oligonucleotide
  Sense strand starting at position 2555 of SEQ ID NO: 316914
auaauaauggccuagcuca

SEQ ID NO: 449934 - RNA, 19 nt, Artificial Sequence
  Description of Artificial Sequence: Synthetic oligonucleotide
  Antisense Strand to SEQ ID NO: 449933
ugagcuaggccauuauuau

SEQ ID NO: 449935 - RNA, 19 nt, Artificial Sequence
  Description of Artificial Sequence: Synthetic oligonucleotide
  Sense strand starting at position 2711 of SEQ ID NO: 316914
gucacuuugccucaccaga

SEQ ID NO: 449936 - RNA, 19 nt, Artificial Sequence
  Description of Artificial Sequence: Synthetic oligonucleotide
  Antisense Strand to SEQ ID NO: 449935
ucuggugaggcaaagugac

SEQ ID NO: 449937 - RNA, 19 nt, Artificial Sequence
  Description of Artificial Sequence: Synthetic oligonucleotide
  Sense strand starting at position 2796 of SEQ ID NO: 316914
uuaagccacucuuuggaaa

SEQ ID NO: 449938 - RNA, 19 nt, Artificial Sequence
  Description of Artificial Sequence: Synthetic oligonucleotide
  Antisense Strand to SEQ ID NO: 449937
uuuccaaagaguggcuuaa

SEQ ID NO: 449939 - RNA, 19 nt, Artificial Sequence
  Description of Artificial Sequence: Synthetic oligonucleotide
  Sense strand starting at position 2974 of SEQ ID NO: 316914
ugggcuguuaccgaucuga

SEQ ID NO: 449940 - RNA, 19 nt, Artificial Sequence
  Description of Artificial Sequence: Synthetic oligonucleotide
  Antisense Strand to SEQ ID NO: 449939
ucagaucgguaacagccca

SEQ ID NO: 449941 - RNA, 19 nt, Artificial Sequence
  Description of Artificial Sequence: Synthetic oligonucleotide
  Sense strand starting at position 2983 of SEQ ID NO: 316914
accgaucugaugugaaaga

SEQ ID NO: 449942 - RNA, 19 nt, Artificial Sequence
  Description of Artificial Sequence: Synthetic oligonucleotide
  Antisense Strand to SEQ ID NO: 449941
ucuuucacaucagaucggu

SEQ ID NO: 449943 - RNA, 19 nt, Artificial Sequence
  Description of Artificial Sequence: Synthetic oligonucleotide
  Sense strand starting at position 3324 of SEQ ID NO: 316914
cagggcugccuugggaaua

SEQ ID NO: 449944 - RNA, 19 nt, Artificial Sequence
  Description of Artificial Sequence: Synthetic oligonucleotide
  Antisense Strand to SEQ ID NO: 449943
uauucccaaggcagcccug

SEQ ID NO: 449945 - RNA, 19 nt, Artificial Sequence
  Description of Artificial Sequence: Synthetic oligonucleotide
  Sense strand starting at position 3329 of SEQ ID NO: 316914
cugccuugggaauaagagu

SEQ ID NO: 449946 - RNA, 19 nt, Artificial Sequence
  Description of Artificial Sequence: Synthetic oligonucleotide
  Antisense Strand to SEQ ID NO: 449945
acucuuauucccaaggcag

SEQ ID NO: 449947 - RNA, 19 nt, Artificial Sequence
  Description of Artificial Sequence: Synthetic oligonucleotide
  Sense strand starting at position 3347 of SEQ ID NO: 316914
uggagauucuaggaauaga

SEQ ID NO: 449948 - RNA, 19 nt, Artificial Sequence
  Description of Artificial Sequence: Synthetic oligonucleotide
  Antisense Strand to SEQ ID NO: 449947
ucuauuccuagaaucucca

SEQ ID NO: 449949 - RNA, 19 nt, Artificial Sequence
  Description of Artificial Sequence: Synthetic oligonucleotide
  Sense strand starting at position 3376 of SEQ ID NO: 316914
ucagaaaguucugcuacuu

SEQ ID NO: 449950 - RNA, 19 nt, Artificial Sequence
  Description of Artificial Sequence: Synthetic oligonucleotide
  Antisense Strand to SEQ ID NO: 449949
aaguagcagaacuuucuga

SEQ ID NO: 449951 - RNA, 19 nt, Artificial Sequence
  Description of Artificial Sequence: Synthetic oligonucleotide
  Sense strand starting at position 3463 of SEQ ID NO: 316914
aggaaauacuuguuccauu

SEQ ID NO: 449952 - RNA, 19 nt, Artificial Sequence
  Description of Artificial Sequence: Synthetic oligonucleotide
  Antisense Strand to SEQ ID NO: 449951
aauggaacaaguauuuccu

SEQ ID NO: 449953 - RNA, 19 nt, Artificial Sequence
  Description of Artificial Sequence: Synthetic oligonucleotide
  Sense strand starting at position 3464 of SEQ ID NO: 316914
ggaaauacuuguuccauug

SEQ ID NO: 449954 - RNA, 19 nt, Artificial Sequence
  Description of Artificial Sequence: Synthetic oligonucleotide
  Antisense Strand to SEQ ID NO: 449953
caauggaacaaguauuucc

SEQ ID NO: 449955 - RNA, 19 nt, Artificial Sequence
  Description of Artificial Sequence: Synthetic oligonucleotide
  Sense strand starting at position 3475 of SEQ ID NO: 316914
uuccauugguuuguauaaa

SEQ ID NO: 449956 - RNA, 19 nt, Artificial Sequence
  Description of Artificial Sequence: Synthetic oligonucleotide
  Antisense Strand to SEQ ID NO: 449955
uuuauacaaaccaauggaa

SEQ ID NO: 449957 - RNA, 19 nt, Artificial Sequence
  Description of Artificial Sequence: Synthetic oligonucleotide
  Sense strand starting at position 3510 of SEQ ID NO: 316914
auguaugguccuuaccaag

SEQ ID NO: 449958 - RNA, 19 nt, Artificial Sequence
  Description of Artificial Sequence: Synthetic oligonucleotide
  Antisense Strand to SEQ ID NO: 449957
cuugguaaggaccauacau

SEQ ID NO: 449959 - RNA, 19 nt, Artificial Sequence
  Description of Artificial Sequence: Synthetic oligonucleotide
  Sense strand starting at position 3522 of SEQ ID NO: 316914
uaccaagaugccugguaca

SEQ ID NO: 449960 - RNA, 19 nt, Artificial Sequence
  Description of Artificial Sequence: Synthetic oligonucleotide
  Antisense Strand to SEQ ID NO: 449959
uguaccaggcaucuuggua

SEQ ID NO: 449961 - RNA, 19 nt, Artificial Sequence
  Description of Artificial Sequence: Synthetic oligonucleotide
  Sense strand starting at position 3535 of SEQ ID NO: 316914
gguacauaguuagcuauua

SEQ ID NO: 449962 - RNA, 19 nt, Artificial Sequence
  Description of Artificial Sequence: Synthetic oligonucleotide
  Antisense Strand to SEQ ID NO: 449961
uaauagcuaacuauguacc

SEQ ID NO: 449963 - RNA, 19 nt, Artificial Sequence
  Description of Artificial Sequence: Synthetic oligonucleotide
  Sense strand starting at position 3633 of SEQ ID NO: 316914
auguauuggguuuauagau

SEQ ID NO: 449964 - RNA, 19 nt, Artificial Sequence
  Description of Artificial Sequence: Synthetic oligonucleotide
  Antisense Strand to SEQ ID NO: 449963
aucuauaaacccaauacau

SEQ ID NO: 449965 - RNA, 19 nt, Artificial Sequence
  Description of Artificial Sequence: Synthetic oligonucleotide
  Sense strand starting at position 3740 of SEQ ID NO: 316914
aaugcuuggugaucaucua

SEQ ID NO: 449966 - RNA, 19 nt, Artificial Sequence
  Description of Artificial Sequence: Synthetic oligonucleotide
  Antisense Strand to SEQ ID NO: 449965
uagaugaucaccaagcauu

SEQ ID NO: 449967 - RNA, 19 nt, Artificial Sequence
  Description of Artificial Sequence: Synthetic oligonucleotide
  Sense strand starting at position 3741 of SEQ ID NO: 316914
augcuuggugaucaucuau

SEQ ID NO: 449968 - RNA, 19 nt, Artificial Sequence
  Description of Artificial Sequence: Synthetic oligonucleotide
  Antisense Strand to SEQ ID NO: 449967
auagaugaucaccaagcau

SEQ ID NO: 449969 - RNA, 19 nt, Artificial Sequence
  Description of Artificial Sequence: Synthetic oligonucleotide
  Sense strand starting at position 3855 of SEQ ID NO: 316914
uccagcuauuaauuggaua

SEQ ID NO: 449970 - RNA, 19 nt, Artificial Sequence
  Description of Artificial Sequence: Synthetic oligonucleotide
  Antisense Strand to SEQ ID NO: 449969
uauccaauuaauagcugga

SEQ ID NO: 449971 - RNA, 19 nt, Artificial Sequence
  Description of Artificial Sequence: Synthetic oligonucleotide
  Sense strand starting at position 78 of SEQ ID NO: 316915
uuaucaguagcuuaacgau

SEQ ID NO: 449972 - RNA, 19 nt, Artificial Sequence
  Description of Artificial Sequence: Synthetic oligonucleotide
  Antisense Strand to SEQ ID NO: 449971
aucguuaagcuacugauaa

SEQ ID NO: 449973 - RNA, 19 nt, Artificial Sequence
  Description of Artificial Sequence: Synthetic oligonucleotide
  Sense strand starting at position 92 of SEQ ID NO: 316915
acgauuauacuguauacuu

SEQ ID NO: 449974 - RNA, 19 nt, Artificial Sequence
  Description of Artificial Sequence: Synthetic oligonucleotide
  Antisense Strand to SEQ ID NO: 449973
aaguauacaguauaaucgu

SEQ ID NO: 449975 - RNA, 19 nt, Artificial Sequence
  Description of Artificial Sequence: Synthetic oligonucleotide
  Sense strand starting at position 124 of SEQ ID NO: 316915
acuuaagaguaacaaguua

SEQ ID NO: 449976 - RNA, 19 nt, Artificial Sequence
  Description of Artificial Sequence: Synthetic oligonucleotide
  Antisense Strand to SEQ ID NO: 449975
uaacuuguuacucuuaagu

SEQ ID NO: 449977 - RNA, 19 nt, Artificial Sequence
  Description of Artificial Sequence: Synthetic oligonucleotide
  Sense strand starting at position 206 of SEQ ID NO: 316915
auagaauuggcguaagauu

SEQ ID NO: 449978 - RNA, 19 nt, Artificial Sequence
  Description of Artificial Sequence: Synthetic oligonucleotide
  Antisense Strand to SEQ ID NO: 449977
aaucuuacgccaauucuau

SEQ ID NO: 449979 - RNA, 19 nt, Artificial Sequence
  Description of Artificial Sequence: Synthetic oligonucleotide
  Sense strand starting at position 215 of SEQ ID NO: 316915
gcguaagauuagguccuga

SEQ ID NO: 449980 - RNA, 19 nt, Artificial Sequence
  Description of Artificial Sequence: Synthetic oligonucleotide
  Antisense Strand to SEQ ID NO: 449979
ucaggaccuaaucuuacgc

SEQ ID NO: 449981 - RNA, 19 nt, Artificial Sequence
  Description of Artificial Sequence: Synthetic oligonucleotide
  Sense strand starting at position 295 of SEQ ID NO: 316915
gaagccaaugauuguaaga

SEQ ID NO: 449982 - RNA, 19 nt, Artificial Sequence
  Description of Artificial Sequence: Synthetic oligonucleotide
  Antisense Strand to SEQ ID NO: 449981
ucuuacaaucauuggcuuc

SEQ ID NO: 449983 - RNA, 19 nt, Artificial Sequence
  Description of Artificial Sequence: Synthetic oligonucleotide
  Sense strand starting at position 297 of SEQ ID NO: 316915
agccaaugauuguaagaaa

SEQ ID NO: 449984 - RNA, 19 nt, Artificial Sequence
  Description of Artificial Sequence: Synthetic oligonucleotide
  Antisense Strand to SEQ ID NO: 449983
uuucuuacaaucauuggcu

SEQ ID NO: 449985 - RNA, 19 nt, Artificial Sequence
  Description of Artificial Sequence: Synthetic oligonucleotide
  Sense strand starting at position 346 of SEQ ID NO: 316915
ucacacaaccuguguaaua

SEQ ID NO: 449986 - RNA, 19 nt, Artificial Sequence
  Description of Artificial Sequence: Synthetic oligonucleotide
  Antisense Strand to SEQ ID NO: 449985
uauuacacagguuguguga

SEQ ID NO: 449987 - RNA, 19 nt, Artificial Sequence
  Description of Artificial Sequence: Synthetic oligonucleotide
  Sense strand starting at position 677 of SEQ ID NO: 316915
gcuuaaauuuaagagguaa

SEQ ID NO: 449988 - RNA, 19 nt, Artificial Sequence
  Description of Artificial Sequence: Synthetic oligonucleotide
  Antisense Strand to SEQ ID NO: 449987
uuaccucuuaaauuuaagc

SEQ ID NO: 449989 - RNA, 19 nt, Artificial Sequence
  Description of Artificial Sequence: Synthetic oligonucleotide
  Sense strand starting at position 929 of SEQ ID NO: 316915
gcaagaagggauugugacu

SEQ ID NO: 449990 - RNA, 19 nt, Artificial Sequence
  Description of Artificial Sequence: Synthetic oligonucleotide
  Antisense Strand to SEQ ID NO: 449989
agucacaaucccuucuugc

SEQ ID NO: 449991 - RNA, 19 nt, Artificial Sequence
  Description of Artificial Sequence: Synthetic oligonucleotide
  Sense strand starting at position 936 of SEQ ID NO: 316915
gggauugugacuuaaaguu

SEQ ID NO: 449992 - RNA, 19 nt, Artificial Sequence
  Description of Artificial Sequence: Synthetic oligonucleotide
  Antisense Strand to SEQ ID NO: 449991
aacuuuaagucacaauccc

SEQ ID NO: 449993 - RNA, 19 nt, Artificial Sequence
  Description of Artificial Sequence: Synthetic oligonucleotide
  Sense strand starting at position 1025 of SEQ ID NO: 316915
acaaauacaugagaugaca

SEQ ID NO: 449994 - RNA, 19 nt, Artificial Sequence
  Description of Artificial Sequence: Synthetic oligonucleotide
  Antisense Strand to SEQ ID NO: 449993
ugucaucucauguauuugu

SEQ ID NO: 449995 - RNA, 19 nt, Artificial Sequence
  Description of Artificial Sequence: Synthetic oligonucleotide
  Sense strand starting at position 1070 of SEQ ID NO: 316915
gagauaccuccaugaugua

SEQ ID NO: 449996 - RNA, 19 nt, Artificial Sequence
  Description of Artificial Sequence: Synthetic oligonucleotide
  Antisense Strand to SEQ ID NO: 449995
uacaucauggagguaucuc

SEQ ID NO: 449997 - RNA, 19 nt, Artificial Sequence
  Description of Artificial Sequence: Synthetic oligonucleotide
  Sense strand starting at position 1077 of SEQ ID NO: 316915
cuccaugauguagguuaaa

SEQ ID NO: 449998 - RNA, 19 nt, Artificial Sequence
  Description of Artificial Sequence: Synthetic oligonucleotide
  Antisense Strand to SEQ ID NO: 449997
uuuaaccuacaucauggag

SEQ ID NO: 449999 - RNA, 19 nt, Artificial Sequence
  Description of Artificial Sequence: Synthetic oligonucleotide
  Sense strand starting at position 1090 of SEQ ID NO: 316915
guuaaacgguagucucuua

SEQ ID NO: 450000 - RNA, 19 nt, Artificial Sequence
  Description of Artificial Sequence: Synthetic oligonucleotide
  Antisense Strand to SEQ ID NO: 449999
uaagagacuaccguuuaac

SEQ ID NO: 450001 - RNA, 19 nt, Artificial Sequence
  Description of Artificial Sequence: Synthetic oligonucleotide
  Sense strand starting at position 1233 of SEQ ID NO: 316915
aggugcauuccauacaaac

SEQ ID NO: 450002 - RNA, 19 nt, Artificial Sequence
  Description of Artificial Sequence: Synthetic oligonucleotide
  Antisense Strand to SEQ ID NO: 450001
guuuguauggaaugcaccu

SEQ ID NO: 450003 - RNA, 19 nt, Artificial Sequence
  Description of Artificial Sequence: Synthetic oligonucleotide
  Sense strand starting at position 1262 of SEQ ID NO: 316915
gaaacaagacguuaguugu

SEQ ID NO: 450004 - RNA, 19 nt, Artificial Sequence
  Description of Artificial Sequence: Synthetic oligonucleotide
  Antisense Strand to SEQ ID NO: 450003
acaacuaacgucuuguuuc

SEQ ID NO: 450005 - RNA, 19 nt, Artificial Sequence
  Description of Artificial Sequence: Synthetic oligonucleotide
  Sense strand starting at position 1265 of SEQ ID NO: 316915
acaagacguuaguuguaca

SEQ ID NO: 450006 - RNA, 19 nt, Artificial Sequence
  Description of Artificial Sequence: Synthetic oligonucleotide
  Antisense Strand to SEQ ID NO: 450005
uguacaacuaacgucuugu

SEQ ID NO: 450007 - RNA, 19 nt, Artificial Sequence
  Description of Artificial Sequence: Synthetic oligonucleotide
  Sense strand starting at position 1270 of SEQ ID NO: 316915
acguuaguuguacagcauu

SEQ ID NO: 450008 - RNA, 19 nt, Artificial Sequence
  Description of Artificial Sequence: Synthetic oligonucleotide
  Antisense Strand to SEQ ID NO: 450007
aaugcuguacaacuaacgu

SEQ ID NO: 450009 - RNA, 19 nt, Artificial Sequence
  Description of Artificial Sequence: Synthetic oligonucleotide
  Sense strand starting at position 1276 of SEQ ID NO: 316915
guuguacagcauuaacuuu

SEQ ID NO: 450010 - RNA, 19 nt, Artificial Sequence
  Description of Artificial Sequence: Synthetic oligonucleotide
  Antisense Strand to SEQ ID NO: 450009
aaaguuaaugcuguacaac

SEQ ID NO: 450011 - RNA, 19 nt, Artificial Sequence
  Description of Artificial Sequence: Synthetic oligonucleotide
  Sense strand starting at position 1310 of SEQ ID NO: 316915
cagaaugacuguuucugaa

SEQ ID NO: 450012 - RNA, 19 nt, Artificial Sequence
  Description of Artificial Sequence: Synthetic oligonucleotide
  Antisense Strand to SEQ ID NO: 450011
uucagaaacagucauucug

SEQ ID NO: 450013 - RNA, 19 nt, Artificial Sequence
  Description of Artificial Sequence: Synthetic oligonucleotide
  Sense strand starting at position 1312 of SEQ ID NO: 316915
gaaugacuguuucugaaag

SEQ ID NO: 450014 - RNA, 19 nt, Artificial Sequence
  Description of Artificial Sequence: Synthetic oligonucleotide
  Antisense Strand to SEQ ID NO: 450013
cuuucagaaacagucauuc

SEQ ID NO: 450015 - RNA, 19 nt, Artificial Sequence
  Description of Artificial Sequence: Synthetic oligonucleotide
  Sense strand starting at position 1314 of SEQ ID NO: 316915
augacuguuucugaaagaa

SEQ ID NO: 450016 - RNA, 19 nt, Artificial Sequence
  Description of Artificial Sequence: Synthetic oligonucleotide
  Antisense Strand to SEQ ID NO: 450015
uucuuucagaaacagucau

SEQ ID NO: 450017 - RNA, 19 nt, Artificial Sequence
  Description of Artificial Sequence: Synthetic oligonucleotide
  Sense strand starting at position 2207 of SEQ ID NO: 316915
uugccauugcuggcgagua

SEQ ID NO: 450018 - RNA, 19 nt, Artificial Sequence
  Description of Artificial Sequence: Synthetic oligonucleotide
  Antisense Strand to SEQ ID NO: 450017
uacucgccagcaauggcaa

SEQ ID NO: 450019 - RNA, 19 nt, Artificial Sequence
  Description of Artificial Sequence: Synthetic oligonucleotide
  Sense strand starting at position 2209 of SEQ ID NO: 316915
gccauugcuggcgaguaca

SEQ ID NO: 450020 - RNA, 19 nt, Artificial Sequence
  Description of Artificial Sequence: Synthetic oligonucleotide
  Antisense Strand to SEQ ID NO: 450019
uguacucgccagcaauggc

SEQ ID NO: 450021 - RNA, 19 nt, Artificial Sequence
  Description of Artificial Sequence: Synthetic oligonucleotide
  Sense strand starting at position 2518 of SEQ ID NO: 316915
ggagguagcccuugcuaca

SEQ ID NO: 450022 - RNA, 19 nt, Artificial Sequence
  Description of Artificial Sequence: Synthetic oligonucleotide
  Antisense Strand to SEQ ID NO: 450021
uguagcaagggcuaccucc

SEQ ID NO: 450023 - RNA, 19 nt, Artificial Sequence
  Description of Artificial Sequence: Synthetic oligonucleotide
  Sense strand starting at position 2539 of SEQ ID NO: 316915
ugcauauccuguuuggagu

SEQ ID NO: 450024 - RNA, 19 nt, Artificial Sequence
  Description of Artificial Sequence: Synthetic oligonucleotide
  Antisense Strand to SEQ ID NO: 450023
acuccaaacaggauaugca

SEQ ID NO: 450025 - RNA, 19 nt, Artificial Sequence
  Description of Artificial Sequence: Synthetic oligonucleotide
  Sense strand starting at position 2540 of SEQ ID NO: 316915
gcauauccuguuuggaguu

SEQ ID NO: 450026 - RNA, 19 nt, Artificial Sequence
  Description of Artificial Sequence: Synthetic oligonucleotide
  Antisense Strand to SEQ ID NO: 450025
aacuccaaacaggauaugc

SEQ ID NO: 450027 - RNA, 19 nt, Artificial Sequence
  Description of Artificial Sequence: Synthetic oligonucleotide
  Sense strand starting at position 2617 of SEQ ID NO: 316915
accugagauugacaagucu

SEQ ID NO: 450028 - RNA, 19 nt, Artificial Sequence
  Description of Artificial Sequence: Synthetic oligonucleotide
  Antisense Strand to SEQ ID NO: 450027
agacuugucaaucucaggu

SEQ ID NO: 450029 - RNA, 19 nt, Artificial Sequence
  Description of Artificial Sequence: Synthetic oligonucleotide
  Sense strand starting at position 2624 of SEQ ID NO: 316915
auugacaagucuuaaauag

SEQ ID NO: 450030 - RNA, 19 nt, Artificial Sequence
  Description of Artificial Sequence: Synthetic oligonucleotide
  Antisense Strand to SEQ ID NO: 450029
cuauuuaagacuugucaau

SEQ ID NO: 450031 - RNA, 19 nt, Artificial Sequence
  Description of Artificial Sequence: Synthetic oligonucleotide
  Sense strand starting at position 2654 of SEQ ID NO: 316915
auaguaucauccuucgacu

SEQ ID NO: 450032 - RNA, 19 nt, Artificial Sequence
  Description of Artificial Sequence: Synthetic oligonucleotide
  Antisense Strand to SEQ ID NO: 450031
agucgaaggaugauacuau

SEQ ID NO: 450033 - RNA, 19 nt, Artificial Sequence
  Description of Artificial Sequence: Synthetic oligonucleotide
  Sense strand starting at position 2779 of SEQ ID NO: 316915
gcuaucacagagugaauau

SEQ ID NO: 450034 - RNA, 19 nt, Artificial Sequence
  Description of Artificial Sequence: Synthetic oligonucleotide
  Antisense Strand to SEQ ID NO: 450033
auauucacucugugauagc

SEQ ID NO: 450035 - RNA, 19 nt, Artificial Sequence
  Description of Artificial Sequence: Synthetic oligonucleotide
  Sense strand starting at position 2888 of SEQ ID NO: 316915
cuugcagauuugucuguuu

SEQ ID NO: 450036 - RNA, 19 nt, Artificial Sequence
  Description of Artificial Sequence: Synthetic oligonucleotide
  Antisense Strand to SEQ ID NO: 450035
aaacagacaaaucugcaag

SEQ ID NO: 450037 - RNA, 19 nt, Artificial Sequence
  Description of Artificial Sequence: Synthetic oligonucleotide
  Sense strand starting at position 2896 of SEQ ID NO: 316915
uuugucuguuucucaaaga

SEQ ID NO: 450038 - RNA, 19 nt, Artificial Sequence
  Description of Artificial Sequence: Synthetic oligonucleotide
  Antisense Strand to SEQ ID NO: 450037
ucuuugagaaacagacaaa

SEQ ID NO: 450039 - RNA, 19 nt, Artificial Sequence
  Description of Artificial Sequence: Synthetic oligonucleotide
  Sense strand starting at position 3606 of SEQ ID NO: 316915
acucguggucucuagcaau

SEQ ID NO: 450040 - RNA, 19 nt, Artificial Sequence
  Description of Artificial Sequence: Synthetic oligonucleotide
  Antisense Strand to SEQ ID NO: 450039
auugcuagagaccacgagu

SEQ ID NO: 450041 - RNA, 19 nt, Artificial Sequence
  Description of Artificial Sequence: Synthetic oligonucleotide
  Sense strand starting at position 3771 of SEQ ID NO: 316915
caaguuagaugaucucuga

SEQ ID NO: 450042 - RNA, 19 nt, Artificial Sequence
  Description of Artificial Sequence: Synthetic oligonucleotide
  Antisense Strand to SEQ ID NO: 450041
ucagagaucaucuaacuug

SEQ ID NO: 450043 - RNA, 19 nt, Artificial Sequence
  Description of Artificial Sequence: Synthetic oligonucleotide
  Sense strand starting at position 3774 of SEQ ID NO: 316915
guuagaugaucucugaggu

SEQ ID NO: 450044 - RNA, 19 nt, Artificial Sequence
  Description of Artificial Sequence: Synthetic oligonucleotide
  Antisense Strand to SEQ ID NO: 450043
accucagagaucaucuaac

SEQ ID NO: 450045 - RNA, 19 nt, Artificial Sequence
  Description of Artificial Sequence: Synthetic oligonucleotide
  Sense strand starting at position 3821 of SEQ ID NO: 316915
ggcauucgcuugucaacag

SEQ ID NO: 450046 - RNA, 19 nt, Artificial Sequence
  Description of Artificial Sequence: Synthetic oligonucleotide
  Antisense Strand to SEQ ID NO: 450045
cuguugacaagcgaaugcc

SEQ ID NO: 450047 - RNA, 19 nt, Artificial Sequence
  Description of Artificial Sequence: Synthetic oligonucleotide
  Sense strand starting at position 3875 of SEQ ID NO: 316915
uuucuugcuccuugaugaa

SEQ ID NO: 450048 - RNA, 19 nt, Artificial Sequence
  Description of Artificial Sequence: Synthetic oligonucleotide
  Antisense Strand to SEQ ID NO: 450047
uucaucaaggagcaagaaa

SEQ ID NO: 450049 - RNA, 19 nt, Artificial Sequence
  Description of Artificial Sequence: Synthetic oligonucleotide
  Sense strand starting at position 3879 of SEQ ID NO: 316915
uugcuccuugaugaauaaa

SEQ ID NO: 450050 - RNA, 19 nt, Artificial Sequence
  Description of Artificial Sequence: Synthetic oligonucleotide
  Antisense Strand to SEQ ID NO: 450049
uuuauucaucaaggagcaa

SEQ ID NO: 450051 - RNA, 19 nt, Artificial Sequence
  Description of Artificial Sequence: Synthetic oligonucleotide
  Sense strand starting at position 167 of SEQ ID NO: 316916
uuaaauguccuuggcaaga

SEQ ID NO: 450052 - RNA, 19 nt, Artificial Sequence
  Description of Artificial Sequence: Synthetic oligonucleotide
  Antisense Strand to SEQ ID NO: 450051
ucuugccaaggacauuuaa

SEQ ID NO: 450053 - RNA, 19 nt, Artificial Sequence
  Description of Artificial Sequence: Synthetic oligonucleotide
  Sense strand starting at position 243 of SEQ ID NO: 316916
gauggagucuggguuacag

SEQ ID NO: 450054 - RNA, 19 nt, Artificial Sequence
  Description of Artificial Sequence: Synthetic oligonucleotide
  Antisense Strand to SEQ ID NO: 450053
cuguaacccagacuccauc

SEQ ID NO: 450055 - RNA, 19 nt, Artificial Sequence
  Description of Artificial Sequence: Synthetic oligonucleotide
  Sense strand starting at position 320 of SEQ ID NO: 316916
gguacauggcaucacuaau

SEQ ID NO: 450056 - RNA, 19 nt, Artificial Sequence
  Description of Artificial Sequence: Synthetic oligonucleotide
  Antisense Strand to SEQ ID NO: 450055
auuagugaugccauguacc

SEQ ID NO: 450057 - RNA, 19 nt, Artificial Sequence
  Description of Artificial Sequence: Synthetic oligonucleotide
  Sense strand starting at position 355 of SEQ ID NO: 316916
ggcauagaauucccacuca

SEQ ID NO: 450058 - RNA, 19 nt, Artificial Sequence
  Description of Artificial Sequence: Synthetic oligonucleotide
  Antisense Strand to SEQ ID NO: 450057
ugagugggaauucuaugcc

SEQ ID NO: 450059 - RNA, 19 nt, Artificial Sequence
  Description of Artificial Sequence: Synthetic oligonucleotide
  Sense strand starting at position 423 of SEQ ID NO: 316916
aguuuaagguccucacaau

SEQ ID NO: 450060 - RNA, 19 nt, Artificial Sequence
  Description of Artificial Sequence: Synthetic oligonucleotide
  Antisense Strand to SEQ ID NO: 450059
auugugaggaccuuaaacu

SEQ ID NO: 450061 - RNA, 19 nt, Artificial Sequence
  Description of Artificial Sequence: Synthetic oligonucleotide
  Sense strand starting at position 424 of SEQ ID NO: 316916
guuuaagguccucacaaua

SEQ ID NO: 450062 - RNA, 19 nt, Artificial Sequence
  Description of Artificial Sequence: Synthetic oligonucleotide
  Antisense Strand to SEQ ID NO: 450061
uauugugaggaccuuaaac

SEQ ID NO: 450063 - RNA, 19 nt, Artificial Sequence
  Description of Artificial Sequence: Synthetic oligonucleotide
  Sense strand starting at position 604 of SEQ ID NO: 316916
uuauuauacugggucuaga

SEQ ID NO: 450064 - RNA, 19 nt, Artificial Sequence
  Description of Artificial Sequence: Synthetic oligonucleotide
  Antisense Strand to SEQ ID NO: 450063
ucuagacccaguauaauaa

SEQ ID NO: 450065 - RNA, 19 nt, Artificial Sequence
  Description of Artificial Sequence: Synthetic oligonucleotide
  Sense strand starting at position 617 of SEQ ID NO: 316916
ucuagaucuguuuaacagu

SEQ ID NO: 450066 - RNA, 19 nt, Artificial Sequence
  Description of Artificial Sequence: Synthetic oligonucleotide
  Antisense Strand to SEQ ID NO: 450065
acuguuaaacagaucuaga

SEQ ID NO: 450067 - RNA, 19 nt, Artificial Sequence
  Description of Artificial Sequence: Synthetic oligonucleotide
  Sense strand starting at position 678 of SEQ ID NO: 316916
uagugucagaauugggagu

SEQ ID NO: 450068 - RNA, 19 nt, Artificial Sequence
  Description of Artificial Sequence: Synthetic oligonucleotide
  Antisense Strand to SEQ ID NO: 450067
acucccaauucugacacua

SEQ ID NO: 450069 - RNA, 19 nt, Artificial Sequence
  Description of Artificial Sequence: Synthetic oligonucleotide
  Sense strand starting at position 691 of SEQ ID NO: 316916
gggaguuggugcucaauuu

SEQ ID NO: 450070 - RNA, 19 nt, Artificial Sequence
  Description of Artificial Sequence: Synthetic oligonucleotide
  Antisense Strand to SEQ ID NO: 450069
aaauugagcaccaacuccc

SEQ ID NO: 450071 - RNA, 19 nt, Artificial Sequence
  Description of Artificial Sequence: Synthetic oligonucleotide
  Sense strand starting at position 838 of SEQ ID NO: 316916
uggaaucuguggucaaacu

SEQ ID NO: 450072 - RNA, 19 nt, Artificial Sequence
  Description of Artificial Sequence: Synthetic oligonucleotide
  Antisense Strand to SEQ ID NO: 450071
aguuugaccacagauucca

SEQ ID NO: 450073 - RNA, 19 nt, Artificial Sequence
  Description of Artificial Sequence: Synthetic oligonucleotide
  Sense strand starting at position 914 of SEQ ID NO: 316916
aguuaucugugacuuuaag

SEQ ID NO: 450074 - RNA, 19 nt, Artificial Sequence
  Description of Artificial Sequence: Synthetic oligonucleotide
  Antisense Strand to SEQ ID NO: 450073
cuuaaagucacagauaacu

SEQ ID NO: 450075 - RNA, 19 nt, Artificial Sequence
  Description of Artificial Sequence: Synthetic oligonucleotide
  Sense strand starting at position 1062 of SEQ ID NO: 316916
guauguguucgagagauca

SEQ ID NO: 450076 - RNA, 19 nt, Artificial Sequence
  Description of Artificial Sequence: Synthetic oligonucleotide
  Antisense Strand to SEQ ID NO: 450075
ugaucucucgaacacauac

SEQ ID NO: 450077 - RNA, 19 nt, Artificial Sequence
  Description of Artificial Sequence: Synthetic oligonucleotide
  Sense strand starting at position 1064 of SEQ ID NO: 316916
auguguucgagagaucaaa

SEQ ID NO: 450078 - RNA, 19 nt, Artificial Sequence
  Description of Artificial Sequence: Synthetic oligonucleotide
  Antisense Strand to SEQ ID NO: 450077
uuugaucucucgaacacau

SEQ ID NO: 450079 - RNA, 19 nt, Artificial Sequence
  Description of Artificial Sequence: Synthetic oligonucleotide
  Sense strand starting at position 1099 of SEQ ID NO: 316916
aucagcuuugaucaauuga

SEQ ID NO: 450080 - RNA, 19 nt, Artificial Sequence
  Description of Artificial Sequence: Synthetic oligonucleotide
  Antisense Strand to SEQ ID NO: 450079
ucaauugaucaaagcugau

SEQ ID NO: 450081 - RNA, 19 nt, Artificial Sequence
  Description of Artificial Sequence: Synthetic oligonucleotide
  Sense strand starting at position 1113 of SEQ ID NO: 316916
auugaaaucucggaaauuu

SEQ ID NO: 450082 - RNA, 19 nt, Artificial Sequence
  Description of Artificial Sequence: Synthetic oligonucleotide
  Antisense Strand to SEQ ID NO: 450081
aaauuuccgagauuucaau

SEQ ID NO: 450083 - RNA, 19 nt, Artificial Sequence
  Description of Artificial Sequence: Synthetic oligonucleotide
  Sense strand starting at position 2361 of SEQ ID NO: 316916
gaucuuuguucuuuagaga

SEQ ID NO: 450084 - RNA, 19 nt, Artificial Sequence
  Description of Artificial Sequence: Synthetic oligonucleotide
  Antisense Strand to SEQ ID NO: 450083
ucucuaaagaacaaagauc

SEQ ID NO: 450085 - RNA, 19 nt, Artificial Sequence
  Description of Artificial Sequence: Synthetic oligonucleotide
  Sense strand starting at position 2362 of SEQ ID NO: 316916
aucuuuguucuuuagagac

SEQ ID NO: 450086 - RNA, 19 nt, Artificial Sequence
  Description of Artificial Sequence: Synthetic oligonucleotide
  Antisense Strand to SEQ ID NO: 450085
gucucuaaagaacaaagau

SEQ ID NO: 450087 - RNA, 19 nt, Artificial Sequence
  Description of Artificial Sequence: Synthetic oligonucleotide
  Sense strand starting at position 2491 of SEQ ID NO: 316916
ugauuugaaucacauagca

SEQ ID NO: 450088 - RNA, 19 nt, Artificial Sequence
  Description of Artificial Sequence: Synthetic oligonucleotide
  Antisense Strand to SEQ ID NO: 450087
ugcuaugugauucaaauca

SEQ ID NO: 450089 - RNA, 19 nt, Artificial Sequence
  Description of Artificial Sequence: Synthetic oligonucleotide
  Sense strand starting at position 2615 of SEQ ID NO: 316916
ccaccauaccaugguuaua

SEQ ID NO: 450090 - RNA, 19 nt, Artificial Sequence
  Description of Artificial Sequence: Synthetic oligonucleotide
  Antisense Strand to SEQ ID NO: 450089
uauaaccaugguauggugg

SEQ ID NO: 450091 - RNA, 19 nt, Artificial Sequence
  Description of Artificial Sequence: Synthetic oligonucleotide
  Sense strand starting at position 2617 of SEQ ID NO: 316916
accauaccaugguuauaua

SEQ ID NO: 450092 - RNA, 19 nt, Artificial Sequence
  Description of Artificial Sequence: Synthetic oligonucleotide
  Antisense Strand to SEQ ID NO: 450091
uauauaaccaugguauggu

SEQ ID NO: 450093 - RNA, 19 nt, Artificial Sequence
  Description of Artificial Sequence: Synthetic oligonucleotide
  Sense strand starting at position 2797 of SEQ ID NO: 316916
aaggcauaucagcagcaga

SEQ ID NO: 450094 - RNA, 19 nt, Artificial Sequence
  Description of Artificial Sequence: Synthetic oligonucleotide
  Antisense Strand to SEQ ID NO: 450093
ucugcugcugauaugccuu

SEQ ID NO: 450095 - RNA, 19 nt, Artificial Sequence
  Description of Artificial Sequence: Synthetic oligonucleotide
  Sense strand starting at position 2800 of SEQ ID NO: 316916
gcauaucagcagcagauau

SEQ ID NO: 450096 - RNA, 19 nt, Artificial Sequence
  Description of Artificial Sequence: Synthetic oligonucleotide
  Antisense Strand to SEQ ID NO: 450095
auaucugcugcugauaugc

SEQ ID NO: 450097 - RNA, 19 nt, Artificial Sequence
  Description of Artificial Sequence: Synthetic oligonucleotide
  Sense strand starting at position 2814 of SEQ ID NO: 316916
gauauuugguuugaggaag

SEQ ID NO: 450098 - RNA, 19 nt, Artificial Sequence
  Description of Artificial Sequence: Synthetic oligonucleotide
  Antisense Strand to SEQ ID NO: 450097
cuuccucaaaccaaauauc

SEQ ID NO: 450099 - RNA, 19 nt, Artificial Sequence
  Description of Artificial Sequence: Synthetic oligonucleotide
  Sense strand starting at position 2843 of SEQ ID NO: 316916
auguguuugaguccgcuuu

SEQ ID NO: 450100 - RNA, 19 nt, Artificial Sequence
  Description of Artificial Sequence: Synthetic oligonucleotide
  Antisense Strand to SEQ ID NO: 450099
aaagcggacucaaacacau

SEQ ID NO: 450101 - RNA, 19 nt, Artificial Sequence
  Description of Artificial Sequence: Synthetic oligonucleotide
  Sense strand starting at position 3057 of SEQ ID NO: 316916
cuucuccaugaguagugaa

SEQ ID NO: 450102 - RNA, 19 nt, Artificial Sequence
  Description of Artificial Sequence: Synthetic oligonucleotide
  Antisense Strand to SEQ ID NO: 450101
uucacuacucauggagaag

SEQ ID NO: 450103 - RNA, 19 nt, Artificial Sequence
  Description of Artificial Sequence: Synthetic oligonucleotide
  Sense strand starting at position 3067 of SEQ ID NO: 316916
aguagugaacagugacuca

SEQ ID NO: 450104 - RNA, 19 nt, Artificial Sequence
  Description of Artificial Sequence: Synthetic oligonucleotide
  Antisense Strand to SEQ ID NO: 450103
ugagucacuguucacuacu

SEQ ID NO: 450105 - RNA, 19 nt, Artificial Sequence
  Description of Artificial Sequence: Synthetic oligonucleotide
  Sense strand starting at position 3237 of SEQ ID NO: 316916
uugggaacuagcugugaau

SEQ ID NO: 450106 - RNA, 19 nt, Artificial Sequence
  Description of Artificial Sequence: Synthetic oligonucleotide
  Antisense Strand to SEQ ID NO: 450105
auucacagcuaguucccaa

SEQ ID NO: 450107 - RNA, 19 nt, Artificial Sequence
  Description of Artificial Sequence: Synthetic oligonucleotide
  Sense strand starting at position 3239 of SEQ ID NO: 316916
gggaacuagcugugaauaa

SEQ ID NO: 450108 - RNA, 19 nt, Artificial Sequence
  Description of Artificial Sequence: Synthetic oligonucleotide
  Antisense Strand to SEQ ID NO: 450107
uuauucacagcuaguuccc

SEQ ID NO: 450109 - RNA, 19 nt, Artificial Sequence
  Description of Artificial Sequence: Synthetic oligonucleotide
  Sense strand starting at position 3249 of SEQ ID NO: 316916
ugugaauaaugugcugaaa

SEQ ID NO: 450110 - RNA, 19 nt, Artificial Sequence
  Description of Artificial Sequence: Synthetic oligonucleotide
  Antisense Strand to SEQ ID NO: 450109
uuucagcacauuauucaca

SEQ ID NO: 450111 - RNA, 19 nt, Artificial Sequence
  Description of Artificial Sequence: Synthetic oligonucleotide
  Sense strand starting at position 3309 of SEQ ID NO: 316916
gucauuuguuuccuucgga

SEQ ID NO: 450112 - RNA, 19 nt, Artificial Sequence
  Description of Artificial Sequence: Synthetic oligonucleotide
  Antisense Strand to SEQ ID NO: 450111
uccgaaggaaacaaaugac

SEQ ID NO: 450113 - RNA, 19 nt, Artificial Sequence
  Description of Artificial Sequence: Synthetic oligonucleotide
  Sense strand starting at position 3312 of SEQ ID NO: 316916
auuuguuuccuucggacuu

SEQ ID NO: 450114 - RNA, 19 nt, Artificial Sequence
  Description of Artificial Sequence: Synthetic oligonucleotide
  Antisense Strand to SEQ ID NO: 450113
aaguccgaaggaaacaaau

SEQ ID NO: 450115 - RNA, 19 nt, Artificial Sequence
  Description of Artificial Sequence: Synthetic oligonucleotide
  Sense strand starting at position 3347 of SEQ ID NO: 316916
ggauuaaguguuuauccug

SEQ ID NO: 450116 - RNA, 19 nt, Artificial Sequence
  Description of Artificial Sequence: Synthetic oligonucleotide
  Antisense Strand to SEQ ID NO: 450115
caggauaaacacuuaaucc

SEQ ID NO: 450117 - RNA, 19 nt, Artificial Sequence
  Description of Artificial Sequence: Synthetic oligonucleotide
  Sense strand starting at position 3356 of SEQ ID NO: 316916
guuuauccugaugagcaau

SEQ ID NO: 450118 - RNA, 19 nt, Artificial Sequence
  Description of Artificial Sequence: Synthetic oligonucleotide
  Antisense Strand to SEQ ID NO: 450117
auugcucaucaggauaaac

SEQ ID NO: 450119 - RNA, 19 nt, Artificial Sequence
  Description of Artificial Sequence: Synthetic oligonucleotide
  Sense strand starting at position 3422 of SEQ ID NO: 316916
ugcuauuucuguuugcuga

SEQ ID NO: 450120 - RNA, 19 nt, Artificial Sequence
  Description of Artificial Sequence: Synthetic oligonucleotide
  Antisense Strand to SEQ ID NO: 450119
ucagcaaacagaaauagca

SEQ ID NO: 450121 - RNA, 19 nt, Artificial Sequence
  Description of Artificial Sequence: Synthetic oligonucleotide
  Sense strand starting at position 3423 of SEQ ID NO: 316916
gcuauuucuguuugcugaa

SEQ ID NO: 450122 - RNA, 19 nt, Artificial Sequence
  Description of Artificial Sequence: Synthetic oligonucleotide
  Antisense Strand to SEQ ID NO: 450121
uucagcaaacagaaauagc

SEQ ID NO: 450123 - RNA, 19 nt, Artificial Sequence
  Description of Artificial Sequence: Synthetic oligonucleotide
  Sense strand starting at position 3485 of SEQ ID NO: 316916
auagaagguauuggcuuua

SEQ ID NO: 450124 - RNA, 19 nt, Artificial Sequence
  Description of Artificial Sequence: Synthetic oligonucleotide
  Antisense Strand to SEQ ID NO: 450123
uaaagccaauaccuucuau

SEQ ID NO: 450125 - RNA, 19 nt, Artificial Sequence
  Description of Artificial Sequence: Synthetic oligonucleotide
  Sense strand starting at position 3520 of SEQ ID NO: 316916
gauacagucccaggucaua

SEQ ID NO: 450126 - RNA, 19 nt, Artificial Sequence
  Description of Artificial Sequence: Synthetic oligonucleotide
  Antisense Strand to SEQ ID NO: 450125
uaugaccugggacuguauc

SEQ ID NO: 450127 - RNA, 19 nt, Artificial Sequence
  Description of Artificial Sequence: Synthetic oligonucleotide
  Sense strand starting at position 3568 of SEQ ID NO: 316916
acuccauccuuggucagaa

SEQ ID NO: 450128 - RNA, 19 nt, Artificial Sequence
  Description of Artificial Sequence: Synthetic oligonucleotide
  Antisense Strand to SEQ ID NO: 450127
uucugaccaaggauggagu

SEQ ID NO: 450129 - RNA, 19 nt, Artificial Sequence
  Description of Artificial Sequence: Synthetic oligonucleotide
  Sense strand starting at position 3642 of SEQ ID NO: 316916
uuuguaacugcauauagaa

SEQ ID NO: 450130 - RNA, 19 nt, Artificial Sequence
  Description of Artificial Sequence: Synthetic oligonucleotide
  Antisense Strand to SEQ ID NO: 450129
uucuauaugcaguuacaaa

SEQ ID NO: 450131 - RNA, 19 nt, Artificial Sequence
  Description of Artificial Sequence: Synthetic oligonucleotide
  Sense strand starting at position 3 of SEQ ID NO: 316917
gugacucucucaucugguu

SEQ ID NO: 450132 - RNA, 19 nt, Artificial Sequence
  Description of Artificial Sequence: Synthetic oligonucleotide
  Antisense Strand to SEQ ID NO: 450131
aaccagaugagagagucac

SEQ ID NO: 450133 - RNA, 19 nt, Artificial Sequence
  Description of Artificial Sequence: Synthetic oligonucleotide
  Sense strand starting at position 12 of SEQ ID NO: 316917
ucaucugguuuauuguuau

SEQ ID NO: 450134 - RNA, 19 nt, Artificial Sequence
  Description of Artificial Sequence: Synthetic oligonucleotide
  Antisense Strand to SEQ ID NO: 450133
auaacaauaaaccagauga

SEQ ID NO: 450135 - RNA, 19 nt, Artificial Sequence
  Description of Artificial Sequence: Synthetic oligonucleotide
  Sense strand starting at position 151 of SEQ ID NO: 316917
ugugccuuucgcggagauu

SEQ ID NO: 450136 - RNA, 19 nt, Artificial Sequence
  Description of Artificial Sequence: Synthetic oligonucleotide
  Antisense Strand to SEQ ID NO: 450135
aaucuccgcgaaaggcaca

SEQ ID NO: 450137 - RNA, 19 nt, Artificial Sequence
  Description of Artificial Sequence: Synthetic oligonucleotide
  Sense strand starting at position 152 of SEQ ID NO: 316917
gugccuuucgcggagauua

SEQ ID NO: 450138 - RNA, 19 nt, Artificial Sequence
  Description of Artificial Sequence: Synthetic oligonucleotide
  Antisense Strand to SEQ ID NO: 450137
uaaucuccgcgaaaggcac

SEQ ID NO: 450139 - RNA, 19 nt, Artificial Sequence
  Description of Artificial Sequence: Synthetic oligonucleotide
  Sense strand starting at position 154 of SEQ ID NO: 316917
gccuuucgcggagauuaua

SEQ ID NO: 450140 - RNA, 19 nt, Artificial Sequence
  Description of Artificial Sequence: Synthetic oligonucleotide
  Antisense Strand to SEQ ID NO: 450139
uauaaucuccgcgaaaggc

SEQ ID NO: 450141 - RNA, 19 nt, Artificial Sequence
  Description of Artificial Sequence: Synthetic oligonucleotide
  Sense strand starting at position 740 of SEQ ID NO: 316917
cggauugcauuugauauca

SEQ ID NO: 450142 - RNA, 19 nt, Artificial Sequence
  Description of Artificial Sequence: Synthetic oligonucleotide
  Antisense Strand to SEQ ID NO: 450141
ugauaucaaaugcaauccg

SEQ ID NO: 450143 - RNA, 19 nt, Artificial Sequence
  Description of Artificial Sequence: Synthetic oligonucleotide
  Sense strand starting at position 751 of SEQ ID NO: 316917
ugauaucauggcgacaacu

SEQ ID NO: 450144 - RNA, 19 nt, Artificial Sequence
  Description of Artificial Sequence: Synthetic oligonucleotide
  Antisense Strand to SEQ ID NO: 450143
aguugucgccaugauauca

SEQ ID NO: 450145 - RNA, 19 nt, Artificial Sequence
  Description of Artificial Sequence: Synthetic oligonucleotide
  Sense strand starting at position 917 of SEQ ID NO: 316917
cgugcuucuccguacugga

SEQ ID NO: 450146 - RNA, 19 nt, Artificial Sequence
  Description of Artificial Sequence: Synthetic oligonucleotide
  Antisense Strand to SEQ ID NO: 450145
uccaguacggagaagcacg

SEQ ID NO: 450147 - RNA, 19 nt, Artificial Sequence
  Description of Artificial Sequence: Synthetic oligonucleotide
  Sense strand starting at position 982 of SEQ ID NO: 316917
ccaaccaguuaguuauaaa

SEQ ID NO: 450148 - RNA, 19 nt, Artificial Sequence
  Description of Artificial Sequence: Synthetic oligonucleotide
  Antisense Strand to SEQ ID NO: 450147
uuuauaacuaacugguugg

SEQ ID NO: 450149 - RNA, 19 nt, Artificial Sequence
  Description of Artificial Sequence: Synthetic oligonucleotide
  Sense strand starting at position 1070 of SEQ ID NO: 316917
gaaagacuguauguuucuu

SEQ ID NO: 450150 - RNA, 19 nt, Artificial Sequence
  Description of Artificial Sequence: Synthetic oligonucleotide
  Antisense Strand to SEQ ID NO: 450149
aagaaacauacagucuuuc

SEQ ID NO: 450151 - RNA, 19 nt, Artificial Sequence
  Description of Artificial Sequence: Synthetic oligonucleotide
  Sense strand starting at position 1074 of SEQ ID NO: 316917
gacuguauguuucuuagga

SEQ ID NO: 450152 - RNA, 19 nt, Artificial Sequence
  Description of Artificial Sequence: Synthetic oligonucleotide
  Antisense Strand to SEQ ID NO: 450151
uccuaagaaacauacaguc

SEQ ID NO: 450153 - RNA, 19 nt, Artificial Sequence
  Description of Artificial Sequence: Synthetic oligonucleotide
  Sense strand starting at position 1075 of SEQ ID NO: 316917
acuguauguuucuuaggaa

SEQ ID NO: 450154 - RNA, 19 nt, Artificial Sequence
  Description of Artificial Sequence: Synthetic oligonucleotide
  Antisense Strand to SEQ ID NO: 450153
uuccuaagaaacauacagu

SEQ ID NO: 450155 - RNA, 19 nt, Artificial Sequence
  Description of Artificial Sequence: Synthetic oligonucleotide
  Sense strand starting at position 1079 of SEQ ID NO: 316917
uauguuucuuaggaacaga

SEQ ID NO: 450156 - RNA, 19 nt, Artificial Sequence
  Description of Artificial Sequence: Synthetic oligonucleotide
  Antisense Strand to SEQ ID NO: 450155
ucuguuccuaagaaacaua

SEQ ID NO: 450157 - RNA, 19 nt, Artificial Sequence
  Description of Artificial Sequence: Synthetic oligonucleotide
  Sense strand starting at position 1118 of SEQ ID NO: 316917
agcaauuguucgcuccuca

SEQ ID NO: 450158 - RNA, 19 nt, Artificial Sequence
  Description of Artificial Sequence: Synthetic oligonucleotide
  Antisense Strand to SEQ ID NO: 450157
ugaggagcgaacaauugcu

SEQ ID NO: 450159 - RNA, 19 nt, Artificial Sequence
  Description of Artificial Sequence: Synthetic oligonucleotide
  Sense strand starting at position 1194 of SEQ ID NO: 316917
ggaucaguuucagagaugu

SEQ ID NO: 450160 - RNA, 19 nt, Artificial Sequence
  Description of Artificial Sequence: Synthetic oligonucleotide
  Antisense Strand to SEQ ID NO: 450159
acaucucugaaacugaucc

SEQ ID NO: 450161 - RNA, 19 nt, Artificial Sequence
  Description of Artificial Sequence: Synthetic oligonucleotide
  Sense strand starting at position 1479 of SEQ ID NO: 316917
cucucaccuucggaaugau

SEQ ID NO: 450162 - RNA, 19 nt, Artificial Sequence
  Description of Artificial Sequence: Synthetic oligonucleotide
  Antisense Strand to SEQ ID NO: 450161
aucauuccgaaggugagag

SEQ ID NO: 450163 - RNA, 19 nt, Artificial Sequence
  Description of Artificial Sequence: Synthetic oligonucleotide
  Sense strand starting at position 2229 of SEQ ID NO: 316917
ucggaagcuucagaggaaa

SEQ ID NO: 450164 - RNA, 19 nt, Artificial Sequence
  Description of Artificial Sequence: Synthetic oligonucleotide
  Antisense Strand to SEQ ID NO: 450163
uuuccucugaagcuuccga

SEQ ID NO: 450165 - RNA, 19 nt, Artificial Sequence
  Description of Artificial Sequence: Synthetic oligonucleotide
  Sense strand starting at position 2581 of SEQ ID NO: 316917
cugcuuugcucggugugaa

SEQ ID NO: 450166 - RNA, 19 nt, Artificial Sequence
  Description of Artificial Sequence: Synthetic oligonucleotide
  Antisense Strand to SEQ ID NO: 450165
uucacaccgagcaaagcag

SEQ ID NO: 450167 - RNA, 19 nt, Artificial Sequence
  Description of Artificial Sequence: Synthetic oligonucleotide
  Sense strand starting at position 2582 of SEQ ID NO: 316917
ugcuuugcucggugugaaa

SEQ ID NO: 450168 - RNA, 19 nt, Artificial Sequence
  Description of Artificial Sequence: Synthetic oligonucleotide
  Antisense Strand to SEQ ID NO: 450167
uuucacaccgagcaaagca

SEQ ID NO: 450169 - RNA, 19 nt, Artificial Sequence
  Description of Artificial Sequence: Synthetic oligonucleotide
  Sense strand starting at position 2614 of SEQ ID NO: 316917
cucggagcuuuggcgaaau

SEQ ID NO: 450170 - RNA, 19 nt, Artificial Sequence
  Description of Artificial Sequence: Synthetic oligonucleotide
  Antisense Strand to SEQ ID NO: 450169
auuucgccaaagcuccgag

SEQ ID NO: 450171 - RNA, 19 nt, Artificial Sequence
  Description of Artificial Sequence: Synthetic oligonucleotide
  Sense strand starting at position 2625 of SEQ ID NO: 316917
ggcgaaauuccagagaguc

SEQ ID NO: 450172 - RNA, 19 nt, Artificial Sequence
  Description of Artificial Sequence: Synthetic oligonucleotide
  Antisense Strand to SEQ ID NO: 450171
gacucucuggaauuucgcc

SEQ ID NO: 450173 - RNA, 19 nt, Artificial Sequence
  Description of Artificial Sequence: Synthetic oligonucleotide
  Sense strand starting at position 2796 of SEQ ID NO: 316917
cacaguucuugcucaggca

SEQ ID NO: 450174 - RNA, 19 nt, Artificial Sequence
  Description of Artificial Sequence: Synthetic oligonucleotide
  Antisense Strand to SEQ ID NO: 450173
ugccugagcaagaacugug

SEQ ID NO: 450175 - RNA, 19 nt, Artificial Sequence
  Description of Artificial Sequence: Synthetic oligonucleotide
  Sense strand starting at position 2934 of SEQ ID NO: 316917
gccacuccugcugaacuaa

SEQ ID NO: 450176 - RNA, 19 nt, Artificial Sequence
  Description of Artificial Sequence: Synthetic oligonucleotide
  Antisense Strand to SEQ ID NO: 450175
uuaguucagcaggaguggc

SEQ ID NO: 450177 - RNA, 19 nt, Artificial Sequence
  Description of Artificial Sequence: Synthetic oligonucleotide
  Sense strand starting at position 3034 of SEQ ID NO: 316917
cgggaagaucuuggugugu

SEQ ID NO: 450178 - RNA, 19 nt, Artificial Sequence
  Description of Artificial Sequence: Synthetic oligonucleotide
  Antisense Strand to SEQ ID NO: 450177
acacaccaagaucuucccg

SEQ ID NO: 450179 - RNA, 19 nt, Artificial Sequence
  Description of Artificial Sequence: Synthetic oligonucleotide
  Sense strand starting at position 3086 of SEQ ID NO: 316917
uuucccuuucccuaggaga

SEQ ID NO: 450180 - RNA, 19 nt, Artificial Sequence
  Description of Artificial Sequence: Synthetic oligonucleotide
  Antisense Strand to SEQ ID NO: 450179
ucuccuagggaaagggaaa

SEQ ID NO: 450181 - RNA, 19 nt, Artificial Sequence
  Description of Artificial Sequence: Synthetic oligonucleotide
  Sense strand starting at position 3088 of SEQ ID NO: 316917
ucccuuucccuaggagacu

SEQ ID NO: 450182 - RNA, 19 nt, Artificial Sequence
  Description of Artificial Sequence: Synthetic oligonucleotide
  Antisense Strand to SEQ ID NO: 450181
agucuccuagggaaaggga

SEQ ID NO: 450183 - RNA, 19 nt, Artificial Sequence
  Description of Artificial Sequence: Synthetic oligonucleotide
  Sense strand starting at position 3102 of SEQ ID NO: 316917
agacucugucaguggaaca

SEQ ID NO: 450184 - RNA, 19 nt, Artificial Sequence
  Description of Artificial Sequence: Synthetic oligonucleotide
  Antisense Strand to SEQ ID NO: 450183
uguuccacugacagagucu

SEQ ID NO: 450185 - RNA, 19 nt, Artificial Sequence
  Description of Artificial Sequence: Synthetic oligonucleotide
  Sense strand starting at position 3162 of SEQ ID NO: 316917
ugccaauggcugggaaagu

SEQ ID NO: 450186 - RNA, 19 nt, Artificial Sequence
  Description of Artificial Sequence: Synthetic oligonucleotide
  Antisense Strand to SEQ ID NO: 450185
acuuucccagccauuggca

SEQ ID NO: 450187 - RNA, 19 nt, Artificial Sequence
  Description of Artificial Sequence: Synthetic oligonucleotide
  Sense strand starting at position 3163 of SEQ ID NO: 316917
gccaauggcugggaaagua

SEQ ID NO: 450188 - RNA, 19 nt, Artificial Sequence
  Description of Artificial Sequence: Synthetic oligonucleotide
  Antisense Strand to SEQ ID NO: 450187
uacuuucccagccauuggc

SEQ ID NO: 450189 - RNA, 19 nt, Artificial Sequence
  Description of Artificial Sequence: Synthetic oligonucleotide
  Sense strand starting at position 3284 of SEQ ID NO: 316917
auagcugguccacguuuaa

SEQ ID NO: 450190 - RNA, 19 nt, Artificial Sequence
  Description of Artificial Sequence: Synthetic oligonucleotide
  Antisense Strand to SEQ ID NO: 450189
uuaaacguggaccagcuau

SEQ ID NO: 450191 - RNA, 19 nt, Artificial Sequence
  Description of Artificial Sequence: Synthetic oligonucleotide
  Sense strand starting at position 3318 of SEQ ID NO: 316917
acaguugcaucagagagau

SEQ ID NO: 450192 - RNA, 19 nt, Artificial Sequence
  Description of Artificial Sequence: Synthetic oligonucleotide
  Antisense Strand to SEQ ID NO: 450191
aucucucugaugcaacugu

SEQ ID NO: 450193 - RNA, 19 nt, Artificial Sequence
  Description of Artificial Sequence: Synthetic oligonucleotide
  Sense strand starting at position 3330 of SEQ ID NO: 316917
gagagaugcugacuggguu

SEQ ID NO: 450194 - RNA, 19 nt, Artificial Sequence
  Description of Artificial Sequence: Synthetic oligonucleotide
  Antisense Strand to SEQ ID NO: 450193
aacccagucagcaucucuc

SEQ ID NO: 450195 - RNA, 19 nt, Artificial Sequence
  Description of Artificial Sequence: Synthetic oligonucleotide
  Sense strand starting at position 3381 of SEQ ID NO: 316917
ccucaauugagucgggaug

SEQ ID NO: 450196 - RNA, 19 nt, Artificial Sequence
  Description of Artificial Sequence: Synthetic oligonucleotide
  Antisense Strand to SEQ ID NO: 450195
caucccgacucaauugagg

SEQ ID NO: 450197 - RNA, 19 nt, Artificial Sequence
  Description of Artificial Sequence: Synthetic oligonucleotide
  Sense strand starting at position 3565 of SEQ ID NO: 316917
ggucccugucaguguuacu

SEQ ID NO: 450198 - RNA, 19 nt, Artificial Sequence
  Description of Artificial Sequence: Synthetic oligonucleotide
  Antisense Strand to SEQ ID NO: 450197
aguaacacugacagggacc

SEQ ID NO: 450199 - RNA, 19 nt, Artificial Sequence
  Description of Artificial Sequence: Synthetic oligonucleotide
  Sense strand starting at position 3689 of SEQ ID NO: 316917
uggucauucuagggacaga

SEQ ID NO: 450200 - RNA, 19 nt, Artificial Sequence
  Description of Artificial Sequence: Synthetic oligonucleotide
  Antisense Strand to SEQ ID NO: 450199
ucugucccuagaaugacca

SEQ ID NO: 450201 - RNA, 19 nt, Artificial Sequence
  Description of Artificial Sequence: Synthetic oligonucleotide
  Sense strand starting at position 3706 of SEQ ID NO: 316917
gagguuguaucaucuuugu

SEQ ID NO: 450202 - RNA, 19 nt, Artificial Sequence
  Description of Artificial Sequence: Synthetic oligonucleotide
  Antisense Strand to SEQ ID NO: 450201
acaaagaugauacaaccuc

SEQ ID NO: 450203 - RNA, 19 nt, Artificial Sequence
  Description of Artificial Sequence: Synthetic oligonucleotide
  Sense strand starting at position 3709 of SEQ ID NO: 316917
guuguaucaucuuuguaua

SEQ ID NO: 450204 - RNA, 19 nt, Artificial Sequence
  Description of Artificial Sequence: Synthetic oligonucleotide
  Antisense Strand to SEQ ID NO: 450203
uauacaaagaugauacaac

SEQ ID NO: 450205 - RNA, 19 nt, Artificial Sequence
  Description of Artificial Sequence: Synthetic oligonucleotide
  Sense strand starting at position 3741 of SEQ ID NO: 316917
guaggugcucuuuaaacau

SEQ ID NO: 450206 - RNA, 19 nt, Artificial Sequence
  Description of Artificial Sequence: Synthetic oligonucleotide
  Antisense Strand to SEQ ID NO: 450205
auguuuaaagagcaccuac

SEQ ID NO: 450207 - RNA, 19 nt, Artificial Sequence
  Description of Artificial Sequence: Synthetic oligonucleotide
  Sense strand starting at position 3773 of SEQ ID NO: 316917
ggauuaagugccugagagc

SEQ ID NO: 450208 - RNA, 19 nt, Artificial Sequence
  Description of Artificial Sequence: Synthetic oligonucleotide
  Antisense Strand to SEQ ID NO: 450207
gcucucaggcacuuaaucc

SEQ ID NO: 450209 - RNA, 19 nt, Artificial Sequence
  Description of Artificial Sequence: Synthetic oligonucleotide
  Sense strand starting at position 3774 of SEQ ID NO: 316917
gauuaagugccugagagca

SEQ ID NO: 450210 - RNA, 19 nt, Artificial Sequence
  Description of Artificial Sequence: Synthetic oligonucleotide
  Antisense Strand to SEQ ID NO: 450209
ugcucucaggcacuuaauc

SEQ ID NO: 450211 - RNA, 19 nt, Artificial Sequence
  Description of Artificial Sequence: Synthetic oligonucleotide
  Sense strand starting at position 8 of SEQ ID NO: 316918
ggcugugugguccaagaug

SEQ ID NO: 450212 - RNA, 19 nt, Artificial Sequence
  Description of Artificial Sequence: Synthetic oligonucleotide
  Antisense Strand to SEQ ID NO: 450211
caucuuggaccacacagcc

SEQ ID NO: 450213 - RNA, 19 nt, Artificial Sequence
  Description of Artificial Sequence: Synthetic oligonucleotide
  Sense strand starting at position 19 of SEQ ID NO: 316918
ccaagauggcgguagaaga

SEQ ID NO: 450214 - RNA, 19 nt, Artificial Sequence
  Description of Artificial Sequence: Synthetic oligonucleotide
  Antisense Strand to SEQ ID NO: 450213
ucuucuaccgccaucuugg

SEQ ID NO: 450215 - RNA, 19 nt, Artificial Sequence
  Description of Artificial Sequence: Synthetic oligonucleotide
  Sense strand starting at position 32 of SEQ ID NO: 316918
agaagagucucccuuccau

SEQ ID NO: 450216 - RNA, 19 nt, Artificial Sequence
  Description of Artificial Sequence: Synthetic oligonucleotide
  Antisense Strand to SEQ ID NO: 450215
auggaagggagacucuucu

SEQ ID NO: 450217 - RNA, 19 nt, Artificial Sequence
  Description of Artificial Sequence: Synthetic oligonucleotide
  Sense strand starting at position 127 of SEQ ID NO: 316918
ucaguugagagagguaguu

SEQ ID NO: 450218 - RNA, 19 nt, Artificial Sequence
  Description of Artificial Sequence: Synthetic oligonucleotide
  Antisense Strand to SEQ ID NO: 450217
aacuaccucucucaacuga

SEQ ID NO: 450219 - RNA, 19 nt, Artificial Sequence
  Description of Artificial Sequence: Synthetic oligonucleotide
  Sense strand starting at position 265 of SEQ ID NO: 316918
augguugaguccucagagu

SEQ ID NO: 450220 - RNA, 19 nt, Artificial Sequence
  Description of Artificial Sequence: Synthetic oligonucleotide
  Antisense Strand to SEQ ID NO: 450219
acucugaggacucaaccau

SEQ ID NO: 450221 - RNA, 19 nt, Artificial Sequence
  Description of Artificial Sequence: Synthetic oligonucleotide
  Sense strand starting at position 281 of SEQ ID NO: 316918
agucaauaucaguagcacu

SEQ ID NO: 450222 - RNA, 19 nt, Artificial Sequence
  Description of Artificial Sequence: Synthetic oligonucleotide
  Antisense Strand to SEQ ID NO: 450221
agugcuacugauauugacu

SEQ ID NO: 450223 - RNA, 19 nt, Artificial Sequence
  Description of Artificial Sequence: Synthetic oligonucleotide
  Sense strand starting at position 351 of SEQ ID NO: 316918
uguguuaguauugaccauu

SEQ ID NO: 450224 - RNA, 19 nt, Artificial Sequence
  Description of Artificial Sequence: Synthetic oligonucleotide
  Antisense Strand to SEQ ID NO: 450223
aauggucaauacuaacaca

SEQ ID NO: 450225 - RNA, 19 nt, Artificial Sequence
  Description of Artificial Sequence: Synthetic oligonucleotide
  Sense strand starting at position 354 of SEQ ID NO: 316918
guuaguauugaccauuggu

SEQ ID NO: 450226 - RNA, 19 nt, Artificial Sequence
  Description of Artificial Sequence: Synthetic oligonucleotide
  Antisense Strand to SEQ ID NO: 450225
accaauggucaauacuaac

SEQ ID NO: 450227 - RNA, 19 nt, Artificial Sequence
  Description of Artificial Sequence: Synthetic oligonucleotide
  Sense strand starting at position 437 of SEQ ID NO: 316918
ccauccggaagaugauauu

SEQ ID NO: 450228 - RNA, 19 nt, Artificial Sequence
  Description of Artificial Sequence: Synthetic oligonucleotide
  Antisense Strand to SEQ ID NO: 450227
aauaucaucuuccggaugg

SEQ ID NO: 450229 - RNA, 19 nt, Artificial Sequence
  Description of Artificial Sequence: Synthetic oligonucleotide
  Sense strand starting at position 449 of SEQ ID NO: 316918
ugauauugucacuguaggu

SEQ ID NO: 450230 - RNA, 19 nt, Artificial Sequence
  Description of Artificial Sequence: Synthetic oligonucleotide
  Antisense Strand to SEQ ID NO: 450229
accuacagugacaauauca

SEQ ID NO: 450231 - RNA, 19 nt, Artificial Sequence
  Description of Artificial Sequence: Synthetic oligonucleotide
  Sense strand starting at position 462 of SEQ ID NO: 316918
guagguguugcugccauca

SEQ ID NO: 450232 - RNA, 19 nt, Artificial Sequence
  Description of Artificial Sequence: Synthetic oligonucleotide
  Antisense Strand to SEQ ID NO: 450231
ugauggcagcaacaccuac

SEQ ID NO: 450233 - RNA, 19 nt, Artificial Sequence
  Description of Artificial Sequence: Synthetic oligonucleotide
  Sense strand starting at position 601 of SEQ ID NO: 316918
ucuuccagguuaucuuuau

SEQ ID NO: 450234 - RNA, 19 nt, Artificial Sequence
  Description of Artificial Sequence: Synthetic oligonucleotide
  Antisense Strand to SEQ ID NO: 450233
auaaagauaaccuggaaga

SEQ ID NO: 450235 - RNA, 19 nt, Artificial Sequence
  Description of Artificial Sequence: Synthetic oligonucleotide
  Sense strand starting at position 605 of SEQ ID NO: 316918
ccagguuaucuuuaucacu

SEQ ID NO: 450236 - RNA, 19 nt, Artificial Sequence
  Description of Artificial Sequence: Synthetic oligonucleotide
  Antisense Strand to SEQ ID NO: 450235
agugauaaagauaaccugg

SEQ ID NO: 450237 - RNA, 19 nt, Artificial Sequence
  Description of Artificial Sequence: Synthetic oligonucleotide
  Sense strand starting at position 607 of SEQ ID NO: 316918
agguuaucuuuaucacuga

SEQ ID NO: 450238 - RNA, 19 nt, Artificial Sequence
  Description of Artificial Sequence: Synthetic oligonucleotide
  Antisense Strand to SEQ ID NO: 450237
ucagugauaaagauaaccu

SEQ ID NO: 450239 - RNA, 19 nt, Artificial Sequence
  Description of Artificial Sequence: Synthetic oligonucleotide
  Sense strand starting at position 2430 of SEQ ID NO: 316918
gggauugucccucaggguu

SEQ ID NO: 450240 - RNA, 19 nt, Artificial Sequence
  Description of Artificial Sequence: Synthetic oligonucleotide
  Antisense Strand to SEQ ID NO: 450239
aacccugagggacaauccc

SEQ ID NO: 450241 - RNA, 19 nt, Artificial Sequence
  Description of Artificial Sequence: Synthetic oligonucleotide
  Sense strand starting at position 2475 of SEQ ID NO: 316918
gucaguccugcgucuguga

SEQ ID NO: 450242 - RNA, 19 nt, Artificial Sequence
  Description of Artificial Sequence: Synthetic oligonucleotide
  Antisense Strand to SEQ ID NO: 450241
ucacagacgcaggacugac

SEQ ID NO: 450243 - RNA, 19 nt, Artificial Sequence
  Description of Artificial Sequence: Synthetic oligonucleotide
  Sense strand starting at position 2521 of SEQ ID NO: 316918
agggauugguguuucugaa

SEQ ID NO: 450244 - RNA, 19 nt, Artificial Sequence
  Description of Artificial Sequence: Synthetic oligonucleotide
  Antisense Strand to SEQ ID NO: 450243
uucagaaacaccaaucccu

SEQ ID NO: 450245 - RNA, 19 nt, Artificial Sequence
  Description of Artificial Sequence: Synthetic oligonucleotide
  Sense strand starting at position 2777 of SEQ ID NO: 316918
acuugaacagcuuguaauc

SEQ ID NO: 450246 - RNA, 19 nt, Artificial Sequence
  Description of Artificial Sequence: Synthetic oligonucleotide
  Antisense Strand to SEQ ID NO: 450245
gauuacaagcuguucaagu

SEQ ID NO: 450247 - RNA, 19 nt, Artificial Sequence
  Description of Artificial Sequence: Synthetic oligonucleotide
  Sense strand starting at position 2878 of SEQ ID NO: 316918
cuuagaaugugguuuccau

SEQ ID NO: 450248 - RNA, 19 nt, Artificial Sequence
  Description of Artificial Sequence: Synthetic oligonucleotide
  Antisense Strand to SEQ ID NO: 450247
auggaaaccacauucuaag

SEQ ID NO: 450249 - RNA, 19 nt, Artificial Sequence
  Description of Artificial Sequence: Synthetic oligonucleotide
  Sense strand starting at position 2887 of SEQ ID NO: 316918
ugguuuccauaucugauca

SEQ ID NO: 450250 - RNA, 19 nt, Artificial Sequence
  Description of Artificial Sequence: Synthetic oligonucleotide
  Antisense Strand to SEQ ID NO: 450249
ugaucagauauggaaacca

SEQ ID NO: 450251 - RNA, 19 nt, Artificial Sequence
  Description of Artificial Sequence: Synthetic oligonucleotide
  Sense strand starting at position 2917 of SEQ ID NO: 316918
ccuguuaguuuauuagaca

SEQ ID NO: 450252 - RNA, 19 nt, Artificial Sequence
  Description of Artificial Sequence: Synthetic oligonucleotide
  Antisense Strand to SEQ ID NO: 450251
ugucuaauaaacuaacagg

SEQ ID NO: 450253 - RNA, 19 nt, Artificial Sequence
  Description of Artificial Sequence: Synthetic oligonucleotide
  Sense strand starting at position 2948 of SEQ ID NO: 316918
auuacuuucuucguagaca

SEQ ID NO: 450254 - RNA, 19 nt, Artificial Sequence
  Description of Artificial Sequence: Synthetic oligonucleotide
  Antisense Strand to SEQ ID NO: 450253
ugucuacgaagaaaguaau

SEQ ID NO: 450255 - RNA, 19 nt, Artificial Sequence
  Description of Artificial Sequence: Synthetic oligonucleotide
  Sense strand starting at position 2951 of SEQ ID NO: 316918
acuuucuucguagacagua

SEQ ID NO: 450256 - RNA, 19 nt, Artificial Sequence
  Description of Artificial Sequence: Synthetic oligonucleotide
  Antisense Strand to SEQ ID NO: 450255
uacugucuacgaagaaagu

SEQ ID NO: 450257 - RNA, 19 nt, Artificial Sequence
  Description of Artificial Sequence: Synthetic oligonucleotide
  Sense strand starting at position 3000 of SEQ ID NO: 316918
agcagaauacuuggaucaa

SEQ ID NO: 450258 - RNA, 19 nt, Artificial Sequence
  Description of Artificial Sequence: Synthetic oligonucleotide
  Antisense Strand to SEQ ID NO: 450257
uugauccaaguauucugcu

SEQ ID NO: 450259 - RNA, 19 nt, Artificial Sequence
  Description of Artificial Sequence: Synthetic oligonucleotide
  Sense strand starting at position 3089 of SEQ ID NO: 316918
uguaguguuagguacuuaa

SEQ ID NO: 450260 - RNA, 19 nt, Artificial Sequence
  Description of Artificial Sequence: Synthetic oligonucleotide
  Antisense Strand to SEQ ID NO: 450259
uuaaguaccuaacacuaca

SEQ ID NO: 450261 - RNA, 19 nt, Artificial Sequence
  Description of Artificial Sequence: Synthetic oligonucleotide
  Sense strand starting at position 3093 of SEQ ID NO: 316918
guguuagguacuuaacaga

SEQ ID NO: 450262 - RNA, 19 nt, Artificial Sequence
  Description of Artificial Sequence: Synthetic oligonucleotide
  Antisense Strand to SEQ ID NO: 450261
ucuguuaaguaccuaacac

SEQ ID NO: 450263 - RNA, 19 nt, Artificial Sequence
  Description of Artificial Sequence: Synthetic oligonucleotide
  Sense strand starting at position 3147 of SEQ ID NO: 316918
uuaguuacagugcagagua

SEQ ID NO: 450264 - RNA, 19 nt, Artificial Sequence
  Description of Artificial Sequence: Synthetic oligonucleotide
  Antisense Strand to SEQ ID NO: 450263
uacucugcacuguaacuaa

SEQ ID NO: 450265 - RNA, 19 nt, Artificial Sequence
  Description of Artificial Sequence: Synthetic oligonucleotide
  Sense strand starting at position 3149 of SEQ ID NO: 316918
aguuacagugcagaguaau

SEQ ID NO: 450266 - RNA, 19 nt, Artificial Sequence
  Description of Artificial Sequence: Synthetic oligonucleotide
  Antisense Strand to SEQ ID NO: 450265
auuacucugcacuguaacu

SEQ ID NO: 450267 - RNA, 19 nt, Artificial Sequence
  Description of Artificial Sequence: Synthetic oligonucleotide
  Sense strand starting at position 3216 of SEQ ID NO: 316918
aauuaaugugaaugugaga

SEQ ID NO: 450268 - RNA, 19 nt, Artificial Sequence
  Description of Artificial Sequence: Synthetic oligonucleotide
  Antisense Strand to SEQ ID NO: 450267
ucucacauucacauuaauu

SEQ ID NO: 450269 - RNA, 19 nt, Artificial Sequence
  Description of Artificial Sequence: Synthetic oligonucleotide
  Sense strand starting at position 3403 of SEQ ID NO: 316918
gggcaagaauaaucugcua

SEQ ID NO: 450270 - RNA, 19 nt, Artificial Sequence
  Description of Artificial Sequence: Synthetic oligonucleotide
  Antisense Strand to SEQ ID NO: 450269
uagcagauuauucuugccc

SEQ ID NO: 450271 - RNA, 19 nt, Artificial Sequence
  Description of Artificial Sequence: Synthetic oligonucleotide
  Sense strand starting at position 3414 of SEQ ID NO: 316918
aucugcuagugacuugaaa

SEQ ID NO: 450272 - RNA, 19 nt, Artificial Sequence
  Description of Artificial Sequence: Synthetic oligonucleotide
  Antisense Strand to SEQ ID NO: 450271
uuucaagucacuagcagau

SEQ ID NO: 450273 - RNA, 19 nt, Artificial Sequence
  Description of Artificial Sequence: Synthetic oligonucleotide
  Sense strand starting at position 3416 of SEQ ID NO: 316918
cugcuagugacuugaaaga

SEQ ID NO: 450274 - RNA, 19 nt, Artificial Sequence
  Description of Artificial Sequence: Synthetic oligonucleotide
  Antisense Strand to SEQ ID NO: 450273
ucuuucaagucacuagcag

SEQ ID NO: 450275 - RNA, 19 nt, Artificial Sequence
  Description of Artificial Sequence: Synthetic oligonucleotide
  Sense strand starting at position 3461 of SEQ ID NO: 316918
uuaaucauccagugaaaug

SEQ ID NO: 450276 - RNA, 19 nt, Artificial Sequence
  Description of Artificial Sequence: Synthetic oligonucleotide
  Antisense Strand to SEQ ID NO: 450275
cauuucacuggaugauuaa

SEQ ID NO: 450277 - RNA, 19 nt, Artificial Sequence
  Description of Artificial Sequence: Synthetic oligonucleotide
  Sense strand starting at position 3471 of SEQ ID NO: 316918
agugaaaugcuaugggucu

SEQ ID NO: 450278 - RNA, 19 nt, Artificial Sequence
  Description of Artificial Sequence: Synthetic oligonucleotide
  Antisense Strand to SEQ ID NO: 450277
agacccauagcauuucacu

SEQ ID NO: 450279 - RNA, 19 nt, Artificial Sequence
  Description of Artificial Sequence: Synthetic oligonucleotide
  Sense strand starting at position 3473 of SEQ ID NO: 316918
ugaaaugcuaugggucuau

SEQ ID NO: 450280 - RNA, 19 nt, Artificial Sequence
  Description of Artificial Sequence: Synthetic oligonucleotide
  Antisense Strand to SEQ ID NO: 450279
auagacccauagcauuuca

SEQ ID NO: 450281 - RNA, 19 nt, Artificial Sequence
  Description of Artificial Sequence: Synthetic oligonucleotide
  Sense strand starting at position 3477 of SEQ ID NO: 316918
augcuaugggucuauacaa

SEQ ID NO: 450282 - RNA, 19 nt, Artificial Sequence
  Description of Artificial Sequence: Synthetic oligonucleotide
  Antisense Strand to SEQ ID NO: 450281
uuguauagacccauagcau

SEQ ID NO: 450283 - RNA, 19 nt, Artificial Sequence
  Description of Artificial Sequence: Synthetic oligonucleotide
  Sense strand starting at position 3499 of SEQ ID NO: 316918
acuuuaguugaauguuagu

SEQ ID NO: 450284 - RNA, 19 nt, Artificial Sequence
  Description of Artificial Sequence: Synthetic oligonucleotide
  Antisense Strand to SEQ ID NO: 450283
acuaacauucaacuaaagu

SEQ ID NO: 450285 - RNA, 19 nt, Artificial Sequence
  Description of Artificial Sequence: Synthetic oligonucleotide
  Sense strand starting at position 3577 of SEQ ID NO: 316918
ucaauauguguuuagccua

SEQ ID NO: 450286 - RNA, 19 nt, Artificial Sequence
  Description of Artificial Sequence: Synthetic oligonucleotide
  Antisense Strand to SEQ ID NO: 450285
uaggcuaaacacauauuga

SEQ ID NO: 450287 - RNA, 19 nt, Artificial Sequence
  Description of Artificial Sequence: Synthetic oligonucleotide
  Sense strand starting at position 3582 of SEQ ID NO: 316918
auguguuuagccuaaugau

SEQ ID NO: 450288 - RNA, 19 nt, Artificial Sequence
  Description of Artificial Sequence: Synthetic oligonucleotide
  Antisense Strand to SEQ ID NO: 450287
aucauuaggcuaaacacau

SEQ ID NO: 450289 - RNA, 19 nt, Artificial Sequence
  Description of Artificial Sequence: Synthetic oligonucleotide
  Sense strand starting at position 3914 of SEQ ID NO: 316918
gcugaacuacuauguuuau

SEQ ID NO: 450290 - RNA, 19 nt, Artificial Sequence
  Description of Artificial Sequence: Synthetic oligonucleotide
  Antisense Strand to SEQ ID NO: 450289
auaaacauaguaguucagc

SEQ ID NO: 450291 - RNA, 19 nt, Artificial Sequence
  Description of Artificial Sequence: Synthetic oligonucleotide
  Sense strand starting at position 61 of SEQ ID NO: 316919
aguuaaaguuaccacauga

SEQ ID NO: 450292 - RNA, 19 nt, Artificial Sequence
  Description of Artificial Sequence: Synthetic oligonucleotide
  Antisense Strand to SEQ ID NO: 450291
ucaugugguaacuuuaacu

SEQ ID NO: 450293 - RNA, 19 nt, Artificial Sequence
  Description of Artificial Sequence: Synthetic oligonucleotide
  Sense strand starting at position 284 of SEQ ID NO: 316919
gcgcuacaacaaugaugaa

SEQ ID NO: 450294 - RNA, 19 nt, Artificial Sequence
  Description of Artificial Sequence: Synthetic oligonucleotide
  Antisense Strand to SEQ ID NO: 450293
uucaucauuguuguagcgc

SEQ ID NO: 450295 - RNA, 19 nt, Artificial Sequence
  Description of Artificial Sequence: Synthetic oligonucleotide
  Sense strand starting at position 660 of SEQ ID NO: 316919
gcacauugacagugcuaua

SEQ ID NO: 450296 - RNA, 19 nt, Artificial Sequence
  Description of Artificial Sequence: Synthetic oligonucleotide
  Antisense Strand to SEQ ID NO: 450295
uauagcacugucaaugugc

SEQ ID NO: 450297 - RNA, 19 nt, Artificial Sequence
  Description of Artificial Sequence: Synthetic oligonucleotide
  Sense strand starting at position 670 of SEQ ID NO: 316919
agugcuauaugagcauuaa

SEQ ID NO: 450298 - RNA, 19 nt, Artificial Sequence
  Description of Artificial Sequence: Synthetic oligonucleotide
  Antisense Strand to SEQ ID NO: 450297
uuaaugcucauauagcacu

SEQ ID NO: 450299 - RNA, 19 nt, Artificial Sequence
  Description of Artificial Sequence: Synthetic oligonucleotide
  Sense strand starting at position 671 of SEQ ID NO: 316919
gugcuauaugagcauuaau

SEQ ID NO: 450300 - RNA, 19 nt, Artificial Sequence
  Description of Artificial Sequence: Synthetic oligonucleotide
  Antisense Strand to SEQ ID NO: 450299
auuaaugcucauauagcac

SEQ ID NO: 450301 - RNA, 19 nt, Artificial Sequence
  Description of Artificial Sequence: Synthetic oligonucleotide
  Sense strand starting at position 692 of SEQ ID NO: 316919
ugauuauuacgaugaucuu

SEQ ID NO: 450302 - RNA, 19 nt, Artificial Sequence
  Description of Artificial Sequence: Synthetic oligonucleotide
  Antisense Strand to SEQ ID NO: 450301
aagaucaucguaauaauca

SEQ ID NO: 450303 - RNA, 19 nt, Artificial Sequence
  Description of Artificial Sequence: Synthetic oligonucleotide
  Sense strand starting at position 698 of SEQ ID NO: 316919
uuacgaugaucuuaagaca

SEQ ID NO: 450304 - RNA, 19 nt, Artificial Sequence
  Description of Artificial Sequence: Synthetic oligonucleotide
  Antisense Strand to SEQ ID NO: 450303
ugucuuaagaucaucguaa

SEQ ID NO: 450305 - RNA, 19 nt, Artificial Sequence
  Description of Artificial Sequence: Synthetic oligonucleotide
  Sense strand starting at position 808 of SEQ ID NO: 316919
ggauaaaccugccauuuau

SEQ ID NO: 450306 - RNA, 19 nt, Artificial Sequence
  Description of Artificial Sequence: Synthetic oligonucleotide
  Antisense Strand to SEQ ID NO: 450305
auaaauggcagguuuaucc

SEQ ID NO: 450307 - RNA, 19 nt, Artificial Sequence
  Description of Artificial Sequence: Synthetic oligonucleotide
  Sense strand starting at position 960 of SEQ ID NO: 316919
ucgacauuuguauguaccu

SEQ ID NO: 450308 - RNA, 19 nt, Artificial Sequence
  Description of Artificial Sequence: Synthetic oligonucleotide
  Antisense Strand to SEQ ID NO: 450307
agguacauacaaaugucga

SEQ ID NO: 450309 - RNA, 19 nt, Artificial Sequence
  Description of Artificial Sequence: Synthetic oligonucleotide
  Sense strand starting at position 1249 of SEQ ID NO: 316919
acuaguaaaugacaagagu

SEQ ID NO: 450310 - RNA, 19 nt, Artificial Sequence
  Description of Artificial Sequence: Synthetic oligonucleotide
  Antisense Strand to SEQ ID NO: 450309
acucuugucauuuacuagu

SEQ ID NO: 450311 - RNA, 19 nt, Artificial Sequence
  Description of Artificial Sequence: Synthetic oligonucleotide
  Sense strand starting at position 1336 of SEQ ID NO: 316919
cuguacauauuagauuaga

SEQ ID NO: 450312 - RNA, 19 nt, Artificial Sequence
  Description of Artificial Sequence: Synthetic oligonucleotide
  Antisense Strand to SEQ ID NO: 450311
ucuaaucuaauauguacag

SEQ ID NO: 450313 - RNA, 19 nt, Artificial Sequence
  Description of Artificial Sequence: Synthetic oligonucleotide
  Sense strand starting at position 1416 of SEQ ID NO: 316919
aggaaauuaucaugaacua

SEQ ID NO: 450314 - RNA, 19 nt, Artificial Sequence
  Description of Artificial Sequence: Synthetic oligonucleotide
  Antisense Strand to SEQ ID NO: 450313
uaguucaugauaauuuccu

SEQ ID NO: 450315 - RNA, 19 nt, Artificial Sequence
  Description of Artificial Sequence: Synthetic oligonucleotide
  Sense strand starting at position 2447 of SEQ ID NO: 316919
cugaaagaagccuaaucgu

SEQ ID NO: 450316 - RNA, 19 nt, Artificial Sequence
  Description of Artificial Sequence: Synthetic oligonucleotide
  Antisense Strand to SEQ ID NO: 450315
acgauuaggcuucuuucag

SEQ ID NO: 450317 - RNA, 19 nt, Artificial Sequence
  Description of Artificial Sequence: Synthetic oligonucleotide
  Sense strand starting at position 2501 of SEQ ID NO: 316919
caggcauuugcccgacaga

SEQ ID NO: 450318 - RNA, 19 nt, Artificial Sequence
  Description of Artificial Sequence: Synthetic oligonucleotide
  Antisense Strand to SEQ ID NO: 450317
ucugucgggcaaaugccug

SEQ ID NO: 450319 - RNA, 19 nt, Artificial Sequence
  Description of Artificial Sequence: Synthetic oligonucleotide
  Sense strand starting at position 2765 of SEQ ID NO: 316919
gcagcgguggguguuauua

SEQ ID NO: 450320 - RNA, 19 nt, Artificial Sequence
  Description of Artificial Sequence: Synthetic oligonucleotide
  Antisense Strand to SEQ ID NO: 450319
uaauaacacccaccgcugc

SEQ ID NO: 450321 - RNA, 19 nt, Artificial Sequence
  Description of Artificial Sequence: Synthetic oligonucleotide
  Sense strand starting at position 2775 of SEQ ID NO: 316919
guguuauuaaucgcguaug

SEQ ID NO: 450322 - RNA, 19 nt, Artificial Sequence
  Description of Artificial Sequence: Synthetic oligonucleotide
  Antisense Strand to SEQ ID NO: 450321
cauacgcgauuaauaacac

SEQ ID NO: 450323 - RNA, 19 nt, Artificial Sequence
  Description of Artificial Sequence: Synthetic oligonucleotide
  Sense strand starting at position 2777 of SEQ ID NO: 316919
guuauuaaucgcguaugug

SEQ ID NO: 450324 - RNA, 19 nt, Artificial Sequence
  Description of Artificial Sequence: Synthetic oligonucleotide
  Antisense Strand to SEQ ID NO: 450323
cacauacgcgauuaauaac

SEQ ID NO: 450325 - RNA, 19 nt, Artificial Sequence
  Description of Artificial Sequence: Synthetic oligonucleotide
  Sense strand starting at position 2957 of SEQ ID NO: 316919
cgucacaaugugcagagau

SEQ ID NO: 450326 - RNA, 19 nt, Artificial Sequence
  Description of Artificial Sequence: Synthetic oligonucleotide
  Antisense Strand to SEQ ID NO: 450325
aucucugcacauugugacg

SEQ ID NO: 450327 - RNA, 19 nt, Artificial Sequence
  Description of Artificial Sequence: Synthetic oligonucleotide
  Sense strand starting at position 2978 of SEQ ID NO: 316919
gcguccuuaccgcuaucaa

SEQ ID NO: 450328 - RNA, 19 nt, Artificial Sequence
  Description of Artificial Sequence: Synthetic oligonucleotide
  Antisense Strand to SEQ ID NO: 450327
uugauagcgguaaggacgc

SEQ ID NO: 450329 - RNA, 19 nt, Artificial Sequence
  Description of Artificial Sequence: Synthetic oligonucleotide
  Sense strand starting at position 2979 of SEQ ID NO: 316919
cguccuuaccgcuaucaac

SEQ ID NO: 450330 - RNA, 19 nt, Artificial Sequence
  Description of Artificial Sequence: Synthetic oligonucleotide
  Antisense Strand to SEQ ID NO: 450329
guugauagcgguaaggacg

SEQ ID NO: 450331 - RNA, 19 nt, Artificial Sequence
  Description of Artificial Sequence: Synthetic oligonucleotide
  Sense strand starting at position 2985 of SEQ ID NO: 316919
uaccgcuaucaacguauuu

SEQ ID NO: 450332 - RNA, 19 nt, Artificial Sequence
  Description of Artificial Sequence: Synthetic oligonucleotide
  Antisense Strand to SEQ ID NO: 450331
aaauacguugauagcggua

SEQ ID NO: 450333 - RNA, 19 nt, Artificial Sequence
  Description of Artificial Sequence: Synthetic oligonucleotide
  Sense strand starting at position 3060 of SEQ ID NO: 316919
ccaugaugcccggagucau

SEQ ID NO: 450334 - RNA, 19 nt, Artificial Sequence
  Description of Artificial Sequence: Synthetic oligonucleotide
  Antisense Strand to SEQ ID NO: 450333
augacuccgggcaucaugg

SEQ ID NO: 450335 - RNA, 19 nt, Artificial Sequence
  Description of Artificial Sequence: Synthetic oligonucleotide
  Sense strand starting at position 3070 of SEQ ID NO: 316919
cggagucauuaacaaagga

SEQ ID NO: 450336 - RNA, 19 nt, Artificial Sequence
  Description of Artificial Sequence: Synthetic oligonucleotide
  Antisense Strand to SEQ ID NO: 450335
uccuuuguuaaugacuccg

SEQ ID NO: 450337 - RNA, 19 nt, Artificial Sequence
  Description of Artificial Sequence: Synthetic oligonucleotide
  Sense strand starting at position 3191 of SEQ ID NO: 316919
aauuaaaugguacgaguua

SEQ ID NO: 450338 - RNA, 19 nt, Artificial Sequence
  Description of Artificial Sequence: Synthetic oligonucleotide
  Antisense Strand to SEQ ID NO: 450337
uaacucguaccauuuaauu

SEQ ID NO: 450339 - RNA, 19 nt, Artificial Sequence
  Description of Artificial Sequence: Synthetic oligonucleotide
  Sense strand starting at position 3196 of SEQ ID NO: 316919
aaugguacgaguuauauag

SEQ ID NO: 450340 - RNA, 19 nt, Artificial Sequence
  Description of Artificial Sequence: Synthetic oligonucleotide
  Antisense Strand to SEQ ID NO: 450339
cuauauaacucguaccauu

SEQ ID NO: 450341 - RNA, 19 nt, Artificial Sequence
  Description of Artificial Sequence: Synthetic oligonucleotide
  Sense strand starting at position 3205 of SEQ ID NO: 316919
aguuauauagggugcuuau

SEQ ID NO: 450342 - RNA, 19 nt, Artificial Sequence
  Description of Artificial Sequence: Synthetic oligonucleotide
  Antisense Strand to SEQ ID NO: 450341
auaagcacccuauauaacu

SEQ ID NO: 450343 - RNA, 19 nt, Artificial Sequence
  Description of Artificial Sequence: Synthetic oligonucleotide
  Sense strand starting at position 3328 of SEQ ID NO: 316919
auggauacaugcucugaag

SEQ ID NO: 450344 - RNA, 19 nt, Artificial Sequence
  Description of Artificial Sequence: Synthetic oligonucleotide
  Antisense Strand to SEQ ID NO: 450343
cuucagagcauguauccau

SEQ ID NO: 450345 - RNA, 19 nt, Artificial Sequence
  Description of Artificial Sequence: Synthetic oligonucleotide
  Sense strand starting at position 3330 of SEQ ID NO: 316919
ggauacaugcucugaagga

SEQ ID NO: 450346 - RNA, 19 nt, Artificial Sequence
  Description of Artificial Sequence: Synthetic oligonucleotide
  Antisense Strand to SEQ ID NO: 450345
uccuucagagcauguaucc

SEQ ID NO: 450347 - RNA, 19 nt, Artificial Sequence
  Description of Artificial Sequence: Synthetic oligonucleotide
  Sense strand starting at position 3331 of SEQ ID NO: 316919
gauacaugcucugaaggaa

SEQ ID NO: 450348 - RNA, 19 nt, Artificial Sequence
  Description of Artificial Sequence: Synthetic oligonucleotide
  Antisense Strand to SEQ ID NO: 450347
uuccuucagagcauguauc

SEQ ID NO: 450349 - RNA, 19 nt, Artificial Sequence
  Description of Artificial Sequence: Synthetic oligonucleotide
  Sense strand starting at position 3334 of SEQ ID NO: 316919
acaugcucugaaggaauga

SEQ ID NO: 450350 - RNA, 19 nt, Artificial Sequence
  Description of Artificial Sequence: Synthetic oligonucleotide
  Antisense Strand to SEQ ID NO: 450349
ucauuccuucagagcaugu

SEQ ID NO: 450351 - RNA, 19 nt, Artificial Sequence
  Description of Artificial Sequence: Synthetic oligonucleotide
  Sense strand starting at position 3375 of SEQ ID NO: 316919
agaacaaagucguacaaua

SEQ ID NO: 450352 - RNA, 19 nt, Artificial Sequence
  Description of Artificial Sequence: Synthetic oligonucleotide
  Antisense Strand to SEQ ID NO: 450351
uauuguacgacuuuguucu

SEQ ID NO: 450353 - RNA, 19 nt, Artificial Sequence
  Description of Artificial Sequence: Synthetic oligonucleotide
  Sense strand starting at position 3385 of SEQ ID NO: 316919
cguacaauaugucuacagu

SEQ ID NO: 450354 - RNA, 19 nt, Artificial Sequence
  Description of Artificial Sequence: Synthetic oligonucleotide
  Antisense Strand to SEQ ID NO: 450353
acuguagacauauuguacg

SEQ ID NO: 450355 - RNA, 19 nt, Artificial Sequence
  Description of Artificial Sequence: Synthetic oligonucleotide
  Sense strand starting at position 3386 of SEQ ID NO: 316919
guacaauaugucuacagua

SEQ ID NO: 450356 - RNA, 19 nt, Artificial Sequence
  Description of Artificial Sequence: Synthetic oligonucleotide
  Antisense Strand to SEQ ID NO: 450355
uacuguagacauauuguac

SEQ ID NO: 450357 - RNA, 19 nt, Artificial Sequence
  Description of Artificial Sequence: Synthetic oligonucleotide
  Sense strand starting at position 3485 of SEQ ID NO: 316919
cagaaaggguaguaucauu

SEQ ID NO: 450358 - RNA, 19 nt, Artificial Sequence
  Description of Artificial Sequence: Synthetic oligonucleotide
  Antisense Strand to SEQ ID NO: 450357
aaugauacuacccuuucug

SEQ ID NO: 450359 - RNA, 19 nt, Artificial Sequence
  Description of Artificial Sequence: Synthetic oligonucleotide
  Sense strand starting at position 3604 of SEQ ID NO: 316919
gacugaaagucagcuugaa

SEQ ID NO: 450360 - RNA, 19 nt, Artificial Sequence
  Description of Artificial Sequence: Synthetic oligonucleotide
  Antisense Strand to SEQ ID NO: 450359
uucaagcugacuuucaguc

SEQ ID NO: 450361 - RNA, 19 nt, Artificial Sequence
  Description of Artificial Sequence: Synthetic oligonucleotide
  Sense strand starting at position 3678 of SEQ ID NO: 316919
uggcauaugccguauuucu

SEQ ID NO: 450362 - RNA, 19 nt, Artificial Sequence
  Description of Artificial Sequence: Synthetic oligonucleotide
  Antisense Strand to SEQ ID NO: 450361
agaaauacggcauaugcca

SEQ ID NO: 450363 - RNA, 19 nt, Artificial Sequence
  Description of Artificial Sequence: Synthetic oligonucleotide
  Sense strand starting at position 3685 of SEQ ID NO: 316919
ugccguauuucuggauuuc

SEQ ID NO: 450364 - RNA, 19 nt, Artificial Sequence
  Description of Artificial Sequence: Synthetic oligonucleotide
  Antisense Strand to SEQ ID NO: 450363
gaaauccagaaauacggca

SEQ ID NO: 450365 - RNA, 19 nt, Artificial Sequence
  Description of Artificial Sequence: Synthetic oligonucleotide
  Sense strand starting at position 3722 of SEQ ID NO: 316919
ucuauauaugcacagaguu

SEQ ID NO: 450366 - RNA, 19 nt, Artificial Sequence
  Description of Artificial Sequence: Synthetic oligonucleotide
  Antisense Strand to SEQ ID NO: 450365
aacucugugcauauauaga

SEQ ID NO: 450367 - RNA, 19 nt, Artificial Sequence
  Description of Artificial Sequence: Synthetic oligonucleotide
  Sense strand starting at position 3771 of SEQ ID NO: 316919
accaauuucguuuguagac

SEQ ID NO: 450368 - RNA, 19 nt, Artificial Sequence
  Description of Artificial Sequence: Synthetic oligonucleotide
  Antisense Strand to SEQ ID NO: 450367
gucuacaaacgaaauuggu

SEQ ID NO: 450369 - RNA, 19 nt, Artificial Sequence
  Description of Artificial Sequence: Synthetic oligonucleotide
  Sense strand starting at position 3903 of SEQ ID NO: 316919
agcucuucccauugauggu

SEQ ID NO: 450370 - RNA, 19 nt, Artificial Sequence
  Description of Artificial Sequence: Synthetic oligonucleotide
  Antisense Strand to SEQ ID NO: 450369
accaucaaugggaagagcu

SEQ ID NO: 450371 - RNA, 19 nt, Artificial Sequence
  Description of Artificial Sequence: Synthetic oligonucleotide
  Sense strand starting at position 592 of SEQ ID NO: 316920
ugacauagcucgcacagaa

SEQ ID NO: 450372 - RNA, 19 nt, Artificial Sequence
  Description of Artificial Sequence: Synthetic oligonucleotide
  Antisense Strand to SEQ ID NO: 450371
uucugugcgagcuauguca

SEQ ID NO: 450373 - RNA, 19 nt, Artificial Sequence
  Description of Artificial Sequence: Synthetic oligonucleotide
  Sense strand starting at position 2439 of SEQ ID NO: 316920
uuguauuagguccacacau

SEQ ID NO: 450374 - RNA, 19 nt, Artificial Sequence
  Description of Artificial Sequence: Synthetic oligonucleotide
  Antisense Strand to SEQ ID NO: 450373
auguguggaccuaauacaa

SEQ ID NO: 450375 - RNA, 19 nt, Artificial Sequence
  Description of Artificial Sequence: Synthetic oligonucleotide
  Sense strand starting at position 2441 of SEQ ID NO: 316920
guauuagguccacacauau

SEQ ID NO: 450376 - RNA, 19 nt, Artificial Sequence
  Description of Artificial Sequence: Synthetic oligonucleotide
  Antisense Strand to SEQ ID NO: 450375
auauguguggaccuaauac

SEQ ID NO: 450377 - RNA, 19 nt, Artificial Sequence
  Description of Artificial Sequence: Synthetic oligonucleotide
  Sense strand starting at position 2597 of SEQ ID NO: 316920
cccgauuccugagguagca

SEQ ID NO: 450378 - RNA, 19 nt, Artificial Sequence
  Description of Artificial Sequence: Synthetic oligonucleotide
  Antisense Strand to SEQ ID NO: 450377
ugcuaccucaggaaucggg

SEQ ID NO: 450379 - RNA, 19 nt, Artificial Sequence
  Description of Artificial Sequence: Synthetic oligonucleotide
  Sense strand starting at position 2599 of SEQ ID NO: 316920
cgauuccugagguagcaaa

SEQ ID NO: 450380 - RNA, 19 nt, Artificial Sequence
  Description of Artificial Sequence: Synthetic oligonucleotide
  Antisense Strand to SEQ ID NO: 450379
uuugcuaccucaggaaucg

SEQ ID NO: 450381 - RNA, 19 nt, Artificial Sequence
  Description of Artificial Sequence: Synthetic oligonucleotide
  Sense strand starting at position 2820 of SEQ ID NO: 316920
cgucaaagcccacauugau

SEQ ID NO: 450382 - RNA, 19 nt, Artificial Sequence
  Description of Artificial Sequence: Synthetic oligonucleotide
  Antisense Strand to SEQ ID NO: 450381
aucaaugugggcuuugacg

SEQ ID NO: 450383 - RNA, 19 nt, Artificial Sequence
  Description of Artificial Sequence: Synthetic oligonucleotide
  Sense strand starting at position 19 of SEQ ID NO: 316921
guuggacugcuuuaauaaa

SEQ ID NO: 450384 - RNA, 19 nt, Artificial Sequence
  Description of Artificial Sequence: Synthetic oligonucleotide
  Antisense Strand to SEQ ID NO: 450383
uuuauuaaagcaguccaac

SEQ ID NO: 450385 - RNA, 19 nt, Artificial Sequence
  Description of Artificial Sequence: Synthetic oligonucleotide
  Sense strand starting at position 222 of SEQ ID NO: 316921
gcaaguacucuacauaaag

SEQ ID NO: 450386 - RNA, 19 nt, Artificial Sequence
  Description of Artificial Sequence: Synthetic oligonucleotide
  Antisense Strand to SEQ ID NO: 450385
cuuuauguagaguacuugc

SEQ ID NO: 450387 - RNA, 19 nt, Artificial Sequence
  Description of Artificial Sequence: Synthetic oligonucleotide
  Sense strand starting at position 312 of SEQ ID NO: 316921
augugcuaucucugauuuc

SEQ ID NO: 450388 - RNA, 19 nt, Artificial Sequence
  Description of Artificial Sequence: Synthetic oligonucleotide
  Antisense Strand to SEQ ID NO: 450387
gaaaucagagauagcacau

SEQ ID NO: 450389 - RNA, 19 nt, Artificial Sequence
  Description of Artificial Sequence: Synthetic oligonucleotide
  Sense strand starting at position 321 of SEQ ID NO: 316921
cucugauuuccucggcaag

SEQ ID NO: 450390 - RNA, 19 nt, Artificial Sequence
  Description of Artificial Sequence: Synthetic oligonucleotide
  Antisense Strand to SEQ ID NO: 450389
cuugccgaggaaaucagag

SEQ ID NO: 450391 - RNA, 19 nt, Artificial Sequence
  Description of Artificial Sequence: Synthetic oligonucleotide
  Sense strand starting at position 322 of SEQ ID NO: 316921
ucugauuuccucggcaagu

SEQ ID NO: 450392 - RNA, 19 nt, Artificial Sequence
  Description of Artificial Sequence: Synthetic oligonucleotide
  Antisense Strand to SEQ ID NO: 450391
acuugccgaggaaaucaga

SEQ ID NO: 450393 - RNA, 19 nt, Artificial Sequence
  Description of Artificial Sequence: Synthetic oligonucleotide
  Sense strand starting at position 323 of SEQ ID NO: 316921
cugauuuccucggcaagua

SEQ ID NO: 450394 - RNA, 19 nt, Artificial Sequence
  Description of Artificial Sequence: Synthetic oligonucleotide
  Antisense Strand to SEQ ID NO: 450393
uacuugccgaggaaaucag

SEQ ID NO: 450395 - RNA, 19 nt, Artificial Sequence
  Description of Artificial Sequence: Synthetic oligonucleotide
  Sense strand starting at position 332 of SEQ ID NO: 316921
ucggcaaguauugacagau

SEQ ID NO: 450396 - RNA, 19 nt, Artificial Sequence
  Description of Artificial Sequence: Synthetic oligonucleotide
  Antisense Strand to SEQ ID NO: 450395
aucugucaauacuugccga

SEQ ID NO: 450397 - RNA, 19 nt, Artificial Sequence
  Description of Artificial Sequence: Synthetic oligonucleotide
  Sense strand starting at position 348 of SEQ ID NO: 316921
gauuaagcagagugauaau

SEQ ID NO: 450398 - RNA, 19 nt, Artificial Sequence
  Description of Artificial Sequence: Synthetic oligonucleotide
  Antisense Strand to SEQ ID NO: 450397
auuaucacucugcuuaauc

SEQ ID NO: 450399 - RNA, 19 nt, Artificial Sequence
  Description of Artificial Sequence: Synthetic oligonucleotide
  Sense strand starting at position 357 of SEQ ID NO: 316921
gagugauaaugcucaagau

SEQ ID NO: 450400 - RNA, 19 nt, Artificial Sequence
  Description of Artificial Sequence: Synthetic oligonucleotide
  Antisense Strand to SEQ ID NO: 450399
aucuugagcauuaucacuc

SEQ ID NO: 450401 - RNA, 19 nt, Artificial Sequence
  Description of Artificial Sequence: Synthetic oligonucleotide
  Sense strand starting at position 428 of SEQ ID NO: 316921
uuauaauggcuguaaauuc

SEQ ID NO: 450402 - RNA, 19 nt, Artificial Sequence
  Description of Artificial Sequence: Synthetic oligonucleotide
  Antisense Strand to SEQ ID NO: 450401
gaauuuacagccauuauaa

SEQ ID NO: 450403 - RNA, 19 nt, Artificial Sequence
  Description of Artificial Sequence: Synthetic oligonucleotide
  Sense strand starting at position 610 of SEQ ID NO: 316921
agugaaucgaaguaauauu

SEQ ID NO: 450404 - RNA, 19 nt, Artificial Sequence
  Description of Artificial Sequence: Synthetic oligonucleotide
  Antisense Strand to SEQ ID NO: 450403
aauauuacuucgauucacu

SEQ ID NO: 450405 - RNA, 19 nt, Artificial Sequence
  Description of Artificial Sequence: Synthetic oligonucleotide
  Sense strand starting at position 727 of SEQ ID NO: 316921
aaucuuggccuaggaaaga

SEQ ID NO: 450406 - RNA, 19 nt, Artificial Sequence
  Description of Artificial Sequence: Synthetic oligonucleotide
  Antisense Strand to SEQ ID NO: 450405
ucuuuccuaggccaagauu

SEQ ID NO: 450407 - RNA, 19 nt, Artificial Sequence
  Description of Artificial Sequence: Synthetic oligonucleotide
  Sense strand starting at position 1557 of SEQ ID NO: 316921
cgcgguuugguguccguua

SEQ ID NO: 450408 - RNA, 19 nt, Artificial Sequence
  Description of Artificial Sequence: Synthetic oligonucleotide
  Antisense Strand to SEQ ID NO: 450407
uaacggacaccaaaccgcg

SEQ ID NO: 450409 - RNA, 19 nt, Artificial Sequence
  Description of Artificial Sequence: Synthetic oligonucleotide
  Sense strand starting at position 1847 of SEQ ID NO: 316921
cuccguucucuugacaaug

SEQ ID NO: 450410 - RNA, 19 nt, Artificial Sequence
  Description of Artificial Sequence: Synthetic oligonucleotide
  Antisense Strand to SEQ ID NO: 450409
cauugucaagagaacggag

SEQ ID NO: 450411 - RNA, 19 nt, Artificial Sequence
  Description of Artificial Sequence: Synthetic oligonucleotide
  Sense strand starting at position 1895 of SEQ ID NO: 316921
ggaaccgaucugugguuaa

SEQ ID NO: 450412 - RNA, 19 nt, Artificial Sequence
  Description of Artificial Sequence: Synthetic oligonucleotide
  Antisense Strand to SEQ ID NO: 450411
uuaaccacagaucgguucc

SEQ ID NO: 450413 - RNA, 19 nt, Artificial Sequence
  Description of Artificial Sequence: Synthetic oligonucleotide
  Sense strand starting at position 2273 of SEQ ID NO: 316921
acacuugauugggcaagga

SEQ ID NO: 450414 - RNA, 19 nt, Artificial Sequence
  Description of Artificial Sequence: Synthetic oligonucleotide
  Antisense Strand to SEQ ID NO: 450413
uccuugcccaaucaagugu

SEQ ID NO: 450415 - RNA, 19 nt, Artificial Sequence
  Description of Artificial Sequence: Synthetic oligonucleotide
  Sense strand starting at position 2330 of SEQ ID NO: 316921
ucuuuacgggcuugagaaa

SEQ ID NO: 450416 - RNA, 19 nt, Artificial Sequence
  Description of Artificial Sequence: Synthetic oligonucleotide
  Antisense Strand to SEQ ID NO: 450415
uuucucaagcccguaaaga

SEQ ID NO: 450417 - RNA, 19 nt, Artificial Sequence
  Description of Artificial Sequence: Synthetic oligonucleotide
  Sense strand starting at position 2387 of SEQ ID NO: 316921
cgacuuuaccuuuaaaugu

SEQ ID NO: 450418 - RNA, 19 nt, Artificial Sequence
  Description of Artificial Sequence: Synthetic oligonucleotide
  Antisense Strand to SEQ ID NO: 450417
acauuuaaagguaaagucg

SEQ ID NO: 450419 - RNA, 19 nt, Artificial Sequence
  Description of Artificial Sequence: Synthetic oligonucleotide
  Sense strand starting at position 2481 of SEQ ID NO: 316921
ucucccgaucaguaaugua

SEQ ID NO: 450420 - RNA, 19 nt, Artificial Sequence
  Description of Artificial Sequence: Synthetic oligonucleotide
  Antisense Strand to SEQ ID NO: 450419
uacauuacugaucgggaga

SEQ ID NO: 450421 - RNA, 19 nt, Artificial Sequence
  Description of Artificial Sequence: Synthetic oligonucleotide
  Sense strand starting at position 2523 of SEQ ID NO: 316921
gcggaaccuuauccaauga

SEQ ID NO: 450422 - RNA, 19 nt, Artificial Sequence
  Description of Artificial Sequence: Synthetic oligonucleotide
  Antisense Strand to SEQ ID NO: 450421
ucauuggauaagguuccgc

SEQ ID NO: 450423 - RNA, 19 nt, Artificial Sequence
  Description of Artificial Sequence: Synthetic oligonucleotide
  Sense strand starting at position 2579 of SEQ ID NO: 316921
cugaaaguccagugcuaau

SEQ ID NO: 450424 - RNA, 19 nt, Artificial Sequence
  Description of Artificial Sequence: Synthetic oligonucleotide
  Antisense Strand to SEQ ID NO: 450423
auuagcacuggacuuucag

SEQ ID NO: 450425 - RNA, 19 nt, Artificial Sequence
  Description of Artificial Sequence: Synthetic oligonucleotide
  Sense strand starting at position 2650 of SEQ ID NO: 316921
cauugauugcacuggcauu

SEQ ID NO: 450426 - RNA, 19 nt, Artificial Sequence
  Description of Artificial Sequence: Synthetic oligonucleotide
  Antisense Strand to SEQ ID NO: 450425
aaugccagugcaaucaaug

SEQ ID NO: 450427 - RNA, 19 nt, Artificial Sequence
  Description of Artificial Sequence: Synthetic oligonucleotide
  Sense strand starting at position 2676 of SEQ ID NO: 316921
ccggaagagcuuuaaucaa

SEQ ID NO: 450428 - RNA, 19 nt, Artificial Sequence
  Description of Artificial Sequence: Synthetic oligonucleotide
  Antisense Strand to SEQ ID NO: 450427
uugauuaaagcucuuccgg

SEQ ID NO: 450429 - RNA, 19 nt, Artificial Sequence
  Description of Artificial Sequence: Synthetic oligonucleotide
  Sense strand starting at position 2759 of SEQ ID NO: 316921
auuacaaguuccguuuaag

SEQ ID NO: 450430 - RNA, 19 nt, Artificial Sequence
  Description of Artificial Sequence: Synthetic oligonucleotide
  Antisense Strand to SEQ ID NO: 450429
cuuaaacggaacuuguaau

SEQ ID NO: 450431 - RNA, 19 nt, Artificial Sequence
  Description of Artificial Sequence: Synthetic oligonucleotide
  Sense strand starting at position 2762 of SEQ ID NO: 316921
acaaguuccguuuaaguca

SEQ ID NO: 450432 - RNA, 19 nt, Artificial Sequence
  Description of Artificial Sequence: Synthetic oligonucleotide
  Antisense Strand to SEQ ID NO: 450431
ugacuuaaacggaacuugu

SEQ ID NO: 450433 - RNA, 19 nt, Artificial Sequence
  Description of Artificial Sequence: Synthetic oligonucleotide
  Sense strand starting at position 2972 of SEQ ID NO: 316921
gagggaaucugauaccaga

SEQ ID NO: 450434 - RNA, 19 nt, Artificial Sequence
  Description of Artificial Sequence: Synthetic oligonucleotide
  Antisense Strand to SEQ ID NO: 450433
ucugguaucagauucccuc

SEQ ID NO: 450435 - RNA, 19 nt, Artificial Sequence
  Description of Artificial Sequence: Synthetic oligonucleotide
  Sense strand starting at position 3082 of SEQ ID NO: 316921
ucccacuggagcuguaaga

SEQ ID NO: 450436 - RNA, 19 nt, Artificial Sequence
  Description of Artificial Sequence: Synthetic oligonucleotide
  Antisense Strand to SEQ ID NO: 450435
ucuuacagcuccaguggga

SEQ ID NO: 450437 - RNA, 19 nt, Artificial Sequence
  Description of Artificial Sequence: Synthetic oligonucleotide
  Sense strand starting at position 3238 of SEQ ID NO: 316921
guacauuugcagugauacc

SEQ ID NO: 450438 - RNA, 19 nt, Artificial Sequence
  Description of Artificial Sequence: Synthetic oligonucleotide
  Antisense Strand to SEQ ID NO: 450437
gguaucacugcaaauguac

SEQ ID NO: 450439 - RNA, 19 nt, Artificial Sequence
  Description of Artificial Sequence: Synthetic oligonucleotide
  Sense strand starting at position 3337 of SEQ ID NO: 316921
guaaguaaacaucaguagu

SEQ ID NO: 450440 - RNA, 19 nt, Artificial Sequence
  Description of Artificial Sequence: Synthetic oligonucleotide
  Antisense Strand to SEQ ID NO: 450439
acuacugauguuuacuuac

SEQ ID NO: 450441 - RNA, 19 nt, Artificial Sequence
  Description of Artificial Sequence: Synthetic oligonucleotide
  Sense strand starting at position 3488 of SEQ ID NO: 316921
cgaugaacuaucuggguug

SEQ ID NO: 450442 - RNA, 19 nt, Artificial Sequence
  Description of Artificial Sequence: Synthetic oligonucleotide
  Antisense Strand to SEQ ID NO: 450441
caacccagauaguucaucg

SEQ ID NO: 450443 - RNA, 19 nt, Artificial Sequence
  Description of Artificial Sequence: Synthetic oligonucleotide
  Sense strand starting at position 3491 of SEQ ID NO: 316921
ugaacuaucuggguugcau

SEQ ID NO: 450444 - RNA, 19 nt, Artificial Sequence
  Description of Artificial Sequence: Synthetic oligonucleotide
  Antisense Strand to SEQ ID NO: 450443
augcaacccagauaguuca

SEQ ID NO: 450445 - RNA, 19 nt, Artificial Sequence
  Description of Artificial Sequence: Synthetic oligonucleotide
  Sense strand starting at position 3630 of SEQ ID NO: 316921
cugguuuacucacuuacca

SEQ ID NO: 450446 - RNA, 19 nt, Artificial Sequence
  Description of Artificial Sequence: Synthetic oligonucleotide
  Antisense Strand to SEQ ID NO: 450445
ugguaagugaguaaaccag

SEQ ID NO: 450447 - RNA, 19 nt, Artificial Sequence
  Description of Artificial Sequence: Synthetic oligonucleotide
  Sense strand starting at position 3663 of SEQ ID NO: 316921
gacugcuucuggguucuaa

SEQ ID NO: 450448 - RNA, 19 nt, Artificial Sequence
  Description of Artificial Sequence: Synthetic oligonucleotide
  Antisense Strand to SEQ ID NO: 450447
uuagaacccagaagcaguc

SEQ ID NO: 450449 - RNA, 19 nt, Artificial Sequence
  Description of Artificial Sequence: Synthetic oligonucleotide
  Sense strand starting at position 3673 of SEQ ID NO: 316921
ggguucuaauauucuacau

SEQ ID NO: 450450 - RNA, 19 nt, Artificial Sequence
  Description of Artificial Sequence: Synthetic oligonucleotide
  Antisense Strand to SEQ ID NO: 450449
auguagaauauuagaaccc

SEQ ID NO: 450451 - RNA, 19 nt, Artificial Sequence
  Description of Artificial Sequence: Synthetic oligonucleotide
  Sense strand starting at position 3717 of SEQ ID NO: 316921
auguacugauaucuaguau

SEQ ID NO: 450452 - RNA, 19 nt, Artificial Sequence
  Description of Artificial Sequence: Synthetic oligonucleotide
  Antisense Strand to SEQ ID NO: 450451
auacuagauaucaguacau

SEQ ID NO: 450453 - RNA, 19 nt, Artificial Sequence
  Description of Artificial Sequence: Synthetic oligonucleotide
  Sense strand starting at position 3723 of SEQ ID NO: 316921
ugauaucuaguaugaucuu

SEQ ID NO: 450454 - RNA, 19 nt, Artificial Sequence
  Description of Artificial Sequence: Synthetic oligonucleotide
  Antisense Strand to SEQ ID NO: 450453
aagaucauacuagauauca

SEQ ID NO: 450455 - RNA, 19 nt, Artificial Sequence
  Description of Artificial Sequence: Synthetic oligonucleotide
  Sense strand starting at position 3729 of SEQ ID NO: 316921
cuaguaugaucuucuggag

SEQ ID NO: 450456 - RNA, 19 nt, Artificial Sequence
  Description of Artificial Sequence: Synthetic oligonucleotide
  Antisense Strand to SEQ ID NO: 450455
cuccagaagaucauacuag

SEQ ID NO: 450457 - RNA, 19 nt, Artificial Sequence
  Description of Artificial Sequence: Synthetic oligonucleotide
  Sense strand starting at position 3746 of SEQ ID NO: 316921
agauaaagauauccagugu

SEQ ID NO: 450458 - RNA, 19 nt, Artificial Sequence
  Description of Artificial Sequence: Synthetic oligonucleotide
  Antisense Strand to SEQ ID NO: 450457
acacuggauaucuuuaucu

SEQ ID NO: 450459 - RNA, 19 nt, Artificial Sequence
  Description of Artificial Sequence: Synthetic oligonucleotide
  Sense strand starting at position 3837 of SEQ ID NO: 316921
gcccuaugauauccagcuu

SEQ ID NO: 450460 - RNA, 19 nt, Artificial Sequence
  Description of Artificial Sequence: Synthetic oligonucleotide
  Antisense Strand to SEQ ID NO: 450459
aagcuggauaucauagggc

SEQ ID NO: 450461 - RNA, 19 nt, Artificial Sequence
  Description of Artificial Sequence: Synthetic oligonucleotide
  Sense strand starting at position 3843 of SEQ ID NO: 316921
ugauauccagcuuguuacu

SEQ ID NO: 450462 - RNA, 19 nt, Artificial Sequence
  Description of Artificial Sequence: Synthetic oligonucleotide
  Antisense Strand to SEQ ID NO: 450461
aguaacaagcuggauauca

SEQ ID NO: 450463 - RNA, 19 nt, Artificial Sequence
  Description of Artificial Sequence: Synthetic oligonucleotide
  Sense strand starting at position 10 of SEQ ID NO: 316922
caaagaauaucuguuuagg

SEQ ID NO: 450464 - RNA, 19 nt, Artificial Sequence
  Description of Artificial Sequence: Synthetic oligonucleotide
  Antisense Strand to SEQ ID NO: 450463
ccuaaacagauauucuuug

SEQ ID NO: 450465 - RNA, 19 nt, Artificial Sequence
  Description of Artificial Sequence: Synthetic oligonucleotide
  Sense strand starting at position 12 of SEQ ID NO: 316922
aagaauaucuguuuagggu

SEQ ID NO: 450466 - RNA, 19 nt, Artificial Sequence
  Description of Artificial Sequence: Synthetic oligonucleotide
  Antisense Strand to SEQ ID NO: 450465
acccuaaacagauauucuu

SEQ ID NO: 450467 - RNA, 19 nt, Artificial Sequence
  Description of Artificial Sequence: Synthetic oligonucleotide
  Sense strand starting at position 312 of SEQ ID NO: 316922
acuuauuaaguacgaaaca

SEQ ID NO: 450468 - RNA, 19 nt, Artificial Sequence
  Description of Artificial Sequence: Synthetic oligonucleotide
  Antisense Strand to SEQ ID NO: 450467
uguuucguacuuaauaagu

SEQ ID NO: 450469 - RNA, 19 nt, Artificial Sequence
  Description of Artificial Sequence: Synthetic oligonucleotide
  Sense strand starting at position 519 of SEQ ID NO: 316922
ugucaaagucaugaauagu

SEQ ID NO: 450470 - RNA, 19 nt, Artificial Sequence
  Description of Artificial Sequence: Synthetic oligonucleotide
  Antisense Strand to SEQ ID NO: 450469
acuauucaugacuuugaca

SEQ ID NO: 450471 - RNA, 19 nt, Artificial Sequence
  Description of Artificial Sequence: Synthetic oligonucleotide
  Sense strand starting at position 720 of SEQ ID NO: 316922
uuaagcaugcaagagguua

SEQ ID NO: 450472 - RNA, 19 nt, Artificial Sequence
  Description of Artificial Sequence: Synthetic oligonucleotide
  Antisense Strand to SEQ ID NO: 450471
uaaccucuugcaugcuuaa

SEQ ID NO: 450473 - RNA, 19 nt, Artificial Sequence
  Description of Artificial Sequence: Synthetic oligonucleotide
  Sense strand starting at position 732 of SEQ ID NO: 316922
gagguuaaacauugcugaa

SEQ ID NO: 450474 - RNA, 19 nt, Artificial Sequence
  Description of Artificial Sequence: Synthetic oligonucleotide
  Antisense Strand to SEQ ID NO: 450473
uucagcaauguuuaaccuc

SEQ ID NO: 450475 - RNA, 19 nt, Artificial Sequence
  Description of Artificial Sequence: Synthetic oligonucleotide
  Sense strand starting at position 734 of SEQ ID NO: 316922
gguuaaacauugcugaaau

SEQ ID NO: 450476 - RNA, 19 nt, Artificial Sequence
  Description of Artificial Sequence: Synthetic oligonucleotide
  Antisense Strand to SEQ ID NO: 450475
auuucagcaauguuuaacc

SEQ ID NO: 450477 - RNA, 19 nt, Artificial Sequence
  Description of Artificial Sequence: Synthetic oligonucleotide
  Sense strand starting at position 746 of SEQ ID NO: 316922
cugaaauagugagacauuu

SEQ ID NO: 450478 - RNA, 19 nt, Artificial Sequence
  Description of Artificial Sequence: Synthetic oligonucleotide
  Antisense Strand to SEQ ID NO: 450477
aaaugucucacuauuucag

SEQ ID NO: 450479 - RNA, 19 nt, Artificial Sequence
  Description of Artificial Sequence: Synthetic oligonucleotide
  Sense strand starting at position 803 of SEQ ID NO: 316922
agcacaagcgacuauaaua

SEQ ID NO: 450480 - RNA, 19 nt, Artificial Sequence
  Description of Artificial Sequence: Synthetic oligonucleotide
  Antisense Strand to SEQ ID NO: 450479
uauuauagucgcuugugcu

SEQ ID NO: 450481 - RNA, 19 nt, Artificial Sequence
  Description of Artificial Sequence: Synthetic oligonucleotide
  Sense strand starting at position 823 of SEQ ID NO: 316922
aagcgaauacuguauuauu

SEQ ID NO: 450482 - RNA, 19 nt, Artificial Sequence
  Description of Artificial Sequence: Synthetic oligonucleotide
  Antisense Strand to SEQ ID NO: 450481
aauaauacaguauucgcuu

SEQ ID NO: 450483 - RNA, 19 nt, Artificial Sequence
  Description of Artificial Sequence: Synthetic oligonucleotide
  Sense strand starting at position 997 of SEQ ID NO: 316922
uuggaucuacugcauaaca

SEQ ID NO: 450484 - RNA, 19 nt, Artificial Sequence
  Description of Artificial Sequence: Synthetic oligonucleotide
  Antisense Strand to SEQ ID NO: 450483
uguuaugcaguagauccaa

SEQ ID NO: 450485 - RNA, 19 nt, Artificial Sequence
  Description of Artificial Sequence: Synthetic oligonucleotide
  Sense strand starting at position 1274 of SEQ ID NO: 316922
cugaaaguauugcucuaaa

SEQ ID NO: 450486 - RNA, 19 nt, Artificial Sequence
  Description of Artificial Sequence: Synthetic oligonucleotide
  Antisense Strand to SEQ ID NO: 450485
uuuagagcaauacuuucag

SEQ ID NO: 450487 - RNA, 19 nt, Artificial Sequence
  Description of Artificial Sequence: Synthetic oligonucleotide
  Sense strand starting at position 1377 of SEQ ID NO: 316922
gugcauaaucacuaacaga

SEQ ID NO: 450488 - RNA, 19 nt, Artificial Sequence
  Description of Artificial Sequence: Synthetic oligonucleotide
  Antisense Strand to SEQ ID NO: 450487
ucuguuagugauuaugcac

SEQ ID NO: 450489 - RNA, 19 nt, Artificial Sequence
  Description of Artificial Sequence: Synthetic oligonucleotide
  Sense strand starting at position 1387 of SEQ ID NO: 316922
acuaacagauugucuugua

SEQ ID NO: 450490 - RNA, 19 nt, Artificial Sequence
  Description of Artificial Sequence: Synthetic oligonucleotide
  Antisense Strand to SEQ ID NO: 450489
uacaagacaaucuguuagu

SEQ ID NO: 450491 - RNA, 19 nt, Artificial Sequence
  Description of Artificial Sequence: Synthetic oligonucleotide
  Sense strand starting at position 1388 of SEQ ID NO: 316922
cuaacagauugucuuguaa

SEQ ID NO: 450492 - RNA, 19 nt, Artificial Sequence
  Description of Artificial Sequence: Synthetic oligonucleotide
  Antisense Strand to SEQ ID NO: 450491
uuacaagacaaucuguuag

SEQ ID NO: 450493 - RNA, 19 nt, Artificial Sequence
  Description of Artificial Sequence: Synthetic oligonucleotide
  Sense strand starting at position 1619 of SEQ ID NO: 316922
cuaaacgcuguggaaauau

SEQ ID NO: 450494 - RNA, 19 nt, Artificial Sequence
  Description of Artificial Sequence: Synthetic oligonucleotide
  Antisense Strand to SEQ ID NO: 450493
auauuuccacagcguuuag

SEQ ID NO: 450495 - RNA, 19 nt, Artificial Sequence
  Description of Artificial Sequence: Synthetic oligonucleotide
  Sense strand starting at position 1951 of SEQ ID NO: 316922
guuugucucagucacugaa

SEQ ID NO: 450496 - RNA, 19 nt, Artificial Sequence
  Description of Artificial Sequence: Synthetic oligonucleotide
  Antisense Strand to SEQ ID NO: 450495
uucagugacugagacaaac

SEQ ID NO: 450497 - RNA, 19 nt, Artificial Sequence
  Description of Artificial Sequence: Synthetic oligonucleotide
  Sense strand starting at position 2471 of SEQ ID NO: 316922
uuugaacggauccguauuu

SEQ ID NO: 450498 - RNA, 19 nt, Artificial Sequence
  Description of Artificial Sequence: Synthetic oligonucleotide
  Antisense Strand to SEQ ID NO: 450497
aaauacggauccguucaaa

SEQ ID NO: 450499 - RNA, 19 nt, Artificial Sequence
  Description of Artificial Sequence: Synthetic oligonucleotide
  Sense strand starting at position 2543 of SEQ ID NO: 316922
ugcagaaacuugccuggaa

SEQ ID NO: 450500 - RNA, 19 nt, Artificial Sequence
  Description of Artificial Sequence: Synthetic oligonucleotide
  Antisense Strand to SEQ ID NO: 450499
uuccaggcaaguuucugca

SEQ ID NO: 450501 - RNA, 19 nt, Artificial Sequence
  Description of Artificial Sequence: Synthetic oligonucleotide
  Sense strand starting at position 2545 of SEQ ID NO: 316922
cagaaacuugccuggaaga

SEQ ID NO: 450502 - RNA, 19 nt, Artificial Sequence
  Description of Artificial Sequence: Synthetic oligonucleotide
  Antisense Strand to SEQ ID NO: 450501
ucuuccaggcaaguuucug

SEQ ID NO: 450503 - RNA, 19 nt, Artificial Sequence
  Description of Artificial Sequence: Synthetic oligonucleotide
  Sense strand starting at position 2574 of SEQ ID NO: 316922
aauucugagcacugagaga

SEQ ID NO: 450504 - RNA, 19 nt, Artificial Sequence
  Description of Artificial Sequence: Synthetic oligonucleotide
  Antisense Strand to SEQ ID NO: 450503
ucucucagugcucagaauu

SEQ ID NO: 450505 - RNA, 19 nt, Artificial Sequence
  Description of Artificial Sequence: Synthetic oligonucleotide
  Sense strand starting at position 2658 of SEQ ID NO: 316922
ugcuccauaguauauauua

SEQ ID NO: 450506 - RNA, 19 nt, Artificial Sequence
  Description of Artificial Sequence: Synthetic oligonucleotide
  Antisense Strand to SEQ ID NO: 450505
uaauauauacuauggagca

SEQ ID NO: 450507 - RNA, 19 nt, Artificial Sequence
  Description of Artificial Sequence: Synthetic oligonucleotide
  Sense strand starting at position 2749 of SEQ ID NO: 316922
acuguauagacuuggagau

SEQ ID NO: 450508 - RNA, 19 nt, Artificial Sequence
  Description of Artificial Sequence: Synthetic oligonucleotide
  Antisense Strand to SEQ ID NO: 450507
aucuccaagucuauacagu

SEQ ID NO: 450509 - RNA, 19 nt, Artificial Sequence
  Description of Artificial Sequence: Synthetic oligonucleotide
  Sense strand starting at position 2750 of SEQ ID NO: 316922
cuguauagacuuggagauu

SEQ ID NO: 450510 - RNA, 19 nt, Artificial Sequence
  Description of Artificial Sequence: Synthetic oligonucleotide
  Antisense Strand to SEQ ID NO: 450509
aaucuccaagucuauacag

SEQ ID NO: 450511 - RNA, 19 nt, Artificial Sequence
  Description of Artificial Sequence: Synthetic oligonucleotide
  Sense strand starting at position 2796 of SEQ ID NO: 316922
aagugaaaguuaucagcuu

SEQ ID NO: 450512 - RNA, 19 nt, Artificial Sequence
  Description of Artificial Sequence: Synthetic oligonucleotide
  Antisense Strand to SEQ ID NO: 450511
aagcugauaacuuucacuu

SEQ ID NO: 450513 - RNA, 19 nt, Artificial Sequence
  Description of Artificial Sequence: Synthetic oligonucleotide
  Sense strand starting at position 2834 of SEQ ID NO: 316922
uaugaagguuaugcaauau

SEQ ID NO: 450514 - RNA, 19 nt, Artificial Sequence
  Description of Artificial Sequence: Synthetic oligonucleotide
  Antisense Strand to SEQ ID NO: 450513
auauugcauaaccuucaua

SEQ ID NO: 450515 - RNA, 19 nt, Artificial Sequence
  Description of Artificial Sequence: Synthetic oligonucleotide
  Sense strand starting at position 2877 of SEQ ID NO: 316922
uucuaugaaagaugggcua

SEQ ID NO: 450516 - RNA, 19 nt, Artificial Sequence
  Description of Artificial Sequence: Synthetic oligonucleotide
  Antisense Strand to SEQ ID NO: 450515
uagcccaucuuucauagaa

SEQ ID NO: 450517 - RNA, 19 nt, Artificial Sequence
  Description of Artificial Sequence: Synthetic oligonucleotide
  Sense strand starting at position 2921 of SEQ ID NO: 316922
gcaauucucucaguauuug

SEQ ID NO: 450518 - RNA, 19 nt, Artificial Sequence
  Description of Artificial Sequence: Synthetic oligonucleotide
  Antisense Strand to SEQ ID NO: 450517
caaauacugagagaauugc

SEQ ID NO: 450519 - RNA, 19 nt, Artificial Sequence
  Description of Artificial Sequence: Synthetic oligonucleotide
  Sense strand starting at position 2929 of SEQ ID NO: 316922
cucaguauuugugauauuu

SEQ ID NO: 450520 - RNA, 19 nt, Artificial Sequence
  Description of Artificial Sequence: Synthetic oligonucleotide
  Antisense Strand to SEQ ID NO: 450519
aaauaucacaaauacugag

SEQ ID NO: 450521 - RNA, 19 nt, Artificial Sequence
  Description of Artificial Sequence: Synthetic oligonucleotide
  Sense strand starting at position 2940 of SEQ ID NO: 316922
ugauauuucuugucccagu

SEQ ID NO: 450522 - RNA, 19 nt, Artificial Sequence
  Description of Artificial Sequence: Synthetic oligonucleotide
  Antisense Strand to SEQ ID NO: 450521
acugggacaagaaauauca

SEQ ID NO: 450523 - RNA, 19 nt, Artificial Sequence
  Description of Artificial Sequence: Synthetic oligonucleotide
  Sense strand starting at position 3066 of SEQ ID NO: 316922
cauccagaagggugauuau

SEQ ID NO: 450524 - RNA, 19 nt, Artificial Sequence
  Description of Artificial Sequence: Synthetic oligonucleotide
  Antisense Strand to SEQ ID NO: 450523
auaaucacccuucuggaug

SEQ ID NO: 450525 - RNA, 19 nt, Artificial Sequence
  Description of Artificial Sequence: Synthetic oligonucleotide
  Sense strand starting at position 3169 of SEQ ID NO: 316922
ucuuaaguuggauaaagca

SEQ ID NO: 450526 - RNA, 19 nt, Artificial Sequence
  Description of Artificial Sequence: Synthetic oligonucleotide
  Antisense Strand to SEQ ID NO: 450525
ugcuuuauccaacuuaaga

SEQ ID NO: 450527 - RNA, 19 nt, Artificial Sequence
  Description of Artificial Sequence: Synthetic oligonucleotide
  Sense strand starting at position 3238 of SEQ ID NO: 316922
auugcuuuccaucagaaug

SEQ ID NO: 450528 - RNA, 19 nt, Artificial Sequence
  Description of Artificial Sequence: Synthetic oligonucleotide
  Antisense Strand to SEQ ID NO: 450527
cauucugauggaaagcaau

SEQ ID NO: 450529 - RNA, 19 nt, Artificial Sequence
  Description of Artificial Sequence: Synthetic oligonucleotide
  Sense strand starting at position 3266 of SEQ ID NO: 316922
ugauaugugucaucauaug

SEQ ID NO: 450530 - RNA, 19 nt, Artificial Sequence
  Description of Artificial Sequence: Synthetic oligonucleotide
  Antisense Strand to SEQ ID NO: 450529
cauaugaugacacauauca

SEQ ID NO: 450531 - RNA, 19 nt, Artificial Sequence
  Description of Artificial Sequence: Synthetic oligonucleotide
  Sense strand starting at position 3282 of SEQ ID NO: 316922
augccaggagucugauauc

SEQ ID NO: 450532 - RNA, 19 nt, Artificial Sequence
  Description of Artificial Sequence: Synthetic oligonucleotide
  Antisense Strand to SEQ ID NO: 450531
gauaucagacuccuggcau

SEQ ID NO: 450533 - RNA, 19 nt, Artificial Sequence
  Description of Artificial Sequence: Synthetic oligonucleotide
  Sense strand starting at position 3579 of SEQ ID NO: 316922
ggcuuuauuccagaaauug

SEQ ID NO: 450534 - RNA, 19 nt, Artificial Sequence
  Description of Artificial Sequence: Synthetic oligonucleotide
  Antisense Strand to SEQ ID NO: 450533
caauuucuggaauaaagcc

SEQ ID NO: 450535 - RNA, 19 nt, Artificial Sequence
  Description of Artificial Sequence: Synthetic oligonucleotide
  Sense strand starting at position 3669 of SEQ ID NO: 316922
uuggguaaucugcaauguu

SEQ ID NO: 450536 - RNA, 19 nt, Artificial Sequence
  Description of Artificial Sequence: Synthetic oligonucleotide
  Antisense Strand to SEQ ID NO: 450535
aacauugcagauuacccaa

SEQ ID NO: 450537 - RNA, 19 nt, Artificial Sequence
  Description of Artificial Sequence: Synthetic oligonucleotide
  Sense strand starting at position 3714 of SEQ ID NO: 316922
uugcauuuguaagugucaa

SEQ ID NO: 450538 - RNA, 19 nt, Artificial Sequence
  Description of Artificial Sequence: Synthetic oligonucleotide
  Antisense Strand to SEQ ID NO: 450537
uugacacuuacaaaugcaa

SEQ ID NO: 450539 - RNA, 19 nt, Artificial Sequence
  Description of Artificial Sequence: Synthetic oligonucleotide
  Sense strand starting at position 3715 of SEQ ID NO: 316922
ugcauuuguaagugucaag

SEQ ID NO: 450540 - RNA, 19 nt, Artificial Sequence
  Description of Artificial Sequence: Synthetic oligonucleotide
  Antisense Strand to SEQ ID NO: 450539
cuugacacuuacaaaugca

SEQ ID NO: 450541 - RNA, 19 nt, Artificial Sequence
  Description of Artificial Sequence: Synthetic oligonucleotide
  Sense strand starting at position 3815 of SEQ ID NO: 316922
ggcagacaccaugauaugu

SEQ ID NO: 450542 - RNA, 19 nt, Artificial Sequence
  Description of Artificial Sequence: Synthetic oligonucleotide
  Antisense Strand to SEQ ID NO: 450541
acauaucauggugucugcc

SEQ ID NO: 450543 - RNA, 19 nt, Artificial Sequence
  Description of Artificial Sequence: Synthetic oligonucleotide
  Sense strand starting at position 1 of SEQ ID NO: 316923
gagaguaacuaggucaugu

SEQ ID NO: 450544 - RNA, 19 nt, Artificial Sequence
  Description of Artificial Sequence: Synthetic oligonucleotide
  Antisense Strand to SEQ ID NO: 450543
acaugaccuaguuacucuc

SEQ ID NO: 450545 - RNA, 19 nt, Artificial Sequence
  Description of Artificial Sequence: Synthetic oligonucleotide
  Sense strand starting at position 3 of SEQ ID NO: 316923
gaguaacuaggucauguuu

SEQ ID NO: 450546 - RNA, 19 nt, Artificial Sequence
  Description of Artificial Sequence: Synthetic oligonucleotide
  Antisense Strand to SEQ ID NO: 450545
aaacaugaccuaguuacuc

SEQ ID NO: 450547 - RNA, 19 nt, Artificial Sequence
  Description of Artificial Sequence: Synthetic oligonucleotide
  Sense strand starting at position 16 of SEQ ID NO: 316923
auguuuguccauuaaauuc

SEQ ID NO: 450548 - RNA, 19 nt, Artificial Sequence
  Description of Artificial Sequence: Synthetic oligonucleotide
  Antisense Strand to SEQ ID NO: 450547
gaauuuaauggacaaacau

SEQ ID NO: 450549 - RNA, 19 nt, Artificial Sequence
  Description of Artificial Sequence: Synthetic oligonucleotide
  Sense strand starting at position 175 of SEQ ID NO: 316923
ccuaauuaugcguaauaaa

SEQ ID NO: 450550 - RNA, 19 nt, Artificial Sequence
  Description of Artificial Sequence: Synthetic oligonucleotide
  Antisense Strand to SEQ ID NO: 450549
uuuauuacgcauaauuagg

SEQ ID NO: 450551 - RNA, 19 nt, Artificial Sequence
  Description of Artificial Sequence: Synthetic oligonucleotide
  Sense strand starting at position 300 of SEQ ID NO: 316923
cugcuaacugaacaguuaa

SEQ ID NO: 450552 - RNA, 19 nt, Artificial Sequence
  Description of Artificial Sequence: Synthetic oligonucleotide
  Antisense Strand to SEQ ID NO: 450551
uuaacuguucaguuagcag

SEQ ID NO: 450553 - RNA, 19 nt, Artificial Sequence
  Description of Artificial Sequence: Synthetic oligonucleotide
  Sense strand starting at position 320 of SEQ ID NO: 316923
uuaguuacucuacgaaaug

SEQ ID NO: 450554 - RNA, 19 nt, Artificial Sequence
  Description of Artificial Sequence: Synthetic oligonucleotide
  Antisense Strand to SEQ ID NO: 450553
cauuucguagaguaacuaa

SEQ ID NO: 450555 - RNA, 19 nt, Artificial Sequence
  Description of Artificial Sequence: Synthetic oligonucleotide
  Sense strand starting at position 489 of SEQ ID NO: 316923
auucuagguccuuauuauu

SEQ ID NO: 450556 - RNA, 19 nt, Artificial Sequence
  Description of Artificial Sequence: Synthetic oligonucleotide
  Antisense Strand to SEQ ID NO: 450555
aauaauaaggaccuagaau

SEQ ID NO: 450557 - RNA, 19 nt, Artificial Sequence
  Description of Artificial Sequence: Synthetic oligonucleotide
  Sense strand starting at position 495 of SEQ ID NO: 316923
gguccuuauuauuccuaca

SEQ ID NO: 450558 - RNA, 19 nt, Artificial Sequence
  Description of Artificial Sequence: Synthetic oligonucleotide
  Antisense Strand to SEQ ID NO: 450557
uguaggaauaauaaggacc

SEQ ID NO: 450559 - RNA, 19 nt, Artificial Sequence
  Description of Artificial Sequence: Synthetic oligonucleotide
  Sense strand starting at position 530 of SEQ ID NO: 316923
ucagaauuaguuuguaaag

SEQ ID NO: 450560 - RNA, 19 nt, Artificial Sequence
  Description of Artificial Sequence: Synthetic oligonucleotide
  Antisense Strand to SEQ ID NO: 450559
cuuuacaaacuaauucuga

SEQ ID NO: 450561 - RNA, 19 nt, Artificial Sequence
  Description of Artificial Sequence: Synthetic oligonucleotide
  Sense strand starting at position 531 of SEQ ID NO: 316923
cagaauuaguuuguaaaga

SEQ ID NO: 450562 - RNA, 19 nt, Artificial Sequence
  Description of Artificial Sequence: Synthetic oligonucleotide
  Antisense Strand to SEQ ID NO: 450561
ucuuuacaaacuaauucug

SEQ ID NO: 450563 - RNA, 19 nt, Artificial Sequence
  Description of Artificial Sequence: Synthetic oligonucleotide
  Sense strand starting at position 567 of SEQ ID NO: 316923
ggcccauaagaguaaucuu

SEQ ID NO: 450564 - RNA, 19 nt, Artificial Sequence
  Description of Artificial Sequence: Synthetic oligonucleotide
  Antisense Strand to SEQ ID NO: 450563
aagauuacucuuaugggcc

SEQ ID NO: 450565 - RNA, 19 nt, Artificial Sequence
  Description of Artificial Sequence: Synthetic oligonucleotide
  Sense strand starting at position 745 of SEQ ID NO: 316923
ugccuaaggcuauauuaac

SEQ ID NO: 450566 - RNA, 19 nt, Artificial Sequence
  Description of Artificial Sequence: Synthetic oligonucleotide
  Antisense Strand to SEQ ID NO: 450565
guuaauauagccuuaggca

SEQ ID NO: 450567 - RNA, 19 nt, Artificial Sequence
  Description of Artificial Sequence: Synthetic oligonucleotide
  Sense strand starting at position 819 of SEQ ID NO: 316923
ggcucucuuaacgacaguu

SEQ ID NO: 450568 - RNA, 19 nt, Artificial Sequence
  Description of Artificial Sequence: Synthetic oligonucleotide
  Antisense Strand to SEQ ID NO: 450567
aacugucguuaagagagcc

SEQ ID NO: 450569 - RNA, 19 nt, Artificial Sequence
  Description of Artificial Sequence: Synthetic oligonucleotide
  Sense strand starting at position 821 of SEQ ID NO: 316923
cucucuuaacgacaguuaa

SEQ ID NO: 450570 - RNA, 19 nt, Artificial Sequence
  Description of Artificial Sequence: Synthetic oligonucleotide
  Antisense Strand to SEQ ID NO: 450569
uuaacugucguuaagagag

SEQ ID NO: 450571 - RNA, 19 nt, Artificial Sequence
  Description of Artificial Sequence: Synthetic oligonucleotide
  Sense strand starting at position 831 of SEQ ID NO: 316923
gacaguuaauguuuccuag

SEQ ID NO: 450572 - RNA, 19 nt, Artificial Sequence
  Description of Artificial Sequence: Synthetic oligonucleotide
  Antisense Strand to SEQ ID NO: 450571
cuaggaaacauuaacuguc

SEQ ID NO: 450573 - RNA, 19 nt, Artificial Sequence
  Description of Artificial Sequence: Synthetic oligonucleotide
  Sense strand starting at position 917 of SEQ ID NO: 316923
acaguaucuuaauccaagu

SEQ ID NO: 450574 - RNA, 19 nt, Artificial Sequence
  Description of Artificial Sequence: Synthetic oligonucleotide
  Antisense Strand to SEQ ID NO: 450573
acuuggauuaagauacugu

SEQ ID NO: 450575 - RNA, 19 nt, Artificial Sequence
  Description of Artificial Sequence: Synthetic oligonucleotide
  Sense strand starting at position 968 of SEQ ID NO: 316923
ggacuuuacuauuccagcu

SEQ ID NO: 450576 - RNA, 19 nt, Artificial Sequence
  Description of Artificial Sequence: Synthetic oligonucleotide
  Antisense Strand to SEQ ID NO: 450575
agcuggaauaguaaagucc

SEQ ID NO: 450577 - RNA, 19 nt, Artificial Sequence
  Description of Artificial Sequence: Synthetic oligonucleotide
  Sense strand starting at position 1055 of SEQ ID NO: 316923
ccguuagaacauuaaguau

SEQ ID NO: 450578 - RNA, 19 nt, Artificial Sequence
  Description of Artificial Sequence: Synthetic oligonucleotide
  Antisense Strand to SEQ ID NO: 450577
auacuuaauguucuaacgg

SEQ ID NO: 450579 - RNA, 19 nt, Artificial Sequence
  Description of Artificial Sequence: Synthetic oligonucleotide
  Sense strand starting at position 1086 of SEQ ID NO: 316923
aaagcugaucuaugcagga

SEQ ID NO: 450580 - RNA, 19 nt, Artificial Sequence
  Description of Artificial Sequence: Synthetic oligonucleotide
  Antisense Strand to SEQ ID NO: 450579
uccugcauagaucagcuuu

SEQ ID NO: 450581 - RNA, 19 nt, Artificial Sequence
  Description of Artificial Sequence: Synthetic oligonucleotide
  Sense strand starting at position 1088 of SEQ ID NO: 316923
agcugaucuaugcaggaaa

SEQ ID NO: 450582 - RNA, 19 nt, Artificial Sequence
  Description of Artificial Sequence: Synthetic oligonucleotide
  Antisense Strand to SEQ ID NO: 450581
uuuccugcauagaucagcu

SEQ ID NO: 450583 - RNA, 19 nt, Artificial Sequence
  Description of Artificial Sequence: Synthetic oligonucleotide
  Sense strand starting at position 1090 of SEQ ID NO: 316923
cugaucuaugcaggaaauu

SEQ ID NO: 450584 - RNA, 19 nt, Artificial Sequence
  Description of Artificial Sequence: Synthetic oligonucleotide
  Antisense Strand to SEQ ID NO: 450583
aauuuccugcauagaucag

SEQ ID NO: 450585 - RNA, 19 nt, Artificial Sequence
  Description of Artificial Sequence: Synthetic oligonucleotide
  Sense strand starting at position 1282 of SEQ ID NO: 316923
aaagccauucccgagucaa

SEQ ID NO: 450586 - RNA, 19 nt, Artificial Sequence
  Description of Artificial Sequence: Synthetic oligonucleotide
  Antisense Strand to SEQ ID NO: 450585
uugacucgggaauggcuuu

SEQ ID NO: 450587 - RNA, 19 nt, Artificial Sequence
  Description of Artificial Sequence: Synthetic oligonucleotide
  Sense strand starting at position 1302 of SEQ ID NO: 316923
aagggaucgucugcauaag

SEQ ID NO: 450588 - RNA, 19 nt, Artificial Sequence
  Description of Artificial Sequence: Synthetic oligonucleotide
  Antisense Strand to SEQ ID NO: 450587
cuuaugcagacgaucccuu

SEQ ID NO: 450589 - RNA, 19 nt, Artificial Sequence
  Description of Artificial Sequence: Synthetic oligonucleotide
  Sense strand starting at position 1303 of SEQ ID NO: 316923
agggaucgucugcauaaga

SEQ ID NO: 450590 - RNA, 19 nt, Artificial Sequence
  Description of Artificial Sequence: Synthetic oligonucleotide
  Antisense Strand to SEQ ID NO: 450589
ucuuaugcagacgaucccu

SEQ ID NO: 450591 - RNA, 19 nt, Artificial Sequence
  Description of Artificial Sequence: Synthetic oligonucleotide
  Sense strand starting at position 2181 of SEQ ID NO: 316923
cgaguucgucugccucaca

SEQ ID NO: 450592 - RNA, 19 nt, Artificial Sequence
  Description of Artificial Sequence: Synthetic oligonucleotide
  Antisense Strand to SEQ ID NO: 450591
ugugaggcagacgaacucg

SEQ ID NO: 450593 - RNA, 19 nt, Artificial Sequence
  Description of Artificial Sequence: Synthetic oligonucleotide
  Sense strand starting at position 2462 of SEQ ID NO: 316923
aagauaagaguccgcugau

SEQ ID NO: 450594 - RNA, 19 nt, Artificial Sequence
  Description of Artificial Sequence: Synthetic oligonucleotide
  Antisense Strand to SEQ ID NO: 450593
aucagcggacucuuaucuu

SEQ ID NO: 450595 - RNA, 19 nt, Artificial Sequence
  Description of Artificial Sequence: Synthetic oligonucleotide
  Sense strand starting at position 2463 of SEQ ID NO: 316923
agauaagaguccgcugauu

SEQ ID NO: 450596 - RNA, 19 nt, Artificial Sequence
  Description of Artificial Sequence: Synthetic oligonucleotide
  Antisense Strand to SEQ ID NO: 450595
aaucagcggacucuuaucu

SEQ ID NO: 450597 - RNA, 19 nt, Artificial Sequence
  Description of Artificial Sequence: Synthetic oligonucleotide
  Sense strand starting at position 2626 of SEQ ID NO: 316923
gagggaauuuaguaaucuc

SEQ ID NO: 450598 - RNA, 19 nt, Artificial Sequence
  Description of Artificial Sequence: Synthetic oligonucleotide
  Antisense Strand to SEQ ID NO: 450597
gagauuacuaaauucccuc

SEQ ID NO: 450599 - RNA, 19 nt, Artificial Sequence
  Description of Artificial Sequence: Synthetic oligonucleotide
  Sense strand starting at position 2861 of SEQ ID NO: 316923
ggcuaaauaucaguagaua

SEQ ID NO: 450600 - RNA, 19 nt, Artificial Sequence
  Description of Artificial Sequence: Synthetic oligonucleotide
  Antisense Strand to SEQ ID NO: 450599
uaucuacugauauuuagcc

SEQ ID NO: 450601 - RNA, 19 nt, Artificial Sequence
  Description of Artificial Sequence: Synthetic oligonucleotide
  Sense strand starting at position 2862 of SEQ ID NO: 316923
gcuaaauaucaguagauac

SEQ ID NO: 450602 - RNA, 19 nt, Artificial Sequence
  Description of Artificial Sequence: Synthetic oligonucleotide
  Antisense Strand to SEQ ID NO: 450601
guaucuacugauauuuagc

SEQ ID NO: 450603 - RNA, 19 nt, Artificial Sequence
  Description of Artificial Sequence: Synthetic oligonucleotide
  Sense strand starting at position 3011 of SEQ ID NO: 316923
caaaucuuguagucaagga

SEQ ID NO: 450604 - RNA, 19 nt, Artificial Sequence
  Description of Artificial Sequence: Synthetic oligonucleotide
  Antisense Strand to SEQ ID NO: 450603
uccuugacuacaagauuug

SEQ ID NO: 450605 - RNA, 19 nt, Artificial Sequence
  Description of Artificial Sequence: Synthetic oligonucleotide
  Sense strand starting at position 3142 of SEQ ID NO: 316923
auuaaugaaugcuuacgaa

SEQ ID NO: 450606 - RNA, 19 nt, Artificial Sequence
  Description of Artificial Sequence: Synthetic oligonucleotide
  Antisense Strand to SEQ ID NO: 450605
uucguaagcauucauuaau

SEQ ID NO: 450607 - RNA, 19 nt, Artificial Sequence
  Description of Artificial Sequence: Synthetic oligonucleotide
  Sense strand starting at position 3182 of SEQ ID NO: 316923
auguacaucucaucaguuu

SEQ ID NO: 450608 - RNA, 19 nt, Artificial Sequence
  Description of Artificial Sequence: Synthetic oligonucleotide
  Antisense Strand to SEQ ID NO: 450607
aaacugaugagauguacau

SEQ ID NO: 450609 - RNA, 19 nt, Artificial Sequence
  Description of Artificial Sequence: Synthetic oligonucleotide
  Sense strand starting at position 3243 of SEQ ID NO: 316923
uuaagacaauacgucaaau

SEQ ID NO: 450610 - RNA, 19 nt, Artificial Sequence
  Description of Artificial Sequence: Synthetic oligonucleotide
  Antisense Strand to SEQ ID NO: 450609
auuugacguauugucuuaa

SEQ ID NO: 450611 - RNA, 19 nt, Artificial Sequence
  Description of Artificial Sequence: Synthetic oligonucleotide
  Sense strand starting at position 3323 of SEQ ID NO: 316923
ccuuuagacugcuuaaaga

SEQ ID NO: 450612 - RNA, 19 nt, Artificial Sequence
  Description of Artificial Sequence: Synthetic oligonucleotide
  Antisense Strand to SEQ ID NO: 450611
ucuuuaagcagucuaaagg

SEQ ID NO: 450613 - RNA, 19 nt, Artificial Sequence
  Description of Artificial Sequence: Synthetic oligonucleotide
  Sense strand starting at position 3365 of SEQ ID NO: 316923
ggcagaccaucacuuuaau

SEQ ID NO: 450614 - RNA, 19 nt, Artificial Sequence
  Description of Artificial Sequence: Synthetic oligonucleotide
  Antisense Strand to SEQ ID NO: 450613
auuaaagugauggucugcc

SEQ ID NO: 450615 - RNA, 19 nt, Artificial Sequence
  Description of Artificial Sequence: Synthetic oligonucleotide
  Sense strand starting at position 3430 of SEQ ID NO: 316923
gccggcuguccuuuaauau

SEQ ID NO: 450616 - RNA, 19 nt, Artificial Sequence
  Description of Artificial Sequence: Synthetic oligonucleotide
  Antisense Strand to SEQ ID NO: 450615
auauuaaaggacagccggc

SEQ ID NO: 450617 - RNA, 19 nt, Artificial Sequence
  Description of Artificial Sequence: Synthetic oligonucleotide
  Sense strand starting at position 3441 of SEQ ID NO: 316923
uuuaauauacugggcuuau

SEQ ID NO: 450618 - RNA, 19 nt, Artificial Sequence
  Description of Artificial Sequence: Synthetic oligonucleotide
  Antisense Strand to SEQ ID NO: 450617
auaagcccaguauauuaaa

SEQ ID NO: 450619 - RNA, 19 nt, Artificial Sequence
  Description of Artificial Sequence: Synthetic oligonucleotide
  Sense strand starting at position 3442 of SEQ ID NO: 316923
uuaauauacugggcuuaua

SEQ ID NO: 450620 - RNA, 19 nt, Artificial Sequence
  Description of Artificial Sequence: Synthetic oligonucleotide
  Antisense Strand to SEQ ID NO: 450619
uauaagcccaguauauuaa

SEQ ID NO: 450621 - RNA, 19 nt, Artificial Sequence
  Description of Artificial Sequence: Synthetic oligonucleotide
  Sense strand starting at position 3500 of SEQ ID NO: 316923
acaguaacccuaugagcua

SEQ ID NO: 450622 - RNA, 19 nt, Artificial Sequence
  Description of Artificial Sequence: Synthetic oligonucleotide
  Antisense Strand to SEQ ID NO: 450621
uagcucauaggguuacugu

SEQ ID NO: 450623 - RNA, 19 nt, Artificial Sequence
  Description of Artificial Sequence: Synthetic oligonucleotide
  Sense strand starting at position 165 of SEQ ID NO: 316924
auucuagguccuuauuauu

SEQ ID NO: 450624 - RNA, 19 nt, Artificial Sequence
  Description of Artificial Sequence: Synthetic oligonucleotide
  Antisense Strand to SEQ ID NO: 450623
aauaauaaggaccuagaau

SEQ ID NO: 450625 - RNA, 19 nt, Artificial Sequence
  Description of Artificial Sequence: Synthetic oligonucleotide
  Sense strand starting at position 171 of SEQ ID NO: 316924
gguccuuauuauuccuaca

SEQ ID NO: 450626 - RNA, 19 nt, Artificial Sequence
  Description of Artificial Sequence: Synthetic oligonucleotide
  Antisense Strand to SEQ ID NO: 450625
uguaggaauaauaaggacc

SEQ ID NO: 450627 - RNA, 19 nt, Artificial Sequence
  Description of Artificial Sequence: Synthetic oligonucleotide
  Sense strand starting at position 206 of SEQ ID NO: 316924
ucagaauuaguuuguaaag

SEQ ID NO: 450628 - RNA, 19 nt, Artificial Sequence
  Description of Artificial Sequence: Synthetic oligonucleotide
  Antisense Strand to SEQ ID NO: 450627
cuuuacaaacuaauucuga

SEQ ID NO: 450629 - RNA, 19 nt, Artificial Sequence
  Description of Artificial Sequence: Synthetic oligonucleotide
  Sense strand starting at position 207 of SEQ ID NO: 316924
cagaauuaguuuguaaaga

SEQ ID NO: 450630 - RNA, 19 nt, Artificial Sequence
  Description of Artificial Sequence: Synthetic oligonucleotide
  Antisense Strand to SEQ ID NO: 450629
ucuuuacaaacuaauucug

SEQ ID NO: 450631 - RNA, 19 nt, Artificial Sequence
  Description of Artificial Sequence: Synthetic oligonucleotide
  Sense strand starting at position 243 of SEQ ID NO: 316924
ggcccauaagaguaaucuu

SEQ ID NO: 450632 - RNA, 19 nt, Artificial Sequence
  Description of Artificial Sequence: Synthetic oligonucleotide
  Antisense Strand to SEQ ID NO: 450631
aagauuacucuuaugggcc

SEQ ID NO: 450633 - RNA, 19 nt, Artificial Sequence
  Description of Artificial Sequence: Synthetic oligonucleotide
  Sense strand starting at position 421 of SEQ ID NO: 316924
ugccuaaggcuauauuaac

SEQ ID NO: 450634 - RNA, 19 nt, Artificial Sequence
  Description of Artificial Sequence: Synthetic oligonucleotide
  Antisense Strand to SEQ ID NO: 450633
guuaauauagccuuaggca

SEQ ID NO: 450635 - RNA, 19 nt, Artificial Sequence
  Description of Artificial Sequence: Synthetic oligonucleotide
  Sense strand starting at position 495 of SEQ ID NO: 316924
ggcucucuuaacgacaguu

SEQ ID NO: 450636 - RNA, 19 nt, Artificial Sequence
  Description of Artificial Sequence: Synthetic oligonucleotide
  Antisense Strand to SEQ ID NO: 450635
aacugucguuaagagagcc

SEQ ID NO: 450637 - RNA, 19 nt, Artificial Sequence
  Description of Artificial Sequence: Synthetic oligonucleotide
  Sense strand starting at position 497 of SEQ ID NO: 316924
cucucuuaacgacaguuaa

SEQ ID NO: 450638 - RNA, 19 nt, Artificial Sequence
  Description of Artificial Sequence: Synthetic oligonucleotide
  Antisense Strand to SEQ ID NO: 450637
uuaacugucguuaagagag

SEQ ID NO: 450639 - RNA, 19 nt, Artificial Sequence
  Description of Artificial Sequence: Synthetic oligonucleotide
  Sense strand starting at position 507 of SEQ ID NO: 316924
gacaguuaauguuuccuag

SEQ ID NO: 450640 - RNA, 19 nt, Artificial Sequence
  Description of Artificial Sequence: Synthetic oligonucleotide
  Antisense Strand to SEQ ID NO: 450639
cuaggaaacauuaacuguc

SEQ ID NO: 450641 - RNA, 19 nt, Artificial Sequence
  Description of Artificial Sequence: Synthetic oligonucleotide
  Sense strand starting at position 593 of SEQ ID NO: 316924
acaguaucuuaauccaagu

SEQ ID NO: 450642 - RNA, 19 nt, Artificial Sequence
  Description of Artificial Sequence: Synthetic oligonucleotide
  Antisense Strand to SEQ ID NO: 450641
acuuggauuaagauacugu

SEQ ID NO: 450643 - RNA, 19 nt, Artificial Sequence
  Description of Artificial Sequence: Synthetic oligonucleotide
  Sense strand starting at position 644 of SEQ ID NO: 316924
ggacuuuacuauuccagcu

SEQ ID NO: 450644 - RNA, 19 nt, Artificial Sequence
  Description of Artificial Sequence: Synthetic oligonucleotide
  Antisense Strand to SEQ ID NO: 450643
agcuggaauaguaaagucc

SEQ ID NO: 450645 - RNA, 19 nt, Artificial Sequence
  Description of Artificial Sequence: Synthetic oligonucleotide
  Sense strand starting at position 731 of SEQ ID NO: 316924
ccguuagaacauuaaguau

SEQ ID NO: 450646 - RNA, 19 nt, Artificial Sequence
  Description of Artificial Sequence: Synthetic oligonucleotide
  Antisense Strand to SEQ ID NO: 450645
auacuuaauguucuaacgg

SEQ ID NO: 450647 - RNA, 19 nt, Artificial Sequence
  Description of Artificial Sequence: Synthetic oligonucleotide
  Sense strand starting at position 762 of SEQ ID NO: 316924
aaagcugaucuaugcagga

SEQ ID NO: 450648 - RNA, 19 nt, Artificial Sequence
  Description of Artificial Sequence: Synthetic oligonucleotide
  Antisense Strand to SEQ ID NO: 450647
uccugcauagaucagcuuu

SEQ ID NO: 450649 - RNA, 19 nt, Artificial Sequence
  Description of Artificial Sequence: Synthetic oligonucleotide
  Sense strand starting at position 764 of SEQ ID NO: 316924
agcugaucuaugcaggaaa

SEQ ID NO: 450650 - RNA, 19 nt, Artificial Sequence
  Description of Artificial Sequence: Synthetic oligonucleotide
  Antisense Strand to SEQ ID NO: 450649
uuuccugcauagaucagcu

SEQ ID NO: 450651 - RNA, 19 nt, Artificial Sequence
  Description of Artificial Sequence: Synthetic oligonucleotide
  Sense strand starting at position 766 of SEQ ID NO: 316924
cugaucuaugcaggaaauu

SEQ ID NO: 450652 - RNA, 19 nt, Artificial Sequence
  Description of Artificial Sequence: Synthetic oligonucleotide
  Antisense Strand to SEQ ID NO: 450651
aauuuccugcauagaucag

SEQ ID NO: 450653 - RNA, 19 nt, Artificial Sequence
  Description of Artificial Sequence: Synthetic oligonucleotide
  Sense strand starting at position 958 of SEQ ID NO: 316924
aaagccauucccgagucaa

SEQ ID NO: 450654 - RNA, 19 nt, Artificial Sequence
  Description of Artificial Sequence: Synthetic oligonucleotide
  Antisense Strand to SEQ ID NO: 450653
uugacucgggaauggcuuu

SEQ ID NO: 450655 - RNA, 19 nt, Artificial Sequence
  Description of Artificial Sequence: Synthetic oligonucleotide
  Sense strand starting at position 978 of SEQ ID NO: 316924
aagggaucgucugcauaag

SEQ ID NO: 450656 - RNA, 19 nt, Artificial Sequence
  Description of Artificial Sequence: Synthetic oligonucleotide
  Antisense Strand to SEQ ID NO: 450655
cuuaugcagacgaucccuu

SEQ ID NO: 450657 - RNA, 19 nt, Artificial Sequence
  Description of Artificial Sequence: Synthetic oligonucleotide
  Sense strand starting at position 979 of SEQ ID NO: 316924
agggaucgucugcauaaga

SEQ ID NO: 450658 - RNA, 19 nt, Artificial Sequence
  Description of Artificial Sequence: Synthetic oligonucleotide
  Antisense Strand to SEQ ID NO: 450657
ucuuaugcagacgaucccu

SEQ ID NO: 450659 - RNA, 19 nt, Artificial Sequence
  Description of Artificial Sequence: Synthetic oligonucleotide
  Sense strand starting at position 1146 of SEQ ID NO: 316924
uguuuccgugcacagaaau

SEQ ID NO: 450660 - RNA, 19 nt, Artificial Sequence
  Description of Artificial Sequence: Synthetic oligonucleotide
  Antisense Strand to SEQ ID NO: 450659
auuucugugcacggaaaca

SEQ ID NO: 450661 - RNA, 19 nt, Artificial Sequence
  Description of Artificial Sequence: Synthetic oligonucleotide
  Sense strand starting at position 1857 of SEQ ID NO: 316924
cgaguucgucugccucaca

SEQ ID NO: 450662 - RNA, 19 nt, Artificial Sequence
  Description of Artificial Sequence: Synthetic oligonucleotide
  Antisense Strand to SEQ ID NO: 450661
ugugaggcagacgaacucg

SEQ ID NO: 450663 - RNA, 19 nt, Artificial Sequence
  Description of Artificial Sequence: Synthetic oligonucleotide
  Sense strand starting at position 2138 of SEQ ID NO: 316924
aagauaagaguccgcugau

SEQ ID NO: 450664 - RNA, 19 nt, Artificial Sequence
  Description of Artificial Sequence: Synthetic oligonucleotide
  Antisense Strand to SEQ ID NO: 450663
aucagcggacucuuaucuu

SEQ ID NO: 450665 - RNA, 19 nt, Artificial Sequence
  Description of Artificial Sequence: Synthetic oligonucleotide
  Sense strand starting at position 2139 of SEQ ID NO: 316924
agauaagaguccgcugauu

SEQ ID NO: 450666 - RNA, 19 nt, Artificial Sequence
  Description of Artificial Sequence: Synthetic oligonucleotide
  Antisense Strand to SEQ ID NO: 450665
aaucagcggacucuuaucu

SEQ ID NO: 450667 - RNA, 19 nt, Artificial Sequence
  Description of Artificial Sequence: Synthetic oligonucleotide
  Sense strand starting at position 2302 of SEQ ID NO: 316924
gagggaauuuaguaaucuc

SEQ ID NO: 450668 - RNA, 19 nt, Artificial Sequence
  Description of Artificial Sequence: Synthetic oligonucleotide
  Antisense Strand to SEQ ID NO: 450667
gagauuacuaaauucccuc

SEQ ID NO: 450669 - RNA, 19 nt, Artificial Sequence
  Description of Artificial Sequence: Synthetic oligonucleotide
  Sense strand starting at position 2537 of SEQ ID NO: 316924
ggcuaaauaucaguagaua

SEQ ID NO: 450670 - RNA, 19 nt, Artificial Sequence
  Description of Artificial Sequence: Synthetic oligonucleotide
  Antisense Strand to SEQ ID NO: 450669
uaucuacugauauuuagcc

SEQ ID NO: 450671 - RNA, 19 nt, Artificial Sequence
  Description of Artificial Sequence: Synthetic oligonucleotide
  Sense strand starting at position 2538 of SEQ ID NO: 316924
gcuaaauaucaguagauac

SEQ ID NO: 450672 - RNA, 19 nt, Artificial Sequence
  Description of Artificial Sequence: Synthetic oligonucleotide
  Antisense Strand to SEQ ID NO: 450671
guaucuacugauauuuagc

SEQ ID NO: 450673 - RNA, 19 nt, Artificial Sequence
  Description of Artificial Sequence: Synthetic oligonucleotide
  Sense strand starting at position 2687 of SEQ ID NO: 316924
caaaucuuguagucaagga

SEQ ID NO: 450674 - RNA, 19 nt, Artificial Sequence
  Description of Artificial Sequence: Synthetic oligonucleotide
  Antisense Strand to SEQ ID NO: 450673
uccuugacuacaagauuug

SEQ ID NO: 450675 - RNA, 19 nt, Artificial Sequence
  Description of Artificial Sequence: Synthetic oligonucleotide
  Sense strand starting at position 2818 of SEQ ID NO: 316924
auuaaugaaugcuuacgaa

SEQ ID NO: 450676 - RNA, 19 nt, Artificial Sequence
  Description of Artificial Sequence: Synthetic oligonucleotide
  Antisense Strand to SEQ ID NO: 450675
uucguaagcauucauuaau

SEQ ID NO: 450677 - RNA, 19 nt, Artificial Sequence
  Description of Artificial Sequence: Synthetic oligonucleotide
  Sense strand starting at position 2858 of SEQ ID NO: 316924
auguacaucucaucaguuu

SEQ ID NO: 450678 - RNA, 19 nt, Artificial Sequence
  Description of Artificial Sequence: Synthetic oligonucleotide
  Antisense Strand to SEQ ID NO: 450677
aaacugaugagauguacau

SEQ ID NO: 450679 - RNA, 19 nt, Artificial Sequence
  Description of Artificial Sequence: Synthetic oligonucleotide
  Sense strand starting at position 2919 of SEQ ID NO: 316924
uuaagacaauacgucaaau

SEQ ID NO: 450680 - RNA, 19 nt, Artificial Sequence
  Description of Artificial Sequence: Synthetic oligonucleotide
  Antisense Strand to SEQ ID NO: 450679
auuugacguauugucuuaa

SEQ ID NO: 450681 - RNA, 19 nt, Artificial Sequence
  Description of Artificial Sequence: Synthetic oligonucleotide
  Sense strand starting at position 2999 of SEQ ID NO: 316924
ccuuuagacugcuuaaaga

SEQ ID NO: 450682 - RNA, 19 nt, Artificial Sequence
  Description of Artificial Sequence: Synthetic oligonucleotide
  Antisense Strand to SEQ ID NO: 450681
ucuuuaagcagucuaaagg

SEQ ID NO: 450683 - RNA, 19 nt, Artificial Sequence
  Description of Artificial Sequence: Synthetic oligonucleotide
  Sense strand starting at position 3041 of SEQ ID NO: 316924
ggcagaccaucacuuuaau

SEQ ID NO: 450684 - RNA, 19 nt, Artificial Sequence
  Description of Artificial Sequence: Synthetic oligonucleotide
  Antisense Strand to SEQ ID NO: 450683
auuaaagugauggucugcc

SEQ ID NO: 450685 - RNA, 19 nt, Artificial Sequence
  Description of Artificial Sequence: Synthetic oligonucleotide
  Sense strand starting at position 3106 of SEQ ID NO: 316924
gccggcuguccuuuaauau

SEQ ID NO: 450686 - RNA, 19 nt, Artificial Sequence
  Description of Artificial Sequence: Synthetic oligonucleotide
  Antisense Strand to SEQ ID NO: 450685
auauuaaaggacagccggc

SEQ ID NO: 450687 - RNA, 19 nt, Artificial Sequence
  Description of Artificial Sequence: Synthetic oligonucleotide
  Sense strand starting at position 3107 of SEQ ID NO: 316924
ccggcuguccuuuaauaua

SEQ ID NO: 450688 - RNA, 19 nt, Artificial Sequence
  Description of Artificial Sequence: Synthetic oligonucleotide
  Antisense Strand to SEQ ID NO: 450687
uauauuaaaggacagccgg

SEQ ID NO: 450689 - RNA, 19 nt, Artificial Sequence
  Description of Artificial Sequence: Synthetic oligonucleotide
  Sense strand starting at position 3117 of SEQ ID NO: 316924
uuuaauauacugggcuuau

SEQ ID NO: 450690 - RNA, 19 nt, Artificial Sequence
  Description of Artificial Sequence: Synthetic oligonucleotide
  Antisense Strand to SEQ ID NO: 450689
auaagcccaguauauuaaa

SEQ ID NO: 450691 - RNA, 19 nt, Artificial Sequence
  Description of Artificial Sequence: Synthetic oligonucleotide
  Sense strand starting at position 3118 of SEQ ID NO: 316924
uuaauauacugggcuuaua

SEQ ID NO: 450692 - RNA, 19 nt, Artificial Sequence
  Description of Artificial Sequence: Synthetic oligonucleotide
  Antisense Strand to SEQ ID NO: 450691
uauaagcccaguauauuaa

SEQ ID NO: 450693 - RNA, 19 nt, Artificial Sequence
  Description of Artificial Sequence: Synthetic oligonucleotide
  Sense strand starting at position 3176 of SEQ ID NO: 316924
acaguaacccuaugagcua

SEQ ID NO: 450694 - RNA, 19 nt, Artificial Sequence
  Description of Artificial Sequence: Synthetic oligonucleotide
  Antisense Strand to SEQ ID NO: 450693
uagcucauaggguuacugu

SEQ ID NO: 450695 - RNA, 19 nt, Artificial Sequence
  Description of Artificial Sequence: Synthetic oligonucleotide
  Sense strand starting at position 3809 of SEQ ID NO: 316924
ccauguauccugcagaggu

SEQ ID NO: 450696 - RNA, 19 nt, Artificial Sequence
  Description of Artificial Sequence: Synthetic oligonucleotide
  Antisense Strand to SEQ ID NO: 450695
accucugcaggauacaugg

SEQ ID NO: 450697 - RNA, 19 nt, Artificial Sequence
  Description of Artificial Sequence: Synthetic oligonucleotide
  Sense strand starting at position 3827 of SEQ ID NO: 316924
ugcagaacuuucucuagag

SEQ ID NO: 450698 - RNA, 19 nt, Artificial Sequence
  Description of Artificial Sequence: Synthetic oligonucleotide
  Antisense Strand to SEQ ID NO: 450697
cucuagagaaaguucugca

SEQ ID NO: 450699 - RNA, 19 nt, Artificial Sequence
  Description of Artificial Sequence: Synthetic oligonucleotide
  Sense strand starting at position 3831 of SEQ ID NO: 316924
gaacuuucucuagagcagu

SEQ ID NO: 450700 - RNA, 19 nt, Artificial Sequence
  Description of Artificial Sequence: Synthetic oligonucleotide
  Antisense Strand to SEQ ID NO: 450699
acugcucuagagaaaguuc

SEQ ID NO: 450701 - RNA, 19 nt, Artificial Sequence
  Description of Artificial Sequence: Synthetic oligonucleotide
  Sense strand starting at position 3861 of SEQ ID NO: 316924
cuuaaugugcaccgaaauc

SEQ ID NO: 450702 - RNA, 19 nt, Artificial Sequence
  Description of Artificial Sequence: Synthetic oligonucleotide
  Antisense Strand to SEQ ID NO: 450701
gauuucggugcacauuaag

SEQ ID NO: 450703 - RNA, 19 nt, Artificial Sequence
  Description of Artificial Sequence: Synthetic oligonucleotide
  Sense strand starting at position 253 of SEQ ID NO: 316925
uggagagcuuucuuaugau

SEQ ID NO: 450704 - RNA, 19 nt, Artificial Sequence
  Description of Artificial Sequence: Synthetic oligonucleotide
  Antisense Strand to SEQ ID NO: 450703
aucauaagaaagcucucca

SEQ ID NO: 450705 - RNA, 19 nt, Artificial Sequence
  Description of Artificial Sequence: Synthetic oligonucleotide
  Sense strand starting at position 256 of SEQ ID NO: 316925
agagcuuucuuaugauuug

SEQ ID NO: 450706 - RNA, 19 nt, Artificial Sequence
  Description of Artificial Sequence: Synthetic oligonucleotide
  Antisense Strand to SEQ ID NO: 450705
caaaucauaagaaagcucu

SEQ ID NO: 450707 - RNA, 19 nt, Artificial Sequence
  Description of Artificial Sequence: Synthetic oligonucleotide
  Sense strand starting at position 262 of SEQ ID NO: 316925
uucuuaugauuuguggcau

SEQ ID NO: 450708 - RNA, 19 nt, Artificial Sequence
  Description of Artificial Sequence: Synthetic oligonucleotide
  Antisense Strand to SEQ ID NO: 450707
augccacaaaucauaagaa

SEQ ID NO: 450709 - RNA, 19 nt, Artificial Sequence
  Description of Artificial Sequence: Synthetic oligonucleotide
  Sense strand starting at position 343 of SEQ ID NO: 316925
acuggugaguugucaguga

SEQ ID NO: 450710 - RNA, 19 nt, Artificial Sequence
  Description of Artificial Sequence: Synthetic oligonucleotide
  Antisense Strand to SEQ ID NO: 450709
ucacugacaacucaccagu

SEQ ID NO: 450711 - RNA, 19 nt, Artificial Sequence
  Description of Artificial Sequence: Synthetic oligonucleotide
  Sense strand starting at position 346 of SEQ ID NO: 316925
ggugaguugucagugaagu

SEQ ID NO: 450712 - RNA, 19 nt, Artificial Sequence
  Description of Artificial Sequence: Synthetic oligonucleotide
  Antisense Strand to SEQ ID NO: 450711
acuucacugacaacucacc

SEQ ID NO: 450713 - RNA, 19 nt, Artificial Sequence
  Description of Artificial Sequence: Synthetic oligonucleotide
  Sense strand starting at position 347 of SEQ ID NO: 316925
gugaguugucagugaaguu

SEQ ID NO: 450714 - RNA, 19 nt, Artificial Sequence
  Description of Artificial Sequence: Synthetic oligonucleotide
  Antisense Strand to SEQ ID NO: 450713
aacuucacugacaacucac

SEQ ID NO: 450715 - RNA, 19 nt, Artificial Sequence
  Description of Artificial Sequence: Synthetic oligonucleotide
  Sense strand starting at position 348 of SEQ ID NO: 316925
ugaguugucagugaaguua

SEQ ID NO: 450716 - RNA, 19 nt, Artificial Sequence
  Description of Artificial Sequence: Synthetic oligonucleotide
  Antisense Strand to SEQ ID NO: 450715
uaacuucacugacaacuca

SEQ ID NO: 450717 - RNA, 19 nt, Artificial Sequence
  Description of Artificial Sequence: Synthetic oligonucleotide
  Sense strand starting at position 422 of SEQ ID NO: 316925
ggauuaaccugagcucuaa

SEQ ID NO: 450718 - RNA, 19 nt, Artificial Sequence
  Description of Artificial Sequence: Synthetic oligonucleotide
  Antisense Strand to SEQ ID NO: 450717
uuagagcucagguuaaucc

SEQ ID NO: 450719 - RNA, 19 nt, Artificial Sequence
  Description of Artificial Sequence: Synthetic oligonucleotide
  Sense strand starting at position 433 of SEQ ID NO: 316925
agcucuaauacugggugua

SEQ ID NO: 450720 - RNA, 19 nt, Artificial Sequence
  Description of Artificial Sequence: Synthetic oligonucleotide
  Antisense Strand to SEQ ID NO: 450719
uacacccaguauuagagcu

SEQ ID NO: 450721 - RNA, 19 nt, Artificial Sequence
  Description of Artificial Sequence: Synthetic oligonucleotide
  Sense strand starting at position 434 of SEQ ID NO: 316925
gcucuaauacuggguguag

SEQ ID NO: 450722 - RNA, 19 nt, Artificial Sequence
  Description of Artificial Sequence: Synthetic oligonucleotide
  Antisense Strand to SEQ ID NO: 450721
cuacacccaguauuagagc

SEQ ID NO: 450723 - RNA, 19 nt, Artificial Sequence
  Description of Artificial Sequence: Synthetic oligonucleotide
  Sense strand starting at position 435 of SEQ ID NO: 316925
cucuaauacuggguguaga

SEQ ID NO: 450724 - RNA, 19 nt, Artificial Sequence
  Description of Artificial Sequence: Synthetic oligonucleotide
  Antisense Strand to SEQ ID NO: 450723
ucuacacccaguauuagag

SEQ ID NO: 450725 - RNA, 19 nt, Artificial Sequence
  Description of Artificial Sequence: Synthetic oligonucleotide
  Sense strand starting at position 436 of SEQ ID NO: 316925
ucuaauacuggguguagau

SEQ ID NO: 450726 - RNA, 19 nt, Artificial Sequence
  Description of Artificial Sequence: Synthetic oligonucleotide
  Antisense Strand to SEQ ID NO: 450725
aucuacacccaguauuaga

SEQ ID NO: 450727 - RNA, 19 nt, Artificial Sequence
  Description of Artificial Sequence: Synthetic oligonucleotide
  Sense strand starting at position 445 of SEQ ID NO: 316925
ggguguagauauuccucaa

SEQ ID NO: 450728 - RNA, 19 nt, Artificial Sequence
  Description of Artificial Sequence: Synthetic oligonucleotide
  Antisense Strand to SEQ ID NO: 450727
uugaggaauaucuacaccc

SEQ ID NO: 450729 - RNA, 19 nt, Artificial Sequence
  Description of Artificial Sequence: Synthetic oligonucleotide
  Sense strand starting at position 448 of SEQ ID NO: 316925
uguagauauuccucaacga

SEQ ID NO: 450730 - RNA, 19 nt, Artificial Sequence
  Description of Artificial Sequence: Synthetic oligonucleotide
  Antisense Strand to SEQ ID NO: 450729
ucguugaggaauaucuaca

SEQ ID NO: 450731 - RNA, 19 nt, Artificial Sequence
  Description of Artificial Sequence: Synthetic oligonucleotide
  Sense strand starting at position 449 of SEQ ID NO: 316925
guagauauuccucaacgac

SEQ ID NO: 450732 - RNA, 19 nt, Artificial Sequence
  Description of Artificial Sequence: Synthetic oligonucleotide
  Antisense Strand to SEQ ID NO: 450731
gucguugaggaauaucuac

SEQ ID NO: 450733 - RNA, 19 nt, Artificial Sequence
  Description of Artificial Sequence: Synthetic oligonucleotide
  Sense strand starting at position 582 of SEQ ID NO: 316925
agugucauuucuuuccuuu

SEQ ID NO: 450734 - RNA, 19 nt, Artificial Sequence
  Description of Artificial Sequence: Synthetic oligonucleotide
  Antisense Strand to SEQ ID NO: 450733
aaaggaaagaaaugacacu

SEQ ID NO: 450735 - RNA, 19 nt, Artificial Sequence
  Description of Artificial Sequence: Synthetic oligonucleotide
  Sense strand starting at position 585 of SEQ ID NO: 316925
gucauuucuuuccuuugca

SEQ ID NO: 450736 - RNA, 19 nt, Artificial Sequence
  Description of Artificial Sequence: Synthetic oligonucleotide
  Antisense Strand to SEQ ID NO: 450735
ugcaaaggaaagaaaugac

SEQ ID NO: 450737 - RNA, 19 nt, Artificial Sequence
  Description of Artificial Sequence: Synthetic oligonucleotide
  Sense strand starting at position 637 of SEQ ID NO: 316925
agaauaagaucccagaccu

SEQ ID NO: 450738 - RNA, 19 nt, Artificial Sequence
  Description of Artificial Sequence: Synthetic oligonucleotide
  Antisense Strand to SEQ ID NO: 450737
aggucugggaucuuauucu

SEQ ID NO: 450739 - RNA, 19 nt, Artificial Sequence
  Description of Artificial Sequence: Synthetic oligonucleotide
  Sense strand starting at position 663 of SEQ ID NO: 316925
ggacacagguuuccacuaa

SEQ ID NO: 450740 - RNA, 19 nt, Artificial Sequence
  Description of Artificial Sequence: Synthetic oligonucleotide
  Antisense Strand to SEQ ID NO: 450739
uuaguggaaaccugugucc

SEQ ID NO: 450741 - RNA, 19 nt, Artificial Sequence
  Description of Artificial Sequence: Synthetic oligonucleotide
  Sense strand starting at position 667 of SEQ ID NO: 316925
acagguuuccacuaaagca

SEQ ID NO: 450742 - RNA, 19 nt, Artificial Sequence
  Description of Artificial Sequence: Synthetic oligonucleotide
  Antisense Strand to SEQ ID NO: 450741
ugcuuuaguggaaaccugu

SEQ ID NO: 450743 - RNA, 19 nt, Artificial Sequence
  Description of Artificial Sequence: Synthetic oligonucleotide
  Sense strand starting at position 675 of SEQ ID NO: 316925
ccacuaaagcaagguugau

SEQ ID NO: 450744 - RNA, 19 nt, Artificial Sequence
  Description of Artificial Sequence: Synthetic oligonucleotide
  Antisense Strand to SEQ ID NO: 450743
aucaaccuugcuuuagugg

SEQ ID NO: 450745 - RNA, 19 nt, Artificial Sequence
  Description of Artificial Sequence: Synthetic oligonucleotide
  Sense strand starting at position 1176 of SEQ ID NO: 316925
ggagcuuuagcacacauca

SEQ ID NO: 450746 - RNA, 19 nt, Artificial Sequence
  Description of Artificial Sequence: Synthetic oligonucleotide
  Antisense Strand to SEQ ID NO: 450745
ugaugugugcuaaagcucc

SEQ ID NO: 450747 - RNA, 19 nt, Artificial Sequence
  Description of Artificial Sequence: Synthetic oligonucleotide
  Sense strand starting at position 1361 of SEQ ID NO: 316925
aagaaaguuguccggccaa

SEQ ID NO: 450748 - RNA, 19 nt, Artificial Sequence
  Description of Artificial Sequence: Synthetic oligonucleotide
  Antisense Strand to SEQ ID NO: 450747
uuggccggacaacuuucuu

SEQ ID NO: 450749 - RNA, 19 nt, Artificial Sequence
  Description of Artificial Sequence: Synthetic oligonucleotide
  Sense strand starting at position 1452 of SEQ ID NO: 316925
gagaccggcauucguuuaa

SEQ ID NO: 450750 - RNA, 19 nt, Artificial Sequence
  Description of Artificial Sequence: Synthetic oligonucleotide
  Antisense Strand to SEQ ID NO: 450749
uuaaacgaaugccggucuc

SEQ ID NO: 450751 - RNA, 19 nt, Artificial Sequence
  Description of Artificial Sequence: Synthetic oligonucleotide
  Sense strand starting at position 1456 of SEQ ID NO: 316925
ccggcauucguuuaagaac

SEQ ID NO: 450752 - RNA, 19 nt, Artificial Sequence
  Description of Artificial Sequence: Synthetic oligonucleotide
  Antisense Strand to SEQ ID NO: 450751
guucuuaaacgaaugccgg

SEQ ID NO: 450753 - RNA, 19 nt, Artificial Sequence
  Description of Artificial Sequence: Synthetic oligonucleotide
  Sense strand starting at position 2596 of SEQ ID NO: 316925
ccgguuucugcccagacuu

SEQ ID NO: 450754 - RNA, 19 nt, Artificial Sequence
  Description of Artificial Sequence: Synthetic oligonucleotide
  Antisense Strand to SEQ ID NO: 450753
aagucugggcagaaaccgg

SEQ ID NO: 450755 - RNA, 19 nt, Artificial Sequence
  Description of Artificial Sequence: Synthetic oligonucleotide
  Sense strand starting at position 2604 of SEQ ID NO: 316925
ugcccagacuuucucugaa

SEQ ID NO: 450756 - RNA, 19 nt, Artificial Sequence
  Description of Artificial Sequence: Synthetic oligonucleotide
  Antisense Strand to SEQ ID NO: 450755
uucagagaaagucugggca

SEQ ID NO: 450757 - RNA, 19 nt, Artificial Sequence
  Description of Artificial Sequence: Synthetic oligonucleotide
  Sense strand starting at position 2859 of SEQ ID NO: 316925
gggacauucgaauguucag

SEQ ID NO: 450758 - RNA, 19 nt, Artificial Sequence
  Description of Artificial Sequence: Synthetic oligonucleotide
  Antisense Strand to SEQ ID NO: 450757
cugaacauucgaauguccc

SEQ ID NO: 450759 - RNA, 19 nt, Artificial Sequence
  Description of Artificial Sequence: Synthetic oligonucleotide
  Sense strand starting at position 2920 of SEQ ID NO: 316925
gcuugugcugugcucgaga

SEQ ID NO: 450760 - RNA, 19 nt, Artificial Sequence
  Description of Artificial Sequence: Synthetic oligonucleotide
  Antisense Strand to SEQ ID NO: 450759
ucucgagcacagcacaagc

SEQ ID NO: 450761 - RNA, 19 nt, Artificial Sequence
  Description of Artificial Sequence: Synthetic oligonucleotide
  Sense strand starting at position 3117 of SEQ ID NO: 316925
gcuguucugccagagugau

SEQ ID NO: 450762 - RNA, 19 nt, Artificial Sequence
  Description of Artificial Sequence: Synthetic oligonucleotide
  Antisense Strand to SEQ ID NO: 450761
aucacucuggcagaacagc

SEQ ID NO: 450763 - RNA, 19 nt, Artificial Sequence
  Description of Artificial Sequence: Synthetic oligonucleotide
  Sense strand starting at position 3245 of SEQ ID NO: 316925
gaaaucuacuguucggaug

SEQ ID NO: 450764 - RNA, 19 nt, Artificial Sequence
  Description of Artificial Sequence: Synthetic oligonucleotide
  Antisense Strand to SEQ ID NO: 450763
cauccgaacaguagauuuc

SEQ ID NO: 450765 - RNA, 19 nt, Artificial Sequence
  Description of Artificial Sequence: Synthetic oligonucleotide
  Sense strand starting at position 3613 of SEQ ID NO: 316925
aaggaaauuuacuggguac

SEQ ID NO: 450766 - RNA, 19 nt, Artificial Sequence
  Description of Artificial Sequence: Synthetic oligonucleotide
  Antisense Strand to SEQ ID NO: 450765
guacccaguaaauuuccuu

SEQ ID NO: 450767 - RNA, 19 nt, Artificial Sequence
  Description of Artificial Sequence: Synthetic oligonucleotide
  Sense strand starting at position 3625 of SEQ ID NO: 316925
uggguacccuaguucuauu

SEQ ID NO: 450768 - RNA, 19 nt, Artificial Sequence
  Description of Artificial Sequence: Synthetic oligonucleotide
  Antisense Strand to SEQ ID NO: 450767
aauagaacuaggguaccca

SEQ ID NO: 450769 - RNA, 19 nt, Artificial Sequence
  Description of Artificial Sequence: Synthetic oligonucleotide
  Sense strand starting at position 3670 of SEQ ID NO: 316925
uuauuauacugguccugag

SEQ ID NO: 450770 - RNA, 19 nt, Artificial Sequence
  Description of Artificial Sequence: Synthetic oligonucleotide
  Antisense Strand to SEQ ID NO: 450769
cucaggaccaguauaauaa

SEQ ID NO: 450771 - RNA, 19 nt, Artificial Sequence
  Description of Artificial Sequence: Synthetic oligonucleotide
  Sense strand starting at position 3674 of SEQ ID NO: 316925
uauacugguccugaguuua

SEQ ID NO: 450772 - RNA, 19 nt, Artificial Sequence
  Description of Artificial Sequence: Synthetic oligonucleotide
  Antisense Strand to SEQ ID NO: 450771
uaaacucaggaccaguaua

SEQ ID NO: 450773 - RNA, 19 nt, Artificial Sequence
  Description of Artificial Sequence: Synthetic oligonucleotide
  Sense strand starting at position 3687 of SEQ ID NO: 316925
aguuuaacaugauucugua

SEQ ID NO: 450774 - RNA, 19 nt, Artificial Sequence
  Description of Artificial Sequence: Synthetic oligonucleotide
  Antisense Strand to SEQ ID NO: 450773
uacagaaucauguuaaacu

SEQ ID NO: 450775 - RNA, 19 nt, Artificial Sequence
  Description of Artificial Sequence: Synthetic oligonucleotide
  Sense strand starting at position 3802 of SEQ ID NO: 316925
augagcauuucuggaaaga

SEQ ID NO: 450776 - RNA, 19 nt, Artificial Sequence
  Description of Artificial Sequence: Synthetic oligonucleotide
  Antisense Strand to SEQ ID NO: 450775
ucuuuccagaaaugcucau

SEQ ID NO: 450777 - RNA, 19 nt, Artificial Sequence
  Description of Artificial Sequence: Synthetic oligonucleotide
  Sense strand starting at position 3860 of SEQ ID NO: 316925
uucugaagcuccucugagu

SEQ ID NO: 450778 - RNA, 19 nt, Artificial Sequence
  Description of Artificial Sequence: Synthetic oligonucleotide
  Antisense Strand to SEQ ID NO: 450777
acucagaggagcuucagaa

SEQ ID NO: 450779 - RNA, 19 nt, Artificial Sequence
  Description of Artificial Sequence: Synthetic oligonucleotide
  Sense strand starting at position 3865 of SEQ ID NO: 316925
aagcuccucugaguuugaa

SEQ ID NO: 450780 - RNA, 19 nt, Artificial Sequence
  Description of Artificial Sequence: Synthetic oligonucleotide
  Antisense Strand to SEQ ID NO: 450779
uucaaacucagaggagcuu

SEQ ID NO: 450781 - RNA, 19 nt, Artificial Sequence
  Description of Artificial Sequence: Synthetic oligonucleotide
  Sense strand starting at position 3930 of SEQ ID NO: 316925
agacaaagaucccugcaua

SEQ ID NO: 450782 - RNA, 19 nt, Artificial Sequence
  Description of Artificial Sequence: Synthetic oligonucleotide
  Antisense Strand to SEQ ID NO: 450781
uaugcagggaucuuugucu

SEQ ID NO: 450783 - RNA, 19 nt, Artificial Sequence
  Description of Artificial Sequence: Synthetic oligonucleotide
  Sense strand starting at position 244 of SEQ ID NO: 316926
uucugucagcucgaaggaa

SEQ ID NO: 450784 - RNA, 19 nt, Artificial Sequence
  Description of Artificial Sequence: Synthetic oligonucleotide
  Antisense Strand to SEQ ID NO: 450783
uuccuucgagcugacagaa

SEQ ID NO: 450785 - RNA, 19 nt, Artificial Sequence
  Description of Artificial Sequence: Synthetic oligonucleotide
  Sense strand starting at position 368 of SEQ ID NO: 316926
gugaauguucugcauggaa

SEQ ID NO: 450786 - RNA, 19 nt, Artificial Sequence
  Description of Artificial Sequence: Synthetic oligonucleotide
  Antisense Strand to SEQ ID NO: 450785
uuccaugcagaacauucac

SEQ ID NO: 450787 - RNA, 19 nt, Artificial Sequence
  Description of Artificial Sequence: Synthetic oligonucleotide
  Sense strand starting at position 370 of SEQ ID NO: 316926
gaauguucugcauggaaag

SEQ ID NO: 450788 - RNA, 19 nt, Artificial Sequence
  Description of Artificial Sequence: Synthetic oligonucleotide
  Antisense Strand to SEQ ID NO: 450787
cuuuccaugcagaacauuc

SEQ ID NO: 450789 - RNA, 19 nt, Artificial Sequence
  Description of Artificial Sequence: Synthetic oligonucleotide
  Sense strand starting at position 423 of SEQ ID NO: 316926
acgagaagcagugaaguuu

SEQ ID NO: 450790 - RNA, 19 nt, Artificial Sequence
  Description of Artificial Sequence: Synthetic oligonucleotide
  Antisense Strand to SEQ ID NO: 450789
aaacuucacugcuucucgu

SEQ ID NO: 450791 - RNA, 19 nt, Artificial Sequence
  Description of Artificial Sequence: Synthetic oligonucleotide
  Sense strand starting at position 528 of SEQ ID NO: 316926
gcauuaauggccuacaaga

SEQ ID NO: 450792 - RNA, 19 nt, Artificial Sequence
  Description of Artificial Sequence: Synthetic oligonucleotide
  Antisense Strand to SEQ ID NO: 450791
ucuuguaggccauuaaugc

SEQ ID NO: 450793 - RNA, 19 nt, Artificial Sequence
  Description of Artificial Sequence: Synthetic oligonucleotide
  Sense strand starting at position 777 of SEQ ID NO: 316926
guguuaaagcuauggagau

SEQ ID NO: 450794 - RNA, 19 nt, Artificial Sequence
  Description of Artificial Sequence: Synthetic oligonucleotide
  Antisense Strand to SEQ ID NO: 450793
aucuccauagcuuuaacac

SEQ ID NO: 450795 - RNA, 19 nt, Artificial Sequence
  Description of Artificial Sequence: Synthetic oligonucleotide
  Sense strand starting at position 790 of SEQ ID NO: 316926
ggagauuacuuccuggacu

SEQ ID NO: 450796 - RNA, 19 nt, Artificial Sequence
  Description of Artificial Sequence: Synthetic oligonucleotide
  Antisense Strand to SEQ ID NO: 450795
aguccaggaaguaaucucc

SEQ ID NO: 450797 - RNA, 19 nt, Artificial Sequence
  Description of Artificial Sequence: Synthetic oligonucleotide
  Sense strand starting at position 792 of SEQ ID NO: 316926
agauuacuuccuggacucu

SEQ ID NO: 450798 - RNA, 19 nt, Artificial Sequence
  Description of Artificial Sequence: Synthetic oligonucleotide
  Antisense Strand to SEQ ID NO: 450797
agaguccaggaaguaaucu

SEQ ID NO: 450799 - RNA, 19 nt, Artificial Sequence
  Description of Artificial Sequence: Synthetic oligonucleotide
  Sense strand starting at position 809 of SEQ ID NO: 316926
cuguguaggacuugaugau

SEQ ID NO: 450800 - RNA, 19 nt, Artificial Sequence
  Description of Artificial Sequence: Synthetic oligonucleotide
  Antisense Strand to SEQ ID NO: 450799
aucaucaaguccuacacag

SEQ ID NO: 450801 - RNA, 19 nt, Artificial Sequence
  Description of Artificial Sequence: Synthetic oligonucleotide
  Sense strand starting at position 810 of SEQ ID NO: 316926
uguguaggacuugaugauu

SEQ ID NO: 450802 - RNA, 19 nt, Artificial Sequence
  Description of Artificial Sequence: Synthetic oligonucleotide
  Antisense Strand to SEQ ID NO: 450801
aaucaucaaguccuacaca

SEQ ID NO: 450803 - RNA, 19 nt, Artificial Sequence
  Description of Artificial Sequence: Synthetic oligonucleotide
  Sense strand starting at position 908 of SEQ ID NO: 316926
uuucuuuaacagcaagaug

SEQ ID NO: 450804 - RNA, 19 nt, Artificial Sequence
  Description of Artificial Sequence: Synthetic oligonucleotide
  Antisense Strand to SEQ ID NO: 450803
caucuugcuguuaaagaaa

SEQ ID NO: 450805 - RNA, 19 nt, Artificial Sequence
  Description of Artificial Sequence: Synthetic oligonucleotide
  Sense strand starting at position 938 of SEQ ID NO: 316926
agacuucucucugccagga

SEQ ID NO: 450806 - RNA, 19 nt, Artificial Sequence
  Description of Artificial Sequence: Synthetic oligonucleotide
  Antisense Strand to SEQ ID NO: 450805
uccuggcagagagaagucu

SEQ ID NO: 450807 - RNA, 19 nt, Artificial Sequence
  Description of Artificial Sequence: Synthetic oligonucleotide
  Sense strand starting at position 1421 of SEQ ID NO: 316926
gguaaucacagugagcaaa

SEQ ID NO: 450808 - RNA, 19 nt, Artificial Sequence
  Description of Artificial Sequence: Synthetic oligonucleotide
  Antisense Strand to SEQ ID NO: 450807
uuugcucacugugauuacc

SEQ ID NO: 450809 - RNA, 19 nt, Artificial Sequence
  Description of Artificial Sequence: Synthetic oligonucleotide
  Sense strand starting at position 1511 of SEQ ID NO: 316926
uaugcuucuggugauaagu

SEQ ID NO: 450810 - RNA, 19 nt, Artificial Sequence
  Description of Artificial Sequence: Synthetic oligonucleotide
  Antisense Strand to SEQ ID NO: 450809
acuuaucaccagaagcaua

SEQ ID NO: 450811 - RNA, 19 nt, Artificial Sequence
  Description of Artificial Sequence: Synthetic oligonucleotide
  Sense strand starting at position 1517 of SEQ ID NO: 316926
ucuggugauaaguaucgaa

SEQ ID NO: 450812 - RNA, 19 nt, Artificial Sequence
  Description of Artificial Sequence: Synthetic oligonucleotide
  Antisense Strand to SEQ ID NO: 450811
uucgauacuuaucaccaga

SEQ ID NO: 450813 - RNA, 19 nt, Artificial Sequence
  Description of Artificial Sequence: Synthetic oligonucleotide
  Sense strand starting at position 1521 of SEQ ID NO: 316926
gugauaaguaucgaaauua

SEQ ID NO: 450814 - RNA, 19 nt, Artificial Sequence
  Description of Artificial Sequence: Synthetic oligonucleotide
  Antisense Strand to SEQ ID NO: 450813
uaauuucgauacuuaucac

SEQ ID NO: 450815 - RNA, 19 nt, Artificial Sequence
  Description of Artificial Sequence: Synthetic oligonucleotide
  Sense strand starting at position 1654 of SEQ ID NO: 316926
acaggaaagugucucuauc

SEQ ID NO: 450816 - RNA, 19 nt, Artificial Sequence
  Description of Artificial Sequence: Synthetic oligonucleotide
  Antisense Strand to SEQ ID NO: 450815
gauagagacacuuuccugu

SEQ ID NO: 450817 - RNA, 19 nt, Artificial Sequence
  Description of Artificial Sequence: Synthetic oligonucleotide
  Sense strand starting at position 1733 of SEQ ID NO: 316926
ugcccugaucuugacgaga

SEQ ID NO: 450818 - RNA, 19 nt, Artificial Sequence
  Description of Artificial Sequence: Synthetic oligonucleotide
  Antisense Strand to SEQ ID NO: 450817
ucucgucaagaucagggca

SEQ ID NO: 450819 - RNA, 19 nt, Artificial Sequence
  Description of Artificial Sequence: Synthetic oligonucleotide
  Sense strand starting at position 1920 of SEQ ID NO: 316926
aggcgaaggcguucguagu

SEQ ID NO: 450820 - RNA, 19 nt, Artificial Sequence
  Description of Artificial Sequence: Synthetic oligonucleotide
  Antisense Strand to SEQ ID NO: 450819
acuacgaacgccuucgccu

SEQ ID NO: 450821 - RNA, 19 nt, Artificial Sequence
  Description of Artificial Sequence: Synthetic oligonucleotide
  Sense strand starting at position 2578 of SEQ ID NO: 316926
uuacuuagucaucaacgca

SEQ ID NO: 450822 - RNA, 19 nt, Artificial Sequence
  Description of Artificial Sequence: Synthetic oligonucleotide
  Antisense Strand to SEQ ID NO: 450821
ugcguugaugacuaaguaa

SEQ ID NO: 450823 - RNA, 19 nt, Artificial Sequence
  Description of Artificial Sequence: Synthetic oligonucleotide
  Sense strand starting at position 2726 of SEQ ID NO: 316926
agcucugagagcuggagaa

SEQ ID NO: 450824 - RNA, 19 nt, Artificial Sequence
  Description of Artificial Sequence: Synthetic oligonucleotide
  Antisense Strand to SEQ ID NO: 450823
uucuccagcucucagagcu

SEQ ID NO: 450825 - RNA, 19 nt, Artificial Sequence
  Description of Artificial Sequence: Synthetic oligonucleotide
  Sense strand starting at position 2852 of SEQ ID NO: 316926
ucccuagcaggugaucaaa

SEQ ID NO: 450826 - RNA, 19 nt, Artificial Sequence
  Description of Artificial Sequence: Synthetic oligonucleotide
  Antisense Strand to SEQ ID NO: 450825
uuugaucaccugcuaggga

SEQ ID NO: 450827 - RNA, 19 nt, Artificial Sequence
  Description of Artificial Sequence: Synthetic oligonucleotide
  Sense strand starting at position 2894 of SEQ ID NO: 316926
uuacauuacccaggagcaa

SEQ ID NO: 450828 - RNA, 19 nt, Artificial Sequence
  Description of Artificial Sequence: Synthetic oligonucleotide
  Antisense Strand to SEQ ID NO: 450827
uugcuccuggguaauguaa

SEQ ID NO: 450829 - RNA, 19 nt, Artificial Sequence
  Description of Artificial Sequence: Synthetic oligonucleotide
  Sense strand starting at position 3011 of SEQ ID NO: 316926
ggcaaagggacuuggaauu

SEQ ID NO: 450830 - RNA, 19 nt, Artificial Sequence
  Description of Artificial Sequence: Synthetic oligonucleotide
  Antisense Strand to SEQ ID NO: 450829
aauuccaagucccuuugcc

SEQ ID NO: 450831 - RNA, 19 nt, Artificial Sequence
  Description of Artificial Sequence: Synthetic oligonucleotide
  Sense strand starting at position 3071 of SEQ ID NO: 316926
ucucauuucuguucuguuu

SEQ ID NO: 450832 - RNA, 19 nt, Artificial Sequence
  Description of Artificial Sequence: Synthetic oligonucleotide
  Antisense Strand to SEQ ID NO: 450831
aaacagaacagaaaugaga

SEQ ID NO: 450833 - RNA, 19 nt, Artificial Sequence
  Description of Artificial Sequence: Synthetic oligonucleotide
  Sense strand starting at position 3088 of SEQ ID NO: 316926
uuuaucugaggcgauagaa

SEQ ID NO: 450834 - RNA, 19 nt, Artificial Sequence
  Description of Artificial Sequence: Synthetic oligonucleotide
  Antisense Strand to SEQ ID NO: 450833
uucuaucgccucagauaaa

SEQ ID NO: 450835 - RNA, 19 nt, Artificial Sequence
  Description of Artificial Sequence: Synthetic oligonucleotide
  Sense strand starting at position 3097 of SEQ ID NO: 316926
ggcgauagaauccaaacgu

SEQ ID NO: 450836 - RNA, 19 nt, Artificial Sequence
  Description of Artificial Sequence: Synthetic oligonucleotide
  Antisense Strand to SEQ ID NO: 450835
acguuuggauucuaucgcc

SEQ ID NO: 450837 - RNA, 19 nt, Artificial Sequence
  Description of Artificial Sequence: Synthetic oligonucleotide
  Sense strand starting at position 3172 of SEQ ID NO: 316926
acagaauguuaugcacauu

SEQ ID NO: 450838 - RNA, 19 nt, Artificial Sequence
  Description of Artificial Sequence: Synthetic oligonucleotide
  Antisense Strand to SEQ ID NO: 450837
aaugugcauaacauucugu

SEQ ID NO: 450839 - RNA, 19 nt, Artificial Sequence
  Description of Artificial Sequence: Synthetic oligonucleotide
  Sense strand starting at position 3215 of SEQ ID NO: 316926
guuuaucuccuccagaagu

SEQ ID NO: 450840 - RNA, 19 nt, Artificial Sequence
  Description of Artificial Sequence: Synthetic oligonucleotide
  Antisense Strand to SEQ ID NO: 450839
acuucuggaggagauaaac

SEQ ID NO: 450841 - RNA, 19 nt, Artificial Sequence
  Description of Artificial Sequence: Synthetic oligonucleotide
  Sense strand starting at position 3234 of SEQ ID NO: 316926
uguuauaaacguuagacac

SEQ ID NO: 450842 - RNA, 19 nt, Artificial Sequence
  Description of Artificial Sequence: Synthetic oligonucleotide
  Antisense Strand to SEQ ID NO: 450841
gugucuaacguuuauaaca

SEQ ID NO: 450843 - RNA, 19 nt, Artificial Sequence
  Description of Artificial Sequence: Synthetic oligonucleotide
  Sense strand starting at position 3271 of SEQ ID NO: 316926
gagagauaaguaugcugau

SEQ ID NO: 450844 - RNA, 19 nt, Artificial Sequence
  Description of Artificial Sequence: Synthetic oligonucleotide
  Antisense Strand to SEQ ID NO: 450843
aucagcauacuuaucucuc

SEQ ID NO: 450845 - RNA, 19 nt, Artificial Sequence
  Description of Artificial Sequence: Synthetic oligonucleotide
  Sense strand starting at position 3272 of SEQ ID NO: 316926
agagauaaguaugcugaua

SEQ ID NO: 450846 - RNA, 19 nt, Artificial Sequence
  Description of Artificial Sequence: Synthetic oligonucleotide
  Antisense Strand to SEQ ID NO: 450845
uaucagcauacuuaucucu

SEQ ID NO: 450847 - RNA, 19 nt, Artificial Sequence
  Description of Artificial Sequence: Synthetic oligonucleotide
  Sense strand starting at position 3286 of SEQ ID NO: 316926
ugauacguuucugucauuu

SEQ ID NO: 450848 - RNA, 19 nt, Artificial Sequence
  Description of Artificial Sequence: Synthetic oligonucleotide
  Antisense Strand to SEQ ID NO: 450847
aaaugacagaaacguauca

SEQ ID NO: 450849 - RNA, 19 nt, Artificial Sequence
  Description of Artificial Sequence: Synthetic oligonucleotide
  Sense strand starting at position 3436 of SEQ ID NO: 316926
ugaagauuaugggaggaga

SEQ ID NO: 450850 - RNA, 19 nt, Artificial Sequence
  Description of Artificial Sequence: Synthetic oligonucleotide
  Antisense Strand to SEQ ID NO: 450849
ucuccucccauaaucuuca

SEQ ID NO: 450851 - RNA, 19 nt, Artificial Sequence
  Description of Artificial Sequence: Synthetic oligonucleotide
  Sense strand starting at position 3564 of SEQ ID NO: 316926
uauuuagcuugcucuguga

SEQ ID NO: 450852 - RNA, 19 nt, Artificial Sequence
  Description of Artificial Sequence: Synthetic oligonucleotide
  Antisense Strand to SEQ ID NO: 450851
ucacagagcaagcuaaaua

SEQ ID NO: 450853 - RNA, 19 nt, Artificial Sequence
  Description of Artificial Sequence: Synthetic oligonucleotide
  Sense strand starting at position 3641 of SEQ ID NO: 316926
cauugcagagucuaauuga

SEQ ID NO: 450854 - RNA, 19 nt, Artificial Sequence
  Description of Artificial Sequence: Synthetic oligonucleotide
  Antisense Strand to SEQ ID NO: 450853
ucaauuagacucugcaaug

SEQ ID NO: 450855 - RNA, 19 nt, Artificial Sequence
  Description of Artificial Sequence: Synthetic oligonucleotide
  Sense strand starting at position 3644 of SEQ ID NO: 316926
ugcagagucuaauugaaau

SEQ ID NO: 450856 - RNA, 19 nt, Artificial Sequence
  Description of Artificial Sequence: Synthetic oligonucleotide
  Antisense Strand to SEQ ID NO: 450855
auuucaauuagacucugca

SEQ ID NO: 450857 - RNA, 19 nt, Artificial Sequence
  Description of Artificial Sequence: Synthetic oligonucleotide
  Sense strand starting at position 3716 of SEQ ID NO: 316926
aucuuauacuuggcaugaa

SEQ ID NO: 450858 - RNA, 19 nt, Artificial Sequence
  Description of Artificial Sequence: Synthetic oligonucleotide
  Antisense Strand to SEQ ID NO: 450857
uucaugccaaguauaagau

SEQ ID NO: 450859 - RNA, 19 nt, Artificial Sequence
  Description of Artificial Sequence: Synthetic oligonucleotide
  Sense strand starting at position 3763 of SEQ ID NO: 316926
uuuccauuucugugaguca

SEQ ID NO: 450860 - RNA, 19 nt, Artificial Sequence
  Description of Artificial Sequence: Synthetic oligonucleotide
  Antisense Strand to SEQ ID NO: 450859
ugacucacagaaauggaaa

SEQ ID NO: 450861 - RNA, 19 nt, Artificial Sequence
  Description of Artificial Sequence: Synthetic oligonucleotide
  Sense strand starting at position 3967 of SEQ ID NO: 316926
ggucuucuccuggauucua

SEQ ID NO: 450862 - RNA, 19 nt, Artificial Sequence
  Description of Artificial Sequence: Synthetic oligonucleotide
  Antisense Strand to SEQ ID NO: 450861
uagaauccaggagaagacc

SEQ ID NO: 450863 - RNA, 19 nt, Artificial Sequence
  Description of Artificial Sequence: Synthetic oligonucleotide
  Sense strand starting at position 232 of SEQ ID NO: 316927
uugaaaguguuucuuaauc

SEQ ID NO: 450864 - RNA, 19 nt, Artificial Sequence
  Description of Artificial Sequence: Synthetic oligonucleotide
  Antisense Strand to SEQ ID NO: 450863
gauuaagaaacacuuucaa

SEQ ID NO: 450865 - RNA, 19 nt, Artificial Sequence
  Description of Artificial Sequence: Synthetic oligonucleotide
  Sense strand starting at position 372 of SEQ ID NO: 316927
ugaccauuacuuggacaau

SEQ ID NO: 450866 - RNA, 19 nt, Artificial Sequence
  Description of Artificial Sequence: Synthetic oligonucleotide
  Antisense Strand to SEQ ID NO: 450865
auuguccaaguaaugguca

SEQ ID NO: 450867 - RNA, 19 nt, Artificial Sequence
  Description of Artificial Sequence: Synthetic oligonucleotide
  Sense strand starting at position 534 of SEQ ID NO: 316927
aaagauguccacugaugau

SEQ ID NO: 450868 - RNA, 19 nt, Artificial Sequence
  Description of Artificial Sequence: Synthetic oligonucleotide
  Antisense Strand to SEQ ID NO: 450867
aucaucaguggacaucuuu

SEQ ID NO: 450869 - RNA, 19 nt, Artificial Sequence
  Description of Artificial Sequence: Synthetic oligonucleotide
  Sense strand starting at position 658 of SEQ ID NO: 316927
aucaguacuccugacugua

SEQ ID NO: 450870 - RNA, 19 nt, Artificial Sequence
  Description of Artificial Sequence: Synthetic oligonucleotide
  Antisense Strand to SEQ ID NO: 450869
uacagucaggaguacugau

SEQ ID NO: 450871 - RNA, 19 nt, Artificial Sequence
  Description of Artificial Sequence: Synthetic oligonucleotide
  Sense strand starting at position 904 of SEQ ID NO: 316927
uucugucagcucgaaggaa

SEQ ID NO: 450872 - RNA, 19 nt, Artificial Sequence
  Description of Artificial Sequence: Synthetic oligonucleotide
  Antisense Strand to SEQ ID NO: 450871
uuccuucgagcugacagaa

SEQ ID NO: 450873 - RNA, 19 nt, Artificial Sequence
  Description of Artificial Sequence: Synthetic oligonucleotide
  Sense strand starting at position 1028 of SEQ ID NO: 316927
gugaauguucugcauggaa

SEQ ID NO: 450874 - RNA, 19 nt, Artificial Sequence
  Description of Artificial Sequence: Synthetic oligonucleotide
  Antisense Strand to SEQ ID NO: 450873
uuccaugcagaacauucac

SEQ ID NO: 450875 - RNA, 19 nt, Artificial Sequence
  Description of Artificial Sequence: Synthetic oligonucleotide
  Sense strand starting at position 1030 of SEQ ID NO: 316927
gaauguucugcauggaaag

SEQ ID NO: 450876 - RNA, 19 nt, Artificial Sequence
  Description of Artificial Sequence: Synthetic oligonucleotide
  Antisense Strand to SEQ ID NO: 450875
cuuuccaugcagaacauuc

SEQ ID NO: 450877 - RNA, 19 nt, Artificial Sequence
  Description of Artificial Sequence: Synthetic oligonucleotide
  Sense strand starting at position 1083 of SEQ ID NO: 316927
acgagaagcagugaaguuu

SEQ ID NO: 450878 - RNA, 19 nt, Artificial Sequence
  Description of Artificial Sequence: Synthetic oligonucleotide
  Antisense Strand to SEQ ID NO: 450877
aaacuucacugcuucucgu

SEQ ID NO: 450879 - RNA, 19 nt, Artificial Sequence
  Description of Artificial Sequence: Synthetic oligonucleotide
  Sense strand starting at position 1188 of SEQ ID NO: 316927
gcauuaauggccuacaaga

SEQ ID NO: 450880 - RNA, 19 nt, Artificial Sequence
  Description of Artificial Sequence: Synthetic oligonucleotide
  Antisense Strand to SEQ ID NO: 450879
ucuuguaggccauuaaugc

SEQ ID NO: 450881 - RNA, 19 nt, Artificial Sequence
  Description of Artificial Sequence: Synthetic oligonucleotide
  Sense strand starting at position 1435 of SEQ ID NO: 316927
ucguguuaaagcuauggag

SEQ ID NO: 450882 - RNA, 19 nt, Artificial Sequence
  Description of Artificial Sequence: Synthetic oligonucleotide
  Antisense Strand to SEQ ID NO: 450881
cuccauagcuuuaacacga

SEQ ID NO: 450883 - RNA, 19 nt, Artificial Sequence
  Description of Artificial Sequence: Synthetic oligonucleotide
  Sense strand starting at position 1437 of SEQ ID NO: 316927
guguuaaagcuauggagau

SEQ ID NO: 450884 - RNA, 19 nt, Artificial Sequence
  Description of Artificial Sequence: Synthetic oligonucleotide
  Antisense Strand to SEQ ID NO: 450883
aucuccauagcuuuaacac

SEQ ID NO: 450885 - RNA, 19 nt, Artificial Sequence
  Description of Artificial Sequence: Synthetic oligonucleotide
  Sense strand starting at position 1450 of SEQ ID NO: 316927
ggagauuacuuccuggacu

SEQ ID NO: 450886 - RNA, 19 nt, Artificial Sequence
  Description of Artificial Sequence: Synthetic oligonucleotide
  Antisense Strand to SEQ ID NO: 450885
aguccaggaaguaaucucc

SEQ ID NO: 450887 - RNA, 19 nt, Artificial Sequence
  Description of Artificial Sequence: Synthetic oligonucleotide
  Sense strand starting at position 1452 of SEQ ID NO: 316927
agauuacuuccuggacucu

SEQ ID NO: 450888 - RNA, 19 nt, Artificial Sequence
  Description of Artificial Sequence: Synthetic oligonucleotide
  Antisense Strand to SEQ ID NO: 450887
agaguccaggaaguaaucu

SEQ ID NO: 450889 - RNA, 19 nt, Artificial Sequence
  Description of Artificial Sequence: Synthetic oligonucleotide
  Sense strand starting at position 1469 of SEQ ID NO: 316927
cuguguaggacuugaugau

SEQ ID NO: 450890 - RNA, 19 nt, Artificial Sequence
  Description of Artificial Sequence: Synthetic oligonucleotide
  Antisense Strand to SEQ ID NO: 450889
aucaucaaguccuacacag

SEQ ID NO: 450891 - RNA, 19 nt, Artificial Sequence
  Description of Artificial Sequence: Synthetic oligonucleotide
  Sense strand starting at position 1470 of SEQ ID NO: 316927
uguguaggacuugaugauu

SEQ ID NO: 450892 - RNA, 19 nt, Artificial Sequence
  Description of Artificial Sequence: Synthetic oligonucleotide
  Antisense Strand to SEQ ID NO: 450891
aaucaucaaguccuacaca

SEQ ID NO: 450893 - RNA, 19 nt, Artificial Sequence
  Description of Artificial Sequence: Synthetic oligonucleotide
  Sense strand starting at position 1568 of SEQ ID NO: 316927
uuucuuuaacagcaagaug

SEQ ID NO: 450894 - RNA, 19 nt, Artificial Sequence
  Description of Artificial Sequence: Synthetic oligonucleotide
  Antisense Strand to SEQ ID NO: 450893
caucuugcuguuaaagaaa

SEQ ID NO: 450895 - RNA, 19 nt, Artificial Sequence
  Description of Artificial Sequence: Synthetic oligonucleotide
  Sense strand starting at position 1598 of SEQ ID NO: 316927
agacuucucucugccagga

SEQ ID NO: 450896 - RNA, 19 nt, Artificial Sequence
  Description of Artificial Sequence: Synthetic oligonucleotide
  Antisense Strand to SEQ ID NO: 450895
uccuggcagagagaagucu

SEQ ID NO: 450897 - RNA, 19 nt, Artificial Sequence
  Description of Artificial Sequence: Synthetic oligonucleotide
  Sense strand starting at position 2081 of SEQ ID NO: 316927
gguaaucacagugagcaaa

SEQ ID NO: 450898 - RNA, 19 nt, Artificial Sequence
  Description of Artificial Sequence: Synthetic oligonucleotide
  Antisense Strand to SEQ ID NO: 450897
uuugcucacugugauuacc

SEQ ID NO: 450899 - RNA, 19 nt, Artificial Sequence
  Description of Artificial Sequence: Synthetic oligonucleotide
  Sense strand starting at position 2171 of SEQ ID NO: 316927
uaugcuucuggugauaagu

SEQ ID NO: 450900 - RNA, 19 nt, Artificial Sequence
  Description of Artificial Sequence: Synthetic oligonucleotide
  Antisense Strand to SEQ ID NO: 450899
acuuaucaccagaagcaua

SEQ ID NO: 450901 - RNA, 19 nt, Artificial Sequence
  Description of Artificial Sequence: Synthetic oligonucleotide
  Sense strand starting at position 2177 of SEQ ID NO: 316927
ucuggugauaaguaucgaa

SEQ ID NO: 450902 - RNA, 19 nt, Artificial Sequence
  Description of Artificial Sequence: Synthetic oligonucleotide
  Antisense Strand to SEQ ID NO: 450901
uucgauacuuaucaccaga

SEQ ID NO: 450903 - RNA, 19 nt, Artificial Sequence
  Description of Artificial Sequence: Synthetic oligonucleotide
  Sense strand starting at position 2181 of SEQ ID NO: 316927
gugauaaguaucgaaauua

SEQ ID NO: 450904 - RNA, 19 nt, Artificial Sequence
  Description of Artificial Sequence: Synthetic oligonucleotide
  Antisense Strand to SEQ ID NO: 450903
uaauuucgauacuuaucac

SEQ ID NO: 450905 - RNA, 19 nt, Artificial Sequence
  Description of Artificial Sequence: Synthetic oligonucleotide
  Sense strand starting at position 2314 of SEQ ID NO: 316927
acaggaaagugucucuauc

SEQ ID NO: 450906 - RNA, 19 nt, Artificial Sequence
  Description of Artificial Sequence: Synthetic oligonucleotide
  Antisense Strand to SEQ ID NO: 450905
gauagagacacuuuccugu

SEQ ID NO: 450907 - RNA, 19 nt, Artificial Sequence
  Description of Artificial Sequence: Synthetic oligonucleotide
  Sense strand starting at position 2393 of SEQ ID NO: 316927
ugcccugaucuugacgaga

SEQ ID NO: 450908 - RNA, 19 nt, Artificial Sequence
  Description of Artificial Sequence: Synthetic oligonucleotide
  Antisense Strand to SEQ ID NO: 450907
ucucgucaagaucagggca

SEQ ID NO: 450909 - RNA, 19 nt, Artificial Sequence
  Description of Artificial Sequence: Synthetic oligonucleotide
  Sense strand starting at position 2580 of SEQ ID NO: 316927
aggcgaaggcguucguagu

SEQ ID NO: 450910 - RNA, 19 nt, Artificial Sequence
  Description of Artificial Sequence: Synthetic oligonucleotide
  Antisense Strand to SEQ ID NO: 450909
acuacgaacgccuucgccu

SEQ ID NO: 450911 - RNA, 19 nt, Artificial Sequence
  Description of Artificial Sequence: Synthetic oligonucleotide
  Sense strand starting at position 3080 of SEQ ID NO: 316927
guguaaagccgggaaugua

SEQ ID NO: 450912 - RNA, 19 nt, Artificial Sequence
  Description of Artificial Sequence: Synthetic oligonucleotide
  Antisense Strand to SEQ ID NO: 450911
uacauucccggcuuuacac

SEQ ID NO: 450913 - RNA, 19 nt, Artificial Sequence
  Description of Artificial Sequence: Synthetic oligonucleotide
  Sense strand starting at position 3238 of SEQ ID NO: 316927
uuacuuagucaucaacgca

SEQ ID NO: 450914 - RNA, 19 nt, Artificial Sequence
  Description of Artificial Sequence: Synthetic oligonucleotide
  Antisense Strand to SEQ ID NO: 450913
ugcguugaugacuaaguaa

SEQ ID NO: 450915 - RNA, 19 nt, Artificial Sequence
  Description of Artificial Sequence: Synthetic oligonucleotide
  Sense strand starting at position 3386 of SEQ ID NO: 316927
agcucugagagcuggagaa

SEQ ID NO: 450916 - RNA, 19 nt, Artificial Sequence
  Description of Artificial Sequence: Synthetic oligonucleotide
  Antisense Strand to SEQ ID NO: 450915
uucuccagcucucagagcu

SEQ ID NO: 450917 - RNA, 19 nt, Artificial Sequence
  Description of Artificial Sequence: Synthetic oligonucleotide
  Sense strand starting at position 3512 of SEQ ID NO: 316927
ucccuagcaggugaucaaa

SEQ ID NO: 450918 - RNA, 19 nt, Artificial Sequence
  Description of Artificial Sequence: Synthetic oligonucleotide
  Antisense Strand to SEQ ID NO: 450917
uuugaucaccugcuaggga

SEQ ID NO: 450919 - RNA, 19 nt, Artificial Sequence
  Description of Artificial Sequence: Synthetic oligonucleotide
  Sense strand starting at position 3554 of SEQ ID NO: 316927
uuacauuacccaggagcaa

SEQ ID NO: 450920 - RNA, 19 nt, Artificial Sequence
  Description of Artificial Sequence: Synthetic oligonucleotide
  Antisense Strand to SEQ ID NO: 450919
uugcuccuggguaauguaa

SEQ ID NO: 450921 - RNA, 19 nt, Artificial Sequence
  Description of Artificial Sequence: Synthetic oligonucleotide
  Sense strand starting at position 3671 of SEQ ID NO: 316927
ggcaaagggacuuggaauu

SEQ ID NO: 450922 - RNA, 19 nt, Artificial Sequence
  Description of Artificial Sequence: Synthetic oligonucleotide
  Antisense Strand to SEQ ID NO: 450921
aauuccaagucccuuugcc

SEQ ID NO: 450923 - RNA, 19 nt, Artificial Sequence
  Description of Artificial Sequence: Synthetic oligonucleotide
  Sense strand starting at position 3731 of SEQ ID NO: 316927
ucucauuucuguucuguuu

SEQ ID NO: 450924 - RNA, 19 nt, Artificial Sequence
  Description of Artificial Sequence: Synthetic oligonucleotide
  Antisense Strand to SEQ ID NO: 450923
aaacagaacagaaaugaga

SEQ ID NO: 450925 - RNA, 19 nt, Artificial Sequence
  Description of Artificial Sequence: Synthetic oligonucleotide
  Sense strand starting at position 3748 of SEQ ID NO: 316927
uuuaucugaggcgauagaa

SEQ ID NO: 450926 - RNA, 19 nt, Artificial Sequence
  Description of Artificial Sequence: Synthetic oligonucleotide
  Antisense Strand to SEQ ID NO: 450925
uucuaucgccucagauaaa

SEQ ID NO: 450927 - RNA, 19 nt, Artificial Sequence
  Description of Artificial Sequence: Synthetic oligonucleotide
  Sense strand starting at position 3757 of SEQ ID NO: 316927
ggcgauagaauccaaacgu

SEQ ID NO: 450928 - RNA, 19 nt, Artificial Sequence
  Description of Artificial Sequence: Synthetic oligonucleotide
  Antisense Strand to SEQ ID NO: 450927
acguuuggauucuaucgcc

SEQ ID NO: 450929 - RNA, 19 nt, Artificial Sequence
  Description of Artificial Sequence: Synthetic oligonucleotide
  Sense strand starting at position 3832 of SEQ ID NO: 316927
acagaauguuaugcacauu

SEQ ID NO: 450930 - RNA, 19 nt, Artificial Sequence
  Description of Artificial Sequence: Synthetic oligonucleotide
  Antisense Strand to SEQ ID NO: 450929
aaugugcauaacauucugu

SEQ ID NO: 450931 - RNA, 19 nt, Artificial Sequence
  Description of Artificial Sequence: Synthetic oligonucleotide
  Sense strand starting at position 3875 of SEQ ID NO: 316927
guuuaucuccuccagaagu

SEQ ID NO: 450932 - RNA, 19 nt, Artificial Sequence
  Description of Artificial Sequence: Synthetic oligonucleotide
  Antisense Strand to SEQ ID NO: 450931
acuucuggaggagauaaac

SEQ ID NO: 450933 - RNA, 19 nt, Artificial Sequence
  Description of Artificial Sequence: Synthetic oligonucleotide
  Sense strand starting at position 3894 of SEQ ID NO: 316927
uguuauaaacguuagacac

SEQ ID NO: 450934 - RNA, 19 nt, Artificial Sequence
  Description of Artificial Sequence: Synthetic oligonucleotide
  Antisense Strand to SEQ ID NO: 450933
gugucuaacguuuauaaca

SEQ ID NO: 450935 - RNA, 19 nt, Artificial Sequence
  Description of Artificial Sequence: Synthetic oligonucleotide
  Sense strand starting at position 3931 of SEQ ID NO: 316927
gagagauaaguaugcugau

SEQ ID NO: 450936 - RNA, 19 nt, Artificial Sequence
  Description of Artificial Sequence: Synthetic oligonucleotide
  Antisense Strand to SEQ ID NO: 450935
aucagcauacuuaucucuc

SEQ ID NO: 450937 - RNA, 19 nt, Artificial Sequence
  Description of Artificial Sequence: Synthetic oligonucleotide
  Sense strand starting at position 3932 of SEQ ID NO: 316927
agagauaaguaugcugaua

SEQ ID NO: 450938 - RNA, 19 nt, Artificial Sequence
  Description of Artificial Sequence: Synthetic oligonucleotide
  Antisense Strand to SEQ ID NO: 450937
uaucagcauacuuaucucu

SEQ ID NO: 450939 - RNA, 19 nt, Artificial Sequence
  Description of Artificial Sequence: Synthetic oligonucleotide
  Sense strand starting at position 3946 of SEQ ID NO: 316927
ugauacguuucugucauuu

SEQ ID NO: 450940 - RNA, 19 nt, Artificial Sequence
  Description of Artificial Sequence: Synthetic oligonucleotide
  Antisense Strand to SEQ ID NO: 450939
aaaugacagaaacguauca

SEQ ID NO: 450941 - RNA, 19 nt, Artificial Sequence
  Description of Artificial Sequence: Synthetic oligonucleotide
  Sense strand starting at position 3973 of SEQ ID NO: 316927
gagucaauaugugccaaac

SEQ ID NO: 450942 - RNA, 19 nt, Artificial Sequence
  Description of Artificial Sequence: Synthetic oligonucleotide
  Antisense Strand to SEQ ID NO: 450941
guuuggcacauauugacuc

SEQ ID NO: 450943 - RNA, 19 nt, Artificial Sequence
  Description of Artificial Sequence: Synthetic oligonucleotide
  Sense strand starting at position 88 of SEQ ID NO: 316928
gggaaacuauucucagcga

SEQ ID NO: 450944 - RNA, 19 nt, Artificial Sequence
  Description of Artificial Sequence: Synthetic oligonucleotide
  Antisense Strand to SEQ ID NO: 450943
ucgcugagaauaguuuccc

SEQ ID NO: 450945 - RNA, 19 nt, Artificial Sequence
  Description of Artificial Sequence: Synthetic oligonucleotide
  Sense strand starting at position 92 of SEQ ID NO: 316928
aacuauucucagcgaagag

SEQ ID NO: 450946 - RNA, 19 nt, Artificial Sequence
  Description of Artificial Sequence: Synthetic oligonucleotide
  Antisense Strand to SEQ ID NO: 450945
cucuucgcugagaauaguu

SEQ ID NO: 450947 - RNA, 19 nt, Artificial Sequence
  Description of Artificial Sequence: Synthetic oligonucleotide
  Sense strand starting at position 391 of SEQ ID NO: 316928
acacacuugcgcguuugaa

SEQ ID NO: 450948 - RNA, 19 nt, Artificial Sequence
  Description of Artificial Sequence: Synthetic oligonucleotide
  Antisense Strand to SEQ ID NO: 450947
uucaaacgcgcaagugugu

SEQ ID NO: 450949 - RNA, 19 nt, Artificial Sequence
  Description of Artificial Sequence: Synthetic oligonucleotide
  Sense strand starting at position 392 of SEQ ID NO: 316928
cacacuugcgcguuugaaa

SEQ ID NO: 450950 - RNA, 19 nt, Artificial Sequence
  Description of Artificial Sequence: Synthetic oligonucleotide
  Antisense Strand to SEQ ID NO: 450949
uuucaaacgcgcaagugug

SEQ ID NO: 450951 - RNA, 19 nt, Artificial Sequence
  Description of Artificial Sequence: Synthetic oligonucleotide
  Sense strand starting at position 393 of SEQ ID NO: 316928
acacuugcgcguuugaaau

SEQ ID NO: 450952 - RNA, 19 nt, Artificial Sequence
  Description of Artificial Sequence: Synthetic oligonucleotide
  Antisense Strand to SEQ ID NO: 450951
auuucaaacgcgcaagugu

SEQ ID NO: 450953 - RNA, 19 nt, Artificial Sequence
  Description of Artificial Sequence: Synthetic oligonucleotide
  Sense strand starting at position 399 of SEQ ID NO: 316928
gcgcguuugaaaucguuca

SEQ ID NO: 450954 - RNA, 19 nt, Artificial Sequence
  Description of Artificial Sequence: Synthetic oligonucleotide
  Antisense Strand to SEQ ID NO: 450953
ugaacgauuucaaacgcgc

SEQ ID NO: 450955 - RNA, 19 nt, Artificial Sequence
  Description of Artificial Sequence: Synthetic oligonucleotide
  Sense strand starting at position 457 of SEQ ID NO: 316928
cgagcaaacuguccaggau

SEQ ID NO: 450956 - RNA, 19 nt, Artificial Sequence
  Description of Artificial Sequence: Synthetic oligonucleotide
  Antisense Strand to SEQ ID NO: 450955
auccuggacaguuugcucg

SEQ ID NO: 450957 - RNA, 19 nt, Artificial Sequence
  Description of Artificial Sequence: Synthetic oligonucleotide
  Sense strand starting at position 469 of SEQ ID NO: 316928
ccaggaugcgggugaaauu

SEQ ID NO: 450958 - RNA, 19 nt, Artificial Sequence
  Description of Artificial Sequence: Synthetic oligonucleotide
  Antisense Strand to SEQ ID NO: 450957
aauuucacccgcauccugg

SEQ ID NO: 450959 - RNA, 19 nt, Artificial Sequence
  Description of Artificial Sequence: Synthetic oligonucleotide
  Sense strand starting at position 771 of SEQ ID NO: 316928
caucuaugcggucacagaa

SEQ ID NO: 450960 - RNA, 19 nt, Artificial Sequence
  Description of Artificial Sequence: Synthetic oligonucleotide
  Antisense Strand to SEQ ID NO: 450959
uucugugaccgcauagaug

SEQ ID NO: 450961 - RNA, 19 nt, Artificial Sequence
  Description of Artificial Sequence: Synthetic oligonucleotide
  Sense strand starting at position 809 of SEQ ID NO: 316928
gcucuuacagcugagauaa

SEQ ID NO: 450962 - RNA, 19 nt, Artificial Sequence
  Description of Artificial Sequence: Synthetic oligonucleotide
  Antisense Strand to SEQ ID NO: 450961
uuaucucagcuguaagagc

SEQ ID NO: 450963 - RNA, 19 nt, Artificial Sequence
  Description of Artificial Sequence: Synthetic oligonucleotide
  Sense strand starting at position 984 of SEQ ID NO: 316928
gagcgaucgcggguaccuu

SEQ ID NO: 450964 - RNA, 19 nt, Artificial Sequence
  Description of Artificial Sequence: Synthetic oligonucleotide
  Antisense Strand to SEQ ID NO: 450963
aagguacccgcgaucgcuc

SEQ ID NO: 450965 - RNA, 19 nt, Artificial Sequence
  Description of Artificial Sequence: Synthetic oligonucleotide
  Sense strand starting at position 994 of SEQ ID NO: 316928
ggguaccuucuuggcagaa

SEQ ID NO: 450966 - RNA, 19 nt, Artificial Sequence
  Description of Artificial Sequence: Synthetic oligonucleotide
  Antisense Strand to SEQ ID NO: 450965
uucugccaagaagguaccc

SEQ ID NO: 450967 - RNA, 19 nt, Artificial Sequence
  Description of Artificial Sequence: Synthetic oligonucleotide
  Sense strand starting at position 995 of SEQ ID NO: 316928
gguaccuucuuggcagaaa

SEQ ID NO: 450968 - RNA, 19 nt, Artificial Sequence
  Description of Artificial Sequence: Synthetic oligonucleotide
  Antisense Strand to SEQ ID NO: 450967
uuucugccaagaagguacc

SEQ ID NO: 450969 - RNA, 19 nt, Artificial Sequence
  Description of Artificial Sequence: Synthetic oligonucleotide
  Sense strand starting at position 1438 of SEQ ID NO: 316928
agcaguguucguccuccua

SEQ ID NO: 450970 - RNA, 19 nt, Artificial Sequence
  Description of Artificial Sequence: Synthetic oligonucleotide
  Antisense Strand to SEQ ID NO: 450969
uaggaggacgaacacugcu

SEQ ID NO: 450971 - RNA, 19 nt, Artificial Sequence
  Description of Artificial Sequence: Synthetic oligonucleotide
  Sense strand starting at position 1488 of SEQ ID NO: 316928
ggaucuaaccaaugaagcu

SEQ ID NO: 450972 - RNA, 19 nt, Artificial Sequence
  Description of Artificial Sequence: Synthetic oligonucleotide
  Antisense Strand to SEQ ID NO: 450971
agcuucauugguuagaucc

SEQ ID NO: 450973 - RNA, 19 nt, Artificial Sequence
  Description of Artificial Sequence: Synthetic oligonucleotide
  Sense strand starting at position 1702 of SEQ ID NO: 316928
cagaaagauucuuccuggu

SEQ ID NO: 450974 - RNA, 19 nt, Artificial Sequence
  Description of Artificial Sequence: Synthetic oligonucleotide
  Antisense Strand to SEQ ID NO: 450973
accaggaagaaucuuucug

SEQ ID NO: 450975 - RNA, 19 nt, Artificial Sequence
  Description of Artificial Sequence: Synthetic oligonucleotide
  Sense strand starting at position 1704 of SEQ ID NO: 316928
gaaagauucuuccugguaa

SEQ ID NO: 450976 - RNA, 19 nt, Artificial Sequence
  Description of Artificial Sequence: Synthetic oligonucleotide
  Antisense Strand to SEQ ID NO: 450975
uuaccaggaagaaucuuuc

SEQ ID NO: 450977 - RNA, 19 nt, Artificial Sequence
  Description of Artificial Sequence: Synthetic oligonucleotide
  Sense strand starting at position 1752 of SEQ ID NO: 316928
cgccaaacuauugggaagu

SEQ ID NO: 450978 - RNA, 19 nt, Artificial Sequence
  Description of Artificial Sequence: Synthetic oligonucleotide
  Antisense Strand to SEQ ID NO: 450977
acuucccaauaguuuggcg

SEQ ID NO: 450979 - RNA, 19 nt, Artificial Sequence
  Description of Artificial Sequence: Synthetic oligonucleotide
  Sense strand starting at position 1803 of SEQ ID NO: 316928
cuaagcuauugcuuuaaag

SEQ ID NO: 450980 - RNA, 19 nt, Artificial Sequence
  Description of Artificial Sequence: Synthetic oligonucleotide
  Antisense Strand to SEQ ID NO: 450979
cuuuaaagcaauagcuuag

SEQ ID NO: 450981 - RNA, 19 nt, Artificial Sequence
  Description of Artificial Sequence: Synthetic oligonucleotide
  Sense strand starting at position 1966 of SEQ ID NO: 316928
ucagaauggaguugacuua

SEQ ID NO: 450982 - RNA, 19 nt, Artificial Sequence
  Description of Artificial Sequence: Synthetic oligonucleotide
  Antisense Strand to SEQ ID NO: 450981
uaagucaacuccauucuga

SEQ ID NO: 450983 - RNA, 19 nt, Artificial Sequence
  Description of Artificial Sequence: Synthetic oligonucleotide
  Sense strand starting at position 1993 of SEQ ID NO: 316928
gguugacugcuuuagguag

SEQ ID NO: 450984 - RNA, 19 nt, Artificial Sequence
  Description of Artificial Sequence: Synthetic oligonucleotide
  Antisense Strand to SEQ ID NO: 450983
cuaccuaaagcagucaacc

SEQ ID NO: 450985 - RNA, 19 nt, Artificial Sequence
  Description of Artificial Sequence: Synthetic oligonucleotide
  Sense strand starting at position 2323 of SEQ ID NO: 316928
aguaaugaugcauguggaa

SEQ ID NO: 450986 - RNA, 19 nt, Artificial Sequence
  Description of Artificial Sequence: Synthetic oligonucleotide
  Antisense Strand to SEQ ID NO: 450985
uuccacaugcaucauuacu

SEQ ID NO: 450987 - RNA, 19 nt, Artificial Sequence
  Description of Artificial Sequence: Synthetic oligonucleotide
  Sense strand starting at position 2362 of SEQ ID NO: 316928
ugagcuaaguaauucccau

SEQ ID NO: 450988 - RNA, 19 nt, Artificial Sequence
  Description of Artificial Sequence: Synthetic oligonucleotide
  Antisense Strand to SEQ ID NO: 450987
augggaauuacuuagcuca

SEQ ID NO: 450989 - RNA, 19 nt, Artificial Sequence
  Description of Artificial Sequence: Synthetic oligonucleotide
  Sense strand starting at position 2464 of SEQ ID NO: 316928
gagggaacgcauuguauua

SEQ ID NO: 450990 - RNA, 19 nt, Artificial Sequence
  Description of Artificial Sequence: Synthetic oligonucleotide
  Antisense Strand to SEQ ID NO: 450989
uaauacaaugcguucccuc

SEQ ID NO: 450991 - RNA, 19 nt, Artificial Sequence
  Description of Artificial Sequence: Synthetic oligonucleotide
  Sense strand starting at position 2583 of SEQ ID NO: 316928
ccgugcucuguauucugua

SEQ ID NO: 450992 - RNA, 19 nt, Artificial Sequence
  Description of Artificial Sequence: Synthetic oligonucleotide
  Antisense Strand to SEQ ID NO: 450991
uacagaauacagagcacgg

SEQ ID NO: 450993 - RNA, 19 nt, Artificial Sequence
  Description of Artificial Sequence: Synthetic oligonucleotide
  Sense strand starting at position 2741 of SEQ ID NO: 316928
uggcacauagaaugucaau

SEQ ID NO: 450994 - RNA, 19 nt, Artificial Sequence
  Description of Artificial Sequence: Synthetic oligonucleotide
  Antisense Strand to SEQ ID NO: 450993
auugacauucuaugugcca

SEQ ID NO: 450995 - RNA, 19 nt, Artificial Sequence
  Description of Artificial Sequence: Synthetic oligonucleotide
  Sense strand starting at position 2820 of SEQ ID NO: 316928
uauaaauguggaugacuau

SEQ ID NO: 450996 - RNA, 19 nt, Artificial Sequence
  Description of Artificial Sequence: Synthetic oligonucleotide
  Antisense Strand to SEQ ID NO: 450995
auagucauccacauuuaua

SEQ ID NO: 450997 - RNA, 19 nt, Artificial Sequence
  Description of Artificial Sequence: Synthetic oligonucleotide
  Sense strand starting at position 2872 of SEQ ID NO: 316928
acuaguguauccuccaaau

SEQ ID NO: 450998 - RNA, 19 nt, Artificial Sequence
  Description of Artificial Sequence: Synthetic oligonucleotide
  Antisense Strand to SEQ ID NO: 450997
auuuggaggauacacuagu

SEQ ID NO: 450999 - RNA, 19 nt, Artificial Sequence
  Description of Artificial Sequence: Synthetic oligonucleotide
  Sense strand starting at position 2885 of SEQ ID NO: 316928
ccaaauaugccaugaaagc

SEQ ID NO: 451000 - RNA, 19 nt, Artificial Sequence
  Description of Artificial Sequence: Synthetic oligonucleotide
  Antisense Strand to SEQ ID NO: 450999
gcuuucauggcauauuugg

SEQ ID NO: 451001 - RNA, 19 nt, Artificial Sequence
  Description of Artificial Sequence: Synthetic oligonucleotide
  Sense strand starting at position 2894 of SEQ ID NO: 316928
ccaugaaagcauuagucac

SEQ ID NO: 451002 - RNA, 19 nt, Artificial Sequence
  Description of Artificial Sequence: Synthetic oligonucleotide
  Antisense Strand to SEQ ID NO: 451001
gugacuaaugcuuucaugg

SEQ ID NO: 451003 - RNA, 19 nt, Artificial Sequence
  Description of Artificial Sequence: Synthetic oligonucleotide
  Sense strand starting at position 2901 of SEQ ID NO: 316928
agcauuagucaccacagau

SEQ ID NO: 451004 - RNA, 19 nt, Artificial Sequence
  Description of Artificial Sequence: Synthetic oligonucleotide
  Antisense Strand to SEQ ID NO: 451003
aucuguggugacuaaugcu

SEQ ID NO: 451005 - RNA, 19 nt, Artificial Sequence
  Description of Artificial Sequence: Synthetic oligonucleotide
  Sense strand starting at position 3073 of SEQ ID NO: 316928
uucuaaguaguuggaagua

SEQ ID NO: 451006 - RNA, 19 nt, Artificial Sequence
  Description of Artificial Sequence: Synthetic oligonucleotide
  Antisense Strand to SEQ ID NO: 451005
uacuuccaacuacuuagaa

SEQ ID NO: 451007 - RNA, 19 nt, Artificial Sequence
  Description of Artificial Sequence: Synthetic oligonucleotide
  Sense strand starting at position 3222 of SEQ ID NO: 316928
gcugguaugacagauguaa

SEQ ID NO: 451008 - RNA, 19 nt, Artificial Sequence
  Description of Artificial Sequence: Synthetic oligonucleotide
  Antisense Strand to SEQ ID NO: 451007
uuacaucugucauaccagc

SEQ ID NO: 451009 - RNA, 19 nt, Artificial Sequence
  Description of Artificial Sequence: Synthetic oligonucleotide
  Sense strand starting at position 3488 of SEQ ID NO: 316928
uguuaauuggguuauagua

SEQ ID NO: 451010 - RNA, 19 nt, Artificial Sequence
  Description of Artificial Sequence: Synthetic oligonucleotide
  Antisense Strand to SEQ ID NO: 451009
uacuauaacccaauuaaca

SEQ ID NO: 451011 - RNA, 19 nt, Artificial Sequence
  Description of Artificial Sequence: Synthetic oligonucleotide
  Sense strand starting at position 3772 of SEQ ID NO: 316928
ccaggauugucagugaauu

SEQ ID NO: 451012 - RNA, 19 nt, Artificial Sequence
  Description of Artificial Sequence: Synthetic oligonucleotide
  Antisense Strand to SEQ ID NO: 451011
aauucacugacaauccugg

SEQ ID NO: 451013 - RNA, 19 nt, Artificial Sequence
  Description of Artificial Sequence: Synthetic oligonucleotide
  Sense strand starting at position 3773 of SEQ ID NO: 316928
caggauugucagugaauua

SEQ ID NO: 451014 - RNA, 19 nt, Artificial Sequence
  Description of Artificial Sequence: Synthetic oligonucleotide
  Antisense Strand to SEQ ID NO: 451013
uaauucacugacaauccug

SEQ ID NO: 451015 - RNA, 19 nt, Artificial Sequence
  Description of Artificial Sequence: Synthetic oligonucleotide
  Sense strand starting at position 3877 of SEQ ID NO: 316928
cucugauuacuagguuuag

SEQ ID NO: 451016 - RNA, 19 nt, Artificial Sequence
  Description of Artificial Sequence: Synthetic oligonucleotide
  Antisense Strand to SEQ ID NO: 451015
cuaaaccuaguaaucagag

SEQ ID NO: 451017 - RNA, 19 nt, Artificial Sequence
  Description of Artificial Sequence: Synthetic oligonucleotide
  Sense strand starting at position 3881 of SEQ ID NO: 316928
gauuacuagguuuagcaga

SEQ ID NO: 451018 - RNA, 19 nt, Artificial Sequence
  Description of Artificial Sequence: Synthetic oligonucleotide
  Antisense Strand to SEQ ID NO: 451017
ucugcuaaaccuaguaauc

SEQ ID NO: 451019 - RNA, 19 nt, Artificial Sequence
  Description of Artificial Sequence: Synthetic oligonucleotide
  Sense strand starting at position 3883 of SEQ ID NO: 316928
uuacuagguuuagcagaau

SEQ ID NO: 451020 - RNA, 19 nt, Artificial Sequence
  Description of Artificial Sequence: Synthetic oligonucleotide
  Antisense Strand to SEQ ID NO: 451019
auucugcuaaaccuaguaa

SEQ ID NO: 451021 - RNA, 19 nt, Artificial Sequence
  Description of Artificial Sequence: Synthetic oligonucleotide
  Sense strand starting at position 3974 of SEQ ID NO: 316928
augaguuuacuuuggauau

SEQ ID NO: 451022 - RNA, 19 nt, Artificial Sequence
  Description of Artificial Sequence: Synthetic oligonucleotide
  Antisense Strand to SEQ ID NO: 451021
auauccaaaguaaacucau

SEQ ID NO: 451023 - RNA, 19 nt, Artificial Sequence
  Description of Artificial Sequence: Synthetic oligonucleotide
  Sense strand starting at position 55 of SEQ ID NO: 316929
cccucaauaggagguauaa

SEQ ID NO: 451024 - RNA, 19 nt, Artificial Sequence
  Description of Artificial Sequence: Synthetic oligonucleotide
  Antisense Strand to SEQ ID NO: 451023
uuauaccuccuauugaggg

SEQ ID NO: 451025 - RNA, 19 nt, Artificial Sequence
  Description of Artificial Sequence: Synthetic oligonucleotide
  Sense strand starting at position 275 of SEQ ID NO: 316929
gguuaaacagaguggugau

SEQ ID NO: 451026 - RNA, 19 nt, Artificial Sequence
  Description of Artificial Sequence: Synthetic oligonucleotide
  Antisense Strand to SEQ ID NO: 451025
aucaccacucuguuuaacc

SEQ ID NO: 451027 - RNA, 19 nt, Artificial Sequence
  Description of Artificial Sequence: Synthetic oligonucleotide
  Sense strand starting at position 360 of SEQ ID NO: 316929
uuguuaccacuugaaugua

SEQ ID NO: 451028 - RNA, 19 nt, Artificial Sequence
  Description of Artificial Sequence: Synthetic oligonucleotide
  Antisense Strand to SEQ ID NO: 451027
uacauucaagugguaacaa

SEQ ID NO: 451029 - RNA, 19 nt, Artificial Sequence
  Description of Artificial Sequence: Synthetic oligonucleotide
  Sense strand starting at position 507 of SEQ ID NO: 316929
caagucauuuguccucguu

SEQ ID NO: 451030 - RNA, 19 nt, Artificial Sequence
  Description of Artificial Sequence: Synthetic oligonucleotide
  Antisense Strand to SEQ ID NO: 451029
aacgaggacaaaugacuug

SEQ ID NO: 451031 - RNA, 19 nt, Artificial Sequence
  Description of Artificial Sequence: Synthetic oligonucleotide
  Sense strand starting at position 509 of SEQ ID NO: 316929
agucauuuguccucguuga

SEQ ID NO: 451032 - RNA, 19 nt, Artificial Sequence
  Description of Artificial Sequence: Synthetic oligonucleotide
  Antisense Strand to SEQ ID NO: 451031
ucaacgaggacaaaugacu

SEQ ID NO: 451033 - RNA, 19 nt, Artificial Sequence
  Description of Artificial Sequence: Synthetic oligonucleotide
  Sense strand starting at position 510 of SEQ ID NO: 316929
gucauuuguccucguugaa

SEQ ID NO: 451034 - RNA, 19 nt, Artificial Sequence
  Description of Artificial Sequence: Synthetic oligonucleotide
  Antisense Strand to SEQ ID NO: 451033
uucaacgaggacaaaugac

SEQ ID NO: 451035 - RNA, 19 nt, Artificial Sequence
  Description of Artificial Sequence: Synthetic oligonucleotide
  Sense strand starting at position 541 of SEQ ID NO: 316929
gcuguuugagguuaagaau

SEQ ID NO: 451036 - RNA, 19 nt, Artificial Sequence
  Description of Artificial Sequence: Synthetic oligonucleotide
  Antisense Strand to SEQ ID NO: 451035
auucuuaaccucaaacagc

SEQ ID NO: 451037 - RNA, 19 nt, Artificial Sequence
  Description of Artificial Sequence: Synthetic oligonucleotide
  Sense strand starting at position 721 of SEQ ID NO: 316929
gcuggaacaucucuaacuu

SEQ ID NO: 451038 - RNA, 19 nt, Artificial Sequence
  Description of Artificial Sequence: Synthetic oligonucleotide
  Antisense Strand to SEQ ID NO: 451037
aaguuagagauguuccagc

SEQ ID NO: 451039 - RNA, 19 nt, Artificial Sequence
  Description of Artificial Sequence: Synthetic oligonucleotide
  Sense strand starting at position 990 of SEQ ID NO: 316929
gggaaacuauucucagcga

SEQ ID NO: 451040 - RNA, 19 nt, Artificial Sequence
  Description of Artificial Sequence: Synthetic oligonucleotide
  Antisense Strand to SEQ ID NO: 451039
ucgcugagaauaguuuccc

SEQ ID NO: 451041 - RNA, 19 nt, Artificial Sequence
  Description of Artificial Sequence: Synthetic oligonucleotide
  Sense strand starting at position 994 of SEQ ID NO: 316929
aacuauucucagcgaagag

SEQ ID NO: 451042 - RNA, 19 nt, Artificial Sequence
  Description of Artificial Sequence: Synthetic oligonucleotide
  Antisense Strand to SEQ ID NO: 451041
cucuucgcugagaauaguu

SEQ ID NO: 451043 - RNA, 19 nt, Artificial Sequence
  Description of Artificial Sequence: Synthetic oligonucleotide
  Sense strand starting at position 1293 of SEQ ID NO: 316929
acacacuugcgcguuugaa

SEQ ID NO: 451044 - RNA, 19 nt, Artificial Sequence
  Description of Artificial Sequence: Synthetic oligonucleotide
  Antisense Strand to SEQ ID NO: 451043
uucaaacgcgcaagugugu

SEQ ID NO: 451045 - RNA, 19 nt, Artificial Sequence
  Description of Artificial Sequence: Synthetic oligonucleotide
  Sense strand starting at position 1294 of SEQ ID NO: 316929
cacacuugcgcguuugaaa

SEQ ID NO: 451046 - RNA, 19 nt, Artificial Sequence
  Description of Artificial Sequence: Synthetic oligonucleotide
  Antisense Strand to SEQ ID NO: 451045
uuucaaacgcgcaagugug

SEQ ID NO: 451047 - RNA, 19 nt, Artificial Sequence
  Description of Artificial Sequence: Synthetic oligonucleotide
  Sense strand starting at position 1295 of SEQ ID NO: 316929
acacuugcgcguuugaaau

SEQ ID NO: 451048 - RNA, 19 nt, Artificial Sequence
  Description of Artificial Sequence: Synthetic oligonucleotide
  Antisense Strand to SEQ ID NO: 451047
auuucaaacgcgcaagugu

SEQ ID NO: 451049 - RNA, 19 nt, Artificial Sequence
  Description of Artificial Sequence: Synthetic oligonucleotide
  Sense strand starting at position 1301 of SEQ ID NO: 316929
gcgcguuugaaaucguuca

SEQ ID NO: 451050 - RNA, 19 nt, Artificial Sequence
  Description of Artificial Sequence: Synthetic oligonucleotide
  Antisense Strand to SEQ ID NO: 451049
ugaacgauuucaaacgcgc

SEQ ID NO: 451051 - RNA, 19 nt, Artificial Sequence
  Description of Artificial Sequence: Synthetic oligonucleotide
  Sense strand starting at position 1359 of SEQ ID NO: 316929
cgagcaaacuguccaggau

SEQ ID NO: 451052 - RNA, 19 nt, Artificial Sequence
  Description of Artificial Sequence: Synthetic oligonucleotide
  Antisense Strand to SEQ ID NO: 451051
auccuggacaguuugcucg

SEQ ID NO: 451053 - RNA, 19 nt, Artificial Sequence
  Description of Artificial Sequence: Synthetic oligonucleotide
  Sense strand starting at position 1371 of SEQ ID NO: 316929
ccaggaugcgggugaaauu

SEQ ID NO: 451054 - RNA, 19 nt, Artificial Sequence
  Description of Artificial Sequence: Synthetic oligonucleotide
  Antisense Strand to SEQ ID NO: 451053
aauuucacccgcauccugg

SEQ ID NO: 451055 - RNA, 19 nt, Artificial Sequence
  Description of Artificial Sequence: Synthetic oligonucleotide
  Sense strand starting at position 1673 of SEQ ID NO: 316929
caucuaugcggucacagaa

SEQ ID NO: 451056 - RNA, 19 nt, Artificial Sequence
  Description of Artificial Sequence: Synthetic oligonucleotide
  Antisense Strand to SEQ ID NO: 451055
uucugugaccgcauagaug

SEQ ID NO: 451057 - RNA, 19 nt, Artificial Sequence
  Description of Artificial Sequence: Synthetic oligonucleotide
  Sense strand starting at position 1711 of SEQ ID NO: 316929
gcucuuacagcugagauaa

SEQ ID NO: 451058 - RNA, 19 nt, Artificial Sequence
  Description of Artificial Sequence: Synthetic oligonucleotide
  Antisense Strand to SEQ ID NO: 451057
uuaucucagcuguaagagc

SEQ ID NO: 451059 - RNA, 19 nt, Artificial Sequence
  Description of Artificial Sequence: Synthetic oligonucleotide
  Sense strand starting at position 1886 of SEQ ID NO: 316929
gagcgaucgcggguaccuu

SEQ ID NO: 451060 - RNA, 19 nt, Artificial Sequence
  Description of Artificial Sequence: Synthetic oligonucleotide
  Antisense Strand to SEQ ID NO: 451059
aagguacccgcgaucgcuc

SEQ ID NO: 451061 - RNA, 19 nt, Artificial Sequence
  Description of Artificial Sequence: Synthetic oligonucleotide
  Sense strand starting at position 1896 of SEQ ID NO: 316929
ggguaccuucuuggcagaa

SEQ ID NO: 451062 - RNA, 19 nt, Artificial Sequence
  Description of Artificial Sequence: Synthetic oligonucleotide
  Antisense Strand to SEQ ID NO: 451061
uucugccaagaagguaccc

SEQ ID NO: 451063 - RNA, 19 nt, Artificial Sequence
  Description of Artificial Sequence: Synthetic oligonucleotide
  Sense strand starting at position 1897 of SEQ ID NO: 316929
gguaccuucuuggcagaaa

SEQ ID NO: 451064 - RNA, 19 nt, Artificial Sequence
  Description of Artificial Sequence: Synthetic oligonucleotide
  Antisense Strand to SEQ ID NO: 451063
uuucugccaagaagguacc

SEQ ID NO: 451065 - RNA, 19 nt, Artificial Sequence
  Description of Artificial Sequence: Synthetic oligonucleotide
  Sense strand starting at position 2340 of SEQ ID NO: 316929
agcaguguucguccuccua

SEQ ID NO: 451066 - RNA, 19 nt, Artificial Sequence
  Description of Artificial Sequence: Synthetic oligonucleotide
  Antisense Strand to SEQ ID NO: 451065
uaggaggacgaacacugcu

SEQ ID NO: 451067 - RNA, 19 nt, Artificial Sequence
  Description of Artificial Sequence: Synthetic oligonucleotide
  Sense strand starting at position 2390 of SEQ ID NO: 316929
ggaucuaaccaaugaagcu

SEQ ID NO: 451068 - RNA, 19 nt, Artificial Sequence
  Description of Artificial Sequence: Synthetic oligonucleotide
  Antisense Strand to SEQ ID NO: 451067
agcuucauugguuagaucc

SEQ ID NO: 451069 - RNA, 19 nt, Artificial Sequence
  Description of Artificial Sequence: Synthetic oligonucleotide
  Sense strand starting at position 2604 of SEQ ID NO: 316929
cagaaagauucuuccuggu

SEQ ID NO: 451070 - RNA, 19 nt, Artificial Sequence
  Description of Artificial Sequence: Synthetic oligonucleotide
  Antisense Strand to SEQ ID NO: 451069
accaggaagaaucuuucug

SEQ ID NO: 451071 - RNA, 19 nt, Artificial Sequence
  Description of Artificial Sequence: Synthetic oligonucleotide
  Sense strand starting at position 2606 of SEQ ID NO: 316929
gaaagauucuuccugguaa

SEQ ID NO: 451072 - RNA, 19 nt, Artificial Sequence
  Description of Artificial Sequence: Synthetic oligonucleotide
  Antisense Strand to SEQ ID NO: 451071
uuaccaggaagaaucuuuc

SEQ ID NO: 451073 - RNA, 19 nt, Artificial Sequence
  Description of Artificial Sequence: Synthetic oligonucleotide
  Sense strand starting at position 2654 of SEQ ID NO: 316929
cgccaaacuauugggaagu

SEQ ID NO: 451074 - RNA, 19 nt, Artificial Sequence
  Description of Artificial Sequence: Synthetic oligonucleotide
  Antisense Strand to SEQ ID NO: 451073
acuucccaauaguuuggcg

SEQ ID NO: 451075 - RNA, 19 nt, Artificial Sequence
  Description of Artificial Sequence: Synthetic oligonucleotide
  Sense strand starting at position 2705 of SEQ ID NO: 316929
cuaagcuauugcuuuaaag

SEQ ID NO: 451076 - RNA, 19 nt, Artificial Sequence
  Description of Artificial Sequence: Synthetic oligonucleotide
  Antisense Strand to SEQ ID NO: 451075
cuuuaaagcaauagcuuag

SEQ ID NO: 451077 - RNA, 19 nt, Artificial Sequence
  Description of Artificial Sequence: Synthetic oligonucleotide
  Sense strand starting at position 2868 of SEQ ID NO: 316929
ucagaauggaguugacuua

SEQ ID NO: 451078 - RNA, 19 nt, Artificial Sequence
  Description of Artificial Sequence: Synthetic oligonucleotide
  Antisense Strand to SEQ ID NO: 451077
uaagucaacuccauucuga

SEQ ID NO: 451079 - RNA, 19 nt, Artificial Sequence
  Description of Artificial Sequence: Synthetic oligonucleotide
  Sense strand starting at position 2895 of SEQ ID NO: 316929
gguugacugcuuuagguag

SEQ ID NO: 451080 - RNA, 19 nt, Artificial Sequence
  Description of Artificial Sequence: Synthetic oligonucleotide
  Antisense Strand to SEQ ID NO: 451079
cuaccuaaagcagucaacc

SEQ ID NO: 451081 - RNA, 19 nt, Artificial Sequence
  Description of Artificial Sequence: Synthetic oligonucleotide
  Sense strand starting at position 3225 of SEQ ID NO: 316929
aguaaugaugcauguggaa

SEQ ID NO: 451082 - RNA, 19 nt, Artificial Sequence
  Description of Artificial Sequence: Synthetic oligonucleotide
  Antisense Strand to SEQ ID NO: 451081
uuccacaugcaucauuacu

SEQ ID NO: 451083 - RNA, 19 nt, Artificial Sequence
  Description of Artificial Sequence: Synthetic oligonucleotide
  Sense strand starting at position 3264 of SEQ ID NO: 316929
ugagcuaaguaauucccau

SEQ ID NO: 451084 - RNA, 19 nt, Artificial Sequence
  Description of Artificial Sequence: Synthetic oligonucleotide
  Antisense Strand to SEQ ID NO: 451083
augggaauuacuuagcuca

SEQ ID NO: 451085 - RNA, 19 nt, Artificial Sequence
  Description of Artificial Sequence: Synthetic oligonucleotide
  Sense strand starting at position 3366 of SEQ ID NO: 316929
gagggaacgcauuguauua

SEQ ID NO: 451086 - RNA, 19 nt, Artificial Sequence
  Description of Artificial Sequence: Synthetic oligonucleotide
  Antisense Strand to SEQ ID NO: 451085
uaauacaaugcguucccuc

SEQ ID NO: 451087 - RNA, 19 nt, Artificial Sequence
  Description of Artificial Sequence: Synthetic oligonucleotide
  Sense strand starting at position 3485 of SEQ ID NO: 316929
ccgugcucuguauucugua

SEQ ID NO: 451088 - RNA, 19 nt, Artificial Sequence
  Description of Artificial Sequence: Synthetic oligonucleotide
  Antisense Strand to SEQ ID NO: 451087
uacagaauacagagcacgg

SEQ ID NO: 451089 - RNA, 19 nt, Artificial Sequence
  Description of Artificial Sequence: Synthetic oligonucleotide
  Sense strand starting at position 3643 of SEQ ID NO: 316929
uggcacauagaaugucaau

SEQ ID NO: 451090 - RNA, 19 nt, Artificial Sequence
  Description of Artificial Sequence: Synthetic oligonucleotide
  Antisense Strand to SEQ ID NO: 451089
auugacauucuaugugcca

SEQ ID NO: 451091 - RNA, 19 nt, Artificial Sequence
  Description of Artificial Sequence: Synthetic oligonucleotide
  Sense strand starting at position 3722 of SEQ ID NO: 316929
uauaaauguggaugacuau

SEQ ID NO: 451092 - RNA, 19 nt, Artificial Sequence
  Description of Artificial Sequence: Synthetic oligonucleotide
  Antisense Strand to SEQ ID NO: 451091
auagucauccacauuuaua

SEQ ID NO: 451093 - RNA, 19 nt, Artificial Sequence
  Description of Artificial Sequence: Synthetic oligonucleotide
  Sense strand starting at position 3774 of SEQ ID NO: 316929
acuaguguauccuccaaau

SEQ ID NO: 451094 - RNA, 19 nt, Artificial Sequence
  Description of Artificial Sequence: Synthetic oligonucleotide
  Antisense Strand to SEQ ID NO: 451093
auuuggaggauacacuagu

SEQ ID NO: 451095 - RNA, 19 nt, Artificial Sequence
  Description of Artificial Sequence: Synthetic oligonucleotide
  Sense strand starting at position 3787 of SEQ ID NO: 316929
ccaaauaugccaugaaagc

SEQ ID NO: 451096 - RNA, 19 nt, Artificial Sequence
  Description of Artificial Sequence: Synthetic oligonucleotide
  Antisense Strand to SEQ ID NO: 451095
gcuuucauggcauauuugg

SEQ ID NO: 451097 - RNA, 19 nt, Artificial Sequence
  Description of Artificial Sequence: Synthetic oligonucleotide
  Sense strand starting at position 3796 of SEQ ID NO: 316929
ccaugaaagcauuagucac

SEQ ID NO: 451098 - RNA, 19 nt, Artificial Sequence
  Description of Artificial Sequence: Synthetic oligonucleotide
  Antisense Strand to SEQ ID NO: 451097
gugacuaaugcuuucaugg

SEQ ID NO: 451099 - RNA, 19 nt, Artificial Sequence
  Description of Artificial Sequence: Synthetic oligonucleotide
  Sense strand starting at position 3803 of SEQ ID NO: 316929
agcauuagucaccacagau

SEQ ID NO: 451100 - RNA, 19 nt, Artificial Sequence
  Description of Artificial Sequence: Synthetic oligonucleotide
  Antisense Strand to SEQ ID NO: 451099
aucuguggugacuaaugcu

SEQ ID NO: 451101 - RNA, 19 nt, Artificial Sequence
  Description of Artificial Sequence: Synthetic oligonucleotide
  Sense strand starting at position 3975 of SEQ ID NO: 316929
uucuaaguaguuggaagua

SEQ ID NO: 451102 - RNA, 19 nt, Artificial Sequence
  Description of Artificial Sequence: Synthetic oligonucleotide
  Antisense Strand to SEQ ID NO: 451101
uacuuccaacuacuuagaa

SEQ ID NO: 451103 - RNA, 19 nt, Artificial Sequence
  Description of Artificial Sequence: Synthetic oligonucleotide
  Sense strand starting at position 93 of SEQ ID NO: 316930
augcuuagguuucuagagu

SEQ ID NO: 451104 - RNA, 19 nt, Artificial Sequence
  Description of Artificial Sequence: Synthetic oligonucleotide
  Antisense Strand to SEQ ID NO: 451103
acucuagaaaccuaagcau

SEQ ID NO: 451105 - RNA, 19 nt, Artificial Sequence
  Description of Artificial Sequence: Synthetic oligonucleotide
  Sense strand starting at position 614 of SEQ ID NO: 316930
gugugucgaaauuacaaac

SEQ ID NO: 451106 - RNA, 19 nt, Artificial Sequence
  Description of Artificial Sequence: Synthetic oligonucleotide
  Antisense Strand to SEQ ID NO: 451105
guuuguaauuucgacacac

SEQ ID NO: 451107 - RNA, 19 nt, Artificial Sequence
  Description of Artificial Sequence: Synthetic oligonucleotide
  Sense strand starting at position 700 of SEQ ID NO: 316930
cgaggugaccgccaaugaa

SEQ ID NO: 451108 - RNA, 19 nt, Artificial Sequence
  Description of Artificial Sequence: Synthetic oligonucleotide
  Antisense Strand to SEQ ID NO: 451107
uucauuggcggucaccucg

SEQ ID NO: 451109 - RNA, 19 nt, Artificial Sequence
  Description of Artificial Sequence: Synthetic oligonucleotide
  Sense strand starting at position 727 of SEQ ID NO: 316930
ggcaaagggaccuguccau

SEQ ID NO: 451110 - RNA, 19 nt, Artificial Sequence
  Description of Artificial Sequence: Synthetic oligonucleotide
  Antisense Strand to SEQ ID NO: 451109
auggacaggucccuuugcc

SEQ ID NO: 451111 - RNA, 19 nt, Artificial Sequence
  Description of Artificial Sequence: Synthetic oligonucleotide
  Sense strand starting at position 886 of SEQ ID NO: 316930
aggaacagauucucucagu

SEQ ID NO: 451112 - RNA, 19 nt, Artificial Sequence
  Description of Artificial Sequence: Synthetic oligonucleotide
  Antisense Strand to SEQ ID NO: 451111
acugagagaaucuguuccu

SEQ ID NO: 451113 - RNA, 19 nt, Artificial Sequence
  Description of Artificial Sequence: Synthetic oligonucleotide
  Sense strand starting at position 887 of SEQ ID NO: 316930
ggaacagauucucucagug

SEQ ID NO: 451114 - RNA, 19 nt, Artificial Sequence
  Description of Artificial Sequence: Synthetic oligonucleotide
  Antisense Strand to SEQ ID NO: 451113
cacugagagaaucuguucc

SEQ ID NO: 451115 - RNA, 19 nt, Artificial Sequence
  Description of Artificial Sequence: Synthetic oligonucleotide
  Sense strand starting at position 891 of SEQ ID NO: 316930
cagauucucucagugacag

SEQ ID NO: 451116 - RNA, 19 nt, Artificial Sequence
  Description of Artificial Sequence: Synthetic oligonucleotide
  Antisense Strand to SEQ ID NO: 451115
cugucacugagagaaucug

SEQ ID NO: 451117 - RNA, 19 nt, Artificial Sequence
  Description of Artificial Sequence: Synthetic oligonucleotide
  Sense strand starting at position 1025 of SEQ ID NO: 316930
acgcgugaugcagugacua

SEQ ID NO: 451118 - RNA, 19 nt, Artificial Sequence
  Description of Artificial Sequence: Synthetic oligonucleotide
  Antisense Strand to SEQ ID NO: 451117
uagucacugcaucacgcgu

SEQ ID NO: 451119 - RNA, 19 nt, Artificial Sequence
  Description of Artificial Sequence: Synthetic oligonucleotide
  Sense strand starting at position 1027 of SEQ ID NO: 316930
gcgugaugcagugacuaug

SEQ ID NO: 451120 - RNA, 19 nt, Artificial Sequence
  Description of Artificial Sequence: Synthetic oligonucleotide
  Antisense Strand to SEQ ID NO: 451119
cauagucacugcaucacgc

SEQ ID NO: 451121 - RNA, 19 nt, Artificial Sequence
  Description of Artificial Sequence: Synthetic oligonucleotide
  Sense strand starting at position 1351 of SEQ ID NO: 316930
cuggguucauuggugcuaa

SEQ ID NO: 451122 - RNA, 19 nt, Artificial Sequence
  Description of Artificial Sequence: Synthetic oligonucleotide
  Antisense Strand to SEQ ID NO: 451121
uuagcaccaaugaacccag

SEQ ID NO: 451123 - RNA, 19 nt, Artificial Sequence
  Description of Artificial Sequence: Synthetic oligonucleotide
  Sense strand starting at position 2251 of SEQ ID NO: 316930
ggacaucuggcuuggugua

SEQ ID NO: 451124 - RNA, 19 nt, Artificial Sequence
  Description of Artificial Sequence: Synthetic oligonucleotide
  Antisense Strand to SEQ ID NO: 451123
uacaccaagccagaugucc

SEQ ID NO: 451125 - RNA, 19 nt, Artificial Sequence
  Description of Artificial Sequence: Synthetic oligonucleotide
  Sense strand starting at position 2253 of SEQ ID NO: 316930
acaucuggcuugguguaga

SEQ ID NO: 451126 - RNA, 19 nt, Artificial Sequence
  Description of Artificial Sequence: Synthetic oligonucleotide
  Antisense Strand to SEQ ID NO: 451125
ucuacaccaagccagaugu

SEQ ID NO: 451127 - RNA, 19 nt, Artificial Sequence
  Description of Artificial Sequence: Synthetic oligonucleotide
  Sense strand starting at position 2443 of SEQ ID NO: 316930
uauccuccagguugugaua

SEQ ID NO: 451128 - RNA, 19 nt, Artificial Sequence
  Description of Artificial Sequence: Synthetic oligonucleotide
  Antisense Strand to SEQ ID NO: 451127
uaucacaaccuggaggaua

SEQ ID NO: 451129 - RNA, 19 nt, Artificial Sequence
  Description of Artificial Sequence: Synthetic oligonucleotide
  Sense strand starting at position 2513 of SEQ ID NO: 316930
cuagcagaacucugaaaca

SEQ ID NO: 451130 - RNA, 19 nt, Artificial Sequence
  Description of Artificial Sequence: Synthetic oligonucleotide
  Antisense Strand to SEQ ID NO: 451129
uguuucagaguucugcuag

SEQ ID NO: 451131 - RNA, 19 nt, Artificial Sequence
  Description of Artificial Sequence: Synthetic oligonucleotide
  Sense strand starting at position 2547 of SEQ ID NO: 316930
cucuguucgccaguagguu

SEQ ID NO: 451132 - RNA, 19 nt, Artificial Sequence
  Description of Artificial Sequence: Synthetic oligonucleotide
  Antisense Strand to SEQ ID NO: 451131
aaccuacuggcgaacagag

SEQ ID NO: 451133 - RNA, 19 nt, Artificial Sequence
  Description of Artificial Sequence: Synthetic oligonucleotide
  Sense strand starting at position 2565 of SEQ ID NO: 316930
ugggauucugcaggagcaa

SEQ ID NO: 451134 - RNA, 19 nt, Artificial Sequence
  Description of Artificial Sequence: Synthetic oligonucleotide
  Antisense Strand to SEQ ID NO: 451133
uugcuccugcagaauccca

SEQ ID NO: 451135 - RNA, 19 nt, Artificial Sequence
  Description of Artificial Sequence: Synthetic oligonucleotide
  Sense strand starting at position 2578 of SEQ ID NO: 316930
gagcaaguauuguuugaau

SEQ ID NO: 451136 - RNA, 19 nt, Artificial Sequence
  Description of Artificial Sequence: Synthetic oligonucleotide
  Antisense Strand to SEQ ID NO: 451135
auucaaacaauacuugcuc

SEQ ID NO: 451137 - RNA, 19 nt, Artificial Sequence
  Description of Artificial Sequence: Synthetic oligonucleotide
  Sense strand starting at position 2580 of SEQ ID NO: 316930
gcaaguauuguuugaauua

SEQ ID NO: 451138 - RNA, 19 nt, Artificial Sequence
  Description of Artificial Sequence: Synthetic oligonucleotide
  Antisense Strand to SEQ ID NO: 451137
uaauucaaacaauacuugc

SEQ ID NO: 451139 - RNA, 19 nt, Artificial Sequence
  Description of Artificial Sequence: Synthetic oligonucleotide
  Sense strand starting at position 2622 of SEQ ID NO: 316930
cuacaaaugucauugagca

SEQ ID NO: 451140 - RNA, 19 nt, Artificial Sequence
  Description of Artificial Sequence: Synthetic oligonucleotide
  Antisense Strand to SEQ ID NO: 451139
ugcucaaugacauuuguag

SEQ ID NO: 451141 - RNA, 19 nt, Artificial Sequence
  Description of Artificial Sequence: Synthetic oligonucleotide
  Sense strand starting at position 2709 of SEQ ID NO: 316930
gugggcauucugggacuua

SEQ ID NO: 451142 - RNA, 19 nt, Artificial Sequence
  Description of Artificial Sequence: Synthetic oligonucleotide
  Antisense Strand to SEQ ID NO: 451141
uaagucccagaaugcccac

SEQ ID NO: 451143 - RNA, 19 nt, Artificial Sequence
  Description of Artificial Sequence: Synthetic oligonucleotide
  Sense strand starting at position 2745 of SEQ ID NO: 316930
guucuuguccuagagaaau

SEQ ID NO: 451144 - RNA, 19 nt, Artificial Sequence
  Description of Artificial Sequence: Synthetic oligonucleotide
  Antisense Strand to SEQ ID NO: 451143
auuucucuaggacaagaac

SEQ ID NO: 451145 - RNA, 19 nt, Artificial Sequence
  Description of Artificial Sequence: Synthetic oligonucleotide
  Sense strand starting at position 2799 of SEQ ID NO: 316930
aguaaagcgaauuguaauc

SEQ ID NO: 451146 - RNA, 19 nt, Artificial Sequence
  Description of Artificial Sequence: Synthetic oligonucleotide
  Antisense Strand to SEQ ID NO: 451145
gauuacaauucgcuuuacu

SEQ ID NO: 451147 - RNA, 19 nt, Artificial Sequence
  Description of Artificial Sequence: Synthetic oligonucleotide
  Sense strand starting at position 2804 of SEQ ID NO: 316930
agcgaauuguaaucccuac

SEQ ID NO: 451148 - RNA, 19 nt, Artificial Sequence
  Description of Artificial Sequence: Synthetic oligonucleotide
  Antisense Strand to SEQ ID NO: 451147
guagggauuacaauucgcu

SEQ ID NO: 451149 - RNA, 19 nt, Artificial Sequence
  Description of Artificial Sequence: Synthetic oligonucleotide
  Sense strand starting at position 2877 of SEQ ID NO: 316930
auuagcuucuaacuaggau

SEQ ID NO: 451150 - RNA, 19 nt, Artificial Sequence
  Description of Artificial Sequence: Synthetic oligonucleotide
  Antisense Strand to SEQ ID NO: 451149
auccuaguuagaagcuaau

SEQ ID NO: 451151 - RNA, 19 nt, Artificial Sequence
  Description of Artificial Sequence: Synthetic oligonucleotide
  Sense strand starting at position 2900 of SEQ ID NO: 316930
gugucucaaggucaagaaa

SEQ ID NO: 451152 - RNA, 19 nt, Artificial Sequence
  Description of Artificial Sequence: Synthetic oligonucleotide
  Antisense Strand to SEQ ID NO: 451151
uuucuugaccuugagacac

SEQ ID NO: 451153 - RNA, 19 nt, Artificial Sequence
  Description of Artificial Sequence: Synthetic oligonucleotide
  Sense strand starting at position 3010 of SEQ ID NO: 316930
auucuaauguaccuaggaa

SEQ ID NO: 451154 - RNA, 19 nt, Artificial Sequence
  Description of Artificial Sequence: Synthetic oligonucleotide
  Antisense Strand to SEQ ID NO: 451153
uuccuagguacauuagaau

SEQ ID NO: 451155 - RNA, 19 nt, Artificial Sequence
  Description of Artificial Sequence: Synthetic oligonucleotide
  Sense strand starting at position 3052 of SEQ ID NO: 316930
agaaguuuagagugaaggu

SEQ ID NO: 451156 - RNA, 19 nt, Artificial Sequence
  Description of Artificial Sequence: Synthetic oligonucleotide
  Antisense Strand to SEQ ID NO: 451155
accuucacucuaaacuucu

SEQ ID NO: 451157 - RNA, 19 nt, Artificial Sequence
  Description of Artificial Sequence: Synthetic oligonucleotide
  Sense strand starting at position 3127 of SEQ ID NO: 316930
auggguaauugggaagacu

SEQ ID NO: 451158 - RNA, 19 nt, Artificial Sequence
  Description of Artificial Sequence: Synthetic oligonucleotide
  Antisense Strand to SEQ ID NO: 451157
agucuucccaauuacccau

SEQ ID NO: 451159 - RNA, 19 nt, Artificial Sequence
  Description of Artificial Sequence: Synthetic oligonucleotide
  Sense strand starting at position 3160 of SEQ ID NO: 316930
ugucaauucuauccaaugu

SEQ ID NO: 451160 - RNA, 19 nt, Artificial Sequence
  Description of Artificial Sequence: Synthetic oligonucleotide
  Antisense Strand to SEQ ID NO: 451159
acauuggauagaauugaca

SEQ ID NO: 451161 - RNA, 19 nt, Artificial Sequence
  Description of Artificial Sequence: Synthetic oligonucleotide
  Sense strand starting at position 3330 of SEQ ID NO: 316930
auuugccuuugagauauca

SEQ ID NO: 451162 - RNA, 19 nt, Artificial Sequence
  Description of Artificial Sequence: Synthetic oligonucleotide
  Antisense Strand to SEQ ID NO: 451161
ugauaucucaaaggcaaau

SEQ ID NO: 451163 - RNA, 19 nt, Artificial Sequence
  Description of Artificial Sequence: Synthetic oligonucleotide
  Sense strand starting at position 3349 of SEQ ID NO: 316930
agacauuauugugcuauau

SEQ ID NO: 451164 - RNA, 19 nt, Artificial Sequence
  Description of Artificial Sequence: Synthetic oligonucleotide
  Antisense Strand to SEQ ID NO: 451163
auauagcacaauaaugucu

SEQ ID NO: 451165 - RNA, 19 nt, Artificial Sequence
  Description of Artificial Sequence: Synthetic oligonucleotide
  Sense strand starting at position 3372 of SEQ ID NO: 316930
acugaaucaguuugucuuu

SEQ ID NO: 451166 - RNA, 19 nt, Artificial Sequence
  Description of Artificial Sequence: Synthetic oligonucleotide
  Antisense Strand to SEQ ID NO: 451165
aaagacaaacugauucagu

SEQ ID NO: 451167 - RNA, 19 nt, Artificial Sequence
  Description of Artificial Sequence: Synthetic oligonucleotide
  Sense strand starting at position 3383 of SEQ ID NO: 316930
uugucuuuggcauggaauu

SEQ ID NO: 451168 - RNA, 19 nt, Artificial Sequence
  Description of Artificial Sequence: Synthetic oligonucleotide
  Antisense Strand to SEQ ID NO: 451167
aauuccaugccaaagacaa

SEQ ID NO: 451169 - RNA, 19 nt, Artificial Sequence
  Description of Artificial Sequence: Synthetic oligonucleotide
  Sense strand starting at position 3577 of SEQ ID NO: 316930
guagauacguaacuuuaau

SEQ ID NO: 451170 - RNA, 19 nt, Artificial Sequence
  Description of Artificial Sequence: Synthetic oligonucleotide
  Antisense Strand to SEQ ID NO: 451169
auuaaaguuacguaucuac

SEQ ID NO: 451171 - RNA, 19 nt, Artificial Sequence
  Description of Artificial Sequence: Synthetic oligonucleotide
  Sense strand starting at position 3637 of SEQ ID NO: 316930
auaucuuuaugacugugau

SEQ ID NO: 451172 - RNA, 19 nt, Artificial Sequence
  Description of Artificial Sequence: Synthetic oligonucleotide
  Antisense Strand to SEQ ID NO: 451171
aucacagucauaaagauau

SEQ ID NO: 451173 - RNA, 19 nt, Artificial Sequence
  Description of Artificial Sequence: Synthetic oligonucleotide
  Sense strand starting at position 3640 of SEQ ID NO: 316930
ucuuuaugacugugauaaa

SEQ ID NO: 451174 - RNA, 19 nt, Artificial Sequence
  Description of Artificial Sequence: Synthetic oligonucleotide
  Antisense Strand to SEQ ID NO: 451173
uuuaucacagucauaaaga

SEQ ID NO: 451175 - RNA, 19 nt, Artificial Sequence
  Description of Artificial Sequence: Synthetic oligonucleotide
  Sense strand starting at position 3700 of SEQ ID NO: 316930
agauuauugcgauaacuau

SEQ ID NO: 451176 - RNA, 19 nt, Artificial Sequence
  Description of Artificial Sequence: Synthetic oligonucleotide
  Antisense Strand to SEQ ID NO: 451175
auaguuaucgcaauaaucu

SEQ ID NO: 451177 - RNA, 19 nt, Artificial Sequence
  Description of Artificial Sequence: Synthetic oligonucleotide
  Sense strand starting at position 3706 of SEQ ID NO: 316930
uugcgauaacuauguuaaa

SEQ ID NO: 451178 - RNA, 19 nt, Artificial Sequence
  Description of Artificial Sequence: Synthetic oligonucleotide
  Antisense Strand to SEQ ID NO: 451177
uuuaacauaguuaucgcaa

SEQ ID NO: 451179 - RNA, 19 nt, Artificial Sequence
  Description of Artificial Sequence: Synthetic oligonucleotide
  Sense strand starting at position 3798 of SEQ ID NO: 316930
auuuaaccaucagaagguu

SEQ ID NO: 451180 - RNA, 19 nt, Artificial Sequence
  Description of Artificial Sequence: Synthetic oligonucleotide
  Antisense Strand to SEQ ID NO: 451179
aaccuucugaugguuaaau

SEQ ID NO: 451181 - RNA, 19 nt, Artificial Sequence
  Description of Artificial Sequence: Synthetic oligonucleotide
  Sense strand starting at position 3806 of SEQ ID NO: 316930
aucagaagguuuguauaaa

SEQ ID NO: 451182 - RNA, 19 nt, Artificial Sequence
  Description of Artificial Sequence: Synthetic oligonucleotide
  Antisense Strand to SEQ ID NO: 451181
uuuauacaaaccuucugau

SEQ ID NO: 451183 - RNA, 19 nt, Artificial Sequence
  Description of Artificial Sequence: Synthetic oligonucleotide
  Sense strand starting at position 223 of SEQ ID NO: 316931
cuugccuauuuguuugaaa

SEQ ID NO: 451184 - RNA, 19 nt, Artificial Sequence
  Description of Artificial Sequence: Synthetic oligonucleotide
  Antisense Strand to SEQ ID NO: 451183
uuucaaacaaauaggcaag

SEQ ID NO: 451185 - RNA, 19 nt, Artificial Sequence
  Description of Artificial Sequence: Synthetic oligonucleotide
  Sense strand starting at position 320 of SEQ ID NO: 316931
gauguauguguauaccuaa

SEQ ID NO: 451186 - RNA, 19 nt, Artificial Sequence
  Description of Artificial Sequence: Synthetic oligonucleotide
  Antisense Strand to SEQ ID NO: 451185
uuagguauacacauacauc

SEQ ID NO: 451187 - RNA, 19 nt, Artificial Sequence
  Description of Artificial Sequence: Synthetic oligonucleotide
  Sense strand starting at position 808 of SEQ ID NO: 316931
gucccagaccuuuauaagu

SEQ ID NO: 451188 - RNA, 19 nt, Artificial Sequence
  Description of Artificial Sequence: Synthetic oligonucleotide
  Antisense Strand to SEQ ID NO: 451187
acuuauaaaggucugggac

SEQ ID NO: 451189 - RNA, 19 nt, Artificial Sequence
  Description of Artificial Sequence: Synthetic oligonucleotide
  Sense strand starting at position 813 of SEQ ID NO: 316931
agaccuuuauaagugucua

SEQ ID NO: 451190 - RNA, 19 nt, Artificial Sequence
  Description of Artificial Sequence: Synthetic oligonucleotide
  Antisense Strand to SEQ ID NO: 451189
uagacacuuauaaaggucu

SEQ ID NO: 451191 - RNA, 19 nt, Artificial Sequence
  Description of Artificial Sequence: Synthetic oligonucleotide
  Sense strand starting at position 832 of SEQ ID NO: 316931
ugucuuaaucaacguauuu

SEQ ID NO: 451192 - RNA, 19 nt, Artificial Sequence
  Description of Artificial Sequence: Synthetic oligonucleotide
  Antisense Strand to SEQ ID NO: 451191
aaauacguugauuaagaca

SEQ ID NO: 451193 - RNA, 19 nt, Artificial Sequence
  Description of Artificial Sequence: Synthetic oligonucleotide
  Sense strand starting at position 873 of SEQ ID NO: 316931
cuacguauaaucgaagaau

SEQ ID NO: 451194 - RNA, 19 nt, Artificial Sequence
  Description of Artificial Sequence: Synthetic oligonucleotide
  Antisense Strand to SEQ ID NO: 451193
auucuucgauuauacguag

SEQ ID NO: 451195 - RNA, 19 nt, Artificial Sequence
  Description of Artificial Sequence: Synthetic oligonucleotide
  Sense strand starting at position 876 of SEQ ID NO: 316931
cguauaaucgaagaaugau

SEQ ID NO: 451196 - RNA, 19 nt, Artificial Sequence
  Description of Artificial Sequence: Synthetic oligonucleotide
  Antisense Strand to SEQ ID NO: 451195
aucauucuucgauuauacg

SEQ ID NO: 451197 - RNA, 19 nt, Artificial Sequence
  Description of Artificial Sequence: Synthetic oligonucleotide
  Sense strand starting at position 911 of SEQ ID NO: 316931
ugucuaccagaaugacuua

SEQ ID NO: 451198 - RNA, 19 nt, Artificial Sequence
  Description of Artificial Sequence: Synthetic oligonucleotide
  Antisense Strand to SEQ ID NO: 451197
uaagucauucugguagaca

SEQ ID NO: 451199 - RNA, 19 nt, Artificial Sequence
  Description of Artificial Sequence: Synthetic oligonucleotide
  Sense strand starting at position 982 of SEQ ID NO: 316931
auuugugaucggugacacu

SEQ ID NO: 451200 - RNA, 19 nt, Artificial Sequence
  Description of Artificial Sequence: Synthetic oligonucleotide
  Antisense Strand to SEQ ID NO: 451199
agugucaccgaucacaaau

SEQ ID NO: 451201 - RNA, 19 nt, Artificial Sequence
  Description of Artificial Sequence: Synthetic oligonucleotide
  Sense strand starting at position 1258 of SEQ ID NO: 316931
aacacugguuuguuccaga

SEQ ID NO: 451202 - RNA, 19 nt, Artificial Sequence
  Description of Artificial Sequence: Synthetic oligonucleotide
  Antisense Strand to SEQ ID NO: 451201
ucuggaacaaaccaguguu

SEQ ID NO: 451203 - RNA, 19 nt, Artificial Sequence
  Description of Artificial Sequence: Synthetic oligonucleotide
  Sense strand starting at position 1263 of SEQ ID NO: 316931
ugguuuguuccagaaaguu

SEQ ID NO: 451204 - RNA, 19 nt, Artificial Sequence
  Description of Artificial Sequence: Synthetic oligonucleotide
  Antisense Strand to SEQ ID NO: 451203
aacuuucuggaacaaacca

SEQ ID NO: 451205 - RNA, 19 nt, Artificial Sequence
  Description of Artificial Sequence: Synthetic oligonucleotide
  Sense strand starting at position 1615 of SEQ ID NO: 316931
ugguaaauaccacauaugu

SEQ ID NO: 451206 - RNA, 19 nt, Artificial Sequence
  Description of Artificial Sequence: Synthetic oligonucleotide
  Antisense Strand to SEQ ID NO: 451205
acauaugugguauuuacca

SEQ ID NO: 451207 - RNA, 19 nt, Artificial Sequence
  Description of Artificial Sequence: Synthetic oligonucleotide
  Sense strand starting at position 1631 of SEQ ID NO: 316931
uguguuaggaaaugcaaau

SEQ ID NO: 451208 - RNA, 19 nt, Artificial Sequence
  Description of Artificial Sequence: Synthetic oligonucleotide
  Antisense Strand to SEQ ID NO: 451207
auuugcauuuccuaacaca

SEQ ID NO: 451209 - RNA, 19 nt, Artificial Sequence
  Description of Artificial Sequence: Synthetic oligonucleotide
  Sense strand starting at position 1797 of SEQ ID NO: 316931
uuugacuccgcagaagaaa

SEQ ID NO: 451210 - RNA, 19 nt, Artificial Sequence
  Description of Artificial Sequence: Synthetic oligonucleotide
  Antisense Strand to SEQ ID NO: 451209
uuucuucugcggagucaaa

SEQ ID NO: 451211 - RNA, 19 nt, Artificial Sequence
  Description of Artificial Sequence: Synthetic oligonucleotide
  Sense strand starting at position 2182 of SEQ ID NO: 316931
uugaguggccuugaacaga

SEQ ID NO: 451212 - RNA, 19 nt, Artificial Sequence
  Description of Artificial Sequence: Synthetic oligonucleotide
  Antisense Strand to SEQ ID NO: 451211
ucuguucaaggccacucaa

SEQ ID NO: 451213 - RNA, 19 nt, Artificial Sequence
  Description of Artificial Sequence: Synthetic oligonucleotide
  Sense strand starting at position 2371 of SEQ ID NO: 316931
ggauucuguuaauuugugu

SEQ ID NO: 451214 - RNA, 19 nt, Artificial Sequence
  Description of Artificial Sequence: Synthetic oligonucleotide
  Antisense Strand to SEQ ID NO: 451213
acacaaauuaacagaaucc

SEQ ID NO: 451215 - RNA, 19 nt, Artificial Sequence
  Description of Artificial Sequence: Synthetic oligonucleotide
  Sense strand starting at position 2376 of SEQ ID NO: 316931
cuguuaauuuguguuaauc

SEQ ID NO: 451216 - RNA, 19 nt, Artificial Sequence
  Description of Artificial Sequence: Synthetic oligonucleotide
  Antisense Strand to SEQ ID NO: 451215
gauuaacacaaauuaacag

SEQ ID NO: 451217 - RNA, 19 nt, Artificial Sequence
  Description of Artificial Sequence: Synthetic oligonucleotide
  Sense strand starting at position 2476 of SEQ ID NO: 316931
gcacucaggagauguugaa

SEQ ID NO: 451218 - RNA, 19 nt, Artificial Sequence
  Description of Artificial Sequence: Synthetic oligonucleotide
  Antisense Strand to SEQ ID NO: 451217
uucaacaucuccugagugc

SEQ ID NO: 451219 - RNA, 19 nt, Artificial Sequence
  Description of Artificial Sequence: Synthetic oligonucleotide
  Sense strand starting at position 2483 of SEQ ID NO: 316931
ggagauguugaauguauaa

SEQ ID NO: 451220 - RNA, 19 nt, Artificial Sequence
  Description of Artificial Sequence: Synthetic oligonucleotide
  Antisense Strand to SEQ ID NO: 451219
uuauacauucaacaucucc

SEQ ID NO: 451221 - RNA, 19 nt, Artificial Sequence
  Description of Artificial Sequence: Synthetic oligonucleotide
  Sense strand starting at position 2580 of SEQ ID NO: 316931
cgccuuaauagugagagag

SEQ ID NO: 451222 - RNA, 19 nt, Artificial Sequence
  Description of Artificial Sequence: Synthetic oligonucleotide
  Antisense Strand to SEQ ID NO: 451221
cucucucacuauuaaggcg

SEQ ID NO: 451223 - RNA, 19 nt, Artificial Sequence
  Description of Artificial Sequence: Synthetic oligonucleotide
  Sense strand starting at position 2645 of SEQ ID NO: 316931
ugaauaaugccaggcaaga

SEQ ID NO: 451224 - RNA, 19 nt, Artificial Sequence
  Description of Artificial Sequence: Synthetic oligonucleotide
  Antisense Strand to SEQ ID NO: 451223
ucuugccuggcauuauuca

SEQ ID NO: 451225 - RNA, 19 nt, Artificial Sequence
  Description of Artificial Sequence: Synthetic oligonucleotide
  Sense strand starting at position 2745 of SEQ ID NO: 316931
agaccuauuagaugggcaa

SEQ ID NO: 451226 - RNA, 19 nt, Artificial Sequence
  Description of Artificial Sequence: Synthetic oligonucleotide
  Antisense Strand to SEQ ID NO: 451225
uugcccaucuaauaggucu

SEQ ID NO: 451227 - RNA, 19 nt, Artificial Sequence
  Description of Artificial Sequence: Synthetic oligonucleotide
  Sense strand starting at position 2746 of SEQ ID NO: 316931
gaccuauuagaugggcaau

SEQ ID NO: 451228 - RNA, 19 nt, Artificial Sequence
  Description of Artificial Sequence: Synthetic oligonucleotide
  Antisense Strand to SEQ ID NO: 451227
auugcccaucuaauagguc

SEQ ID NO: 451229 - RNA, 19 nt, Artificial Sequence
  Description of Artificial Sequence: Synthetic oligonucleotide
  Sense strand starting at position 2871 of SEQ ID NO: 316931
uugccaugguaaccagaaa

SEQ ID NO: 451230 - RNA, 19 nt, Artificial Sequence
  Description of Artificial Sequence: Synthetic oligonucleotide
  Antisense Strand to SEQ ID NO: 451229
uuucugguuaccauggcaa

SEQ ID NO: 451231 - RNA, 19 nt, Artificial Sequence
  Description of Artificial Sequence: Synthetic oligonucleotide
  Sense strand starting at position 3110 of SEQ ID NO: 316931
agcauauuugucugccuca

SEQ ID NO: 451232 - RNA, 19 nt, Artificial Sequence
  Description of Artificial Sequence: Synthetic oligonucleotide
  Antisense Strand to SEQ ID NO: 451231
ugaggcagacaaauaugcu

SEQ ID NO: 451233 - RNA, 19 nt, Artificial Sequence
  Description of Artificial Sequence: Synthetic oligonucleotide
  Sense strand starting at position 3111 of SEQ ID NO: 316931
gcauauuugucugccucaa

SEQ ID NO: 451234 - RNA, 19 nt, Artificial Sequence
  Description of Artificial Sequence: Synthetic oligonucleotide
  Antisense Strand to SEQ ID NO: 451233
uugaggcagacaaauaugc

SEQ ID NO: 451235 - RNA, 19 nt, Artificial Sequence
  Description of Artificial Sequence: Synthetic oligonucleotide
  Sense strand starting at position 3131 of SEQ ID NO: 316931
cgguucaagccagaaguaa

SEQ ID NO: 451236 - RNA, 19 nt, Artificial Sequence
  Description of Artificial Sequence: Synthetic oligonucleotide
  Antisense Strand to SEQ ID NO: 451235
uuacuucuggcuugaaccg

SEQ ID NO: 451237 - RNA, 19 nt, Artificial Sequence
  Description of Artificial Sequence: Synthetic oligonucleotide
  Sense strand starting at position 3243 of SEQ ID NO: 316931
uuguucuaucccgaaauaa

SEQ ID NO: 451238 - RNA, 19 nt, Artificial Sequence
  Description of Artificial Sequence: Synthetic oligonucleotide
  Antisense Strand to SEQ ID NO: 451237
uuauuucgggauagaacaa

SEQ ID NO: 451239 - RNA, 19 nt, Artificial Sequence
  Description of Artificial Sequence: Synthetic oligonucleotide
  Sense strand starting at position 3315 of SEQ ID NO: 316931
uuuagucuccucuggaaau

SEQ ID NO: 451240 - RNA, 19 nt, Artificial Sequence
  Description of Artificial Sequence: Synthetic oligonucleotide
  Antisense Strand to SEQ ID NO: 451239
auuuccagaggagacuaaa

SEQ ID NO: 451241 - RNA, 19 nt, Artificial Sequence
  Description of Artificial Sequence: Synthetic oligonucleotide
  Sense strand starting at position 3542 of SEQ ID NO: 316931
uuaagaauaugcuuuggau

SEQ ID NO: 451242 - RNA, 19 nt, Artificial Sequence
  Description of Artificial Sequence: Synthetic oligonucleotide
  Antisense Strand to SEQ ID NO: 451241
auccaaagcauauucuuaa

SEQ ID NO: 451243 - RNA, 19 nt, Artificial Sequence
  Description of Artificial Sequence: Synthetic oligonucleotide
  Sense strand starting at position 3544 of SEQ ID NO: 316931
aagaauaugcuuuggauag

SEQ ID NO: 451244 - RNA, 19 nt, Artificial Sequence
  Description of Artificial Sequence: Synthetic oligonucleotide
  Antisense Strand to SEQ ID NO: 451243
cuauccaaagcauauucuu

SEQ ID NO: 451245 - RNA, 19 nt, Artificial Sequence
  Description of Artificial Sequence: Synthetic oligonucleotide
  Sense strand starting at position 3548 of SEQ ID NO: 316931
auaugcuuuggauagcuau

SEQ ID NO: 451246 - RNA, 19 nt, Artificial Sequence
  Description of Artificial Sequence: Synthetic oligonucleotide
  Antisense Strand to SEQ ID NO: 451245
auagcuauccaaagcauau

SEQ ID NO: 451247 - RNA, 19 nt, Artificial Sequence
  Description of Artificial Sequence: Synthetic oligonucleotide
  Sense strand starting at position 3551 of SEQ ID NO: 316931
ugcuuuggauagcuauuua

SEQ ID NO: 451248 - RNA, 19 nt, Artificial Sequence
  Description of Artificial Sequence: Synthetic oligonucleotide
  Antisense Strand to SEQ ID NO: 451247
uaaauagcuauccaaagca

SEQ ID NO: 451249 - RNA, 19 nt, Artificial Sequence
  Description of Artificial Sequence: Synthetic oligonucleotide
  Sense strand starting at position 3601 of SEQ ID NO: 316931
ugaucugauuagccagaga

SEQ ID NO: 451250 - RNA, 19 nt, Artificial Sequence
  Description of Artificial Sequence: Synthetic oligonucleotide
  Antisense Strand to SEQ ID NO: 451249
ucucuggcuaaucagauca

SEQ ID NO: 451251 - RNA, 19 nt, Artificial Sequence
  Description of Artificial Sequence: Synthetic oligonucleotide
  Sense strand starting at position 3687 of SEQ ID NO: 316931
gcuaacauuggauaagguu

SEQ ID NO: 451252 - RNA, 19 nt, Artificial Sequence
  Description of Artificial Sequence: Synthetic oligonucleotide
  Antisense Strand to SEQ ID NO: 451251
aaccuuauccaauguuagc

SEQ ID NO: 451253 - RNA, 19 nt, Artificial Sequence
  Description of Artificial Sequence: Synthetic oligonucleotide
  Sense strand starting at position 3694 of SEQ ID NO: 316931
uuggauaagguuuguaaac

SEQ ID NO: 451254 - RNA, 19 nt, Artificial Sequence
  Description of Artificial Sequence: Synthetic oligonucleotide
  Antisense Strand to SEQ ID NO: 451253
guuuacaaaccuuauccaa

SEQ ID NO: 451255 - RNA, 19 nt, Artificial Sequence
  Description of Artificial Sequence: Synthetic oligonucleotide
  Sense strand starting at position 3695 of SEQ ID NO: 316931
uggauaagguuuguaaaca

SEQ ID NO: 451256 - RNA, 19 nt, Artificial Sequence
  Description of Artificial Sequence: Synthetic oligonucleotide
  Antisense Strand to SEQ ID NO: 451255
uguuuacaaaccuuaucca

SEQ ID NO: 451257 - RNA, 19 nt, Artificial Sequence
  Description of Artificial Sequence: Synthetic oligonucleotide
  Sense strand starting at position 3864 of SEQ ID NO: 316931
aaggguaucuccuugggua

SEQ ID NO: 451258 - RNA, 19 nt, Artificial Sequence
  Description of Artificial Sequence: Synthetic oligonucleotide
  Antisense Strand to SEQ ID NO: 451257
uacccaaggagauacccuu

SEQ ID NO: 451259 - RNA, 19 nt, Artificial Sequence
  Description of Artificial Sequence: Synthetic oligonucleotide
  Sense strand starting at position 3880 of SEQ ID NO: 316931
guaguaagaauuugccugu

SEQ ID NO: 451260 - RNA, 19 nt, Artificial Sequence
  Description of Artificial Sequence: Synthetic oligonucleotide
  Antisense Strand to SEQ ID NO: 451259
acaggcaaauucuuacuac

SEQ ID NO: 451261 - RNA, 19 nt, Artificial Sequence
  Description of Artificial Sequence: Synthetic oligonucleotide
  Sense strand starting at position 3883 of SEQ ID NO: 316931
guaagaauuugccuguuua

SEQ ID NO: 451262 - RNA, 19 nt, Artificial Sequence
  Description of Artificial Sequence: Synthetic oligonucleotide
  Antisense Strand to SEQ ID NO: 451261
uaaacaggcaaauucuuac

SEQ ID NO: 451263 - RNA, 19 nt, Artificial Sequence
  Description of Artificial Sequence: Synthetic oligonucleotide
  Sense strand starting at position 20 of SEQ ID NO: 316932
cuaagugacccacaagcuu

SEQ ID NO: 451264 - RNA, 19 nt, Artificial Sequence
  Description of Artificial Sequence: Synthetic oligonucleotide
  Antisense Strand to SEQ ID NO: 451263
aagcuugugggucacuuag

SEQ ID NO: 451265 - RNA, 19 nt, Artificial Sequence
  Description of Artificial Sequence: Synthetic oligonucleotide
  Sense strand starting at position 34 of SEQ ID NO: 316932
agcuucuuucuuuauacga

SEQ ID NO: 451266 - RNA, 19 nt, Artificial Sequence
  Description of Artificial Sequence: Synthetic oligonucleotide
  Antisense Strand to SEQ ID NO: 451265
ucguauaaagaaagaagcu

SEQ ID NO: 451267 - RNA, 19 nt, Artificial Sequence
  Description of Artificial Sequence: Synthetic oligonucleotide
  Sense strand starting at position 228 of SEQ ID NO: 316932
gcaaguccuguccacaaua

SEQ ID NO: 451268 - RNA, 19 nt, Artificial Sequence
  Description of Artificial Sequence: Synthetic oligonucleotide
  Antisense Strand to SEQ ID NO: 451267
uauuguggacaggacuugc

SEQ ID NO: 451269 - RNA, 19 nt, Artificial Sequence
  Description of Artificial Sequence: Synthetic oligonucleotide
  Sense strand starting at position 421 of SEQ ID NO: 316932
ggagacaaagugugugaua

SEQ ID NO: 451270 - RNA, 19 nt, Artificial Sequence
  Description of Artificial Sequence: Synthetic oligonucleotide
  Antisense Strand to SEQ ID NO: 451269
uaucacacacuuugucucc

SEQ ID NO: 451271 - RNA, 19 nt, Artificial Sequence
  Description of Artificial Sequence: Synthetic oligonucleotide
  Sense strand starting at position 422 of SEQ ID NO: 316932
gagacaaagugugugauaa

SEQ ID NO: 451272 - RNA, 19 nt, Artificial Sequence
  Description of Artificial Sequence: Synthetic oligonucleotide
  Antisense Strand to SEQ ID NO: 451271
uuaucacacacuuugucuc

SEQ ID NO: 451273 - RNA, 19 nt, Artificial Sequence
  Description of Artificial Sequence: Synthetic oligonucleotide
  Sense strand starting at position 423 of SEQ ID NO: 316932
agacaaagugugugauaau

SEQ ID NO: 451274 - RNA, 19 nt, Artificial Sequence
  Description of Artificial Sequence: Synthetic oligonucleotide
  Antisense Strand to SEQ ID NO: 451273
auuaucacacacuuugucu

SEQ ID NO: 451275 - RNA, 19 nt, Artificial Sequence
  Description of Artificial Sequence: Synthetic oligonucleotide
  Sense strand starting at position 434 of SEQ ID NO: 316932
gugauaaugcuacagucaa

SEQ ID NO: 451276 - RNA, 19 nt, Artificial Sequence
  Description of Artificial Sequence: Synthetic oligonucleotide
  Antisense Strand to SEQ ID NO: 451275
uugacuguagcauuaucac

SEQ ID NO: 451277 - RNA, 19 nt, Artificial Sequence
  Description of Artificial Sequence: Synthetic oligonucleotide
  Sense strand starting at position 479 of SEQ ID NO: 316932
aucagaauucugggauagu

SEQ ID NO: 451278 - RNA, 19 nt, Artificial Sequence
  Description of Artificial Sequence: Synthetic oligonucleotide
  Antisense Strand to SEQ ID NO: 451277
acuaucccagaauucugau

SEQ ID NO: 451279 - RNA, 19 nt, Artificial Sequence
  Description of Artificial Sequence: Synthetic oligonucleotide
  Sense strand starting at position 609 of SEQ ID NO: 316932
gugccaauacagcagaaua

SEQ ID NO: 451280 - RNA, 19 nt, Artificial Sequence
  Description of Artificial Sequence: Synthetic oligonucleotide
  Antisense Strand to SEQ ID NO: 451279
uauucugcuguauuggcac

SEQ ID NO: 451281 - RNA, 19 nt, Artificial Sequence
  Description of Artificial Sequence: Synthetic oligonucleotide
  Sense strand starting at position 654 of SEQ ID NO: 316932
cuguguuuagcccauaaac

SEQ ID NO: 451282 - RNA, 19 nt, Artificial Sequence
  Description of Artificial Sequence: Synthetic oligonucleotide
  Antisense Strand to SEQ ID NO: 451281
guuuaugggcuaaacacag

SEQ ID NO: 451283 - RNA, 19 nt, Artificial Sequence
  Description of Artificial Sequence: Synthetic oligonucleotide
  Sense strand starting at position 656 of SEQ ID NO: 316932
guguuuagcccauaaacuu

SEQ ID NO: 451284 - RNA, 19 nt, Artificial Sequence
  Description of Artificial Sequence: Synthetic oligonucleotide
  Antisense Strand to SEQ ID NO: 451283
aaguuuaugggcuaaacac

SEQ ID NO: 451285 - RNA, 19 nt, Artificial Sequence
  Description of Artificial Sequence: Synthetic oligonucleotide
  Sense strand starting at position 850 of SEQ ID NO: 316932
gaggacuuaagccgaguga

SEQ ID NO: 451286 - RNA, 19 nt, Artificial Sequence
  Description of Artificial Sequence: Synthetic oligonucleotide
  Antisense Strand to SEQ ID NO: 451285
ucacucggcuuaaguccuc

SEQ ID NO: 451287 - RNA, 19 nt, Artificial Sequence
  Description of Artificial Sequence: Synthetic oligonucleotide
  Sense strand starting at position 879 of SEQ ID NO: 316932
cugcaaguucuauauaggu

SEQ ID NO: 451288 - RNA, 19 nt, Artificial Sequence
  Description of Artificial Sequence: Synthetic oligonucleotide
  Antisense Strand to SEQ ID NO: 451287
accuauauagaacuugcag

SEQ ID NO: 451289 - RNA, 19 nt, Artificial Sequence
  Description of Artificial Sequence: Synthetic oligonucleotide
  Sense strand starting at position 884 of SEQ ID NO: 316932
aguucuauauaggucacaa

SEQ ID NO: 451290 - RNA, 19 nt, Artificial Sequence
  Description of Artificial Sequence: Synthetic oligonucleotide
  Antisense Strand to SEQ ID NO: 451289
uugugaccuauauagaacu

SEQ ID NO: 451291 - RNA, 19 nt, Artificial Sequence
  Description of Artificial Sequence: Synthetic oligonucleotide
  Sense strand starting at position 933 of SEQ ID NO: 316932
gaaucacacgaguagaugu

SEQ ID NO: 451292 - RNA, 19 nt, Artificial Sequence
  Description of Artificial Sequence: Synthetic oligonucleotide
  Antisense Strand to SEQ ID NO: 451291
acaucuacucgugugauuc

SEQ ID NO: 451293 - RNA, 19 nt, Artificial Sequence
  Description of Artificial Sequence: Synthetic oligonucleotide
  Sense strand starting at position 943 of SEQ ID NO: 316932
aguagauguucaccgggaa

SEQ ID NO: 451294 - RNA, 19 nt, Artificial Sequence
  Description of Artificial Sequence: Synthetic oligonucleotide
  Antisense Strand to SEQ ID NO: 451293
uucccggugaacaucuacu

SEQ ID NO: 451295 - RNA, 19 nt, Artificial Sequence
  Description of Artificial Sequence: Synthetic oligonucleotide
  Sense strand starting at position 944 of SEQ ID NO: 316932
guagauguucaccgggaag

SEQ ID NO: 451296 - RNA, 19 nt, Artificial Sequence
  Description of Artificial Sequence: Synthetic oligonucleotide
  Antisense Strand to SEQ ID NO: 451295
cuucccggugaacaucuac

SEQ ID NO: 451297 - RNA, 19 nt, Artificial Sequence
  Description of Artificial Sequence: Synthetic oligonucleotide
  Sense strand starting at position 946 of SEQ ID NO: 316932
agauguucaccgggaagag

SEQ ID NO: 451298 - RNA, 19 nt, Artificial Sequence
  Description of Artificial Sequence: Synthetic oligonucleotide
  Antisense Strand to SEQ ID NO: 451297
cucuucccggugaacaucu

SEQ ID NO: 451299 - RNA, 19 nt, Artificial Sequence
  Description of Artificial Sequence: Synthetic oligonucleotide
  Sense strand starting at position 1089 of SEQ ID NO: 316932
ucaaguucccuggacugua

SEQ ID NO: 451300 - RNA, 19 nt, Artificial Sequence
  Description of Artificial Sequence: Synthetic oligonucleotide
  Antisense Strand to SEQ ID NO: 451299
uacaguccagggaacuuga

SEQ ID NO: 451301 - RNA, 19 nt, Artificial Sequence
  Description of Artificial Sequence: Synthetic oligonucleotide
  Sense strand starting at position 2232 of SEQ ID NO: 316932
gguuuaagcgcuucgccau

SEQ ID NO: 451302 - RNA, 19 nt, Artificial Sequence
  Description of Artificial Sequence: Synthetic oligonucleotide
  Antisense Strand to SEQ ID NO: 451301
auggcgaagcgcuuaaacc

SEQ ID NO: 451303 - RNA, 19 nt, Artificial Sequence
  Description of Artificial Sequence: Synthetic oligonucleotide
  Sense strand starting at position 2294 of SEQ ID NO: 316932
uugcgaauggguucgcgaa

SEQ ID NO: 451304 - RNA, 19 nt, Artificial Sequence
  Description of Artificial Sequence: Synthetic oligonucleotide
  Antisense Strand to SEQ ID NO: 451303
uucgcgaacccauucgcaa

SEQ ID NO: 451305 - RNA, 19 nt, Artificial Sequence
  Description of Artificial Sequence: Synthetic oligonucleotide
  Sense strand starting at position 2337 of SEQ ID NO: 316932
caaggaguuagcgugcguu

SEQ ID NO: 451306 - RNA, 19 nt, Artificial Sequence
  Description of Artificial Sequence: Synthetic oligonucleotide
  Antisense Strand to SEQ ID NO: 451305
aacgcacgcuaacuccuug

SEQ ID NO: 451307 - RNA, 19 nt, Artificial Sequence
  Description of Artificial Sequence: Synthetic oligonucleotide
  Sense strand starting at position 2339 of SEQ ID NO: 316932
aggaguuagcgugcguuaa

SEQ ID NO: 451308 - RNA, 19 nt, Artificial Sequence
  Description of Artificial Sequence: Synthetic oligonucleotide
  Antisense Strand to SEQ ID NO: 451307
uuaacgcacgcuaacuccu

SEQ ID NO: 451309 - RNA, 19 nt, Artificial Sequence
  Description of Artificial Sequence: Synthetic oligonucleotide
  Sense strand starting at position 2349 of SEQ ID NO: 316932
gugcguuaagcuuucagua

SEQ ID NO: 451310 - RNA, 19 nt, Artificial Sequence
  Description of Artificial Sequence: Synthetic oligonucleotide
  Antisense Strand to SEQ ID NO: 451309
uacugaaagcuuaacgcac

SEQ ID NO: 451311 - RNA, 19 nt, Artificial Sequence
  Description of Artificial Sequence: Synthetic oligonucleotide
  Sense strand starting at position 2595 of SEQ ID NO: 316932
cccugugacccucaagguu

SEQ ID NO: 451312 - RNA, 19 nt, Artificial Sequence
  Description of Artificial Sequence: Synthetic oligonucleotide
  Antisense Strand to SEQ ID NO: 451311
aaccuugagggucacaggg

SEQ ID NO: 451313 - RNA, 19 nt, Artificial Sequence
  Description of Artificial Sequence: Synthetic oligonucleotide
  Sense strand starting at position 2663 of SEQ ID NO: 316932
cuuggaaggguucguaaug

SEQ ID NO: 451314 - RNA, 19 nt, Artificial Sequence
  Description of Artificial Sequence: Synthetic oligonucleotide
  Antisense Strand to SEQ ID NO: 451313
cauuacgaacccuuccaag

SEQ ID NO: 451315 - RNA, 19 nt, Artificial Sequence
  Description of Artificial Sequence: Synthetic oligonucleotide
  Sense strand starting at position 2682 of SEQ ID NO: 316932
cccaacuauuuggagauga

SEQ ID NO: 451316 - RNA, 19 nt, Artificial Sequence
  Description of Artificial Sequence: Synthetic oligonucleotide
  Antisense Strand to SEQ ID NO: 451315
ucaucuccaaauaguuggg

SEQ ID NO: 451317 - RNA, 19 nt, Artificial Sequence
  Description of Artificial Sequence: Synthetic oligonucleotide
  Sense strand starting at position 2794 of SEQ ID NO: 316932
gguagcaggaggugaauua

SEQ ID NO: 451318 - RNA, 19 nt, Artificial Sequence
  Description of Artificial Sequence: Synthetic oligonucleotide
  Antisense Strand to SEQ ID NO: 451317
uaauucaccuccugcuacc

SEQ ID NO: 451319 - RNA, 19 nt, Artificial Sequence
  Description of Artificial Sequence: Synthetic oligonucleotide
  Sense strand starting at position 2801 of SEQ ID NO: 316932
ggaggugaauuaguugcua

SEQ ID NO: 451320 - RNA, 19 nt, Artificial Sequence
  Description of Artificial Sequence: Synthetic oligonucleotide
  Antisense Strand to SEQ ID NO: 451319
uagcaacuaauucaccucc

SEQ ID NO: 451321 - RNA, 19 nt, Artificial Sequence
  Description of Artificial Sequence: Synthetic oligonucleotide
  Sense strand starting at position 3216 of SEQ ID NO: 316932
ggucccuugagguaagaca

SEQ ID NO: 451322 - RNA, 19 nt, Artificial Sequence
  Description of Artificial Sequence: Synthetic oligonucleotide
  Antisense Strand to SEQ ID NO: 451321
ugucuuaccucaagggacc

SEQ ID NO: 451323 - RNA, 19 nt, Artificial Sequence
  Description of Artificial Sequence: Synthetic oligonucleotide
  Sense strand starting at position 3249 of SEQ ID NO: 316932
accagaugggcucauguau

SEQ ID NO: 451324 - RNA, 19 nt, Artificial Sequence
  Description of Artificial Sequence: Synthetic oligonucleotide
  Antisense Strand to SEQ ID NO: 451323
auacaugagcccaucuggu

SEQ ID NO: 451325 - RNA, 19 nt, Artificial Sequence
  Description of Artificial Sequence: Synthetic oligonucleotide
  Sense strand starting at position 3319 of SEQ ID NO: 316932
guuauuuguucuccaacuc

SEQ ID NO: 451326 - RNA, 19 nt, Artificial Sequence
  Description of Artificial Sequence: Synthetic oligonucleotide
  Antisense Strand to SEQ ID NO: 451325
gaguuggagaacaaauaac

SEQ ID NO: 451327 - RNA, 19 nt, Artificial Sequence
  Description of Artificial Sequence: Synthetic oligonucleotide
  Sense strand starting at position 3364 of SEQ ID NO: 316932
gccucuuagccgucccaga

SEQ ID NO: 451328 - RNA, 19 nt, Artificial Sequence
  Description of Artificial Sequence: Synthetic oligonucleotide
  Antisense Strand to SEQ ID NO: 451327
ucugggacggcuaagaggc

SEQ ID NO: 451329 - RNA, 19 nt, Artificial Sequence
  Description of Artificial Sequence: Synthetic oligonucleotide
  Sense strand starting at position 3431 of SEQ ID NO: 316932
uuggaacacuuaucuaugu

SEQ ID NO: 451330 - RNA, 19 nt, Artificial Sequence
  Description of Artificial Sequence: Synthetic oligonucleotide
  Antisense Strand to SEQ ID NO: 451329
acauagauaaguguuccaa

SEQ ID NO: 451331 - RNA, 19 nt, Artificial Sequence
  Description of Artificial Sequence: Synthetic oligonucleotide
  Sense strand starting at position 3445 of SEQ ID NO: 316932
uauguuauggaaugaagua

SEQ ID NO: 451332 - RNA, 19 nt, Artificial Sequence
  Description of Artificial Sequence: Synthetic oligonucleotide
  Antisense Strand to SEQ ID NO: 451331
uacuucauuccauaacaua

SEQ ID NO: 451333 - RNA, 19 nt, Artificial Sequence
  Description of Artificial Sequence: Synthetic oligonucleotide
  Sense strand starting at position 3458 of SEQ ID NO: 316932
gaaguauugcaugaagcca

SEQ ID NO: 451334 - RNA, 19 nt, Artificial Sequence
  Description of Artificial Sequence: Synthetic oligonucleotide
  Antisense Strand to SEQ ID NO: 451333
uggcuucaugcaauacuuc

SEQ ID NO: 451335 - RNA, 19 nt, Artificial Sequence
  Description of Artificial Sequence: Synthetic oligonucleotide
  Sense strand starting at position 3533 of SEQ ID NO: 316932
ggcacugauuuauugcuua

SEQ ID NO: 451336 - RNA, 19 nt, Artificial Sequence
  Description of Artificial Sequence: Synthetic oligonucleotide
  Antisense Strand to SEQ ID NO: 451335
uaagcaauaaaucagugcc

SEQ ID NO: 451337 - RNA, 19 nt, Artificial Sequence
  Description of Artificial Sequence: Synthetic oligonucleotide
  Sense strand starting at position 3589 of SEQ ID NO: 316932
caucuuugugaagaaagca

SEQ ID NO: 451338 - RNA, 19 nt, Artificial Sequence
  Description of Artificial Sequence: Synthetic oligonucleotide
  Antisense Strand to SEQ ID NO: 451337
ugcuuucuucacaaagaug

SEQ ID NO: 451339 - RNA, 19 nt, Artificial Sequence
  Description of Artificial Sequence: Synthetic oligonucleotide
  Sense strand starting at position 3739 of SEQ ID NO: 316932
ggucgacuguggaauagaa

SEQ ID NO: 451340 - RNA, 19 nt, Artificial Sequence
  Description of Artificial Sequence: Synthetic oligonucleotide
  Antisense Strand to SEQ ID NO: 451339
uucuauuccacagucgacc

SEQ ID NO: 451341 - RNA, 19 nt, Artificial Sequence
  Description of Artificial Sequence: Synthetic oligonucleotide
  Sense strand starting at position 3919 of SEQ ID NO: 316932
aagagcagucagugaagga

SEQ ID NO: 451342 - RNA, 19 nt, Artificial Sequence
  Description of Artificial Sequence: Synthetic oligonucleotide
  Antisense Strand to SEQ ID NO: 451341
uccuucacugacugcucuu

SEQ ID NO: 451343 - RNA, 19 nt, Artificial Sequence
  Description of Artificial Sequence: Synthetic oligonucleotide
  Sense strand starting at position 24 of SEQ ID NO: 316933
cuaagugacccacaagcuu

SEQ ID NO: 451344 - RNA, 19 nt, Artificial Sequence
  Description of Artificial Sequence: Synthetic oligonucleotide
  Antisense Strand to SEQ ID NO: 451343
aagcuugugggucacuuag

SEQ ID NO: 451345 - RNA, 19 nt, Artificial Sequence
  Description of Artificial Sequence: Synthetic oligonucleotide
  Sense strand starting at position 38 of SEQ ID NO: 316933
agcuucuuucuuuauacga

SEQ ID NO: 451346 - RNA, 19 nt, Artificial Sequence
  Description of Artificial Sequence: Synthetic oligonucleotide
  Antisense Strand to SEQ ID NO: 451345
ucguauaaagaaagaagcu

SEQ ID NO: 451347 - RNA, 19 nt, Artificial Sequence
  Description of Artificial Sequence: Synthetic oligonucleotide
  Sense strand starting at position 232 of SEQ ID NO: 316933
gcaaguccuguccacaaua

SEQ ID NO: 451348 - RNA, 19 nt, Artificial Sequence
  Description of Artificial Sequence: Synthetic oligonucleotide
  Antisense Strand to SEQ ID NO: 451347
uauuguggacaggacuugc

SEQ ID NO: 451349 - RNA, 19 nt, Artificial Sequence
  Description of Artificial Sequence: Synthetic oligonucleotide
  Sense strand starting at position 425 of SEQ ID NO: 316933
ggagacaaagugugugaua

SEQ ID NO: 451350 - RNA, 19 nt, Artificial Sequence
  Description of Artificial Sequence: Synthetic oligonucleotide
  Antisense Strand to SEQ ID NO: 451349
uaucacacacuuugucucc

SEQ ID NO: 451351 - RNA, 19 nt, Artificial Sequence
  Description of Artificial Sequence: Synthetic oligonucleotide
  Sense strand starting at position 426 of SEQ ID NO: 316933
gagacaaagugugugauaa

SEQ ID NO: 451352 - RNA, 19 nt, Artificial Sequence
  Description of Artificial Sequence: Synthetic oligonucleotide
  Antisense Strand to SEQ ID NO: 451351
uuaucacacacuuugucuc

SEQ ID NO: 451353 - RNA, 19 nt, Artificial Sequence
  Description of Artificial Sequence: Synthetic oligonucleotide
  Sense strand starting at position 427 of SEQ ID NO: 316933
agacaaagugugugauaau

SEQ ID NO: 451354 - RNA, 19 nt, Artificial Sequence
  Description of Artificial Sequence: Synthetic oligonucleotide
  Antisense Strand to SEQ ID NO: 451353
auuaucacacacuuugucu

SEQ ID NO: 451355 - RNA, 19 nt, Artificial Sequence
  Description of Artificial Sequence: Synthetic oligonucleotide
  Sense strand starting at position 438 of SEQ ID NO: 316933
gugauaaugcuacagucaa

SEQ ID NO: 451356 - RNA, 19 nt, Artificial Sequence
  Description of Artificial Sequence: Synthetic oligonucleotide
  Antisense Strand to SEQ ID NO: 451355
uugacuguagcauuaucac

SEQ ID NO: 451357 - RNA, 19 nt, Artificial Sequence
  Description of Artificial Sequence: Synthetic oligonucleotide
  Sense strand starting at position 483 of SEQ ID NO: 316933
aucagaauucugggauagu

SEQ ID NO: 451358 - RNA, 19 nt, Artificial Sequence
  Description of Artificial Sequence: Synthetic oligonucleotide
  Antisense Strand to SEQ ID NO: 451357
acuaucccagaauucugau

SEQ ID NO: 451359 - RNA, 19 nt, Artificial Sequence
  Description of Artificial Sequence: Synthetic oligonucleotide
  Sense strand starting at position 613 of SEQ ID NO: 316933
gugccaauacagcagaaua

SEQ ID NO: 451360 - RNA, 19 nt, Artificial Sequence
  Description of Artificial Sequence: Synthetic oligonucleotide
  Antisense Strand to SEQ ID NO: 451359
uauucugcuguauuggcac

SEQ ID NO: 451361 - RNA, 19 nt, Artificial Sequence
  Description of Artificial Sequence: Synthetic oligonucleotide
  Sense strand starting at position 658 of SEQ ID NO: 316933
cuguguuuagcccauaaac

SEQ ID NO: 451362 - RNA, 19 nt, Artificial Sequence
  Description of Artificial Sequence: Synthetic oligonucleotide
  Antisense Strand to SEQ ID NO: 451361
guuuaugggcuaaacacag

SEQ ID NO: 451363 - RNA, 19 nt, Artificial Sequence
  Description of Artificial Sequence: Synthetic oligonucleotide
  Sense strand starting at position 660 of SEQ ID NO: 316933
guguuuagcccauaaacuu

SEQ ID NO: 451364 - RNA, 19 nt, Artificial Sequence
  Description of Artificial Sequence: Synthetic oligonucleotide
  Antisense Strand to SEQ ID NO: 451363
aaguuuaugggcuaaacac

SEQ ID NO: 451365 - RNA, 19 nt, Artificial Sequence
  Description of Artificial Sequence: Synthetic oligonucleotide
  Sense strand starting at position 854 of SEQ ID NO: 316933
gaggacuuaagccgaguga

SEQ ID NO: 451366 - RNA, 19 nt, Artificial Sequence
  Description of Artificial Sequence: Synthetic oligonucleotide
  Antisense Strand to SEQ ID NO: 451365
ucacucggcuuaaguccuc

SEQ ID NO: 451367 - RNA, 19 nt, Artificial Sequence
  Description of Artificial Sequence: Synthetic oligonucleotide
  Sense strand starting at position 883 of SEQ ID NO: 316933
cugcaaguucuauauaggu

SEQ ID NO: 451368 - RNA, 19 nt, Artificial Sequence
  Description of Artificial Sequence: Synthetic oligonucleotide
  Antisense Strand to SEQ ID NO: 451367
accuauauagaacuugcag

SEQ ID NO: 451369 - RNA, 19 nt, Artificial Sequence
  Description of Artificial Sequence: Synthetic oligonucleotide
  Sense strand starting at position 888 of SEQ ID NO: 316933
aguucuauauaggucacaa

SEQ ID NO: 451370 - RNA, 19 nt, Artificial Sequence
  Description of Artificial Sequence: Synthetic oligonucleotide
  Antisense Strand to SEQ ID NO: 451369
uugugaccuauauagaacu

SEQ ID NO: 451371 - RNA, 19 nt, Artificial Sequence
  Description of Artificial Sequence: Synthetic oligonucleotide
  Sense strand starting at position 937 of SEQ ID NO: 316933
gaaucacacgaguagaugu

SEQ ID NO: 451372 - RNA, 19 nt, Artificial Sequence
  Description of Artificial Sequence: Synthetic oligonucleotide
  Antisense Strand to SEQ ID NO: 451371
acaucuacucgugugauuc

SEQ ID NO: 451373 - RNA, 19 nt, Artificial Sequence
  Description of Artificial Sequence: Synthetic oligonucleotide
  Sense strand starting at position 947 of SEQ ID NO: 316933
aguagauguucaccgggaa

SEQ ID NO: 451374 - RNA, 19 nt, Artificial Sequence
  Description of Artificial Sequence: Synthetic oligonucleotide
  Antisense Strand to SEQ ID NO: 451373
uucccggugaacaucuacu

SEQ ID NO: 451375 - RNA, 19 nt, Artificial Sequence
  Description of Artificial Sequence: Synthetic oligonucleotide
  Sense strand starting at position 948 of SEQ ID NO: 316933
guagauguucaccgggaag

SEQ ID NO: 451376 - RNA, 19 nt, Artificial Sequence
  Description of Artificial Sequence: Synthetic oligonucleotide
  Antisense Strand to SEQ ID NO: 451375
cuucccggugaacaucuac

SEQ ID NO: 451377 - RNA, 19 nt, Artificial Sequence
  Description of Artificial Sequence: Synthetic oligonucleotide
  Sense strand starting at position 950 of SEQ ID NO: 316933
agauguucaccgggaagag

SEQ ID NO: 451378 - RNA, 19 nt, Artificial Sequence
  Description of Artificial Sequence: Synthetic oligonucleotide
  Antisense Strand to SEQ ID NO: 451377
cucuucccggugaacaucu

SEQ ID NO: 451379 - RNA, 19 nt, Artificial Sequence
  Description of Artificial Sequence: Synthetic oligonucleotide
  Sense strand starting at position 1093 of SEQ ID NO: 316933
ucaaguucccuggacugua

SEQ ID NO: 451380 - RNA, 19 nt, Artificial Sequence
  Description of Artificial Sequence: Synthetic oligonucleotide
  Antisense Strand to SEQ ID NO: 451379
uacaguccagggaacuuga

SEQ ID NO: 451381 - RNA, 19 nt, Artificial Sequence
  Description of Artificial Sequence: Synthetic oligonucleotide
  Sense strand starting at position 2236 of SEQ ID NO: 316933
gguuuaagcgcuucgccau

SEQ ID NO: 451382 - RNA, 19 nt, Artificial Sequence
  Description of Artificial Sequence: Synthetic oligonucleotide
  Antisense Strand to SEQ ID NO: 451381
auggcgaagcgcuuaaacc

SEQ ID NO: 451383 - RNA, 19 nt, Artificial Sequence
  Description of Artificial Sequence: Synthetic oligonucleotide
  Sense strand starting at position 2298 of SEQ ID NO: 316933
uugcgaauggguucgcgaa

SEQ ID NO: 451384 - RNA, 19 nt, Artificial Sequence
  Description of Artificial Sequence: Synthetic oligonucleotide
  Antisense Strand to SEQ ID NO: 451383
uucgcgaacccauucgcaa

SEQ ID NO: 451385 - RNA, 19 nt, Artificial Sequence
  Description of Artificial Sequence: Synthetic oligonucleotide
  Sense strand starting at position 2341 of SEQ ID NO: 316933
caaggaguuagcgugcguu

SEQ ID NO: 451386 - RNA, 19 nt, Artificial Sequence
  Description of Artificial Sequence: Synthetic oligonucleotide
  Antisense Strand to SEQ ID NO: 451385
aacgcacgcuaacuccuug

SEQ ID NO: 451387 - RNA, 19 nt, Artificial Sequence
  Description of Artificial Sequence: Synthetic oligonucleotide
  Sense strand starting at position 2343 of SEQ ID NO: 316933
aggaguuagcgugcguuaa

SEQ ID NO: 451388 - RNA, 19 nt, Artificial Sequence
  Description of Artificial Sequence: Synthetic oligonucleotide
  Antisense Strand to SEQ ID NO: 451387
uuaacgcacgcuaacuccu

SEQ ID NO: 451389 - RNA, 19 nt, Artificial Sequence
  Description of Artificial Sequence: Synthetic oligonucleotide
  Sense strand starting at position 2353 of SEQ ID NO: 316933
gugcguuaagcuuucagua

SEQ ID NO: 451390 - RNA, 19 nt, Artificial Sequence
  Description of Artificial Sequence: Synthetic oligonucleotide
  Antisense Strand to SEQ ID NO: 451389
uacugaaagcuuaacgcac

SEQ ID NO: 451391 - RNA, 19 nt, Artificial Sequence
  Description of Artificial Sequence: Synthetic oligonucleotide
  Sense strand starting at position 2599 of SEQ ID NO: 316933
cccugugacccucaagguu

SEQ ID NO: 451392 - RNA, 19 nt, Artificial Sequence
  Description of Artificial Sequence: Synthetic oligonucleotide
  Antisense Strand to SEQ ID NO: 451391
aaccuugagggucacaggg

SEQ ID NO: 451393 - RNA, 19 nt, Artificial Sequence
  Description of Artificial Sequence: Synthetic oligonucleotide
  Sense strand starting at position 2667 of SEQ ID NO: 316933
cuuggaaggguucguaaug

SEQ ID NO: 451394 - RNA, 19 nt, Artificial Sequence
  Description of Artificial Sequence: Synthetic oligonucleotide
  Antisense Strand to SEQ ID NO: 451393
cauuacgaacccuuccaag

SEQ ID NO: 451395 - RNA, 19 nt, Artificial Sequence
  Description of Artificial Sequence: Synthetic oligonucleotide
  Sense strand starting at position 2686 of SEQ ID NO: 316933
cccaacuauuuggagauga

SEQ ID NO: 451396 - RNA, 19 nt, Artificial Sequence
  Description of Artificial Sequence: Synthetic oligonucleotide
  Antisense Strand to SEQ ID NO: 451395
ucaucuccaaauaguuggg

SEQ ID NO: 451397 - RNA, 19 nt, Artificial Sequence
  Description of Artificial Sequence: Synthetic oligonucleotide
  Sense strand starting at position 2798 of SEQ ID NO: 316933
gguagcaggaggugaauua

SEQ ID NO: 451398 - RNA, 19 nt, Artificial Sequence
  Description of Artificial Sequence: Synthetic oligonucleotide
  Antisense Strand to SEQ ID NO: 451397
uaauucaccuccugcuacc

SEQ ID NO: 451399 - RNA, 19 nt, Artificial Sequence
  Description of Artificial Sequence: Synthetic oligonucleotide
  Sense strand starting at position 2805 of SEQ ID NO: 316933
ggaggugaauuaguugcua

SEQ ID NO: 451400 - RNA, 19 nt, Artificial Sequence
  Description of Artificial Sequence: Synthetic oligonucleotide
  Antisense Strand to SEQ ID NO: 451399
uagcaacuaauucaccucc

SEQ ID NO: 451401 - RNA, 19 nt, Artificial Sequence
  Description of Artificial Sequence: Synthetic oligonucleotide
  Sense strand starting at position 3220 of SEQ ID NO: 316933
ggucccuugagguaagaca

SEQ ID NO: 451402 - RNA, 19 nt, Artificial Sequence
  Description of Artificial Sequence: Synthetic oligonucleotide
  Antisense Strand to SEQ ID NO: 451401
ugucuuaccucaagggacc

SEQ ID NO: 451403 - RNA, 19 nt, Artificial Sequence
  Description of Artificial Sequence: Synthetic oligonucleotide
  Sense strand starting at position 3253 of SEQ ID NO: 316933
accagaugggcucauguau

SEQ ID NO: 451404 - RNA, 19 nt, Artificial Sequence
  Description of Artificial Sequence: Synthetic oligonucleotide
  Antisense Strand to SEQ ID NO: 451403
auacaugagcccaucuggu

SEQ ID NO: 451405 - RNA, 19 nt, Artificial Sequence
  Description of Artificial Sequence: Synthetic oligonucleotide
  Sense strand starting at position 3323 of SEQ ID NO: 316933
guuauuuguucuccaacuc

SEQ ID NO: 451406 - RNA, 19 nt, Artificial Sequence
  Description of Artificial Sequence: Synthetic oligonucleotide
  Antisense Strand to SEQ ID NO: 451405
gaguuggagaacaaauaac

SEQ ID NO: 451407 - RNA, 19 nt, Artificial Sequence
  Description of Artificial Sequence: Synthetic oligonucleotide
  Sense strand starting at position 3368 of SEQ ID NO: 316933
gccucuuagccgucccaga

SEQ ID NO: 451408 - RNA, 19 nt, Artificial Sequence
  Description of Artificial Sequence: Synthetic oligonucleotide
  Antisense Strand to SEQ ID NO: 451407
ucugggacggcuaagaggc

SEQ ID NO: 451409 - RNA, 19 nt, Artificial Sequence
  Description of Artificial Sequence: Synthetic oligonucleotide
  Sense strand starting at position 3435 of SEQ ID NO: 316933
uuggaacacuuaucuaugu

SEQ ID NO: 451410 - RNA, 19 nt, Artificial Sequence
  Description of Artificial Sequence: Synthetic oligonucleotide
  Antisense Strand to SEQ ID NO: 451409
acauagauaaguguuccaa

SEQ ID NO: 451411 - RNA, 19 nt, Artificial Sequence
  Description of Artificial Sequence: Synthetic oligonucleotide
  Sense strand starting at position 3449 of SEQ ID NO: 316933
uauguuauggaaugaagua

SEQ ID NO: 451412 - RNA, 19 nt, Artificial Sequence
  Description of Artificial Sequence: Synthetic oligonucleotide
  Antisense Strand to SEQ ID NO: 451411
uacuucauuccauaacaua

SEQ ID NO: 451413 - RNA, 19 nt, Artificial Sequence
  Description of Artificial Sequence: Synthetic oligonucleotide
  Sense strand starting at position 3462 of SEQ ID NO: 316933
gaaguauugcaugaagcca

SEQ ID NO: 451414 - RNA, 19 nt, Artificial Sequence
  Description of Artificial Sequence: Synthetic oligonucleotide
  Antisense Strand to SEQ ID NO: 451413
uggcuucaugcaauacuuc

SEQ ID NO: 451415 - RNA, 19 nt, Artificial Sequence
  Description of Artificial Sequence: Synthetic oligonucleotide
  Sense strand starting at position 3537 of SEQ ID NO: 316933
ggcacugauuuauugcuua

SEQ ID NO: 451416 - RNA, 19 nt, Artificial Sequence
  Description of Artificial Sequence: Synthetic oligonucleotide
  Antisense Strand to SEQ ID NO: 451415
uaagcaauaaaucagugcc

SEQ ID NO: 451417 - RNA, 19 nt, Artificial Sequence
  Description of Artificial Sequence: Synthetic oligonucleotide
  Sense strand starting at position 3593 of SEQ ID NO: 316933
caucuuugugaagaaagca

SEQ ID NO: 451418 - RNA, 19 nt, Artificial Sequence
  Description of Artificial Sequence: Synthetic oligonucleotide
  Antisense Strand to SEQ ID NO: 451417
ugcuuucuucacaaagaug

SEQ ID NO: 451419 - RNA, 19 nt, Artificial Sequence
  Description of Artificial Sequence: Synthetic oligonucleotide
  Sense strand starting at position 3743 of SEQ ID NO: 316933
ggucgacuguggaauagaa

SEQ ID NO: 451420 - RNA, 19 nt, Artificial Sequence
  Description of Artificial Sequence: Synthetic oligonucleotide
  Antisense Strand to SEQ ID NO: 451419
uucuauuccacagucgacc

SEQ ID NO: 451421 - RNA, 19 nt, Artificial Sequence
  Description of Artificial Sequence: Synthetic oligonucleotide
  Sense strand starting at position 3923 of SEQ ID NO: 316933
aagagcagucagugaagga

SEQ ID NO: 451422 - RNA, 19 nt, Artificial Sequence
  Description of Artificial Sequence: Synthetic oligonucleotide
  Antisense Strand to SEQ ID NO: 451421
uccuucacugacugcucuu

SEQ ID NO: 451423 - RNA, 19 nt, Artificial Sequence
  Description of Artificial Sequence: Synthetic oligonucleotide
  Sense strand starting at position 77 of SEQ ID NO: 316934
aguuauccuuugucaauaa

SEQ ID NO: 451424 - RNA, 19 nt, Artificial Sequence
  Description of Artificial Sequence: Synthetic oligonucleotide
  Antisense Strand to SEQ ID NO: 451423
uuauugacaaaggauaacu

SEQ ID NO: 451425 - RNA, 19 nt, Artificial Sequence
  Description of Artificial Sequence: Synthetic oligonucleotide
  Sense strand starting at position 81 of SEQ ID NO: 316934
auccuuugucaauaaguca

SEQ ID NO: 451426 - RNA, 19 nt, Artificial Sequence
  Description of Artificial Sequence: Synthetic oligonucleotide
  Antisense Strand to SEQ ID NO: 451425
ugacuuauugacaaaggau

SEQ ID NO: 451427 - RNA, 19 nt, Artificial Sequence
  Description of Artificial Sequence: Synthetic oligonucleotide
  Sense strand starting at position 84 of SEQ ID NO: 316934
cuuugucaauaagucauau

SEQ ID NO: 451428 - RNA, 19 nt, Artificial Sequence
  Description of Artificial Sequence: Synthetic oligonucleotide
  Antisense Strand to SEQ ID NO: 451427
auaugacuuauugacaaag

SEQ ID NO: 451429 - RNA, 19 nt, Artificial Sequence
  Description of Artificial Sequence: Synthetic oligonucleotide
  Sense strand starting at position 244 of SEQ ID NO: 316934
aagggauuccacugcugua

SEQ ID NO: 451430 - RNA, 19 nt, Artificial Sequence
  Description of Artificial Sequence: Synthetic oligonucleotide
  Antisense Strand to SEQ ID NO: 451429
uacagcaguggaaucccuu

SEQ ID NO: 451431 - RNA, 19 nt, Artificial Sequence
  Description of Artificial Sequence: Synthetic oligonucleotide
  Sense strand starting at position 340 of SEQ ID NO: 316934
cuaggauucuuacucuuga

SEQ ID NO: 451432 - RNA, 19 nt, Artificial Sequence
  Description of Artificial Sequence: Synthetic oligonucleotide
  Antisense Strand to SEQ ID NO: 451431
ucaagaguaagaauccuag

SEQ ID NO: 451433 - RNA, 19 nt, Artificial Sequence
  Description of Artificial Sequence: Synthetic oligonucleotide
  Sense strand starting at position 380 of SEQ ID NO: 316934
gcccaacuucuugaugcua

SEQ ID NO: 451434 - RNA, 19 nt, Artificial Sequence
  Description of Artificial Sequence: Synthetic oligonucleotide
  Antisense Strand to SEQ ID NO: 451433
uagcaucaagaaguugggc

SEQ ID NO: 451435 - RNA, 19 nt, Artificial Sequence
  Description of Artificial Sequence: Synthetic oligonucleotide
  Sense strand starting at position 755 of SEQ ID NO: 316934
cuccaaauccaaggaaugu

SEQ ID NO: 451436 - RNA, 19 nt, Artificial Sequence
  Description of Artificial Sequence: Synthetic oligonucleotide
  Antisense Strand to SEQ ID NO: 451435
acauuccuuggauuuggag

SEQ ID NO: 451437 - RNA, 19 nt, Artificial Sequence
  Description of Artificial Sequence: Synthetic oligonucleotide
  Sense strand starting at position 768 of SEQ ID NO: 316934
gaaugucagcgcuaacacu

SEQ ID NO: 451438 - RNA, 19 nt, Artificial Sequence
  Description of Artificial Sequence: Synthetic oligonucleotide
  Antisense Strand to SEQ ID NO: 451437
aguguuagcgcugacauuc

SEQ ID NO: 451439 - RNA, 19 nt, Artificial Sequence
  Description of Artificial Sequence: Synthetic oligonucleotide
  Sense strand starting at position 2377 of SEQ ID NO: 316934
ggacaauaacuccguccuu

SEQ ID NO: 451440 - RNA, 19 nt, Artificial Sequence
  Description of Artificial Sequence: Synthetic oligonucleotide
  Antisense Strand to SEQ ID NO: 451439
aaggacggaguuauugucc

SEQ ID NO: 451441 - RNA, 19 nt, Artificial Sequence
  Description of Artificial Sequence: Synthetic oligonucleotide
  Sense strand starting at position 2557 of SEQ ID NO: 316934
gcuccacguggcugauuua

SEQ ID NO: 451442 - RNA, 19 nt, Artificial Sequence
  Description of Artificial Sequence: Synthetic oligonucleotide
  Antisense Strand to SEQ ID NO: 451441
uaaaucagccacguggagc

SEQ ID NO: 451443 - RNA, 19 nt, Artificial Sequence
  Description of Artificial Sequence: Synthetic oligonucleotide
  Sense strand starting at position 2665 of SEQ ID NO: 316934
ccaggugagaugugcaaau

SEQ ID NO: 451444 - RNA, 19 nt, Artificial Sequence
  Description of Artificial Sequence: Synthetic oligonucleotide
  Antisense Strand to SEQ ID NO: 451443
auuugcacaucucaccugg

SEQ ID NO: 451445 - RNA, 19 nt, Artificial Sequence
  Description of Artificial Sequence: Synthetic oligonucleotide
  Sense strand starting at position 2667 of SEQ ID NO: 316934
aggugagaugugcaaauau

SEQ ID NO: 451446 - RNA, 19 nt, Artificial Sequence
  Description of Artificial Sequence: Synthetic oligonucleotide
  Antisense Strand to SEQ ID NO: 451445
auauuugcacaucucaccu

SEQ ID NO: 451447 - RNA, 19 nt, Artificial Sequence
  Description of Artificial Sequence: Synthetic oligonucleotide
  Sense strand starting at position 2677 of SEQ ID NO: 316934
ugcaaauaucacuggauug

SEQ ID NO: 451448 - RNA, 19 nt, Artificial Sequence
  Description of Artificial Sequence: Synthetic oligonucleotide
  Antisense Strand to SEQ ID NO: 451447
caauccagugauauuugca

SEQ ID NO: 451449 - RNA, 19 nt, Artificial Sequence
  Description of Artificial Sequence: Synthetic oligonucleotide
  Sense strand starting at position 2707 of SEQ ID NO: 316934
uuggaaagccaguauuccu

SEQ ID NO: 451450 - RNA, 19 nt, Artificial Sequence
  Description of Artificial Sequence: Synthetic oligonucleotide
  Antisense Strand to SEQ ID NO: 451449
aggaauacuggcuuuccaa

SEQ ID NO: 451451 - RNA, 19 nt, Artificial Sequence
  Description of Artificial Sequence: Synthetic oligonucleotide
  Sense strand starting at position 2717 of SEQ ID NO: 316934
aguauuccuccugagcuaa

SEQ ID NO: 451452 - RNA, 19 nt, Artificial Sequence
  Description of Artificial Sequence: Synthetic oligonucleotide
  Antisense Strand to SEQ ID NO: 451451
uuagcucaggaggaauacu

SEQ ID NO: 451453 - RNA, 19 nt, Artificial Sequence
  Description of Artificial Sequence: Synthetic oligonucleotide
  Sense strand starting at position 2924 of SEQ ID NO: 316934
gauauuggcaaguguuuag

SEQ ID NO: 451454 - RNA, 19 nt, Artificial Sequence
  Description of Artificial Sequence: Synthetic oligonucleotide
  Antisense Strand to SEQ ID NO: 451453
cuaaacacuugccaauauc

SEQ ID NO: 451455 - RNA, 19 nt, Artificial Sequence
  Description of Artificial Sequence: Synthetic oligonucleotide
  Sense strand starting at position 2994 of SEQ ID NO: 316934
agaugucuaugccuuuaua

SEQ ID NO: 451456 - RNA, 19 nt, Artificial Sequence
  Description of Artificial Sequence: Synthetic oligonucleotide
  Antisense Strand to SEQ ID NO: 451455
uauaaaggcauagacaucu

SEQ ID NO: 451457 - RNA, 19 nt, Artificial Sequence
  Description of Artificial Sequence: Synthetic oligonucleotide
  Sense strand starting at position 3004 of SEQ ID NO: 316934
gccuuuauagcagaaugua

SEQ ID NO: 451458 - RNA, 19 nt, Artificial Sequence
  Description of Artificial Sequence: Synthetic oligonucleotide
  Antisense Strand to SEQ ID NO: 451457
uacauucugcuauaaaggc

SEQ ID NO: 451459 - RNA, 19 nt, Artificial Sequence
  Description of Artificial Sequence: Synthetic oligonucleotide
  Sense strand starting at position 3012 of SEQ ID NO: 316934
agcagaauguauguaauua

SEQ ID NO: 451460 - RNA, 19 nt, Artificial Sequence
  Description of Artificial Sequence: Synthetic oligonucleotide
  Antisense Strand to SEQ ID NO: 451459
uaauuacauacauucugcu

SEQ ID NO: 451461 - RNA, 19 nt, Artificial Sequence
  Description of Artificial Sequence: Synthetic oligonucleotide
  Sense strand starting at position 3024 of SEQ ID NO: 316934
guaauuacauuaucagugu

SEQ ID NO: 451462 - RNA, 19 nt, Artificial Sequence
  Description of Artificial Sequence: Synthetic oligonucleotide
  Antisense Strand to SEQ ID NO: 451461
acacugauaauguaauuac

SEQ ID NO: 451463 - RNA, 19 nt, Artificial Sequence
  Description of Artificial Sequence: Synthetic oligonucleotide
  Sense strand starting at position 3027 of SEQ ID NO: 316934
auuacauuaucaguguacu

SEQ ID NO: 451464 - RNA, 19 nt, Artificial Sequence
  Description of Artificial Sequence: Synthetic oligonucleotide
  Antisense Strand to SEQ ID NO: 451463
aguacacugauaauguaau

SEQ ID NO: 451465 - RNA, 19 nt, Artificial Sequence
  Description of Artificial Sequence: Synthetic oligonucleotide
  Sense strand starting at position 3028 of SEQ ID NO: 316934
uuacauuaucaguguacua

SEQ ID NO: 451466 - RNA, 19 nt, Artificial Sequence
  Description of Artificial Sequence: Synthetic oligonucleotide
  Antisense Strand to SEQ ID NO: 451465
uaguacacugauaauguaa

SEQ ID NO: 451467 - RNA, 19 nt, Artificial Sequence
  Description of Artificial Sequence: Synthetic oligonucleotide
  Sense strand starting at position 3030 of SEQ ID NO: 316934
acauuaucaguguacuaua

SEQ ID NO: 451468 - RNA, 19 nt, Artificial Sequence
  Description of Artificial Sequence: Synthetic oligonucleotide
  Antisense Strand to SEQ ID NO: 451467
uauaguacacugauaaugu

SEQ ID NO: 451469 - RNA, 19 nt, Artificial Sequence
  Description of Artificial Sequence: Synthetic oligonucleotide
  Sense strand starting at position 3035 of SEQ ID NO: 316934
aucaguguacuauauccua

SEQ ID NO: 451470 - RNA, 19 nt, Artificial Sequence
  Description of Artificial Sequence: Synthetic oligonucleotide
  Antisense Strand to SEQ ID NO: 451469
uaggauauaguacacugau

SEQ ID NO: 451471 - RNA, 19 nt, Artificial Sequence
  Description of Artificial Sequence: Synthetic oligonucleotide
  Sense strand starting at position 3038 of SEQ ID NO: 316934
aguguacuauauccuaaac

SEQ ID NO: 451472 - RNA, 19 nt, Artificial Sequence
  Description of Artificial Sequence: Synthetic oligonucleotide
  Antisense Strand to SEQ ID NO: 451471
guuuaggauauaguacacu

SEQ ID NO: 451473 - RNA, 19 nt, Artificial Sequence
  Description of Artificial Sequence: Synthetic oligonucleotide
  Sense strand starting at position 3511 of SEQ ID NO: 316934
gucucacaucugcaaguuu

SEQ ID NO: 451474 - RNA, 19 nt, Artificial Sequence
  Description of Artificial Sequence: Synthetic oligonucleotide
  Antisense Strand to SEQ ID NO: 451473
aaacuugcagaugugagac

SEQ ID NO: 451475 - RNA, 19 nt, Artificial Sequence
  Description of Artificial Sequence: Synthetic oligonucleotide
  Sense strand starting at position 3545 of SEQ ID NO: 316934
agcucaguuauguaaaguu

SEQ ID NO: 451476 - RNA, 19 nt, Artificial Sequence
  Description of Artificial Sequence: Synthetic oligonucleotide
  Antisense Strand to SEQ ID NO: 451475
aacuuuacauaacugagcu

SEQ ID NO: 451477 - RNA, 19 nt, Artificial Sequence
  Description of Artificial Sequence: Synthetic oligonucleotide
  Sense strand starting at position 3630 of SEQ ID NO: 316934
uuuggcuuggcuuacaaua

SEQ ID NO: 451478 - RNA, 19 nt, Artificial Sequence
  Description of Artificial Sequence: Synthetic oligonucleotide
  Antisense Strand to SEQ ID NO: 451477
uauuguaagccaagccaaa

SEQ ID NO: 451479 - RNA, 19 nt, Artificial Sequence
  Description of Artificial Sequence: Synthetic oligonucleotide
  Sense strand starting at position 3638 of SEQ ID NO: 316934
ggcuuacaauagcuaguau

SEQ ID NO: 451480 - RNA, 19 nt, Artificial Sequence
  Description of Artificial Sequence: Synthetic oligonucleotide
  Antisense Strand to SEQ ID NO: 451479
auacuagcuauuguaagcc

SEQ ID NO: 451481 - RNA, 19 nt, Artificial Sequence
  Description of Artificial Sequence: Synthetic oligonucleotide
  Sense strand starting at position 3650 of SEQ ID NO: 316934
cuaguauaucagggaguuc

SEQ ID NO: 451482 - RNA, 19 nt, Artificial Sequence
  Description of Artificial Sequence: Synthetic oligonucleotide
  Antisense Strand to SEQ ID NO: 451481
gaacucccugauauacuag

SEQ ID NO: 451483 - RNA, 19 nt, Artificial Sequence
  Description of Artificial Sequence: Synthetic oligonucleotide
  Sense strand starting at position 3661 of SEQ ID NO: 316934
gggaguucuguagaugcca

SEQ ID NO: 451484 - RNA, 19 nt, Artificial Sequence
  Description of Artificial Sequence: Synthetic oligonucleotide
  Antisense Strand to SEQ ID NO: 451483
uggcaucuacagaacuccc

SEQ ID NO: 451485 - RNA, 19 nt, Artificial Sequence
  Description of Artificial Sequence: Synthetic oligonucleotide
  Sense strand starting at position 3731 of SEQ ID NO: 316934
ugguuccggaaauguagaa

SEQ ID NO: 451486 - RNA, 19 nt, Artificial Sequence
  Description of Artificial Sequence: Synthetic oligonucleotide
  Antisense Strand to SEQ ID NO: 451485
uucuacauuuccggaacca

SEQ ID NO: 451487 - RNA, 19 nt, Artificial Sequence
  Description of Artificial Sequence: Synthetic oligonucleotide
  Sense strand starting at position 3743 of SEQ ID NO: 316934
uguagaauggauuguaguu

SEQ ID NO: 451488 - RNA, 19 nt, Artificial Sequence
  Description of Artificial Sequence: Synthetic oligonucleotide
  Antisense Strand to SEQ ID NO: 451487
aacuacaauccauucuaca

SEQ ID NO: 451489 - RNA, 19 nt, Artificial Sequence
  Description of Artificial Sequence: Synthetic oligonucleotide
  Sense strand starting at position 3755 of SEQ ID NO: 316934
uguaguuagguguauuauu

SEQ ID NO: 451490 - RNA, 19 nt, Artificial Sequence
  Description of Artificial Sequence: Synthetic oligonucleotide
  Antisense Strand to SEQ ID NO: 451489
aauaauacaccuaacuaca

SEQ ID NO: 451491 - RNA, 19 nt, Artificial Sequence
  Description of Artificial Sequence: Synthetic oligonucleotide
  Sense strand starting at position 3836 of SEQ ID NO: 316934
gggacugucaaguguuaaa

SEQ ID NO: 451492 - RNA, 19 nt, Artificial Sequence
  Description of Artificial Sequence: Synthetic oligonucleotide
  Antisense Strand to SEQ ID NO: 451491
uuuaacacuugacaguccc

SEQ ID NO: 451493 - RNA, 19 nt, Artificial Sequence
  Description of Artificial Sequence: Synthetic oligonucleotide
  Sense strand starting at position 3864 of SEQ ID NO: 316934
cugcuugacuuagcauuua

SEQ ID NO: 451494 - RNA, 19 nt, Artificial Sequence
  Description of Artificial Sequence: Synthetic oligonucleotide
  Antisense Strand to SEQ ID NO: 451493
uaaaugcuaagucaagcag

SEQ ID NO: 451495 - RNA, 19 nt, Artificial Sequence
  Description of Artificial Sequence: Synthetic oligonucleotide
  Sense strand starting at position 3916 of SEQ ID NO: 316934
aguagaagaugagagauuu

SEQ ID NO: 451496 - RNA, 19 nt, Artificial Sequence
  Description of Artificial Sequence: Synthetic oligonucleotide
  Antisense Strand to SEQ ID NO: 451495
aaaucucucaucuucuacu

SEQ ID NO: 451497 - RNA, 19 nt, Artificial Sequence
  Description of Artificial Sequence: Synthetic oligonucleotide
  Sense strand starting at position 3962 of SEQ ID NO: 316934
agagaucuagaguguguaa

SEQ ID NO: 451498 - RNA, 19 nt, Artificial Sequence
  Description of Artificial Sequence: Synthetic oligonucleotide
  Antisense Strand to SEQ ID NO: 451497
uuacacacucuagaucucu

SEQ ID NO: 451499 - RNA, 19 nt, Artificial Sequence
  Description of Artificial Sequence: Synthetic oligonucleotide
  Sense strand starting at position 3964 of SEQ ID NO: 316934
agaucuagaguguguaauu

SEQ ID NO: 451500 - RNA, 19 nt, Artificial Sequence
  Description of Artificial Sequence: Synthetic oligonucleotide
  Antisense Strand to SEQ ID NO: 451499
aauuacacacucuagaucu

SEQ ID NO: 451501 - RNA, 19 nt, Artificial Sequence
  Description of Artificial Sequence: Synthetic oligonucleotide
  Sense strand starting at position 3965 of SEQ ID NO: 316934
gaucuagaguguguaauuc

SEQ ID NO: 451502 - RNA, 19 nt, Artificial Sequence
  Description of Artificial Sequence: Synthetic oligonucleotide
  Antisense Strand to SEQ ID NO: 451501
gaauuacacacucuagauc

SEQ ID NO: 451503 - RNA, 19 nt, Artificial Sequence
  Description of Artificial Sequence: Synthetic oligonucleotide
  Sense strand starting at position 51 of SEQ ID NO: 316935
uaguauggguguuuccaau

SEQ ID NO: 451504 - RNA, 19 nt, Artificial Sequence
  Description of Artificial Sequence: Synthetic oligonucleotide
  Antisense Strand to SEQ ID NO: 451503
auuggaaacacccauacua

SEQ ID NO: 451505 - RNA, 19 nt, Artificial Sequence
  Description of Artificial Sequence: Synthetic oligonucleotide
  Sense strand starting at position 57 of SEQ ID NO: 316935
ggguguuuccaauaugaca

SEQ ID NO: 451506 - RNA, 19 nt, Artificial Sequence
  Description of Artificial Sequence: Synthetic oligonucleotide
  Antisense Strand to SEQ ID NO: 451505
ugucauauuggaaacaccc

SEQ ID NO: 451507 - RNA, 19 nt, Artificial Sequence
  Description of Artificial Sequence: Synthetic oligonucleotide
  Sense strand starting at position 98 of SEQ ID NO: 316935
uuaucaagcgacugugaaa

SEQ ID NO: 451508 - RNA, 19 nt, Artificial Sequence
  Description of Artificial Sequence: Synthetic oligonucleotide
  Antisense Strand to SEQ ID NO: 451507
uuucacagucgcuugauaa

SEQ ID NO: 451509 - RNA, 19 nt, Artificial Sequence
  Description of Artificial Sequence: Synthetic oligonucleotide
  Sense strand starting at position 187 of SEQ ID NO: 316935
gagagacuuuaaguuucga

SEQ ID NO: 451510 - RNA, 19 nt, Artificial Sequence
  Description of Artificial Sequence: Synthetic oligonucleotide
  Antisense Strand to SEQ ID NO: 451509
ucgaaacuuaaagucucuc

SEQ ID NO: 451511 - RNA, 19 nt, Artificial Sequence
  Description of Artificial Sequence: Synthetic oligonucleotide
  Sense strand starting at position 453 of SEQ ID NO: 316935
ggugaaagauuaucuucuc

SEQ ID NO: 451512 - RNA, 19 nt, Artificial Sequence
  Description of Artificial Sequence: Synthetic oligonucleotide
  Antisense Strand to SEQ ID NO: 451511
gagaagauaaucuuucacc

SEQ ID NO: 451513 - RNA, 19 nt, Artificial Sequence
  Description of Artificial Sequence: Synthetic oligonucleotide
  Sense strand starting at position 454 of SEQ ID NO: 316935
gugaaagauuaucuucucu

SEQ ID NO: 451514 - RNA, 19 nt, Artificial Sequence
  Description of Artificial Sequence: Synthetic oligonucleotide
  Antisense Strand to SEQ ID NO: 451513
agagaagauaaucuuucac

SEQ ID NO: 451515 - RNA, 19 nt, Artificial Sequence
  Description of Artificial Sequence: Synthetic oligonucleotide
  Sense strand starting at position 493 of SEQ ID NO: 316935
cuucuuuacuaguuguaca

SEQ ID NO: 451516 - RNA, 19 nt, Artificial Sequence
  Description of Artificial Sequence: Synthetic oligonucleotide
  Antisense Strand to SEQ ID NO: 451515
uguacaacuaguaaagaag

SEQ ID NO: 451517 - RNA, 19 nt, Artificial Sequence
  Description of Artificial Sequence: Synthetic oligonucleotide
  Sense strand starting at position 506 of SEQ ID NO: 316935
uguacaugucacgauguua

SEQ ID NO: 451518 - RNA, 19 nt, Artificial Sequence
  Description of Artificial Sequence: Synthetic oligonucleotide
  Antisense Strand to SEQ ID NO: 451517
uaacaucgugacauguaca

SEQ ID NO: 451519 - RNA, 19 nt, Artificial Sequence
  Description of Artificial Sequence: Synthetic oligonucleotide
  Sense strand starting at position 583 of SEQ ID NO: 316935
auaaucagcucugucaaga

SEQ ID NO: 451520 - RNA, 19 nt, Artificial Sequence
  Description of Artificial Sequence: Synthetic oligonucleotide
  Antisense Strand to SEQ ID NO: 451519
ucuugacagagcugauuau

SEQ ID NO: 451521 - RNA, 19 nt, Artificial Sequence
  Description of Artificial Sequence: Synthetic oligonucleotide
  Sense strand starting at position 656 of SEQ ID NO: 316935
ggaucacugccuuaccaau

SEQ ID NO: 451522 - RNA, 19 nt, Artificial Sequence
  Description of Artificial Sequence: Synthetic oligonucleotide
  Antisense Strand to SEQ ID NO: 451521
auugguaaggcagugaucc

SEQ ID NO: 451523 - RNA, 19 nt, Artificial Sequence
  Description of Artificial Sequence: Synthetic oligonucleotide
  Sense strand starting at position 666 of SEQ ID NO: 316935
cuuaccaauccuuguguga

SEQ ID NO: 451524 - RNA, 19 nt, Artificial Sequence
  Description of Artificial Sequence: Synthetic oligonucleotide
  Antisense Strand to SEQ ID NO: 451523
ucacacaaggauugguaag

SEQ ID NO: 451525 - RNA, 19 nt, Artificial Sequence
  Description of Artificial Sequence: Synthetic oligonucleotide
  Sense strand starting at position 1007 of SEQ ID NO: 316935
uggccaucugcagaacaaa

SEQ ID NO: 451526 - RNA, 19 nt, Artificial Sequence
  Description of Artificial Sequence: Synthetic oligonucleotide
  Antisense Strand to SEQ ID NO: 451525
uuuguucugcagauggcca

SEQ ID NO: 451527 - RNA, 19 nt, Artificial Sequence
  Description of Artificial Sequence: Synthetic oligonucleotide
  Sense strand starting at position 1050 of SEQ ID NO: 316935
aacuaugacgaaggcauua

SEQ ID NO: 451528 - RNA, 19 nt, Artificial Sequence
  Description of Artificial Sequence: Synthetic oligonucleotide
  Antisense Strand to SEQ ID NO: 451527
uaaugccuucgucauaguu

SEQ ID NO: 451529 - RNA, 19 nt, Artificial Sequence
  Description of Artificial Sequence: Synthetic oligonucleotide
  Sense strand starting at position 1055 of SEQ ID NO: 316935
ugacgaaggcauuaucuau

SEQ ID NO: 451530 - RNA, 19 nt, Artificial Sequence
  Description of Artificial Sequence: Synthetic oligonucleotide
  Antisense Strand to SEQ ID NO: 451529
auagauaaugccuucguca

SEQ ID NO: 451531 - RNA, 19 nt, Artificial Sequence
  Description of Artificial Sequence: Synthetic oligonucleotide
  Sense strand starting at position 1065 of SEQ ID NO: 316935
auuaucuauuggcuuagaa

SEQ ID NO: 451532 - RNA, 19 nt, Artificial Sequence
  Description of Artificial Sequence: Synthetic oligonucleotide
  Antisense Strand to SEQ ID NO: 451531
uucuaagccaauagauaau

SEQ ID NO: 451533 - RNA, 19 nt, Artificial Sequence
  Description of Artificial Sequence: Synthetic oligonucleotide
  Sense strand starting at position 1197 of SEQ ID NO: 316935
ccugcuagauacuuaggua

SEQ ID NO: 451534 - RNA, 19 nt, Artificial Sequence
  Description of Artificial Sequence: Synthetic oligonucleotide
  Antisense Strand to SEQ ID NO: 451533
uaccuaaguaucuagcagg

SEQ ID NO: 451535 - RNA, 19 nt, Artificial Sequence
  Description of Artificial Sequence: Synthetic oligonucleotide
  Sense strand starting at position 2090 of SEQ ID NO: 316935
gccuccagacgcuauauaa

SEQ ID NO: 451536 - RNA, 19 nt, Artificial Sequence
  Description of Artificial Sequence: Synthetic oligonucleotide
  Antisense Strand to SEQ ID NO: 451535
uuauauagcgucuggaggc

SEQ ID NO: 451537 - RNA, 19 nt, Artificial Sequence
  Description of Artificial Sequence: Synthetic oligonucleotide
  Sense strand starting at position 2212 of SEQ ID NO: 316935
ccggguaaucugggaccga

SEQ ID NO: 451538 - RNA, 19 nt, Artificial Sequence
  Description of Artificial Sequence: Synthetic oligonucleotide
  Antisense Strand to SEQ ID NO: 451537
ucggucccagauuacccgg

SEQ ID NO: 451539 - RNA, 19 nt, Artificial Sequence
  Description of Artificial Sequence: Synthetic oligonucleotide
  Sense strand starting at position 2307 of SEQ ID NO: 316935
ggcgguugucccaggaauu

SEQ ID NO: 451540 - RNA, 19 nt, Artificial Sequence
  Description of Artificial Sequence: Synthetic oligonucleotide
  Antisense Strand to SEQ ID NO: 451539
aauuccugggacaaccgcc

SEQ ID NO: 451541 - RNA, 19 nt, Artificial Sequence
  Description of Artificial Sequence: Synthetic oligonucleotide
  Sense strand starting at position 2560 of SEQ ID NO: 316935
ggcuuuauuugggucugca

SEQ ID NO: 451542 - RNA, 19 nt, Artificial Sequence
  Description of Artificial Sequence: Synthetic oligonucleotide
  Antisense Strand to SEQ ID NO: 451541
ugcagacccaaauaaagcc

SEQ ID NO: 451543 - RNA, 19 nt, Artificial Sequence
  Description of Artificial Sequence: Synthetic oligonucleotide
  Sense strand starting at position 2708 of SEQ ID NO: 316935
aaacgugggacucgagaua

SEQ ID NO: 451544 - RNA, 19 nt, Artificial Sequence
  Description of Artificial Sequence: Synthetic oligonucleotide
  Antisense Strand to SEQ ID NO: 451543
uaucucgagucccacguuu

SEQ ID NO: 451545 - RNA, 19 nt, Artificial Sequence
  Description of Artificial Sequence: Synthetic oligonucleotide
  Sense strand starting at position 2969 of SEQ ID NO: 316935
ggucaccucuuuguuacaa

SEQ ID NO: 451546 - RNA, 19 nt, Artificial Sequence
  Description of Artificial Sequence: Synthetic oligonucleotide
  Antisense Strand to SEQ ID NO: 451545
uuguaacaaagaggugacc

SEQ ID NO: 451547 - RNA, 19 nt, Artificial Sequence
  Description of Artificial Sequence: Synthetic oligonucleotide
  Sense strand starting at position 2979 of SEQ ID NO: 316935
uuguuacaaccuggauaug

SEQ ID NO: 451548 - RNA, 19 nt, Artificial Sequence
  Description of Artificial Sequence: Synthetic oligonucleotide
  Antisense Strand to SEQ ID NO: 451547
cauauccagguuguaacaa

SEQ ID NO: 451549 - RNA, 19 nt, Artificial Sequence
  Description of Artificial Sequence: Synthetic oligonucleotide
  Sense strand starting at position 3014 of SEQ ID NO: 316935
gguagacaugcuugggaua

SEQ ID NO: 451550 - RNA, 19 nt, Artificial Sequence
  Description of Artificial Sequence: Synthetic oligonucleotide
  Antisense Strand to SEQ ID NO: 451549
uaucccaagcaugucuacc

SEQ ID NO: 451551 - RNA, 19 nt, Artificial Sequence
  Description of Artificial Sequence: Synthetic oligonucleotide
  Sense strand starting at position 3029 of SEQ ID NO: 316935
gauagauaagccuguggac

SEQ ID NO: 451552 - RNA, 19 nt, Artificial Sequence
  Description of Artificial Sequence: Synthetic oligonucleotide
  Antisense Strand to SEQ ID NO: 451551
guccacaggcuuaucuauc

SEQ ID NO: 451553 - RNA, 19 nt, Artificial Sequence
  Description of Artificial Sequence: Synthetic oligonucleotide
  Sense strand starting at position 3031 of SEQ ID NO: 316935
uagauaagccuguggacuu

SEQ ID NO: 451554 - RNA, 19 nt, Artificial Sequence
  Description of Artificial Sequence: Synthetic oligonucleotide
  Antisense Strand to SEQ ID NO: 451553
aaguccacaggcuuaucua

SEQ ID NO: 451555 - RNA, 19 nt, Artificial Sequence
  Description of Artificial Sequence: Synthetic oligonucleotide
  Sense strand starting at position 3177 of SEQ ID NO: 316935
agauuugagugggaagagu

SEQ ID NO: 451556 - RNA, 19 nt, Artificial Sequence
  Description of Artificial Sequence: Synthetic oligonucleotide
  Antisense Strand to SEQ ID NO: 451555
acucuucccacucaaaucu

SEQ ID NO: 451557 - RNA, 19 nt, Artificial Sequence
  Description of Artificial Sequence: Synthetic oligonucleotide
  Sense strand starting at position 3191 of SEQ ID NO: 316935
agaguuaugccuuaaacug

SEQ ID NO: 451558 - RNA, 19 nt, Artificial Sequence
  Description of Artificial Sequence: Synthetic oligonucleotide
  Antisense Strand to SEQ ID NO: 451557
caguuuaaggcauaacucu

SEQ ID NO: 451559 - RNA, 19 nt, Artificial Sequence
  Description of Artificial Sequence: Synthetic oligonucleotide
  Sense strand starting at position 3350 of SEQ ID NO: 316935
uugaauguguccuuuauau

SEQ ID NO: 451560 - RNA, 19 nt, Artificial Sequence
  Description of Artificial Sequence: Synthetic oligonucleotide
  Antisense Strand to SEQ ID NO: 451559
auauaaaggacacauucaa

SEQ ID NO: 451561 - RNA, 19 nt, Artificial Sequence
  Description of Artificial Sequence: Synthetic oligonucleotide
  Sense strand starting at position 3530 of SEQ ID NO: 316935
augugaauucugggaagca

SEQ ID NO: 451562 - RNA, 19 nt, Artificial Sequence
  Description of Artificial Sequence: Synthetic oligonucleotide
  Antisense Strand to SEQ ID NO: 451561
ugcuucccagaauucacau

SEQ ID NO: 451563 - RNA, 19 nt, Artificial Sequence
  Description of Artificial Sequence: Synthetic oligonucleotide
  Sense strand starting at position 3560 of SEQ ID NO: 316935
agagguuuccugggaauau

SEQ ID NO: 451564 - RNA, 19 nt, Artificial Sequence
  Description of Artificial Sequence: Synthetic oligonucleotide
  Antisense Strand to SEQ ID NO: 451563
auauucccaggaaaccucu

SEQ ID NO: 451565 - RNA, 19 nt, Artificial Sequence
  Description of Artificial Sequence: Synthetic oligonucleotide
  Sense strand starting at position 3569 of SEQ ID NO: 316935
cugggaauauugucaggug

SEQ ID NO: 451566 - RNA, 19 nt, Artificial Sequence
  Description of Artificial Sequence: Synthetic oligonucleotide
  Antisense Strand to SEQ ID NO: 451565
caccugacaauauucccag

SEQ ID NO: 451567 - RNA, 19 nt, Artificial Sequence
  Description of Artificial Sequence: Synthetic oligonucleotide
  Sense strand starting at position 3578 of SEQ ID NO: 316935
uugucaggugcucaaggaa

SEQ ID NO: 451568 - RNA, 19 nt, Artificial Sequence
  Description of Artificial Sequence: Synthetic oligonucleotide
  Antisense Strand to SEQ ID NO: 451567
uuccuugagcaccugacaa

SEQ ID NO: 451569 - RNA, 19 nt, Artificial Sequence
  Description of Artificial Sequence: Synthetic oligonucleotide
  Sense strand starting at position 3581 of SEQ ID NO: 316935
ucaggugcucaaggaaaua

SEQ ID NO: 451570 - RNA, 19 nt, Artificial Sequence
  Description of Artificial Sequence: Synthetic oligonucleotide
  Antisense Strand to SEQ ID NO: 451569
uauuuccuugagcaccuga

SEQ ID NO: 451571 - RNA, 19 nt, Artificial Sequence
  Description of Artificial Sequence: Synthetic oligonucleotide
  Sense strand starting at position 3779 of SEQ ID NO: 316935
cuagcauucuauuuguuga

SEQ ID NO: 451572 - RNA, 19 nt, Artificial Sequence
  Description of Artificial Sequence: Synthetic oligonucleotide
  Antisense Strand to SEQ ID NO: 451571
ucaacaaauagaaugcuag

SEQ ID NO: 451573 - RNA, 19 nt, Artificial Sequence
  Description of Artificial Sequence: Synthetic oligonucleotide
  Sense strand starting at position 3782 of SEQ ID NO: 316935
gcauucuauuuguugaauc

SEQ ID NO: 451574 - RNA, 19 nt, Artificial Sequence
  Description of Artificial Sequence: Synthetic oligonucleotide
  Antisense Strand to SEQ ID NO: 451573
gauucaacaaauagaaugc

SEQ ID NO: 451575 - RNA, 19 nt, Artificial Sequence
  Description of Artificial Sequence: Synthetic oligonucleotide
  Sense strand starting at position 3803 of SEQ ID NO: 316935
ggguguugaguugaaacau

SEQ ID NO: 451576 - RNA, 19 nt, Artificial Sequence
  Description of Artificial Sequence: Synthetic oligonucleotide
  Antisense Strand to SEQ ID NO: 451575
auguuucaacucaacaccc

SEQ ID NO: 451577 - RNA, 19 nt, Artificial Sequence
  Description of Artificial Sequence: Synthetic oligonucleotide
  Sense strand starting at position 3913 of SEQ ID NO: 316935
cgcagaauacaugguagaa

SEQ ID NO: 451578 - RNA, 19 nt, Artificial Sequence
  Description of Artificial Sequence: Synthetic oligonucleotide
  Antisense Strand to SEQ ID NO: 451577
uucuaccauguauucugcg

SEQ ID NO: 451579 - RNA, 19 nt, Artificial Sequence
  Description of Artificial Sequence: Synthetic oligonucleotide
  Sense strand starting at position 3966 of SEQ ID NO: 316935
uuuauagcauaguuccaga

SEQ ID NO: 451580 - RNA, 19 nt, Artificial Sequence
  Description of Artificial Sequence: Synthetic oligonucleotide
  Antisense Strand to SEQ ID NO: 451579
ucuggaacuaugcuauaaa

SEQ ID NO: 451581 - RNA, 19 nt, Artificial Sequence
  Description of Artificial Sequence: Synthetic oligonucleotide
  Sense strand starting at position 3971 of SEQ ID NO: 316935
agcauaguuccagaccaua

SEQ ID NO: 451582 - RNA, 19 nt, Artificial Sequence
  Description of Artificial Sequence: Synthetic oligonucleotide
  Antisense Strand to SEQ ID NO: 451581
uauggucuggaacuaugcu

SEQ ID NO: 451583 - RNA, 19 nt, Artificial Sequence
  Description of Artificial Sequence: Synthetic oligonucleotide
  Sense strand starting at position 344 of SEQ ID NO: 316936
ucauguauggacugguaca

SEQ ID NO: 451584 - RNA, 19 nt, Artificial Sequence
  Description of Artificial Sequence: Synthetic oligonucleotide
  Antisense Strand to SEQ ID NO: 451583
uguaccaguccauacauga

SEQ ID NO: 451585 - RNA, 19 nt, Artificial Sequence
  Description of Artificial Sequence: Synthetic oligonucleotide
  Sense strand starting at position 431 of SEQ ID NO: 316936
agccauucuuaguuagaca

SEQ ID NO: 451586 - RNA, 19 nt, Artificial Sequence
  Description of Artificial Sequence: Synthetic oligonucleotide
  Antisense Strand to SEQ ID NO: 451585
ugucuaacuaagaauggcu

SEQ ID NO: 451587 - RNA, 19 nt, Artificial Sequence
  Description of Artificial Sequence: Synthetic oligonucleotide
  Sense strand starting at position 556 of SEQ ID NO: 316936
agauuuccucucuggcagu

SEQ ID NO: 451588 - RNA, 19 nt, Artificial Sequence
  Description of Artificial Sequence: Synthetic oligonucleotide
  Antisense Strand to SEQ ID NO: 451587
acugccagagaggaaaucu

SEQ ID NO: 451589 - RNA, 19 nt, Artificial Sequence
  Description of Artificial Sequence: Synthetic oligonucleotide
  Sense strand starting at position 567 of SEQ ID NO: 316936
cuggcaguuucccucucaa

SEQ ID NO: 451590 - RNA, 19 nt, Artificial Sequence
  Description of Artificial Sequence: Synthetic oligonucleotide
  Antisense Strand to SEQ ID NO: 451589
uugagagggaaacugccag

SEQ ID NO: 451591 - RNA, 19 nt, Artificial Sequence
  Description of Artificial Sequence: Synthetic oligonucleotide
  Sense strand starting at position 634 of SEQ ID NO: 316936
gggcuuuggagucagaaua

SEQ ID NO: 451592 - RNA, 19 nt, Artificial Sequence
  Description of Artificial Sequence: Synthetic oligonucleotide
  Antisense Strand to SEQ ID NO: 451591
uauucugacuccaaagccc

SEQ ID NO: 451593 - RNA, 19 nt, Artificial Sequence
  Description of Artificial Sequence: Synthetic oligonucleotide
  Sense strand starting at position 642 of SEQ ID NO: 316936
gagucagaauacuuggcuu

SEQ ID NO: 451594 - RNA, 19 nt, Artificial Sequence
  Description of Artificial Sequence: Synthetic oligonucleotide
  Antisense Strand to SEQ ID NO: 451593
aagccaaguauucugacuc

SEQ ID NO: 451595 - RNA, 19 nt, Artificial Sequence
  Description of Artificial Sequence: Synthetic oligonucleotide
  Sense strand starting at position 644 of SEQ ID NO: 316936
gucagaauacuuggcuuug

SEQ ID NO: 451596 - RNA, 19 nt, Artificial Sequence
  Description of Artificial Sequence: Synthetic oligonucleotide
  Antisense Strand to SEQ ID NO: 451595
caaagccaaguauucugac

SEQ ID NO: 451597 - RNA, 19 nt, Artificial Sequence
  Description of Artificial Sequence: Synthetic oligonucleotide
  Sense strand starting at position 645 of SEQ ID NO: 316936
ucagaauacuuggcuuugu

SEQ ID NO: 451598 - RNA, 19 nt, Artificial Sequence
  Description of Artificial Sequence: Synthetic oligonucleotide
  Antisense Strand to SEQ ID NO: 451597
acaaagccaaguauucuga

SEQ ID NO: 451599 - RNA, 19 nt, Artificial Sequence
  Description of Artificial Sequence: Synthetic oligonucleotide
  Sense strand starting at position 646 of SEQ ID NO: 316936
cagaauacuuggcuuugua

SEQ ID NO: 451600 - RNA, 19 nt, Artificial Sequence
  Description of Artificial Sequence: Synthetic oligonucleotide
  Antisense Strand to SEQ ID NO: 451599
uacaaagccaaguauucug

SEQ ID NO: 451601 - RNA, 19 nt, Artificial Sequence
  Description of Artificial Sequence: Synthetic oligonucleotide
  Sense strand starting at position 907 of SEQ ID NO: 316936
aggcauaaguacucacgau

SEQ ID NO: 451602 - RNA, 19 nt, Artificial Sequence
  Description of Artificial Sequence: Synthetic oligonucleotide
  Antisense Strand to SEQ ID NO: 451601
aucgugaguacuuaugccu

SEQ ID NO: 451603 - RNA, 19 nt, Artificial Sequence
  Description of Artificial Sequence: Synthetic oligonucleotide
  Sense strand starting at position 908 of SEQ ID NO: 316936
ggcauaaguacucacgauu

SEQ ID NO: 451604 - RNA, 19 nt, Artificial Sequence
  Description of Artificial Sequence: Synthetic oligonucleotide
  Antisense Strand to SEQ ID NO: 451603
aaucgugaguacuuaugcc

SEQ ID NO: 451605 - RNA, 19 nt, Artificial Sequence
  Description of Artificial Sequence: Synthetic oligonucleotide
  Sense strand starting at position 914 of SEQ ID NO: 316936
aguacucacgauuaccuau

SEQ ID NO: 451606 - RNA, 19 nt, Artificial Sequence
  Description of Artificial Sequence: Synthetic oligonucleotide
  Antisense Strand to SEQ ID NO: 451605
auagguaaucgugaguacu

SEQ ID NO: 451607 - RNA, 19 nt, Artificial Sequence
  Description of Artificial Sequence: Synthetic oligonucleotide
  Sense strand starting at position 1374 of SEQ ID NO: 316936
cgaccuaugucuucugauc

SEQ ID NO: 451608 - RNA, 19 nt, Artificial Sequence
  Description of Artificial Sequence: Synthetic oligonucleotide
  Antisense Strand to SEQ ID NO: 451607
gaucagaagacauaggucg

SEQ ID NO: 451609 - RNA, 19 nt, Artificial Sequence
  Description of Artificial Sequence: Synthetic oligonucleotide
  Sense strand starting at position 1380 of SEQ ID NO: 316936
augucuucugaucacugua

SEQ ID NO: 451610 - RNA, 19 nt, Artificial Sequence
  Description of Artificial Sequence: Synthetic oligonucleotide
  Antisense Strand to SEQ ID NO: 451609
uacagugaucagaagacau

SEQ ID NO: 451611 - RNA, 19 nt, Artificial Sequence
  Description of Artificial Sequence: Synthetic oligonucleotide
  Sense strand starting at position 1511 of SEQ ID NO: 316936
gggugaagaguuuacuucu

SEQ ID NO: 451612 - RNA, 19 nt, Artificial Sequence
  Description of Artificial Sequence: Synthetic oligonucleotide
  Antisense Strand to SEQ ID NO: 451611
agaaguaaacucuucaccc

SEQ ID NO: 451613 - RNA, 19 nt, Artificial Sequence
  Description of Artificial Sequence: Synthetic oligonucleotide
  Sense strand starting at position 1514 of SEQ ID NO: 316936
ugaagaguuuacuucucca

SEQ ID NO: 451614 - RNA, 19 nt, Artificial Sequence
  Description of Artificial Sequence: Synthetic oligonucleotide
  Antisense Strand to SEQ ID NO: 451613
uggagaaguaaacucuuca

SEQ ID NO: 451615 - RNA, 19 nt, Artificial Sequence
  Description of Artificial Sequence: Synthetic oligonucleotide
  Sense strand starting at position 1518 of SEQ ID NO: 316936
gaguuuacuucuccauggu

SEQ ID NO: 451616 - RNA, 19 nt, Artificial Sequence
  Description of Artificial Sequence: Synthetic oligonucleotide
  Antisense Strand to SEQ ID NO: 451615
accauggagaaguaaacuc

SEQ ID NO: 451617 - RNA, 19 nt, Artificial Sequence
  Description of Artificial Sequence: Synthetic oligonucleotide
  Sense strand starting at position 2039 of SEQ ID NO: 316936
aauguugcucuuggagaua

SEQ ID NO: 451618 - RNA, 19 nt, Artificial Sequence
  Description of Artificial Sequence: Synthetic oligonucleotide
  Antisense Strand to SEQ ID NO: 451617
uaucuccaagagcaacauu

SEQ ID NO: 451619 - RNA, 19 nt, Artificial Sequence
  Description of Artificial Sequence: Synthetic oligonucleotide
  Sense strand starting at position 2054 of SEQ ID NO: 316936
gauagcuggcguuagggau

SEQ ID NO: 451620 - RNA, 19 nt, Artificial Sequence
  Description of Artificial Sequence: Synthetic oligonucleotide
  Antisense Strand to SEQ ID NO: 451619
aucccuaacgccagcuauc

SEQ ID NO: 451621 - RNA, 19 nt, Artificial Sequence
  Description of Artificial Sequence: Synthetic oligonucleotide
  Sense strand starting at position 2150 of SEQ ID NO: 316936
gaaugaaguugguucuuga

SEQ ID NO: 451622 - RNA, 19 nt, Artificial Sequence
  Description of Artificial Sequence: Synthetic oligonucleotide
  Antisense Strand to SEQ ID NO: 451621
ucaagaaccaacuucauuc

SEQ ID NO: 451623 - RNA, 19 nt, Artificial Sequence
  Description of Artificial Sequence: Synthetic oligonucleotide
  Sense strand starting at position 2153 of SEQ ID NO: 316936
ugaaguugguucuugaagu

SEQ ID NO: 451624 - RNA, 19 nt, Artificial Sequence
  Description of Artificial Sequence: Synthetic oligonucleotide
  Antisense Strand to SEQ ID NO: 451623
acuucaagaaccaacuuca

SEQ ID NO: 451625 - RNA, 19 nt, Artificial Sequence
  Description of Artificial Sequence: Synthetic oligonucleotide
  Sense strand starting at position 2298 of SEQ ID NO: 316936
gcgcuauguccaguagauc

SEQ ID NO: 451626 - RNA, 19 nt, Artificial Sequence
  Description of Artificial Sequence: Synthetic oligonucleotide
  Antisense Strand to SEQ ID NO: 451625
gaucuacuggacauagcgc

SEQ ID NO: 451627 - RNA, 19 nt, Artificial Sequence
  Description of Artificial Sequence: Synthetic oligonucleotide
  Sense strand starting at position 2299 of SEQ ID NO: 316936
cgcuauguccaguagaucu

SEQ ID NO: 451628 - RNA, 19 nt, Artificial Sequence
  Description of Artificial Sequence: Synthetic oligonucleotide
  Antisense Strand to SEQ ID NO: 451627
agaucuacuggacauagcg

SEQ ID NO: 451629 - RNA, 19 nt, Artificial Sequence
  Description of Artificial Sequence: Synthetic oligonucleotide
  Sense strand starting at position 2343 of SEQ ID NO: 316936
gacggaagcguuuaucuga

SEQ ID NO: 451630 - RNA, 19 nt, Artificial Sequence
  Description of Artificial Sequence: Synthetic oligonucleotide
  Antisense Strand to SEQ ID NO: 451629
ucagauaaacgcuuccguc

SEQ ID NO: 451631 - RNA, 19 nt, Artificial Sequence
  Description of Artificial Sequence: Synthetic oligonucleotide
  Sense strand starting at position 2700 of SEQ ID NO: 316936
uaaauuugguuggagucuu

SEQ ID NO: 451632 - RNA, 19 nt, Artificial Sequence
  Description of Artificial Sequence: Synthetic oligonucleotide
  Antisense Strand to SEQ ID NO: 451631
aagacuccaaccaaauuua

SEQ ID NO: 451633 - RNA, 19 nt, Artificial Sequence
  Description of Artificial Sequence: Synthetic oligonucleotide
  Sense strand starting at position 2734 of SEQ ID NO: 316936
cugagaccuuaccuugaua

SEQ ID NO: 451634 - RNA, 19 nt, Artificial Sequence
  Description of Artificial Sequence: Synthetic oligonucleotide
  Antisense Strand to SEQ ID NO: 451633
uaucaagguaaggucucag

SEQ ID NO: 451635 - RNA, 19 nt, Artificial Sequence
  Description of Artificial Sequence: Synthetic oligonucleotide
  Sense strand starting at position 2754 of SEQ ID NO: 316936
uugaucucguguuuagaag

SEQ ID NO: 451636 - RNA, 19 nt, Artificial Sequence
  Description of Artificial Sequence: Synthetic oligonucleotide
  Antisense Strand to SEQ ID NO: 451635
cuucuaaacacgagaucaa

SEQ ID NO: 451637 - RNA, 19 nt, Artificial Sequence
  Description of Artificial Sequence: Synthetic oligonucleotide
  Sense strand starting at position 2755 of SEQ ID NO: 316936
ugaucucguguuuagaaga

SEQ ID NO: 451638 - RNA, 19 nt, Artificial Sequence
  Description of Artificial Sequence: Synthetic oligonucleotide
  Antisense Strand to SEQ ID NO: 451637
ucuucuaaacacgagauca

SEQ ID NO: 451639 - RNA, 19 nt, Artificial Sequence
  Description of Artificial Sequence: Synthetic oligonucleotide
  Sense strand starting at position 2778 of SEQ ID NO: 316936
ggaacuugguaccuaucua

SEQ ID NO: 451640 - RNA, 19 nt, Artificial Sequence
  Description of Artificial Sequence: Synthetic oligonucleotide
  Antisense Strand to SEQ ID NO: 451639
uagauagguaccaaguucc

SEQ ID NO: 451641 - RNA, 19 nt, Artificial Sequence
  Description of Artificial Sequence: Synthetic oligonucleotide
  Sense strand starting at position 3229 of SEQ ID NO: 316936
gggccuauauaaguguauu

SEQ ID NO: 451642 - RNA, 19 nt, Artificial Sequence
  Description of Artificial Sequence: Synthetic oligonucleotide
  Antisense Strand to SEQ ID NO: 451641
aauacacuuauauaggccc

SEQ ID NO: 451643 - RNA, 19 nt, Artificial Sequence
  Description of Artificial Sequence: Synthetic oligonucleotide
  Sense strand starting at position 3282 of SEQ ID NO: 316936
guaugaaaccuuugcuuau

SEQ ID NO: 451644 - RNA, 19 nt, Artificial Sequence
  Description of Artificial Sequence: Synthetic oligonucleotide
  Antisense Strand to SEQ ID NO: 451643
auaagcaaagguuucauac

SEQ ID NO: 451645 - RNA, 19 nt, Artificial Sequence
  Description of Artificial Sequence: Synthetic oligonucleotide
  Sense strand starting at position 3305 of SEQ ID NO: 316936
ugcuguguauuugcucaau

SEQ ID NO: 451646 - RNA, 19 nt, Artificial Sequence
  Description of Artificial Sequence: Synthetic oligonucleotide
  Antisense Strand to SEQ ID NO: 451645
auugagcaaauacacagca

SEQ ID NO: 451647 - RNA, 19 nt, Artificial Sequence
  Description of Artificial Sequence: Synthetic oligonucleotide
  Sense strand starting at position 3307 of SEQ ID NO: 316936
cuguguauuugcucaauuc

SEQ ID NO: 451648 - RNA, 19 nt, Artificial Sequence
  Description of Artificial Sequence: Synthetic oligonucleotide
  Antisense Strand to SEQ ID NO: 451647
gaauugagcaaauacacag

SEQ ID NO: 451649 - RNA, 19 nt, Artificial Sequence
  Description of Artificial Sequence: Synthetic oligonucleotide
  Sense strand starting at position 3308 of SEQ ID NO: 316936
uguguauuugcucaauucu

SEQ ID NO: 451650 - RNA, 19 nt, Artificial Sequence
  Description of Artificial Sequence: Synthetic oligonucleotide
  Antisense Strand to SEQ ID NO: 451649
agaauugagcaaauacaca

SEQ ID NO: 451651 - RNA, 19 nt, Artificial Sequence
  Description of Artificial Sequence: Synthetic oligonucleotide
  Sense strand starting at position 3331 of SEQ ID NO: 316936
ugaacuugagauugucaca

SEQ ID NO: 451652 - RNA, 19 nt, Artificial Sequence
  Description of Artificial Sequence: Synthetic oligonucleotide
  Antisense Strand to SEQ ID NO: 451651
ugugacaaucucaaguuca

SEQ ID NO: 451653 - RNA, 19 nt, Artificial Sequence
  Description of Artificial Sequence: Synthetic oligonucleotide
  Sense strand starting at position 3419 of SEQ ID NO: 316936
uugcuugaacaagaaguuu

SEQ ID NO: 451654 - RNA, 19 nt, Artificial Sequence
  Description of Artificial Sequence: Synthetic oligonucleotide
  Antisense Strand to SEQ ID NO: 451653
aaacuucuuguucaagcaa

SEQ ID NO: 451655 - RNA, 19 nt, Artificial Sequence
  Description of Artificial Sequence: Synthetic oligonucleotide
  Sense strand starting at position 3914 of SEQ ID NO: 316936
ggugcucaggcugagaaga

SEQ ID NO: 451656 - RNA, 19 nt, Artificial Sequence
  Description of Artificial Sequence: Synthetic oligonucleotide
  Antisense Strand to SEQ ID NO: 451655
ucuucucagccugagcacc

SEQ ID NO: 451657 - RNA, 19 nt, Artificial Sequence
  Description of Artificial Sequence: Synthetic oligonucleotide
  Sense strand starting at position 3943 of SEQ ID NO: 316936
ggguuccucacguaguuau

SEQ ID NO: 451658 - RNA, 19 nt, Artificial Sequence
  Description of Artificial Sequence: Synthetic oligonucleotide
  Antisense Strand to SEQ ID NO: 451657
auaacuacgugaggaaccc

SEQ ID NO: 451659 - RNA, 19 nt, Artificial Sequence
  Description of Artificial Sequence: Synthetic oligonucleotide
  Sense strand starting at position 3946 of SEQ ID NO: 316936
uuccucacguaguuauaca

SEQ ID NO: 451660 - RNA, 19 nt, Artificial Sequence
  Description of Artificial Sequence: Synthetic oligonucleotide
  Antisense Strand to SEQ ID NO: 451659
uguauaacuacgugaggaa

SEQ ID NO: 451661 - RNA, 19 nt, Artificial Sequence
  Description of Artificial Sequence: Synthetic oligonucleotide
  Sense strand starting at position 3953 of SEQ ID NO: 316936
cguaguuauacaguugugu

SEQ ID NO: 451662 - RNA, 19 nt, Artificial Sequence
  Description of Artificial Sequence: Synthetic oligonucleotide
  Antisense Strand to SEQ ID NO: 451661
acacaacuguauaacuacg

SEQ ID NO: 451663 - RNA, 19 nt, Artificial Sequence
  Description of Artificial Sequence: Synthetic oligonucleotide
  Sense strand starting at position 85 of SEQ ID NO: 316937
cuacacugagauuggcaaa

SEQ ID NO: 451664 - RNA, 19 nt, Artificial Sequence
  Description of Artificial Sequence: Synthetic oligonucleotide
  Antisense Strand to SEQ ID NO: 451663
uuugccaaucucaguguag

SEQ ID NO: 451665 - RNA, 19 nt, Artificial Sequence
  Description of Artificial Sequence: Synthetic oligonucleotide
  Sense strand starting at position 200 of SEQ ID NO: 316937
auggguaucaggugacaac

SEQ ID NO: 451666 - RNA, 19 nt, Artificial Sequence
  Description of Artificial Sequence: Synthetic oligonucleotide
  Antisense Strand to SEQ ID NO: 451665
guugucaccugauacccau

SEQ ID NO: 451667 - RNA, 19 nt, Artificial Sequence
  Description of Artificial Sequence: Synthetic oligonucleotide
  Sense strand starting at position 201 of SEQ ID NO: 316937
uggguaucaggugacaacu

SEQ ID NO: 451668 - RNA, 19 nt, Artificial Sequence
  Description of Artificial Sequence: Synthetic oligonucleotide
  Antisense Strand to SEQ ID NO: 451667
aguugucaccugauaccca

SEQ ID NO: 451669 - RNA, 19 nt, Artificial Sequence
  Description of Artificial Sequence: Synthetic oligonucleotide
  Sense strand starting at position 699 of SEQ ID NO: 316937
gugcuuauucccuaugaaa

SEQ ID NO: 451670 - RNA, 19 nt, Artificial Sequence
  Description of Artificial Sequence: Synthetic oligonucleotide
  Antisense Strand to SEQ ID NO: 451669
uuucauagggaauaagcac

SEQ ID NO: 451671 - RNA, 19 nt, Artificial Sequence
  Description of Artificial Sequence: Synthetic oligonucleotide
  Sense strand starting at position 710 of SEQ ID NO: 316937
cuaugaaauccauguaugu

SEQ ID NO: 451672 - RNA, 19 nt, Artificial Sequence
  Description of Artificial Sequence: Synthetic oligonucleotide
  Antisense Strand to SEQ ID NO: 451671
acauacauggauuucauag

SEQ ID NO: 451673 - RNA, 19 nt, Artificial Sequence
  Description of Artificial Sequence: Synthetic oligonucleotide
  Sense strand starting at position 839 of SEQ ID NO: 316937
ucugaaguacugcaagaau

SEQ ID NO: 451674 - RNA, 19 nt, Artificial Sequence
  Description of Artificial Sequence: Synthetic oligonucleotide
  Antisense Strand to SEQ ID NO: 451673
auucuugcaguacuucaga

SEQ ID NO: 451675 - RNA, 19 nt, Artificial Sequence
  Description of Artificial Sequence: Synthetic oligonucleotide
  Sense strand starting at position 921 of SEQ ID NO: 316937
auuagaaauucugcaugca

SEQ ID NO: 451676 - RNA, 19 nt, Artificial Sequence
  Description of Artificial Sequence: Synthetic oligonucleotide
  Antisense Strand to SEQ ID NO: 451675
ugcaugcagaauuucuaau

SEQ ID NO: 451677 - RNA, 19 nt, Artificial Sequence
  Description of Artificial Sequence: Synthetic oligonucleotide
  Sense strand starting at position 922 of SEQ ID NO: 316937
uuagaaauucugcaugcag

SEQ ID NO: 451678 - RNA, 19 nt, Artificial Sequence
  Description of Artificial Sequence: Synthetic oligonucleotide
  Antisense Strand to SEQ ID NO: 451677
cugcaugcagaauuucuaa

SEQ ID NO: 451679 - RNA, 19 nt, Artificial Sequence
  Description of Artificial Sequence: Synthetic oligonucleotide
  Sense strand starting at position 1042 of SEQ ID NO: 316937
cugaauacuucuuucugga

SEQ ID NO: 451680 - RNA, 19 nt, Artificial Sequence
  Description of Artificial Sequence: Synthetic oligonucleotide
  Antisense Strand to SEQ ID NO: 451679
uccagaaagaaguauucag

SEQ ID NO: 451681 - RNA, 19 nt, Artificial Sequence
  Description of Artificial Sequence: Synthetic oligonucleotide
  Sense strand starting at position 1129 of SEQ ID NO: 316937
auuagaaacuugccauaug

SEQ ID NO: 451682 - RNA, 19 nt, Artificial Sequence
  Description of Artificial Sequence: Synthetic oligonucleotide
  Antisense Strand to SEQ ID NO: 451681
cauauggcaaguuucuaau

SEQ ID NO: 451683 - RNA, 19 nt, Artificial Sequence
  Description of Artificial Sequence: Synthetic oligonucleotide
  Sense strand starting at position 1132 of SEQ ID NO: 316937
agaaacuugccauauguuu

SEQ ID NO: 451684 - RNA, 19 nt, Artificial Sequence
  Description of Artificial Sequence: Synthetic oligonucleotide
  Antisense Strand to SEQ ID NO: 451683
aaacauauggcaaguuucu

SEQ ID NO: 451685 - RNA, 19 nt, Artificial Sequence
  Description of Artificial Sequence: Synthetic oligonucleotide
  Sense strand starting at position 1416 of SEQ ID NO: 316937
ccauacuagcgcuaaauaa

SEQ ID NO: 451686 - RNA, 19 nt, Artificial Sequence
  Description of Artificial Sequence: Synthetic oligonucleotide
  Antisense Strand to SEQ ID NO: 451685
uuauuuagcgcuaguaugg

SEQ ID NO: 451687 - RNA, 19 nt, Artificial Sequence
  Description of Artificial Sequence: Synthetic oligonucleotide
  Sense strand starting at position 1486 of SEQ ID NO: 316937
cuauuaguaagaugaccga

SEQ ID NO: 451688 - RNA, 19 nt, Artificial Sequence
  Description of Artificial Sequence: Synthetic oligonucleotide
  Antisense Strand to SEQ ID NO: 451687
ucggucaucuuacuaauag

SEQ ID NO: 451689 - RNA, 19 nt, Artificial Sequence
  Description of Artificial Sequence: Synthetic oligonucleotide
  Sense strand starting at position 1615 of SEQ ID NO: 316937
gauagaaagucuguuugug

SEQ ID NO: 451690 - RNA, 19 nt, Artificial Sequence
  Description of Artificial Sequence: Synthetic oligonucleotide
  Antisense Strand to SEQ ID NO: 451689
cacaaacagacuuucuauc

SEQ ID NO: 451691 - RNA, 19 nt, Artificial Sequence
  Description of Artificial Sequence: Synthetic oligonucleotide
  Sense strand starting at position 1748 of SEQ ID NO: 316937
acaguuaggugggcagaaa

SEQ ID NO: 451692 - RNA, 19 nt, Artificial Sequence
  Description of Artificial Sequence: Synthetic oligonucleotide
  Antisense Strand to SEQ ID NO: 451691
uuucugcccaccuaacugu

SEQ ID NO: 451693 - RNA, 19 nt, Artificial Sequence
  Description of Artificial Sequence: Synthetic oligonucleotide
  Sense strand starting at position 1749 of SEQ ID NO: 316937
caguuaggugggcagaaau

SEQ ID NO: 451694 - RNA, 19 nt, Artificial Sequence
  Description of Artificial Sequence: Synthetic oligonucleotide
  Antisense Strand to SEQ ID NO: 451693
auuucugcccaccuaacug

SEQ ID NO: 451695 - RNA, 19 nt, Artificial Sequence
  Description of Artificial Sequence: Synthetic oligonucleotide
  Sense strand starting at position 1759 of SEQ ID NO: 316937
ggcagaaauguaugaaaca

SEQ ID NO: 451696 - RNA, 19 nt, Artificial Sequence
  Description of Artificial Sequence: Synthetic oligonucleotide
  Antisense Strand to SEQ ID NO: 451695
uguuucauacauuucugcc

SEQ ID NO: 451697 - RNA, 19 nt, Artificial Sequence
  Description of Artificial Sequence: Synthetic oligonucleotide
  Sense strand starting at position 2193 of SEQ ID NO: 316937
gggaguuggagagguuugu

SEQ ID NO: 451698 - RNA, 19 nt, Artificial Sequence
  Description of Artificial Sequence: Synthetic oligonucleotide
  Antisense Strand to SEQ ID NO: 451697
acaaaccucuccaacuccc

SEQ ID NO: 451699 - RNA, 19 nt, Artificial Sequence
  Description of Artificial Sequence: Synthetic oligonucleotide
  Sense strand starting at position 2212 of SEQ ID NO: 316937
ggcugugagcguguguaua

SEQ ID NO: 451700 - RNA, 19 nt, Artificial Sequence
  Description of Artificial Sequence: Synthetic oligonucleotide
  Antisense Strand to SEQ ID NO: 451699
uauacacacgcucacagcc

SEQ ID NO: 451701 - RNA, 19 nt, Artificial Sequence
  Description of Artificial Sequence: Synthetic oligonucleotide
  Sense strand starting at position 2395 of SEQ ID NO: 316937
agcaauuugugcguuaaug

SEQ ID NO: 451702 - RNA, 19 nt, Artificial Sequence
  Description of Artificial Sequence: Synthetic oligonucleotide
  Antisense Strand to SEQ ID NO: 451701
cauuaacgcacaaauugcu

SEQ ID NO: 451703 - RNA, 19 nt, Artificial Sequence
  Description of Artificial Sequence: Synthetic oligonucleotide
  Sense strand starting at position 2397 of SEQ ID NO: 316937
caauuugugcguuaaugca

SEQ ID NO: 451704 - RNA, 19 nt, Artificial Sequence
  Description of Artificial Sequence: Synthetic oligonucleotide
  Antisense Strand to SEQ ID NO: 451703
ugcauuaacgcacaaauug

SEQ ID NO: 451705 - RNA, 19 nt, Artificial Sequence
  Description of Artificial Sequence: Synthetic oligonucleotide
  Sense strand starting at position 2439 of SEQ ID NO: 316937
ccguaaugccaggcucagu

SEQ ID NO: 451706 - RNA, 19 nt, Artificial Sequence
  Description of Artificial Sequence: Synthetic oligonucleotide
  Antisense Strand to SEQ ID NO: 451705
acugagccuggcauuacgg

SEQ ID NO: 451707 - RNA, 19 nt, Artificial Sequence
  Description of Artificial Sequence: Synthetic oligonucleotide
  Sense strand starting at position 2471 of SEQ ID NO: 316937
guaguuacugcagagauca

SEQ ID NO: 451708 - RNA, 19 nt, Artificial Sequence
  Description of Artificial Sequence: Synthetic oligonucleotide
  Antisense Strand to SEQ ID NO: 451707
ugaucucugcaguaacuac

SEQ ID NO: 451709 - RNA, 19 nt, Artificial Sequence
  Description of Artificial Sequence: Synthetic oligonucleotide
  Sense strand starting at position 2493 of SEQ ID NO: 316937
caguuauggcccgcauguu

SEQ ID NO: 451710 - RNA, 19 nt, Artificial Sequence
  Description of Artificial Sequence: Synthetic oligonucleotide
  Antisense Strand to SEQ ID NO: 451709
aacaugcgggccauaacug

SEQ ID NO: 451711 - RNA, 19 nt, Artificial Sequence
  Description of Artificial Sequence: Synthetic oligonucleotide
  Sense strand starting at position 2590 of SEQ ID NO: 316937
uauguuuaagcagagguaa

SEQ ID NO: 451712 - RNA, 19 nt, Artificial Sequence
  Description of Artificial Sequence: Synthetic oligonucleotide
  Antisense Strand to SEQ ID NO: 451711
uuaccucugcuuaaacaua

SEQ ID NO: 451713 - RNA, 19 nt, Artificial Sequence
  Description of Artificial Sequence: Synthetic oligonucleotide
  Sense strand starting at position 2663 of SEQ ID NO: 316937
auuauuggccaguaucaga

SEQ ID NO: 451714 - RNA, 19 nt, Artificial Sequence
  Description of Artificial Sequence: Synthetic oligonucleotide
  Antisense Strand to SEQ ID NO: 451713
ucugauacuggccaauaau

SEQ ID NO: 451715 - RNA, 19 nt, Artificial Sequence
  Description of Artificial Sequence: Synthetic oligonucleotide
  Sense strand starting at position 2778 of SEQ ID NO: 316937
ccgauuucuuguguuugaa

SEQ ID NO: 451716 - RNA, 19 nt, Artificial Sequence
  Description of Artificial Sequence: Synthetic oligonucleotide
  Antisense Strand to SEQ ID NO: 451715
uucaaacacaagaaaucgg

SEQ ID NO: 451717 - RNA, 19 nt, Artificial Sequence
  Description of Artificial Sequence: Synthetic oligonucleotide
  Sense strand starting at position 2787 of SEQ ID NO: 316937
uguguuugaacacagucua

SEQ ID NO: 451718 - RNA, 19 nt, Artificial Sequence
  Description of Artificial Sequence: Synthetic oligonucleotide
  Antisense Strand to SEQ ID NO: 451717
uagacuguguucaaacaca

SEQ ID NO: 451719 - RNA, 19 nt, Artificial Sequence
  Description of Artificial Sequence: Synthetic oligonucleotide
  Sense strand starting at position 2977 of SEQ ID NO: 316937
gagaaugcauuugacaaag

SEQ ID NO: 451720 - RNA, 19 nt, Artificial Sequence
  Description of Artificial Sequence: Synthetic oligonucleotide
  Antisense Strand to SEQ ID NO: 451719
cuuugucaaaugcauucuc

SEQ ID NO: 451721 - RNA, 19 nt, Artificial Sequence
  Description of Artificial Sequence: Synthetic oligonucleotide
  Sense strand starting at position 2979 of SEQ ID NO: 316937
gaaugcauuugacaaagga

SEQ ID NO: 451722 - RNA, 19 nt, Artificial Sequence
  Description of Artificial Sequence: Synthetic oligonucleotide
  Antisense Strand to SEQ ID NO: 451721
uccuuugucaaaugcauuc

SEQ ID NO: 451723 - RNA, 19 nt, Artificial Sequence
  Description of Artificial Sequence: Synthetic oligonucleotide
  Sense strand starting at position 3074 of SEQ ID NO: 316937
aauggaucuguuugagaua

SEQ ID NO: 451724 - RNA, 19 nt, Artificial Sequence
  Description of Artificial Sequence: Synthetic oligonucleotide
  Antisense Strand to SEQ ID NO: 451723
uaucucaaacagauccauu

SEQ ID NO: 451725 - RNA, 19 nt, Artificial Sequence
  Description of Artificial Sequence: Synthetic oligonucleotide
  Sense strand starting at position 3193 of SEQ ID NO: 316937
ugaugaaguuauccaccga

SEQ ID NO: 451726 - RNA, 19 nt, Artificial Sequence
  Description of Artificial Sequence: Synthetic oligonucleotide
  Antisense Strand to SEQ ID NO: 451725
ucgguggauaacuucauca

SEQ ID NO: 451727 - RNA, 19 nt, Artificial Sequence
  Description of Artificial Sequence: Synthetic oligonucleotide
  Sense strand starting at position 3197 of SEQ ID NO: 316937
gaaguuauccaccgagaua

SEQ ID NO: 451728 - RNA, 19 nt, Artificial Sequence
  Description of Artificial Sequence: Synthetic oligonucleotide
  Antisense Strand to SEQ ID NO: 451727
uaucucgguggauaacuuc

SEQ ID NO: 451729 - RNA, 19 nt, Artificial Sequence
  Description of Artificial Sequence: Synthetic oligonucleotide
  Sense strand starting at position 3302 of SEQ ID NO: 316937
aucagugaugccuaauucu

SEQ ID NO: 451730 - RNA, 19 nt, Artificial Sequence
  Description of Artificial Sequence: Synthetic oligonucleotide
  Antisense Strand to SEQ ID NO: 451729
agaauuaggcaucacugau

SEQ ID NO: 451731 - RNA, 19 nt, Artificial Sequence
  Description of Artificial Sequence: Synthetic oligonucleotide
  Sense strand starting at position 3311 of SEQ ID NO: 316937
gccuaauucugaguauaga

SEQ ID NO: 451732 - RNA, 19 nt, Artificial Sequence
  Description of Artificial Sequence: Synthetic oligonucleotide
  Antisense Strand to SEQ ID NO: 451731
ucuauacucagaauuaggc

SEQ ID NO: 451733 - RNA, 19 nt, Artificial Sequence
  Description of Artificial Sequence: Synthetic oligonucleotide
  Sense strand starting at position 3630 of SEQ ID NO: 316937
gguggagacuuguuccaaa

SEQ ID NO: 451734 - RNA, 19 nt, Artificial Sequence
  Description of Artificial Sequence: Synthetic oligonucleotide
  Antisense Strand to SEQ ID NO: 451733
uuuggaacaagucuccacc

SEQ ID NO: 451735 - RNA, 19 nt, Artificial Sequence
  Description of Artificial Sequence: Synthetic oligonucleotide
  Sense strand starting at position 3682 of SEQ ID NO: 316937
ucagaugauucucuagauc

SEQ ID NO: 451736 - RNA, 19 nt, Artificial Sequence
  Description of Artificial Sequence: Synthetic oligonucleotide
  Antisense Strand to SEQ ID NO: 451735
gaucuagagaaucaucuga

SEQ ID NO: 451737 - RNA, 19 nt, Artificial Sequence
  Description of Artificial Sequence: Synthetic oligonucleotide
  Sense strand starting at position 3694 of SEQ ID NO: 316937
cuagauccuuuacuagagu

SEQ ID NO: 451738 - RNA, 19 nt, Artificial Sequence
  Description of Artificial Sequence: Synthetic oligonucleotide
  Antisense Strand to SEQ ID NO: 451737
acucuaguaaaggaucuag

SEQ ID NO: 451739 - RNA, 19 nt, Artificial Sequence
  Description of Artificial Sequence: Synthetic oligonucleotide
  Sense strand starting at position 3705 of SEQ ID NO: 316937
acuagagucuucccucuga

SEQ ID NO: 451740 - RNA, 19 nt, Artificial Sequence
  Description of Artificial Sequence: Synthetic oligonucleotide
  Antisense Strand to SEQ ID NO: 451739
ucagagggaagacucuagu

SEQ ID NO: 451741 - RNA, 19 nt, Artificial Sequence
  Description of Artificial Sequence: Synthetic oligonucleotide
  Sense strand starting at position 3772 of SEQ ID NO: 316937
uuauuuagcuccucagguu

SEQ ID NO: 451742 - RNA, 19 nt, Artificial Sequence
  Description of Artificial Sequence: Synthetic oligonucleotide
  Antisense Strand to SEQ ID NO: 451741
aaccugaggagcuaaauaa

SEQ ID NO: 451743 - RNA, 19 nt, Artificial Sequence
  Description of Artificial Sequence: Synthetic oligonucleotide
  Sense strand starting at position 224 of SEQ ID NO: 316938
agaugucuucuacauggca

SEQ ID NO: 451744 - RNA, 19 nt, Artificial Sequence
  Description of Artificial Sequence: Synthetic oligonucleotide
  Antisense Strand to SEQ ID NO: 451743
ugccauguagaagacaucu

SEQ ID NO: 451745 - RNA, 19 nt, Artificial Sequence
  Description of Artificial Sequence: Synthetic oligonucleotide
  Sense strand starting at position 246 of SEQ ID NO: 316938
aucacaacuguguaguaaa

SEQ ID NO: 451746 - RNA, 19 nt, Artificial Sequence
  Description of Artificial Sequence: Synthetic oligonucleotide
  Antisense Strand to SEQ ID NO: 451745
uuuacuacacaguugugau

SEQ ID NO: 451747 - RNA, 19 nt, Artificial Sequence
  Description of Artificial Sequence: Synthetic oligonucleotide
  Sense strand starting at position 329 of SEQ ID NO: 316938
uggguuguaccaggaucaa

SEQ ID NO: 451748 - RNA, 19 nt, Artificial Sequence
  Description of Artificial Sequence: Synthetic oligonucleotide
  Antisense Strand to SEQ ID NO: 451747
uugauccugguacaaccca

SEQ ID NO: 451749 - RNA, 19 nt, Artificial Sequence
  Description of Artificial Sequence: Synthetic oligonucleotide
  Sense strand starting at position 412 of SEQ ID NO: 316938
uuaaguuuagacggaauga

SEQ ID NO: 451750 - RNA, 19 nt, Artificial Sequence
  Description of Artificial Sequence: Synthetic oligonucleotide
  Antisense Strand to SEQ ID NO: 451749
ucauuccgucuaaacuuaa

SEQ ID NO: 451751 - RNA, 19 nt, Artificial Sequence
  Description of Artificial Sequence: Synthetic oligonucleotide
  Sense strand starting at position 547 of SEQ ID NO: 316938
uugauugauugacuuguuu

SEQ ID NO: 451752 - RNA, 19 nt, Artificial Sequence
  Description of Artificial Sequence: Synthetic oligonucleotide
  Antisense Strand to SEQ ID NO: 451751
aaacaagucaaucaaucaa

SEQ ID NO: 451753 - RNA, 19 nt, Artificial Sequence
  Description of Artificial Sequence: Synthetic oligonucleotide
  Sense strand starting at position 889 of SEQ ID NO: 316938
gucauauuggauugcauau

SEQ ID NO: 451754 - RNA, 19 nt, Artificial Sequence
  Description of Artificial Sequence: Synthetic oligonucleotide
  Antisense Strand to SEQ ID NO: 451753
auaugcaauccaauaugac

SEQ ID NO: 451755 - RNA, 19 nt, Artificial Sequence
  Description of Artificial Sequence: Synthetic oligonucleotide
  Sense strand starting at position 910 of SEQ ID NO: 316938
gcccuacuccaguaugauc

SEQ ID NO: 451756 - RNA, 19 nt, Artificial Sequence
  Description of Artificial Sequence: Synthetic oligonucleotide
  Antisense Strand to SEQ ID NO: 451755
gaucauacuggaguagggc

SEQ ID NO: 451757 - RNA, 19 nt, Artificial Sequence
  Description of Artificial Sequence: Synthetic oligonucleotide
  Sense strand starting at position 971 of SEQ ID NO: 316938
ggcuucuagaaccguaaga

SEQ ID NO: 451758 - RNA, 19 nt, Artificial Sequence
  Description of Artificial Sequence: Synthetic oligonucleotide
  Antisense Strand to SEQ ID NO: 451757
ucuuacgguucuagaagcc

SEQ ID NO: 451759 - RNA, 19 nt, Artificial Sequence
  Description of Artificial Sequence: Synthetic oligonucleotide
  Sense strand starting at position 1310 of SEQ ID NO: 316938
cugggugcucuuuaccauu

SEQ ID NO: 451760 - RNA, 19 nt, Artificial Sequence
  Description of Artificial Sequence: Synthetic oligonucleotide
  Antisense Strand to SEQ ID NO: 451759
aaugguaaagagcacccag

SEQ ID NO: 451761 - RNA, 19 nt, Artificial Sequence
  Description of Artificial Sequence: Synthetic oligonucleotide
  Sense strand starting at position 1385 of SEQ ID NO: 316938
uuggcuuggcgcucacuaa

SEQ ID NO: 451762 - RNA, 19 nt, Artificial Sequence
  Description of Artificial Sequence: Synthetic oligonucleotide
  Antisense Strand to SEQ ID NO: 451761
uuagugagcgccaagccaa

SEQ ID NO: 451763 - RNA, 19 nt, Artificial Sequence
  Description of Artificial Sequence: Synthetic oligonucleotide
  Sense strand starting at position 1389 of SEQ ID NO: 316938
cuuggcgcucacuaagaau

SEQ ID NO: 451764 - RNA, 19 nt, Artificial Sequence
  Description of Artificial Sequence: Synthetic oligonucleotide
  Antisense Strand to SEQ ID NO: 451763
auucuuagugagcgccaag

SEQ ID NO: 451765 - RNA, 19 nt, Artificial Sequence
  Description of Artificial Sequence: Synthetic oligonucleotide
  Sense strand starting at position 1486 of SEQ ID NO: 316938
augauucuccuuuguagag

SEQ ID NO: 451766 - RNA, 19 nt, Artificial Sequence
  Description of Artificial Sequence: Synthetic oligonucleotide
  Antisense Strand to SEQ ID NO: 451765
cucuacaaaggagaaucau

SEQ ID NO: 451767 - RNA, 19 nt, Artificial Sequence
  Description of Artificial Sequence: Synthetic oligonucleotide
  Sense strand starting at position 1574 of SEQ ID NO: 316938
cugaguuuggacugacuga

SEQ ID NO: 451768 - RNA, 19 nt, Artificial Sequence
  Description of Artificial Sequence: Synthetic oligonucleotide
  Antisense Strand to SEQ ID NO: 451767
ucagucaguccaaacucag

SEQ ID NO: 451769 - RNA, 19 nt, Artificial Sequence
  Description of Artificial Sequence: Synthetic oligonucleotide
  Sense strand starting at position 1636 of SEQ ID NO: 316938
cuuccuugugccuaaagag

SEQ ID NO: 451770 - RNA, 19 nt, Artificial Sequence
  Description of Artificial Sequence: Synthetic oligonucleotide
  Antisense Strand to SEQ ID NO: 451769
cucuuuaggcacaaggaag

SEQ ID NO: 451771 - RNA, 19 nt, Artificial Sequence
  Description of Artificial Sequence: Synthetic oligonucleotide
  Sense strand starting at position 1762 of SEQ ID NO: 316938
ccaccaucuuccucaggua

SEQ ID NO: 451772 - RNA, 19 nt, Artificial Sequence
  Description of Artificial Sequence: Synthetic oligonucleotide
  Antisense Strand to SEQ ID NO: 451771
uaccugaggaagauggugg

SEQ ID NO: 451773 - RNA, 19 nt, Artificial Sequence
  Description of Artificial Sequence: Synthetic oligonucleotide
  Sense strand starting at position 1992 of SEQ ID NO: 316938
gcucucacccuagaaugaa

SEQ ID NO: 451774 - RNA, 19 nt, Artificial Sequence
  Description of Artificial Sequence: Synthetic oligonucleotide
  Antisense Strand to SEQ ID NO: 451773
uucauucuagggugagagc

SEQ ID NO: 451775 - RNA, 19 nt, Artificial Sequence
  Description of Artificial Sequence: Synthetic oligonucleotide
  Sense strand starting at position 2070 of SEQ ID NO: 316938
ugccacagccuugauaaga

SEQ ID NO: 451776 - RNA, 19 nt, Artificial Sequence
  Description of Artificial Sequence: Synthetic oligonucleotide
  Antisense Strand to SEQ ID NO: 451775
ucuuaucaaggcuguggca

SEQ ID NO: 451777 - RNA, 19 nt, Artificial Sequence
  Description of Artificial Sequence: Synthetic oligonucleotide
  Sense strand starting at position 2091 of SEQ ID NO: 316938
ccaagauacuuuguacaag

SEQ ID NO: 451778 - RNA, 19 nt, Artificial Sequence
  Description of Artificial Sequence: Synthetic oligonucleotide
  Antisense Strand to SEQ ID NO: 451777
cuuguacaaaguaucuugg

SEQ ID NO: 451779 - RNA, 19 nt, Artificial Sequence
  Description of Artificial Sequence: Synthetic oligonucleotide
  Sense strand starting at position 2171 of SEQ ID NO: 316938
ggugcuaagucccugauuu

SEQ ID NO: 451780 - RNA, 19 nt, Artificial Sequence
  Description of Artificial Sequence: Synthetic oligonucleotide
  Antisense Strand to SEQ ID NO: 451779
aaaucagggacuuagcacc

SEQ ID NO: 451781 - RNA, 19 nt, Artificial Sequence
  Description of Artificial Sequence: Synthetic oligonucleotide
  Sense strand starting at position 2172 of SEQ ID NO: 316938
gugcuaagucccugauuug

SEQ ID NO: 451782 - RNA, 19 nt, Artificial Sequence
  Description of Artificial Sequence: Synthetic oligonucleotide
  Antisense Strand to SEQ ID NO: 451781
caaaucagggacuuagcac

SEQ ID NO: 451783 - RNA, 19 nt, Artificial Sequence
  Description of Artificial Sequence: Synthetic oligonucleotide
  Sense strand starting at position 2306 of SEQ ID NO: 316938
ccguacucuguagagguaa

SEQ ID NO: 451784 - RNA, 19 nt, Artificial Sequence
  Description of Artificial Sequence: Synthetic oligonucleotide
  Antisense Strand to SEQ ID NO: 451783
uuaccucuacagaguacgg

SEQ ID NO: 451785 - RNA, 19 nt, Artificial Sequence
  Description of Artificial Sequence: Synthetic oligonucleotide
  Sense strand starting at position 2354 of SEQ ID NO: 316938
aucccauauuguguaaaua

SEQ ID NO: 451786 - RNA, 19 nt, Artificial Sequence
  Description of Artificial Sequence: Synthetic oligonucleotide
  Antisense Strand to SEQ ID NO: 451785
uauuuacacaauaugggau

SEQ ID NO: 451787 - RNA, 19 nt, Artificial Sequence
  Description of Artificial Sequence: Synthetic oligonucleotide
  Sense strand starting at position 2355 of SEQ ID NO: 316938
ucccauauuguguaaauaa

SEQ ID NO: 451788 - RNA, 19 nt, Artificial Sequence
  Description of Artificial Sequence: Synthetic oligonucleotide
  Antisense Strand to SEQ ID NO: 451787
uuauuuacacaauauggga

SEQ ID NO: 451789 - RNA, 19 nt, Artificial Sequence
  Description of Artificial Sequence: Synthetic oligonucleotide
  Sense strand starting at position 2412 of SEQ ID NO: 316938
uauugacuucuggguauag

SEQ ID NO: 451790 - RNA, 19 nt, Artificial Sequence
  Description of Artificial Sequence: Synthetic oligonucleotide
  Antisense Strand to SEQ ID NO: 451789
cuauacccagaagucaaua

SEQ ID NO: 451791 - RNA, 19 nt, Artificial Sequence
  Description of Artificial Sequence: Synthetic oligonucleotide
  Sense strand starting at position 2491 of SEQ ID NO: 316938
ccaucuggccaacaugaua

SEQ ID NO: 451792 - RNA, 19 nt, Artificial Sequence
  Description of Artificial Sequence: Synthetic oligonucleotide
  Antisense Strand to SEQ ID NO: 451791
uaucauguuggccagaugg

SEQ ID NO: 451793 - RNA, 19 nt, Artificial Sequence
  Description of Artificial Sequence: Synthetic oligonucleotide
  Sense strand starting at position 2708 of SEQ ID NO: 316938
agaauacaucucugaguug

SEQ ID NO: 451794 - RNA, 19 nt, Artificial Sequence
  Description of Artificial Sequence: Synthetic oligonucleotide
  Antisense Strand to SEQ ID NO: 451793
caacucagagauguauucu

SEQ ID NO: 451795 - RNA, 19 nt, Artificial Sequence
  Description of Artificial Sequence: Synthetic oligonucleotide
  Sense strand starting at position 2945 of SEQ ID NO: 316938
uggaauugucuuuagucua

SEQ ID NO: 451796 - RNA, 19 nt, Artificial Sequence
  Description of Artificial Sequence: Synthetic oligonucleotide
  Antisense Strand to SEQ ID NO: 451795
uagacuaaagacaauucca

SEQ ID NO: 451797 - RNA, 19 nt, Artificial Sequence
  Description of Artificial Sequence: Synthetic oligonucleotide
  Sense strand starting at position 2950 of SEQ ID NO: 316938
uugucuuuagucuaacauu

SEQ ID NO: 451798 - RNA, 19 nt, Artificial Sequence
  Description of Artificial Sequence: Synthetic oligonucleotide
  Antisense Strand to SEQ ID NO: 451797
aauguuagacuaaagacaa

SEQ ID NO: 451799 - RNA, 19 nt, Artificial Sequence
  Description of Artificial Sequence: Synthetic oligonucleotide
  Sense strand starting at position 3225 of SEQ ID NO: 316938
ggguauggguuuccacaga

SEQ ID NO: 451800 - RNA, 19 nt, Artificial Sequence
  Description of Artificial Sequence: Synthetic oligonucleotide
  Antisense Strand to SEQ ID NO: 451799
ucuguggaaacccauaccc

SEQ ID NO: 451801 - RNA, 19 nt, Artificial Sequence
  Description of Artificial Sequence: Synthetic oligonucleotide
  Sense strand starting at position 3230 of SEQ ID NO: 316938
uggguuuccacagaaaugu

SEQ ID NO: 451802 - RNA, 19 nt, Artificial Sequence
  Description of Artificial Sequence: Synthetic oligonucleotide
  Antisense Strand to SEQ ID NO: 451801
acauuucuguggaaaccca

SEQ ID NO: 451803 - RNA, 19 nt, Artificial Sequence
  Description of Artificial Sequence: Synthetic oligonucleotide
  Sense strand starting at position 3308 of SEQ ID NO: 316938
gaagcuucuguguaaaucu

SEQ ID NO: 451804 - RNA, 19 nt, Artificial Sequence
  Description of Artificial Sequence: Synthetic oligonucleotide
  Antisense Strand to SEQ ID NO: 451803
agauuuacacagaagcuuc

SEQ ID NO: 451805 - RNA, 19 nt, Artificial Sequence
  Description of Artificial Sequence: Synthetic oligonucleotide
  Sense strand starting at position 3663 of SEQ ID NO: 316938
guauguauaaccgaaguga

SEQ ID NO: 451806 - RNA, 19 nt, Artificial Sequence
  Description of Artificial Sequence: Synthetic oligonucleotide
  Antisense Strand to SEQ ID NO: 451805
ucacuucgguuauacauac

SEQ ID NO: 451807 - RNA, 19 nt, Artificial Sequence
  Description of Artificial Sequence: Synthetic oligonucleotide
  Sense strand starting at position 3720 of SEQ ID NO: 316938
aucauucuacauuguguaa

SEQ ID NO: 451808 - RNA, 19 nt, Artificial Sequence
  Description of Artificial Sequence: Synthetic oligonucleotide
  Antisense Strand to SEQ ID NO: 451807
uuacacaauguagaaugau

SEQ ID NO: 451809 - RNA, 19 nt, Artificial Sequence
  Description of Artificial Sequence: Synthetic oligonucleotide
  Sense strand starting at position 3723 of SEQ ID NO: 316938
auucuacauuguguaauga

SEQ ID NO: 451810 - RNA, 19 nt, Artificial Sequence
  Description of Artificial Sequence: Synthetic oligonucleotide
  Antisense Strand to SEQ ID NO: 451809
ucauuacacaauguagaau

SEQ ID NO: 451811 - RNA, 19 nt, Artificial Sequence
  Description of Artificial Sequence: Synthetic oligonucleotide
  Sense strand starting at position 3763 of SEQ ID NO: 316938
aagguauaaguagguugaa

SEQ ID NO: 451812 - RNA, 19 nt, Artificial Sequence
  Description of Artificial Sequence: Synthetic oligonucleotide
  Antisense Strand to SEQ ID NO: 451811
uucaaccuacuuauaccuu

SEQ ID NO: 451813 - RNA, 19 nt, Artificial Sequence
  Description of Artificial Sequence: Synthetic oligonucleotide
  Sense strand starting at position 3764 of SEQ ID NO: 316938
agguauaaguagguugaaa

SEQ ID NO: 451814 - RNA, 19 nt, Artificial Sequence
  Description of Artificial Sequence: Synthetic oligonucleotide
  Antisense Strand to SEQ ID NO: 451813
uuucaaccuacuuauaccu

SEQ ID NO: 451815 - RNA, 19 nt, Artificial Sequence
  Description of Artificial Sequence: Synthetic oligonucleotide
  Sense strand starting at position 3862 of SEQ ID NO: 316938
aagguacauguuuggugaa

SEQ ID NO: 451816 - RNA, 19 nt, Artificial Sequence
  Description of Artificial Sequence: Synthetic oligonucleotide
  Antisense Strand to SEQ ID NO: 451815
uucaccaaacauguaccuu

SEQ ID NO: 451817 - RNA, 19 nt, Artificial Sequence
  Description of Artificial Sequence: Synthetic oligonucleotide
  Sense strand starting at position 3864 of SEQ ID NO: 316938
gguacauguuuggugaaau

SEQ ID NO: 451818 - RNA, 19 nt, Artificial Sequence
  Description of Artificial Sequence: Synthetic oligonucleotide
  Antisense Strand to SEQ ID NO: 451817
auuucaccaaacauguacc

SEQ ID NO: 451819 - RNA, 19 nt, Artificial Sequence
  Description of Artificial Sequence: Synthetic oligonucleotide
  Sense strand starting at position 3886 of SEQ ID NO: 316938
cuaacaaaugcauggcaaa

SEQ ID NO: 451820 - RNA, 19 nt, Artificial Sequence
  Description of Artificial Sequence: Synthetic oligonucleotide
  Antisense Strand to SEQ ID NO: 451819
uuugccaugcauuuguuag

SEQ ID NO: 451821 - RNA, 19 nt, Artificial Sequence
  Description of Artificial Sequence: Synthetic oligonucleotide
  Sense strand starting at position 3942 of SEQ ID NO: 316938
gcaauuguaaauugagaga

SEQ ID NO: 451822 - RNA, 19 nt, Artificial Sequence
  Description of Artificial Sequence: Synthetic oligonucleotide
  Antisense Strand to SEQ ID NO: 451821
ucucucaauuuacaauugc

SEQ ID NO: 451823 - RNA, 19 nt, Artificial Sequence
  Description of Artificial Sequence: Synthetic oligonucleotide
  Sense strand starting at position 161 of SEQ ID NO: 316939
auaaauuucgguugcuuaa

SEQ ID NO: 451824 - RNA, 19 nt, Artificial Sequence
  Description of Artificial Sequence: Synthetic oligonucleotide
  Antisense Strand to SEQ ID NO: 451823
uuaagcaaccgaaauuuau

SEQ ID NO: 451825 - RNA, 19 nt, Artificial Sequence
  Description of Artificial Sequence: Synthetic oligonucleotide
  Sense strand starting at position 283 of SEQ ID NO: 316939
auaugaugaauuggagucu

SEQ ID NO: 451826 - RNA, 19 nt, Artificial Sequence
  Description of Artificial Sequence: Synthetic oligonucleotide
  Antisense Strand to SEQ ID NO: 451825
agacuccaauucaucauau

SEQ ID NO: 451827 - RNA, 19 nt, Artificial Sequence
  Description of Artificial Sequence: Synthetic oligonucleotide
  Sense strand starting at position 432 of SEQ ID NO: 316939
aaaggaugugcuuauguuu

SEQ ID NO: 451828 - RNA, 19 nt, Artificial Sequence
  Description of Artificial Sequence: Synthetic oligonucleotide
  Antisense Strand to SEQ ID NO: 451827
aaacauaagcacauccuuu

SEQ ID NO: 451829 - RNA, 19 nt, Artificial Sequence
  Description of Artificial Sequence: Synthetic oligonucleotide
  Sense strand starting at position 548 of SEQ ID NO: 316939
ugucuuacugcugcuguaa

SEQ ID NO: 451830 - RNA, 19 nt, Artificial Sequence
  Description of Artificial Sequence: Synthetic oligonucleotide
  Antisense Strand to SEQ ID NO: 451829
uuacagcagcaguaagaca

SEQ ID NO: 451831 - RNA, 19 nt, Artificial Sequence
  Description of Artificial Sequence: Synthetic oligonucleotide
  Sense strand starting at position 580 of SEQ ID NO: 316939
acuugaugacuacggacaa

SEQ ID NO: 451832 - RNA, 19 nt, Artificial Sequence
  Description of Artificial Sequence: Synthetic oligonucleotide
  Antisense Strand to SEQ ID NO: 451831
uuguccguagucaucaagu

SEQ ID NO: 451833 - RNA, 19 nt, Artificial Sequence
  Description of Artificial Sequence: Synthetic oligonucleotide
  Sense strand starting at position 618 of SEQ ID NO: 316939
aguuguagagcccagaagu

SEQ ID NO: 451834 - RNA, 19 nt, Artificial Sequence
  Description of Artificial Sequence: Synthetic oligonucleotide
  Antisense Strand to SEQ ID NO: 451833
acuucugggcucuacaacu

SEQ ID NO: 451835 - RNA, 19 nt, Artificial Sequence
  Description of Artificial Sequence: Synthetic oligonucleotide
  Sense strand starting at position 635 of SEQ ID NO: 316939
gucugaaaucaggauguug

SEQ ID NO: 451836 - RNA, 19 nt, Artificial Sequence
  Description of Artificial Sequence: Synthetic oligonucleotide
  Antisense Strand to SEQ ID NO: 451835
caacauccugauuucagac

SEQ ID NO: 451837 - RNA, 19 nt, Artificial Sequence
  Description of Artificial Sequence: Synthetic oligonucleotide
  Sense strand starting at position 859 of SEQ ID NO: 316939
cuucuaaauccaggguaau

SEQ ID NO: 451838 - RNA, 19 nt, Artificial Sequence
  Description of Artificial Sequence: Synthetic oligonucleotide
  Antisense Strand to SEQ ID NO: 451837
auuacccuggauuuagaag

SEQ ID NO: 451839 - RNA, 19 nt, Artificial Sequence
  Description of Artificial Sequence: Synthetic oligonucleotide
  Sense strand starting at position 860 of SEQ ID NO: 316939
uucuaaauccaggguaauu

SEQ ID NO: 451840 - RNA, 19 nt, Artificial Sequence
  Description of Artificial Sequence: Synthetic oligonucleotide
  Antisense Strand to SEQ ID NO: 451839
aauuacccuggauuuagaa

SEQ ID NO: 451841 - RNA, 19 nt, Artificial Sequence
  Description of Artificial Sequence: Synthetic oligonucleotide
  Sense strand starting at position 882 of SEQ ID NO: 316939
ucucgagaucuuuaucuua

SEQ ID NO: 451842 - RNA, 19 nt, Artificial Sequence
  Description of Artificial Sequence: Synthetic oligonucleotide
  Antisense Strand to SEQ ID NO: 451841
uaagauaaagaucucgaga

SEQ ID NO: 451843 - RNA, 19 nt, Artificial Sequence
  Description of Artificial Sequence: Synthetic oligonucleotide
  Sense strand starting at position 884 of SEQ ID NO: 316939
ucgagaucuuuaucuuaau

SEQ ID NO: 451844 - RNA, 19 nt, Artificial Sequence
  Description of Artificial Sequence: Synthetic oligonucleotide
  Antisense Strand to SEQ ID NO: 451843
auuaagauaaagaucucga

SEQ ID NO: 451845 - RNA, 19 nt, Artificial Sequence
  Description of Artificial Sequence: Synthetic oligonucleotide
  Sense strand starting at position 885 of SEQ ID NO: 316939
cgagaucuuuaucuuaauu

SEQ ID NO: 451846 - RNA, 19 nt, Artificial Sequence
  Description of Artificial Sequence: Synthetic oligonucleotide
  Antisense Strand to SEQ ID NO: 451845
aauuaagauaaagaucucg

SEQ ID NO: 451847 - RNA, 19 nt, Artificial Sequence
  Description of Artificial Sequence: Synthetic oligonucleotide
  Sense strand starting at position 1125 of SEQ ID NO: 316939
acacaaaugucuguaagaa

SEQ ID NO: 451848 - RNA, 19 nt, Artificial Sequence
  Description of Artificial Sequence: Synthetic oligonucleotide
  Antisense Strand to SEQ ID NO: 451847
uucuuacagacauuugugu

SEQ ID NO: 451849 - RNA, 19 nt, Artificial Sequence
  Description of Artificial Sequence: Synthetic oligonucleotide
  Sense strand starting at position 1167 of SEQ ID NO: 316939
ccgaaaucagagcauguga

SEQ ID NO: 451850 - RNA, 19 nt, Artificial Sequence
  Description of Artificial Sequence: Synthetic oligonucleotide
  Antisense Strand to SEQ ID NO: 451849
ucacaugcucugauuucgg

SEQ ID NO: 451851 - RNA, 19 nt, Artificial Sequence
  Description of Artificial Sequence: Synthetic oligonucleotide
  Sense strand starting at position 1231 of SEQ ID NO: 316939
gucagaaaccaugguaaac

SEQ ID NO: 451852 - RNA, 19 nt, Artificial Sequence
  Description of Artificial Sequence: Synthetic oligonucleotide
  Antisense Strand to SEQ ID NO: 451851
guuuaccaugguuucugac

SEQ ID NO: 451853 - RNA, 19 nt, Artificial Sequence
  Description of Artificial Sequence: Synthetic oligonucleotide
  Sense strand starting at position 1356 of SEQ ID NO: 316939
auagucagauuauucuaag

SEQ ID NO: 451854 - RNA, 19 nt, Artificial Sequence
  Description of Artificial Sequence: Synthetic oligonucleotide
  Antisense Strand to SEQ ID NO: 451853
cuuagaauaaucugacuau

SEQ ID NO: 451855 - RNA, 19 nt, Artificial Sequence
  Description of Artificial Sequence: Synthetic oligonucleotide
  Sense strand starting at position 1459 of SEQ ID NO: 316939
uggguuauugaggaaagcu

SEQ ID NO: 451856 - RNA, 19 nt, Artificial Sequence
  Description of Artificial Sequence: Synthetic oligonucleotide
  Antisense Strand to SEQ ID NO: 451855
agcuuuccucaauaaccca

SEQ ID NO: 451857 - RNA, 19 nt, Artificial Sequence
  Description of Artificial Sequence: Synthetic oligonucleotide
  Sense strand starting at position 1530 of SEQ ID NO: 316939
ggaauagugcaguaccuca

SEQ ID NO: 451858 - RNA, 19 nt, Artificial Sequence
  Description of Artificial Sequence: Synthetic oligonucleotide
  Antisense Strand to SEQ ID NO: 451857
ugagguacugcacuauucc

SEQ ID NO: 451859 - RNA, 19 nt, Artificial Sequence
  Description of Artificial Sequence: Synthetic oligonucleotide
  Sense strand starting at position 1657 of SEQ ID NO: 316939
ggaggcauuagucgaggga

SEQ ID NO: 451860 - RNA, 19 nt, Artificial Sequence
  Description of Artificial Sequence: Synthetic oligonucleotide
  Antisense Strand to SEQ ID NO: 451859
ucccucgacuaaugccucc

SEQ ID NO: 451861 - RNA, 19 nt, Artificial Sequence
  Description of Artificial Sequence: Synthetic oligonucleotide
  Sense strand starting at position 2161 of SEQ ID NO: 316939
ugggacuuguucuucugga

SEQ ID NO: 451862 - RNA, 19 nt, Artificial Sequence
  Description of Artificial Sequence: Synthetic oligonucleotide
  Antisense Strand to SEQ ID NO: 451861
uccagaagaacaaguccca

SEQ ID NO: 451863 - RNA, 19 nt, Artificial Sequence
  Description of Artificial Sequence: Synthetic oligonucleotide
  Sense strand starting at position 2162 of SEQ ID NO: 316939
gggacuuguucuucuggac

SEQ ID NO: 451864 - RNA, 19 nt, Artificial Sequence
  Description of Artificial Sequence: Synthetic oligonucleotide
  Antisense Strand to SEQ ID NO: 451863
guccagaagaacaaguccc

SEQ ID NO: 451865 - RNA, 19 nt, Artificial Sequence
  Description of Artificial Sequence: Synthetic oligonucleotide
  Sense strand starting at position 2378 of SEQ ID NO: 316939
acgcuaucuagugaaagac

SEQ ID NO: 451866 - RNA, 19 nt, Artificial Sequence
  Description of Artificial Sequence: Synthetic oligonucleotide
  Antisense Strand to SEQ ID NO: 451865
gucuuucacuagauagcgu

SEQ ID NO: 451867 - RNA, 19 nt, Artificial Sequence
  Description of Artificial Sequence: Synthetic oligonucleotide
  Sense strand starting at position 2469 of SEQ ID NO: 316939
auauguaaacuagaaacgu

SEQ ID NO: 451868 - RNA, 19 nt, Artificial Sequence
  Description of Artificial Sequence: Synthetic oligonucleotide
  Antisense Strand to SEQ ID NO: 451867
acguuucuaguuuacauau

SEQ ID NO: 451869 - RNA, 19 nt, Artificial Sequence
  Description of Artificial Sequence: Synthetic oligonucleotide
  Sense strand starting at position 2473 of SEQ ID NO: 316939
guaaacuagaaacguagau

SEQ ID NO: 451870 - RNA, 19 nt, Artificial Sequence
  Description of Artificial Sequence: Synthetic oligonucleotide
  Antisense Strand to SEQ ID NO: 451869
aucuacguuucuaguuuac

SEQ ID NO: 451871 - RNA, 19 nt, Artificial Sequence
  Description of Artificial Sequence: Synthetic oligonucleotide
  Sense strand starting at position 2642 of SEQ ID NO: 316939
uucugaucacucuaaguug

SEQ ID NO: 451872 - RNA, 19 nt, Artificial Sequence
  Description of Artificial Sequence: Synthetic oligonucleotide
  Antisense Strand to SEQ ID NO: 451871
caacuuagagugaucagaa

SEQ ID NO: 451873 - RNA, 19 nt, Artificial Sequence
  Description of Artificial Sequence: Synthetic oligonucleotide
  Sense strand starting at position 2693 of SEQ ID NO: 316939
gagcuccauuuggaaggau

SEQ ID NO: 451874 - RNA, 19 nt, Artificial Sequence
  Description of Artificial Sequence: Synthetic oligonucleotide
  Antisense Strand to SEQ ID NO: 451873
auccuuccaaauggagcuc

SEQ ID NO: 451875 - RNA, 19 nt, Artificial Sequence
  Description of Artificial Sequence: Synthetic oligonucleotide
  Sense strand starting at position 2838 of SEQ ID NO: 316939
ccauuuaaauacgaggaau

SEQ ID NO: 451876 - RNA, 19 nt, Artificial Sequence
  Description of Artificial Sequence: Synthetic oligonucleotide
  Antisense Strand to SEQ ID NO: 451875
auuccucguauuuaaaugg

SEQ ID NO: 451877 - RNA, 19 nt, Artificial Sequence
  Description of Artificial Sequence: Synthetic oligonucleotide
  Sense strand starting at position 2846 of SEQ ID NO: 316939
auacgaggaaucugaaguu

SEQ ID NO: 451878 - RNA, 19 nt, Artificial Sequence
  Description of Artificial Sequence: Synthetic oligonucleotide
  Antisense Strand to SEQ ID NO: 451877
aacuucagauuccucguau

SEQ ID NO: 451879 - RNA, 19 nt, Artificial Sequence
  Description of Artificial Sequence: Synthetic oligonucleotide
  Sense strand starting at position 2889 of SEQ ID NO: 316939
aggucauagaucuagcagu

SEQ ID NO: 451880 - RNA, 19 nt, Artificial Sequence
  Description of Artificial Sequence: Synthetic oligonucleotide
  Antisense Strand to SEQ ID NO: 451879
acugcuagaucuaugaccu

SEQ ID NO: 451881 - RNA, 19 nt, Artificial Sequence
  Description of Artificial Sequence: Synthetic oligonucleotide
  Sense strand starting at position 2924 of SEQ ID NO: 316939
guaagucagaugugacuga

SEQ ID NO: 451882 - RNA, 19 nt, Artificial Sequence
  Description of Artificial Sequence: Synthetic oligonucleotide
  Antisense Strand to SEQ ID NO: 451881
ucagucacaucugacuuac

SEQ ID NO: 451883 - RNA, 19 nt, Artificial Sequence
  Description of Artificial Sequence: Synthetic oligonucleotide
  Sense strand starting at position 2928 of SEQ ID NO: 316939
gucagaugugacugaacaa

SEQ ID NO: 451884 - RNA, 19 nt, Artificial Sequence
  Description of Artificial Sequence: Synthetic oligonucleotide
  Antisense Strand to SEQ ID NO: 451883
uuguucagucacaucugac

SEQ ID NO: 451885 - RNA, 19 nt, Artificial Sequence
  Description of Artificial Sequence: Synthetic oligonucleotide
  Sense strand starting at position 2995 of SEQ ID NO: 316939
accucuguagcuuacuaua

SEQ ID NO: 451886 - RNA, 19 nt, Artificial Sequence
  Description of Artificial Sequence: Synthetic oligonucleotide
  Antisense Strand to SEQ ID NO: 451885
uauaguaagcuacagaggu

SEQ ID NO: 451887 - RNA, 19 nt, Artificial Sequence
  Description of Artificial Sequence: Synthetic oligonucleotide
  Sense strand starting at position 3104 of SEQ ID NO: 316939
uucccaaaguuacugagaa

SEQ ID NO: 451888 - RNA, 19 nt, Artificial Sequence
  Description of Artificial Sequence: Synthetic oligonucleotide
  Antisense Strand to SEQ ID NO: 451887
uucucaguaacuuugggaa

SEQ ID NO: 451889 - RNA, 19 nt, Artificial Sequence
  Description of Artificial Sequence: Synthetic oligonucleotide
  Sense strand starting at position 3249 of SEQ ID NO: 316939
cagaguaacuaguccuuga

SEQ ID NO: 451890 - RNA, 19 nt, Artificial Sequence
  Description of Artificial Sequence: Synthetic oligonucleotide
  Antisense Strand to SEQ ID NO: 451889
ucaaggacuaguuacucug

SEQ ID NO: 451891 - RNA, 19 nt, Artificial Sequence
  Description of Artificial Sequence: Synthetic oligonucleotide
  Sense strand starting at position 3253 of SEQ ID NO: 316939
guaacuaguccuugaggga

SEQ ID NO: 451892 - RNA, 19 nt, Artificial Sequence
  Description of Artificial Sequence: Synthetic oligonucleotide
  Antisense Strand to SEQ ID NO: 451891
ucccucaaggacuaguuac

SEQ ID NO: 451893 - RNA, 19 nt, Artificial Sequence
  Description of Artificial Sequence: Synthetic oligonucleotide
  Sense strand starting at position 3420 of SEQ ID NO: 316939
guuucuucugaugcgugua

SEQ ID NO: 451894 - RNA, 19 nt, Artificial Sequence
  Description of Artificial Sequence: Synthetic oligonucleotide
  Antisense Strand to SEQ ID NO: 451893
uacacgcaucagaagaaac

SEQ ID NO: 451895 - RNA, 19 nt, Artificial Sequence
  Description of Artificial Sequence: Synthetic oligonucleotide
  Sense strand starting at position 3432 of SEQ ID NO: 316939
gcguguagucagucaugac

SEQ ID NO: 451896 - RNA, 19 nt, Artificial Sequence
  Description of Artificial Sequence: Synthetic oligonucleotide
  Antisense Strand to SEQ ID NO: 451895
gucaugacugacuacacgc

SEQ ID NO: 451897 - RNA, 19 nt, Artificial Sequence
  Description of Artificial Sequence: Synthetic oligonucleotide
  Sense strand starting at position 3444 of SEQ ID NO: 316939
ucaugacucugggcucuaa

SEQ ID NO: 451898 - RNA, 19 nt, Artificial Sequence
  Description of Artificial Sequence: Synthetic oligonucleotide
  Antisense Strand to SEQ ID NO: 451897
uuagagcccagagucauga

SEQ ID NO: 451899 - RNA, 19 nt, Artificial Sequence
  Description of Artificial Sequence: Synthetic oligonucleotide
  Sense strand starting at position 3691 of SEQ ID NO: 316939
accucuguugcccagaaga

SEQ ID NO: 451900 - RNA, 19 nt, Artificial Sequence
  Description of Artificial Sequence: Synthetic oligonucleotide
  Antisense Strand to SEQ ID NO: 451899
ucuucugggcaacagaggu

SEQ ID NO: 451901 - RNA, 19 nt, Artificial Sequence
  Description of Artificial Sequence: Synthetic oligonucleotide
  Sense strand starting at position 3776 of SEQ ID NO: 316939
ucuauugauccguaacuuc

SEQ ID NO: 451902 - RNA, 19 nt, Artificial Sequence
  Description of Artificial Sequence: Synthetic oligonucleotide
  Antisense Strand to SEQ ID NO: 451901
gaaguuacggaucaauaga

SEQ ID NO: 451903 - RNA, 19 nt, Artificial Sequence
  Description of Artificial Sequence: Synthetic oligonucleotide
  Sense strand starting at position 115 of SEQ ID NO: 316940
ggguuauaagaaugaaguu

SEQ ID NO: 451904 - RNA, 19 nt, Artificial Sequence
  Description of Artificial Sequence: Synthetic oligonucleotide
  Antisense Strand to SEQ ID NO: 451903
aacuucauucuuauaaccc

SEQ ID NO: 451905 - RNA, 19 nt, Artificial Sequence
  Description of Artificial Sequence: Synthetic oligonucleotide
  Sense strand starting at position 191 of SEQ ID NO: 316940
gacugcugagaauguugaa

SEQ ID NO: 451906 - RNA, 19 nt, Artificial Sequence
  Description of Artificial Sequence: Synthetic oligonucleotide
  Antisense Strand to SEQ ID NO: 451905
uucaacauucucagcaguc

SEQ ID NO: 451907 - RNA, 19 nt, Artificial Sequence
  Description of Artificial Sequence: Synthetic oligonucleotide
  Sense strand starting at position 228 of SEQ ID NO: 316940
ucuguuauucuccaaagga

SEQ ID NO: 451908 - RNA, 19 nt, Artificial Sequence
  Description of Artificial Sequence: Synthetic oligonucleotide
  Antisense Strand to SEQ ID NO: 451907
uccuuuggagaauaacaga

SEQ ID NO: 451909 - RNA, 19 nt, Artificial Sequence
  Description of Artificial Sequence: Synthetic oligonucleotide
  Sense strand starting at position 286 of SEQ ID NO: 316940
gagucagcagucuaagaug

SEQ ID NO: 451910 - RNA, 19 nt, Artificial Sequence
  Description of Artificial Sequence: Synthetic oligonucleotide
  Antisense Strand to SEQ ID NO: 451909
caucuuagacugcugacuc

SEQ ID NO: 451911 - RNA, 19 nt, Artificial Sequence
  Description of Artificial Sequence: Synthetic oligonucleotide
  Sense strand starting at position 346 of SEQ ID NO: 316940
auuccuagccauuauugga

SEQ ID NO: 451912 - RNA, 19 nt, Artificial Sequence
  Description of Artificial Sequence: Synthetic oligonucleotide
  Antisense Strand to SEQ ID NO: 451911
uccaauaauggcuaggaau

SEQ ID NO: 451913 - RNA, 19 nt, Artificial Sequence
  Description of Artificial Sequence: Synthetic oligonucleotide
  Sense strand starting at position 373 of SEQ ID NO: 316940
guuugaagacccugaucug

SEQ ID NO: 451914 - RNA, 19 nt, Artificial Sequence
  Description of Artificial Sequence: Synthetic oligonucleotide
  Antisense Strand to SEQ ID NO: 451913
cagaucagggucuucaaac

SEQ ID NO: 451915 - RNA, 19 nt, Artificial Sequence
  Description of Artificial Sequence: Synthetic oligonucleotide
  Sense strand starting at position 464 of SEQ ID NO: 316940
agggauuucuuggaacaug

SEQ ID NO: 451916 - RNA, 19 nt, Artificial Sequence
  Description of Artificial Sequence: Synthetic oligonucleotide
  Antisense Strand to SEQ ID NO: 451915
cauguuccaagaaaucccu

SEQ ID NO: 451917 - RNA, 19 nt, Artificial Sequence
  Description of Artificial Sequence: Synthetic oligonucleotide
  Sense strand starting at position 544 of SEQ ID NO: 316940
ugggaaagacuuuguaguc

SEQ ID NO: 451918 - RNA, 19 nt, Artificial Sequence
  Description of Artificial Sequence: Synthetic oligonucleotide
  Antisense Strand to SEQ ID NO: 451917
gacuacaaagucuuuccca

SEQ ID NO: 451919 - RNA, 19 nt, Artificial Sequence
  Description of Artificial Sequence: Synthetic oligonucleotide
  Sense strand starting at position 545 of SEQ ID NO: 316940
gggaaagacuuuguagucu

SEQ ID NO: 451920 - RNA, 19 nt, Artificial Sequence
  Description of Artificial Sequence: Synthetic oligonucleotide
  Antisense Strand to SEQ ID NO: 451919
agacuacaaagucuuuccc

SEQ ID NO: 451921 - RNA, 19 nt, Artificial Sequence
  Description of Artificial Sequence: Synthetic oligonucleotide
  Sense strand starting at position 793 of SEQ ID NO: 316940
guuaacugacagcacuaaa

SEQ ID NO: 451922 - RNA, 19 nt, Artificial Sequence
  Description of Artificial Sequence: Synthetic oligonucleotide
  Antisense Strand to SEQ ID NO: 451921
uuuagugcugucaguuaac

SEQ ID NO: 451923 - RNA, 19 nt, Artificial Sequence
  Description of Artificial Sequence: Synthetic oligonucleotide
  Sense strand starting at position 850 of SEQ ID NO: 316940
gucccuugugaacauuaaa

SEQ ID NO: 451924 - RNA, 19 nt, Artificial Sequence
  Description of Artificial Sequence: Synthetic oligonucleotide
  Antisense Strand to SEQ ID NO: 451923
uuuaauguucacaagggac

SEQ ID NO: 451925 - RNA, 19 nt, Artificial Sequence
  Description of Artificial Sequence: Synthetic oligonucleotide
  Sense strand starting at position 1046 of SEQ ID NO: 316940
ucuuauuugugguuauguu

SEQ ID NO: 451926 - RNA, 19 nt, Artificial Sequence
  Description of Artificial Sequence: Synthetic oligonucleotide
  Antisense Strand to SEQ ID NO: 451925
aacauaaccacaaauaaga

SEQ ID NO: 451927 - RNA, 19 nt, Artificial Sequence
  Description of Artificial Sequence: Synthetic oligonucleotide
  Sense strand starting at position 1047 of SEQ ID NO: 316940
cuuauuugugguuauguuu

SEQ ID NO: 451928 - RNA, 19 nt, Artificial Sequence
  Description of Artificial Sequence: Synthetic oligonucleotide
  Antisense Strand to SEQ ID NO: 451927
aaacauaaccacaaauaag

SEQ ID NO: 451929 - RNA, 19 nt, Artificial Sequence
  Description of Artificial Sequence: Synthetic oligonucleotide
  Sense strand starting at position 1132 of SEQ ID NO: 316940
uguauaagauuccucuaag

SEQ ID NO: 451930 - RNA, 19 nt, Artificial Sequence
  Description of Artificial Sequence: Synthetic oligonucleotide
  Antisense Strand to SEQ ID NO: 451929
cuuagaggaaucuuauaca

SEQ ID NO: 451931 - RNA, 19 nt, Artificial Sequence
  Description of Artificial Sequence: Synthetic oligonucleotide
  Sense strand starting at position 1133 of SEQ ID NO: 316940
guauaagauuccucuaagg

SEQ ID NO: 451932 - RNA, 19 nt, Artificial Sequence
  Description of Artificial Sequence: Synthetic oligonucleotide
  Antisense Strand to SEQ ID NO: 451931
ccuuagaggaaucuuauac

SEQ ID NO: 451933 - RNA, 19 nt, Artificial Sequence
  Description of Artificial Sequence: Synthetic oligonucleotide
  Sense strand starting at position 1167 of SEQ ID NO: 316940
cuaaguugacaucaugcau

SEQ ID NO: 451934 - RNA, 19 nt, Artificial Sequence
  Description of Artificial Sequence: Synthetic oligonucleotide
  Antisense Strand to SEQ ID NO: 451933
augcaugaugucaacuuag

SEQ ID NO: 451935 - RNA, 19 nt, Artificial Sequence
  Description of Artificial Sequence: Synthetic oligonucleotide
  Sense strand starting at position 1232 of SEQ ID NO: 316940
ugaauaaaugcuuaauggu

SEQ ID NO: 451936 - RNA, 19 nt, Artificial Sequence
  Description of Artificial Sequence: Synthetic oligonucleotide
  Antisense Strand to SEQ ID NO: 451935
accauuaagcauuuauuca

SEQ ID NO: 451937 - RNA, 19 nt, Artificial Sequence
  Description of Artificial Sequence: Synthetic oligonucleotide
  Sense strand starting at position 1240 of SEQ ID NO: 316940
ugcuuaaugguggaucaca

SEQ ID NO: 451938 - RNA, 19 nt, Artificial Sequence
  Description of Artificial Sequence: Synthetic oligonucleotide
  Antisense Strand to SEQ ID NO: 451937
ugugauccaccauuaagca

SEQ ID NO: 451939 - RNA, 19 nt, Artificial Sequence
  Description of Artificial Sequence: Synthetic oligonucleotide
  Sense strand starting at position 2064 of SEQ ID NO: 316940
ucucauauguaaguggaaa

SEQ ID NO: 451940 - RNA, 19 nt, Artificial Sequence
  Description of Artificial Sequence: Synthetic oligonucleotide
  Antisense Strand to SEQ ID NO: 451939
uuuccacuuacauaugaga

SEQ ID NO: 451941 - RNA, 19 nt, Artificial Sequence
  Description of Artificial Sequence: Synthetic oligonucleotide
  Sense strand starting at position 2159 of SEQ ID NO: 316940
cagaccagauguucuaagu

SEQ ID NO: 451942 - RNA, 19 nt, Artificial Sequence
  Description of Artificial Sequence: Synthetic oligonucleotide
  Antisense Strand to SEQ ID NO: 451941
acuuagaacaucuggucug

SEQ ID NO: 451943 - RNA, 19 nt, Artificial Sequence
  Description of Artificial Sequence: Synthetic oligonucleotide
  Sense strand starting at position 2266 of SEQ ID NO: 316940
ggcauaguacuuuguauuu

SEQ ID NO: 451944 - RNA, 19 nt, Artificial Sequence
  Description of Artificial Sequence: Synthetic oligonucleotide
  Antisense Strand to SEQ ID NO: 451943
aaauacaaaguacuaugcc

SEQ ID NO: 451945 - RNA, 19 nt, Artificial Sequence
  Description of Artificial Sequence: Synthetic oligonucleotide
  Sense strand starting at position 2276 of SEQ ID NO: 316940
uuuguauuucuaugcugua

SEQ ID NO: 451946 - RNA, 19 nt, Artificial Sequence
  Description of Artificial Sequence: Synthetic oligonucleotide
  Antisense Strand to SEQ ID NO: 451945
uacagcauagaaauacaaa

SEQ ID NO: 451947 - RNA, 19 nt, Artificial Sequence
  Description of Artificial Sequence: Synthetic oligonucleotide
  Sense strand starting at position 2277 of SEQ ID NO: 316940
uuguauuucuaugcuguau

SEQ ID NO: 451948 - RNA, 19 nt, Artificial Sequence
  Description of Artificial Sequence: Synthetic oligonucleotide
  Antisense Strand to SEQ ID NO: 451947
auacagcauagaaauacaa

SEQ ID NO: 451949 - RNA, 19 nt, Artificial Sequence
  Description of Artificial Sequence: Synthetic oligonucleotide
  Sense strand starting at position 2362 of SEQ ID NO: 316940
gguuaaauggcucaccacu

SEQ ID NO: 451950 - RNA, 19 nt, Artificial Sequence
  Description of Artificial Sequence: Synthetic oligonucleotide
  Antisense Strand to SEQ ID NO: 451949
aguggugagccauuuaacc

SEQ ID NO: 451951 - RNA, 19 nt, Artificial Sequence
  Description of Artificial Sequence: Synthetic oligonucleotide
  Sense strand starting at position 2545 of SEQ ID NO: 316940
aacugagcacuggguaaau

SEQ ID NO: 451952 - RNA, 19 nt, Artificial Sequence
  Description of Artificial Sequence: Synthetic oligonucleotide
  Antisense Strand to SEQ ID NO: 451951
auuuacccagugcucaguu

SEQ ID NO: 451953 - RNA, 19 nt, Artificial Sequence
  Description of Artificial Sequence: Synthetic oligonucleotide
  Sense strand starting at position 2565 of SEQ ID NO: 316940
cugugacuugucuagagag

SEQ ID NO: 451954 - RNA, 19 nt, Artificial Sequence
  Description of Artificial Sequence: Synthetic oligonucleotide
  Antisense Strand to SEQ ID NO: 451953
cucucuagacaagucacag

SEQ ID NO: 451955 - RNA, 19 nt, Artificial Sequence
  Description of Artificial Sequence: Synthetic oligonucleotide
  Sense strand starting at position 2567 of SEQ ID NO: 316940
gugacuugucuagagaguc

SEQ ID NO: 451956 - RNA, 19 nt, Artificial Sequence
  Description of Artificial Sequence: Synthetic oligonucleotide
  Antisense Strand to SEQ ID NO: 451955
gacucucuagacaagucac

SEQ ID NO: 451957 - RNA, 19 nt, Artificial Sequence
  Description of Artificial Sequence: Synthetic oligonucleotide
  Sense strand starting at position 2573 of SEQ ID NO: 316940
ugucuagagagucauaggu

SEQ ID NO: 451958 - RNA, 19 nt, Artificial Sequence
  Description of Artificial Sequence: Synthetic oligonucleotide
  Antisense Strand to SEQ ID NO: 451957
accuaugacucucuagaca

SEQ ID NO: 451959 - RNA, 19 nt, Artificial Sequence
  Description of Artificial Sequence: Synthetic oligonucleotide
  Sense strand starting at position 2577 of SEQ ID NO: 316940
uagagagucauagguagau

SEQ ID NO: 451960 - RNA, 19 nt, Artificial Sequence
  Description of Artificial Sequence: Synthetic oligonucleotide
  Antisense Strand to SEQ ID NO: 451959
aucuaccuaugacucucua

SEQ ID NO: 451961 - RNA, 19 nt, Artificial Sequence
  Description of Artificial Sequence: Synthetic oligonucleotide
  Sense strand starting at position 2601 of SEQ ID NO: 316940
auuggaauuagaugaguuc

SEQ ID NO: 451962 - RNA, 19 nt, Artificial Sequence
  Description of Artificial Sequence: Synthetic oligonucleotide
  Antisense Strand to SEQ ID NO: 451961
gaacucaucuaauuccaau

SEQ ID NO: 451963 - RNA, 19 nt, Artificial Sequence
  Description of Artificial Sequence: Synthetic oligonucleotide
  Sense strand starting at position 2768 of SEQ ID NO: 316940
augcaauguggugauaacu

SEQ ID NO: 451964 - RNA, 19 nt, Artificial Sequence
  Description of Artificial Sequence: Synthetic oligonucleotide
  Antisense Strand to SEQ ID NO: 451963
aguuaucaccacauugcau

SEQ ID NO: 451965 - RNA, 19 nt, Artificial Sequence
  Description of Artificial Sequence: Synthetic oligonucleotide
  Sense strand starting at position 2777 of SEQ ID NO: 316940
ggugauaacucaguacauu

SEQ ID NO: 451966 - RNA, 19 nt, Artificial Sequence
  Description of Artificial Sequence: Synthetic oligonucleotide
  Antisense Strand to SEQ ID NO: 451965
aauguacugaguuaucacc

SEQ ID NO: 451967 - RNA, 19 nt, Artificial Sequence
  Description of Artificial Sequence: Synthetic oligonucleotide
  Sense strand starting at position 2809 of SEQ ID NO: 316940
cuaugagguuaauuaaggu

SEQ ID NO: 451968 - RNA, 19 nt, Artificial Sequence
  Description of Artificial Sequence: Synthetic oligonucleotide
  Antisense Strand to SEQ ID NO: 451967
accuuaauuaaccucauag

SEQ ID NO: 451969 - RNA, 19 nt, Artificial Sequence
  Description of Artificial Sequence: Synthetic oligonucleotide
  Sense strand starting at position 2873 of SEQ ID NO: 316940
ggauuaaugucaccuauua

SEQ ID NO: 451970 - RNA, 19 nt, Artificial Sequence
  Description of Artificial Sequence: Synthetic oligonucleotide
  Antisense Strand to SEQ ID NO: 451969
uaauaggugacauuaaucc

SEQ ID NO: 451971 - RNA, 19 nt, Artificial Sequence
  Description of Artificial Sequence: Synthetic oligonucleotide
  Sense strand starting at position 2941 of SEQ ID NO: 316940
aauaucugugaaggucaau

SEQ ID NO: 451972 - RNA, 19 nt, Artificial Sequence
  Description of Artificial Sequence: Synthetic oligonucleotide
  Antisense Strand to SEQ ID NO: 451971
auugaccuucacagauauu

SEQ ID NO: 451973 - RNA, 19 nt, Artificial Sequence
  Description of Artificial Sequence: Synthetic oligonucleotide
  Sense strand starting at position 2947 of SEQ ID NO: 316940
ugugaaggucaaugaaacu

SEQ ID NO: 451974 - RNA, 19 nt, Artificial Sequence
  Description of Artificial Sequence: Synthetic oligonucleotide
  Antisense Strand to SEQ ID NO: 451973
aguuucauugaccuucaca

SEQ ID NO: 451975 - RNA, 19 nt, Artificial Sequence
  Description of Artificial Sequence: Synthetic oligonucleotide
  Sense strand starting at position 3061 of SEQ ID NO: 316940
agccaaggauuaucuacau

SEQ ID NO: 451976 - RNA, 19 nt, Artificial Sequence
  Description of Artificial Sequence: Synthetic oligonucleotide
  Antisense Strand to SEQ ID NO: 451975
auguagauaauccuuggcu

SEQ ID NO: 451977 - RNA, 19 nt, Artificial Sequence
  Description of Artificial Sequence: Synthetic oligonucleotide
  Sense strand starting at position 3067 of SEQ ID NO: 316940
ggauuaucuacaugggcag

SEQ ID NO: 451978 - RNA, 19 nt, Artificial Sequence
  Description of Artificial Sequence: Synthetic oligonucleotide
  Antisense Strand to SEQ ID NO: 451977
cugcccauguagauaaucc

SEQ ID NO: 451979 - RNA, 19 nt, Artificial Sequence
  Description of Artificial Sequence: Synthetic oligonucleotide
  Sense strand starting at position 3433 of SEQ ID NO: 316940
acuccaaaugagugugaaa

SEQ ID NO: 451980 - RNA, 19 nt, Artificial Sequence
  Description of Artificial Sequence: Synthetic oligonucleotide
  Antisense Strand to SEQ ID NO: 451979
uuucacacucauuuggagu

SEQ ID NO: 451981 - RNA, 19 nt, Artificial Sequence
  Description of Artificial Sequence: Synthetic oligonucleotide
  Sense strand starting at position 3789 of SEQ ID NO: 316940
gagaaaucucuauacgagc

SEQ ID NO: 451982 - RNA, 19 nt, Artificial Sequence
  Description of Artificial Sequence: Synthetic oligonucleotide
  Antisense Strand to SEQ ID NO: 451981
gcucguauagagauuucuc

SEQ ID NO: 451983 - RNA, 19 nt, Artificial Sequence
  Description of Artificial Sequence: Synthetic oligonucleotide
  Sense strand starting at position 29 of SEQ ID NO: 316941
aaggcaauagugcaguaaa

SEQ ID NO: 451984 - RNA, 19 nt, Artificial Sequence
  Description of Artificial Sequence: Synthetic oligonucleotide
  Antisense Strand to SEQ ID NO: 451983
uuuacugcacuauugccuu

SEQ ID NO: 451985 - RNA, 19 nt, Artificial Sequence
  Description of Artificial Sequence: Synthetic oligonucleotide
  Sense strand starting at position 279 of SEQ ID NO: 316941
uuuauuugcuuugcacaga

SEQ ID NO: 451986 - RNA, 19 nt, Artificial Sequence
  Description of Artificial Sequence: Synthetic oligonucleotide
  Antisense Strand to SEQ ID NO: 451985
ucugugcaaagcaaauaaa

SEQ ID NO: 451987 - RNA, 19 nt, Artificial Sequence
  Description of Artificial Sequence: Synthetic oligonucleotide
  Sense strand starting at position 293 of SEQ ID NO: 316941
acagaaauccucuguguug

SEQ ID NO: 451988 - RNA, 19 nt, Artificial Sequence
  Description of Artificial Sequence: Synthetic oligonucleotide
  Antisense Strand to SEQ ID NO: 451987
caacacagaggauuucugu

SEQ ID NO: 451989 - RNA, 19 nt, Artificial Sequence
  Description of Artificial Sequence: Synthetic oligonucleotide
  Sense strand starting at position 305 of SEQ ID NO: 316941
uguguugguagucagaaca

SEQ ID NO: 451990 - RNA, 19 nt, Artificial Sequence
  Description of Artificial Sequence: Synthetic oligonucleotide
  Antisense Strand to SEQ ID NO: 451989
uguucugacuaccaacaca

SEQ ID NO: 451991 - RNA, 19 nt, Artificial Sequence
  Description of Artificial Sequence: Synthetic oligonucleotide
  Sense strand starting at position 436 of SEQ ID NO: 316941
guuggacuaguccagauca

SEQ ID NO: 451992 - RNA, 19 nt, Artificial Sequence
  Description of Artificial Sequence: Synthetic oligonucleotide
  Antisense Strand to SEQ ID NO: 451991
ugaucuggacuaguccaac

SEQ ID NO: 451993 - RNA, 19 nt, Artificial Sequence
  Description of Artificial Sequence: Synthetic oligonucleotide
  Sense strand starting at position 450 of SEQ ID NO: 316941
gaucaucaccagugguaga

SEQ ID NO: 451994 - RNA, 19 nt, Artificial Sequence
  Description of Artificial Sequence: Synthetic oligonucleotide
  Antisense Strand to SEQ ID NO: 451993
ucuaccacuggugaugauc

SEQ ID NO: 451995 - RNA, 19 nt, Artificial Sequence
  Description of Artificial Sequence: Synthetic oligonucleotide
  Sense strand starting at position 460 of SEQ ID NO: 316941
agugguagaauagguagau

SEQ ID NO: 451996 - RNA, 19 nt, Artificial Sequence
  Description of Artificial Sequence: Synthetic oligonucleotide
  Antisense Strand to SEQ ID NO: 451995
aucuaccuauucuaccacu

SEQ ID NO: 451997 - RNA, 19 nt, Artificial Sequence
  Description of Artificial Sequence: Synthetic oligonucleotide
  Sense strand starting at position 461 of SEQ ID NO: 316941
gugguagaauagguagaua

SEQ ID NO: 451998 - RNA, 19 nt, Artificial Sequence
  Description of Artificial Sequence: Synthetic oligonucleotide
  Antisense Strand to SEQ ID NO: 451997
uaucuaccuauucuaccac

SEQ ID NO: 451999 - RNA, 19 nt, Artificial Sequence
  Description of Artificial Sequence: Synthetic oligonucleotide
  Sense strand starting at position 547 of SEQ ID NO: 316941
gacaaagauuuguaugcaa

SEQ ID NO: 452000 - RNA, 19 nt, Artificial Sequence
  Description of Artificial Sequence: Synthetic oligonucleotide
  Antisense Strand to SEQ ID NO: 451999
uugcauacaaaucuuuguc

SEQ ID NO: 452001 - RNA, 19 nt, Artificial Sequence
  Description of Artificial Sequence: Synthetic oligonucleotide
  Sense strand starting at position 671 of SEQ ID NO: 316941
aggagauuggcuggcauua

SEQ ID NO: 452002 - RNA, 19 nt, Artificial Sequence
  Description of Artificial Sequence: Synthetic oligonucleotide
  Antisense Strand to SEQ ID NO: 452001
uaaugccagccaaucuccu

SEQ ID NO: 452003 - RNA, 19 nt, Artificial Sequence
  Description of Artificial Sequence: Synthetic oligonucleotide
  Sense strand starting at position 684 of SEQ ID NO: 316941
gcauuaguggcugaagaau

SEQ ID NO: 452004 - RNA, 19 nt, Artificial Sequence
  Description of Artificial Sequence: Synthetic oligonucleotide
  Antisense Strand to SEQ ID NO: 452003
auucuucagccacuaaugc

SEQ ID NO: 452005 - RNA, 19 nt, Artificial Sequence
  Description of Artificial Sequence: Synthetic oligonucleotide
  Sense strand starting at position 730 of SEQ ID NO: 316941
guaaucaaaugugugaaca

SEQ ID NO: 452006 - RNA, 19 nt, Artificial Sequence
  Description of Artificial Sequence: Synthetic oligonucleotide
  Antisense Strand to SEQ ID NO: 452005
uguucacacauuugauuac

SEQ ID NO: 452007 - RNA, 19 nt, Artificial Sequence
  Description of Artificial Sequence: Synthetic oligonucleotide
  Sense strand starting at position 731 of SEQ ID NO: 316941
uaaucaaaugugugaacag

SEQ ID NO: 452008 - RNA, 19 nt, Artificial Sequence
  Description of Artificial Sequence: Synthetic oligonucleotide
  Antisense Strand to SEQ ID NO: 452007
cuguucacacauuugauua

SEQ ID NO: 452009 - RNA, 19 nt, Artificial Sequence
  Description of Artificial Sequence: Synthetic oligonucleotide
  Sense strand starting at position 1783 of SEQ ID NO: 316941
gcaggcacccauuacuuau

SEQ ID NO: 452010 - RNA, 19 nt, Artificial Sequence
  Description of Artificial Sequence: Synthetic oligonucleotide
  Antisense Strand to SEQ ID NO: 452009
auaaguaaugggugccugc

SEQ ID NO: 452011 - RNA, 19 nt, Artificial Sequence
  Description of Artificial Sequence: Synthetic oligonucleotide
  Sense strand starting at position 1842 of SEQ ID NO: 316941
ucgcaaucuguugcugagu

SEQ ID NO: 452012 - RNA, 19 nt, Artificial Sequence
  Description of Artificial Sequence: Synthetic oligonucleotide
  Antisense Strand to SEQ ID NO: 452011
acucagcaacagauugcga

SEQ ID NO: 452013 - RNA, 19 nt, Artificial Sequence
  Description of Artificial Sequence: Synthetic oligonucleotide
  Sense strand starting at position 2076 of SEQ ID NO: 316941
gguaauuagcaucauucca

SEQ ID NO: 452014 - RNA, 19 nt, Artificial Sequence
  Description of Artificial Sequence: Synthetic oligonucleotide
  Antisense Strand to SEQ ID NO: 452013
uggaaugaugcuaauuacc

SEQ ID NO: 452015 - RNA, 19 nt, Artificial Sequence
  Description of Artificial Sequence: Synthetic oligonucleotide
  Sense strand starting at position 2433 of SEQ ID NO: 316941
ucguguuccagcuuggcau

SEQ ID NO: 452016 - RNA, 19 nt, Artificial Sequence
  Description of Artificial Sequence: Synthetic oligonucleotide
  Antisense Strand to SEQ ID NO: 452015
augccaagcuggaacacga

SEQ ID NO: 452017 - RNA, 19 nt, Artificial Sequence
  Description of Artificial Sequence: Synthetic oligonucleotide
  Sense strand starting at position 2480 of SEQ ID NO: 316941
acaugaguaugaucaguaa

SEQ ID NO: 452018 - RNA, 19 nt, Artificial Sequence
  Description of Artificial Sequence: Synthetic oligonucleotide
  Antisense Strand to SEQ ID NO: 452017
uuacugaucauacucaugu

SEQ ID NO: 452019 - RNA, 19 nt, Artificial Sequence
  Description of Artificial Sequence: Synthetic oligonucleotide
  Sense strand starting at position 2483 of SEQ ID NO: 316941
ugaguaugaucaguaauau

SEQ ID NO: 452020 - RNA, 19 nt, Artificial Sequence
  Description of Artificial Sequence: Synthetic oligonucleotide
  Antisense Strand to SEQ ID NO: 452019
auauuacugaucauacuca

SEQ ID NO: 452021 - RNA, 19 nt, Artificial Sequence
  Description of Artificial Sequence: Synthetic oligonucleotide
  Sense strand starting at position 2515 of SEQ ID NO: 316941
aggaguaauauguaguguu

SEQ ID NO: 452022 - RNA, 19 nt, Artificial Sequence
  Description of Artificial Sequence: Synthetic oligonucleotide
  Antisense Strand to SEQ ID NO: 452021
aacacuacauauuacuccu

SEQ ID NO: 452023 - RNA, 19 nt, Artificial Sequence
  Description of Artificial Sequence: Synthetic oligonucleotide
  Sense strand starting at position 2740 of SEQ ID NO: 316941
guuaauacccuaugaaagu

SEQ ID NO: 452024 - RNA, 19 nt, Artificial Sequence
  Description of Artificial Sequence: Synthetic oligonucleotide
  Antisense Strand to SEQ ID NO: 452023
acuuucauaggguauuaac

SEQ ID NO: 452025 - RNA, 19 nt, Artificial Sequence
  Description of Artificial Sequence: Synthetic oligonucleotide
  Sense strand starting at position 2814 of SEQ ID NO: 316941
cuguguccagaguaggauu

SEQ ID NO: 452026 - RNA, 19 nt, Artificial Sequence
  Description of Artificial Sequence: Synthetic oligonucleotide
  Antisense Strand to SEQ ID NO: 452025
aauccuacucuggacacag

SEQ ID NO: 452027 - RNA, 19 nt, Artificial Sequence
  Description of Artificial Sequence: Synthetic oligonucleotide
  Sense strand starting at position 3083 of SEQ ID NO: 316941
cuauuuacaucuuuccgua

SEQ ID NO: 452028 - RNA, 19 nt, Artificial Sequence
  Description of Artificial Sequence: Synthetic oligonucleotide
  Antisense Strand to SEQ ID NO: 452027
uacggaaagauguaaauag

SEQ ID NO: 452029 - RNA, 19 nt, Artificial Sequence
  Description of Artificial Sequence: Synthetic oligonucleotide
  Sense strand starting at position 3113 of SEQ ID NO: 316941
uuuauaucgugagugauuu

SEQ ID NO: 452030 - RNA, 19 nt, Artificial Sequence
  Description of Artificial Sequence: Synthetic oligonucleotide
  Antisense Strand to SEQ ID NO: 452029
aaaucacucacgauauaaa

SEQ ID NO: 452031 - RNA, 19 nt, Artificial Sequence
  Description of Artificial Sequence: Synthetic oligonucleotide
  Sense strand starting at position 3159 of SEQ ID NO: 316941
acaucccaugugugacaaa

SEQ ID NO: 452032 - RNA, 19 nt, Artificial Sequence
  Description of Artificial Sequence: Synthetic oligonucleotide
  Antisense Strand to SEQ ID NO: 452031
uuugucacacaugggaugu

SEQ ID NO: 452033 - RNA, 19 nt, Artificial Sequence
  Description of Artificial Sequence: Synthetic oligonucleotide
  Sense strand starting at position 3185 of SEQ ID NO: 316941
aaauguugagcugguauaa

SEQ ID NO: 452034 - RNA, 19 nt, Artificial Sequence
  Description of Artificial Sequence: Synthetic oligonucleotide
  Antisense Strand to SEQ ID NO: 452033
uuauaccagcucaacauuu

SEQ ID NO: 452035 - RNA, 19 nt, Artificial Sequence
  Description of Artificial Sequence: Synthetic oligonucleotide
  Sense strand starting at position 3196 of SEQ ID NO: 316941
ugguauaacccagacuguu

SEQ ID NO: 452036 - RNA, 19 nt, Artificial Sequence
  Description of Artificial Sequence: Synthetic oligonucleotide
  Antisense Strand to SEQ ID NO: 452035
aacagucuggguuauacca

SEQ ID NO: 452037 - RNA, 19 nt, Artificial Sequence
  Description of Artificial Sequence: Synthetic oligonucleotide
  Sense strand starting at position 3275 of SEQ ID NO: 316941
gacauauuggguggacugu

SEQ ID NO: 452038 - RNA, 19 nt, Artificial Sequence
  Description of Artificial Sequence: Synthetic oligonucleotide
  Antisense Strand to SEQ ID NO: 452037
acaguccacccaauauguc

SEQ ID NO: 452039 - RNA, 19 nt, Artificial Sequence
  Description of Artificial Sequence: Synthetic oligonucleotide
  Sense strand starting at position 3297 of SEQ ID NO: 316941
ggaagagcaugagugcuaa

SEQ ID NO: 452040 - RNA, 19 nt, Artificial Sequence
  Description of Artificial Sequence: Synthetic oligonucleotide
  Antisense Strand to SEQ ID NO: 452039
uuagcacucaugcucuucc

SEQ ID NO: 452041 - RNA, 19 nt, Artificial Sequence
  Description of Artificial Sequence: Synthetic oligonucleotide
  Sense strand starting at position 3310 of SEQ ID NO: 316941
ugcuaauuaggugggaauu

SEQ ID NO: 452042 - RNA, 19 nt, Artificial Sequence
  Description of Artificial Sequence: Synthetic oligonucleotide
  Antisense Strand to SEQ ID NO: 452041
aauucccaccuaauuagca

SEQ ID NO: 452043 - RNA, 19 nt, Artificial Sequence
  Description of Artificial Sequence: Synthetic oligonucleotide
  Sense strand starting at position 3449 of SEQ ID NO: 316941
cgugccugugagcuaguaa

SEQ ID NO: 452044 - RNA, 19 nt, Artificial Sequence
  Description of Artificial Sequence: Synthetic oligonucleotide
  Antisense Strand to SEQ ID NO: 452043
uuacuagcucacaggcacg

SEQ ID NO: 452045 - RNA, 19 nt, Artificial Sequence
  Description of Artificial Sequence: Synthetic oligonucleotide
  Sense strand starting at position 3462 of SEQ ID NO: 316941
uaguaaucugggcauugua

SEQ ID NO: 452046 - RNA, 19 nt, Artificial Sequence
  Description of Artificial Sequence: Synthetic oligonucleotide
  Antisense Strand to SEQ ID NO: 452045
uacaaugcccagauuacua

SEQ ID NO: 452047 - RNA, 19 nt, Artificial Sequence
  Description of Artificial Sequence: Synthetic oligonucleotide
  Sense strand starting at position 3672 of SEQ ID NO: 316941
acaggauuuguucguugau

SEQ ID NO: 452048 - RNA, 19 nt, Artificial Sequence
  Description of Artificial Sequence: Synthetic oligonucleotide
  Antisense Strand to SEQ ID NO: 452047
aucaacgaacaaauccugu

SEQ ID NO: 452049 - RNA, 19 nt, Artificial Sequence
  Description of Artificial Sequence: Synthetic oligonucleotide
  Sense strand starting at position 3673 of SEQ ID NO: 316941
caggauuuguucguugauc

SEQ ID NO: 452050 - RNA, 19 nt, Artificial Sequence
  Description of Artificial Sequence: Synthetic oligonucleotide
  Antisense Strand to SEQ ID NO: 452049
gaucaacgaacaaauccug

SEQ ID NO: 452051 - RNA, 19 nt, Artificial Sequence
  Description of Artificial Sequence: Synthetic oligonucleotide
  Sense strand starting at position 3675 of SEQ ID NO: 316941
ggauuuguucguugaucca

SEQ ID NO: 452052 - RNA, 19 nt, Artificial Sequence
  Description of Artificial Sequence: Synthetic oligonucleotide
  Antisense Strand to SEQ ID NO: 452051
uggaucaacgaacaaaucc

SEQ ID NO: 452053 - RNA, 19 nt, Artificial Sequence
  Description of Artificial Sequence: Synthetic oligonucleotide
  Sense strand starting at position 3760 of SEQ ID NO: 316941
uuccaagguucugcaauaa

SEQ ID NO: 452054 - RNA, 19 nt, Artificial Sequence
  Description of Artificial Sequence: Synthetic oligonucleotide
  Antisense Strand to SEQ ID NO: 452053
uuauugcagaaccuuggaa

SEQ ID NO: 452055 - RNA, 19 nt, Artificial Sequence
  Description of Artificial Sequence: Synthetic oligonucleotide
  Sense strand starting at position 3827 of SEQ ID NO: 316941
aaagguuuccagggcuaau

SEQ ID NO: 452056 - RNA, 19 nt, Artificial Sequence
  Description of Artificial Sequence: Synthetic oligonucleotide
  Antisense Strand to SEQ ID NO: 452055
auuagcccuggaaaccuuu

SEQ ID NO: 452057 - RNA, 19 nt, Artificial Sequence
  Description of Artificial Sequence: Synthetic oligonucleotide
  Sense strand starting at position 3830 of SEQ ID NO: 316941
gguuuccagggcuaauauu

SEQ ID NO: 452058 - RNA, 19 nt, Artificial Sequence
  Description of Artificial Sequence: Synthetic oligonucleotide
  Antisense Strand to SEQ ID NO: 452057
aauauuagcccuggaaacc

SEQ ID NO: 452059 - RNA, 19 nt, Artificial Sequence
  Description of Artificial Sequence: Synthetic oligonucleotide
  Sense strand starting at position 3902 of SEQ ID NO: 316941
guuaguuacgcaguuucca

SEQ ID NO: 452060 - RNA, 19 nt, Artificial Sequence
  Description of Artificial Sequence: Synthetic oligonucleotide
  Antisense Strand to SEQ ID NO: 452059
uggaaacugcguaacuaac

SEQ ID NO: 452061 - RNA, 19 nt, Artificial Sequence
  Description of Artificial Sequence: Synthetic oligonucleotide
  Sense strand starting at position 3965 of SEQ ID NO: 316941
ucauuaaagcguuagauau

SEQ ID NO: 452062 - RNA, 19 nt, Artificial Sequence
  Description of Artificial Sequence: Synthetic oligonucleotide
  Antisense Strand to SEQ ID NO: 452061
auaucuaacgcuuuaauga

SEQ ID NO: 452063 - RNA, 19 nt, Artificial Sequence
  Description of Artificial Sequence: Synthetic oligonucleotide
  Sense strand starting at position 71 of SEQ ID NO: 316942
cuugcuucugaacaucaga

SEQ ID NO: 452064 - RNA, 19 nt, Artificial Sequence
  Description of Artificial Sequence: Synthetic oligonucleotide
  Antisense Strand to SEQ ID NO: 452063
ucugauguucagaagcaag

SEQ ID NO: 452065 - RNA, 19 nt, Artificial Sequence
  Description of Artificial Sequence: Synthetic oligonucleotide
  Sense strand starting at position 74 of SEQ ID NO: 316942
gcuucugaacaucagauau

SEQ ID NO: 452066 - RNA, 19 nt, Artificial Sequence
  Description of Artificial Sequence: Synthetic oligonucleotide
  Antisense Strand to SEQ ID NO: 452065
auaucugauguucagaagc

SEQ ID NO: 452067 - RNA, 19 nt, Artificial Sequence
  Description of Artificial Sequence: Synthetic oligonucleotide
  Sense strand starting at position 96 of SEQ ID NO: 316942
ccauuaugugaauagcauc

SEQ ID NO: 452068 - RNA, 19 nt, Artificial Sequence
  Description of Artificial Sequence: Synthetic oligonucleotide
  Antisense Strand to SEQ ID NO: 452067
gaugcuauucacauaaugg

SEQ ID NO: 452069 - RNA, 19 nt, Artificial Sequence
  Description of Artificial Sequence: Synthetic oligonucleotide
  Sense strand starting at position 102 of SEQ ID NO: 316942
ugugaauagcaucauuaau

SEQ ID NO: 452070 - RNA, 19 nt, Artificial Sequence
  Description of Artificial Sequence: Synthetic oligonucleotide
  Antisense Strand to SEQ ID NO: 452069
auuaaugaugcuauucaca

SEQ ID NO: 452071 - RNA, 19 nt, Artificial Sequence
  Description of Artificial Sequence: Synthetic oligonucleotide
  Sense strand starting at position 227 of SEQ ID NO: 316942
ggguuuaagcugcauauua

SEQ ID NO: 452072 - RNA, 19 nt, Artificial Sequence
  Description of Artificial Sequence: Synthetic oligonucleotide
  Antisense Strand to SEQ ID NO: 452071
uaauaugcagcuuaaaccc

SEQ ID NO: 452073 - RNA, 19 nt, Artificial Sequence
  Description of Artificial Sequence: Synthetic oligonucleotide
  Sense strand starting at position 319 of SEQ ID NO: 316942
guagucugcacagagauau

SEQ ID NO: 452074 - RNA, 19 nt, Artificial Sequence
  Description of Artificial Sequence: Synthetic oligonucleotide
  Antisense Strand to SEQ ID NO: 452073
auaucucugugcagacuac

SEQ ID NO: 452075 - RNA, 19 nt, Artificial Sequence
  Description of Artificial Sequence: Synthetic oligonucleotide
  Sense strand starting at position 329 of SEQ ID NO: 316942
cagagauauguccgaacug

SEQ ID NO: 452076 - RNA, 19 nt, Artificial Sequence
  Description of Artificial Sequence: Synthetic oligonucleotide
  Antisense Strand to SEQ ID NO: 452075
caguucggacauaucucug

SEQ ID NO: 452077 - RNA, 19 nt, Artificial Sequence
  Description of Artificial Sequence: Synthetic oligonucleotide
  Sense strand starting at position 338 of SEQ ID NO: 316942
guccgaacugauuagguua

SEQ ID NO: 452078 - RNA, 19 nt, Artificial Sequence
  Description of Artificial Sequence: Synthetic oligonucleotide
  Antisense Strand to SEQ ID NO: 452077
uaaccuaaucaguucggac

SEQ ID NO: 452079 - RNA, 19 nt, Artificial Sequence
  Description of Artificial Sequence: Synthetic oligonucleotide
  Sense strand starting at position 349 of SEQ ID NO: 316942
uuagguuaggcccauacaa

SEQ ID NO: 452080 - RNA, 19 nt, Artificial Sequence
  Description of Artificial Sequence: Synthetic oligonucleotide
  Antisense Strand to SEQ ID NO: 452079
uuguaugggccuaaccuaa

SEQ ID NO: 452081 - RNA, 19 nt, Artificial Sequence
  Description of Artificial Sequence: Synthetic oligonucleotide
  Sense strand starting at position 388 of SEQ ID NO: 316942
ucuuuaggauagccuaauu

SEQ ID NO: 452082 - RNA, 19 nt, Artificial Sequence
  Description of Artificial Sequence: Synthetic oligonucleotide
  Antisense Strand to SEQ ID NO: 452081
aauuaggcuauccuaaaga

SEQ ID NO: 452083 - RNA, 19 nt, Artificial Sequence
  Description of Artificial Sequence: Synthetic oligonucleotide
  Sense strand starting at position 542 of SEQ ID NO: 316942
cugugauaagcccauccua

SEQ ID NO: 452084 - RNA, 19 nt, Artificial Sequence
  Description of Artificial Sequence: Synthetic oligonucleotide
  Antisense Strand to SEQ ID NO: 452083
uaggaugggcuuaucacag

SEQ ID NO: 452085 - RNA, 19 nt, Artificial Sequence
  Description of Artificial Sequence: Synthetic oligonucleotide
  Sense strand starting at position 644 of SEQ ID NO: 316942
aguuuaauuugugccauua

SEQ ID NO: 452086 - RNA, 19 nt, Artificial Sequence
  Description of Artificial Sequence: Synthetic oligonucleotide
  Antisense Strand to SEQ ID NO: 452085
uaauggcacaaauuaaacu

SEQ ID NO: 452087 - RNA, 19 nt, Artificial Sequence
  Description of Artificial Sequence: Synthetic oligonucleotide
  Sense strand starting at position 682 of SEQ ID NO: 316942
uugauuggauagcugucaa

SEQ ID NO: 452088 - RNA, 19 nt, Artificial Sequence
  Description of Artificial Sequence: Synthetic oligonucleotide
  Antisense Strand to SEQ ID NO: 452087
uugacagcuauccaaucaa

SEQ ID NO: 452089 - RNA, 19 nt, Artificial Sequence
  Description of Artificial Sequence: Synthetic oligonucleotide
  Sense strand starting at position 814 of SEQ ID NO: 316942
gugcuuuggacuuaaugau

SEQ ID NO: 452090 - RNA, 19 nt, Artificial Sequence
  Description of Artificial Sequence: Synthetic oligonucleotide
  Antisense Strand to SEQ ID NO: 452089
aucauuaaguccaaagcac

SEQ ID NO: 452091 - RNA, 19 nt, Artificial Sequence
  Description of Artificial Sequence: Synthetic oligonucleotide
  Sense strand starting at position 960 of SEQ ID NO: 316942
agggaccgucuguauucaa

SEQ ID NO: 452092 - RNA, 19 nt, Artificial Sequence
  Description of Artificial Sequence: Synthetic oligonucleotide
  Antisense Strand to SEQ ID NO: 452091
uugaauacagacggucccu

SEQ ID NO: 452093 - RNA, 19 nt, Artificial Sequence
  Description of Artificial Sequence: Synthetic oligonucleotide
  Sense strand starting at position 1196 of SEQ ID NO: 316942
ccauaccuguacucugauu

SEQ ID NO: 452094 - RNA, 19 nt, Artificial Sequence
  Description of Artificial Sequence: Synthetic oligonucleotide
  Antisense Strand to SEQ ID NO: 452093
aaucagaguacagguaugg

SEQ ID NO: 452095 - RNA, 19 nt, Artificial Sequence
  Description of Artificial Sequence: Synthetic oligonucleotide
  Sense strand starting at position 1317 of SEQ ID NO: 316942
aguggaaccucuguugauu

SEQ ID NO: 452096 - RNA, 19 nt, Artificial Sequence
  Description of Artificial Sequence: Synthetic oligonucleotide
  Antisense Strand to SEQ ID NO: 452095
aaucaacagagguuccacu

SEQ ID NO: 452097 - RNA, 19 nt, Artificial Sequence
  Description of Artificial Sequence: Synthetic oligonucleotide
  Sense strand starting at position 1341 of SEQ ID NO: 316942
guaguaaguacacaugagu

SEQ ID NO: 452098 - RNA, 19 nt, Artificial Sequence
  Description of Artificial Sequence: Synthetic oligonucleotide
  Antisense Strand to SEQ ID NO: 452097
acucauguguacuuacuac

SEQ ID NO: 452099 - RNA, 19 nt, Artificial Sequence
  Description of Artificial Sequence: Synthetic oligonucleotide
  Sense strand starting at position 1392 of SEQ ID NO: 316942
guuaaugcauaaucaauga

SEQ ID NO: 452100 - RNA, 19 nt, Artificial Sequence
  Description of Artificial Sequence: Synthetic oligonucleotide
  Antisense Strand to SEQ ID NO: 452099
ucauugauuaugcauuaac

SEQ ID NO: 452101 - RNA, 19 nt, Artificial Sequence
  Description of Artificial Sequence: Synthetic oligonucleotide
  Sense strand starting at position 1396 of SEQ ID NO: 316942
augcauaaucaaugaugau

SEQ ID NO: 452102 - RNA, 19 nt, Artificial Sequence
  Description of Artificial Sequence: Synthetic oligonucleotide
  Antisense Strand to SEQ ID NO: 452101
aucaucauugauuaugcau

SEQ ID NO: 452103 - RNA, 19 nt, Artificial Sequence
  Description of Artificial Sequence: Synthetic oligonucleotide
  Sense strand starting at position 1446 of SEQ ID NO: 316942
gguauugucauuugaguuc

SEQ ID NO: 452104 - RNA, 19 nt, Artificial Sequence
  Description of Artificial Sequence: Synthetic oligonucleotide
  Antisense Strand to SEQ ID NO: 452103
gaacucaaaugacaauacc

SEQ ID NO: 452105 - RNA, 19 nt, Artificial Sequence
  Description of Artificial Sequence: Synthetic oligonucleotide
  Sense strand starting at position 1508 of SEQ ID NO: 316942
aaggcaauagugcaguaaa

SEQ ID NO: 452106 - RNA, 19 nt, Artificial Sequence
  Description of Artificial Sequence: Synthetic oligonucleotide
  Antisense Strand to SEQ ID NO: 452105
uuuacugcacuauugccuu

SEQ ID NO: 452107 - RNA, 19 nt, Artificial Sequence
  Description of Artificial Sequence: Synthetic oligonucleotide
  Sense strand starting at position 1758 of SEQ ID NO: 316942
uuuauuugcuuugcacaga

SEQ ID NO: 452108 - RNA, 19 nt, Artificial Sequence
  Description of Artificial Sequence: Synthetic oligonucleotide
  Antisense Strand to SEQ ID NO: 452107
ucugugcaaagcaaauaaa

SEQ ID NO: 452109 - RNA, 19 nt, Artificial Sequence
  Description of Artificial Sequence: Synthetic oligonucleotide
  Sense strand starting at position 1772 of SEQ ID NO: 316942
acagaaauccucuguguug

SEQ ID NO: 452110 - RNA, 19 nt, Artificial Sequence
  Description of Artificial Sequence: Synthetic oligonucleotide
  Antisense Strand to SEQ ID NO: 452109
caacacagaggauuucugu

SEQ ID NO: 452111 - RNA, 19 nt, Artificial Sequence
  Description of Artificial Sequence: Synthetic oligonucleotide
  Sense strand starting at position 1784 of SEQ ID NO: 316942
uguguugguagucagaaca

SEQ ID NO: 452112 - RNA, 19 nt, Artificial Sequence
  Description of Artificial Sequence: Synthetic oligonucleotide
  Antisense Strand to SEQ ID NO: 452111
uguucugacuaccaacaca

SEQ ID NO: 452113 - RNA, 19 nt, Artificial Sequence
  Description of Artificial Sequence: Synthetic oligonucleotide
  Sense strand starting at position 1915 of SEQ ID NO: 316942
guuggacuaguccagauca

SEQ ID NO: 452114 - RNA, 19 nt, Artificial Sequence
  Description of Artificial Sequence: Synthetic oligonucleotide
  Antisense Strand to SEQ ID NO: 452113
ugaucuggacuaguccaac

SEQ ID NO: 452115 - RNA, 19 nt, Artificial Sequence
  Description of Artificial Sequence: Synthetic oligonucleotide
  Sense strand starting at position 1929 of SEQ ID NO: 316942
gaucaucaccagugguaga

SEQ ID NO: 452116 - RNA, 19 nt, Artificial Sequence
  Description of Artificial Sequence: Synthetic oligonucleotide
  Antisense Strand to SEQ ID NO: 452115
ucuaccacuggugaugauc

SEQ ID NO: 452117 - RNA, 19 nt, Artificial Sequence
  Description of Artificial Sequence: Synthetic oligonucleotide
  Sense strand starting at position 1939 of SEQ ID NO: 316942
agugguagaauagguagau

SEQ ID NO: 452118 - RNA, 19 nt, Artificial Sequence
  Description of Artificial Sequence: Synthetic oligonucleotide
  Antisense Strand to SEQ ID NO: 452117
aucuaccuauucuaccacu

SEQ ID NO: 452119 - RNA, 19 nt, Artificial Sequence
  Description of Artificial Sequence: Synthetic oligonucleotide
  Sense strand starting at position 1940 of SEQ ID NO: 316942
gugguagaauagguagaua

SEQ ID NO: 452120 - RNA, 19 nt, Artificial Sequence
  Description of Artificial Sequence: Synthetic oligonucleotide
  Antisense Strand to SEQ ID NO: 452119
uaucuaccuauucuaccac

SEQ ID NO: 452121 - RNA, 19 nt, Artificial Sequence
  Description of Artificial Sequence: Synthetic oligonucleotide
  Sense strand starting at position 2026 of SEQ ID NO: 316942
gacaaagauuuguaugcaa

SEQ ID NO: 452122 - RNA, 19 nt, Artificial Sequence
  Description of Artificial Sequence: Synthetic oligonucleotide
  Antisense Strand to SEQ ID NO: 452121
uugcauacaaaucuuuguc

SEQ ID NO: 452123 - RNA, 19 nt, Artificial Sequence
  Description of Artificial Sequence: Synthetic oligonucleotide
  Sense strand starting at position 2150 of SEQ ID NO: 316942
aggagauuggcuggcauua

SEQ ID NO: 452124 - RNA, 19 nt, Artificial Sequence
  Description of Artificial Sequence: Synthetic oligonucleotide
  Antisense Strand to SEQ ID NO: 452123
uaaugccagccaaucuccu

SEQ ID NO: 452125 - RNA, 19 nt, Artificial Sequence
  Description of Artificial Sequence: Synthetic oligonucleotide
  Sense strand starting at position 2163 of SEQ ID NO: 316942
gcauuaguggcugaagaau

SEQ ID NO: 452126 - RNA, 19 nt, Artificial Sequence
  Description of Artificial Sequence: Synthetic oligonucleotide
  Antisense Strand to SEQ ID NO: 452125
auucuucagccacuaaugc

SEQ ID NO: 452127 - RNA, 19 nt, Artificial Sequence
  Description of Artificial Sequence: Synthetic oligonucleotide
  Sense strand starting at position 2209 of SEQ ID NO: 316942
guaaucaaaugugugaaca

SEQ ID NO: 452128 - RNA, 19 nt, Artificial Sequence
  Description of Artificial Sequence: Synthetic oligonucleotide
  Antisense Strand to SEQ ID NO: 452127
uguucacacauuugauuac

SEQ ID NO: 452129 - RNA, 19 nt, Artificial Sequence
  Description of Artificial Sequence: Synthetic oligonucleotide
  Sense strand starting at position 2210 of SEQ ID NO: 316942
uaaucaaaugugugaacag

SEQ ID NO: 452130 - RNA, 19 nt, Artificial Sequence
  Description of Artificial Sequence: Synthetic oligonucleotide
  Antisense Strand to SEQ ID NO: 452129
cuguucacacauuugauua

SEQ ID NO: 452131 - RNA, 19 nt, Artificial Sequence
  Description of Artificial Sequence: Synthetic oligonucleotide
  Sense strand starting at position 3262 of SEQ ID NO: 316942
gcaggcacccauuacuuau

SEQ ID NO: 452132 - RNA, 19 nt, Artificial Sequence
  Description of Artificial Sequence: Synthetic oligonucleotide
  Antisense Strand to SEQ ID NO: 452131
auaaguaaugggugccugc

SEQ ID NO: 452133 - RNA, 19 nt, Artificial Sequence
  Description of Artificial Sequence: Synthetic oligonucleotide
  Sense strand starting at position 3321 of SEQ ID NO: 316942
ucgcaaucuguugcugagu

SEQ ID NO: 452134 - RNA, 19 nt, Artificial Sequence
  Description of Artificial Sequence: Synthetic oligonucleotide
  Antisense Strand to SEQ ID NO: 452133
acucagcaacagauugcga

SEQ ID NO: 452135 - RNA, 19 nt, Artificial Sequence
  Description of Artificial Sequence: Synthetic oligonucleotide
  Sense strand starting at position 3555 of SEQ ID NO: 316942
gguaauuagcaucauucca

SEQ ID NO: 452136 - RNA, 19 nt, Artificial Sequence
  Description of Artificial Sequence: Synthetic oligonucleotide
  Antisense Strand to SEQ ID NO: 452135
uggaaugaugcuaauuacc

SEQ ID NO: 452137 - RNA, 19 nt, Artificial Sequence
  Description of Artificial Sequence: Synthetic oligonucleotide
  Sense strand starting at position 3912 of SEQ ID NO: 316942
ucguguuccagcuuggcau

SEQ ID NO: 452138 - RNA, 19 nt, Artificial Sequence
  Description of Artificial Sequence: Synthetic oligonucleotide
  Antisense Strand to SEQ ID NO: 452137
augccaagcuggaacacga

SEQ ID NO: 452139 - RNA, 19 nt, Artificial Sequence
  Description of Artificial Sequence: Synthetic oligonucleotide
  Sense strand starting at position 3959 of SEQ ID NO: 316942
acaugaguaugaucaguaa

SEQ ID NO: 452140 - RNA, 19 nt, Artificial Sequence
  Description of Artificial Sequence: Synthetic oligonucleotide
  Antisense Strand to SEQ ID NO: 452139
uuacugaucauacucaugu

SEQ ID NO: 452141 - RNA, 19 nt, Artificial Sequence
  Description of Artificial Sequence: Synthetic oligonucleotide
  Sense strand starting at position 3962 of SEQ ID NO: 316942
ugaguaugaucaguaauau

SEQ ID NO: 452142 - RNA, 19 nt, Artificial Sequence
  Description of Artificial Sequence: Synthetic oligonucleotide
  Antisense Strand to SEQ ID NO: 452141
auauuacugaucauacuca

SEQ ID NO: 452143 - RNA, 19 nt, Artificial Sequence
  Description of Artificial Sequence: Synthetic oligonucleotide
  Sense strand starting at position 245 of SEQ ID NO: 316943
gaggcucuugaguaauacu

SEQ ID NO: 452144 - RNA, 19 nt, Artificial Sequence
  Description of Artificial Sequence: Synthetic oligonucleotide
  Antisense Strand to SEQ ID NO: 452143
aguauuacucaagagccuc

SEQ ID NO: 452145 - RNA, 19 nt, Artificial Sequence
  Description of Artificial Sequence: Synthetic oligonucleotide
  Sense strand starting at position 373 of SEQ ID NO: 316943
caggaauuguuaguaauag

SEQ ID NO: 452146 - RNA, 19 nt, Artificial Sequence
  Description of Artificial Sequence: Synthetic oligonucleotide
  Antisense Strand to SEQ ID NO: 452145
cuauuacuaacaauuccug

SEQ ID NO: 452147 - RNA, 19 nt, Artificial Sequence
  Description of Artificial Sequence: Synthetic oligonucleotide
  Sense strand starting at position 382 of SEQ ID NO: 316943
uuaguaauagucuauacag

SEQ ID NO: 452148 - RNA, 19 nt, Artificial Sequence
  Description of Artificial Sequence: Synthetic oligonucleotide
  Antisense Strand to SEQ ID NO: 452147
cuguauagacuauuacuaa

SEQ ID NO: 452149 - RNA, 19 nt, Artificial Sequence
  Description of Artificial Sequence: Synthetic oligonucleotide
  Sense strand starting at position 418 of SEQ ID NO: 316943
uuaguaauagucuacacag

SEQ ID NO: 452150 - RNA, 19 nt, Artificial Sequence
  Description of Artificial Sequence: Synthetic oligonucleotide
  Antisense Strand to SEQ ID NO: 452149
cuguguagacuauuacuaa

SEQ ID NO: 452151 - RNA, 19 nt, Artificial Sequence
  Description of Artificial Sequence: Synthetic oligonucleotide
  Sense strand starting at position 445 of SEQ ID NO: 316943
ggacuauuguuaguaauag

SEQ ID NO: 452152 - RNA, 19 nt, Artificial Sequence
  Description of Artificial Sequence: Synthetic oligonucleotide
  Antisense Strand to SEQ ID NO: 452151
cuauuacuaacaauagucc

SEQ ID NO: 452153 - RNA, 19 nt, Artificial Sequence
  Description of Artificial Sequence: Synthetic oligonucleotide
  Sense strand starting at position 454 of SEQ ID NO: 316943
uuaguaauaguccacacau

SEQ ID NO: 452154 - RNA, 19 nt, Artificial Sequence
  Description of Artificial Sequence: Synthetic oligonucleotide
  Antisense Strand to SEQ ID NO: 452153
auguguggacuauuacuaa

SEQ ID NO: 452155 - RNA, 19 nt, Artificial Sequence
  Description of Artificial Sequence: Synthetic oligonucleotide
  Sense strand starting at position 595 of SEQ ID NO: 316943
acaguugaagacugugaau

SEQ ID NO: 452156 - RNA, 19 nt, Artificial Sequence
  Description of Artificial Sequence: Synthetic oligonucleotide
  Antisense Strand to SEQ ID NO: 452155
auucacagucuucaacugu

SEQ ID NO: 452157 - RNA, 19 nt, Artificial Sequence
  Description of Artificial Sequence: Synthetic oligonucleotide
  Sense strand starting at position 597 of SEQ ID NO: 316943
aguugaagacugugaauaa

SEQ ID NO: 452158 - RNA, 19 nt, Artificial Sequence
  Description of Artificial Sequence: Synthetic oligonucleotide
  Antisense Strand to SEQ ID NO: 452157
uuauucacagucuucaacu

SEQ ID NO: 452159 - RNA, 19 nt, Artificial Sequence
  Description of Artificial Sequence: Synthetic oligonucleotide
  Sense strand starting at position 688 of SEQ ID NO: 316943
uguguuauuuaugcucaac

SEQ ID NO: 452160 - RNA, 19 nt, Artificial Sequence
  Description of Artificial Sequence: Synthetic oligonucleotide
  Antisense Strand to SEQ ID NO: 452159
guugagcauaaauaacaca

SEQ ID NO: 452161 - RNA, 19 nt, Artificial Sequence
  Description of Artificial Sequence: Synthetic oligonucleotide
  Sense strand starting at position 792 of SEQ ID NO: 316943
ugaauuguuucccuaugaa

SEQ ID NO: 452162 - RNA, 19 nt, Artificial Sequence
  Description of Artificial Sequence: Synthetic oligonucleotide
  Antisense Strand to SEQ ID NO: 452161
uucauagggaaacaauuca

SEQ ID NO: 452163 - RNA, 19 nt, Artificial Sequence
  Description of Artificial Sequence: Synthetic oligonucleotide
  Sense strand starting at position 828 of SEQ ID NO: 316943
uugaaugcucacuaugacu

SEQ ID NO: 452164 - RNA, 19 nt, Artificial Sequence
  Description of Artificial Sequence: Synthetic oligonucleotide
  Antisense Strand to SEQ ID NO: 452163
agucauagugagcauucaa

SEQ ID NO: 452165 - RNA, 19 nt, Artificial Sequence
  Description of Artificial Sequence: Synthetic oligonucleotide
  Sense strand starting at position 911 of SEQ ID NO: 316943
ugguuugcuuaucuaauuu

SEQ ID NO: 452166 - RNA, 19 nt, Artificial Sequence
  Description of Artificial Sequence: Synthetic oligonucleotide
  Antisense Strand to SEQ ID NO: 452165
aaauuagauaagcaaacca

SEQ ID NO: 452167 - RNA, 19 nt, Artificial Sequence
  Description of Artificial Sequence: Synthetic oligonucleotide
  Sense strand starting at position 964 of SEQ ID NO: 316943
gcucaugucucauuuacca

SEQ ID NO: 452168 - RNA, 19 nt, Artificial Sequence
  Description of Artificial Sequence: Synthetic oligonucleotide
  Antisense Strand to SEQ ID NO: 452167
ugguaaaugagacaugagc

SEQ ID NO: 452169 - RNA, 19 nt, Artificial Sequence
  Description of Artificial Sequence: Synthetic oligonucleotide
  Sense strand starting at position 995 of SEQ ID NO: 316943
uguuuagaugcucaauaga

SEQ ID NO: 452170 - RNA, 19 nt, Artificial Sequence
  Description of Artificial Sequence: Synthetic oligonucleotide
  Antisense Strand to SEQ ID NO: 452169
ucuauugagcaucuaaaca

SEQ ID NO: 452171 - RNA, 19 nt, Artificial Sequence
  Description of Artificial Sequence: Synthetic oligonucleotide
  Sense strand starting at position 1022 of SEQ ID NO: 316943
ugaccaagucagugaauga

SEQ ID NO: 452172 - RNA, 19 nt, Artificial Sequence
  Description of Artificial Sequence: Synthetic oligonucleotide
  Antisense Strand to SEQ ID NO: 452171
ucauucacugacuugguca

SEQ ID NO: 452173 - RNA, 19 nt, Artificial Sequence
  Description of Artificial Sequence: Synthetic oligonucleotide
  Sense strand starting at position 1064 of SEQ ID NO: 316943
aagagauugucccuuugau

SEQ ID NO: 452174 - RNA, 19 nt, Artificial Sequence
  Description of Artificial Sequence: Synthetic oligonucleotide
  Antisense Strand to SEQ ID NO: 452173
aucaaagggacaaucucuu

SEQ ID NO: 452175 - RNA, 19 nt, Artificial Sequence
  Description of Artificial Sequence: Synthetic oligonucleotide
  Sense strand starting at position 1074 of SEQ ID NO: 316943
cccuuugaugcugaaugga

SEQ ID NO: 452176 - RNA, 19 nt, Artificial Sequence
  Description of Artificial Sequence: Synthetic oligonucleotide
  Antisense Strand to SEQ ID NO: 452175
uccauucagcaucaaaggg

SEQ ID NO: 452177 - RNA, 19 nt, Artificial Sequence
  Description of Artificial Sequence: Synthetic oligonucleotide
  Sense strand starting at position 1379 of SEQ ID NO: 316943
cugauuggguuccucugaa

SEQ ID NO: 452178 - RNA, 19 nt, Artificial Sequence
  Description of Artificial Sequence: Synthetic oligonucleotide
  Antisense Strand to SEQ ID NO: 452177
uucagaggaacccaaucag

SEQ ID NO: 452179 - RNA, 19 nt, Artificial Sequence
  Description of Artificial Sequence: Synthetic oligonucleotide
  Sense strand starting at position 1441 of SEQ ID NO: 316943
gacaauuccuaggugacca

SEQ ID NO: 452180 - RNA, 19 nt, Artificial Sequence
  Description of Artificial Sequence: Synthetic oligonucleotide
  Antisense Strand to SEQ ID NO: 452179
uggucaccuaggaauuguc

SEQ ID NO: 452181 - RNA, 19 nt, Artificial Sequence
  Description of Artificial Sequence: Synthetic oligonucleotide
  Sense strand starting at position 1456 of SEQ ID NO: 316943
accaacacuuaguuguaua

SEQ ID NO: 452182 - RNA, 19 nt, Artificial Sequence
  Description of Artificial Sequence: Synthetic oligonucleotide
  Antisense Strand to SEQ ID NO: 452181
uauacaacuaaguguuggu

SEQ ID NO: 452183 - RNA, 19 nt, Artificial Sequence
  Description of Artificial Sequence: Synthetic oligonucleotide
  Sense strand starting at position 1550 of SEQ ID NO: 316943
aggauaauguccuccaaga

SEQ ID NO: 452184 - RNA, 19 nt, Artificial Sequence
  Description of Artificial Sequence: Synthetic oligonucleotide
  Antisense Strand to SEQ ID NO: 452183
ucuuggaggacauuauccu

SEQ ID NO: 452185 - RNA, 19 nt, Artificial Sequence
  Description of Artificial Sequence: Synthetic oligonucleotide
  Sense strand starting at position 1571 of SEQ ID NO: 316943
uaauaauggcauuagugua

SEQ ID NO: 452186 - RNA, 19 nt, Artificial Sequence
  Description of Artificial Sequence: Synthetic oligonucleotide
  Antisense Strand to SEQ ID NO: 452185
uacacuaaugccauuauua

SEQ ID NO: 452187 - RNA, 19 nt, Artificial Sequence
  Description of Artificial Sequence: Synthetic oligonucleotide
  Sense strand starting at position 1595 of SEQ ID NO: 316943
aucuuaguauuaccuggau

SEQ ID NO: 452188 - RNA, 19 nt, Artificial Sequence
  Description of Artificial Sequence: Synthetic oligonucleotide
  Antisense Strand to SEQ ID NO: 452187
auccagguaauacuaagau

SEQ ID NO: 452189 - RNA, 19 nt, Artificial Sequence
  Description of Artificial Sequence: Synthetic oligonucleotide
  Sense strand starting at position 1598 of SEQ ID NO: 316943
uuaguauuaccuggaucau

SEQ ID NO: 452190 - RNA, 19 nt, Artificial Sequence
  Description of Artificial Sequence: Synthetic oligonucleotide
  Antisense Strand to SEQ ID NO: 452189
augauccagguaauacuaa

SEQ ID NO: 452191 - RNA, 19 nt, Artificial Sequence
  Description of Artificial Sequence: Synthetic oligonucleotide
  Sense strand starting at position 1859 of SEQ ID NO: 316943
uacaacauguggucacaga

SEQ ID NO: 452192 - RNA, 19 nt, Artificial Sequence
  Description of Artificial Sequence: Synthetic oligonucleotide
  Antisense Strand to SEQ ID NO: 452191
ucugugaccacauguugua

SEQ ID NO: 452193 - RNA, 19 nt, Artificial Sequence
  Description of Artificial Sequence: Synthetic oligonucleotide
  Sense strand starting at position 1919 of SEQ ID NO: 316943
gaauguuuccagcagaacu

SEQ ID NO: 452194 - RNA, 19 nt, Artificial Sequence
  Description of Artificial Sequence: Synthetic oligonucleotide
  Antisense Strand to SEQ ID NO: 452193
aguucugcuggaaacauuc

SEQ ID NO: 452195 - RNA, 19 nt, Artificial Sequence
  Description of Artificial Sequence: Synthetic oligonucleotide
  Sense strand starting at position 1921 of SEQ ID NO: 316943
auguuuccagcagaacuuu

SEQ ID NO: 452196 - RNA, 19 nt, Artificial Sequence
  Description of Artificial Sequence: Synthetic oligonucleotide
  Antisense Strand to SEQ ID NO: 452195
aaaguucugcuggaaacau

SEQ ID NO: 452197 - RNA, 19 nt, Artificial Sequence
  Description of Artificial Sequence: Synthetic oligonucleotide
  Sense strand starting at position 1994 of SEQ ID NO: 316943
cugucauggcuguaggaaa

SEQ ID NO: 452198 - RNA, 19 nt, Artificial Sequence
  Description of Artificial Sequence: Synthetic oligonucleotide
  Antisense Strand to SEQ ID NO: 452197
uuuccuacagccaugacag

SEQ ID NO: 452199 - RNA, 19 nt, Artificial Sequence
  Description of Artificial Sequence: Synthetic oligonucleotide
  Sense strand starting at position 2199 of SEQ ID NO: 316943
uguaguuuacaaugagaag

SEQ ID NO: 452200 - RNA, 19 nt, Artificial Sequence
  Description of Artificial Sequence: Synthetic oligonucleotide
  Antisense Strand to SEQ ID NO: 452199
cuucucauuguaaacuaca

SEQ ID NO: 452201 - RNA, 19 nt, Artificial Sequence
  Description of Artificial Sequence: Synthetic oligonucleotide
  Sense strand starting at position 2312 of SEQ ID NO: 316943
auguuaacucaucaaugug

SEQ ID NO: 452202 - RNA, 19 nt, Artificial Sequence
  Description of Artificial Sequence: Synthetic oligonucleotide
  Antisense Strand to SEQ ID NO: 452201
cacauugaugaguuaacau

SEQ ID NO: 452203 - RNA, 19 nt, Artificial Sequence
  Description of Artificial Sequence: Synthetic oligonucleotide
  Sense strand starting at position 2786 of SEQ ID NO: 316943
gggagaaucuauuccaugu

SEQ ID NO: 452204 - RNA, 19 nt, Artificial Sequence
  Description of Artificial Sequence: Synthetic oligonucleotide
  Antisense Strand to SEQ ID NO: 452203
acauggaauagauucuccc

SEQ ID NO: 452205 - RNA, 19 nt, Artificial Sequence
  Description of Artificial Sequence: Synthetic oligonucleotide
  Sense strand starting at position 3070 of SEQ ID NO: 316943
acgugaacaccuugaagga

SEQ ID NO: 452206 - RNA, 19 nt, Artificial Sequence
  Description of Artificial Sequence: Synthetic oligonucleotide
  Antisense Strand to SEQ ID NO: 452205
uccuucaagguguucacgu

SEQ ID NO: 452207 - RNA, 19 nt, Artificial Sequence
  Description of Artificial Sequence: Synthetic oligonucleotide
  Sense strand starting at position 3202 of SEQ ID NO: 316943
cuccuaaaucaggguguaa

SEQ ID NO: 452208 - RNA, 19 nt, Artificial Sequence
  Description of Artificial Sequence: Synthetic oligonucleotide
  Antisense Strand to SEQ ID NO: 452207
uuacacccugauuuaggag

SEQ ID NO: 452209 - RNA, 19 nt, Artificial Sequence
  Description of Artificial Sequence: Synthetic oligonucleotide
  Sense strand starting at position 3204 of SEQ ID NO: 316943
ccuaaaucaggguguaaug

SEQ ID NO: 452210 - RNA, 19 nt, Artificial Sequence
  Description of Artificial Sequence: Synthetic oligonucleotide
  Antisense Strand to SEQ ID NO: 452209
cauuacacccugauuuagg

SEQ ID NO: 452211 - RNA, 19 nt, Artificial Sequence
  Description of Artificial Sequence: Synthetic oligonucleotide
  Sense strand starting at position 3206 of SEQ ID NO: 316943
uaaaucaggguguaauguu

SEQ ID NO: 452212 - RNA, 19 nt, Artificial Sequence
  Description of Artificial Sequence: Synthetic oligonucleotide
  Antisense Strand to SEQ ID NO: 452211
aacauuacacccugauuua

SEQ ID NO: 452213 - RNA, 19 nt, Artificial Sequence
  Description of Artificial Sequence: Synthetic oligonucleotide
  Sense strand starting at position 3384 of SEQ ID NO: 316943
acugacaccguauguauuu

SEQ ID NO: 452214 - RNA, 19 nt, Artificial Sequence
  Description of Artificial Sequence: Synthetic oligonucleotide
  Antisense Strand to SEQ ID NO: 452213
aaauacauacggugucagu

SEQ ID NO: 452215 - RNA, 19 nt, Artificial Sequence
  Description of Artificial Sequence: Synthetic oligonucleotide
  Sense strand starting at position 3616 of SEQ ID NO: 316943
agacauucuuuagcaauga

SEQ ID NO: 452216 - RNA, 19 nt, Artificial Sequence
  Description of Artificial Sequence: Synthetic oligonucleotide
  Antisense Strand to SEQ ID NO: 452215
ucauugcuaaagaaugucu

SEQ ID NO: 452217 - RNA, 19 nt, Artificial Sequence
  Description of Artificial Sequence: Synthetic oligonucleotide
  Sense strand starting at position 3782 of SEQ ID NO: 316943
augauuauaucagcacaug

SEQ ID NO: 452218 - RNA, 19 nt, Artificial Sequence
  Description of Artificial Sequence: Synthetic oligonucleotide
  Antisense Strand to SEQ ID NO: 452217
caugugcugauauaaucau

SEQ ID NO: 452219 - RNA, 19 nt, Artificial Sequence
  Description of Artificial Sequence: Synthetic oligonucleotide
  Sense strand starting at position 3783 of SEQ ID NO: 316943
ugauuauaucagcacaugu

SEQ ID NO: 452220 - RNA, 19 nt, Artificial Sequence
  Description of Artificial Sequence: Synthetic oligonucleotide
  Antisense Strand to SEQ ID NO: 452219
acaugugcugauauaauca

SEQ ID NO: 452221 - RNA, 19 nt, Artificial Sequence
  Description of Artificial Sequence: Synthetic oligonucleotide
  Sense strand starting at position 3942 of SEQ ID NO: 316943
guguauuacccauacugau

SEQ ID NO: 452222 - RNA, 19 nt, Artificial Sequence
  Description of Artificial Sequence: Synthetic oligonucleotide
  Antisense Strand to SEQ ID NO: 452221
aucaguauggguaauacac

SEQ ID NO: 452223 - RNA, 19 nt, Artificial Sequence
  Description of Artificial Sequence: Synthetic oligonucleotide
  Sense strand starting at position 16 of SEQ ID NO: 316944
aucugaauagccuauguuu

SEQ ID NO: 452224 - RNA, 19 nt, Artificial Sequence
  Description of Artificial Sequence: Synthetic oligonucleotide
  Antisense Strand to SEQ ID NO: 452223
aaacauaggcuauucagau

SEQ ID NO: 452225 - RNA, 19 nt, Artificial Sequence
  Description of Artificial Sequence: Synthetic oligonucleotide
  Sense strand starting at position 193 of SEQ ID NO: 316944
ggucauguagcaagugguu

SEQ ID NO: 452226 - RNA, 19 nt, Artificial Sequence
  Description of Artificial Sequence: Synthetic oligonucleotide
  Antisense Strand to SEQ ID NO: 452225
aaccacuugcuacaugacc

SEQ ID NO: 452227 - RNA, 19 nt, Artificial Sequence
  Description of Artificial Sequence: Synthetic oligonucleotide
  Sense strand starting at position 200 of SEQ ID NO: 316944
uagcaagugguuuauaaac

SEQ ID NO: 452228 - RNA, 19 nt, Artificial Sequence
  Description of Artificial Sequence: Synthetic oligonucleotide
  Antisense Strand to SEQ ID NO: 452227
guuuauaaaccacuugcua

SEQ ID NO: 452229 - RNA, 19 nt, Artificial Sequence
  Description of Artificial Sequence: Synthetic oligonucleotide
  Sense strand starting at position 324 of SEQ ID NO: 316944
uggcacacccgagauauau

SEQ ID NO: 452230 - RNA, 19 nt, Artificial Sequence
  Description of Artificial Sequence: Synthetic oligonucleotide
  Antisense Strand to SEQ ID NO: 452229
auauaucucgggugugcca

SEQ ID NO: 452231 - RNA, 19 nt, Artificial Sequence
  Description of Artificial Sequence: Synthetic oligonucleotide
  Sense strand starting at position 472 of SEQ ID NO: 316944
uuccauguggcauaacgaa

SEQ ID NO: 452232 - RNA, 19 nt, Artificial Sequence
  Description of Artificial Sequence: Synthetic oligonucleotide
  Antisense Strand to SEQ ID NO: 452231
uucguuaugccacauggaa

SEQ ID NO: 452233 - RNA, 19 nt, Artificial Sequence
  Description of Artificial Sequence: Synthetic oligonucleotide
  Sense strand starting at position 525 of SEQ ID NO: 316944
ucguuccauccugagaacu

SEQ ID NO: 452234 - RNA, 19 nt, Artificial Sequence
  Description of Artificial Sequence: Synthetic oligonucleotide
  Antisense Strand to SEQ ID NO: 452233
aguucucaggauggaacga

SEQ ID NO: 452235 - RNA, 19 nt, Artificial Sequence
  Description of Artificial Sequence: Synthetic oligonucleotide
  Sense strand starting at position 655 of SEQ ID NO: 316944
ugaagaauaucugcuugua

SEQ ID NO: 452236 - RNA, 19 nt, Artificial Sequence
  Description of Artificial Sequence: Synthetic oligonucleotide
  Antisense Strand to SEQ ID NO: 452235
uacaagcagauauucuuca

SEQ ID NO: 452237 - RNA, 19 nt, Artificial Sequence
  Description of Artificial Sequence: Synthetic oligonucleotide
  Sense strand starting at position 727 of SEQ ID NO: 316944
aguggaauuccacagucac

SEQ ID NO: 452238 - RNA, 19 nt, Artificial Sequence
  Description of Artificial Sequence: Synthetic oligonucleotide
  Antisense Strand to SEQ ID NO: 452237
gugacuguggaauuccacu

SEQ ID NO: 452239 - RNA, 19 nt, Artificial Sequence
  Description of Artificial Sequence: Synthetic oligonucleotide
  Sense strand starting at position 812 of SEQ ID NO: 316944
gacauuuauugguaaacug

SEQ ID NO: 452240 - RNA, 19 nt, Artificial Sequence
  Description of Artificial Sequence: Synthetic oligonucleotide
  Antisense Strand to SEQ ID NO: 452239
caguuuaccaauaaauguc

SEQ ID NO: 452241 - RNA, 19 nt, Artificial Sequence
  Description of Artificial Sequence: Synthetic oligonucleotide
  Sense strand starting at position 954 of SEQ ID NO: 316944
uccugaggucucuauaauu

SEQ ID NO: 452242 - RNA, 19 nt, Artificial Sequence
  Description of Artificial Sequence: Synthetic oligonucleotide
  Antisense Strand to SEQ ID NO: 452241
aauuauagagaccucagga

SEQ ID NO: 452243 - RNA, 19 nt, Artificial Sequence
  Description of Artificial Sequence: Synthetic oligonucleotide
  Sense strand starting at position 982 of SEQ ID NO: 316944
ucucuuagccaacgaauaa

SEQ ID NO: 452244 - RNA, 19 nt, Artificial Sequence
  Description of Artificial Sequence: Synthetic oligonucleotide
  Antisense Strand to SEQ ID NO: 452243
uuauucguuggcuaagaga

SEQ ID NO: 452245 - RNA, 19 nt, Artificial Sequence
  Description of Artificial Sequence: Synthetic oligonucleotide
  Sense strand starting at position 1020 of SEQ ID NO: 316944
agaaccuuccagugcauaa

SEQ ID NO: 452246 - RNA, 19 nt, Artificial Sequence
  Description of Artificial Sequence: Synthetic oligonucleotide
  Antisense Strand to SEQ ID NO: 452245
uuaugcacuggaagguucu

SEQ ID NO: 452247 - RNA, 19 nt, Artificial Sequence
  Description of Artificial Sequence: Synthetic oligonucleotide
  Sense strand starting at position 1116 of SEQ ID NO: 316944
cguauuacacaguaagaag

SEQ ID NO: 452248 - RNA, 19 nt, Artificial Sequence
  Description of Artificial Sequence: Synthetic oligonucleotide
  Antisense Strand to SEQ ID NO: 452247
cuucuuacuguguaauacg

SEQ ID NO: 452249 - RNA, 19 nt, Artificial Sequence
  Description of Artificial Sequence: Synthetic oligonucleotide
  Sense strand starting at position 1131 of SEQ ID NO: 316944
gaagcaaccuguuccauag

SEQ ID NO: 452250 - RNA, 19 nt, Artificial Sequence
  Description of Artificial Sequence: Synthetic oligonucleotide
  Antisense Strand to SEQ ID NO: 452249
cuauggaacagguugcuuc

SEQ ID NO: 452251 - RNA, 19 nt, Artificial Sequence
  Description of Artificial Sequence: Synthetic oligonucleotide
  Sense strand starting at position 1135 of SEQ ID NO: 316944
caaccuguuccauaggugu

SEQ ID NO: 452252 - RNA, 19 nt, Artificial Sequence
  Description of Artificial Sequence: Synthetic oligonucleotide
  Antisense Strand to SEQ ID NO: 452251
acaccuauggaacagguug

SEQ ID NO: 452253 - RNA, 19 nt, Artificial Sequence
  Description of Artificial Sequence: Synthetic oligonucleotide
  Sense strand starting at position 1252 of SEQ ID NO: 316944
uuaauuaggccauagaucu

SEQ ID NO: 452254 - RNA, 19 nt, Artificial Sequence
  Description of Artificial Sequence: Synthetic oligonucleotide
  Antisense Strand to SEQ ID NO: 452253
agaucuauggccuaauuaa

SEQ ID NO: 452255 - RNA, 19 nt, Artificial Sequence
  Description of Artificial Sequence: Synthetic oligonucleotide
  Sense strand starting at position 1382 of SEQ ID NO: 316944
uuguuacaucuguacaaug

SEQ ID NO: 452256 - RNA, 19 nt, Artificial Sequence
  Description of Artificial Sequence: Synthetic oligonucleotide
  Antisense Strand to SEQ ID NO: 452255
cauuguacagauguaacaa

SEQ ID NO: 452257 - RNA, 19 nt, Artificial Sequence
  Description of Artificial Sequence: Synthetic oligonucleotide
  Sense strand starting at position 1384 of SEQ ID NO: 316944
guuacaucuguacaaugca

SEQ ID NO: 452258 - RNA, 19 nt, Artificial Sequence
  Description of Artificial Sequence: Synthetic oligonucleotide
  Antisense Strand to SEQ ID NO: 452257
ugcauuguacagauguaac

SEQ ID NO: 452259 - RNA, 19 nt, Artificial Sequence
  Description of Artificial Sequence: Synthetic oligonucleotide
  Sense strand starting at position 1431 of SEQ ID NO: 316944
ccagauaagccaugaauca

SEQ ID NO: 452260 - RNA, 19 nt, Artificial Sequence
  Description of Artificial Sequence: Synthetic oligonucleotide
  Antisense Strand to SEQ ID NO: 452259
ugauucauggcuuaucugg

SEQ ID NO: 452261 - RNA, 19 nt, Artificial Sequence
  Description of Artificial Sequence: Synthetic oligonucleotide
  Sense strand starting at position 1559 of SEQ ID NO: 316944
cugucuuagacuugacgaa

SEQ ID NO: 452262 - RNA, 19 nt, Artificial Sequence
  Description of Artificial Sequence: Synthetic oligonucleotide
  Antisense Strand to SEQ ID NO: 452261
uucgucaagucuaagacag

SEQ ID NO: 452263 - RNA, 19 nt, Artificial Sequence
  Description of Artificial Sequence: Synthetic oligonucleotide
  Sense strand starting at position 1563 of SEQ ID NO: 316944
cuuagacuugacgaaguua

SEQ ID NO: 452264 - RNA, 19 nt, Artificial Sequence
  Description of Artificial Sequence: Synthetic oligonucleotide
  Antisense Strand to SEQ ID NO: 452263
uaacuucgucaagucuaag

SEQ ID NO: 452265 - RNA, 19 nt, Artificial Sequence
  Description of Artificial Sequence: Synthetic oligonucleotide
  Sense strand starting at position 1840 of SEQ ID NO: 316944
gggaacucuuguguuaauu

SEQ ID NO: 452266 - RNA, 19 nt, Artificial Sequence
  Description of Artificial Sequence: Synthetic oligonucleotide
  Antisense Strand to SEQ ID NO: 452265
aauuaacacaagaguuccc

SEQ ID NO: 452267 - RNA, 19 nt, Artificial Sequence
  Description of Artificial Sequence: Synthetic oligonucleotide
  Sense strand starting at position 1853 of SEQ ID NO: 316944
uuaauuccacuuugugaug

SEQ ID NO: 452268 - RNA, 19 nt, Artificial Sequence
  Description of Artificial Sequence: Synthetic oligonucleotide
  Antisense Strand to SEQ ID NO: 452267
caucacaaaguggaauuaa

SEQ ID NO: 452269 - RNA, 19 nt, Artificial Sequence
  Description of Artificial Sequence: Synthetic oligonucleotide
  Sense strand starting at position 1862 of SEQ ID NO: 316944
cuuugugaugacuaaguag

SEQ ID NO: 452270 - RNA, 19 nt, Artificial Sequence
  Description of Artificial Sequence: Synthetic oligonucleotide
  Antisense Strand to SEQ ID NO: 452269
cuacuuagucaucacaaag

SEQ ID NO: 452271 - RNA, 19 nt, Artificial Sequence
  Description of Artificial Sequence: Synthetic oligonucleotide
  Sense strand starting at position 2252 of SEQ ID NO: 316944
auaucucuacguuaucauu

SEQ ID NO: 452272 - RNA, 19 nt, Artificial Sequence
  Description of Artificial Sequence: Synthetic oligonucleotide
  Antisense Strand to SEQ ID NO: 452271
aaugauaacguagagauau

SEQ ID NO: 452273 - RNA, 19 nt, Artificial Sequence
  Description of Artificial Sequence: Synthetic oligonucleotide
  Sense strand starting at position 2288 of SEQ ID NO: 316944
aggucugcuggagaugaau

SEQ ID NO: 452274 - RNA, 19 nt, Artificial Sequence
  Description of Artificial Sequence: Synthetic oligonucleotide
  Antisense Strand to SEQ ID NO: 452273
auucaucuccagcagaccu

SEQ ID NO: 452275 - RNA, 19 nt, Artificial Sequence
  Description of Artificial Sequence: Synthetic oligonucleotide
  Sense strand starting at position 2367 of SEQ ID NO: 316944
gguauagaauucuauuuga

SEQ ID NO: 452276 - RNA, 19 nt, Artificial Sequence
  Description of Artificial Sequence: Synthetic oligonucleotide
  Antisense Strand to SEQ ID NO: 452275
ucaaauagaauucuauacc

SEQ ID NO: 452277 - RNA, 19 nt, Artificial Sequence
  Description of Artificial Sequence: Synthetic oligonucleotide
  Sense strand starting at position 2584 of SEQ ID NO: 316944
gguuuacugagcuacuuga

SEQ ID NO: 452278 - RNA, 19 nt, Artificial Sequence
  Description of Artificial Sequence: Synthetic oligonucleotide
  Antisense Strand to SEQ ID NO: 452277
ucaaguagcucaguaaacc

SEQ ID NO: 452279 - RNA, 19 nt, Artificial Sequence
  Description of Artificial Sequence: Synthetic oligonucleotide
  Sense strand starting at position 2730 of SEQ ID NO: 316944
uucuccuuguccuugauuu

SEQ ID NO: 452280 - RNA, 19 nt, Artificial Sequence
  Description of Artificial Sequence: Synthetic oligonucleotide
  Antisense Strand to SEQ ID NO: 452279
aaaucaaggacaaggagaa

SEQ ID NO: 452281 - RNA, 19 nt, Artificial Sequence
  Description of Artificial Sequence: Synthetic oligonucleotide
  Sense strand starting at position 2967 of SEQ ID NO: 316944
gucaguucugguucgguuu

SEQ ID NO: 452282 - RNA, 19 nt, Artificial Sequence
  Description of Artificial Sequence: Synthetic oligonucleotide
  Antisense Strand to SEQ ID NO: 452281
aaaccgaaccagaacugac

SEQ ID NO: 452283 - RNA, 19 nt, Artificial Sequence
  Description of Artificial Sequence: Synthetic oligonucleotide
  Sense strand starting at position 3004 of SEQ ID NO: 316944
cucauuauggcuuguauuu

SEQ ID NO: 452284 - RNA, 19 nt, Artificial Sequence
  Description of Artificial Sequence: Synthetic oligonucleotide
  Antisense Strand to SEQ ID NO: 452283
aaauacaagccauaaugag

SEQ ID NO: 452285 - RNA, 19 nt, Artificial Sequence
  Description of Artificial Sequence: Synthetic oligonucleotide
  Sense strand starting at position 3101 of SEQ ID NO: 316944
uuuguaucccuauaaaugg

SEQ ID NO: 452286 - RNA, 19 nt, Artificial Sequence
  Description of Artificial Sequence: Synthetic oligonucleotide
  Antisense Strand to SEQ ID NO: 452285
ccauuuauagggauacaaa

SEQ ID NO: 452287 - RNA, 19 nt, Artificial Sequence
  Description of Artificial Sequence: Synthetic oligonucleotide
  Sense strand starting at position 3206 of SEQ ID NO: 316944
caaggauaguacucagucu

SEQ ID NO: 452288 - RNA, 19 nt, Artificial Sequence
  Description of Artificial Sequence: Synthetic oligonucleotide
  Antisense Strand to SEQ ID NO: 452287
agacugaguacuauccuug

SEQ ID NO: 452289 - RNA, 19 nt, Artificial Sequence
  Description of Artificial Sequence: Synthetic oligonucleotide
  Sense strand starting at position 3237 of SEQ ID NO: 316944
uccucuuuacugugaagag

SEQ ID NO: 452290 - RNA, 19 nt, Artificial Sequence
  Description of Artificial Sequence: Synthetic oligonucleotide
  Antisense Strand to SEQ ID NO: 452289
cucuucacaguaaagagga

SEQ ID NO: 452291 - RNA, 19 nt, Artificial Sequence
  Description of Artificial Sequence: Synthetic oligonucleotide
  Sense strand starting at position 3295 of SEQ ID NO: 316944
ggcuguuuggaacaguaau

SEQ ID NO: 452292 - RNA, 19 nt, Artificial Sequence
  Description of Artificial Sequence: Synthetic oligonucleotide
  Antisense Strand to SEQ ID NO: 452291
auuacuguuccaaacagcc

SEQ ID NO: 452293 - RNA, 19 nt, Artificial Sequence
  Description of Artificial Sequence: Synthetic oligonucleotide
  Sense strand starting at position 3338 of SEQ ID NO: 316944
ggauacuguuaucucuagu

SEQ ID NO: 452294 - RNA, 19 nt, Artificial Sequence
  Description of Artificial Sequence: Synthetic oligonucleotide
  Antisense Strand to SEQ ID NO: 452293
acuagagauaacaguaucc

SEQ ID NO: 452295 - RNA, 19 nt, Artificial Sequence
  Description of Artificial Sequence: Synthetic oligonucleotide
  Sense strand starting at position 3492 of SEQ ID NO: 316944
gugcuaugccuggcagagu

SEQ ID NO: 452296 - RNA, 19 nt, Artificial Sequence
  Description of Artificial Sequence: Synthetic oligonucleotide
  Antisense Strand to SEQ ID NO: 452295
acucugccaggcauagcac

SEQ ID NO: 452297 - RNA, 19 nt, Artificial Sequence
  Description of Artificial Sequence: Synthetic oligonucleotide
  Sense strand starting at position 3809 of SEQ ID NO: 316944
acuacaucuuggccagagu

SEQ ID NO: 452298 - RNA, 19 nt, Artificial Sequence
  Description of Artificial Sequence: Synthetic oligonucleotide
  Antisense Strand to SEQ ID NO: 452297
acucuggccaagauguagu

SEQ ID NO: 452299 - RNA, 19 nt, Artificial Sequence
  Description of Artificial Sequence: Synthetic oligonucleotide
  Sense strand starting at position 3864 of SEQ ID NO: 316944
aacuauagagucggugaau

SEQ ID NO: 452300 - RNA, 19 nt, Artificial Sequence
  Description of Artificial Sequence: Synthetic oligonucleotide
  Antisense Strand to SEQ ID NO: 452299
auucaccgacucuauaguu

SEQ ID NO: 452301 - RNA, 19 nt, Artificial Sequence
  Description of Artificial Sequence: Synthetic oligonucleotide
  Sense strand starting at position 3865 of SEQ ID NO: 316944
acuauagagucggugaaua

SEQ ID NO: 452302 - RNA, 19 nt, Artificial Sequence
  Description of Artificial Sequence: Synthetic oligonucleotide
  Antisense Strand to SEQ ID NO: 452301
uauucaccgacucuauagu

SEQ ID NO: 452303 - RNA, 19 nt, Artificial Sequence
  Description of Artificial Sequence: Synthetic oligonucleotide
  Sense strand starting at position 408 of SEQ ID NO: 316945
ucuauaagguaguuugaga

SEQ ID NO: 452304 - RNA, 19 nt, Artificial Sequence
  Description of Artificial Sequence: Synthetic oligonucleotide
  Antisense Strand to SEQ ID NO: 452303
ucucaaacuaccuuauaga

SEQ ID NO: 452305 - RNA, 19 nt, Artificial Sequence
  Description of Artificial Sequence: Synthetic oligonucleotide
  Sense strand starting at position 501 of SEQ ID NO: 316945
aguagaaaucaguaugcau

SEQ ID NO: 452306 - RNA, 19 nt, Artificial Sequence
  Description of Artificial Sequence: Synthetic oligonucleotide
  Antisense Strand to SEQ ID NO: 452305
augcauacugauuucuacu

SEQ ID NO: 452307 - RNA, 19 nt, Artificial Sequence
  Description of Artificial Sequence: Synthetic oligonucleotide
  Sense strand starting at position 504 of SEQ ID NO: 316945
agaaaucaguaugcauaua

SEQ ID NO: 452308 - RNA, 19 nt, Artificial Sequence
  Description of Artificial Sequence: Synthetic oligonucleotide
  Antisense Strand to SEQ ID NO: 452307
uauaugcauacugauuucu

SEQ ID NO: 452309 - RNA, 19 nt, Artificial Sequence
  Description of Artificial Sequence: Synthetic oligonucleotide
  Sense strand starting at position 583 of SEQ ID NO: 316945
auggaaauccuaugguaau

SEQ ID NO: 452310 - RNA, 19 nt, Artificial Sequence
  Description of Artificial Sequence: Synthetic oligonucleotide
  Antisense Strand to SEQ ID NO: 452309
auuaccauaggauuuccau

SEQ ID NO: 452311 - RNA, 19 nt, Artificial Sequence
  Description of Artificial Sequence: Synthetic oligonucleotide
  Sense strand starting at position 646 of SEQ ID NO: 316945
cuauaugagcaguaccuua

SEQ ID NO: 452312 - RNA, 19 nt, Artificial Sequence
  Description of Artificial Sequence: Synthetic oligonucleotide
  Antisense Strand to SEQ ID NO: 452311
uaagguacugcucauauag

SEQ ID NO: 452313 - RNA, 19 nt, Artificial Sequence
  Description of Artificial Sequence: Synthetic oligonucleotide
  Sense strand starting at position 895 of SEQ ID NO: 316945
cauguauuaccugagcuag

SEQ ID NO: 452314 - RNA, 19 nt, Artificial Sequence
  Description of Artificial Sequence: Synthetic oligonucleotide
  Antisense Strand to SEQ ID NO: 452313
cuagcucagguaauacaug

SEQ ID NO: 452315 - RNA, 19 nt, Artificial Sequence
  Description of Artificial Sequence: Synthetic oligonucleotide
  Sense strand starting at position 906 of SEQ ID NO: 316945
ugagcuaggucauuagaaa

SEQ ID NO: 452316 - RNA, 19 nt, Artificial Sequence
  Description of Artificial Sequence: Synthetic oligonucleotide
  Antisense Strand to SEQ ID NO: 452315
uuucuaaugaccuagcuca

SEQ ID NO: 452317 - RNA, 19 nt, Artificial Sequence
  Description of Artificial Sequence: Synthetic oligonucleotide
  Sense strand starting at position 992 of SEQ ID NO: 316945
aguuucucucaucaguaaa

SEQ ID NO: 452318 - RNA, 19 nt, Artificial Sequence
  Description of Artificial Sequence: Synthetic oligonucleotide
  Antisense Strand to SEQ ID NO: 452317
uuuacugaugagagaaacu

SEQ ID NO: 452319 - RNA, 19 nt, Artificial Sequence
  Description of Artificial Sequence: Synthetic oligonucleotide
  Sense strand starting at position 1008 of SEQ ID NO: 316945
aaaugacuauggucuguau

SEQ ID NO: 452320 - RNA, 19 nt, Artificial Sequence
  Description of Artificial Sequence: Synthetic oligonucleotide
  Antisense Strand to SEQ ID NO: 452319
auacagaccauagucauuu

SEQ ID NO: 452321 - RNA, 19 nt, Artificial Sequence
  Description of Artificial Sequence: Synthetic oligonucleotide
  Sense strand starting at position 1019 of SEQ ID NO: 316945
gucuguauuucugcauuaa

SEQ ID NO: 452322 - RNA, 19 nt, Artificial Sequence
  Description of Artificial Sequence: Synthetic oligonucleotide
  Antisense Strand to SEQ ID NO: 452321
uuaaugcagaaauacagac

SEQ ID NO: 452323 - RNA, 19 nt, Artificial Sequence
  Description of Artificial Sequence: Synthetic oligonucleotide
  Sense strand starting at position 1334 of SEQ ID NO: 316945
ugcaaauuucccggucuca

SEQ ID NO: 452324 - RNA, 19 nt, Artificial Sequence
  Description of Artificial Sequence: Synthetic oligonucleotide
  Antisense Strand to SEQ ID NO: 452323
ugagaccgggaaauuugca

SEQ ID NO: 452325 - RNA, 19 nt, Artificial Sequence
  Description of Artificial Sequence: Synthetic oligonucleotide
  Sense strand starting at position 1345 of SEQ ID NO: 316945
cggucucaucaauaacaag

SEQ ID NO: 452326 - RNA, 19 nt, Artificial Sequence
  Description of Artificial Sequence: Synthetic oligonucleotide
  Antisense Strand to SEQ ID NO: 452325
cuuguuauugaugagaccg

SEQ ID NO: 452327 - RNA, 19 nt, Artificial Sequence
  Description of Artificial Sequence: Synthetic oligonucleotide
  Sense strand starting at position 1462 of SEQ ID NO: 316945
gaaacuaauguccgaaagu

SEQ ID NO: 452328 - RNA, 19 nt, Artificial Sequence
  Description of Artificial Sequence: Synthetic oligonucleotide
  Antisense Strand to SEQ ID NO: 452327
acuuucggacauuaguuuc

SEQ ID NO: 452329 - RNA, 19 nt, Artificial Sequence
  Description of Artificial Sequence: Synthetic oligonucleotide
  Sense strand starting at position 1600 of SEQ ID NO: 316945
guagacugaugcuugggaa

SEQ ID NO: 452330 - RNA, 19 nt, Artificial Sequence
  Description of Artificial Sequence: Synthetic oligonucleotide
  Antisense Strand to SEQ ID NO: 452329
uucccaagcaucagucuac

SEQ ID NO: 452331 - RNA, 19 nt, Artificial Sequence
  Description of Artificial Sequence: Synthetic oligonucleotide
  Sense strand starting at position 1742 of SEQ ID NO: 316945
agaugaaaugucugaagug

SEQ ID NO: 452332 - RNA, 19 nt, Artificial Sequence
  Description of Artificial Sequence: Synthetic oligonucleotide
  Antisense Strand to SEQ ID NO: 452331
cacuucagacauuucaucu

SEQ ID NO: 452333 - RNA, 19 nt, Artificial Sequence
  Description of Artificial Sequence: Synthetic oligonucleotide
  Sense strand starting at position 1771 of SEQ ID NO: 316945
gggcaacaguucucuaaag

SEQ ID NO: 452334 - RNA, 19 nt, Artificial Sequence
  Description of Artificial Sequence: Synthetic oligonucleotide
  Antisense Strand to SEQ ID NO: 452333
cuuuagagaacuguugccc

SEQ ID NO: 452335 - RNA, 19 nt, Artificial Sequence
  Description of Artificial Sequence: Synthetic oligonucleotide
  Sense strand starting at position 2262 of SEQ ID NO: 316945
auacaagagucagcaguaa

SEQ ID NO: 452336 - RNA, 19 nt, Artificial Sequence
  Description of Artificial Sequence: Synthetic oligonucleotide
  Antisense Strand to SEQ ID NO: 452335
uuacugcugacucuuguau

SEQ ID NO: 452337 - RNA, 19 nt, Artificial Sequence
  Description of Artificial Sequence: Synthetic oligonucleotide
  Sense strand starting at position 2399 of SEQ ID NO: 316945
agcguuguugacuggauuu

SEQ ID NO: 452338 - RNA, 19 nt, Artificial Sequence
  Description of Artificial Sequence: Synthetic oligonucleotide
  Antisense Strand to SEQ ID NO: 452337
aaauccagucaacaacgcu

SEQ ID NO: 452339 - RNA, 19 nt, Artificial Sequence
  Description of Artificial Sequence: Synthetic oligonucleotide
  Sense strand starting at position 2423 of SEQ ID NO: 316945
ggguuuccuuaaguaauag

SEQ ID NO: 452340 - RNA, 19 nt, Artificial Sequence
  Description of Artificial Sequence: Synthetic oligonucleotide
  Antisense Strand to SEQ ID NO: 452339
cuauuacuuaaggaaaccc

SEQ ID NO: 452341 - RNA, 19 nt, Artificial Sequence
  Description of Artificial Sequence: Synthetic oligonucleotide
  Sense strand starting at position 2434 of SEQ ID NO: 316945
aguaauaguaaggguucua

SEQ ID NO: 452342 - RNA, 19 nt, Artificial Sequence
  Description of Artificial Sequence: Synthetic oligonucleotide
  Antisense Strand to SEQ ID NO: 452341
uagaacccuuacuauuacu

SEQ ID NO: 452343 - RNA, 19 nt, Artificial Sequence
  Description of Artificial Sequence: Synthetic oligonucleotide
  Sense strand starting at position 2474 of SEQ ID NO: 316945
uaaagagauggcugcuaga

SEQ ID NO: 452344 - RNA, 19 nt, Artificial Sequence
  Description of Artificial Sequence: Synthetic oligonucleotide
  Antisense Strand to SEQ ID NO: 452343
ucuagcagccaucucuuua

SEQ ID NO: 452345 - RNA, 19 nt, Artificial Sequence
  Description of Artificial Sequence: Synthetic oligonucleotide
  Sense strand starting at position 2550 of SEQ ID NO: 316945
caguaaguuuaagugagaa

SEQ ID NO: 452346 - RNA, 19 nt, Artificial Sequence
  Description of Artificial Sequence: Synthetic oligonucleotide
  Antisense Strand to SEQ ID NO: 452345
uucucacuuaaacuuacug

SEQ ID NO: 452347 - RNA, 19 nt, Artificial Sequence
  Description of Artificial Sequence: Synthetic oligonucleotide
  Sense strand starting at position 2821 of SEQ ID NO: 316945
uucuuugaucuuuauagug

SEQ ID NO: 452348 - RNA, 19 nt, Artificial Sequence
  Description of Artificial Sequence: Synthetic oligonucleotide
  Antisense Strand to SEQ ID NO: 452347
cacuauaaagaucaaagaa

SEQ ID NO: 452349 - RNA, 19 nt, Artificial Sequence
  Description of Artificial Sequence: Synthetic oligonucleotide
  Sense strand starting at position 2991 of SEQ ID NO: 316945
uugguuauuccugaaauuc

SEQ ID NO: 452350 - RNA, 19 nt, Artificial Sequence
  Description of Artificial Sequence: Synthetic oligonucleotide
  Antisense Strand to SEQ ID NO: 452349
gaauuucaggaauaaccaa

SEQ ID NO: 452351 - RNA, 19 nt, Artificial Sequence
  Description of Artificial Sequence: Synthetic oligonucleotide
  Sense strand starting at position 3007 of SEQ ID NO: 316945
uucucuguuuaacuggaaa

SEQ ID NO: 452352 - RNA, 19 nt, Artificial Sequence
  Description of Artificial Sequence: Synthetic oligonucleotide
  Antisense Strand to SEQ ID NO: 452351
uuuccaguuaaacagagaa

SEQ ID NO: 452353 - RNA, 19 nt, Artificial Sequence
  Description of Artificial Sequence: Synthetic oligonucleotide
  Sense strand starting at position 3010 of SEQ ID NO: 316945
ucuguuuaacuggaaagca

SEQ ID NO: 452354 - RNA, 19 nt, Artificial Sequence
  Description of Artificial Sequence: Synthetic oligonucleotide
  Antisense Strand to SEQ ID NO: 452353
ugcuuuccaguuaaacaga

SEQ ID NO: 452355 - RNA, 19 nt, Artificial Sequence
  Description of Artificial Sequence: Synthetic oligonucleotide
  Sense strand starting at position 3112 of SEQ ID NO: 316945
aauaaagaguuuccuggau

SEQ ID NO: 452356 - RNA, 19 nt, Artificial Sequence
  Description of Artificial Sequence: Synthetic oligonucleotide
  Antisense Strand to SEQ ID NO: 452355
auccaggaaacucuuuauu

SEQ ID NO: 452357 - RNA, 19 nt, Artificial Sequence
  Description of Artificial Sequence: Synthetic oligonucleotide
  Sense strand starting at position 3224 of SEQ ID NO: 316945
auugauucugcccaggaau

SEQ ID NO: 452358 - RNA, 19 nt, Artificial Sequence
  Description of Artificial Sequence: Synthetic oligonucleotide
  Antisense Strand to SEQ ID NO: 452357
auuccugggcagaaucaau

SEQ ID NO: 452359 - RNA, 19 nt, Artificial Sequence
  Description of Artificial Sequence: Synthetic oligonucleotide
  Sense strand starting at position 3226 of SEQ ID NO: 316945
ugauucugcccaggaauau

SEQ ID NO: 452360 - RNA, 19 nt, Artificial Sequence
  Description of Artificial Sequence: Synthetic oligonucleotide
  Antisense Strand to SEQ ID NO: 452359
auauuccugggcagaauca

SEQ ID NO: 452361 - RNA, 19 nt, Artificial Sequence
  Description of Artificial Sequence: Synthetic oligonucleotide
  Sense strand starting at position 3406 of SEQ ID NO: 316945
caagaauacguggauuccu

SEQ ID NO: 452362 - RNA, 19 nt, Artificial Sequence
  Description of Artificial Sequence: Synthetic oligonucleotide
  Antisense Strand to SEQ ID NO: 452361
aggaauccacguauucuug

SEQ ID NO: 452363 - RNA, 19 nt, Artificial Sequence
  Description of Artificial Sequence: Synthetic oligonucleotide
  Sense strand starting at position 3440 of SEQ ID NO: 316945
cugacuggguacuuugaga

SEQ ID NO: 452364 - RNA, 19 nt, Artificial Sequence
  Description of Artificial Sequence: Synthetic oligonucleotide
  Antisense Strand to SEQ ID NO: 452363
ucucaaaguacccagucag

SEQ ID NO: 452365 - RNA, 19 nt, Artificial Sequence
  Description of Artificial Sequence: Synthetic oligonucleotide
  Sense strand starting at position 3543 of SEQ ID NO: 316945
gcagauuuauucucuggcu

SEQ ID NO: 452366 - RNA, 19 nt, Artificial Sequence
  Description of Artificial Sequence: Synthetic oligonucleotide
  Antisense Strand to SEQ ID NO: 452365
agccagagaauaaaucugc

SEQ ID NO: 452367 - RNA, 19 nt, Artificial Sequence
  Description of Artificial Sequence: Synthetic oligonucleotide
  Sense strand starting at position 3566 of SEQ ID NO: 316945
ggagacaauguauguuuaa

SEQ ID NO: 452368 - RNA, 19 nt, Artificial Sequence
  Description of Artificial Sequence: Synthetic oligonucleotide
  Antisense Strand to SEQ ID NO: 452367
uuaaacauacauugucucc

SEQ ID NO: 452369 - RNA, 19 nt, Artificial Sequence
  Description of Artificial Sequence: Synthetic oligonucleotide
  Sense strand starting at position 3567 of SEQ ID NO: 316945
gagacaauguauguuuaag

SEQ ID NO: 452370 - RNA, 19 nt, Artificial Sequence
  Description of Artificial Sequence: Synthetic oligonucleotide
  Antisense Strand to SEQ ID NO: 452369
cuuaaacauacauugucuc

SEQ ID NO: 452371 - RNA, 19 nt, Artificial Sequence
  Description of Artificial Sequence: Synthetic oligonucleotide
  Sense strand starting at position 3575 of SEQ ID NO: 316945
guauguuuaagucaguaaa

SEQ ID NO: 452372 - RNA, 19 nt, Artificial Sequence
  Description of Artificial Sequence: Synthetic oligonucleotide
  Antisense Strand to SEQ ID NO: 452371
uuuacugacuuaaacauac

SEQ ID NO: 452373 - RNA, 19 nt, Artificial Sequence
  Description of Artificial Sequence: Synthetic oligonucleotide
  Sense strand starting at position 3613 of SEQ ID NO: 316945
cucucuuuagaguaaucug

SEQ ID NO: 452374 - RNA, 19 nt, Artificial Sequence
  Description of Artificial Sequence: Synthetic oligonucleotide
  Antisense Strand to SEQ ID NO: 452373
cagauuacucuaaagagag

SEQ ID NO: 452375 - RNA, 19 nt, Artificial Sequence
  Description of Artificial Sequence: Synthetic oligonucleotide
  Sense strand starting at position 3616 of SEQ ID NO: 316945
ucuuuagaguaaucuggaa

SEQ ID NO: 452376 - RNA, 19 nt, Artificial Sequence
  Description of Artificial Sequence: Synthetic oligonucleotide
  Antisense Strand to SEQ ID NO: 452375
uuccagauuacucuaaaga

SEQ ID NO: 452377 - RNA, 19 nt, Artificial Sequence
  Description of Artificial Sequence: Synthetic oligonucleotide
  Sense strand starting at position 3725 of SEQ ID NO: 316945
uuaguacggauaugaaauu

SEQ ID NO: 452378 - RNA, 19 nt, Artificial Sequence
  Description of Artificial Sequence: Synthetic oligonucleotide
  Antisense Strand to SEQ ID NO: 452377
aauuucauauccguacuaa

SEQ ID NO: 452379 - RNA, 19 nt, Artificial Sequence
  Description of Artificial Sequence: Synthetic oligonucleotide
  Sense strand starting at position 3736 of SEQ ID NO: 316945
augaaauuaguauggaucu

SEQ ID NO: 452380 - RNA, 19 nt, Artificial Sequence
  Description of Artificial Sequence: Synthetic oligonucleotide
  Antisense Strand to SEQ ID NO: 452379
agauccauacuaauuucau

SEQ ID NO: 452381 - RNA, 19 nt, Artificial Sequence
  Description of Artificial Sequence: Synthetic oligonucleotide
  Sense strand starting at position 3945 of SEQ ID NO: 316945
auagauacucaguauucgu

SEQ ID NO: 452382 - RNA, 19 nt, Artificial Sequence
  Description of Artificial Sequence: Synthetic oligonucleotide
  Antisense Strand to SEQ ID NO: 452381
acgaauacugaguaucuau

SEQ ID NO: 452383 - RNA, 19 nt, Artificial Sequence
  Description of Artificial Sequence: Synthetic oligonucleotide
  Sense strand starting at position 179 of SEQ ID NO: 316946
cuauaugacugucccuuua

SEQ ID NO: 452384 - RNA, 19 nt, Artificial Sequence
  Description of Artificial Sequence: Synthetic oligonucleotide
  Antisense Strand to SEQ ID NO: 452383
uaaagggacagucauauag

SEQ ID NO: 452385 - RNA, 19 nt, Artificial Sequence
  Description of Artificial Sequence: Synthetic oligonucleotide
  Sense strand starting at position 193 of SEQ ID NO: 316946
cuuuaaagaguauaagcau

SEQ ID NO: 452386 - RNA, 19 nt, Artificial Sequence
  Description of Artificial Sequence: Synthetic oligonucleotide
  Antisense Strand to SEQ ID NO: 452385
augcuuauacucuuuaaag

SEQ ID NO: 452387 - RNA, 19 nt, Artificial Sequence
  Description of Artificial Sequence: Synthetic oligonucleotide
  Sense strand starting at position 380 of SEQ ID NO: 316946
cgagauauaauagguuacu

SEQ ID NO: 452388 - RNA, 19 nt, Artificial Sequence
  Description of Artificial Sequence: Synthetic oligonucleotide
  Antisense Strand to SEQ ID NO: 452387
aguaaccuauuauaucucg

SEQ ID NO: 452389 - RNA, 19 nt, Artificial Sequence
  Description of Artificial Sequence: Synthetic oligonucleotide
  Sense strand starting at position 486 of SEQ ID NO: 316946
cuggaagcaugguuuaaca

SEQ ID NO: 452390 - RNA, 19 nt, Artificial Sequence
  Description of Artificial Sequence: Synthetic oligonucleotide
  Antisense Strand to SEQ ID NO: 452389
uguuaaaccaugcuuccag

SEQ ID NO: 452391 - RNA, 19 nt, Artificial Sequence
  Description of Artificial Sequence: Synthetic oligonucleotide
  Sense strand starting at position 758 of SEQ ID NO: 316946
uuaaguuagcuuuaaagcu

SEQ ID NO: 452392 - RNA, 19 nt, Artificial Sequence
  Description of Artificial Sequence: Synthetic oligonucleotide
  Antisense Strand to SEQ ID NO: 452391
agcuuuaaagcuaacuuaa

SEQ ID NO: 452393 - RNA, 19 nt, Artificial Sequence
  Description of Artificial Sequence: Synthetic oligonucleotide
  Sense strand starting at position 920 of SEQ ID NO: 316946
accauauucuugccagaga

SEQ ID NO: 452394 - RNA, 19 nt, Artificial Sequence
  Description of Artificial Sequence: Synthetic oligonucleotide
  Antisense Strand to SEQ ID NO: 452393
ucucuggcaagaauauggu

SEQ ID NO: 452395 - RNA, 19 nt, Artificial Sequence
  Description of Artificial Sequence: Synthetic oligonucleotide
  Sense strand starting at position 923 of SEQ ID NO: 316946
auauucuugccagagauuc

SEQ ID NO: 452396 - RNA, 19 nt, Artificial Sequence
  Description of Artificial Sequence: Synthetic oligonucleotide
  Antisense Strand to SEQ ID NO: 452395
gaaucucuggcaagaauau

SEQ ID NO: 452397 - RNA, 19 nt, Artificial Sequence
  Description of Artificial Sequence: Synthetic oligonucleotide
  Sense strand starting at position 1212 of SEQ ID NO: 316946
cucccuggguacuuuaaau

SEQ ID NO: 452398 - RNA, 19 nt, Artificial Sequence
  Description of Artificial Sequence: Synthetic oligonucleotide
  Antisense Strand to SEQ ID NO: 452397
auuuaaaguacccagggag

SEQ ID NO: 452399 - RNA, 19 nt, Artificial Sequence
  Description of Artificial Sequence: Synthetic oligonucleotide
  Sense strand starting at position 1491 of SEQ ID NO: 316946
gcugcauugacuggaggau

SEQ ID NO: 452400 - RNA, 19 nt, Artificial Sequence
  Description of Artificial Sequence: Synthetic oligonucleotide
  Antisense Strand to SEQ ID NO: 452399
auccuccagucaaugcagc

SEQ ID NO: 452401 - RNA, 19 nt, Artificial Sequence
  Description of Artificial Sequence: Synthetic oligonucleotide
  Sense strand starting at position 1750 of SEQ ID NO: 316946
gcgucuauucccguccuca

SEQ ID NO: 452402 - RNA, 19 nt, Artificial Sequence
  Description of Artificial Sequence: Synthetic oligonucleotide
  Antisense Strand to SEQ ID NO: 452401
ugaggacgggaauagacgc

SEQ ID NO: 452403 - RNA, 19 nt, Artificial Sequence
  Description of Artificial Sequence: Synthetic oligonucleotide
  Sense strand starting at position 2202 of SEQ ID NO: 316946
aaugauagugucgguacaa

SEQ ID NO: 452404 - RNA, 19 nt, Artificial Sequence
  Description of Artificial Sequence: Synthetic oligonucleotide
  Antisense Strand to SEQ ID NO: 452403
uuguaccgacacuaucauu

SEQ ID NO: 452405 - RNA, 19 nt, Artificial Sequence
  Description of Artificial Sequence: Synthetic oligonucleotide
  Sense strand starting at position 2203 of SEQ ID NO: 316946
augauagugucgguacaaa

SEQ ID NO: 452406 - RNA, 19 nt, Artificial Sequence
  Description of Artificial Sequence: Synthetic oligonucleotide
  Antisense Strand to SEQ ID NO: 452405
uuuguaccgacacuaucau

SEQ ID NO: 452407 - RNA, 19 nt, Artificial Sequence
  Description of Artificial Sequence: Synthetic oligonucleotide
  Sense strand starting at position 2460 of SEQ ID NO: 316946
agguaauacuauguuuaac

SEQ ID NO: 452408 - RNA, 19 nt, Artificial Sequence
  Description of Artificial Sequence: Synthetic oligonucleotide
  Antisense Strand to SEQ ID NO: 452407
guuaaacauaguauuaccu

SEQ ID NO: 452409 - RNA, 19 nt, Artificial Sequence
  Description of Artificial Sequence: Synthetic oligonucleotide
  Sense strand starting at position 2471 of SEQ ID NO: 316946
uguuuaacaucuguuacau

SEQ ID NO: 452410 - RNA, 19 nt, Artificial Sequence
  Description of Artificial Sequence: Synthetic oligonucleotide
  Antisense Strand to SEQ ID NO: 452409
auguaacagauguuaaaca

SEQ ID NO: 452411 - RNA, 19 nt, Artificial Sequence
  Description of Artificial Sequence: Synthetic oligonucleotide
  Sense strand starting at position 2492 of SEQ ID NO: 316946
uuaacauguguacagaacu

SEQ ID NO: 452412 - RNA, 19 nt, Artificial Sequence
  Description of Artificial Sequence: Synthetic oligonucleotide
  Antisense Strand to SEQ ID NO: 452411
aguucuguacacauguuaa

SEQ ID NO: 452413 - RNA, 19 nt, Artificial Sequence
  Description of Artificial Sequence: Synthetic oligonucleotide
  Sense strand starting at position 2499 of SEQ ID NO: 316946
guguacagaacuugacagu

SEQ ID NO: 452414 - RNA, 19 nt, Artificial Sequence
  Description of Artificial Sequence: Synthetic oligonucleotide
  Antisense Strand to SEQ ID NO: 452413
acugucaaguucuguacac

SEQ ID NO: 452415 - RNA, 19 nt, Artificial Sequence
  Description of Artificial Sequence: Synthetic oligonucleotide
  Sense strand starting at position 2558 of SEQ ID NO: 316946
accacauuccugggcaagu

SEQ ID NO: 452416 - RNA, 19 nt, Artificial Sequence
  Description of Artificial Sequence: Synthetic oligonucleotide
  Antisense Strand to SEQ ID NO: 452415
acuugcccaggaauguggu

SEQ ID NO: 452417 - RNA, 19 nt, Artificial Sequence
  Description of Artificial Sequence: Synthetic oligonucleotide
  Sense strand starting at position 2559 of SEQ ID NO: 316946
ccacauuccugggcaaguu

SEQ ID NO: 452418 - RNA, 19 nt, Artificial Sequence
  Description of Artificial Sequence: Synthetic oligonucleotide
  Antisense Strand to SEQ ID NO: 452417
aacuugcccaggaaugugg

SEQ ID NO: 452419 - RNA, 19 nt, Artificial Sequence
  Description of Artificial Sequence: Synthetic oligonucleotide
  Sense strand starting at position 2626 of SEQ ID NO: 316946
gagauuuacuuagaguuac

SEQ ID NO: 452420 - RNA, 19 nt, Artificial Sequence
  Description of Artificial Sequence: Synthetic oligonucleotide
  Antisense Strand to SEQ ID NO: 452419
guaacucuaaguaaaucuc

SEQ ID NO: 452421 - RNA, 19 nt, Artificial Sequence
  Description of Artificial Sequence: Synthetic oligonucleotide
  Sense strand starting at position 2706 of SEQ ID NO: 316946
cagggucucugccuuauaa

SEQ ID NO: 452422 - RNA, 19 nt, Artificial Sequence
  Description of Artificial Sequence: Synthetic oligonucleotide
  Antisense Strand to SEQ ID NO: 452421
uuauaaggcagagacccug

SEQ ID NO: 452423 - RNA, 19 nt, Artificial Sequence
  Description of Artificial Sequence: Synthetic oligonucleotide
  Sense strand starting at position 2708 of SEQ ID NO: 316946
gggucucugccuuauaaga

SEQ ID NO: 452424 - RNA, 19 nt, Artificial Sequence
  Description of Artificial Sequence: Synthetic oligonucleotide
  Antisense Strand to SEQ ID NO: 452423
ucuuauaaggcagagaccc

SEQ ID NO: 452425 - RNA, 19 nt, Artificial Sequence
  Description of Artificial Sequence: Synthetic oligonucleotide
  Sense strand starting at position 2775 of SEQ ID NO: 316946
auaugcagcccuuagauaa

SEQ ID NO: 452426 - RNA, 19 nt, Artificial Sequence
  Description of Artificial Sequence: Synthetic oligonucleotide
  Antisense Strand to SEQ ID NO: 452425
uuaucuaagggcugcauau

SEQ ID NO: 452427 - RNA, 19 nt, Artificial Sequence
  Description of Artificial Sequence: Synthetic oligonucleotide
  Sense strand starting at position 2795 of SEQ ID NO: 316946
agauaaggcuauccuauua

SEQ ID NO: 452428 - RNA, 19 nt, Artificial Sequence
  Description of Artificial Sequence: Synthetic oligonucleotide
  Antisense Strand to SEQ ID NO: 452427
uaauaggauagccuuaucu

SEQ ID NO: 452429 - RNA, 19 nt, Artificial Sequence
  Description of Artificial Sequence: Synthetic oligonucleotide
  Sense strand starting at position 2816 of SEQ ID NO: 316946
ucuugaauguaugccugau

SEQ ID NO: 452430 - RNA, 19 nt, Artificial Sequence
  Description of Artificial Sequence: Synthetic oligonucleotide
  Antisense Strand to SEQ ID NO: 452429
aucaggcauacauucaaga

SEQ ID NO: 452431 - RNA, 19 nt, Artificial Sequence
  Description of Artificial Sequence: Synthetic oligonucleotide
  Sense strand starting at position 2820 of SEQ ID NO: 316946
gaauguaugccugauugau

SEQ ID NO: 452432 - RNA, 19 nt, Artificial Sequence
  Description of Artificial Sequence: Synthetic oligonucleotide
  Antisense Strand to SEQ ID NO: 452431
aucaaucaggcauacauuc

SEQ ID NO: 452433 - RNA, 19 nt, Artificial Sequence
  Description of Artificial Sequence: Synthetic oligonucleotide
  Sense strand starting at position 2927 of SEQ ID NO: 316946
uugaacuucugggcaauca

SEQ ID NO: 452434 - RNA, 19 nt, Artificial Sequence
  Description of Artificial Sequence: Synthetic oligonucleotide
  Antisense Strand to SEQ ID NO: 452433
ugauugcccagaaguucaa

SEQ ID NO: 452435 - RNA, 19 nt, Artificial Sequence
  Description of Artificial Sequence: Synthetic oligonucleotide
  Sense strand starting at position 3153 of SEQ ID NO: 316946
gcaccagguccugauggau

SEQ ID NO: 452436 - RNA, 19 nt, Artificial Sequence
  Description of Artificial Sequence: Synthetic oligonucleotide
  Antisense Strand to SEQ ID NO: 452435
auccaucaggaccuggugc

SEQ ID NO: 452437 - RNA, 19 nt, Artificial Sequence
  Description of Artificial Sequence: Synthetic oligonucleotide
  Sense strand starting at position 3295 of SEQ ID NO: 316946
auauaaccguguuccauaa

SEQ ID NO: 452438 - RNA, 19 nt, Artificial Sequence
  Description of Artificial Sequence: Synthetic oligonucleotide
  Antisense Strand to SEQ ID NO: 452437
uuauggaacacgguuauau

SEQ ID NO: 452439 - RNA, 19 nt, Artificial Sequence
  Description of Artificial Sequence: Synthetic oligonucleotide
  Sense strand starting at position 3331 of SEQ ID NO: 316946
gcugccuaagaguagugau

SEQ ID NO: 452440 - RNA, 19 nt, Artificial Sequence
  Description of Artificial Sequence: Synthetic oligonucleotide
  Antisense Strand to SEQ ID NO: 452439
aucacuacucuuaggcagc

SEQ ID NO: 452441 - RNA, 19 nt, Artificial Sequence
  Description of Artificial Sequence: Synthetic oligonucleotide
  Sense strand starting at position 3516 of SEQ ID NO: 316946
uuuggugaauaggucauau

SEQ ID NO: 452442 - RNA, 19 nt, Artificial Sequence
  Description of Artificial Sequence: Synthetic oligonucleotide
  Antisense Strand to SEQ ID NO: 452441
auaugaccuauucaccaaa

SEQ ID NO: 452443 - RNA, 19 nt, Artificial Sequence
  Description of Artificial Sequence: Synthetic oligonucleotide
  Sense strand starting at position 3532 of SEQ ID NO: 316946
uaugaagaaugauaaagga

SEQ ID NO: 452444 - RNA, 19 nt, Artificial Sequence
  Description of Artificial Sequence: Synthetic oligonucleotide
  Antisense Strand to SEQ ID NO: 452443
uccuuuaucauucuucaua

SEQ ID NO: 452445 - RNA, 19 nt, Artificial Sequence
  Description of Artificial Sequence: Synthetic oligonucleotide
  Sense strand starting at position 3573 of SEQ ID NO: 316946
gaguuuagaaguuggcgaa

SEQ ID NO: 452446 - RNA, 19 nt, Artificial Sequence
  Description of Artificial Sequence: Synthetic oligonucleotide
  Antisense Strand to SEQ ID NO: 452445
uucgccaacuucuaaacuc

SEQ ID NO: 452447 - RNA, 19 nt, Artificial Sequence
  Description of Artificial Sequence: Synthetic oligonucleotide
  Sense strand starting at position 3574 of SEQ ID NO: 316946
aguuuagaaguuggcgaaa

SEQ ID NO: 452448 - RNA, 19 nt, Artificial Sequence
  Description of Artificial Sequence: Synthetic oligonucleotide
  Antisense Strand to SEQ ID NO: 452447
uuucgccaacuucuaaacu

SEQ ID NO: 452449 - RNA, 19 nt, Artificial Sequence
  Description of Artificial Sequence: Synthetic oligonucleotide
  Sense strand starting at position 3648 of SEQ ID NO: 316946
gaauuccgauuccuguaau

SEQ ID NO: 452450 - RNA, 19 nt, Artificial Sequence
  Description of Artificial Sequence: Synthetic oligonucleotide
  Antisense Strand to SEQ ID NO: 452449
auuacaggaaucggaauuc

SEQ ID NO: 452451 - RNA, 19 nt, Artificial Sequence
  Description of Artificial Sequence: Synthetic oligonucleotide
  Sense strand starting at position 3651 of SEQ ID NO: 316946
uuccgauuccuguaauaaa

SEQ ID NO: 452452 - RNA, 19 nt, Artificial Sequence
  Description of Artificial Sequence: Synthetic oligonucleotide
  Antisense Strand to SEQ ID NO: 452451
uuuauuacaggaaucggaa

SEQ ID NO: 452453 - RNA, 19 nt, Artificial Sequence
  Description of Artificial Sequence: Synthetic oligonucleotide
  Sense strand starting at position 3707 of SEQ ID NO: 316946
uuggaagaacuaugcugaa

SEQ ID NO: 452454 - RNA, 19 nt, Artificial Sequence
  Description of Artificial Sequence: Synthetic oligonucleotide
  Antisense Strand to SEQ ID NO: 452453
uucagcauaguucuuccaa

SEQ ID NO: 452455 - RNA, 19 nt, Artificial Sequence
  Description of Artificial Sequence: Synthetic oligonucleotide
  Sense strand starting at position 3744 of SEQ ID NO: 316946
gcucaccuucccuaguauu

SEQ ID NO: 452456 - RNA, 19 nt, Artificial Sequence
  Description of Artificial Sequence: Synthetic oligonucleotide
  Antisense Strand to SEQ ID NO: 452455
aauacuagggaaggugagc

SEQ ID NO: 452457 - RNA, 19 nt, Artificial Sequence
  Description of Artificial Sequence: Synthetic oligonucleotide
  Sense strand starting at position 3769 of SEQ ID NO: 316946
gugccauccauggauguua

SEQ ID NO: 452458 - RNA, 19 nt, Artificial Sequence
  Description of Artificial Sequence: Synthetic oligonucleotide
  Antisense Strand to SEQ ID NO: 452457
uaacauccauggauggcac

SEQ ID NO: 452459 - RNA, 19 nt, Artificial Sequence
  Description of Artificial Sequence: Synthetic oligonucleotide
  Sense strand starting at position 3771 of SEQ ID NO: 316946
gccauccauggauguuaua

SEQ ID NO: 452460 - RNA, 19 nt, Artificial Sequence
  Description of Artificial Sequence: Synthetic oligonucleotide
  Antisense Strand to SEQ ID NO: 452459
uauaacauccauggauggc

SEQ ID NO: 452461 - RNA, 19 nt, Artificial Sequence
  Description of Artificial Sequence: Synthetic oligonucleotide
  Sense strand starting at position 3944 of SEQ ID NO: 316946
cuaugaaagugaucugcuu

SEQ ID NO: 452462 - RNA, 19 nt, Artificial Sequence
  Description of Artificial Sequence: Synthetic oligonucleotide
  Antisense Strand to SEQ ID NO: 452461
aagcagaucacuuucauag

SEQ ID NO: 452463 - RNA, 19 nt, Artificial Sequence
  Description of Artificial Sequence: Synthetic oligonucleotide
  Sense strand starting at position 126 of SEQ ID NO: 316947
gucucuguaacagauggau

SEQ ID NO: 452464 - RNA, 19 nt, Artificial Sequence
  Description of Artificial Sequence: Synthetic oligonucleotide
  Antisense Strand to SEQ ID NO: 452463
auccaucuguuacagagac

SEQ ID NO: 452465 - RNA, 19 nt, Artificial Sequence
  Description of Artificial Sequence: Synthetic oligonucleotide
  Sense strand starting at position 129 of SEQ ID NO: 316947
ucuguaacagauggauaua

SEQ ID NO: 452466 - RNA, 19 nt, Artificial Sequence
  Description of Artificial Sequence: Synthetic oligonucleotide
  Antisense Strand to SEQ ID NO: 452465
uauauccaucuguuacaga

SEQ ID NO: 452467 - RNA, 19 nt, Artificial Sequence
  Description of Artificial Sequence: Synthetic oligonucleotide
  Sense strand starting at position 457 of SEQ ID NO: 316947
cuauaugacugucccuuua

SEQ ID NO: 452468 - RNA, 19 nt, Artificial Sequence
  Description of Artificial Sequence: Synthetic oligonucleotide
  Antisense Strand to SEQ ID NO: 452467
uaaagggacagucauauag

SEQ ID NO: 452469 - RNA, 19 nt, Artificial Sequence
  Description of Artificial Sequence: Synthetic oligonucleotide
  Sense strand starting at position 471 of SEQ ID NO: 316947
cuuuaaagaguauaagcau

SEQ ID NO: 452470 - RNA, 19 nt, Artificial Sequence
  Description of Artificial Sequence: Synthetic oligonucleotide
  Antisense Strand to SEQ ID NO: 452469
augcuuauacucuuuaaag

SEQ ID NO: 452471 - RNA, 19 nt, Artificial Sequence
  Description of Artificial Sequence: Synthetic oligonucleotide
  Sense strand starting at position 658 of SEQ ID NO: 316947
cgagauauaauagguuacu

SEQ ID NO: 452472 - RNA, 19 nt, Artificial Sequence
  Description of Artificial Sequence: Synthetic oligonucleotide
  Antisense Strand to SEQ ID NO: 452471
aguaaccuauuauaucucg

SEQ ID NO: 452473 - RNA, 19 nt, Artificial Sequence
  Description of Artificial Sequence: Synthetic oligonucleotide
  Sense strand starting at position 764 of SEQ ID NO: 316947
cuggaagcaugguuuaaca

SEQ ID NO: 452474 - RNA, 19 nt, Artificial Sequence
  Description of Artificial Sequence: Synthetic oligonucleotide
  Antisense Strand to SEQ ID NO: 452473
uguuaaaccaugcuuccag

SEQ ID NO: 452475 - RNA, 19 nt, Artificial Sequence
  Description of Artificial Sequence: Synthetic oligonucleotide
  Sense strand starting at position 1036 of SEQ ID NO: 316947
uuaaguuagcuuuaaagcu

SEQ ID NO: 452476 - RNA, 19 nt, Artificial Sequence
  Description of Artificial Sequence: Synthetic oligonucleotide
  Antisense Strand to SEQ ID NO: 452475
agcuuuaaagcuaacuuaa

SEQ ID NO: 452477 - RNA, 19 nt, Artificial Sequence
  Description of Artificial Sequence: Synthetic oligonucleotide
  Sense strand starting at position 1198 of SEQ ID NO: 316947
accauauucuugccagaga

SEQ ID NO: 452478 - RNA, 19 nt, Artificial Sequence
  Description of Artificial Sequence: Synthetic oligonucleotide
  Antisense Strand to SEQ ID NO: 452477
ucucuggcaagaauauggu

SEQ ID NO: 452479 - RNA, 19 nt, Artificial Sequence
  Description of Artificial Sequence: Synthetic oligonucleotide
  Sense strand starting at position 1201 of SEQ ID NO: 316947
auauucuugccagagauuc

SEQ ID NO: 452480 - RNA, 19 nt, Artificial Sequence
  Description of Artificial Sequence: Synthetic oligonucleotide
  Antisense Strand to SEQ ID NO: 452479
gaaucucuggcaagaauau

SEQ ID NO: 452481 - RNA, 19 nt, Artificial Sequence
  Description of Artificial Sequence: Synthetic oligonucleotide
  Sense strand starting at position 1490 of SEQ ID NO: 316947
cucccuggguacuuuaaau

SEQ ID NO: 452482 - RNA, 19 nt, Artificial Sequence
  Description of Artificial Sequence: Synthetic oligonucleotide
  Antisense Strand to SEQ ID NO: 452481
auuuaaaguacccagggag

SEQ ID NO: 452483 - RNA, 19 nt, Artificial Sequence
  Description of Artificial Sequence: Synthetic oligonucleotide
  Sense strand starting at position 1769 of SEQ ID NO: 316947
gcugcauugacuggaggau

SEQ ID NO: 452484 - RNA, 19 nt, Artificial Sequence
  Description of Artificial Sequence: Synthetic oligonucleotide
  Antisense Strand to SEQ ID NO: 452483
auccuccagucaaugcagc

SEQ ID NO: 452485 - RNA, 19 nt, Artificial Sequence
  Description of Artificial Sequence: Synthetic oligonucleotide
  Sense strand starting at position 1781 of SEQ ID NO: 316947
ggaggauccucauaaacaa

SEQ ID NO: 452486 - RNA, 19 nt, Artificial Sequence
  Description of Artificial Sequence: Synthetic oligonucleotide
  Antisense Strand to SEQ ID NO: 452485
uuguuuaugaggauccucc

SEQ ID NO: 452487 - RNA, 19 nt, Artificial Sequence
  Description of Artificial Sequence: Synthetic oligonucleotide
  Sense strand starting at position 2028 of SEQ ID NO: 316947
gcgucuauucccguccuca

SEQ ID NO: 452488 - RNA, 19 nt, Artificial Sequence
  Description of Artificial Sequence: Synthetic oligonucleotide
  Antisense Strand to SEQ ID NO: 452487
ugaggacgggaauagacgc

SEQ ID NO: 452489 - RNA, 19 nt, Artificial Sequence
  Description of Artificial Sequence: Synthetic oligonucleotide
  Sense strand starting at position 2480 of SEQ ID NO: 316947
aaugauagugucgguacaa

SEQ ID NO: 452490 - RNA, 19 nt, Artificial Sequence
  Description of Artificial Sequence: Synthetic oligonucleotide
  Antisense Strand to SEQ ID NO: 452489
uuguaccgacacuaucauu

SEQ ID NO: 452491 - RNA, 19 nt, Artificial Sequence
  Description of Artificial Sequence: Synthetic oligonucleotide
  Sense strand starting at position 2481 of SEQ ID NO: 316947
augauagugucgguacaaa

SEQ ID NO: 452492 - RNA, 19 nt, Artificial Sequence
  Description of Artificial Sequence: Synthetic oligonucleotide
  Antisense Strand to SEQ ID NO: 452491
uuuguaccgacacuaucau

SEQ ID NO: 452493 - RNA, 19 nt, Artificial Sequence
  Description of Artificial Sequence: Synthetic oligonucleotide
  Sense strand starting at position 2738 of SEQ ID NO: 316947
agguaauacuauguuuaac

SEQ ID NO: 452494 - RNA, 19 nt, Artificial Sequence
  Description of Artificial Sequence: Synthetic oligonucleotide
  Antisense Strand to SEQ ID NO: 452493
guuaaacauaguauuaccu

SEQ ID NO: 452495 - RNA, 19 nt, Artificial Sequence
  Description of Artificial Sequence: Synthetic oligonucleotide
  Sense strand starting at position 2749 of SEQ ID NO: 316947
uguuuaacaucuguuacau

SEQ ID NO: 452496 - RNA, 19 nt, Artificial Sequence
  Description of Artificial Sequence: Synthetic oligonucleotide
  Antisense Strand to SEQ ID NO: 452495
auguaacagauguuaaaca

SEQ ID NO: 452497 - RNA, 19 nt, Artificial Sequence
  Description of Artificial Sequence: Synthetic oligonucleotide
  Sense strand starting at position 2770 of SEQ ID NO: 316947
uuaacauguguacagaacu

SEQ ID NO: 452498 - RNA, 19 nt, Artificial Sequence
  Description of Artificial Sequence: Synthetic oligonucleotide
  Antisense Strand to SEQ ID NO: 452497
aguucuguacacauguuaa

SEQ ID NO: 452499 - RNA, 19 nt, Artificial Sequence
  Description of Artificial Sequence: Synthetic oligonucleotide
  Sense strand starting at position 2777 of SEQ ID NO: 316947
guguacagaacuugacagu

SEQ ID NO: 452500 - RNA, 19 nt, Artificial Sequence
  Description of Artificial Sequence: Synthetic oligonucleotide
  Antisense Strand to SEQ ID NO: 452499
acugucaaguucuguacac

SEQ ID NO: 452501 - RNA, 19 nt, Artificial Sequence
  Description of Artificial Sequence: Synthetic oligonucleotide
  Sense strand starting at position 2836 of SEQ ID NO: 316947
accacauuccugggcaagu

SEQ ID NO: 452502 - RNA, 19 nt, Artificial Sequence
  Description of Artificial Sequence: Synthetic oligonucleotide
  Antisense Strand to SEQ ID NO: 452501
acuugcccaggaauguggu

SEQ ID NO: 452503 - RNA, 19 nt, Artificial Sequence
  Description of Artificial Sequence: Synthetic oligonucleotide
  Sense strand starting at position 2837 of SEQ ID NO: 316947
ccacauuccugggcaaguu

SEQ ID NO: 452504 - RNA, 19 nt, Artificial Sequence
  Description of Artificial Sequence: Synthetic oligonucleotide
  Antisense Strand to SEQ ID NO: 452503
aacuugcccaggaaugugg

SEQ ID NO: 452505 - RNA, 19 nt, Artificial Sequence
  Description of Artificial Sequence: Synthetic oligonucleotide
  Sense strand starting at position 2904 of SEQ ID NO: 316947
gagauuuacuuagaguuac

SEQ ID NO: 452506 - RNA, 19 nt, Artificial Sequence
  Description of Artificial Sequence: Synthetic oligonucleotide
  Antisense Strand to SEQ ID NO: 452505
guaacucuaaguaaaucuc

SEQ ID NO: 452507 - RNA, 19 nt, Artificial Sequence
  Description of Artificial Sequence: Synthetic oligonucleotide
  Sense strand starting at position 2984 of SEQ ID NO: 316947
cagggucucugccuuauaa

SEQ ID NO: 452508 - RNA, 19 nt, Artificial Sequence
  Description of Artificial Sequence: Synthetic oligonucleotide
  Antisense Strand to SEQ ID NO: 452507
uuauaaggcagagacccug

SEQ ID NO: 452509 - RNA, 19 nt, Artificial Sequence
  Description of Artificial Sequence: Synthetic oligonucleotide
  Sense strand starting at position 2986 of SEQ ID NO: 316947
gggucucugccuuauaaga

SEQ ID NO: 452510 - RNA, 19 nt, Artificial Sequence
  Description of Artificial Sequence: Synthetic oligonucleotide
  Antisense Strand to SEQ ID NO: 452509
ucuuauaaggcagagaccc

SEQ ID NO: 452511 - RNA, 19 nt, Artificial Sequence
  Description of Artificial Sequence: Synthetic oligonucleotide
  Sense strand starting at position 3017 of SEQ ID NO: 316947
uguccucauccuugugaag

SEQ ID NO: 452512 - RNA, 19 nt, Artificial Sequence
  Description of Artificial Sequence: Synthetic oligonucleotide
  Antisense Strand to SEQ ID NO: 452511
cuucacaaggaugaggaca

SEQ ID NO: 452513 - RNA, 19 nt, Artificial Sequence
  Description of Artificial Sequence: Synthetic oligonucleotide
  Sense strand starting at position 3053 of SEQ ID NO: 316947
auaugcagcccuuagauaa

SEQ ID NO: 452514 - RNA, 19 nt, Artificial Sequence
  Description of Artificial Sequence: Synthetic oligonucleotide
  Antisense Strand to SEQ ID NO: 452513
uuaucuaagggcugcauau

SEQ ID NO: 452515 - RNA, 19 nt, Artificial Sequence
  Description of Artificial Sequence: Synthetic oligonucleotide
  Sense strand starting at position 3073 of SEQ ID NO: 316947
agauaaggcuauccuauua

SEQ ID NO: 452516 - RNA, 19 nt, Artificial Sequence
  Description of Artificial Sequence: Synthetic oligonucleotide
  Antisense Strand to SEQ ID NO: 452515
uaauaggauagccuuaucu

SEQ ID NO: 452517 - RNA, 19 nt, Artificial Sequence
  Description of Artificial Sequence: Synthetic oligonucleotide
  Sense strand starting at position 3094 of SEQ ID NO: 316947
ucuugaauguaugccugau

SEQ ID NO: 452518 - RNA, 19 nt, Artificial Sequence
  Description of Artificial Sequence: Synthetic oligonucleotide
  Antisense Strand to SEQ ID NO: 452517
aucaggcauacauucaaga

SEQ ID NO: 452519 - RNA, 19 nt, Artificial Sequence
  Description of Artificial Sequence: Synthetic oligonucleotide
  Sense strand starting at position 3098 of SEQ ID NO: 316947
gaauguaugccugauugau

SEQ ID NO: 452520 - RNA, 19 nt, Artificial Sequence
  Description of Artificial Sequence: Synthetic oligonucleotide
  Antisense Strand to SEQ ID NO: 452519
aucaaucaggcauacauuc

SEQ ID NO: 452521 - RNA, 19 nt, Artificial Sequence
  Description of Artificial Sequence: Synthetic oligonucleotide
  Sense strand starting at position 3205 of SEQ ID NO: 316947
uugaacuucugggcaauca

SEQ ID NO: 452522 - RNA, 19 nt, Artificial Sequence
  Description of Artificial Sequence: Synthetic oligonucleotide
  Antisense Strand to SEQ ID NO: 452521
ugauugcccagaaguucaa

SEQ ID NO: 452523 - RNA, 19 nt, Artificial Sequence
  Description of Artificial Sequence: Synthetic oligonucleotide
  Sense strand starting at position 3431 of SEQ ID NO: 316947
gcaccagguccugauggau

SEQ ID NO: 452524 - RNA, 19 nt, Artificial Sequence
  Description of Artificial Sequence: Synthetic oligonucleotide
  Antisense Strand to SEQ ID NO: 452523
auccaucaggaccuggugc

SEQ ID NO: 452525 - RNA, 19 nt, Artificial Sequence
  Description of Artificial Sequence: Synthetic oligonucleotide
  Sense strand starting at position 3573 of SEQ ID NO: 316947
auauaaccguguuccauaa

SEQ ID NO: 452526 - RNA, 19 nt, Artificial Sequence
  Description of Artificial Sequence: Synthetic oligonucleotide
  Antisense Strand to SEQ ID NO: 452525
uuauggaacacgguuauau

SEQ ID NO: 452527 - RNA, 19 nt, Artificial Sequence
  Description of Artificial Sequence: Synthetic oligonucleotide
  Sense strand starting at position 3603 of SEQ ID NO: 316947
uauucugcugccuaagagu

SEQ ID NO: 452528 - RNA, 19 nt, Artificial Sequence
  Description of Artificial Sequence: Synthetic oligonucleotide
  Antisense Strand to SEQ ID NO: 452527
acucuuaggcagcagaaua

SEQ ID NO: 452529 - RNA, 19 nt, Artificial Sequence
  Description of Artificial Sequence: Synthetic oligonucleotide
  Sense strand starting at position 3609 of SEQ ID NO: 316947
gcugccuaagaguagugau

SEQ ID NO: 452530 - RNA, 19 nt, Artificial Sequence
  Description of Artificial Sequence: Synthetic oligonucleotide
  Antisense Strand to SEQ ID NO: 452529
aucacuacucuuaggcagc

SEQ ID NO: 452531 - RNA, 19 nt, Artificial Sequence
  Description of Artificial Sequence: Synthetic oligonucleotide
  Sense strand starting at position 3794 of SEQ ID NO: 316947
uuuggugaauaggucauau

SEQ ID NO: 452532 - RNA, 19 nt, Artificial Sequence
  Description of Artificial Sequence: Synthetic oligonucleotide
  Antisense Strand to SEQ ID NO: 452531
auaugaccuauucaccaaa

SEQ ID NO: 452533 - RNA, 19 nt, Artificial Sequence
  Description of Artificial Sequence: Synthetic oligonucleotide
  Sense strand starting at position 3810 of SEQ ID NO: 316947
uaugaagaaugauaaagga

SEQ ID NO: 452534 - RNA, 19 nt, Artificial Sequence
  Description of Artificial Sequence: Synthetic oligonucleotide
  Antisense Strand to SEQ ID NO: 452533
uccuuuaucauucuucaua

SEQ ID NO: 452535 - RNA, 19 nt, Artificial Sequence
  Description of Artificial Sequence: Synthetic oligonucleotide
  Sense strand starting at position 3851 of SEQ ID NO: 316947
gaguuuagaaguuggcgaa

SEQ ID NO: 452536 - RNA, 19 nt, Artificial Sequence
  Description of Artificial Sequence: Synthetic oligonucleotide
  Antisense Strand to SEQ ID NO: 452535
uucgccaacuucuaaacuc

SEQ ID NO: 452537 - RNA, 19 nt, Artificial Sequence
  Description of Artificial Sequence: Synthetic oligonucleotide
  Sense strand starting at position 3852 of SEQ ID NO: 316947
aguuuagaaguuggcgaaa

SEQ ID NO: 452538 - RNA, 19 nt, Artificial Sequence
  Description of Artificial Sequence: Synthetic oligonucleotide
  Antisense Strand to SEQ ID NO: 452537
uuucgccaacuucuaaacu

SEQ ID NO: 452539 - RNA, 19 nt, Artificial Sequence
  Description of Artificial Sequence: Synthetic oligonucleotide
  Sense strand starting at position 3926 of SEQ ID NO: 316947
gaauuccgauuccuguaau

SEQ ID NO: 452540 - RNA, 19 nt, Artificial Sequence
  Description of Artificial Sequence: Synthetic oligonucleotide
  Antisense Strand to SEQ ID NO: 452539
auuacaggaaucggaauuc

SEQ ID NO: 452541 - RNA, 19 nt, Artificial Sequence
  Description of Artificial Sequence: Synthetic oligonucleotide
  Sense strand starting at position 3929 of SEQ ID NO: 316947
uuccgauuccuguaauaaa

SEQ ID NO: 452542 - RNA, 19 nt, Artificial Sequence
  Description of Artificial Sequence: Synthetic oligonucleotide
  Antisense Strand to SEQ ID NO: 452541
uuuauuacaggaaucggaa

SEQ ID NO: 452543 - RNA, 19 nt, Artificial Sequence
  Description of Artificial Sequence: Synthetic oligonucleotide
  Sense strand starting at position 99 of SEQ ID NO: 316948
ugucuuuaagaagguaaca

SEQ ID NO: 452544 - RNA, 19 nt, Artificial Sequence
  Description of Artificial Sequence: Synthetic oligonucleotide
  Antisense Strand to SEQ ID NO: 452543
uguuaccuucuuaaagaca

SEQ ID NO: 452545 - RNA, 19 nt, Artificial Sequence
  Description of Artificial Sequence: Synthetic oligonucleotide
  Sense strand starting at position 150 of SEQ ID NO: 316948
uggucaccaugaucuagaa

SEQ ID NO: 452546 - RNA, 19 nt, Artificial Sequence
  Description of Artificial Sequence: Synthetic oligonucleotide
  Antisense Strand to SEQ ID NO: 452545
uucuagaucauggugacca

SEQ ID NO: 452547 - RNA, 19 nt, Artificial Sequence
  Description of Artificial Sequence: Synthetic oligonucleotide
  Sense strand starting at position 166 of SEQ ID NO: 316948
gaauucuggcccgauaaca

SEQ ID NO: 452548 - RNA, 19 nt, Artificial Sequence
  Description of Artificial Sequence: Synthetic oligonucleotide
  Antisense Strand to SEQ ID NO: 452547
uguuaucgggccagaauuc

SEQ ID NO: 452549 - RNA, 19 nt, Artificial Sequence
  Description of Artificial Sequence: Synthetic oligonucleotide
  Sense strand starting at position 242 of SEQ ID NO: 316948
ggacucagccuccacuuaa

SEQ ID NO: 452550 - RNA, 19 nt, Artificial Sequence
  Description of Artificial Sequence: Synthetic oligonucleotide
  Antisense Strand to SEQ ID NO: 452549
uuaaguggaggcugagucc

SEQ ID NO: 452551 - RNA, 19 nt, Artificial Sequence
  Description of Artificial Sequence: Synthetic oligonucleotide
  Sense strand starting at position 303 of SEQ ID NO: 316948
accaaagaaucagaaagaa

SEQ ID NO: 452552 - RNA, 19 nt, Artificial Sequence
  Description of Artificial Sequence: Synthetic oligonucleotide
  Antisense Strand to SEQ ID NO: 452551
uucuuucugauucuuuggu

SEQ ID NO: 452553 - RNA, 19 nt, Artificial Sequence
  Description of Artificial Sequence: Synthetic oligonucleotide
  Sense strand starting at position 318 of SEQ ID NO: 316948
agaauuauuggcuguaaug

SEQ ID NO: 452554 - RNA, 19 nt, Artificial Sequence
  Description of Artificial Sequence: Synthetic oligonucleotide
  Antisense Strand to SEQ ID NO: 452553
cauuacagccaauaauucu

SEQ ID NO: 452555 - RNA, 19 nt, Artificial Sequence
  Description of Artificial Sequence: Synthetic oligonucleotide
  Sense strand starting at position 366 of SEQ ID NO: 316948
agaauauauggccagcuga

SEQ ID NO: 452556 - RNA, 19 nt, Artificial Sequence
  Description of Artificial Sequence: Synthetic oligonucleotide
  Antisense Strand to SEQ ID NO: 452555
ucagcuggccauauauucu

SEQ ID NO: 452557 - RNA, 19 nt, Artificial Sequence
  Description of Artificial Sequence: Synthetic oligonucleotide
  Sense strand starting at position 522 of SEQ ID NO: 316948
cuagguucuguagacacaa

SEQ ID NO: 452558 - RNA, 19 nt, Artificial Sequence
  Description of Artificial Sequence: Synthetic oligonucleotide
  Antisense Strand to SEQ ID NO: 452557
uugugucuacagaaccuag

SEQ ID NO: 452559 - RNA, 19 nt, Artificial Sequence
  Description of Artificial Sequence: Synthetic oligonucleotide
  Sense strand starting at position 557 of SEQ ID NO: 316948
ugucaaagggcuuagaauc

SEQ ID NO: 452560 - RNA, 19 nt, Artificial Sequence
  Description of Artificial Sequence: Synthetic oligonucleotide
  Antisense Strand to SEQ ID NO: 452559
gauucuaagcccuuugaca

SEQ ID NO: 452561 - RNA, 19 nt, Artificial Sequence
  Description of Artificial Sequence: Synthetic oligonucleotide
  Sense strand starting at position 585 of SEQ ID NO: 316948
ugagguugaaagcauuauu

SEQ ID NO: 452562 - RNA, 19 nt, Artificial Sequence
  Description of Artificial Sequence: Synthetic oligonucleotide
  Antisense Strand to SEQ ID NO: 452561
aauaaugcuuucaaccuca

SEQ ID NO: 452563 - RNA, 19 nt, Artificial Sequence
  Description of Artificial Sequence: Synthetic oligonucleotide
  Sense strand starting at position 588 of SEQ ID NO: 316948
gguugaaagcauuauucuc

SEQ ID NO: 452564 - RNA, 19 nt, Artificial Sequence
  Description of Artificial Sequence: Synthetic oligonucleotide
  Antisense Strand to SEQ ID NO: 452563
gagaauaaugcuuucaacc

SEQ ID NO: 452565 - RNA, 19 nt, Artificial Sequence
  Description of Artificial Sequence: Synthetic oligonucleotide
  Sense strand starting at position 626 of SEQ ID NO: 316948
cugcaacuacgagaaguuu

SEQ ID NO: 452566 - RNA, 19 nt, Artificial Sequence
  Description of Artificial Sequence: Synthetic oligonucleotide
  Antisense Strand to SEQ ID NO: 452565
aaacuucucguaguugcag

SEQ ID NO: 452567 - RNA, 19 nt, Artificial Sequence
  Description of Artificial Sequence: Synthetic oligonucleotide
  Sense strand starting at position 689 of SEQ ID NO: 316948
aaguguuucugacucaaag

SEQ ID NO: 452568 - RNA, 19 nt, Artificial Sequence
  Description of Artificial Sequence: Synthetic oligonucleotide
  Antisense Strand to SEQ ID NO: 452567
cuuugagucagaaacacuu

SEQ ID NO: 452569 - RNA, 19 nt, Artificial Sequence
  Description of Artificial Sequence: Synthetic oligonucleotide
  Sense strand starting at position 691 of SEQ ID NO: 316948
guguuucugacucaaagag

SEQ ID NO: 452570 - RNA, 19 nt, Artificial Sequence
  Description of Artificial Sequence: Synthetic oligonucleotide
  Antisense Strand to SEQ ID NO: 452569
cucuuugagucagaaacac

SEQ ID NO: 452571 - RNA, 19 nt, Artificial Sequence
  Description of Artificial Sequence: Synthetic oligonucleotide
  Sense strand starting at position 725 of SEQ ID NO: 316948
gucuuaccgguugagaauc

SEQ ID NO: 452572 - RNA, 19 nt, Artificial Sequence
  Description of Artificial Sequence: Synthetic oligonucleotide
  Antisense Strand to SEQ ID NO: 452571
gauucucaaccgguaagac

SEQ ID NO: 452573 - RNA, 19 nt, Artificial Sequence
  Description of Artificial Sequence: Synthetic oligonucleotide
  Sense strand starting at position 733 of SEQ ID NO: 316948
gguugagaaucacuuacga

SEQ ID NO: 452574 - RNA, 19 nt, Artificial Sequence
  Description of Artificial Sequence: Synthetic oligonucleotide
  Antisense Strand to SEQ ID NO: 452573
ucguaagugauucucaacc

SEQ ID NO: 452575 - RNA, 19 nt, Artificial Sequence
  Description of Artificial Sequence: Synthetic oligonucleotide
  Sense strand starting at position 872 of SEQ ID NO: 316948
ggugaaauuuguuaagaac

SEQ ID NO: 452576 - RNA, 19 nt, Artificial Sequence
  Description of Artificial Sequence: Synthetic oligonucleotide
  Antisense Strand to SEQ ID NO: 452575
guucuuaacaaauuucacc

SEQ ID NO: 452577 - RNA, 19 nt, Artificial Sequence
  Description of Artificial Sequence: Synthetic oligonucleotide
  Sense strand starting at position 1078 of SEQ ID NO: 316948
uuugccaauccucagagau

SEQ ID NO: 452578 - RNA, 19 nt, Artificial Sequence
  Description of Artificial Sequence: Synthetic oligonucleotide
  Antisense Strand to SEQ ID NO: 452577
aucucugaggauuggcaaa

SEQ ID NO: 452579 - RNA, 19 nt, Artificial Sequence
  Description of Artificial Sequence: Synthetic oligonucleotide
  Sense strand starting at position 1224 of SEQ ID NO: 316948
agggcugcugaauauaaau

SEQ ID NO: 452580 - RNA, 19 nt, Artificial Sequence
  Description of Artificial Sequence: Synthetic oligonucleotide
  Antisense Strand to SEQ ID NO: 452579
auuuauauucagcagcccu

SEQ ID NO: 452581 - RNA, 19 nt, Artificial Sequence
  Description of Artificial Sequence: Synthetic oligonucleotide
  Sense strand starting at position 2070 of SEQ ID NO: 316948
ucuucuugccuggaagauc

SEQ ID NO: 452582 - RNA, 19 nt, Artificial Sequence
  Description of Artificial Sequence: Synthetic oligonucleotide
  Antisense Strand to SEQ ID NO: 452581
gaucuuccaggcaagaaga

SEQ ID NO: 452583 - RNA, 19 nt, Artificial Sequence
  Description of Artificial Sequence: Synthetic oligonucleotide
  Sense strand starting at position 2159 of SEQ ID NO: 316948
auucuuuaggcuuaugaga

SEQ ID NO: 452584 - RNA, 19 nt, Artificial Sequence
  Description of Artificial Sequence: Synthetic oligonucleotide
  Antisense Strand to SEQ ID NO: 452583
ucucauaagccuaaagaau

SEQ ID NO: 452585 - RNA, 19 nt, Artificial Sequence
  Description of Artificial Sequence: Synthetic oligonucleotide
  Sense strand starting at position 2475 of SEQ ID NO: 316948
cuuugagcuggguaucaca

SEQ ID NO: 452586 - RNA, 19 nt, Artificial Sequence
  Description of Artificial Sequence: Synthetic oligonucleotide
  Antisense Strand to SEQ ID NO: 452585
ugugauacccagcucaaag

SEQ ID NO: 452587 - RNA, 19 nt, Artificial Sequence
  Description of Artificial Sequence: Synthetic oligonucleotide
  Sense strand starting at position 2482 of SEQ ID NO: 316948
cuggguaucacagauguuu

SEQ ID NO: 452588 - RNA, 19 nt, Artificial Sequence
  Description of Artificial Sequence: Synthetic oligonucleotide
  Antisense Strand to SEQ ID NO: 452587
aaacaucugugauacccag

SEQ ID NO: 452589 - RNA, 19 nt, Artificial Sequence
  Description of Artificial Sequence: Synthetic oligonucleotide
  Sense strand starting at position 2484 of SEQ ID NO: 316948
ggguaucacagauguuuau

SEQ ID NO: 452590 - RNA, 19 nt, Artificial Sequence
  Description of Artificial Sequence: Synthetic oligonucleotide
  Antisense Strand to SEQ ID NO: 452589
auaaacaucugugauaccc

SEQ ID NO: 452591 - RNA, 19 nt, Artificial Sequence
  Description of Artificial Sequence: Synthetic oligonucleotide
  Sense strand starting at position 2514 of SEQ ID NO: 316948
aaggaauugggcuguggaa

SEQ ID NO: 452592 - RNA, 19 nt, Artificial Sequence
  Description of Artificial Sequence: Synthetic oligonucleotide
  Antisense Strand to SEQ ID NO: 452591
uuccacagcccaauuccuu

SEQ ID NO: 452593 - RNA, 19 nt, Artificial Sequence
  Description of Artificial Sequence: Synthetic oligonucleotide
  Sense strand starting at position 2516 of SEQ ID NO: 316948
ggaauugggcuguggaaau

SEQ ID NO: 452594 - RNA, 19 nt, Artificial Sequence
  Description of Artificial Sequence: Synthetic oligonucleotide
  Antisense Strand to SEQ ID NO: 452593
auuuccacagcccaauucc

SEQ ID NO: 452595 - RNA, 19 nt, Artificial Sequence
  Description of Artificial Sequence: Synthetic oligonucleotide
  Sense strand starting at position 2523 of SEQ ID NO: 316948
ggcuguggaaauuauugua

SEQ ID NO: 452596 - RNA, 19 nt, Artificial Sequence
  Description of Artificial Sequence: Synthetic oligonucleotide
  Antisense Strand to SEQ ID NO: 452595
uacaauaauuuccacagcc

SEQ ID NO: 452597 - RNA, 19 nt, Artificial Sequence
  Description of Artificial Sequence: Synthetic oligonucleotide
  Sense strand starting at position 2573 of SEQ ID NO: 316948
guguguugugucuucacca

SEQ ID NO: 452598 - RNA, 19 nt, Artificial Sequence
  Description of Artificial Sequence: Synthetic oligonucleotide
  Antisense Strand to SEQ ID NO: 452597
uggugaagacacaacacac

SEQ ID NO: 452599 - RNA, 19 nt, Artificial Sequence
  Description of Artificial Sequence: Synthetic oligonucleotide
  Sense strand starting at position 2680 of SEQ ID NO: 316948
ucuguuucuguggaaacua

SEQ ID NO: 452600 - RNA, 19 nt, Artificial Sequence
  Description of Artificial Sequence: Synthetic oligonucleotide
  Antisense Strand to SEQ ID NO: 452599
uaguuuccacagaaacaga

SEQ ID NO: 452601 - RNA, 19 nt, Artificial Sequence
  Description of Artificial Sequence: Synthetic oligonucleotide
  Sense strand starting at position 2727 of SEQ ID NO: 316948
ccucaaacucguuauauga

SEQ ID NO: 452602 - RNA, 19 nt, Artificial Sequence
  Description of Artificial Sequence: Synthetic oligonucleotide
  Antisense Strand to SEQ ID NO: 452601
ucauauaacgaguuugagg

SEQ ID NO: 452603 - RNA, 19 nt, Artificial Sequence
  Description of Artificial Sequence: Synthetic oligonucleotide
  Sense strand starting at position 2803 of SEQ ID NO: 316948
gcauccuuuagugaagagu

SEQ ID NO: 452604 - RNA, 19 nt, Artificial Sequence
  Description of Artificial Sequence: Synthetic oligonucleotide
  Antisense Strand to SEQ ID NO: 452603
acucuucacuaaaggaugc

SEQ ID NO: 452605 - RNA, 19 nt, Artificial Sequence
  Description of Artificial Sequence: Synthetic oligonucleotide
  Sense strand starting at position 2827 of SEQ ID NO: 316948
guuacauucucguugauuu

SEQ ID NO: 452606 - RNA, 19 nt, Artificial Sequence
  Description of Artificial Sequence: Synthetic oligonucleotide
  Antisense Strand to SEQ ID NO: 452605
aaaucaacgagaauguaac

SEQ ID NO: 452607 - RNA, 19 nt, Artificial Sequence
  Description of Artificial Sequence: Synthetic oligonucleotide
  Sense strand starting at position 2828 of SEQ ID NO: 316948
uuacauucucguugauuua

SEQ ID NO: 452608 - RNA, 19 nt, Artificial Sequence
  Description of Artificial Sequence: Synthetic oligonucleotide
  Antisense Strand to SEQ ID NO: 452607
uaaaucaacgagaauguaa

SEQ ID NO: 452609 - RNA, 19 nt, Artificial Sequence
  Description of Artificial Sequence: Synthetic oligonucleotide
  Sense strand starting at position 2884 of SEQ ID NO: 316948
acagguuuauuaguacuau

SEQ ID NO: 452610 - RNA, 19 nt, Artificial Sequence
  Description of Artificial Sequence: Synthetic oligonucleotide
  Antisense Strand to SEQ ID NO: 452609
auaguacuaauaaaccugu

SEQ ID NO: 452611 - RNA, 19 nt, Artificial Sequence
  Description of Artificial Sequence: Synthetic oligonucleotide
  Sense strand starting at position 3086 of SEQ ID NO: 316948
guaggcuaugcauagaauu

SEQ ID NO: 452612 - RNA, 19 nt, Artificial Sequence
  Description of Artificial Sequence: Synthetic oligonucleotide
  Antisense Strand to SEQ ID NO: 452611
aauucuaugcauagccuac

SEQ ID NO: 452613 - RNA, 19 nt, Artificial Sequence
  Description of Artificial Sequence: Synthetic oligonucleotide
  Sense strand starting at position 3382 of SEQ ID NO: 316948
gcuacauagguguaaaccu

SEQ ID NO: 452614 - RNA, 19 nt, Artificial Sequence
  Description of Artificial Sequence: Synthetic oligonucleotide
  Antisense Strand to SEQ ID NO: 452613
agguuuacaccuauguagc

SEQ ID NO: 452615 - RNA, 19 nt, Artificial Sequence
  Description of Artificial Sequence: Synthetic oligonucleotide
  Sense strand starting at position 3934 of SEQ ID NO: 316948
uguuauuauagaugagagc

SEQ ID NO: 452616 - RNA, 19 nt, Artificial Sequence
  Description of Artificial Sequence: Synthetic oligonucleotide
  Antisense Strand to SEQ ID NO: 452615
gcucucaucuauaauaaca

SEQ ID NO: 452617 - RNA, 19 nt, Artificial Sequence
  Description of Artificial Sequence: Synthetic oligonucleotide
  Sense strand starting at position 3935 of SEQ ID NO: 316948
guuauuauagaugagagcu

SEQ ID NO: 452618 - RNA, 19 nt, Artificial Sequence
  Description of Artificial Sequence: Synthetic oligonucleotide
  Antisense Strand to SEQ ID NO: 452617
agcucucaucuauaauaac

SEQ ID NO: 452619 - RNA, 19 nt, Artificial Sequence
  Description of Artificial Sequence: Synthetic oligonucleotide
  Sense strand starting at position 3974 of SEQ ID NO: 316948
augaacuuccagugggaua

SEQ ID NO: 452620 - RNA, 19 nt, Artificial Sequence
  Description of Artificial Sequence: Synthetic oligonucleotide
  Antisense Strand to SEQ ID NO: 452619
uaucccacuggaaguucau

SEQ ID NO: 452621 - RNA, 19 nt, Artificial Sequence
  Description of Artificial Sequence: Synthetic oligonucleotide
  Sense strand starting at position 3975 of SEQ ID NO: 316948
ugaacuuccagugggauaa

SEQ ID NO: 452622 - RNA, 19 nt, Artificial Sequence
  Description of Artificial Sequence: Synthetic oligonucleotide
  Antisense Strand to SEQ ID NO: 452621
uuaucccacuggaaguuca

SEQ ID NO: 452623 - RNA, 19 nt, Artificial Sequence
  Description of Artificial Sequence: Synthetic oligonucleotide
  Sense strand starting at position 339 of SEQ ID NO: 316949
cuucuuuagauggaaacgu

SEQ ID NO: 452624 - RNA, 19 nt, Artificial Sequence
  Description of Artificial Sequence: Synthetic oligonucleotide
  Antisense Strand to SEQ ID NO: 452623
acguuuccaucuaaagaag

SEQ ID NO: 452625 - RNA, 19 nt, Artificial Sequence
  Description of Artificial Sequence: Synthetic oligonucleotide
  Sense strand starting at position 343 of SEQ ID NO: 316949
uuuagauggaaacgucaca

SEQ ID NO: 452626 - RNA, 19 nt, Artificial Sequence
  Description of Artificial Sequence: Synthetic oligonucleotide
  Antisense Strand to SEQ ID NO: 452625
ugugacguuuccaucuaaa

SEQ ID NO: 452627 - RNA, 19 nt, Artificial Sequence
  Description of Artificial Sequence: Synthetic oligonucleotide
  Sense strand starting at position 403 of SEQ ID NO: 316949
gugaaagaucaagguuaac

SEQ ID NO: 452628 - RNA, 19 nt, Artificial Sequence
  Description of Artificial Sequence: Synthetic oligonucleotide
  Antisense Strand to SEQ ID NO: 452627
guuaaccuugaucuuucac

SEQ ID NO: 452629 - RNA, 19 nt, Artificial Sequence
  Description of Artificial Sequence: Synthetic oligonucleotide
  Sense strand starting at position 477 of SEQ ID NO: 316949
uucugagggccacauguaa

SEQ ID NO: 452630 - RNA, 19 nt, Artificial Sequence
  Description of Artificial Sequence: Synthetic oligonucleotide
  Antisense Strand to SEQ ID NO: 452629
uuacauguggcccucagaa

SEQ ID NO: 452631 - RNA, 19 nt, Artificial Sequence
  Description of Artificial Sequence: Synthetic oligonucleotide
  Sense strand starting at position 1026 of SEQ ID NO: 316949
aagagaauacuguguaacu

SEQ ID NO: 452632 - RNA, 19 nt, Artificial Sequence
  Description of Artificial Sequence: Synthetic oligonucleotide
  Antisense Strand to SEQ ID NO: 452631
aguuacacaguauucucuu

SEQ ID NO: 452633 - RNA, 19 nt, Artificial Sequence
  Description of Artificial Sequence: Synthetic oligonucleotide
  Sense strand starting at position 1027 of SEQ ID NO: 316949
agagaauacuguguaacug

SEQ ID NO: 452634 - RNA, 19 nt, Artificial Sequence
  Description of Artificial Sequence: Synthetic oligonucleotide
  Antisense Strand to SEQ ID NO: 452633
caguuacacaguauucucu

SEQ ID NO: 452635 - RNA, 19 nt, Artificial Sequence
  Description of Artificial Sequence: Synthetic oligonucleotide
  Sense strand starting at position 1052 of SEQ ID NO: 316949
gugcauuuauauguguuua

SEQ ID NO: 452636 - RNA, 19 nt, Artificial Sequence
  Description of Artificial Sequence: Synthetic oligonucleotide
  Antisense Strand to SEQ ID NO: 452635
uaaacacauauaaaugcac

SEQ ID NO: 452637 - RNA, 19 nt, Artificial Sequence
  Description of Artificial Sequence: Synthetic oligonucleotide
  Sense strand starting at position 1054 of SEQ ID NO: 316949
gcauuuauauguguuuaug

SEQ ID NO: 452638 - RNA, 19 nt, Artificial Sequence
  Description of Artificial Sequence: Synthetic oligonucleotide
  Antisense Strand to SEQ ID NO: 452637
cauaaacacauauaaaugc

SEQ ID NO: 452639 - RNA, 19 nt, Artificial Sequence
  Description of Artificial Sequence: Synthetic oligonucleotide
  Sense strand starting at position 1096 of SEQ ID NO: 316949
uuuauagguuaucugauca

SEQ ID NO: 452640 - RNA, 19 nt, Artificial Sequence
  Description of Artificial Sequence: Synthetic oligonucleotide
  Antisense Strand to SEQ ID NO: 452639
ugaucagauaaccuauaaa

SEQ ID NO: 452641 - RNA, 19 nt, Artificial Sequence
  Description of Artificial Sequence: Synthetic oligonucleotide
  Sense strand starting at position 1204 of SEQ ID NO: 316949
agacuuacauuggaauuua

SEQ ID NO: 452642 - RNA, 19 nt, Artificial Sequence
  Description of Artificial Sequence: Synthetic oligonucleotide
  Antisense Strand to SEQ ID NO: 452641
uaaauuccaauguaagucu

SEQ ID NO: 452643 - RNA, 19 nt, Artificial Sequence
  Description of Artificial Sequence: Synthetic oligonucleotide
  Sense strand starting at position 1231 of SEQ ID NO: 316949
ccagcuugauuugucuaau

SEQ ID NO: 452644 - RNA, 19 nt, Artificial Sequence
  Description of Artificial Sequence: Synthetic oligonucleotide
  Antisense Strand to SEQ ID NO: 452643
auuagacaaaucaagcugg

SEQ ID NO: 452645 - RNA, 19 nt, Artificial Sequence
  Description of Artificial Sequence: Synthetic oligonucleotide
  Sense strand starting at position 1234 of SEQ ID NO: 316949
gcuugauuugucuaaugcc

SEQ ID NO: 452646 - RNA, 19 nt, Artificial Sequence
  Description of Artificial Sequence: Synthetic oligonucleotide
  Antisense Strand to SEQ ID NO: 452645
ggcauuagacaaaucaagc

SEQ ID NO: 452647 - RNA, 19 nt, Artificial Sequence
  Description of Artificial Sequence: Synthetic oligonucleotide
  Sense strand starting at position 1474 of SEQ ID NO: 316949
aggagcuuguuaccacaga

SEQ ID NO: 452648 - RNA, 19 nt, Artificial Sequence
  Description of Artificial Sequence: Synthetic oligonucleotide
  Antisense Strand to SEQ ID NO: 452647
ucugugguaacaagcuccu

SEQ ID NO: 452649 - RNA, 19 nt, Artificial Sequence
  Description of Artificial Sequence: Synthetic oligonucleotide
  Sense strand starting at position 1559 of SEQ ID NO: 316949
cugaaucuugagcagcuua

SEQ ID NO: 452650 - RNA, 19 nt, Artificial Sequence
  Description of Artificial Sequence: Synthetic oligonucleotide
  Antisense Strand to SEQ ID NO: 452649
uaagcugcucaagauucag

SEQ ID NO: 452651 - RNA, 19 nt, Artificial Sequence
  Description of Artificial Sequence: Synthetic oligonucleotide
  Sense strand starting at position 1603 of SEQ ID NO: 316949
uuugacugucacuauaugu

SEQ ID NO: 452652 - RNA, 19 nt, Artificial Sequence
  Description of Artificial Sequence: Synthetic oligonucleotide
  Antisense Strand to SEQ ID NO: 452651
acauauagugacagucaaa

SEQ ID NO: 452653 - RNA, 19 nt, Artificial Sequence
  Description of Artificial Sequence: Synthetic oligonucleotide
  Sense strand starting at position 1610 of SEQ ID NO: 316949
gucacuauauguccagaau

SEQ ID NO: 452654 - RNA, 19 nt, Artificial Sequence
  Description of Artificial Sequence: Synthetic oligonucleotide
  Antisense Strand to SEQ ID NO: 452653
auucuggacauauagugac

SEQ ID NO: 452655 - RNA, 19 nt, Artificial Sequence
  Description of Artificial Sequence: Synthetic oligonucleotide
  Sense strand starting at position 1756 of SEQ ID NO: 316949
aguucugacucaucuagga

SEQ ID NO: 452656 - RNA, 19 nt, Artificial Sequence
  Description of Artificial Sequence: Synthetic oligonucleotide
  Antisense Strand to SEQ ID NO: 452655
uccuagaugagucagaacu

SEQ ID NO: 452657 - RNA, 19 nt, Artificial Sequence
  Description of Artificial Sequence: Synthetic oligonucleotide
  Sense strand starting at position 1830 of SEQ ID NO: 316949
gcaaucagucuugaauaag

SEQ ID NO: 452658 - RNA, 19 nt, Artificial Sequence
  Description of Artificial Sequence: Synthetic oligonucleotide
  Antisense Strand to SEQ ID NO: 452657
cuuauucaagacugauugc

SEQ ID NO: 452659 - RNA, 19 nt, Artificial Sequence
  Description of Artificial Sequence: Synthetic oligonucleotide
  Sense strand starting at position 1881 of SEQ ID NO: 316949
uugcauauacaucauguca

SEQ ID NO: 452660 - RNA, 19 nt, Artificial Sequence
  Description of Artificial Sequence: Synthetic oligonucleotide
  Antisense Strand to SEQ ID NO: 452659
ugacaugauguauaugcaa

SEQ ID NO: 452661 - RNA, 19 nt, Artificial Sequence
  Description of Artificial Sequence: Synthetic oligonucleotide
  Sense strand starting at position 1912 of SEQ ID NO: 316949
agggccauaugccugaaau

SEQ ID NO: 452662 - RNA, 19 nt, Artificial Sequence
  Description of Artificial Sequence: Synthetic oligonucleotide
  Antisense Strand to SEQ ID NO: 452661
auuucaggcauauggcccu

SEQ ID NO: 452663 - RNA, 19 nt, Artificial Sequence
  Description of Artificial Sequence: Synthetic oligonucleotide
  Sense strand starting at position 1914 of SEQ ID NO: 316949
ggccauaugccugaaauga

SEQ ID NO: 452664 - RNA, 19 nt, Artificial Sequence
  Description of Artificial Sequence: Synthetic oligonucleotide
  Antisense Strand to SEQ ID NO: 452663
ucauuucaggcauauggcc

SEQ ID NO: 452665 - RNA, 19 nt, Artificial Sequence
  Description of Artificial Sequence: Synthetic oligonucleotide
  Sense strand starting at position 2243 of SEQ ID NO: 316949
uuuguuaaugauggacuga

SEQ ID NO: 452666 - RNA, 19 nt, Artificial Sequence
  Description of Artificial Sequence: Synthetic oligonucleotide
  Antisense Strand to SEQ ID NO: 452665
ucaguccaucauuaacaaa

SEQ ID NO: 452667 - RNA, 19 nt, Artificial Sequence
  Description of Artificial Sequence: Synthetic oligonucleotide
  Sense strand starting at position 2405 of SEQ ID NO: 316949
guucaaaggguaugugaaa

SEQ ID NO: 452668 - RNA, 19 nt, Artificial Sequence
  Description of Artificial Sequence: Synthetic oligonucleotide
  Antisense Strand to SEQ ID NO: 452667
uuucacauacccuuugaac

SEQ ID NO: 452669 - RNA, 19 nt, Artificial Sequence
  Description of Artificial Sequence: Synthetic oligonucleotide
  Sense strand starting at position 2432 of SEQ ID NO: 316949
guaaauaauuaggcagacu

SEQ ID NO: 452670 - RNA, 19 nt, Artificial Sequence
  Description of Artificial Sequence: Synthetic oligonucleotide
  Antisense Strand to SEQ ID NO: 452669
agucugccuaauuauuuac

SEQ ID NO: 452671 - RNA, 19 nt, Artificial Sequence
  Description of Artificial Sequence: Synthetic oligonucleotide
  Sense strand starting at position 2483 of SEQ ID NO: 316949
gaguuuaggcuuuaccuau

SEQ ID NO: 452672 - RNA, 19 nt, Artificial Sequence
  Description of Artificial Sequence: Synthetic oligonucleotide
  Antisense Strand to SEQ ID NO: 452671
auagguaaagccuaaacuc

SEQ ID NO: 452673 - RNA, 19 nt, Artificial Sequence
  Description of Artificial Sequence: Synthetic oligonucleotide
  Sense strand starting at position 2511 of SEQ ID NO: 316949
ggaguaauauacuccuuuc

SEQ ID NO: 452674 - RNA, 19 nt, Artificial Sequence
  Description of Artificial Sequence: Synthetic oligonucleotide
  Antisense Strand to SEQ ID NO: 452673
gaaaggaguauauuacucc

SEQ ID NO: 452675 - RNA, 19 nt, Artificial Sequence
  Description of Artificial Sequence: Synthetic oligonucleotide
  Sense strand starting at position 2549 of SEQ ID NO: 316949
uuguguagcauacagagaa

SEQ ID NO: 452676 - RNA, 19 nt, Artificial Sequence
  Description of Artificial Sequence: Synthetic oligonucleotide
  Antisense Strand to SEQ ID NO: 452675
uucucuguaugcuacacaa

SEQ ID NO: 452677 - RNA, 19 nt, Artificial Sequence
  Description of Artificial Sequence: Synthetic oligonucleotide
  Sense strand starting at position 2582 of SEQ ID NO: 316949
uugggaaauagugggcaau

SEQ ID NO: 452678 - RNA, 19 nt, Artificial Sequence
  Description of Artificial Sequence: Synthetic oligonucleotide
  Antisense Strand to SEQ ID NO: 452677
auugcccacuauuucccaa

SEQ ID NO: 452679 - RNA, 19 nt, Artificial Sequence
  Description of Artificial Sequence: Synthetic oligonucleotide
  Sense strand starting at position 2584 of SEQ ID NO: 316949
gggaaauagugggcaauca

SEQ ID NO: 452680 - RNA, 19 nt, Artificial Sequence
  Description of Artificial Sequence: Synthetic oligonucleotide
  Antisense Strand to SEQ ID NO: 452679
ugauugcccacuauuuccc

SEQ ID NO: 452681 - RNA, 19 nt, Artificial Sequence
  Description of Artificial Sequence: Synthetic oligonucleotide
  Sense strand starting at position 2743 of SEQ ID NO: 316949
cucuaaguuguugaaucua

SEQ ID NO: 452682 - RNA, 19 nt, Artificial Sequence
  Description of Artificial Sequence: Synthetic oligonucleotide
  Antisense Strand to SEQ ID NO: 452681
uagauucaacaacuuagag

SEQ ID NO: 452683 - RNA, 19 nt, Artificial Sequence
  Description of Artificial Sequence: Synthetic oligonucleotide
  Sense strand starting at position 2795 of SEQ ID NO: 316949
aggugcugucaauacugau

SEQ ID NO: 452684 - RNA, 19 nt, Artificial Sequence
  Description of Artificial Sequence: Synthetic oligonucleotide
  Antisense Strand to SEQ ID NO: 452683
aucaguauugacagcaccu

SEQ ID NO: 452685 - RNA, 19 nt, Artificial Sequence
  Description of Artificial Sequence: Synthetic oligonucleotide
  Sense strand starting at position 2912 of SEQ ID NO: 316949
ccuagaagucaguacuauu

SEQ ID NO: 452686 - RNA, 19 nt, Artificial Sequence
  Description of Artificial Sequence: Synthetic oligonucleotide
  Antisense Strand to SEQ ID NO: 452685
aauaguacugacuucuagg

SEQ ID NO: 452687 - RNA, 19 nt, Artificial Sequence
  Description of Artificial Sequence: Synthetic oligonucleotide
  Sense strand starting at position 2936 of SEQ ID NO: 316949
cgucuuaugguugaggaag

SEQ ID NO: 452688 - RNA, 19 nt, Artificial Sequence
  Description of Artificial Sequence: Synthetic oligonucleotide
  Antisense Strand to SEQ ID NO: 452687
cuuccucaaccauaagacg

SEQ ID NO: 452689 - RNA, 19 nt, Artificial Sequence
  Description of Artificial Sequence: Synthetic oligonucleotide
  Sense strand starting at position 3069 of SEQ ID NO: 316949
aggcaaauuuguuagagaa

SEQ ID NO: 452690 - RNA, 19 nt, Artificial Sequence
  Description of Artificial Sequence: Synthetic oligonucleotide
  Antisense Strand to SEQ ID NO: 452689
uucucuaacaaauuugccu

SEQ ID NO: 452691 - RNA, 19 nt, Artificial Sequence
  Description of Artificial Sequence: Synthetic oligonucleotide
  Sense strand starting at position 3071 of SEQ ID NO: 316949
gcaaauuuguuagagaagg

SEQ ID NO: 452692 - RNA, 19 nt, Artificial Sequence
  Description of Artificial Sequence: Synthetic oligonucleotide
  Antisense Strand to SEQ ID NO: 452691
ccuucucuaacaaauuugc

SEQ ID NO: 452693 - RNA, 19 nt, Artificial Sequence
  Description of Artificial Sequence: Synthetic oligonucleotide
  Sense strand starting at position 3266 of SEQ ID NO: 316949
gugauaguugggcauagga

SEQ ID NO: 452694 - RNA, 19 nt, Artificial Sequence
  Description of Artificial Sequence: Synthetic oligonucleotide
  Antisense Strand to SEQ ID NO: 452693
uccuaugcccaacuaucac

SEQ ID NO: 452695 - RNA, 19 nt, Artificial Sequence
  Description of Artificial Sequence: Synthetic oligonucleotide
  Sense strand starting at position 3312 of SEQ ID NO: 316949
cuauguguccuuguagcuu

SEQ ID NO: 452696 - RNA, 19 nt, Artificial Sequence
  Description of Artificial Sequence: Synthetic oligonucleotide
  Antisense Strand to SEQ ID NO: 452695
aagcuacaaggacacauag

SEQ ID NO: 452697 - RNA, 19 nt, Artificial Sequence
  Description of Artificial Sequence: Synthetic oligonucleotide
  Sense strand starting at position 3486 of SEQ ID NO: 316949
uggaaaggucuaugagcca

SEQ ID NO: 452698 - RNA, 19 nt, Artificial Sequence
  Description of Artificial Sequence: Synthetic oligonucleotide
  Antisense Strand to SEQ ID NO: 452697
uggcucauagaccuuucca

SEQ ID NO: 452699 - RNA, 19 nt, Artificial Sequence
  Description of Artificial Sequence: Synthetic oligonucleotide
  Sense strand starting at position 3800 of SEQ ID NO: 316949
gagugaugaugguuuagaa

SEQ ID NO: 452700 - RNA, 19 nt, Artificial Sequence
  Description of Artificial Sequence: Synthetic oligonucleotide
  Antisense Strand to SEQ ID NO: 452699
uucuaaaccaucaucacuc

SEQ ID NO: 452701 - RNA, 19 nt, Artificial Sequence
  Description of Artificial Sequence: Synthetic oligonucleotide
  Sense strand starting at position 3808 of SEQ ID NO: 316949
augguuuagaagugaccca

SEQ ID NO: 452702 - RNA, 19 nt, Artificial Sequence
  Description of Artificial Sequence: Synthetic oligonucleotide
  Antisense Strand to SEQ ID NO: 452701
ugggucacuucuaaaccau

SEQ ID NO: 452703 - RNA, 19 nt, Artificial Sequence
  Description of Artificial Sequence: Synthetic oligonucleotide
  Sense strand starting at position 26 of SEQ ID NO: 316950
aagaguuuauaggcucaag

SEQ ID NO: 452704 - RNA, 19 nt, Artificial Sequence
  Description of Artificial Sequence: Synthetic oligonucleotide
  Antisense Strand to SEQ ID NO: 452703
cuugagccuauaaacucuu

SEQ ID NO: 452705 - RNA, 19 nt, Artificial Sequence
  Description of Artificial Sequence: Synthetic oligonucleotide
  Sense strand starting at position 62 of SEQ ID NO: 316950
aaguguuggguuuaggaga

SEQ ID NO: 452706 - RNA, 19 nt, Artificial Sequence
  Description of Artificial Sequence: Synthetic oligonucleotide
  Antisense Strand to SEQ ID NO: 452705
ucuccuaaacccaacacuu

SEQ ID NO: 452707 - RNA, 19 nt, Artificial Sequence
  Description of Artificial Sequence: Synthetic oligonucleotide
  Sense strand starting at position 102 of SEQ ID NO: 316950
cugucuuuccaauggaaca

SEQ ID NO: 452708 - RNA, 19 nt, Artificial Sequence
  Description of Artificial Sequence: Synthetic oligonucleotide
  Antisense Strand to SEQ ID NO: 452707
uguuccauuggaaagacag

SEQ ID NO: 452709 - RNA, 19 nt, Artificial Sequence
  Description of Artificial Sequence: Synthetic oligonucleotide
  Sense strand starting at position 339 of SEQ ID NO: 316950
gaaagucuugaucacagcu

SEQ ID NO: 452710 - RNA, 19 nt, Artificial Sequence
  Description of Artificial Sequence: Synthetic oligonucleotide
  Antisense Strand to SEQ ID NO: 452709
agcugugaucaagacuuuc

SEQ ID NO: 452711 - RNA, 19 nt, Artificial Sequence
  Description of Artificial Sequence: Synthetic oligonucleotide
  Sense strand starting at position 433 of SEQ ID NO: 316950
agaaauuaguagucaaagc

SEQ ID NO: 452712 - RNA, 19 nt, Artificial Sequence
  Description of Artificial Sequence: Synthetic oligonucleotide
  Antisense Strand to SEQ ID NO: 452711
gcuuugacuacuaauuucu

SEQ ID NO: 452713 - RNA, 19 nt, Artificial Sequence
  Description of Artificial Sequence: Synthetic oligonucleotide
  Sense strand starting at position 518 of SEQ ID NO: 316950
uccuuuacucuuggagaaa

SEQ ID NO: 452714 - RNA, 19 nt, Artificial Sequence
  Description of Artificial Sequence: Synthetic oligonucleotide
  Antisense Strand to SEQ ID NO: 452713
uuucuccaagaguaaagga

SEQ ID NO: 452715 - RNA, 19 nt, Artificial Sequence
  Description of Artificial Sequence: Synthetic oligonucleotide
  Sense strand starting at position 583 of SEQ ID NO: 316950
aguggacuuggcuggaaga

SEQ ID NO: 452716 - RNA, 19 nt, Artificial Sequence
  Description of Artificial Sequence: Synthetic oligonucleotide
  Antisense Strand to SEQ ID NO: 452715
ucuuccagccaaguccacu

SEQ ID NO: 452717 - RNA, 19 nt, Artificial Sequence
  Description of Artificial Sequence: Synthetic oligonucleotide
  Sense strand starting at position 584 of SEQ ID NO: 316950
guggacuuggcuggaagaa

SEQ ID NO: 452718 - RNA, 19 nt, Artificial Sequence
  Description of Artificial Sequence: Synthetic oligonucleotide
  Antisense Strand to SEQ ID NO: 452717
uucuuccagccaaguccac

SEQ ID NO: 452719 - RNA, 19 nt, Artificial Sequence
  Description of Artificial Sequence: Synthetic oligonucleotide
  Sense strand starting at position 785 of SEQ ID NO: 316950
gggugugaaucggcuauuu

SEQ ID NO: 452720 - RNA, 19 nt, Artificial Sequence
  Description of Artificial Sequence: Synthetic oligonucleotide
  Antisense Strand to SEQ ID NO: 452719
aaauagccgauucacaccc

SEQ ID NO: 452721 - RNA, 19 nt, Artificial Sequence
  Description of Artificial Sequence: Synthetic oligonucleotide
  Sense strand starting at position 787 of SEQ ID NO: 316950
gugugaaucggcuauuuca

SEQ ID NO: 452722 - RNA, 19 nt, Artificial Sequence
  Description of Artificial Sequence: Synthetic oligonucleotide
  Antisense Strand to SEQ ID NO: 452721
ugaaauagccgauucacac

SEQ ID NO: 452723 - RNA, 19 nt, Artificial Sequence
  Description of Artificial Sequence: Synthetic oligonucleotide
  Sense strand starting at position 838 of SEQ ID NO: 316950
gucacauuccuggagcuau

SEQ ID NO: 452724 - RNA, 19 nt, Artificial Sequence
  Description of Artificial Sequence: Synthetic oligonucleotide
  Antisense Strand to SEQ ID NO: 452723
auagcuccaggaaugugac

SEQ ID NO: 452725 - RNA, 19 nt, Artificial Sequence
  Description of Artificial Sequence: Synthetic oligonucleotide
  Sense strand starting at position 889 of SEQ ID NO: 316950
ggacccugccuggaaacuu

SEQ ID NO: 452726 - RNA, 19 nt, Artificial Sequence
  Description of Artificial Sequence: Synthetic oligonucleotide
  Antisense Strand to SEQ ID NO: 452725
aaguuuccaggcagggucc

SEQ ID NO: 452727 - RNA, 19 nt, Artificial Sequence
  Description of Artificial Sequence: Synthetic oligonucleotide
  Sense strand starting at position 990 of SEQ ID NO: 316950
gguggaauuuaggaagaau

SEQ ID NO: 452728 - RNA, 19 nt, Artificial Sequence
  Description of Artificial Sequence: Synthetic oligonucleotide
  Antisense Strand to SEQ ID NO: 452727
auucuuccuaaauuccacc

SEQ ID NO: 452729 - RNA, 19 nt, Artificial Sequence
  Description of Artificial Sequence: Synthetic oligonucleotide
  Sense strand starting at position 1225 of SEQ ID NO: 316950
cccuguaaucgccucgcua

SEQ ID NO: 452730 - RNA, 19 nt, Artificial Sequence
  Description of Artificial Sequence: Synthetic oligonucleotide
  Antisense Strand to SEQ ID NO: 452729
uagcgaggcgauuacaggg

SEQ ID NO: 452731 - RNA, 19 nt, Artificial Sequence
  Description of Artificial Sequence: Synthetic oligonucleotide
  Sense strand starting at position 1226 of SEQ ID NO: 316950
ccuguaaucgccucgcuau

SEQ ID NO: 452732 - RNA, 19 nt, Artificial Sequence
  Description of Artificial Sequence: Synthetic oligonucleotide
  Antisense Strand to SEQ ID NO: 452731
auagcgaggcgauuacagg

SEQ ID NO: 452733 - RNA, 19 nt, Artificial Sequence
  Description of Artificial Sequence: Synthetic oligonucleotide
  Sense strand starting at position 1578 of SEQ ID NO: 316950
agccuuugggcgaggugua

SEQ ID NO: 452734 - RNA, 19 nt, Artificial Sequence
  Description of Artificial Sequence: Synthetic oligonucleotide
  Antisense Strand to SEQ ID NO: 452733
uacaccucgcccaaaggcu

SEQ ID NO: 452735 - RNA, 19 nt, Artificial Sequence
  Description of Artificial Sequence: Synthetic oligonucleotide
  Sense strand starting at position 1994 of SEQ ID NO: 316950
agauaaugaucucuaagug

SEQ ID NO: 452736 - RNA, 19 nt, Artificial Sequence
  Description of Artificial Sequence: Synthetic oligonucleotide
  Antisense Strand to SEQ ID NO: 452735
cacuuagagaucauuaucu

SEQ ID NO: 452737 - RNA, 19 nt, Artificial Sequence
  Description of Artificial Sequence: Synthetic oligonucleotide
  Sense strand starting at position 1998 of SEQ ID NO: 316950
aaugaucucuaaguggagu

SEQ ID NO: 452738 - RNA, 19 nt, Artificial Sequence
  Description of Artificial Sequence: Synthetic oligonucleotide
  Antisense Strand to SEQ ID NO: 452737
acuccacuuagagaucauu

SEQ ID NO: 452739 - RNA, 19 nt, Artificial Sequence
  Description of Artificial Sequence: Synthetic oligonucleotide
  Sense strand starting at position 2006 of SEQ ID NO: 316950
cuaaguggagucuggaaau

SEQ ID NO: 452740 - RNA, 19 nt, Artificial Sequence
  Description of Artificial Sequence: Synthetic oligonucleotide
  Antisense Strand to SEQ ID NO: 452739
auuuccagacuccacuuag

SEQ ID NO: 452741 - RNA, 19 nt, Artificial Sequence
  Description of Artificial Sequence: Synthetic oligonucleotide
  Sense strand starting at position 2187 of SEQ ID NO: 316950
auguuucuguaauuggaca

SEQ ID NO: 452742 - RNA, 19 nt, Artificial Sequence
  Description of Artificial Sequence: Synthetic oligonucleotide
  Antisense Strand to SEQ ID NO: 452741
uguccaauuacagaaacau

SEQ ID NO: 452743 - RNA, 19 nt, Artificial Sequence
  Description of Artificial Sequence: Synthetic oligonucleotide
  Sense strand starting at position 2192 of SEQ ID NO: 316950
ucuguaauuggacaagguu

SEQ ID NO: 452744 - RNA, 19 nt, Artificial Sequence
  Description of Artificial Sequence: Synthetic oligonucleotide
  Antisense Strand to SEQ ID NO: 452743
aaccuuguccaauuacaga

SEQ ID NO: 452745 - RNA, 19 nt, Artificial Sequence
  Description of Artificial Sequence: Synthetic oligonucleotide
  Sense strand starting at position 2195 of SEQ ID NO: 316950
guaauuggacaagguuaua

SEQ ID NO: 452746 - RNA, 19 nt, Artificial Sequence
  Description of Artificial Sequence: Synthetic oligonucleotide
  Antisense Strand to SEQ ID NO: 452745
uauaaccuuguccaauuac

SEQ ID NO: 452747 - RNA, 19 nt, Artificial Sequence
  Description of Artificial Sequence: Synthetic oligonucleotide
  Sense strand starting at position 2362 of SEQ ID NO: 316950
uugagaggaugaguuguaa

SEQ ID NO: 452748 - RNA, 19 nt, Artificial Sequence
  Description of Artificial Sequence: Synthetic oligonucleotide
  Antisense Strand to SEQ ID NO: 452747
uuacaacucauccucucaa

SEQ ID NO: 452749 - RNA, 19 nt, Artificial Sequence
  Description of Artificial Sequence: Synthetic oligonucleotide
  Sense strand starting at position 2375 of SEQ ID NO: 316950
uuguaauccuggcucauuu

SEQ ID NO: 452750 - RNA, 19 nt, Artificial Sequence
  Description of Artificial Sequence: Synthetic oligonucleotide
  Antisense Strand to SEQ ID NO: 452749
aaaugagccaggauuacaa

SEQ ID NO: 452751 - RNA, 19 nt, Artificial Sequence
  Description of Artificial Sequence: Synthetic oligonucleotide
  Sense strand starting at position 2478 of SEQ ID NO: 316950
auggguuauugaccuaguu

SEQ ID NO: 452752 - RNA, 19 nt, Artificial Sequence
  Description of Artificial Sequence: Synthetic oligonucleotide
  Antisense Strand to SEQ ID NO: 452751
aacuaggucaauaacccau

SEQ ID NO: 452753 - RNA, 19 nt, Artificial Sequence
  Description of Artificial Sequence: Synthetic oligonucleotide
  Sense strand starting at position 2480 of SEQ ID NO: 316950
ggguuauugaccuaguucu

SEQ ID NO: 452754 - RNA, 19 nt, Artificial Sequence
  Description of Artificial Sequence: Synthetic oligonucleotide
  Antisense Strand to SEQ ID NO: 452753
agaacuaggucaauaaccc

SEQ ID NO: 452755 - RNA, 19 nt, Artificial Sequence
  Description of Artificial Sequence: Synthetic oligonucleotide
  Sense strand starting at position 2626 of SEQ ID NO: 316950
uggauaugauuacuuaccu

SEQ ID NO: 452756 - RNA, 19 nt, Artificial Sequence
  Description of Artificial Sequence: Synthetic oligonucleotide
  Antisense Strand to SEQ ID NO: 452755
agguaaguaaucauaucca

SEQ ID NO: 452757 - RNA, 19 nt, Artificial Sequence
  Description of Artificial Sequence: Synthetic oligonucleotide
  Sense strand starting at position 2627 of SEQ ID NO: 316950
ggauaugauuacuuaccuu

SEQ ID NO: 452758 - RNA, 19 nt, Artificial Sequence
  Description of Artificial Sequence: Synthetic oligonucleotide
  Antisense Strand to SEQ ID NO: 452757
aagguaaguaaucauaucc

SEQ ID NO: 452759 - RNA, 19 nt, Artificial Sequence
  Description of Artificial Sequence: Synthetic oligonucleotide
  Sense strand starting at position 2645 of SEQ ID NO: 316950
ugaggaacauugcuaucua

SEQ ID NO: 452760 - RNA, 19 nt, Artificial Sequence
  Description of Artificial Sequence: Synthetic oligonucleotide
  Antisense Strand to SEQ ID NO: 452759
uagauagcaauguuccuca

SEQ ID NO: 452761 - RNA, 19 nt, Artificial Sequence
  Description of Artificial Sequence: Synthetic oligonucleotide
  Sense strand starting at position 2705 of SEQ ID NO: 316950
agcagaaugcauggauaaa

SEQ ID NO: 452762 - RNA, 19 nt, Artificial Sequence
  Description of Artificial Sequence: Synthetic oligonucleotide
  Antisense Strand to SEQ ID NO: 452761
uuuauccaugcauucugcu

SEQ ID NO: 452763 - RNA, 19 nt, Artificial Sequence
  Description of Artificial Sequence: Synthetic oligonucleotide
  Sense strand starting at position 2774 of SEQ ID NO: 316950
cacguaauggaagagguau

SEQ ID NO: 452764 - RNA, 19 nt, Artificial Sequence
  Description of Artificial Sequence: Synthetic oligonucleotide
  Antisense Strand to SEQ ID NO: 452763
auaccucuuccauuacgug

SEQ ID NO: 452765 - RNA, 19 nt, Artificial Sequence
  Description of Artificial Sequence: Synthetic oligonucleotide
  Sense strand starting at position 2832 of SEQ ID NO: 316950
ggaauacaguuauucuuau

SEQ ID NO: 452766 - RNA, 19 nt, Artificial Sequence
  Description of Artificial Sequence: Synthetic oligonucleotide
  Antisense Strand to SEQ ID NO: 452765
auaagaauaacuguauucc

SEQ ID NO: 452767 - RNA, 19 nt, Artificial Sequence
  Description of Artificial Sequence: Synthetic oligonucleotide
  Sense strand starting at position 3038 of SEQ ID NO: 316950
agguauaucccugaagcuc

SEQ ID NO: 452768 - RNA, 19 nt, Artificial Sequence
  Description of Artificial Sequence: Synthetic oligonucleotide
  Antisense Strand to SEQ ID NO: 452767
gagcuucagggauauaccu

SEQ ID NO: 452769 - RNA, 19 nt, Artificial Sequence
  Description of Artificial Sequence: Synthetic oligonucleotide
  Sense strand starting at position 3175 of SEQ ID NO: 316950
guggaaggaucacuuuauc

SEQ ID NO: 452770 - RNA, 19 nt, Artificial Sequence
  Description of Artificial Sequence: Synthetic oligonucleotide
  Antisense Strand to SEQ ID NO: 452769
gauaaagugauccuuccac

SEQ ID NO: 452771 - RNA, 19 nt, Artificial Sequence
  Description of Artificial Sequence: Synthetic oligonucleotide
  Sense strand starting at position 3181 of SEQ ID NO: 316950
ggaucacuuuauccuggga

SEQ ID NO: 452772 - RNA, 19 nt, Artificial Sequence
  Description of Artificial Sequence: Synthetic oligonucleotide
  Antisense Strand to SEQ ID NO: 452771
ucccaggauaaagugaucc

SEQ ID NO: 452773 - RNA, 19 nt, Artificial Sequence
  Description of Artificial Sequence: Synthetic oligonucleotide
  Sense strand starting at position 3184 of SEQ ID NO: 316950
ucacuuuauccugggaggu

SEQ ID NO: 452774 - RNA, 19 nt, Artificial Sequence
  Description of Artificial Sequence: Synthetic oligonucleotide
  Antisense Strand to SEQ ID NO: 452773
accucccaggauaaaguga

SEQ ID NO: 452775 - RNA, 19 nt, Artificial Sequence
  Description of Artificial Sequence: Synthetic oligonucleotide
  Sense strand starting at position 3185 of SEQ ID NO: 316950
cacuuuauccugggagguu

SEQ ID NO: 452776 - RNA, 19 nt, Artificial Sequence
  Description of Artificial Sequence: Synthetic oligonucleotide
  Antisense Strand to SEQ ID NO: 452775
aaccucccaggauaaagug

SEQ ID NO: 452777 - RNA, 19 nt, Artificial Sequence
  Description of Artificial Sequence: Synthetic oligonucleotide
  Sense strand starting at position 3685 of SEQ ID NO: 316950
gucaguuaaccacauuguu

SEQ ID NO: 452778 - RNA, 19 nt, Artificial Sequence
  Description of Artificial Sequence: Synthetic oligonucleotide
  Antisense Strand to SEQ ID NO: 452777
aacaaugugguuaacugac

SEQ ID NO: 452779 - RNA, 19 nt, Artificial Sequence
  Description of Artificial Sequence: Synthetic oligonucleotide
  Sense strand starting at position 3698 of SEQ ID NO: 316950
auuguuucucaguauccaa

SEQ ID NO: 452780 - RNA, 19 nt, Artificial Sequence
  Description of Artificial Sequence: Synthetic oligonucleotide
  Antisense Strand to SEQ ID NO: 452779
uuggauacugagaaacaau

SEQ ID NO: 452781 - RNA, 19 nt, Artificial Sequence
  Description of Artificial Sequence: Synthetic oligonucleotide
  Sense strand starting at position 3731 of SEQ ID NO: 316950
gcuugagaaagauggugau

SEQ ID NO: 452782 - RNA, 19 nt, Artificial Sequence
  Description of Artificial Sequence: Synthetic oligonucleotide
  Antisense Strand to SEQ ID NO: 452781
aucaccaucuuucucaagc

SEQ ID NO: 452783 - RNA, 19 nt, Artificial Sequence
  Description of Artificial Sequence: Synthetic oligonucleotide
  Sense strand starting at position 72 of SEQ ID NO: 316951
gcagauaaaucagcacugu

SEQ ID NO: 452784 - RNA, 19 nt, Artificial Sequence
  Description of Artificial Sequence: Synthetic oligonucleotide
  Antisense Strand to SEQ ID NO: 452783
acagugcugauuuaucugc

SEQ ID NO: 452785 - RNA, 19 nt, Artificial Sequence
  Description of Artificial Sequence: Synthetic oligonucleotide
  Sense strand starting at position 115 of SEQ ID NO: 316951
cccucauaacugggauuaa

SEQ ID NO: 452786 - RNA, 19 nt, Artificial Sequence
  Description of Artificial Sequence: Synthetic oligonucleotide
  Antisense Strand to SEQ ID NO: 452785
uuaaucccaguuaugaggg

SEQ ID NO: 452787 - RNA, 19 nt, Artificial Sequence
  Description of Artificial Sequence: Synthetic oligonucleotide
  Sense strand starting at position 211 of SEQ ID NO: 316951
uggaaaugguucuuuccuu

SEQ ID NO: 452788 - RNA, 19 nt, Artificial Sequence
  Description of Artificial Sequence: Synthetic oligonucleotide
  Antisense Strand to SEQ ID NO: 452787
aaggaaagaaccauuucca

SEQ ID NO: 452789 - RNA, 19 nt, Artificial Sequence
  Description of Artificial Sequence: Synthetic oligonucleotide
  Sense strand starting at position 236 of SEQ ID NO: 316951
uuugcagacucaguccaau

SEQ ID NO: 452790 - RNA, 19 nt, Artificial Sequence
  Description of Artificial Sequence: Synthetic oligonucleotide
  Antisense Strand to SEQ ID NO: 452789
auuggacugagucugcaaa

SEQ ID NO: 452791 - RNA, 19 nt, Artificial Sequence
  Description of Artificial Sequence: Synthetic oligonucleotide
  Sense strand starting at position 281 of SEQ ID NO: 316951
auuauaauagagugccaua

SEQ ID NO: 452792 - RNA, 19 nt, Artificial Sequence
  Description of Artificial Sequence: Synthetic oligonucleotide
  Antisense Strand to SEQ ID NO: 452791
uauggcacucuauuauaau

SEQ ID NO: 452793 - RNA, 19 nt, Artificial Sequence
  Description of Artificial Sequence: Synthetic oligonucleotide
  Sense strand starting at position 295 of SEQ ID NO: 316951
ccauaaacacuucgauaga

SEQ ID NO: 452794 - RNA, 19 nt, Artificial Sequence
  Description of Artificial Sequence: Synthetic oligonucleotide
  Antisense Strand to SEQ ID NO: 452793
ucuaucgaaguguuuaugg

SEQ ID NO: 452795 - RNA, 19 nt, Artificial Sequence
  Description of Artificial Sequence: Synthetic oligonucleotide
  Sense strand starting at position 332 of SEQ ID NO: 316951
augagagagcaucgcauaa

SEQ ID NO: 452796 - RNA, 19 nt, Artificial Sequence
  Description of Artificial Sequence: Synthetic oligonucleotide
  Antisense Strand to SEQ ID NO: 452795
uuaugcgaugcucucucau

SEQ ID NO: 452797 - RNA, 19 nt, Artificial Sequence
  Description of Artificial Sequence: Synthetic oligonucleotide
  Sense strand starting at position 336 of SEQ ID NO: 316951
gagagcaucgcauaaaccu

SEQ ID NO: 452798 - RNA, 19 nt, Artificial Sequence
  Description of Artificial Sequence: Synthetic oligonucleotide
  Antisense Strand to SEQ ID NO: 452797
agguuuaugcgaugcucuc

SEQ ID NO: 452799 - RNA, 19 nt, Artificial Sequence
  Description of Artificial Sequence: Synthetic oligonucleotide
  Sense strand starting at position 406 of SEQ ID NO: 316951
caggauauugcuggauauu

SEQ ID NO: 452800 - RNA, 19 nt, Artificial Sequence
  Description of Artificial Sequence: Synthetic oligonucleotide
  Antisense Strand to SEQ ID NO: 452799
aauauccagcaauauccug

SEQ ID NO: 452801 - RNA, 19 nt, Artificial Sequence
  Description of Artificial Sequence: Synthetic oligonucleotide
  Sense strand starting at position 660 of SEQ ID NO: 316951
gcagguagcauuugaucca

SEQ ID NO: 452802 - RNA, 19 nt, Artificial Sequence
  Description of Artificial Sequence: Synthetic oligonucleotide
  Antisense Strand to SEQ ID NO: 452801
uggaucaaaugcuaccugc

SEQ ID NO: 452803 - RNA, 19 nt, Artificial Sequence
  Description of Artificial Sequence: Synthetic oligonucleotide
  Sense strand starting at position 789 of SEQ ID NO: 316951
ccucacuucugauugucua

SEQ ID NO: 452804 - RNA, 19 nt, Artificial Sequence
  Description of Artificial Sequence: Synthetic oligonucleotide
  Antisense Strand to SEQ ID NO: 452803
uagacaaucagaagugagg

SEQ ID NO: 452805 - RNA, 19 nt, Artificial Sequence
  Description of Artificial Sequence: Synthetic oligonucleotide
  Sense strand starting at position 790 of SEQ ID NO: 316951
cucacuucugauugucuau

SEQ ID NO: 452806 - RNA, 19 nt, Artificial Sequence
  Description of Artificial Sequence: Synthetic oligonucleotide
  Antisense Strand to SEQ ID NO: 452805
auagacaaucagaagugag

SEQ ID NO: 452807 - RNA, 19 nt, Artificial Sequence
  Description of Artificial Sequence: Synthetic oligonucleotide
  Sense strand starting at position 816 of SEQ ID NO: 316951
cccauauggugucuuaaug

SEQ ID NO: 452808 - RNA, 19 nt, Artificial Sequence
  Description of Artificial Sequence: Synthetic oligonucleotide
  Antisense Strand to SEQ ID NO: 452807
cauuaagacaccauauggg

SEQ ID NO: 452809 - RNA, 19 nt, Artificial Sequence
  Description of Artificial Sequence: Synthetic oligonucleotide
  Sense strand starting at position 1206 of SEQ ID NO: 316951
uuucuuugaguucgaggaa

SEQ ID NO: 452810 - RNA, 19 nt, Artificial Sequence
  Description of Artificial Sequence: Synthetic oligonucleotide
  Antisense Strand to SEQ ID NO: 452809
uuccucgaacucaaagaaa

SEQ ID NO: 452811 - RNA, 19 nt, Artificial Sequence
  Description of Artificial Sequence: Synthetic oligonucleotide
  Sense strand starting at position 1209 of SEQ ID NO: 316951
cuuugaguucgaggaacaa

SEQ ID NO: 452812 - RNA, 19 nt, Artificial Sequence
  Description of Artificial Sequence: Synthetic oligonucleotide
  Antisense Strand to SEQ ID NO: 452811
uuguuccucgaacucaaag

SEQ ID NO: 452813 - RNA, 19 nt, Artificial Sequence
  Description of Artificial Sequence: Synthetic oligonucleotide
  Sense strand starting at position 1332 of SEQ ID NO: 316951
uugaccucccucugugaau

SEQ ID NO: 452814 - RNA, 19 nt, Artificial Sequence
  Description of Artificial Sequence: Synthetic oligonucleotide
  Antisense Strand to SEQ ID NO: 452813
auucacagagggaggucaa

SEQ ID NO: 452815 - RNA, 19 nt, Artificial Sequence
  Description of Artificial Sequence: Synthetic oligonucleotide
  Sense strand starting at position 1333 of SEQ ID NO: 316951
ugaccucccucugugaauu

SEQ ID NO: 452816 - RNA, 19 nt, Artificial Sequence
  Description of Artificial Sequence: Synthetic oligonucleotide
  Antisense Strand to SEQ ID NO: 452815
aauucacagagggagguca

SEQ ID NO: 452817 - RNA, 19 nt, Artificial Sequence
  Description of Artificial Sequence: Synthetic oligonucleotide
  Sense strand starting at position 1515 of SEQ ID NO: 316951
uuggaugugacaugccaau

SEQ ID NO: 452818 - RNA, 19 nt, Artificial Sequence
  Description of Artificial Sequence: Synthetic oligonucleotide
  Antisense Strand to SEQ ID NO: 452817
auuggcaugucacauccaa

SEQ ID NO: 452819 - RNA, 19 nt, Artificial Sequence
  Description of Artificial Sequence: Synthetic oligonucleotide
  Sense strand starting at position 1567 of SEQ ID NO: 316951
uuuaaugaggcaugcacua

SEQ ID NO: 452820 - RNA, 19 nt, Artificial Sequence
  Description of Artificial Sequence: Synthetic oligonucleotide
  Antisense Strand to SEQ ID NO: 452819
uagugcaugccucauuaaa

SEQ ID NO: 452821 - RNA, 19 nt, Artificial Sequence
  Description of Artificial Sequence: Synthetic oligonucleotide
  Sense strand starting at position 1659 of SEQ ID NO: 316951
ccuuccaggucugucauaa

SEQ ID NO: 452822 - RNA, 19 nt, Artificial Sequence
  Description of Artificial Sequence: Synthetic oligonucleotide
  Antisense Strand to SEQ ID NO: 452821
uuaugacagaccuggaagg

SEQ ID NO: 452823 - RNA, 19 nt, Artificial Sequence
  Description of Artificial Sequence: Synthetic oligonucleotide
  Sense strand starting at position 1872 of SEQ ID NO: 316951
augauuacauacuuguuga

SEQ ID NO: 452824 - RNA, 19 nt, Artificial Sequence
  Description of Artificial Sequence: Synthetic oligonucleotide
  Antisense Strand to SEQ ID NO: 452823
ucaacaaguauguaaucau

SEQ ID NO: 452825 - RNA, 19 nt, Artificial Sequence
  Description of Artificial Sequence: Synthetic oligonucleotide
  Sense strand starting at position 1875 of SEQ ID NO: 316951
auuacauacuuguugauga

SEQ ID NO: 452826 - RNA, 19 nt, Artificial Sequence
  Description of Artificial Sequence: Synthetic oligonucleotide
  Antisense Strand to SEQ ID NO: 452825
ucaucaacaaguauguaau

SEQ ID NO: 452827 - RNA, 19 nt, Artificial Sequence
  Description of Artificial Sequence: Synthetic oligonucleotide
  Sense strand starting at position 2464 of SEQ ID NO: 316951
uagucuagucaaggcaaau

SEQ ID NO: 452828 - RNA, 19 nt, Artificial Sequence
  Description of Artificial Sequence: Synthetic oligonucleotide
  Antisense Strand to SEQ ID NO: 452827
auuugccuugacuagacua

SEQ ID NO: 452829 - RNA, 19 nt, Artificial Sequence
  Description of Artificial Sequence: Synthetic oligonucleotide
  Sense strand starting at position 2493 of SEQ ID NO: 316951
gagagaggaugugucugaa

SEQ ID NO: 452830 - RNA, 19 nt, Artificial Sequence
  Description of Artificial Sequence: Synthetic oligonucleotide
  Antisense Strand to SEQ ID NO: 452829
uucagacacauccucucuc

SEQ ID NO: 452831 - RNA, 19 nt, Artificial Sequence
  Description of Artificial Sequence: Synthetic oligonucleotide
  Sense strand starting at position 2496 of SEQ ID NO: 316951
agaggaugugucugaauag

SEQ ID NO: 452832 - RNA, 19 nt, Artificial Sequence
  Description of Artificial Sequence: Synthetic oligonucleotide
  Antisense Strand to SEQ ID NO: 452831
cuauucagacacauccucu

SEQ ID NO: 452833 - RNA, 19 nt, Artificial Sequence
  Description of Artificial Sequence: Synthetic oligonucleotide
  Sense strand starting at position 2616 of SEQ ID NO: 316951
uuuaacugauaugucaaga

SEQ ID NO: 452834 - RNA, 19 nt, Artificial Sequence
  Description of Artificial Sequence: Synthetic oligonucleotide
  Antisense Strand to SEQ ID NO: 452833
ucuugacauaucaguuaaa

SEQ ID NO: 452835 - RNA, 19 nt, Artificial Sequence
  Description of Artificial Sequence: Synthetic oligonucleotide
  Sense strand starting at position 2719 of SEQ ID NO: 316951
uuaaauuggcaagguauau

SEQ ID NO: 452836 - RNA, 19 nt, Artificial Sequence
  Description of Artificial Sequence: Synthetic oligonucleotide
  Antisense Strand to SEQ ID NO: 452835
auauaccuugccaauuuaa

SEQ ID NO: 452837 - RNA, 19 nt, Artificial Sequence
  Description of Artificial Sequence: Synthetic oligonucleotide
  Sense strand starting at position 3066 of SEQ ID NO: 316951
agccaaugaugggcaaaua

SEQ ID NO: 452838 - RNA, 19 nt, Artificial Sequence
  Description of Artificial Sequence: Synthetic oligonucleotide
  Antisense Strand to SEQ ID NO: 452837
uauuugcccaucauuggcu

SEQ ID NO: 452839 - RNA, 19 nt, Artificial Sequence
  Description of Artificial Sequence: Synthetic oligonucleotide
  Sense strand starting at position 3217 of SEQ ID NO: 316951
agcuccauacaaggaauua

SEQ ID NO: 452840 - RNA, 19 nt, Artificial Sequence
  Description of Artificial Sequence: Synthetic oligonucleotide
  Antisense Strand to SEQ ID NO: 452839
uaauuccuuguauggagcu

SEQ ID NO: 452841 - RNA, 19 nt, Artificial Sequence
  Description of Artificial Sequence: Synthetic oligonucleotide
  Sense strand starting at position 3297 of SEQ ID NO: 316951
ugaacaucuccuggaagua

SEQ ID NO: 452842 - RNA, 19 nt, Artificial Sequence
  Description of Artificial Sequence: Synthetic oligonucleotide
  Antisense Strand to SEQ ID NO: 452841
uacuuccaggagauguuca

SEQ ID NO: 452843 - RNA, 19 nt, Artificial Sequence
  Description of Artificial Sequence: Synthetic oligonucleotide
  Sense strand starting at position 3342 of SEQ ID NO: 316951
guacuugguagugggauua

SEQ ID NO: 452844 - RNA, 19 nt, Artificial Sequence
  Description of Artificial Sequence: Synthetic oligonucleotide
  Antisense Strand to SEQ ID NO: 452843
uaaucccacuaccaaguac

SEQ ID NO: 452845 - RNA, 19 nt, Artificial Sequence
  Description of Artificial Sequence: Synthetic oligonucleotide
  Sense strand starting at position 3717 of SEQ ID NO: 316951
uugauugucuuggcaacua

SEQ ID NO: 452846 - RNA, 19 nt, Artificial Sequence
  Description of Artificial Sequence: Synthetic oligonucleotide
  Antisense Strand to SEQ ID NO: 452845
uaguugccaagacaaucaa

SEQ ID NO: 452847 - RNA, 19 nt, Artificial Sequence
  Description of Artificial Sequence: Synthetic oligonucleotide
  Sense strand starting at position 3751 of SEQ ID NO: 316951
cuguaaauccauuauguuc

SEQ ID NO: 452848 - RNA, 19 nt, Artificial Sequence
  Description of Artificial Sequence: Synthetic oligonucleotide
  Antisense Strand to SEQ ID NO: 452847
gaacauaauggauuuacag

SEQ ID NO: 452849 - RNA, 19 nt, Artificial Sequence
  Description of Artificial Sequence: Synthetic oligonucleotide
  Sense strand starting at position 3859 of SEQ ID NO: 316951
uaggcuaaaugucuucuga

SEQ ID NO: 452850 - RNA, 19 nt, Artificial Sequence
  Description of Artificial Sequence: Synthetic oligonucleotide
  Antisense Strand to SEQ ID NO: 452849
ucagaagacauuuagccua

SEQ ID NO: 452851 - RNA, 19 nt, Artificial Sequence
  Description of Artificial Sequence: Synthetic oligonucleotide
  Sense strand starting at position 3861 of SEQ ID NO: 316951
ggcuaaaugucuucugagg

SEQ ID NO: 452852 - RNA, 19 nt, Artificial Sequence
  Description of Artificial Sequence: Synthetic oligonucleotide
  Antisense Strand to SEQ ID NO: 452851
ccucagaagacauuuagcc

SEQ ID NO: 452853 - RNA, 19 nt, Artificial Sequence
  Description of Artificial Sequence: Synthetic oligonucleotide
  Sense strand starting at position 3868 of SEQ ID NO: 316951
ugucuucugagguaugaga

SEQ ID NO: 452854 - RNA, 19 nt, Artificial Sequence
  Description of Artificial Sequence: Synthetic oligonucleotide
  Antisense Strand to SEQ ID NO: 452853
ucucauaccucagaagaca

SEQ ID NO: 452855 - RNA, 19 nt, Artificial Sequence
  Description of Artificial Sequence: Synthetic oligonucleotide
  Sense strand starting at position 3870 of SEQ ID NO: 316951
ucuucugagguaugagaaa

SEQ ID NO: 452856 - RNA, 19 nt, Artificial Sequence
  Description of Artificial Sequence: Synthetic oligonucleotide
  Antisense Strand to SEQ ID NO: 452855
uuucucauaccucagaaga

SEQ ID NO: 452857 - RNA, 19 nt, Artificial Sequence
  Description of Artificial Sequence: Synthetic oligonucleotide
  Sense strand starting at position 3915 of SEQ ID NO: 316951
caugaauuguguccuagga

SEQ ID NO: 452858 - RNA, 19 nt, Artificial Sequence
  Description of Artificial Sequence: Synthetic oligonucleotide
  Antisense Strand to SEQ ID NO: 452857
uccuaggacacaauucaug

SEQ ID NO: 452859 - RNA, 19 nt, Artificial Sequence
  Description of Artificial Sequence: Synthetic oligonucleotide
  Sense strand starting at position 3919 of SEQ ID NO: 316951
aauuguguccuaggacaug

SEQ ID NO: 452860 - RNA, 19 nt, Artificial Sequence
  Description of Artificial Sequence: Synthetic oligonucleotide
  Antisense Strand to SEQ ID NO: 452859
cauguccuaggacacaauu

SEQ ID NO: 452861 - RNA, 19 nt, Artificial Sequence
  Description of Artificial Sequence: Synthetic oligonucleotide
  Sense strand starting at position 3922 of SEQ ID NO: 316951
uguguccuaggacaugaua

SEQ ID NO: 452862 - RNA, 19 nt, Artificial Sequence
  Description of Artificial Sequence: Synthetic oligonucleotide
  Antisense Strand to SEQ ID NO: 452861
uaucauguccuaggacaca

SEQ ID NO: 452863 - RNA, 19 nt, Artificial Sequence
  Description of Artificial Sequence: Synthetic oligonucleotide
  Sense strand starting at position 321 of SEQ ID NO: 316952
aauucucgaguugauugaa

SEQ ID NO: 452864 - RNA, 19 nt, Artificial Sequence
  Description of Artificial Sequence: Synthetic oligonucleotide
  Antisense Strand to SEQ ID NO: 452863
uucaaucaacucgagaauu

SEQ ID NO: 452865 - RNA, 19 nt, Artificial Sequence
  Description of Artificial Sequence: Synthetic oligonucleotide
  Sense strand starting at position 324 of SEQ ID NO: 316952
ucucgaguugauugaauca

SEQ ID NO: 452866 - RNA, 19 nt, Artificial Sequence
  Description of Artificial Sequence: Synthetic oligonucleotide
  Antisense Strand to SEQ ID NO: 452865
ugauucaaucaacucgaga

SEQ ID NO: 452867 - RNA, 19 nt, Artificial Sequence
  Description of Artificial Sequence: Synthetic oligonucleotide
  Sense strand starting at position 467 of SEQ ID NO: 316952
cucagaaguugauuacagu

SEQ ID NO: 452868 - RNA, 19 nt, Artificial Sequence
  Description of Artificial Sequence: Synthetic oligonucleotide
  Antisense Strand to SEQ ID NO: 452867
acuguaaucaacuucugag

SEQ ID NO: 452869 - RNA, 19 nt, Artificial Sequence
  Description of Artificial Sequence: Synthetic oligonucleotide
  Sense strand starting at position 631 of SEQ ID NO: 316952
gauaauuaauggucuuggu

SEQ ID NO: 452870 - RNA, 19 nt, Artificial Sequence
  Description of Artificial Sequence: Synthetic oligonucleotide
  Antisense Strand to SEQ ID NO: 452869
accaagaccauuaauuauc

SEQ ID NO: 452871 - RNA, 19 nt, Artificial Sequence
  Description of Artificial Sequence: Synthetic oligonucleotide
  Sense strand starting at position 657 of SEQ ID NO: 316952
cuaucagauguccaugcaa

SEQ ID NO: 452872 - RNA, 19 nt, Artificial Sequence
  Description of Artificial Sequence: Synthetic oligonucleotide
  Antisense Strand to SEQ ID NO: 452871
uugcauggacaucugauag

SEQ ID NO: 452873 - RNA, 19 nt, Artificial Sequence
  Description of Artificial Sequence: Synthetic oligonucleotide
  Sense strand starting at position 659 of SEQ ID NO: 316952
aucagauguccaugcaaag

SEQ ID NO: 452874 - RNA, 19 nt, Artificial Sequence
  Description of Artificial Sequence: Synthetic oligonucleotide
  Antisense Strand to SEQ ID NO: 452873
cuuugcauggacaucugau

SEQ ID NO: 452875 - RNA, 19 nt, Artificial Sequence
  Description of Artificial Sequence: Synthetic oligonucleotide
  Sense strand starting at position 862 of SEQ ID NO: 316952
cucugcauuucgguacuua

SEQ ID NO: 452876 - RNA, 19 nt, Artificial Sequence
  Description of Artificial Sequence: Synthetic oligonucleotide
  Antisense Strand to SEQ ID NO: 452875
uaaguaccgaaaugcagag

SEQ ID NO: 452877 - RNA, 19 nt, Artificial Sequence
  Description of Artificial Sequence: Synthetic oligonucleotide
  Sense strand starting at position 863 of SEQ ID NO: 316952
ucugcauuucgguacuuau

SEQ ID NO: 452878 - RNA, 19 nt, Artificial Sequence
  Description of Artificial Sequence: Synthetic oligonucleotide
  Antisense Strand to SEQ ID NO: 452877
auaaguaccgaaaugcaga

SEQ ID NO: 452879 - RNA, 19 nt, Artificial Sequence
  Description of Artificial Sequence: Synthetic oligonucleotide
  Sense strand starting at position 866 of SEQ ID NO: 316952
gcauuucgguacuuauauc

SEQ ID NO: 452880 - RNA, 19 nt, Artificial Sequence
  Description of Artificial Sequence: Synthetic oligonucleotide
  Antisense Strand to SEQ ID NO: 452879
gauauaaguaccgaaaugc

SEQ ID NO: 452881 - RNA, 19 nt, Artificial Sequence
  Description of Artificial Sequence: Synthetic oligonucleotide
  Sense strand starting at position 872 of SEQ ID NO: 316952
cgguacuuauaucugaaag

SEQ ID NO: 452882 - RNA, 19 nt, Artificial Sequence
  Description of Artificial Sequence: Synthetic oligonucleotide
  Antisense Strand to SEQ ID NO: 452881
cuuucagauauaaguaccg

SEQ ID NO: 452883 - RNA, 19 nt, Artificial Sequence
  Description of Artificial Sequence: Synthetic oligonucleotide
  Sense strand starting at position 884 of SEQ ID NO: 316952
cugaaagauuugcaaauaa

SEQ ID NO: 452884 - RNA, 19 nt, Artificial Sequence
  Description of Artificial Sequence: Synthetic oligonucleotide
  Antisense Strand to SEQ ID NO: 452883
uuauuugcaaaucuuucag

SEQ ID NO: 452885 - RNA, 19 nt, Artificial Sequence
  Description of Artificial Sequence: Synthetic oligonucleotide
  Sense strand starting at position 908 of SEQ ID NO: 316952
acauucgugccagacauua

SEQ ID NO: 452886 - RNA, 19 nt, Artificial Sequence
  Description of Artificial Sequence: Synthetic oligonucleotide
  Antisense Strand to SEQ ID NO: 452885
uaaugucuggcacgaaugu

SEQ ID NO: 452887 - RNA, 19 nt, Artificial Sequence
  Description of Artificial Sequence: Synthetic oligonucleotide
  Sense strand starting at position 918 of SEQ ID NO: 316952
cagacauuacugcaaguga

SEQ ID NO: 452888 - RNA, 19 nt, Artificial Sequence
  Description of Artificial Sequence: Synthetic oligonucleotide
  Antisense Strand to SEQ ID NO: 452887
ucacuugcaguaaugucug

SEQ ID NO: 452889 - RNA, 19 nt, Artificial Sequence
  Description of Artificial Sequence: Synthetic oligonucleotide
  Sense strand starting at position 1158 of SEQ ID NO: 316952
agcucaauuagauguugga

SEQ ID NO: 452890 - RNA, 19 nt, Artificial Sequence
  Description of Artificial Sequence: Synthetic oligonucleotide
  Antisense Strand to SEQ ID NO: 452889
uccaacaucuaauugagcu

SEQ ID NO: 452891 - RNA, 19 nt, Artificial Sequence
  Description of Artificial Sequence: Synthetic oligonucleotide
  Sense strand starting at position 1312 of SEQ ID NO: 316952
ggcugucaaguguaauuuc

SEQ ID NO: 452892 - RNA, 19 nt, Artificial Sequence
  Description of Artificial Sequence: Synthetic oligonucleotide
  Antisense Strand to SEQ ID NO: 452891
gaaauuacacuugacagcc

SEQ ID NO: 452893 - RNA, 19 nt, Artificial Sequence
  Description of Artificial Sequence: Synthetic oligonucleotide
  Sense strand starting at position 1336 of SEQ ID NO: 316952
aauuacucuuccgugaaga

SEQ ID NO: 452894 - RNA, 19 nt, Artificial Sequence
  Description of Artificial Sequence: Synthetic oligonucleotide
  Antisense Strand to SEQ ID NO: 452893
ucuucacggaagaguaauu

SEQ ID NO: 452895 - RNA, 19 nt, Artificial Sequence
  Description of Artificial Sequence: Synthetic oligonucleotide
  Sense strand starting at position 1338 of SEQ ID NO: 316952
uuacucuuccgugaagauu

SEQ ID NO: 452896 - RNA, 19 nt, Artificial Sequence
  Description of Artificial Sequence: Synthetic oligonucleotide
  Antisense Strand to SEQ ID NO: 452895
aaucuucacggaagaguaa

SEQ ID NO: 452897 - RNA, 19 nt, Artificial Sequence
  Description of Artificial Sequence: Synthetic oligonucleotide
  Sense strand starting at position 1344 of SEQ ID NO: 316952
uuccgugaagauuaucaau

SEQ ID NO: 452898 - RNA, 19 nt, Artificial Sequence
  Description of Artificial Sequence: Synthetic oligonucleotide
  Antisense Strand to SEQ ID NO: 452897
auugauaaucuucacggaa

SEQ ID NO: 452899 - RNA, 19 nt, Artificial Sequence
  Description of Artificial Sequence: Synthetic oligonucleotide
  Sense strand starting at position 1511 of SEQ ID NO: 316952
gaaauugagguuuguauug

SEQ ID NO: 452900 - RNA, 19 nt, Artificial Sequence
  Description of Artificial Sequence: Synthetic oligonucleotide
  Antisense Strand to SEQ ID NO: 452899
caauacaaaccucaauuuc

SEQ ID NO: 452901 - RNA, 19 nt, Artificial Sequence
  Description of Artificial Sequence: Synthetic oligonucleotide
  Sense strand starting at position 1757 of SEQ ID NO: 316952
gauuuaaggugccaagaaa

SEQ ID NO: 452902 - RNA, 19 nt, Artificial Sequence
  Description of Artificial Sequence: Synthetic oligonucleotide
  Antisense Strand to SEQ ID NO: 452901
uuucuuggcaccuuaaauc

SEQ ID NO: 452903 - RNA, 19 nt, Artificial Sequence
  Description of Artificial Sequence: Synthetic oligonucleotide
  Sense strand starting at position 1786 of SEQ ID NO: 316952
auaccaucucaggguuuau

SEQ ID NO: 452904 - RNA, 19 nt, Artificial Sequence
  Description of Artificial Sequence: Synthetic oligonucleotide
  Antisense Strand to SEQ ID NO: 452903
auaaacccugagaugguau

SEQ ID NO: 452905 - RNA, 19 nt, Artificial Sequence
  Description of Artificial Sequence: Synthetic oligonucleotide
  Sense strand starting at position 1878 of SEQ ID NO: 316952
cugucaaaggagugaguau

SEQ ID NO: 452906 - RNA, 19 nt, Artificial Sequence
  Description of Artificial Sequence: Synthetic oligonucleotide
  Antisense Strand to SEQ ID NO: 452905
auacucacuccuuugacag

SEQ ID NO: 452907 - RNA, 19 nt, Artificial Sequence
  Description of Artificial Sequence: Synthetic oligonucleotide
  Sense strand starting at position 1879 of SEQ ID NO: 316952
ugucaaaggagugaguaua

SEQ ID NO: 452908 - RNA, 19 nt, Artificial Sequence
  Description of Artificial Sequence: Synthetic oligonucleotide
  Antisense Strand to SEQ ID NO: 452907
uauacucacuccuuugaca

SEQ ID NO: 452909 - RNA, 19 nt, Artificial Sequence
  Description of Artificial Sequence: Synthetic oligonucleotide
  Sense strand starting at position 1892 of SEQ ID NO: 316952
aguauaaagcucuaagccu

SEQ ID NO: 452910 - RNA, 19 nt, Artificial Sequence
  Description of Artificial Sequence: Synthetic oligonucleotide
  Antisense Strand to SEQ ID NO: 452909
aggcuuagagcuuuauacu

SEQ ID NO: 452911 - RNA, 19 nt, Artificial Sequence
  Description of Artificial Sequence: Synthetic oligonucleotide
  Sense strand starting at position 1898 of SEQ ID NO: 316952
aagcucuaagccugagaga

SEQ ID NO: 452912 - RNA, 19 nt, Artificial Sequence
  Description of Artificial Sequence: Synthetic oligonucleotide
  Antisense Strand to SEQ ID NO: 452911
ucucucaggcuuagagcuu

SEQ ID NO: 452913 - RNA, 19 nt, Artificial Sequence
  Description of Artificial Sequence: Synthetic oligonucleotide
  Sense strand starting at position 1907 of SEQ ID NO: 316952
gccugagagauacauguuu

SEQ ID NO: 452914 - RNA, 19 nt, Artificial Sequence
  Description of Artificial Sequence: Synthetic oligonucleotide
  Antisense Strand to SEQ ID NO: 452913
aaacauguaucucucaggc

SEQ ID NO: 452915 - RNA, 19 nt, Artificial Sequence
  Description of Artificial Sequence: Synthetic oligonucleotide
  Sense strand starting at position 2023 of SEQ ID NO: 316952
augauuauagcccacgaaa

SEQ ID NO: 452916 - RNA, 19 nt, Artificial Sequence
  Description of Artificial Sequence: Synthetic oligonucleotide
  Antisense Strand to SEQ ID NO: 452915
uuucgugggcuauaaucau

SEQ ID NO: 452917 - RNA, 19 nt, Artificial Sequence
  Description of Artificial Sequence: Synthetic oligonucleotide
  Sense strand starting at position 2045 of SEQ ID NO: 316952
gcugguuuccaaugagaau

SEQ ID NO: 452918 - RNA, 19 nt, Artificial Sequence
  Description of Artificial Sequence: Synthetic oligonucleotide
  Antisense Strand to SEQ ID NO: 452917
auucucauuggaaaccagc

SEQ ID NO: 452919 - RNA, 19 nt, Artificial Sequence
  Description of Artificial Sequence: Synthetic oligonucleotide
  Sense strand starting at position 2089 of SEQ ID NO: 316952
gucaguguuagggaaugag

SEQ ID NO: 452920 - RNA, 19 nt, Artificial Sequence
  Description of Artificial Sequence: Synthetic oligonucleotide
  Antisense Strand to SEQ ID NO: 452919
cucauucccuaacacugac

SEQ ID NO: 452921 - RNA, 19 nt, Artificial Sequence
  Description of Artificial Sequence: Synthetic oligonucleotide
  Sense strand starting at position 2146 of SEQ ID NO: 316952
acaagaggauagcaauuua

SEQ ID NO: 452922 - RNA, 19 nt, Artificial Sequence
  Description of Artificial Sequence: Synthetic oligonucleotide
  Antisense Strand to SEQ ID NO: 452921
uaaauugcuauccucuugu

SEQ ID NO: 452923 - RNA, 19 nt, Artificial Sequence
  Description of Artificial Sequence: Synthetic oligonucleotide
  Sense strand starting at position 2205 of SEQ ID NO: 316952
ugcugcagucuggcgauaa

SEQ ID NO: 452924 - RNA, 19 nt, Artificial Sequence
  Description of Artificial Sequence: Synthetic oligonucleotide
  Antisense Strand to SEQ ID NO: 452923
uuaucgccagacugcagca

SEQ ID NO: 452925 - RNA, 19 nt, Artificial Sequence
  Description of Artificial Sequence: Synthetic oligonucleotide
  Sense strand starting at position 2327 of SEQ ID NO: 316952
gcauaaaccuuuccuagag

SEQ ID NO: 452926 - RNA, 19 nt, Artificial Sequence
  Description of Artificial Sequence: Synthetic oligonucleotide
  Antisense Strand to SEQ ID NO: 452925
cucuaggaaagguuuaugc

SEQ ID NO: 452927 - RNA, 19 nt, Artificial Sequence
  Description of Artificial Sequence: Synthetic oligonucleotide
  Sense strand starting at position 2939 of SEQ ID NO: 316952
cugacauaaccuggcauau

SEQ ID NO: 452928 - RNA, 19 nt, Artificial Sequence
  Description of Artificial Sequence: Synthetic oligonucleotide
  Antisense Strand to SEQ ID NO: 452927
auaugccagguuaugucag

SEQ ID NO: 452929 - RNA, 19 nt, Artificial Sequence
  Description of Artificial Sequence: Synthetic oligonucleotide
  Sense strand starting at position 3130 of SEQ ID NO: 316952
uuguaagucaaaugggaaa

SEQ ID NO: 452930 - RNA, 19 nt, Artificial Sequence
  Description of Artificial Sequence: Synthetic oligonucleotide
  Antisense Strand to SEQ ID NO: 452929
uuucccauuugacuuacaa

SEQ ID NO: 452931 - RNA, 19 nt, Artificial Sequence
  Description of Artificial Sequence: Synthetic oligonucleotide
  Sense strand starting at position 3211 of SEQ ID NO: 316952
ccuagagacugggcuaaua

SEQ ID NO: 452932 - RNA, 19 nt, Artificial Sequence
  Description of Artificial Sequence: Synthetic oligonucleotide
  Antisense Strand to SEQ ID NO: 452931
uauuagcccagucucuagg

SEQ ID NO: 452933 - RNA, 19 nt, Artificial Sequence
  Description of Artificial Sequence: Synthetic oligonucleotide
  Sense strand starting at position 3258 of SEQ ID NO: 316952
ucuguugauuucuugccua

SEQ ID NO: 452934 - RNA, 19 nt, Artificial Sequence
  Description of Artificial Sequence: Synthetic oligonucleotide
  Antisense Strand to SEQ ID NO: 452933
uaggcaagaaaucaacaga

SEQ ID NO: 452935 - RNA, 19 nt, Artificial Sequence
  Description of Artificial Sequence: Synthetic oligonucleotide
  Sense strand starting at position 3261 of SEQ ID NO: 316952
guugauuucuugccuaaug

SEQ ID NO: 452936 - RNA, 19 nt, Artificial Sequence
  Description of Artificial Sequence: Synthetic oligonucleotide
  Antisense Strand to SEQ ID NO: 452935
cauuaggcaagaaaucaac

SEQ ID NO: 452937 - RNA, 19 nt, Artificial Sequence
  Description of Artificial Sequence: Synthetic oligonucleotide
  Sense strand starting at position 3262 of SEQ ID NO: 316952
uugauuucuugccuaaugu

SEQ ID NO: 452938 - RNA, 19 nt, Artificial Sequence
  Description of Artificial Sequence: Synthetic oligonucleotide
  Antisense Strand to SEQ ID NO: 452937
acauuaggcaagaaaucaa

SEQ ID NO: 452939 - RNA, 19 nt, Artificial Sequence
  Description of Artificial Sequence: Synthetic oligonucleotide
  Sense strand starting at position 3602 of SEQ ID NO: 316952
ggacucgucaaaugaauua

SEQ ID NO: 452940 - RNA, 19 nt, Artificial Sequence
  Description of Artificial Sequence: Synthetic oligonucleotide
  Antisense Strand to SEQ ID NO: 452939
uaauucauuugacgagucc

SEQ ID NO: 452941 - RNA, 19 nt, Artificial Sequence
  Description of Artificial Sequence: Synthetic oligonucleotide
  Sense strand starting at position 3881 of SEQ ID NO: 316952
aguugaguuguugaugauu

SEQ ID NO: 452942 - RNA, 19 nt, Artificial Sequence
  Description of Artificial Sequence: Synthetic oligonucleotide
  Antisense Strand to SEQ ID NO: 452941
aaucaucaacaacucaacu

SEQ ID NO: 452943 - RNA, 19 nt, Artificial Sequence
  Description of Artificial Sequence: Synthetic oligonucleotide
  Sense strand starting at position 150 of SEQ ID NO: 316953
uuuggacuguaauuaaagu

SEQ ID NO: 452944 - RNA, 19 nt, Artificial Sequence
  Description of Artificial Sequence: Synthetic oligonucleotide
  Antisense Strand to SEQ ID NO: 452943
acuuuaauuacaguccaaa

SEQ ID NO: 452945 - RNA, 19 nt, Artificial Sequence
  Description of Artificial Sequence: Synthetic oligonucleotide
  Sense strand starting at position 248 of SEQ ID NO: 316953
guguuaguaacggagucaa

SEQ ID NO: 452946 - RNA, 19 nt, Artificial Sequence
  Description of Artificial Sequence: Synthetic oligonucleotide
  Antisense Strand to SEQ ID NO: 452945
uugacuccguuacuaacac

SEQ ID NO: 452947 - RNA, 19 nt, Artificial Sequence
  Description of Artificial Sequence: Synthetic oligonucleotide
  Sense strand starting at position 379 of SEQ ID NO: 316953
aguguuaguaaugaaaugu

SEQ ID NO: 452948 - RNA, 19 nt, Artificial Sequence
  Description of Artificial Sequence: Synthetic oligonucleotide
  Antisense Strand to SEQ ID NO: 452947
acauuucauuacuaacacu

SEQ ID NO: 452949 - RNA, 19 nt, Artificial Sequence
  Description of Artificial Sequence: Synthetic oligonucleotide
  Sense strand starting at position 1129 of SEQ ID NO: 316953
caggaugaaugagcuuuaa

SEQ ID NO: 452950 - RNA, 19 nt, Artificial Sequence
  Description of Artificial Sequence: Synthetic oligonucleotide
  Antisense Strand to SEQ ID NO: 452949
uuaaagcucauucauccug

SEQ ID NO: 452951 - RNA, 19 nt, Artificial Sequence
  Description of Artificial Sequence: Synthetic oligonucleotide
  Sense strand starting at position 1133 of SEQ ID NO: 316953
augaaugagcuuuaacucu

SEQ ID NO: 452952 - RNA, 19 nt, Artificial Sequence
  Description of Artificial Sequence: Synthetic oligonucleotide
  Antisense Strand to SEQ ID NO: 452951
agaguuaaagcucauucau

SEQ ID NO: 452953 - RNA, 19 nt, Artificial Sequence
  Description of Artificial Sequence: Synthetic oligonucleotide
  Sense strand starting at position 1151 of SEQ ID NO: 316953
uguugacugcguguuuacu

SEQ ID NO: 452954 - RNA, 19 nt, Artificial Sequence
  Description of Artificial Sequence: Synthetic oligonucleotide
  Antisense Strand to SEQ ID NO: 452953
aguaaacacgcagucaaca

SEQ ID NO: 452955 - RNA, 19 nt, Artificial Sequence
  Description of Artificial Sequence: Synthetic oligonucleotide
  Sense strand starting at position 1152 of SEQ ID NO: 316953
guugacugcguguuuacuu

SEQ ID NO: 452956 - RNA, 19 nt, Artificial Sequence
  Description of Artificial Sequence: Synthetic oligonucleotide
  Antisense Strand to SEQ ID NO: 452955
aaguaaacacgcagucaac

SEQ ID NO: 452957 - RNA, 19 nt, Artificial Sequence
  Description of Artificial Sequence: Synthetic oligonucleotide
  Sense strand starting at position 1407 of SEQ ID NO: 316953
caaaguugagcggagagau

SEQ ID NO: 452958 - RNA, 19 nt, Artificial Sequence
  Description of Artificial Sequence: Synthetic oligonucleotide
  Antisense Strand to SEQ ID NO: 452957
aucucuccgcucaacuuug

SEQ ID NO: 452959 - RNA, 19 nt, Artificial Sequence
  Description of Artificial Sequence: Synthetic oligonucleotide
  Sense strand starting at position 2527 of SEQ ID NO: 316953
uucucaccucauuauggua

SEQ ID NO: 452960 - RNA, 19 nt, Artificial Sequence
  Description of Artificial Sequence: Synthetic oligonucleotide
  Antisense Strand to SEQ ID NO: 452959
uaccauaaugaggugagaa

SEQ ID NO: 452961 - RNA, 19 nt, Artificial Sequence
  Description of Artificial Sequence: Synthetic oligonucleotide
  Sense strand starting at position 2542 of SEQ ID NO: 316953
gguagucuuauuuguccca

SEQ ID NO: 452962 - RNA, 19 nt, Artificial Sequence
  Description of Artificial Sequence: Synthetic oligonucleotide
  Antisense Strand to SEQ ID NO: 452961
ugggacaaauaagacuacc

SEQ ID NO: 452963 - RNA, 19 nt, Artificial Sequence
  Description of Artificial Sequence: Synthetic oligonucleotide
  Sense strand starting at position 2543 of SEQ ID NO: 316953
guagucuuauuugucccaa

SEQ ID NO: 452964 - RNA, 19 nt, Artificial Sequence
  Description of Artificial Sequence: Synthetic oligonucleotide
  Antisense Strand to SEQ ID NO: 452963
uugggacaaauaagacuac

SEQ ID NO: 452965 - RNA, 19 nt, Artificial Sequence
  Description of Artificial Sequence: Synthetic oligonucleotide
  Sense strand starting at position 2639 of SEQ ID NO: 316953
agcgauggucucuaaagga

SEQ ID NO: 452966 - RNA, 19 nt, Artificial Sequence
  Description of Artificial Sequence: Synthetic oligonucleotide
  Antisense Strand to SEQ ID NO: 452965
uccuuuagagaccaucgcu

SEQ ID NO: 452967 - RNA, 19 nt, Artificial Sequence
  Description of Artificial Sequence: Synthetic oligonucleotide
  Sense strand starting at position 2694 of SEQ ID NO: 316953
agaaauucgacaggcaaag

SEQ ID NO: 452968 - RNA, 19 nt, Artificial Sequence
  Description of Artificial Sequence: Synthetic oligonucleotide
  Antisense Strand to SEQ ID NO: 452967
cuuugccugucgaauuucu

SEQ ID NO: 452969 - RNA, 19 nt, Artificial Sequence
  Description of Artificial Sequence: Synthetic oligonucleotide
  Sense strand starting at position 2885 of SEQ ID NO: 316953
ugcuccugccuugagaaau

SEQ ID NO: 452970 - RNA, 19 nt, Artificial Sequence
  Description of Artificial Sequence: Synthetic oligonucleotide
  Antisense Strand to SEQ ID NO: 452969
auuucucaaggcaggagca

SEQ ID NO: 452971 - RNA, 19 nt, Artificial Sequence
  Description of Artificial Sequence: Synthetic oligonucleotide
  Sense strand starting at position 2922 of SEQ ID NO: 316953
gaagguuuguaagcaggau

SEQ ID NO: 452972 - RNA, 19 nt, Artificial Sequence
  Description of Artificial Sequence: Synthetic oligonucleotide
  Antisense Strand to SEQ ID NO: 452971
auccugcuuacaaaccuuc

SEQ ID NO: 452973 - RNA, 19 nt, Artificial Sequence
  Description of Artificial Sequence: Synthetic oligonucleotide
  Sense strand starting at position 2942 of SEQ ID NO: 316953
cucagacaccuuggaguuu

SEQ ID NO: 452974 - RNA, 19 nt, Artificial Sequence
  Description of Artificial Sequence: Synthetic oligonucleotide
  Antisense Strand to SEQ ID NO: 452973
aaacuccaaggugucugag

SEQ ID NO: 452975 - RNA, 19 nt, Artificial Sequence
  Description of Artificial Sequence: Synthetic oligonucleotide
  Sense strand starting at position 2951 of SEQ ID NO: 316953
cuuggaguuucucccugaa

SEQ ID NO: 452976 - RNA, 19 nt, Artificial Sequence
  Description of Artificial Sequence: Synthetic oligonucleotide
  Antisense Strand to SEQ ID NO: 452975
uucagggagaaacuccaag

SEQ ID NO: 452977 - RNA, 19 nt, Artificial Sequence
  Description of Artificial Sequence: Synthetic oligonucleotide
  Sense strand starting at position 2954 of SEQ ID NO: 316953
ggaguuucucccugaaaca

SEQ ID NO: 452978 - RNA, 19 nt, Artificial Sequence
  Description of Artificial Sequence: Synthetic oligonucleotide
  Antisense Strand to SEQ ID NO: 452977
uguuucagggagaaacucc

SEQ ID NO: 452979 - RNA, 19 nt, Artificial Sequence
  Description of Artificial Sequence: Synthetic oligonucleotide
  Sense strand starting at position 3200 of SEQ ID NO: 316953
caguucucagaagaagcua

SEQ ID NO: 452980 - RNA, 19 nt, Artificial Sequence
  Description of Artificial Sequence: Synthetic oligonucleotide
  Antisense Strand to SEQ ID NO: 452979
uagcuucuucugagaacug

SEQ ID NO: 452981 - RNA, 19 nt, Artificial Sequence
  Description of Artificial Sequence: Synthetic oligonucleotide
  Sense strand starting at position 3442 of SEQ ID NO: 316953
gggaccaauuugcaggaau

SEQ ID NO: 452982 - RNA, 19 nt, Artificial Sequence
  Description of Artificial Sequence: Synthetic oligonucleotide
  Antisense Strand to SEQ ID NO: 452981
auuccugcaaauugguccc

SEQ ID NO: 452983 - RNA, 19 nt, Artificial Sequence
  Description of Artificial Sequence: Synthetic oligonucleotide
  Sense strand starting at position 3476 of SEQ ID NO: 316953
gagcuuucucaaugggaag

SEQ ID NO: 452984 - RNA, 19 nt, Artificial Sequence
  Description of Artificial Sequence: Synthetic oligonucleotide
  Antisense Strand to SEQ ID NO: 452983
cuucccauugagaaagcuc

SEQ ID NO: 452985 - RNA, 19 nt, Artificial Sequence
  Description of Artificial Sequence: Synthetic oligonucleotide
  Sense strand starting at position 3477 of SEQ ID NO: 316953
agcuuucucaaugggaagu

SEQ ID NO: 452986 - RNA, 19 nt, Artificial Sequence
  Description of Artificial Sequence: Synthetic oligonucleotide
  Antisense Strand to SEQ ID NO: 452985
acuucccauugagaaagcu

SEQ ID NO: 452987 - RNA, 19 nt, Artificial Sequence
  Description of Artificial Sequence: Synthetic oligonucleotide
  Sense strand starting at position 3478 of SEQ ID NO: 316953
gcuuucucaaugggaagua

SEQ ID NO: 452988 - RNA, 19 nt, Artificial Sequence
  Description of Artificial Sequence: Synthetic oligonucleotide
  Antisense Strand to SEQ ID NO: 452987
uacuucccauugagaaagc

SEQ ID NO: 452989 - RNA, 19 nt, Artificial Sequence
  Description of Artificial Sequence: Synthetic oligonucleotide
  Sense strand starting at position 3494 of SEQ ID NO: 316953
guaaauaaauggucuccau

SEQ ID NO: 452990 - RNA, 19 nt, Artificial Sequence
  Description of Artificial Sequence: Synthetic oligonucleotide
  Antisense Strand to SEQ ID NO: 452989
auggagaccauuuauuuac

SEQ ID NO: 452991 - RNA, 19 nt, Artificial Sequence
  Description of Artificial Sequence: Synthetic oligonucleotide
  Sense strand starting at position 3514 of SEQ ID NO: 316953
uaucauuuaucaguguugu

SEQ ID NO: 452992 - RNA, 19 nt, Artificial Sequence
  Description of Artificial Sequence: Synthetic oligonucleotide
  Antisense Strand to SEQ ID NO: 452991
acaacacugauaaaugaua

SEQ ID NO: 452993 - RNA, 19 nt, Artificial Sequence
  Description of Artificial Sequence: Synthetic oligonucleotide
  Sense strand starting at position 3515 of SEQ ID NO: 316953
aucauuuaucaguguugua

SEQ ID NO: 452994 - RNA, 19 nt, Artificial Sequence
  Description of Artificial Sequence: Synthetic oligonucleotide
  Antisense Strand to SEQ ID NO: 452993
uacaacacugauaaaugau

SEQ ID NO: 452995 - RNA, 19 nt, Artificial Sequence
  Description of Artificial Sequence: Synthetic oligonucleotide
  Sense strand starting at position 3574 of SEQ ID NO: 316953
uccagugcugucuaauaau

SEQ ID NO: 452996 - RNA, 19 nt, Artificial Sequence
  Description of Artificial Sequence: Synthetic oligonucleotide
  Antisense Strand to SEQ ID NO: 452995
auuauuagacagcacugga

SEQ ID NO: 452997 - RNA, 19 nt, Artificial Sequence
  Description of Artificial Sequence: Synthetic oligonucleotide
  Sense strand starting at position 3588 of SEQ ID NO: 316953
auaauacauucugugauug

SEQ ID NO: 452998 - RNA, 19 nt, Artificial Sequence
  Description of Artificial Sequence: Synthetic oligonucleotide
  Antisense Strand to SEQ ID NO: 452997
caaucacagaauguauuau

SEQ ID NO: 452999 - RNA, 19 nt, Artificial Sequence
  Description of Artificial Sequence: Synthetic oligonucleotide
  Sense strand starting at position 3593 of SEQ ID NO: 316953
acauucugugauuguauag

SEQ ID NO: 453000 - RNA, 19 nt, Artificial Sequence
  Description of Artificial Sequence: Synthetic oligonucleotide
  Antisense Strand to SEQ ID NO: 452999
cuauacaaucacagaaugu

SEQ ID NO: 453001 - RNA, 19 nt, Artificial Sequence
  Description of Artificial Sequence: Synthetic oligonucleotide
  Sense strand starting at position 3621 of SEQ ID NO: 316953
uucuuugcugucuaauaug

SEQ ID NO: 453002 - RNA, 19 nt, Artificial Sequence
  Description of Artificial Sequence: Synthetic oligonucleotide
  Antisense Strand to SEQ ID NO: 453001
cauauuagacagcaaagaa

SEQ ID NO: 453003 - RNA, 19 nt, Artificial Sequence
  Description of Artificial Sequence: Synthetic oligonucleotide
  Sense strand starting at position 3672 of SEQ ID NO: 316953
guagauagugugcaauaag

SEQ ID NO: 453004 - RNA, 19 nt, Artificial Sequence
  Description of Artificial Sequence: Synthetic oligonucleotide
  Antisense Strand to SEQ ID NO: 453003
cuuauugcacacuaucuac

SEQ ID NO: 453005 - RNA, 19 nt, Artificial Sequence
  Description of Artificial Sequence: Synthetic oligonucleotide
  Sense strand starting at position 3675 of SEQ ID NO: 316953
gauagugugcaauaagaau

SEQ ID NO: 453006 - RNA, 19 nt, Artificial Sequence
  Description of Artificial Sequence: Synthetic oligonucleotide
  Antisense Strand to SEQ ID NO: 453005
auucuuauugcacacuauc

SEQ ID NO: 453007 - RNA, 19 nt, Artificial Sequence
  Description of Artificial Sequence: Synthetic oligonucleotide
  Sense strand starting at position 3755 of SEQ ID NO: 316953
guugguguugaacaacaua

SEQ ID NO: 453008 - RNA, 19 nt, Artificial Sequence
  Description of Artificial Sequence: Synthetic oligonucleotide
  Antisense Strand to SEQ ID NO: 453007
uauguuguucaacaccaac

SEQ ID NO: 453009 - RNA, 19 nt, Artificial Sequence
  Description of Artificial Sequence: Synthetic oligonucleotide
  Sense strand starting at position 3781 of SEQ ID NO: 316953
acacuaugaugggaagaaa

SEQ ID NO: 453010 - RNA, 19 nt, Artificial Sequence
  Description of Artificial Sequence: Synthetic oligonucleotide
  Antisense Strand to SEQ ID NO: 453009
uuucuucccaucauagugu

SEQ ID NO: 453011 - RNA, 19 nt, Artificial Sequence
  Description of Artificial Sequence: Synthetic oligonucleotide
  Sense strand starting at position 3804 of SEQ ID NO: 316953
gggagauuaucugcaccau

SEQ ID NO: 453012 - RNA, 19 nt, Artificial Sequence
  Description of Artificial Sequence: Synthetic oligonucleotide
  Antisense Strand to SEQ ID NO: 453011
auggugcagauaaucuccc

SEQ ID NO: 453013 - RNA, 19 nt, Artificial Sequence
  Description of Artificial Sequence: Synthetic oligonucleotide
  Sense strand starting at position 3805 of SEQ ID NO: 316953
ggagauuaucugcaccauu

SEQ ID NO: 453014 - RNA, 19 nt, Artificial Sequence
  Description of Artificial Sequence: Synthetic oligonucleotide
  Antisense Strand to SEQ ID NO: 453013
aauggugcagauaaucucc

SEQ ID NO: 453015 - RNA, 19 nt, Artificial Sequence
  Description of Artificial Sequence: Synthetic oligonucleotide
  Sense strand starting at position 3818 of SEQ ID NO: 316953
accauuaagugacuucgga

SEQ ID NO: 453016 - RNA, 19 nt, Artificial Sequence
  Description of Artificial Sequence: Synthetic oligonucleotide
  Antisense Strand to SEQ ID NO: 453015
uccgaagucacuuaauggu

SEQ ID NO: 453017 - RNA, 19 nt, Artificial Sequence
  Description of Artificial Sequence: Synthetic oligonucleotide
  Sense strand starting at position 3873 of SEQ ID NO: 316953
guguuaaggugggugaaau

SEQ ID NO: 453018 - RNA, 19 nt, Artificial Sequence
  Description of Artificial Sequence: Synthetic oligonucleotide
  Antisense Strand to SEQ ID NO: 453017
auuucacccaccuuaacac

SEQ ID NO: 453019 - RNA, 19 nt, Artificial Sequence
  Description of Artificial Sequence: Synthetic oligonucleotide
  Sense strand starting at position 3874 of SEQ ID NO: 316953
uguuaaggugggugaaaug

SEQ ID NO: 453020 - RNA, 19 nt, Artificial Sequence
  Description of Artificial Sequence: Synthetic oligonucleotide
  Antisense Strand to SEQ ID NO: 453019
cauuucacccaccuuaaca

SEQ ID NO: 453021 - RNA, 19 nt, Artificial Sequence
  Description of Artificial Sequence: Synthetic oligonucleotide
  Sense strand starting at position 3980 of SEQ ID NO: 316953
cagauugagcauugagcau

SEQ ID NO: 453022 - RNA, 19 nt, Artificial Sequence
  Description of Artificial Sequence: Synthetic oligonucleotide
  Antisense Strand to SEQ ID NO: 453021
augcucaaugcucaaucug

SEQ ID NO: 453023 - RNA, 19 nt, Artificial Sequence
  Description of Artificial Sequence: Synthetic oligonucleotide
  Sense strand starting at position 53 of SEQ ID NO: 316954
ggguuucaggaggauguuu

SEQ ID NO: 453024 - RNA, 19 nt, Artificial Sequence
  Description of Artificial Sequence: Synthetic oligonucleotide
  Antisense Strand to SEQ ID NO: 453023
aaacauccuccugaaaccc

SEQ ID NO: 453025 - RNA, 19 nt, Artificial Sequence
  Description of Artificial Sequence: Synthetic oligonucleotide
  Sense strand starting at position 62 of SEQ ID NO: 316954
gaggauguuuagccuggaa

SEQ ID NO: 453026 - RNA, 19 nt, Artificial Sequence
  Description of Artificial Sequence: Synthetic oligonucleotide
  Antisense Strand to SEQ ID NO: 453025
uuccaggcuaaacauccuc

SEQ ID NO: 453027 - RNA, 19 nt, Artificial Sequence
  Description of Artificial Sequence: Synthetic oligonucleotide
  Sense strand starting at position 65 of SEQ ID NO: 316954
gauguuuagccuggaaccu

SEQ ID NO: 453028 - RNA, 19 nt, Artificial Sequence
  Description of Artificial Sequence: Synthetic oligonucleotide
  Antisense Strand to SEQ ID NO: 453027
agguuccaggcuaaacauc

SEQ ID NO: 453029 - RNA, 19 nt, Artificial Sequence
  Description of Artificial Sequence: Synthetic oligonucleotide
  Sense strand starting at position 359 of SEQ ID NO: 316954
ggagguaauuuggaacaau

SEQ ID NO: 453030 - RNA, 19 nt, Artificial Sequence
  Description of Artificial Sequence: Synthetic oligonucleotide
  Antisense Strand to SEQ ID NO: 453029
auuguuccaaauuaccucc

SEQ ID NO: 453031 - RNA, 19 nt, Artificial Sequence
  Description of Artificial Sequence: Synthetic oligonucleotide
  Sense strand starting at position 634 of SEQ ID NO: 316954
gcacauaucccaggaggca

SEQ ID NO: 453032 - RNA, 19 nt, Artificial Sequence
  Description of Artificial Sequence: Synthetic oligonucleotide
  Antisense Strand to SEQ ID NO: 453031
ugccuccugggauaugugc

SEQ ID NO: 453033 - RNA, 19 nt, Artificial Sequence
  Description of Artificial Sequence: Synthetic oligonucleotide
  Sense strand starting at position 663 of SEQ ID NO: 316954
cagugucugcaccaaugaa

SEQ ID NO: 453034 - RNA, 19 nt, Artificial Sequence
  Description of Artificial Sequence: Synthetic oligonucleotide
  Antisense Strand to SEQ ID NO: 453033
uucauuggugcagacacug

SEQ ID NO: 453035 - RNA, 19 nt, Artificial Sequence
  Description of Artificial Sequence: Synthetic oligonucleotide
  Sense strand starting at position 731 of SEQ ID NO: 316954
ugaacucugggcggaguaa

SEQ ID NO: 453036 - RNA, 19 nt, Artificial Sequence
  Description of Artificial Sequence: Synthetic oligonucleotide
  Antisense Strand to SEQ ID NO: 453035
uuacuccgcccagaguuca

SEQ ID NO: 453037 - RNA, 19 nt, Artificial Sequence
  Description of Artificial Sequence: Synthetic oligonucleotide
  Sense strand starting at position 2428 of SEQ ID NO: 316954
cccagaacugggugccaua

SEQ ID NO: 453038 - RNA, 19 nt, Artificial Sequence
  Description of Artificial Sequence: Synthetic oligonucleotide
  Antisense Strand to SEQ ID NO: 453037
uauggcacccaguucuggg

SEQ ID NO: 453039 - RNA, 19 nt, Artificial Sequence
  Description of Artificial Sequence: Synthetic oligonucleotide
  Sense strand starting at position 2435 of SEQ ID NO: 316954
cugggugccauacagaaau

SEQ ID NO: 453040 - RNA, 19 nt, Artificial Sequence
  Description of Artificial Sequence: Synthetic oligonucleotide
  Antisense Strand to SEQ ID NO: 453039
auuucuguauggcacccag

SEQ ID NO: 453041 - RNA, 19 nt, Artificial Sequence
  Description of Artificial Sequence: Synthetic oligonucleotide
  Sense strand starting at position 2535 of SEQ ID NO: 316954
cuucucacccagugggaau

SEQ ID NO: 453042 - RNA, 19 nt, Artificial Sequence
  Description of Artificial Sequence: Synthetic oligonucleotide
  Antisense Strand to SEQ ID NO: 453041
auucccacugggugagaag

SEQ ID NO: 453043 - RNA, 19 nt, Artificial Sequence
  Description of Artificial Sequence: Synthetic oligonucleotide
  Sense strand starting at position 2613 of SEQ ID NO: 316954
ugcuucuuccaggaagcuu

SEQ ID NO: 453044 - RNA, 19 nt, Artificial Sequence
  Description of Artificial Sequence: Synthetic oligonucleotide
  Antisense Strand to SEQ ID NO: 453043
aagcuuccuggaagaagca

SEQ ID NO: 453045 - RNA, 19 nt, Artificial Sequence
  Description of Artificial Sequence: Synthetic oligonucleotide
  Sense strand starting at position 2656 of SEQ ID NO: 316954
gccacaacaugacagaaau

SEQ ID NO: 453046 - RNA, 19 nt, Artificial Sequence
  Description of Artificial Sequence: Synthetic oligonucleotide
  Antisense Strand to SEQ ID NO: 453045
auuucugucauguuguggc

SEQ ID NO: 453047 - RNA, 19 nt, Artificial Sequence
  Description of Artificial Sequence: Synthetic oligonucleotide
  Sense strand starting at position 2733 of SEQ ID NO: 316954
gcccuuucugagggacaaa

SEQ ID NO: 453048 - RNA, 19 nt, Artificial Sequence
  Description of Artificial Sequence: Synthetic oligonucleotide
  Antisense Strand to SEQ ID NO: 453047
uuugucccucagaaagggc

SEQ ID NO: 453049 - RNA, 19 nt, Artificial Sequence
  Description of Artificial Sequence: Synthetic oligonucleotide
  Sense strand starting at position 2959 of SEQ ID NO: 316954
ggauauuaauagccagcaa

SEQ ID NO: 453050 - RNA, 19 nt, Artificial Sequence
  Description of Artificial Sequence: Synthetic oligonucleotide
  Antisense Strand to SEQ ID NO: 453049
uugcuggcuauuaauaucc

SEQ ID NO: 453051 - RNA, 19 nt, Artificial Sequence
  Description of Artificial Sequence: Synthetic oligonucleotide
  Sense strand starting at position 2993 of SEQ ID NO: 316954
gugguugcuguuaggguua

SEQ ID NO: 453052 - RNA, 19 nt, Artificial Sequence
  Description of Artificial Sequence: Synthetic oligonucleotide
  Antisense Strand to SEQ ID NO: 453051
uaacccuaacagcaaccac

SEQ ID NO: 453053 - RNA, 19 nt, Artificial Sequence
  Description of Artificial Sequence: Synthetic oligonucleotide
  Sense strand starting at position 2998 of SEQ ID NO: 316954
ugcuguuaggguuaaauug

SEQ ID NO: 453054 - RNA, 19 nt, Artificial Sequence
  Description of Artificial Sequence: Synthetic oligonucleotide
  Antisense Strand to SEQ ID NO: 453053
caauuuaacccuaacagca

SEQ ID NO: 453055 - RNA, 19 nt, Artificial Sequence
  Description of Artificial Sequence: Synthetic oligonucleotide
  Sense strand starting at position 3006 of SEQ ID NO: 316954
ggguuaaauuggccaacau

SEQ ID NO: 453056 - RNA, 19 nt, Artificial Sequence
  Description of Artificial Sequence: Synthetic oligonucleotide
  Antisense Strand to SEQ ID NO: 453055
auguuggccaauuuaaccc

SEQ ID NO: 453057 - RNA, 19 nt, Artificial Sequence
  Description of Artificial Sequence: Synthetic oligonucleotide
  Sense strand starting at position 3007 of SEQ ID NO: 316954
gguuaaauuggccaacaug

SEQ ID NO: 453058 - RNA, 19 nt, Artificial Sequence
  Description of Artificial Sequence: Synthetic oligonucleotide
  Antisense Strand to SEQ ID NO: 453057
cauguuggccaauuuaacc

SEQ ID NO: 453059 - RNA, 19 nt, Artificial Sequence
  Description of Artificial Sequence: Synthetic oligonucleotide
  Sense strand starting at position 3055 of SEQ ID NO: 316954
agugaaggaucagaacaca

SEQ ID NO: 453060 - RNA, 19 nt, Artificial Sequence
  Description of Artificial Sequence: Synthetic oligonucleotide
  Antisense Strand to SEQ ID NO: 453059
uguguucugauccuucacu

SEQ ID NO: 453061 - RNA, 19 nt, Artificial Sequence
  Description of Artificial Sequence: Synthetic oligonucleotide
  Sense strand starting at position 3094 of SEQ ID NO: 316954
ccgucuuauaccugggcaa

SEQ ID NO: 453062 - RNA, 19 nt, Artificial Sequence
  Description of Artificial Sequence: Synthetic oligonucleotide
  Antisense Strand to SEQ ID NO: 453061
uugcccagguauaagacgg

SEQ ID NO: 453063 - RNA, 19 nt, Artificial Sequence
  Description of Artificial Sequence: Synthetic oligonucleotide
  Sense strand starting at position 3095 of SEQ ID NO: 316954
cgucuuauaccugggcaaa

SEQ ID NO: 453064 - RNA, 19 nt, Artificial Sequence
  Description of Artificial Sequence: Synthetic oligonucleotide
  Antisense Strand to SEQ ID NO: 453063
uuugcccagguauaagacg

SEQ ID NO: 453065 - RNA, 19 nt, Artificial Sequence
  Description of Artificial Sequence: Synthetic oligonucleotide
  Sense strand starting at position 3096 of SEQ ID NO: 316954
gucuuauaccugggcaaag

SEQ ID NO: 453066 - RNA, 19 nt, Artificial Sequence
  Description of Artificial Sequence: Synthetic oligonucleotide
  Antisense Strand to SEQ ID NO: 453065
cuuugcccagguauaagac

SEQ ID NO: 453067 - RNA, 19 nt, Artificial Sequence
  Description of Artificial Sequence: Synthetic oligonucleotide
  Sense strand starting at position 3200 of SEQ ID NO: 316954
aguccaauguccuugucau

SEQ ID NO: 453068 - RNA, 19 nt, Artificial Sequence
  Description of Artificial Sequence: Synthetic oligonucleotide
  Antisense Strand to SEQ ID NO: 453067
augacaaggacauuggacu

SEQ ID NO: 453069 - RNA, 19 nt, Artificial Sequence
  Description of Artificial Sequence: Synthetic oligonucleotide
  Sense strand starting at position 3208 of SEQ ID NO: 316954
guccuugucauccagagag

SEQ ID NO: 453070 - RNA, 19 nt, Artificial Sequence
  Description of Artificial Sequence: Synthetic oligonucleotide
  Antisense Strand to SEQ ID NO: 453069
cucucuggaugacaaggac

SEQ ID NO: 453071 - RNA, 19 nt, Artificial Sequence
  Description of Artificial Sequence: Synthetic oligonucleotide
  Sense strand starting at position 3434 of SEQ ID NO: 316954
aggugaauagcugggacaa

SEQ ID NO: 453072 - RNA, 19 nt, Artificial Sequence
  Description of Artificial Sequence: Synthetic oligonucleotide
  Antisense Strand to SEQ ID NO: 453071
uugucccagcuauucaccu

SEQ ID NO: 453073 - RNA, 19 nt, Artificial Sequence
  Description of Artificial Sequence: Synthetic oligonucleotide
  Sense strand starting at position 3435 of SEQ ID NO: 316954
ggugaauagcugggacaaa

SEQ ID NO: 453074 - RNA, 19 nt, Artificial Sequence
  Description of Artificial Sequence: Synthetic oligonucleotide
  Antisense Strand to SEQ ID NO: 453073
uuugucccagcuauucacc

SEQ ID NO: 453075 - RNA, 19 nt, Artificial Sequence
  Description of Artificial Sequence: Synthetic oligonucleotide
  Sense strand starting at position 3446 of SEQ ID NO: 316954
gggacaaagugauugugau

SEQ ID NO: 453076 - RNA, 19 nt, Artificial Sequence
  Description of Artificial Sequence: Synthetic oligonucleotide
  Antisense Strand to SEQ ID NO: 453075
aucacaaucacuuuguccc

SEQ ID NO: 453077 - RNA, 19 nt, Artificial Sequence
  Description of Artificial Sequence: Synthetic oligonucleotide
  Sense strand starting at position 3447 of SEQ ID NO: 316954
ggacaaagugauugugaua

SEQ ID NO: 453078 - RNA, 19 nt, Artificial Sequence
  Description of Artificial Sequence: Synthetic oligonucleotide
  Antisense Strand to SEQ ID NO: 453077
uaucacaaucacuuugucc

SEQ ID NO: 453079 - RNA, 19 nt, Artificial Sequence
  Description of Artificial Sequence: Synthetic oligonucleotide
  Sense strand starting at position 3648 of SEQ ID NO: 316954
cagagagcaucucuucuga

SEQ ID NO: 453080 - RNA, 19 nt, Artificial Sequence
  Description of Artificial Sequence: Synthetic oligonucleotide
  Antisense Strand to SEQ ID NO: 453079
ucagaagagaugcucucug

SEQ ID NO: 453081 - RNA, 19 nt, Artificial Sequence
  Description of Artificial Sequence: Synthetic oligonucleotide
  Sense strand starting at position 3650 of SEQ ID NO: 316954
gagagcaucucuucugaga

SEQ ID NO: 453082 - RNA, 19 nt, Artificial Sequence
  Description of Artificial Sequence: Synthetic oligonucleotide
  Antisense Strand to SEQ ID NO: 453081
ucucagaagagaugcucuc

SEQ ID NO: 453083 - RNA, 19 nt, Artificial Sequence
  Description of Artificial Sequence: Synthetic oligonucleotide
  Sense strand starting at position 3713 of SEQ ID NO: 316954
gccauuugcucaucugcaa

SEQ ID NO: 453084 - RNA, 19 nt, Artificial Sequence
  Description of Artificial Sequence: Synthetic oligonucleotide
  Antisense Strand to SEQ ID NO: 453083
uugcagaugagcaaauggc

SEQ ID NO: 453085 - RNA, 19 nt, Artificial Sequence
  Description of Artificial Sequence: Synthetic oligonucleotide
  Sense strand starting at position 3720 of SEQ ID NO: 316954
gcucaucugcaaggaugua

SEQ ID NO: 453086 - RNA, 19 nt, Artificial Sequence
  Description of Artificial Sequence: Synthetic oligonucleotide
  Antisense Strand to SEQ ID NO: 453085
uacauccuugcagaugagc

SEQ ID NO: 453087 - RNA, 19 nt, Artificial Sequence
  Description of Artificial Sequence: Synthetic oligonucleotide
  Sense strand starting at position 3740 of SEQ ID NO: 316954
uggacaacugcaugaauga

SEQ ID NO: 453088 - RNA, 19 nt, Artificial Sequence
  Description of Artificial Sequence: Synthetic oligonucleotide
  Antisense Strand to SEQ ID NO: 453087
ucauucaugcaguugucca

SEQ ID NO: 453089 - RNA, 19 nt, Artificial Sequence
  Description of Artificial Sequence: Synthetic oligonucleotide
  Sense strand starting at position 3770 of SEQ ID NO: 316954
uggugagaucucuggacuc

SEQ ID NO: 453090 - RNA, 19 nt, Artificial Sequence
  Description of Artificial Sequence: Synthetic oligonucleotide
  Antisense Strand to SEQ ID NO: 453089
gaguccagagaucucacca

SEQ ID NO: 453091 - RNA, 19 nt, Artificial Sequence
  Description of Artificial Sequence: Synthetic oligonucleotide
  Sense strand starting at position 3772 of SEQ ID NO: 316954
gugagaucucuggacucug

SEQ ID NO: 453092 - RNA, 19 nt, Artificial Sequence
  Description of Artificial Sequence: Synthetic oligonucleotide
  Antisense Strand to SEQ ID NO: 453091
cagaguccagagaucucac

SEQ ID NO: 453093 - RNA, 19 nt, Artificial Sequence
  Description of Artificial Sequence: Synthetic oligonucleotide
  Sense strand starting at position 3797 of SEQ ID NO: 316954
gcaccuugauaggucuaga

SEQ ID NO: 453094 - RNA, 19 nt, Artificial Sequence
  Description of Artificial Sequence: Synthetic oligonucleotide
  Antisense Strand to SEQ ID NO: 453093
ucuagaccuaucaaggugc

SEQ ID NO: 453095 - RNA, 19 nt, Artificial Sequence
  Description of Artificial Sequence: Synthetic oligonucleotide
  Sense strand starting at position 3800 of SEQ ID NO: 316954
ccuugauaggucuagaucu

SEQ ID NO: 453096 - RNA, 19 nt, Artificial Sequence
  Description of Artificial Sequence: Synthetic oligonucleotide
  Antisense Strand to SEQ ID NO: 453095
agaucuagaccuaucaagg

SEQ ID NO: 453097 - RNA, 19 nt, Artificial Sequence
  Description of Artificial Sequence: Synthetic oligonucleotide
  Sense strand starting at position 3802 of SEQ ID NO: 316954
uugauaggucuagaucugu

SEQ ID NO: 453098 - RNA, 19 nt, Artificial Sequence
  Description of Artificial Sequence: Synthetic oligonucleotide
  Antisense Strand to SEQ ID NO: 453097
acagaucuagaccuaucaa

SEQ ID NO: 453099 - RNA, 19 nt, Artificial Sequence
  Description of Artificial Sequence: Synthetic oligonucleotide
  Sense strand starting at position 3923 of SEQ ID NO: 316954
uggucuuaucaguauaaua

SEQ ID NO: 453100 - RNA, 19 nt, Artificial Sequence
  Description of Artificial Sequence: Synthetic oligonucleotide
  Antisense Strand to SEQ ID NO: 453099
uauuauacugauaagacca

SEQ ID NO: 453101 - RNA, 19 nt, Artificial Sequence
  Description of Artificial Sequence: Synthetic oligonucleotide
  Sense strand starting at position 3925 of SEQ ID NO: 316954
gucuuaucaguauaauauc

SEQ ID NO: 453102 - RNA, 19 nt, Artificial Sequence
  Description of Artificial Sequence: Synthetic oligonucleotide
  Antisense Strand to SEQ ID NO: 453101
gauauuauacugauaagac

SEQ ID NO: 453103 - RNA, 19 nt, Artificial Sequence
  Description of Artificial Sequence: Synthetic oligonucleotide
  Sense strand starting at position 170 of SEQ ID NO: 316955
ugcagauagcagcagagau

SEQ ID NO: 453104 - RNA, 19 nt, Artificial Sequence
  Description of Artificial Sequence: Synthetic oligonucleotide
  Antisense Strand to SEQ ID NO: 453103
aucucugcugcuaucugca

SEQ ID NO: 453105 - RNA, 19 nt, Artificial Sequence
  Description of Artificial Sequence: Synthetic oligonucleotide
  Sense strand starting at position 205 of SEQ ID NO: 316955
ugacucauguaccuuuauu

SEQ ID NO: 453106 - RNA, 19 nt, Artificial Sequence
  Description of Artificial Sequence: Synthetic oligonucleotide
  Antisense Strand to SEQ ID NO: 453105
aauaaagguacaugaguca

SEQ ID NO: 453107 - RNA, 19 nt, Artificial Sequence
  Description of Artificial Sequence: Synthetic oligonucleotide
  Sense strand starting at position 246 of SEQ ID NO: 316955
ggccaauggugagcacaau

SEQ ID NO: 453108 - RNA, 19 nt, Artificial Sequence
  Description of Artificial Sequence: Synthetic oligonucleotide
  Antisense Strand to SEQ ID NO: 453107
auugugcucaccauuggcc

SEQ ID NO: 453109 - RNA, 19 nt, Artificial Sequence
  Description of Artificial Sequence: Synthetic oligonucleotide
  Sense strand starting at position 747 of SEQ ID NO: 316955
agcggugauuucucccaau

SEQ ID NO: 453110 - RNA, 19 nt, Artificial Sequence
  Description of Artificial Sequence: Synthetic oligonucleotide
  Antisense Strand to SEQ ID NO: 453109
auugggagaaaucaccgcu

SEQ ID NO: 453111 - RNA, 19 nt, Artificial Sequence
  Description of Artificial Sequence: Synthetic oligonucleotide
  Sense strand starting at position 782 of SEQ ID NO: 316955
cuugaaaccuggucuggau

SEQ ID NO: 453112 - RNA, 19 nt, Artificial Sequence
  Description of Artificial Sequence: Synthetic oligonucleotide
  Antisense Strand to SEQ ID NO: 453111
auccagaccagguuucaag

SEQ ID NO: 453113 - RNA, 19 nt, Artificial Sequence
  Description of Artificial Sequence: Synthetic oligonucleotide
  Sense strand starting at position 890 of SEQ ID NO: 316955
cugaaaugaugccuacauc

SEQ ID NO: 453114 - RNA, 19 nt, Artificial Sequence
  Description of Artificial Sequence: Synthetic oligonucleotide
  Antisense Strand to SEQ ID NO: 453113
gauguaggcaucauuucag

SEQ ID NO: 453115 - RNA, 19 nt, Artificial Sequence
  Description of Artificial Sequence: Synthetic oligonucleotide
  Sense strand starting at position 893 of SEQ ID NO: 316955
aaaugaugccuacaucguu

SEQ ID NO: 453116 - RNA, 19 nt, Artificial Sequence
  Description of Artificial Sequence: Synthetic oligonucleotide
  Antisense Strand to SEQ ID NO: 453115
aacgauguaggcaucauuu

SEQ ID NO: 453117 - RNA, 19 nt, Artificial Sequence
  Description of Artificial Sequence: Synthetic oligonucleotide
  Sense strand starting at position 992 of SEQ ID NO: 316955
gaaagaaccguuuaucacc

SEQ ID NO: 453118 - RNA, 19 nt, Artificial Sequence
  Description of Artificial Sequence: Synthetic oligonucleotide
  Antisense Strand to SEQ ID NO: 453117
ggugauaaacgguucuuuc

SEQ ID NO: 453119 - RNA, 19 nt, Artificial Sequence
  Description of Artificial Sequence: Synthetic oligonucleotide
  Sense strand starting at position 1011 of SEQ ID NO: 316955
ucuagucucuacccugauu

SEQ ID NO: 453120 - RNA, 19 nt, Artificial Sequence
  Description of Artificial Sequence: Synthetic oligonucleotide
  Antisense Strand to SEQ ID NO: 453119
aaucaggguagagacuaga

SEQ ID NO: 453121 - RNA, 19 nt, Artificial Sequence
  Description of Artificial Sequence: Synthetic oligonucleotide
  Sense strand starting at position 1052 of SEQ ID NO: 316955
ucuauuagugaacaugucu

SEQ ID NO: 453122 - RNA, 19 nt, Artificial Sequence
  Description of Artificial Sequence: Synthetic oligonucleotide
  Antisense Strand to SEQ ID NO: 453121
agacauguucacuaauaga

SEQ ID NO: 453123 - RNA, 19 nt, Artificial Sequence
  Description of Artificial Sequence: Synthetic oligonucleotide
  Sense strand starting at position 1059 of SEQ ID NO: 316955
gugaacaugucucuacaac

SEQ ID NO: 453124 - RNA, 19 nt, Artificial Sequence
  Description of Artificial Sequence: Synthetic oligonucleotide
  Antisense Strand to SEQ ID NO: 453123
guuguagagacauguucac

SEQ ID NO: 453125 - RNA, 19 nt, Artificial Sequence
  Description of Artificial Sequence: Synthetic oligonucleotide
  Sense strand starting at position 1299 of SEQ ID NO: 316955
cggauauucgcagugugca

SEQ ID NO: 453126 - RNA, 19 nt, Artificial Sequence
  Description of Artificial Sequence: Synthetic oligonucleotide
  Antisense Strand to SEQ ID NO: 453125
ugcacacugcgaauauccg

SEQ ID NO: 453127 - RNA, 19 nt, Artificial Sequence
  Description of Artificial Sequence: Synthetic oligonucleotide
  Sense strand starting at position 1314 of SEQ ID NO: 316955
ugcagacccgauugauuau

SEQ ID NO: 453128 - RNA, 19 nt, Artificial Sequence
  Description of Artificial Sequence: Synthetic oligonucleotide
  Antisense Strand to SEQ ID NO: 453127
auaaucaaucgggucugca

SEQ ID NO: 453129 - RNA, 19 nt, Artificial Sequence
  Description of Artificial Sequence: Synthetic oligonucleotide
  Sense strand starting at position 1315 of SEQ ID NO: 316955
gcagacccgauugauuaua

SEQ ID NO: 453130 - RNA, 19 nt, Artificial Sequence
  Description of Artificial Sequence: Synthetic oligonucleotide
  Antisense Strand to SEQ ID NO: 453129
uauaaucaaucgggucugc

SEQ ID NO: 453131 - RNA, 19 nt, Artificial Sequence
  Description of Artificial Sequence: Synthetic oligonucleotide
  Sense strand starting at position 1320 of SEQ ID NO: 316955
cccgauugauuauaaauuu

SEQ ID NO: 453132 - RNA, 19 nt, Artificial Sequence
  Description of Artificial Sequence: Synthetic oligonucleotide
  Antisense Strand to SEQ ID NO: 453131
aaauuuauaaucaaucggg

SEQ ID NO: 453133 - RNA, 19 nt, Artificial Sequence
  Description of Artificial Sequence: Synthetic oligonucleotide
  Sense strand starting at position 1397 of SEQ ID NO: 316955
gagcaaugaccuugcagag

SEQ ID NO: 453134 - RNA, 19 nt, Artificial Sequence
  Description of Artificial Sequence: Synthetic oligonucleotide
  Antisense Strand to SEQ ID NO: 453133
cucugcaaggucauugcuc

SEQ ID NO: 453135 - RNA, 19 nt, Artificial Sequence
  Description of Artificial Sequence: Synthetic oligonucleotide
  Sense strand starting at position 1776 of SEQ ID NO: 316955
cugaaauuacuaugccaag

SEQ ID NO: 453136 - RNA, 19 nt, Artificial Sequence
  Description of Artificial Sequence: Synthetic oligonucleotide
  Antisense Strand to SEQ ID NO: 453135
cuuggcauaguaauuucag

SEQ ID NO: 453137 - RNA, 19 nt, Artificial Sequence
  Description of Artificial Sequence: Synthetic oligonucleotide
  Sense strand starting at position 1777 of SEQ ID NO: 316955
ugaaauuacuaugccaaga

SEQ ID NO: 453138 - RNA, 19 nt, Artificial Sequence
  Description of Artificial Sequence: Synthetic oligonucleotide
  Antisense Strand to SEQ ID NO: 453137
ucuuggcauaguaauuuca

SEQ ID NO: 453139 - RNA, 19 nt, Artificial Sequence
  Description of Artificial Sequence: Synthetic oligonucleotide
  Sense strand starting at position 1782 of SEQ ID NO: 316955
uuacuaugccaagagcaga

SEQ ID NO: 453140 - RNA, 19 nt, Artificial Sequence
  Description of Artificial Sequence: Synthetic oligonucleotide
  Antisense Strand to SEQ ID NO: 453139
ucugcucuuggcauaguaa

SEQ ID NO: 453141 - RNA, 19 nt, Artificial Sequence
  Description of Artificial Sequence: Synthetic oligonucleotide
  Sense strand starting at position 1889 of SEQ ID NO: 316955
ccaguuuggaggugagagu

SEQ ID NO: 453142 - RNA, 19 nt, Artificial Sequence
  Description of Artificial Sequence: Synthetic oligonucleotide
  Antisense Strand to SEQ ID NO: 453141
acucucaccuccaaacugg

SEQ ID NO: 453143 - RNA, 19 nt, Artificial Sequence
  Description of Artificial Sequence: Synthetic oligonucleotide
  Sense strand starting at position 2290 of SEQ ID NO: 316955
gagucuagacucuagcaga

SEQ ID NO: 453144 - RNA, 19 nt, Artificial Sequence
  Description of Artificial Sequence: Synthetic oligonucleotide
  Antisense Strand to SEQ ID NO: 453143
ucugcuagagucuagacuc

SEQ ID NO: 453145 - RNA, 19 nt, Artificial Sequence
  Description of Artificial Sequence: Synthetic oligonucleotide
  Sense strand starting at position 2303 of SEQ ID NO: 316955
agcagaagguuuccaauaa

SEQ ID NO: 453146 - RNA, 19 nt, Artificial Sequence
  Description of Artificial Sequence: Synthetic oligonucleotide
  Antisense Strand to SEQ ID NO: 453145
uuauuggaaaccuucugcu

SEQ ID NO: 453147 - RNA, 19 nt, Artificial Sequence
  Description of Artificial Sequence: Synthetic oligonucleotide
  Sense strand starting at position 2352 of SEQ ID NO: 316955
aucauccgauaaguaauau

SEQ ID NO: 453148 - RNA, 19 nt, Artificial Sequence
  Description of Artificial Sequence: Synthetic oligonucleotide
  Antisense Strand to SEQ ID NO: 453147
auauuacuuaucggaugau

SEQ ID NO: 453149 - RNA, 19 nt, Artificial Sequence
  Description of Artificial Sequence: Synthetic oligonucleotide
  Sense strand starting at position 2393 of SEQ ID NO: 316955
cugcguauucggagaggca

SEQ ID NO: 453150 - RNA, 19 nt, Artificial Sequence
  Description of Artificial Sequence: Synthetic oligonucleotide
  Antisense Strand to SEQ ID NO: 453149
ugccucuccgaauacgcag

SEQ ID NO: 453151 - RNA, 19 nt, Artificial Sequence
  Description of Artificial Sequence: Synthetic oligonucleotide
  Sense strand starting at position 2395 of SEQ ID NO: 316955
gcguauucggagaggcacu

SEQ ID NO: 453152 - RNA, 19 nt, Artificial Sequence
  Description of Artificial Sequence: Synthetic oligonucleotide
  Antisense Strand to SEQ ID NO: 453151
agugccucuccgaauacgc

SEQ ID NO: 453153 - RNA, 19 nt, Artificial Sequence
  Description of Artificial Sequence: Synthetic oligonucleotide
  Sense strand starting at position 2468 of SEQ ID NO: 316955
cuuugagggcuuuggaaau

SEQ ID NO: 453154 - RNA, 19 nt, Artificial Sequence
  Description of Artificial Sequence: Synthetic oligonucleotide
  Antisense Strand to SEQ ID NO: 453153
auuuccaaagcccucaaag

SEQ ID NO: 453155 - RNA, 19 nt, Artificial Sequence
  Description of Artificial Sequence: Synthetic oligonucleotide
  Sense strand starting at position 2480 of SEQ ID NO: 316955
uggaaaucuucccuguuga

SEQ ID NO: 453156 - RNA, 19 nt, Artificial Sequence
  Description of Artificial Sequence: Synthetic oligonucleotide
  Antisense Strand to SEQ ID NO: 453155
ucaacagggaagauuucca

SEQ ID NO: 453157 - RNA, 19 nt, Artificial Sequence
  Description of Artificial Sequence: Synthetic oligonucleotide
  Sense strand starting at position 2481 of SEQ ID NO: 316955
ggaaaucuucccuguugag

SEQ ID NO: 453158 - RNA, 19 nt, Artificial Sequence
  Description of Artificial Sequence: Synthetic oligonucleotide
  Antisense Strand to SEQ ID NO: 453157
cucaacagggaagauuucc

SEQ ID NO: 453159 - RNA, 19 nt, Artificial Sequence
  Description of Artificial Sequence: Synthetic oligonucleotide
  Sense strand starting at position 2512 of SEQ ID NO: 316955
ccugaauggauguguagua

SEQ ID NO: 453160 - RNA, 19 nt, Artificial Sequence
  Description of Artificial Sequence: Synthetic oligonucleotide
  Antisense Strand to SEQ ID NO: 453159
uacuacacauccauucagg

SEQ ID NO: 453161 - RNA, 19 nt, Artificial Sequence
  Description of Artificial Sequence: Synthetic oligonucleotide
  Sense strand starting at position 2513 of SEQ ID NO: 316955
cugaauggauguguaguau

SEQ ID NO: 453162 - RNA, 19 nt, Artificial Sequence
  Description of Artificial Sequence: Synthetic oligonucleotide
  Antisense Strand to SEQ ID NO: 453161
auacuacacauccauucag

SEQ ID NO: 453163 - RNA, 19 nt, Artificial Sequence
  Description of Artificial Sequence: Synthetic oligonucleotide
  Sense strand starting at position 2597 of SEQ ID NO: 316955
guuggaaggcucugugaaa

SEQ ID NO: 453164 - RNA, 19 nt, Artificial Sequence
  Description of Artificial Sequence: Synthetic oligonucleotide
  Antisense Strand to SEQ ID NO: 453163
uuucacagagccuuccaac

SEQ ID NO: 453165 - RNA, 19 nt, Artificial Sequence
  Description of Artificial Sequence: Synthetic oligonucleotide
  Sense strand starting at position 2694 of SEQ ID NO: 316955
aggcuuauaugaucuaaac

SEQ ID NO: 453166 - RNA, 19 nt, Artificial Sequence
  Description of Artificial Sequence: Synthetic oligonucleotide
  Antisense Strand to SEQ ID NO: 453165
guuuagaucauauaagccu

SEQ ID NO: 453167 - RNA, 19 nt, Artificial Sequence
  Description of Artificial Sequence: Synthetic oligonucleotide
  Sense strand starting at position 2822 of SEQ ID NO: 316955
ugcugauugugauccaaua

SEQ ID NO: 453168 - RNA, 19 nt, Artificial Sequence
  Description of Artificial Sequence: Synthetic oligonucleotide
  Antisense Strand to SEQ ID NO: 453167
uauuggaucacaaucagca

SEQ ID NO: 453169 - RNA, 19 nt, Artificial Sequence
  Description of Artificial Sequence: Synthetic oligonucleotide
  Sense strand starting at position 3196 of SEQ ID NO: 316955
ccagguaaugcccaugcua

SEQ ID NO: 453170 - RNA, 19 nt, Artificial Sequence
  Description of Artificial Sequence: Synthetic oligonucleotide
  Antisense Strand to SEQ ID NO: 453169
uagcaugggcauuaccugg

SEQ ID NO: 453171 - RNA, 19 nt, Artificial Sequence
  Description of Artificial Sequence: Synthetic oligonucleotide
  Sense strand starting at position 3544 of SEQ ID NO: 316955
gagauaguauuagcagaua

SEQ ID NO: 453172 - RNA, 19 nt, Artificial Sequence
  Description of Artificial Sequence: Synthetic oligonucleotide
  Antisense Strand to SEQ ID NO: 453171
uaucugcuaauacuaucuc

SEQ ID NO: 453173 - RNA, 19 nt, Artificial Sequence
  Description of Artificial Sequence: Synthetic oligonucleotide
  Sense strand starting at position 3770 of SEQ ID NO: 316955
uccugaagguggguuaaga

SEQ ID NO: 453174 - RNA, 19 nt, Artificial Sequence
  Description of Artificial Sequence: Synthetic oligonucleotide
  Antisense Strand to SEQ ID NO: 453173
ucuuaacccaccuucagga

SEQ ID NO: 453175 - RNA, 19 nt, Artificial Sequence
  Description of Artificial Sequence: Synthetic oligonucleotide
  Sense strand starting at position 3857 of SEQ ID NO: 316955
gggucaucuucccuacacu

SEQ ID NO: 453176 - RNA, 19 nt, Artificial Sequence
  Description of Artificial Sequence: Synthetic oligonucleotide
  Antisense Strand to SEQ ID NO: 453175
aguguagggaagaugaccc

SEQ ID NO: 453177 - RNA, 19 nt, Artificial Sequence
  Description of Artificial Sequence: Synthetic oligonucleotide
  Sense strand starting at position 3858 of SEQ ID NO: 316955
ggucaucuucccuacacua

SEQ ID NO: 453178 - RNA, 19 nt, Artificial Sequence
  Description of Artificial Sequence: Synthetic oligonucleotide
  Antisense Strand to SEQ ID NO: 453177
uaguguagggaagaugacc

SEQ ID NO: 453179 - RNA, 19 nt, Artificial Sequence
  Description of Artificial Sequence: Synthetic oligonucleotide
  Sense strand starting at position 3910 of SEQ ID NO: 316955
gugguuguggcauaauauu

SEQ ID NO: 453180 - RNA, 19 nt, Artificial Sequence
  Description of Artificial Sequence: Synthetic oligonucleotide
  Antisense Strand to SEQ ID NO: 453179
aauauuaugccacaaccac

SEQ ID NO: 453181 - RNA, 19 nt, Artificial Sequence
  Description of Artificial Sequence: Synthetic oligonucleotide
  Sense strand starting at position 3969 of SEQ ID NO: 316955
agaugucuuuauuccaguu

SEQ ID NO: 453182 - RNA, 19 nt, Artificial Sequence
  Description of Artificial Sequence: Synthetic oligonucleotide
  Antisense Strand to SEQ ID NO: 453181
aacuggaauaaagacaucu

SEQ ID NO: 453183 - RNA, 19 nt, Artificial Sequence
  Description of Artificial Sequence: Synthetic oligonucleotide
  Sense strand starting at position 160 of SEQ ID NO: 316956
cucgggugggcguuaugua

SEQ ID NO: 453184 - RNA, 19 nt, Artificial Sequence
  Description of Artificial Sequence: Synthetic oligonucleotide
  Antisense Strand to SEQ ID NO: 453183
uacauaacgcccacccgag

SEQ ID NO: 453185 - RNA, 19 nt, Artificial Sequence
  Description of Artificial Sequence: Synthetic oligonucleotide
  Sense strand starting at position 348 of SEQ ID NO: 316956
ccucgugggauuuguccaa

SEQ ID NO: 453186 - RNA, 19 nt, Artificial Sequence
  Description of Artificial Sequence: Synthetic oligonucleotide
  Antisense Strand to SEQ ID NO: 453185
uuggacaaaucccacgagg

SEQ ID NO: 453187 - RNA, 19 nt, Artificial Sequence
  Description of Artificial Sequence: Synthetic oligonucleotide
  Sense strand starting at position 748 of SEQ ID NO: 316956
acccgaaaggcaugaauau

SEQ ID NO: 453188 - RNA, 19 nt, Artificial Sequence
  Description of Artificial Sequence: Synthetic oligonucleotide
  Antisense Strand to SEQ ID NO: 453187
auauucaugccuuucgggu

SEQ ID NO: 453189 - RNA, 19 nt, Artificial Sequence
  Description of Artificial Sequence: Synthetic oligonucleotide
  Sense strand starting at position 749 of SEQ ID NO: 316956
cccgaaaggcaugaauauu

SEQ ID NO: 453190 - RNA, 19 nt, Artificial Sequence
  Description of Artificial Sequence: Synthetic oligonucleotide
  Antisense Strand to SEQ ID NO: 453189
aauauucaugccuuucggg

SEQ ID NO: 453191 - RNA, 19 nt, Artificial Sequence
  Description of Artificial Sequence: Synthetic oligonucleotide
  Sense strand starting at position 1019 of SEQ ID NO: 316956
cgcgaauaggccgaauaaa

SEQ ID NO: 453192 - RNA, 19 nt, Artificial Sequence
  Description of Artificial Sequence: Synthetic oligonucleotide
  Antisense Strand to SEQ ID NO: 453191
uuuauucggccuauucgcg

SEQ ID NO: 453193 - RNA, 19 nt, Artificial Sequence
  Description of Artificial Sequence: Synthetic oligonucleotide
  Sense strand starting at position 1206 of SEQ ID NO: 316956
gucgcuaaggcagaauuaa

SEQ ID NO: 453194 - RNA, 19 nt, Artificial Sequence
  Description of Artificial Sequence: Synthetic oligonucleotide
  Antisense Strand to SEQ ID NO: 453193
uuaauucugccuuagcgac

SEQ ID NO: 453195 - RNA, 19 nt, Artificial Sequence
  Description of Artificial Sequence: Synthetic oligonucleotide
  Sense strand starting at position 1267 of SEQ ID NO: 316956
guaucaaaggcauagucuu

SEQ ID NO: 453196 - RNA, 19 nt, Artificial Sequence
  Description of Artificial Sequence: Synthetic oligonucleotide
  Antisense Strand to SEQ ID NO: 453195
aagacuaugccuuugauac

SEQ ID NO: 453197 - RNA, 19 nt, Artificial Sequence
  Description of Artificial Sequence: Synthetic oligonucleotide
  Sense strand starting at position 1313 of SEQ ID NO: 316956
auguauauucuagguaguu

SEQ ID NO: 453198 - RNA, 19 nt, Artificial Sequence
  Description of Artificial Sequence: Synthetic oligonucleotide
  Antisense Strand to SEQ ID NO: 453197
aacuaccuagaauauacau

SEQ ID NO: 453199 - RNA, 19 nt, Artificial Sequence
  Description of Artificial Sequence: Synthetic oligonucleotide
  Sense strand starting at position 1315 of SEQ ID NO: 316956
guauauucuagguaguuua

SEQ ID NO: 453200 - RNA, 19 nt, Artificial Sequence
  Description of Artificial Sequence: Synthetic oligonucleotide
  Antisense Strand to SEQ ID NO: 453199
uaaacuaccuagaauauac

SEQ ID NO: 453201 - RNA, 19 nt, Artificial Sequence
  Description of Artificial Sequence: Synthetic oligonucleotide
  Sense strand starting at position 1326 of SEQ ID NO: 316956
guaguuuaaaucuggaaug

SEQ ID NO: 453202 - RNA, 19 nt, Artificial Sequence
  Description of Artificial Sequence: Synthetic oligonucleotide
  Antisense Strand to SEQ ID NO: 453201
cauuccagauuuaaacuac

SEQ ID NO: 453203 - RNA, 19 nt, Artificial Sequence
  Description of Artificial Sequence: Synthetic oligonucleotide
  Sense strand starting at position 1328 of SEQ ID NO: 316956
aguuuaaaucuggaaugca

SEQ ID NO: 453204 - RNA, 19 nt, Artificial Sequence
  Description of Artificial Sequence: Synthetic oligonucleotide
  Antisense Strand to SEQ ID NO: 453203
ugcauuccagauuuaaacu

SEQ ID NO: 453205 - RNA, 19 nt, Artificial Sequence
  Description of Artificial Sequence: Synthetic oligonucleotide
  Sense strand starting at position 1337 of SEQ ID NO: 316956
cuggaaugcagucaaggua

SEQ ID NO: 453206 - RNA, 19 nt, Artificial Sequence
  Description of Artificial Sequence: Synthetic oligonucleotide
  Antisense Strand to SEQ ID NO: 453205
uaccuugacugcauuccag

SEQ ID NO: 453207 - RNA, 19 nt, Artificial Sequence
  Description of Artificial Sequence: Synthetic oligonucleotide
  Sense strand starting at position 1344 of SEQ ID NO: 316956
gcagucaagguaugacaua

SEQ ID NO: 453208 - RNA, 19 nt, Artificial Sequence
  Description of Artificial Sequence: Synthetic oligonucleotide
  Antisense Strand to SEQ ID NO: 453207
uaugucauaccuugacugc

SEQ ID NO: 453209 - RNA, 19 nt, Artificial Sequence
  Description of Artificial Sequence: Synthetic oligonucleotide
  Sense strand starting at position 2562 of SEQ ID NO: 316956
augcuuaagccgcacaaga

SEQ ID NO: 453210 - RNA, 19 nt, Artificial Sequence
  Description of Artificial Sequence: Synthetic oligonucleotide
  Antisense Strand to SEQ ID NO: 453209
ucuugugcggcuuaagcau

SEQ ID NO: 453211 - RNA, 19 nt, Artificial Sequence
  Description of Artificial Sequence: Synthetic oligonucleotide
  Sense strand starting at position 2620 of SEQ ID NO: 316956
ccaucuuuagaguauauuc

SEQ ID NO: 453212 - RNA, 19 nt, Artificial Sequence
  Description of Artificial Sequence: Synthetic oligonucleotide
  Antisense Strand to SEQ ID NO: 453211
gaauauacucuaaagaugg

SEQ ID NO: 453213 - RNA, 19 nt, Artificial Sequence
  Description of Artificial Sequence: Synthetic oligonucleotide
  Sense strand starting at position 2635 of SEQ ID NO: 316956
auuccauugggcugugaug

SEQ ID NO: 453214 - RNA, 19 nt, Artificial Sequence
  Description of Artificial Sequence: Synthetic oligonucleotide
  Antisense Strand to SEQ ID NO: 453213
caucacagcccaauggaau

SEQ ID NO: 453215 - RNA, 19 nt, Artificial Sequence
  Description of Artificial Sequence: Synthetic oligonucleotide
  Sense strand starting at position 2655 of SEQ ID NO: 316956
ugacucgccuaguuacaga

SEQ ID NO: 453216 - RNA, 19 nt, Artificial Sequence
  Description of Artificial Sequence: Synthetic oligonucleotide
  Antisense Strand to SEQ ID NO: 453215
ucuguaacuaggcgaguca

SEQ ID NO: 453217 - RNA, 19 nt, Artificial Sequence
  Description of Artificial Sequence: Synthetic oligonucleotide
  Sense strand starting at position 2716 of SEQ ID NO: 316956
uguagagucauguagacuu

SEQ ID NO: 453218 - RNA, 19 nt, Artificial Sequence
  Description of Artificial Sequence: Synthetic oligonucleotide
  Antisense Strand to SEQ ID NO: 453217
aagucuacaugacucuaca

SEQ ID NO: 453219 - RNA, 19 nt, Artificial Sequence
  Description of Artificial Sequence: Synthetic oligonucleotide
  Sense strand starting at position 2728 of SEQ ID NO: 316956
uagacuugguuuccuagaa

SEQ ID NO: 453220 - RNA, 19 nt, Artificial Sequence
  Description of Artificial Sequence: Synthetic oligonucleotide
  Antisense Strand to SEQ ID NO: 453219
uucuaggaaaccaagucua

SEQ ID NO: 453221 - RNA, 19 nt, Artificial Sequence
  Description of Artificial Sequence: Synthetic oligonucleotide
  Sense strand starting at position 2729 of SEQ ID NO: 316956
agacuugguuuccuagaag

SEQ ID NO: 453222 - RNA, 19 nt, Artificial Sequence
  Description of Artificial Sequence: Synthetic oligonucleotide
  Antisense Strand to SEQ ID NO: 453221
cuucuaggaaaccaagucu

SEQ ID NO: 453223 - RNA, 19 nt, Artificial Sequence
  Description of Artificial Sequence: Synthetic oligonucleotide
  Sense strand starting at position 2751 of SEQ ID NO: 316956
uugcuuuaugcagauugaa

SEQ ID NO: 453224 - RNA, 19 nt, Artificial Sequence
  Description of Artificial Sequence: Synthetic oligonucleotide
  Antisense Strand to SEQ ID NO: 453223
uucaaucugcauaaagcaa

SEQ ID NO: 453225 - RNA, 19 nt, Artificial Sequence
  Description of Artificial Sequence: Synthetic oligonucleotide
  Sense strand starting at position 2783 of SEQ ID NO: 316956
gguuuaaggaaaggcuauu

SEQ ID NO: 453226 - RNA, 19 nt, Artificial Sequence
  Description of Artificial Sequence: Synthetic oligonucleotide
  Antisense Strand to SEQ ID NO: 453225
aauagccuuuccuuaaacc

SEQ ID NO: 453227 - RNA, 19 nt, Artificial Sequence
  Description of Artificial Sequence: Synthetic oligonucleotide
  Sense strand starting at position 2810 of SEQ ID NO: 316956
gugauuagaagaugaagcu

SEQ ID NO: 453228 - RNA, 19 nt, Artificial Sequence
  Description of Artificial Sequence: Synthetic oligonucleotide
  Antisense Strand to SEQ ID NO: 453227
agcuucaucuucuaaucac

SEQ ID NO: 453229 - RNA, 19 nt, Artificial Sequence
  Description of Artificial Sequence: Synthetic oligonucleotide
  Sense strand starting at position 2850 of SEQ ID NO: 316956
ugcagauucuuucccagag

SEQ ID NO: 453230 - RNA, 19 nt, Artificial Sequence
  Description of Artificial Sequence: Synthetic oligonucleotide
  Antisense Strand to SEQ ID NO: 453229
cucugggaaagaaucugca

SEQ ID NO: 453231 - RNA, 19 nt, Artificial Sequence
  Description of Artificial Sequence: Synthetic oligonucleotide
  Sense strand starting at position 3013 of SEQ ID NO: 316956
gagagaauugauggcgaga

SEQ ID NO: 453232 - RNA, 19 nt, Artificial Sequence
  Description of Artificial Sequence: Synthetic oligonucleotide
  Antisense Strand to SEQ ID NO: 453231
ucucgccaucaauucucuc

SEQ ID NO: 453233 - RNA, 19 nt, Artificial Sequence
  Description of Artificial Sequence: Synthetic oligonucleotide
  Sense strand starting at position 3039 of SEQ ID NO: 316956
cuggacuucccgugugaaa

SEQ ID NO: 453234 - RNA, 19 nt, Artificial Sequence
  Description of Artificial Sequence: Synthetic oligonucleotide
  Antisense Strand to SEQ ID NO: 453233
uuucacacgggaaguccag

SEQ ID NO: 453235 - RNA, 19 nt, Artificial Sequence
  Description of Artificial Sequence: Synthetic oligonucleotide
  Sense strand starting at position 3041 of SEQ ID NO: 316956
ggacuucccgugugaaauu

SEQ ID NO: 453236 - RNA, 19 nt, Artificial Sequence
  Description of Artificial Sequence: Synthetic oligonucleotide
  Antisense Strand to SEQ ID NO: 453235
aauuucacacgggaagucc

SEQ ID NO: 453237 - RNA, 19 nt, Artificial Sequence
  Description of Artificial Sequence: Synthetic oligonucleotide
  Sense strand starting at position 3082 of SEQ ID NO: 316956
ccaagcucauuccuggaaa

SEQ ID NO: 453238 - RNA, 19 nt, Artificial Sequence
  Description of Artificial Sequence: Synthetic oligonucleotide
  Antisense Strand to SEQ ID NO: 453237
uuuccaggaaugagcuugg

SEQ ID NO: 453239 - RNA, 19 nt, Artificial Sequence
  Description of Artificial Sequence: Synthetic oligonucleotide
  Sense strand starting at position 3085 of SEQ ID NO: 316956
agcucauuccuggaaaccu

SEQ ID NO: 453240 - RNA, 19 nt, Artificial Sequence
  Description of Artificial Sequence: Synthetic oligonucleotide
  Antisense Strand to SEQ ID NO: 453239
agguuuccaggaaugagcu

SEQ ID NO: 453241 - RNA, 19 nt, Artificial Sequence
  Description of Artificial Sequence: Synthetic oligonucleotide
  Sense strand starting at position 3094 of SEQ ID NO: 316956
cuggaaaccugcucugaca

SEQ ID NO: 453242 - RNA, 19 nt, Artificial Sequence
  Description of Artificial Sequence: Synthetic oligonucleotide
  Antisense Strand to SEQ ID NO: 453241
ugucagagcagguuuccag

SEQ ID NO: 453243 - RNA, 19 nt, Artificial Sequence
  Description of Artificial Sequence: Synthetic oligonucleotide
  Sense strand starting at position 3096 of SEQ ID NO: 316956
ggaaaccugcucugacaau

SEQ ID NO: 453244 - RNA, 19 nt, Artificial Sequence
  Description of Artificial Sequence: Synthetic oligonucleotide
  Antisense Strand to SEQ ID NO: 453243
auugucagagcagguuucc

SEQ ID NO: 453245 - RNA, 19 nt, Artificial Sequence
  Description of Artificial Sequence: Synthetic oligonucleotide
  Sense strand starting at position 3220 of SEQ ID NO: 316956
uggagcuuacaguacuaaa

SEQ ID NO: 453246 - RNA, 19 nt, Artificial Sequence
  Description of Artificial Sequence: Synthetic oligonucleotide
  Antisense Strand to SEQ ID NO: 453245
uuuaguacuguaagcucca

SEQ ID NO: 453247 - RNA, 19 nt, Artificial Sequence
  Description of Artificial Sequence: Synthetic oligonucleotide
  Sense strand starting at position 3307 of SEQ ID NO: 316956
ugcugacuggauuaucuua

SEQ ID NO: 453248 - RNA, 19 nt, Artificial Sequence
  Description of Artificial Sequence: Synthetic oligonucleotide
  Antisense Strand to SEQ ID NO: 453247
uaagauaauccagucagca

SEQ ID NO: 453249 - RNA, 19 nt, Artificial Sequence
  Description of Artificial Sequence: Synthetic oligonucleotide
  Sense strand starting at position 3369 of SEQ ID NO: 316956
aaaugaugaugagcaaagu

SEQ ID NO: 453250 - RNA, 19 nt, Artificial Sequence
  Description of Artificial Sequence: Synthetic oligonucleotide
  Antisense Strand to SEQ ID NO: 453249
acuuugcucaucaucauuu

SEQ ID NO: 453251 - RNA, 19 nt, Artificial Sequence
  Description of Artificial Sequence: Synthetic oligonucleotide
  Sense strand starting at position 3378 of SEQ ID NO: 316956
ugagcaaaguggcuucuau

SEQ ID NO: 453252 - RNA, 19 nt, Artificial Sequence
  Description of Artificial Sequence: Synthetic oligonucleotide
  Antisense Strand to SEQ ID NO: 453251
auagaagccacuuugcuca

SEQ ID NO: 453253 - RNA, 19 nt, Artificial Sequence
  Description of Artificial Sequence: Synthetic oligonucleotide
  Sense strand starting at position 3470 of SEQ ID NO: 316956
aagugagaauagcuguaau

SEQ ID NO: 453254 - RNA, 19 nt, Artificial Sequence
  Description of Artificial Sequence: Synthetic oligonucleotide
  Antisense Strand to SEQ ID NO: 453253
auuacagcuauucucacuu

SEQ ID NO: 453255 - RNA, 19 nt, Artificial Sequence
  Description of Artificial Sequence: Synthetic oligonucleotide
  Sense strand starting at position 3473 of SEQ ID NO: 316956
ugagaauagcuguaaucua

SEQ ID NO: 453256 - RNA, 19 nt, Artificial Sequence
  Description of Artificial Sequence: Synthetic oligonucleotide
  Antisense Strand to SEQ ID NO: 453255
uagauuacagcuauucuca

SEQ ID NO: 453257 - RNA, 19 nt, Artificial Sequence
  Description of Artificial Sequence: Synthetic oligonucleotide
  Sense strand starting at position 3561 of SEQ ID NO: 316956
auaaguacuccacacugua

SEQ ID NO: 453258 - RNA, 19 nt, Artificial Sequence
  Description of Artificial Sequence: Synthetic oligonucleotide
  Antisense Strand to SEQ ID NO: 453257
uacaguguggaguacuuau

SEQ ID NO: 453259 - RNA, 19 nt, Artificial Sequence
  Description of Artificial Sequence: Synthetic oligonucleotide
  Sense strand starting at position 3564 of SEQ ID NO: 316956
aguacuccacacuguauau

SEQ ID NO: 453260 - RNA, 19 nt, Artificial Sequence
  Description of Artificial Sequence: Synthetic oligonucleotide
  Antisense Strand to SEQ ID NO: 453259
auauacaguguggaguacu

SEQ ID NO: 453261 - RNA, 19 nt, Artificial Sequence
  Description of Artificial Sequence: Synthetic oligonucleotide
  Sense strand starting at position 3762 of SEQ ID NO: 316956
ugugauguaagguauacaa

SEQ ID NO: 453262 - RNA, 19 nt, Artificial Sequence
  Description of Artificial Sequence: Synthetic oligonucleotide
  Antisense Strand to SEQ ID NO: 453261
uuguauaccuuacaucaca

SEQ ID NO: 453263 - RNA, 19 nt, Artificial Sequence
  Description of Artificial Sequence: Synthetic oligonucleotide
  Sense strand starting at position 244 of SEQ ID NO: 316957
cucgggugggcguuaugua

SEQ ID NO: 453264 - RNA, 19 nt, Artificial Sequence
  Description of Artificial Sequence: Synthetic oligonucleotide
  Antisense Strand to SEQ ID NO: 453263
uacauaacgcccacccgag

SEQ ID NO: 453265 - RNA, 19 nt, Artificial Sequence
  Description of Artificial Sequence: Synthetic oligonucleotide
  Sense strand starting at position 432 of SEQ ID NO: 316957
ccucgugggauuuguccaa

SEQ ID NO: 453266 - RNA, 19 nt, Artificial Sequence
  Description of Artificial Sequence: Synthetic oligonucleotide
  Antisense Strand to SEQ ID NO: 453265
uuggacaaaucccacgagg

SEQ ID NO: 453267 - RNA, 19 nt, Artificial Sequence
  Description of Artificial Sequence: Synthetic oligonucleotide
  Sense strand starting at position 832 of SEQ ID NO: 316957
acccgaaaggcaugaauau

SEQ ID NO: 453268 - RNA, 19 nt, Artificial Sequence
  Description of Artificial Sequence: Synthetic oligonucleotide
  Antisense Strand to SEQ ID NO: 453267
auauucaugccuuucgggu

SEQ ID NO: 453269 - RNA, 19 nt, Artificial Sequence
  Description of Artificial Sequence: Synthetic oligonucleotide
  Sense strand starting at position 833 of SEQ ID NO: 316957
cccgaaaggcaugaauauu

SEQ ID NO: 453270 - RNA, 19 nt, Artificial Sequence
  Description of Artificial Sequence: Synthetic oligonucleotide
  Antisense Strand to SEQ ID NO: 453269
aauauucaugccuuucggg

SEQ ID NO: 453271 - RNA, 19 nt, Artificial Sequence
  Description of Artificial Sequence: Synthetic oligonucleotide
  Sense strand starting at position 1103 of SEQ ID NO: 316957
cgcgaauaggccgaauaaa

SEQ ID NO: 453272 - RNA, 19 nt, Artificial Sequence
  Description of Artificial Sequence: Synthetic oligonucleotide
  Antisense Strand to SEQ ID NO: 453271
uuuauucggccuauucgcg

SEQ ID NO: 453273 - RNA, 19 nt, Artificial Sequence
  Description of Artificial Sequence: Synthetic oligonucleotide
  Sense strand starting at position 1290 of SEQ ID NO: 316957
gucgcuaaggcagaauuaa

SEQ ID NO: 453274 - RNA, 19 nt, Artificial Sequence
  Description of Artificial Sequence: Synthetic oligonucleotide
  Antisense Strand to SEQ ID NO: 453273
uuaauucugccuuagcgac

SEQ ID NO: 453275 - RNA, 19 nt, Artificial Sequence
  Description of Artificial Sequence: Synthetic oligonucleotide
  Sense strand starting at position 1351 of SEQ ID NO: 316957
guaucaaaggcauagucuu

SEQ ID NO: 453276 - RNA, 19 nt, Artificial Sequence
  Description of Artificial Sequence: Synthetic oligonucleotide
  Antisense Strand to SEQ ID NO: 453275
aagacuaugccuuugauac

SEQ ID NO: 453277 - RNA, 19 nt, Artificial Sequence
  Description of Artificial Sequence: Synthetic oligonucleotide
  Sense strand starting at position 1397 of SEQ ID NO: 316957
auguauauucuagguaguu

SEQ ID NO: 453278 - RNA, 19 nt, Artificial Sequence
  Description of Artificial Sequence: Synthetic oligonucleotide
  Antisense Strand to SEQ ID NO: 453277
aacuaccuagaauauacau

SEQ ID NO: 453279 - RNA, 19 nt, Artificial Sequence
  Description of Artificial Sequence: Synthetic oligonucleotide
  Sense strand starting at position 1399 of SEQ ID NO: 316957
guauauucuagguaguuua

SEQ ID NO: 453280 - RNA, 19 nt, Artificial Sequence
  Description of Artificial Sequence: Synthetic oligonucleotide
  Antisense Strand to SEQ ID NO: 453279
uaaacuaccuagaauauac

SEQ ID NO: 453281 - RNA, 19 nt, Artificial Sequence
  Description of Artificial Sequence: Synthetic oligonucleotide
  Sense strand starting at position 1410 of SEQ ID NO: 316957
guaguuuaaaucuggaaug

SEQ ID NO: 453282 - RNA, 19 nt, Artificial Sequence
  Description of Artificial Sequence: Synthetic oligonucleotide
  Antisense Strand to SEQ ID NO: 453281
cauuccagauuuaaacuac

SEQ ID NO: 453283 - RNA, 19 nt, Artificial Sequence
  Description of Artificial Sequence: Synthetic oligonucleotide
  Sense strand starting at position 1412 of SEQ ID NO: 316957
aguuuaaaucuggaaugca

SEQ ID NO: 453284 - RNA, 19 nt, Artificial Sequence
  Description of Artificial Sequence: Synthetic oligonucleotide
  Antisense Strand to SEQ ID NO: 453283
ugcauuccagauuuaaacu

SEQ ID NO: 453285 - RNA, 19 nt, Artificial Sequence
  Description of Artificial Sequence: Synthetic oligonucleotide
  Sense strand starting at position 1421 of SEQ ID NO: 316957
cuggaaugcagucaaggua

SEQ ID NO: 453286 - RNA, 19 nt, Artificial Sequence
  Description of Artificial Sequence: Synthetic oligonucleotide
  Antisense Strand to SEQ ID NO: 453285
uaccuugacugcauuccag

SEQ ID NO: 453287 - RNA, 19 nt, Artificial Sequence
  Description of Artificial Sequence: Synthetic oligonucleotide
  Sense strand starting at position 1428 of SEQ ID NO: 316957
gcagucaagguaugacaua

SEQ ID NO: 453288 - RNA, 19 nt, Artificial Sequence
  Description of Artificial Sequence: Synthetic oligonucleotide
  Antisense Strand to SEQ ID NO: 453287
uaugucauaccuugacugc

SEQ ID NO: 453289 - RNA, 19 nt, Artificial Sequence
  Description of Artificial Sequence: Synthetic oligonucleotide
  Sense strand starting at position 2646 of SEQ ID NO: 316957
augcuuaagccgcacaaga

SEQ ID NO: 453290 - RNA, 19 nt, Artificial Sequence
  Description of Artificial Sequence: Synthetic oligonucleotide
  Antisense Strand to SEQ ID NO: 453289
ucuugugcggcuuaagcau

SEQ ID NO: 453291 - RNA, 19 nt, Artificial Sequence
  Description of Artificial Sequence: Synthetic oligonucleotide
  Sense strand starting at position 2704 of SEQ ID NO: 316957
ccaucuuuagaguauauuc

SEQ ID NO: 453292 - RNA, 19 nt, Artificial Sequence
  Description of Artificial Sequence: Synthetic oligonucleotide
  Antisense Strand to SEQ ID NO: 453291
gaauauacucuaaagaugg

SEQ ID NO: 453293 - RNA, 19 nt, Artificial Sequence
  Description of Artificial Sequence: Synthetic oligonucleotide
  Sense strand starting at position 2719 of SEQ ID NO: 316957
auuccauugggcugugaug

SEQ ID NO: 453294 - RNA, 19 nt, Artificial Sequence
  Description of Artificial Sequence: Synthetic oligonucleotide
  Antisense Strand to SEQ ID NO: 453293
caucacagcccaauggaau

SEQ ID NO: 453295 - RNA, 19 nt, Artificial Sequence
  Description of Artificial Sequence: Synthetic oligonucleotide
  Sense strand starting at position 2739 of SEQ ID NO: 316957
ugacucgccuaguuacaga

SEQ ID NO: 453296 - RNA, 19 nt, Artificial Sequence
  Description of Artificial Sequence: Synthetic oligonucleotide
  Antisense Strand to SEQ ID NO: 453295
ucuguaacuaggcgaguca

SEQ ID NO: 453297 - RNA, 19 nt, Artificial Sequence
  Description of Artificial Sequence: Synthetic oligonucleotide
  Sense strand starting at position 2800 of SEQ ID NO: 316957
uguagagucauguagacuu

SEQ ID NO: 453298 - RNA, 19 nt, Artificial Sequence
  Description of Artificial Sequence: Synthetic oligonucleotide
  Antisense Strand to SEQ ID NO: 453297
aagucuacaugacucuaca

SEQ ID NO: 453299 - RNA, 19 nt, Artificial Sequence
  Description of Artificial Sequence: Synthetic oligonucleotide
  Sense strand starting at position 2812 of SEQ ID NO: 316957
uagacuugguuuccuagaa

SEQ ID NO: 453300 - RNA, 19 nt, Artificial Sequence
  Description of Artificial Sequence: Synthetic oligonucleotide
  Antisense Strand to SEQ ID NO: 453299
uucuaggaaaccaagucua

SEQ ID NO: 453301 - RNA, 19 nt, Artificial Sequence
  Description of Artificial Sequence: Synthetic oligonucleotide
  Sense strand starting at position 2813 of SEQ ID NO: 316957
agacuugguuuccuagaag

SEQ ID NO: 453302 - RNA, 19 nt, Artificial Sequence
  Description of Artificial Sequence: Synthetic oligonucleotide
  Antisense Strand to SEQ ID NO: 453301
cuucuaggaaaccaagucu

SEQ ID NO: 453303 - RNA, 19 nt, Artificial Sequence
  Description of Artificial Sequence: Synthetic oligonucleotide
  Sense strand starting at position 2835 of SEQ ID NO: 316957
uugcuuuaugcagauugaa

SEQ ID NO: 453304 - RNA, 19 nt, Artificial Sequence
  Description of Artificial Sequence: Synthetic oligonucleotide
  Antisense Strand to SEQ ID NO: 453303
uucaaucugcauaaagcaa

SEQ ID NO: 453305 - RNA, 19 nt, Artificial Sequence
  Description of Artificial Sequence: Synthetic oligonucleotide
  Sense strand starting at position 2867 of SEQ ID NO: 316957
gguuuaaggaaaggcuauu

SEQ ID NO: 453306 - RNA, 19 nt, Artificial Sequence
  Description of Artificial Sequence: Synthetic oligonucleotide
  Antisense Strand to SEQ ID NO: 453305
aauagccuuuccuuaaacc

SEQ ID NO: 453307 - RNA, 19 nt, Artificial Sequence
  Description of Artificial Sequence: Synthetic oligonucleotide
  Sense strand starting at position 2894 of SEQ ID NO: 316957
gugauuagaagaugaagcu

SEQ ID NO: 453308 - RNA, 19 nt, Artificial Sequence
  Description of Artificial Sequence: Synthetic oligonucleotide
  Antisense Strand to SEQ ID NO: 453307
agcuucaucuucuaaucac

SEQ ID NO: 453309 - RNA, 19 nt, Artificial Sequence
  Description of Artificial Sequence: Synthetic oligonucleotide
  Sense strand starting at position 2934 of SEQ ID NO: 316957
ugcagauucuuucccagag

SEQ ID NO: 453310 - RNA, 19 nt, Artificial Sequence
  Description of Artificial Sequence: Synthetic oligonucleotide
  Antisense Strand to SEQ ID NO: 453309
cucugggaaagaaucugca

SEQ ID NO: 453311 - RNA, 19 nt, Artificial Sequence
  Description of Artificial Sequence: Synthetic oligonucleotide
  Sense strand starting at position 3097 of SEQ ID NO: 316957
gagagaauugauggcgaga

SEQ ID NO: 453312 - RNA, 19 nt, Artificial Sequence
  Description of Artificial Sequence: Synthetic oligonucleotide
  Antisense Strand to SEQ ID NO: 453311
ucucgccaucaauucucuc

SEQ ID NO: 453313 - RNA, 19 nt, Artificial Sequence
  Description of Artificial Sequence: Synthetic oligonucleotide
  Sense strand starting at position 3123 of SEQ ID NO: 316957
cuggacuucccgugugaaa

SEQ ID NO: 453314 - RNA, 19 nt, Artificial Sequence
  Description of Artificial Sequence: Synthetic oligonucleotide
  Antisense Strand to SEQ ID NO: 453313
uuucacacgggaaguccag

SEQ ID NO: 453315 - RNA, 19 nt, Artificial Sequence
  Description of Artificial Sequence: Synthetic oligonucleotide
  Sense strand starting at position 3125 of SEQ ID NO: 316957
ggacuucccgugugaaauu

SEQ ID NO: 453316 - RNA, 19 nt, Artificial Sequence
  Description of Artificial Sequence: Synthetic oligonucleotide
  Antisense Strand to SEQ ID NO: 453315
aauuucacacgggaagucc

SEQ ID NO: 453317 - RNA, 19 nt, Artificial Sequence
  Description of Artificial Sequence: Synthetic oligonucleotide
  Sense strand starting at position 3166 of SEQ ID NO: 316957
ccaagcucauuccuggaaa

SEQ ID NO: 453318 - RNA, 19 nt, Artificial Sequence
  Description of Artificial Sequence: Synthetic oligonucleotide
  Antisense Strand to SEQ ID NO: 453317
uuuccaggaaugagcuugg

SEQ ID NO: 453319 - RNA, 19 nt, Artificial Sequence
  Description of Artificial Sequence: Synthetic oligonucleotide
  Sense strand starting at position 3169 of SEQ ID NO: 316957
agcucauuccuggaaaccu

SEQ ID NO: 453320 - RNA, 19 nt, Artificial Sequence
  Description of Artificial Sequence: Synthetic oligonucleotide
  Antisense Strand to SEQ ID NO: 453319
agguuuccaggaaugagcu

SEQ ID NO: 453321 - RNA, 19 nt, Artificial Sequence
  Description of Artificial Sequence: Synthetic oligonucleotide
  Sense strand starting at position 3178 of SEQ ID NO: 316957
cuggaaaccugcucugaca

SEQ ID NO: 453322 - RNA, 19 nt, Artificial Sequence
  Description of Artificial Sequence: Synthetic oligonucleotide
  Antisense Strand to SEQ ID NO: 453321
ugucagagcagguuuccag

SEQ ID NO: 453323 - RNA, 19 nt, Artificial Sequence
  Description of Artificial Sequence: Synthetic oligonucleotide
  Sense strand starting at position 3180 of SEQ ID NO: 316957
ggaaaccugcucugacaau

SEQ ID NO: 453324 - RNA, 19 nt, Artificial Sequence
  Description of Artificial Sequence: Synthetic oligonucleotide
  Antisense Strand to SEQ ID NO: 453323
auugucagagcagguuucc

SEQ ID NO: 453325 - RNA, 19 nt, Artificial Sequence
  Description of Artificial Sequence: Synthetic oligonucleotide
  Sense strand starting at position 3304 of SEQ ID NO: 316957
uggagcuuacaguacuaaa

SEQ ID NO: 453326 - RNA, 19 nt, Artificial Sequence
  Description of Artificial Sequence: Synthetic oligonucleotide
  Antisense Strand to SEQ ID NO: 453325
uuuaguacuguaagcucca

SEQ ID NO: 453327 - RNA, 19 nt, Artificial Sequence
  Description of Artificial Sequence: Synthetic oligonucleotide
  Sense strand starting at position 3391 of SEQ ID NO: 316957
ugcugacuggauuaucuua

SEQ ID NO: 453328 - RNA, 19 nt, Artificial Sequence
  Description of Artificial Sequence: Synthetic oligonucleotide
  Antisense Strand to SEQ ID NO: 453327
uaagauaauccagucagca

SEQ ID NO: 453329 - RNA, 19 nt, Artificial Sequence
  Description of Artificial Sequence: Synthetic oligonucleotide
  Sense strand starting at position 3453 of SEQ ID NO: 316957
aaaugaugaugagcaaagu

SEQ ID NO: 453330 - RNA, 19 nt, Artificial Sequence
  Description of Artificial Sequence: Synthetic oligonucleotide
  Antisense Strand to SEQ ID NO: 453329
acuuugcucaucaucauuu

SEQ ID NO: 453331 - RNA, 19 nt, Artificial Sequence
  Description of Artificial Sequence: Synthetic oligonucleotide
  Sense strand starting at position 3462 of SEQ ID NO: 316957
ugagcaaaguggcuucuau

SEQ ID NO: 453332 - RNA, 19 nt, Artificial Sequence
  Description of Artificial Sequence: Synthetic oligonucleotide
  Antisense Strand to SEQ ID NO: 453331
auagaagccacuuugcuca

SEQ ID NO: 453333 - RNA, 19 nt, Artificial Sequence
  Description of Artificial Sequence: Synthetic oligonucleotide
  Sense strand starting at position 3554 of SEQ ID NO: 316957
aagugagaauagcuguaau

SEQ ID NO: 453334 - RNA, 19 nt, Artificial Sequence
  Description of Artificial Sequence: Synthetic oligonucleotide
  Antisense Strand to SEQ ID NO: 453333
auuacagcuauucucacuu

SEQ ID NO: 453335 - RNA, 19 nt, Artificial Sequence
  Description of Artificial Sequence: Synthetic oligonucleotide
  Sense strand starting at position 3557 of SEQ ID NO: 316957
ugagaauagcuguaaucua

SEQ ID NO: 453336 - RNA, 19 nt, Artificial Sequence
  Description of Artificial Sequence: Synthetic oligonucleotide
  Antisense Strand to SEQ ID NO: 453335
uagauuacagcuauucuca

SEQ ID NO: 453337 - RNA, 19 nt, Artificial Sequence
  Description of Artificial Sequence: Synthetic oligonucleotide
  Sense strand starting at position 3645 of SEQ ID NO: 316957
auaaguacuccacacugua

SEQ ID NO: 453338 - RNA, 19 nt, Artificial Sequence
  Description of Artificial Sequence: Synthetic oligonucleotide
  Antisense Strand to SEQ ID NO: 453337
uacaguguggaguacuuau

SEQ ID NO: 453339 - RNA, 19 nt, Artificial Sequence
  Description of Artificial Sequence: Synthetic oligonucleotide
  Sense strand starting at position 3648 of SEQ ID NO: 316957
aguacuccacacuguauau

SEQ ID NO: 453340 - RNA, 19 nt, Artificial Sequence
  Description of Artificial Sequence: Synthetic oligonucleotide
  Antisense Strand to SEQ ID NO: 453339
auauacaguguggaguacu

SEQ ID NO: 453341 - RNA, 19 nt, Artificial Sequence
  Description of Artificial Sequence: Synthetic oligonucleotide
  Sense strand starting at position 3846 of SEQ ID NO: 316957
ugugauguaagguauacaa

SEQ ID NO: 453342 - RNA, 19 nt, Artificial Sequence
  Description of Artificial Sequence: Synthetic oligonucleotide
  Antisense Strand to SEQ ID NO: 453341
uuguauaccuuacaucaca

SEQ ID NO: 453343 - RNA, 19 nt, Artificial Sequence
  Description of Artificial Sequence: Synthetic oligonucleotide
  Sense strand starting at position 88 of SEQ ID NO: 316958
cuauuagugcuugacuuac

SEQ ID NO: 453344 - RNA, 19 nt, Artificial Sequence
  Description of Artificial Sequence: Synthetic oligonucleotide
  Antisense Strand to SEQ ID NO: 453343
guaagucaagcacuaauag

SEQ ID NO: 453345 - RNA, 19 nt, Artificial Sequence
  Description of Artificial Sequence: Synthetic oligonucleotide
  Sense strand starting at position 94 of SEQ ID NO: 316958
gugcuugacuuacuuaaug

SEQ ID NO: 453346 - RNA, 19 nt, Artificial Sequence
  Description of Artificial Sequence: Synthetic oligonucleotide
  Antisense Strand to SEQ ID NO: 453345
cauuaaguaagucaagcac

SEQ ID NO: 453347 - RNA, 19 nt, Artificial Sequence
  Description of Artificial Sequence: Synthetic oligonucleotide
  Sense strand starting at position 376 of SEQ ID NO: 316958
gcguguugugcgguggaga

SEQ ID NO: 453348 - RNA, 19 nt, Artificial Sequence
  Description of Artificial Sequence: Synthetic oligonucleotide
  Antisense Strand to SEQ ID NO: 453347
ucuccaccgcacaacacgc

SEQ ID NO: 453349 - RNA, 19 nt, Artificial Sequence
  Description of Artificial Sequence: Synthetic oligonucleotide
  Sense strand starting at position 456 of SEQ ID NO: 316958
aagccaugcguacagauaa

SEQ ID NO: 453350 - RNA, 19 nt, Artificial Sequence
  Description of Artificial Sequence: Synthetic oligonucleotide
  Antisense Strand to SEQ ID NO: 453349
uuaucuguacgcauggcuu

SEQ ID NO: 453351 - RNA, 19 nt, Artificial Sequence
  Description of Artificial Sequence: Synthetic oligonucleotide
  Sense strand starting at position 474 of SEQ ID NO: 316958
aaaguccugugcccagaaa

SEQ ID NO: 453352 - RNA, 19 nt, Artificial Sequence
  Description of Artificial Sequence: Synthetic oligonucleotide
  Antisense Strand to SEQ ID NO: 453351
uuucugggcacaggacuuu

SEQ ID NO: 453353 - RNA, 19 nt, Artificial Sequence
  Description of Artificial Sequence: Synthetic oligonucleotide
  Sense strand starting at position 625 of SEQ ID NO: 316958
ggauuagcaagugaguaga

SEQ ID NO: 453354 - RNA, 19 nt, Artificial Sequence
  Description of Artificial Sequence: Synthetic oligonucleotide
  Antisense Strand to SEQ ID NO: 453353
ucuacucacuugcuaaucc

SEQ ID NO: 453355 - RNA, 19 nt, Artificial Sequence
  Description of Artificial Sequence: Synthetic oligonucleotide
  Sense strand starting at position 628 of SEQ ID NO: 316958
uuagcaagugaguagaguu

SEQ ID NO: 453356 - RNA, 19 nt, Artificial Sequence
  Description of Artificial Sequence: Synthetic oligonucleotide
  Antisense Strand to SEQ ID NO: 453355
aacucuacucacuugcuaa

SEQ ID NO: 453357 - RNA, 19 nt, Artificial Sequence
  Description of Artificial Sequence: Synthetic oligonucleotide
  Sense strand starting at position 726 of SEQ ID NO: 316958
gcccgucugguugccaaua

SEQ ID NO: 453358 - RNA, 19 nt, Artificial Sequence
  Description of Artificial Sequence: Synthetic oligonucleotide
  Antisense Strand to SEQ ID NO: 453357
uauuggcaaccagacgggc

SEQ ID NO: 453359 - RNA, 19 nt, Artificial Sequence
  Description of Artificial Sequence: Synthetic oligonucleotide
  Sense strand starting at position 1011 of SEQ ID NO: 316958
gacaaucaguccuuggcga

SEQ ID NO: 453360 - RNA, 19 nt, Artificial Sequence
  Description of Artificial Sequence: Synthetic oligonucleotide
  Antisense Strand to SEQ ID NO: 453359
ucgccaaggacugauuguc

SEQ ID NO: 453361 - RNA, 19 nt, Artificial Sequence
  Description of Artificial Sequence: Synthetic oligonucleotide
  Sense strand starting at position 1087 of SEQ ID NO: 316958
ccaagaagaugugagaaga

SEQ ID NO: 453362 - RNA, 19 nt, Artificial Sequence
  Description of Artificial Sequence: Synthetic oligonucleotide
  Antisense Strand to SEQ ID NO: 453361
ucuucucacaucuucuugg

SEQ ID NO: 453363 - RNA, 19 nt, Artificial Sequence
  Description of Artificial Sequence: Synthetic oligonucleotide
  Sense strand starting at position 1425 of SEQ ID NO: 316958
agccacauuccacgaauca

SEQ ID NO: 453364 - RNA, 19 nt, Artificial Sequence
  Description of Artificial Sequence: Synthetic oligonucleotide
  Antisense Strand to SEQ ID NO: 453363
ugauucguggaauguggcu

SEQ ID NO: 453365 - RNA, 19 nt, Artificial Sequence
  Description of Artificial Sequence: Synthetic oligonucleotide
  Sense strand starting at position 1647 of SEQ ID NO: 316958
cuuucuuaccgaugugaau

SEQ ID NO: 453366 - RNA, 19 nt, Artificial Sequence
  Description of Artificial Sequence: Synthetic oligonucleotide
  Antisense Strand to SEQ ID NO: 453365
auucacaucgguaagaaag

SEQ ID NO: 453367 - RNA, 19 nt, Artificial Sequence
  Description of Artificial Sequence: Synthetic oligonucleotide
  Sense strand starting at position 1649 of SEQ ID NO: 316958
uucuuaccgaugugaauga

SEQ ID NO: 453368 - RNA, 19 nt, Artificial Sequence
  Description of Artificial Sequence: Synthetic oligonucleotide
  Antisense Strand to SEQ ID NO: 453367
ucauucacaucgguaagaa

SEQ ID NO: 453369 - RNA, 19 nt, Artificial Sequence
  Description of Artificial Sequence: Synthetic oligonucleotide
  Sense strand starting at position 1653 of SEQ ID NO: 316958
uaccgaugugaaugaucga

SEQ ID NO: 453370 - RNA, 19 nt, Artificial Sequence
  Description of Artificial Sequence: Synthetic oligonucleotide
  Antisense Strand to SEQ ID NO: 453369
ucgaucauucacaucggua

SEQ ID NO: 453371 - RNA, 19 nt, Artificial Sequence
  Description of Artificial Sequence: Synthetic oligonucleotide
  Sense strand starting at position 2233 of SEQ ID NO: 316958
gccagaaucuaaguggaaa

SEQ ID NO: 453372 - RNA, 19 nt, Artificial Sequence
  Description of Artificial Sequence: Synthetic oligonucleotide
  Antisense Strand to SEQ ID NO: 453371
uuuccacuuagauucuggc

SEQ ID NO: 453373 - RNA, 19 nt, Artificial Sequence
  Description of Artificial Sequence: Synthetic oligonucleotide
  Sense strand starting at position 2344 of SEQ ID NO: 316958
caagguaaugcagauagua

SEQ ID NO: 453374 - RNA, 19 nt, Artificial Sequence
  Description of Artificial Sequence: Synthetic oligonucleotide
  Antisense Strand to SEQ ID NO: 453373
uacuaucugcauuaccuug

SEQ ID NO: 453375 - RNA, 19 nt, Artificial Sequence
  Description of Artificial Sequence: Synthetic oligonucleotide
  Sense strand starting at position 2346 of SEQ ID NO: 316958
agguaaugcagauaguaau

SEQ ID NO: 453376 - RNA, 19 nt, Artificial Sequence
  Description of Artificial Sequence: Synthetic oligonucleotide
  Antisense Strand to SEQ ID NO: 453375
auuacuaucugcauuaccu

SEQ ID NO: 453377 - RNA, 19 nt, Artificial Sequence
  Description of Artificial Sequence: Synthetic oligonucleotide
  Sense strand starting at position 2679 of SEQ ID NO: 316958
ggaagagcuucucucuaau

SEQ ID NO: 453378 - RNA, 19 nt, Artificial Sequence
  Description of Artificial Sequence: Synthetic oligonucleotide
  Antisense Strand to SEQ ID NO: 453377
auuagagagaagcucuucc

SEQ ID NO: 453379 - RNA, 19 nt, Artificial Sequence
  Description of Artificial Sequence: Synthetic oligonucleotide
  Sense strand starting at position 2838 of SEQ ID NO: 316958
cgagguuaaaugcaaccua

SEQ ID NO: 453380 - RNA, 19 nt, Artificial Sequence
  Description of Artificial Sequence: Synthetic oligonucleotide
  Antisense Strand to SEQ ID NO: 453379
uagguugcauuuaaccucg

SEQ ID NO: 453381 - RNA, 19 nt, Artificial Sequence
  Description of Artificial Sequence: Synthetic oligonucleotide
  Sense strand starting at position 2914 of SEQ ID NO: 316958
uagucuuugccuggaauua

SEQ ID NO: 453382 - RNA, 19 nt, Artificial Sequence
  Description of Artificial Sequence: Synthetic oligonucleotide
  Antisense Strand to SEQ ID NO: 453381
uaauuccaggcaaagacua

SEQ ID NO: 453383 - RNA, 19 nt, Artificial Sequence
  Description of Artificial Sequence: Synthetic oligonucleotide
  Sense strand starting at position 2915 of SEQ ID NO: 316958
agucuuugccuggaauuag

SEQ ID NO: 453384 - RNA, 19 nt, Artificial Sequence
  Description of Artificial Sequence: Synthetic oligonucleotide
  Antisense Strand to SEQ ID NO: 453383
cuaauuccaggcaaagacu

SEQ ID NO: 453385 - RNA, 19 nt, Artificial Sequence
  Description of Artificial Sequence: Synthetic oligonucleotide
  Sense strand starting at position 2956 of SEQ ID NO: 316958
agggacaccuggucacuua

SEQ ID NO: 453386 - RNA, 19 nt, Artificial Sequence
  Description of Artificial Sequence: Synthetic oligonucleotide
  Antisense Strand to SEQ ID NO: 453385
uaagugaccaggugucccu

SEQ ID NO: 453387 - RNA, 19 nt, Artificial Sequence
  Description of Artificial Sequence: Synthetic oligonucleotide
  Sense strand starting at position 3073 of SEQ ID NO: 316958
uucugucuccaguguauuu

SEQ ID NO: 453388 - RNA, 19 nt, Artificial Sequence
  Description of Artificial Sequence: Synthetic oligonucleotide
  Antisense Strand to SEQ ID NO: 453387
aaauacacuggagacagaa

SEQ ID NO: 453389 - RNA, 19 nt, Artificial Sequence
  Description of Artificial Sequence: Synthetic oligonucleotide
  Sense strand starting at position 3342 of SEQ ID NO: 316958
ccucucagucuccagugaa

SEQ ID NO: 453390 - RNA, 19 nt, Artificial Sequence
  Description of Artificial Sequence: Synthetic oligonucleotide
  Antisense Strand to SEQ ID NO: 453389
uucacuggagacugagagg

SEQ ID NO: 453391 - RNA, 19 nt, Artificial Sequence
  Description of Artificial Sequence: Synthetic oligonucleotide
  Sense strand starting at position 3371 of SEQ ID NO: 316958
gcaagcuuauuccuuaaga

SEQ ID NO: 453392 - RNA, 19 nt, Artificial Sequence
  Description of Artificial Sequence: Synthetic oligonucleotide
  Antisense Strand to SEQ ID NO: 453391
ucuuaaggaauaagcuugc

SEQ ID NO: 453393 - RNA, 19 nt, Artificial Sequence
  Description of Artificial Sequence: Synthetic oligonucleotide
  Sense strand starting at position 3398 of SEQ ID NO: 316958
ugaucauugugacuucuuu

SEQ ID NO: 453394 - RNA, 19 nt, Artificial Sequence
  Description of Artificial Sequence: Synthetic oligonucleotide
  Antisense Strand to SEQ ID NO: 453393
aaagaagucacaaugauca

SEQ ID NO: 453395 - RNA, 19 nt, Artificial Sequence
  Description of Artificial Sequence: Synthetic oligonucleotide
  Sense strand starting at position 3473 of SEQ ID NO: 316958
acacaaucgagugacuagu

SEQ ID NO: 453396 - RNA, 19 nt, Artificial Sequence
  Description of Artificial Sequence: Synthetic oligonucleotide
  Antisense Strand to SEQ ID NO: 453395
acuagucacucgauugugu

SEQ ID NO: 453397 - RNA, 19 nt, Artificial Sequence
  Description of Artificial Sequence: Synthetic oligonucleotide
  Sense strand starting at position 3481 of SEQ ID NO: 316958
gagugacuagucgagguca

SEQ ID NO: 453398 - RNA, 19 nt, Artificial Sequence
  Description of Artificial Sequence: Synthetic oligonucleotide
  Antisense Strand to SEQ ID NO: 453397
ugaccucgacuagucacuc

SEQ ID NO: 453399 - RNA, 19 nt, Artificial Sequence
  Description of Artificial Sequence: Synthetic oligonucleotide
  Sense strand starting at position 3510 of SEQ ID NO: 316958
ucauaauauugucucaguu

SEQ ID NO: 453400 - RNA, 19 nt, Artificial Sequence
  Description of Artificial Sequence: Synthetic oligonucleotide
  Antisense Strand to SEQ ID NO: 453399
aacugagacaauauuauga

SEQ ID NO: 453401 - RNA, 19 nt, Artificial Sequence
  Description of Artificial Sequence: Synthetic oligonucleotide
  Sense strand starting at position 3538 of SEQ ID NO: 316958
auucuuuaggaauguugga

SEQ ID NO: 453402 - RNA, 19 nt, Artificial Sequence
  Description of Artificial Sequence: Synthetic oligonucleotide
  Antisense Strand to SEQ ID NO: 453401
uccaacauuccuaaagaau

SEQ ID NO: 453403 - RNA, 19 nt, Artificial Sequence
  Description of Artificial Sequence: Synthetic oligonucleotide
  Sense strand starting at position 3547 of SEQ ID NO: 316958
gaauguuggauguguggau

SEQ ID NO: 453404 - RNA, 19 nt, Artificial Sequence
  Description of Artificial Sequence: Synthetic oligonucleotide
  Antisense Strand to SEQ ID NO: 453403
auccacacauccaacauuc

SEQ ID NO: 453405 - RNA, 19 nt, Artificial Sequence
  Description of Artificial Sequence: Synthetic oligonucleotide
  Sense strand starting at position 3551 of SEQ ID NO: 316958
guuggauguguggauguca

SEQ ID NO: 453406 - RNA, 19 nt, Artificial Sequence
  Description of Artificial Sequence: Synthetic oligonucleotide
  Antisense Strand to SEQ ID NO: 453405
ugacauccacacauccaac

SEQ ID NO: 453407 - RNA, 19 nt, Artificial Sequence
  Description of Artificial Sequence: Synthetic oligonucleotide
  Sense strand starting at position 3562 of SEQ ID NO: 316958
ggaugucaagcucauuaca

SEQ ID NO: 453408 - RNA, 19 nt, Artificial Sequence
  Description of Artificial Sequence: Synthetic oligonucleotide
  Antisense Strand to SEQ ID NO: 453407
uguaaugagcuugacaucc

SEQ ID NO: 453409 - RNA, 19 nt, Artificial Sequence
  Description of Artificial Sequence: Synthetic oligonucleotide
  Sense strand starting at position 3656 of SEQ ID NO: 316958
agccuucugaauuggguua

SEQ ID NO: 453410 - RNA, 19 nt, Artificial Sequence
  Description of Artificial Sequence: Synthetic oligonucleotide
  Antisense Strand to SEQ ID NO: 453409
uaacccaauucagaaggcu

SEQ ID NO: 453411 - RNA, 19 nt, Artificial Sequence
  Description of Artificial Sequence: Synthetic oligonucleotide
  Sense strand starting at position 3661 of SEQ ID NO: 316958
ucugaauuggguuacuauu

SEQ ID NO: 453412 - RNA, 19 nt, Artificial Sequence
  Description of Artificial Sequence: Synthetic oligonucleotide
  Antisense Strand to SEQ ID NO: 453411
aauaguaacccaauucaga

SEQ ID NO: 453413 - RNA, 19 nt, Artificial Sequence
  Description of Artificial Sequence: Synthetic oligonucleotide
  Sense strand starting at position 3806 of SEQ ID NO: 316958
gcacguauuuguccuccca

SEQ ID NO: 453414 - RNA, 19 nt, Artificial Sequence
  Description of Artificial Sequence: Synthetic oligonucleotide
  Antisense Strand to SEQ ID NO: 453413
ugggaggacaaauacgugc

SEQ ID NO: 453415 - RNA, 19 nt, Artificial Sequence
  Description of Artificial Sequence: Synthetic oligonucleotide
  Sense strand starting at position 3808 of SEQ ID NO: 316958
acguauuuguccucccaac

SEQ ID NO: 453416 - RNA, 19 nt, Artificial Sequence
  Description of Artificial Sequence: Synthetic oligonucleotide
  Antisense Strand to SEQ ID NO: 453415
guugggaggacaaauacgu

SEQ ID NO: 453417 - RNA, 19 nt, Artificial Sequence
  Description of Artificial Sequence: Synthetic oligonucleotide
  Sense strand starting at position 3882 of SEQ ID NO: 316958
uguccaguccuuuaaugug

SEQ ID NO: 453418 - RNA, 19 nt, Artificial Sequence
  Description of Artificial Sequence: Synthetic oligonucleotide
  Antisense Strand to SEQ ID NO: 453417
cacauuaaaggacuggaca

SEQ ID NO: 453419 - RNA, 19 nt, Artificial Sequence
  Description of Artificial Sequence: Synthetic oligonucleotide
  Sense strand starting at position 3982 of SEQ ID NO: 316958
ucauaaaugccuugagagu

SEQ ID NO: 453420 - RNA, 19 nt, Artificial Sequence
  Description of Artificial Sequence: Synthetic oligonucleotide
  Antisense Strand to SEQ ID NO: 453419
acucucaaggcauuuauga

SEQ ID NO: 453421 - RNA, 19 nt, Artificial Sequence
  Description of Artificial Sequence: Synthetic oligonucleotide
  Sense strand starting at position 3983 of SEQ ID NO: 316958
cauaaaugccuugagagug

SEQ ID NO: 453422 - RNA, 19 nt, Artificial Sequence
  Description of Artificial Sequence: Synthetic oligonucleotide
  Antisense Strand to SEQ ID NO: 453421
cacucucaaggcauuuaug

SEQ ID NO: 453423 - RNA, 19 nt, Artificial Sequence
  Description of Artificial Sequence: Synthetic oligonucleotide
  Sense strand starting at position 146 of SEQ ID NO: 316959
uccaucacgcaaggaaaua

SEQ ID NO: 453424 - RNA, 19 nt, Artificial Sequence
  Description of Artificial Sequence: Synthetic oligonucleotide
  Antisense Strand to SEQ ID NO: 453423
uauuuccuugcgugaugga

SEQ ID NO: 453425 - RNA, 19 nt, Artificial Sequence
  Description of Artificial Sequence: Synthetic oligonucleotide
  Sense strand starting at position 172 of SEQ ID NO: 316959
ucagcaauuccguaagagu

SEQ ID NO: 453426 - RNA, 19 nt, Artificial Sequence
  Description of Artificial Sequence: Synthetic oligonucleotide
  Antisense Strand to SEQ ID NO: 453425
acucuuacggaauugcuga

SEQ ID NO: 453427 - RNA, 19 nt, Artificial Sequence
  Description of Artificial Sequence: Synthetic oligonucleotide
  Sense strand starting at position 277 of SEQ ID NO: 316959
agacaugagguccgagaca

SEQ ID NO: 453428 - RNA, 19 nt, Artificial Sequence
  Description of Artificial Sequence: Synthetic oligonucleotide
  Antisense Strand to SEQ ID NO: 453427
ugucucggaccucaugucu

SEQ ID NO: 453429 - RNA, 19 nt, Artificial Sequence
  Description of Artificial Sequence: Synthetic oligonucleotide
  Sense strand starting at position 402 of SEQ ID NO: 316959
ggaggauauuuauguuaag

SEQ ID NO: 453430 - RNA, 19 nt, Artificial Sequence
  Description of Artificial Sequence: Synthetic oligonucleotide
  Antisense Strand to SEQ ID NO: 453429
cuuaacauaaauauccucc

SEQ ID NO: 453431 - RNA, 19 nt, Artificial Sequence
  Description of Artificial Sequence: Synthetic oligonucleotide
  Sense strand starting at position 405 of SEQ ID NO: 316959
ggauauuuauguuaaggua

SEQ ID NO: 453432 - RNA, 19 nt, Artificial Sequence
  Description of Artificial Sequence: Synthetic oligonucleotide
  Antisense Strand to SEQ ID NO: 453431
uaccuuaacauaaauaucc

SEQ ID NO: 453433 - RNA, 19 nt, Artificial Sequence
  Description of Artificial Sequence: Synthetic oligonucleotide
  Sense strand starting at position 703 of SEQ ID NO: 316959
ggagccuauuccuuuggau

SEQ ID NO: 453434 - RNA, 19 nt, Artificial Sequence
  Description of Artificial Sequence: Synthetic oligonucleotide
  Antisense Strand to SEQ ID NO: 453433
auccaaaggaauaggcucc

SEQ ID NO: 453435 - RNA, 19 nt, Artificial Sequence
  Description of Artificial Sequence: Synthetic oligonucleotide
  Sense strand starting at position 705 of SEQ ID NO: 316959
agccuauuccuuuggauuc

SEQ ID NO: 453436 - RNA, 19 nt, Artificial Sequence
  Description of Artificial Sequence: Synthetic oligonucleotide
  Antisense Strand to SEQ ID NO: 453435
gaauccaaaggaauaggcu

SEQ ID NO: 453437 - RNA, 19 nt, Artificial Sequence
  Description of Artificial Sequence: Synthetic oligonucleotide
  Sense strand starting at position 718 of SEQ ID NO: 316959
ggauucgacuucucaaaca

SEQ ID NO: 453438 - RNA, 19 nt, Artificial Sequence
  Description of Artificial Sequence: Synthetic oligonucleotide
  Antisense Strand to SEQ ID NO: 453437
uguuugagaagucgaaucc

SEQ ID NO: 453439 - RNA, 19 nt, Artificial Sequence
  Description of Artificial Sequence: Synthetic oligonucleotide
  Sense strand starting at position 734 of SEQ ID NO: 316959
acagaacagcguuaucuua

SEQ ID NO: 453440 - RNA, 19 nt, Artificial Sequence
  Description of Artificial Sequence: Synthetic oligonucleotide
  Antisense Strand to SEQ ID NO: 453439
uaagauaacgcuguucugu

SEQ ID NO: 453441 - RNA, 19 nt, Artificial Sequence
  Description of Artificial Sequence: Synthetic oligonucleotide
  Sense strand starting at position 736 of SEQ ID NO: 316959
agaacagcguuaucuuaua

SEQ ID NO: 453442 - RNA, 19 nt, Artificial Sequence
  Description of Artificial Sequence: Synthetic oligonucleotide
  Antisense Strand to SEQ ID NO: 453441
uauaagauaacgcuguucu

SEQ ID NO: 453443 - RNA, 19 nt, Artificial Sequence
  Description of Artificial Sequence: Synthetic oligonucleotide
  Sense strand starting at position 1042 of SEQ ID NO: 316959
acaaucauuaucggaaggu

SEQ ID NO: 453444 - RNA, 19 nt, Artificial Sequence
  Description of Artificial Sequence: Synthetic oligonucleotide
  Antisense Strand to SEQ ID NO: 453443
accuuccgauaaugauugu

SEQ ID NO: 453445 - RNA, 19 nt, Artificial Sequence
  Description of Artificial Sequence: Synthetic oligonucleotide
  Sense strand starting at position 1056 of SEQ ID NO: 316959
aagguucucgcccagagua

SEQ ID NO: 453446 - RNA, 19 nt, Artificial Sequence
  Description of Artificial Sequence: Synthetic oligonucleotide
  Antisense Strand to SEQ ID NO: 453445
uacucugggcgagaaccuu

SEQ ID NO: 453447 - RNA, 19 nt, Artificial Sequence
  Description of Artificial Sequence: Synthetic oligonucleotide
  Sense strand starting at position 2095 of SEQ ID NO: 316959
uggccugcugggaguugua

SEQ ID NO: 453448 - RNA, 19 nt, Artificial Sequence
  Description of Artificial Sequence: Synthetic oligonucleotide
  Antisense Strand to SEQ ID NO: 453447
uacaacucccagcaggcca

SEQ ID NO: 453449 - RNA, 19 nt, Artificial Sequence
  Description of Artificial Sequence: Synthetic oligonucleotide
  Sense strand starting at position 2154 of SEQ ID NO: 316959
cgguguuuacuucucgcga

SEQ ID NO: 453450 - RNA, 19 nt, Artificial Sequence
  Description of Artificial Sequence: Synthetic oligonucleotide
  Antisense Strand to SEQ ID NO: 453449
ucgcgagaaguaaacaccg

SEQ ID NO: 453451 - RNA, 19 nt, Artificial Sequence
  Description of Artificial Sequence: Synthetic oligonucleotide
  Sense strand starting at position 2160 of SEQ ID NO: 316959
uuacuucucgcgagucgga

SEQ ID NO: 453452 - RNA, 19 nt, Artificial Sequence
  Description of Artificial Sequence: Synthetic oligonucleotide
  Antisense Strand to SEQ ID NO: 453451
uccgacucgcgagaaguaa

SEQ ID NO: 453453 - RNA, 19 nt, Artificial Sequence
  Description of Artificial Sequence: Synthetic oligonucleotide
  Sense strand starting at position 2187 of SEQ ID NO: 316959
gcuguucucgcgagacgag

SEQ ID NO: 453454 - RNA, 19 nt, Artificial Sequence
  Description of Artificial Sequence: Synthetic oligonucleotide
  Antisense Strand to SEQ ID NO: 453453
cucgucucgcgagaacagc

SEQ ID NO: 453455 - RNA, 19 nt, Artificial Sequence
  Description of Artificial Sequence: Synthetic oligonucleotide
  Sense strand starting at position 2614 of SEQ ID NO: 316959
acggcacugacuugauagu

SEQ ID NO: 453456 - RNA, 19 nt, Artificial Sequence
  Description of Artificial Sequence: Synthetic oligonucleotide
  Antisense Strand to SEQ ID NO: 453455
acuaucaagucagugccgu

SEQ ID NO: 453457 - RNA, 19 nt, Artificial Sequence
  Description of Artificial Sequence: Synthetic oligonucleotide
  Sense strand starting at position 2620 of SEQ ID NO: 316959
cugacuugauaguccgaaa

SEQ ID NO: 453458 - RNA, 19 nt, Artificial Sequence
  Description of Artificial Sequence: Synthetic oligonucleotide
  Antisense Strand to SEQ ID NO: 453457
uuucggacuaucaagucag

SEQ ID NO: 453459 - RNA, 19 nt, Artificial Sequence
  Description of Artificial Sequence: Synthetic oligonucleotide
  Sense strand starting at position 2657 of SEQ ID NO: 316959
gcuggagugaccuggaaac

SEQ ID NO: 453460 - RNA, 19 nt, Artificial Sequence
  Description of Artificial Sequence: Synthetic oligonucleotide
  Antisense Strand to SEQ ID NO: 453459
guuuccaggucacuccagc

SEQ ID NO: 453461 - RNA, 19 nt, Artificial Sequence
  Description of Artificial Sequence: Synthetic oligonucleotide
  Sense strand starting at position 2880 of SEQ ID NO: 316959
gcgcguaaccuuguuccuu

SEQ ID NO: 453462 - RNA, 19 nt, Artificial Sequence
  Description of Artificial Sequence: Synthetic oligonucleotide
  Antisense Strand to SEQ ID NO: 453461
aaggaacaagguuacgcgc

SEQ ID NO: 453463 - RNA, 19 nt, Artificial Sequence
  Description of Artificial Sequence: Synthetic oligonucleotide
  Sense strand starting at position 2885 of SEQ ID NO: 316959
uaaccuuguuccuugggaa

SEQ ID NO: 453464 - RNA, 19 nt, Artificial Sequence
  Description of Artificial Sequence: Synthetic oligonucleotide
  Antisense Strand to SEQ ID NO: 453463
uucccaaggaacaagguua

SEQ ID NO: 453465 - RNA, 19 nt, Artificial Sequence
  Description of Artificial Sequence: Synthetic oligonucleotide
  Sense strand starting at position 2886 of SEQ ID NO: 316959
aaccuuguuccuugggaag

SEQ ID NO: 453466 - RNA, 19 nt, Artificial Sequence
  Description of Artificial Sequence: Synthetic oligonucleotide
  Antisense Strand to SEQ ID NO: 453465
cuucccaaggaacaagguu

SEQ ID NO: 453467 - RNA, 19 nt, Artificial Sequence
  Description of Artificial Sequence: Synthetic oligonucleotide
  Sense strand starting at position 2914 of SEQ ID NO: 316959
ggaaacucauugcuuccua

SEQ ID NO: 453468 - RNA, 19 nt, Artificial Sequence
  Description of Artificial Sequence: Synthetic oligonucleotide
  Antisense Strand to SEQ ID NO: 453467
uaggaagcaaugaguuucc

SEQ ID NO: 453469 - RNA, 19 nt, Artificial Sequence
  Description of Artificial Sequence: Synthetic oligonucleotide
  Sense strand starting at position 3168 of SEQ ID NO: 316959
ucaugagcuccugaucucu

SEQ ID NO: 453470 - RNA, 19 nt, Artificial Sequence
  Description of Artificial Sequence: Synthetic oligonucleotide
  Antisense Strand to SEQ ID NO: 453469
agagaucaggagcucauga

SEQ ID NO: 453471 - RNA, 19 nt, Artificial Sequence
  Description of Artificial Sequence: Synthetic oligonucleotide
  Sense strand starting at position 3205 of SEQ ID NO: 316959
gcuggauggucuuugaauc

SEQ ID NO: 453472 - RNA, 19 nt, Artificial Sequence
  Description of Artificial Sequence: Synthetic oligonucleotide
  Antisense Strand to SEQ ID NO: 453471
gauucaaagaccauccagc

SEQ ID NO: 453473 - RNA, 19 nt, Artificial Sequence
  Description of Artificial Sequence: Synthetic oligonucleotide
  Sense strand starting at position 3206 of SEQ ID NO: 316959
cuggauggucuuugaauca

SEQ ID NO: 453474 - RNA, 19 nt, Artificial Sequence
  Description of Artificial Sequence: Synthetic oligonucleotide
  Antisense Strand to SEQ ID NO: 453473
ugauucaaagaccauccag

SEQ ID NO: 453475 - RNA, 19 nt, Artificial Sequence
  Description of Artificial Sequence: Synthetic oligonucleotide
  Sense strand starting at position 3252 of SEQ ID NO: 316959
gacgacagccuguauaaug

SEQ ID NO: 453476 - RNA, 19 nt, Artificial Sequence
  Description of Artificial Sequence: Synthetic oligonucleotide
  Antisense Strand to SEQ ID NO: 453475
cauuauacaggcugucguc

SEQ ID NO: 453477 - RNA, 19 nt, Artificial Sequence
  Description of Artificial Sequence: Synthetic oligonucleotide
  Sense strand starting at position 3263 of SEQ ID NO: 316959
guauaaugaauaggcaaga

SEQ ID NO: 453478 - RNA, 19 nt, Artificial Sequence
  Description of Artificial Sequence: Synthetic oligonucleotide
  Antisense Strand to SEQ ID NO: 453477
ucuugccuauucauuauac

SEQ ID NO: 453479 - RNA, 19 nt, Artificial Sequence
  Description of Artificial Sequence: Synthetic oligonucleotide
  Sense strand starting at position 3291 of SEQ ID NO: 316959
agcugacuucgauaggagu

SEQ ID NO: 453480 - RNA, 19 nt, Artificial Sequence
  Description of Artificial Sequence: Synthetic oligonucleotide
  Antisense Strand to SEQ ID NO: 453479
acuccuaucgaagucagcu

SEQ ID NO: 453481 - RNA, 19 nt, Artificial Sequence
  Description of Artificial Sequence: Synthetic oligonucleotide
  Sense strand starting at position 3304 of SEQ ID NO: 316959
aggagucccucauuacaca

SEQ ID NO: 453482 - RNA, 19 nt, Artificial Sequence
  Description of Artificial Sequence: Synthetic oligonucleotide
  Antisense Strand to SEQ ID NO: 453481
uguguaaugagggacuccu

SEQ ID NO: 453483 - RNA, 19 nt, Artificial Sequence
  Description of Artificial Sequence: Synthetic oligonucleotide
  Sense strand starting at position 3350 of SEQ ID NO: 316959
uagugugguucccuagaag

SEQ ID NO: 453484 - RNA, 19 nt, Artificial Sequence
  Description of Artificial Sequence: Synthetic oligonucleotide
  Antisense Strand to SEQ ID NO: 453483
cuucuagggaaccacacua

SEQ ID NO: 453485 - RNA, 19 nt, Artificial Sequence
  Description of Artificial Sequence: Synthetic oligonucleotide
  Sense strand starting at position 3353 of SEQ ID NO: 316959
ugugguucccuagaagaga

SEQ ID NO: 453486 - RNA, 19 nt, Artificial Sequence
  Description of Artificial Sequence: Synthetic oligonucleotide
  Antisense Strand to SEQ ID NO: 453485
ucucuucuagggaaccaca

SEQ ID NO: 453487 - RNA, 19 nt, Artificial Sequence
  Description of Artificial Sequence: Synthetic oligonucleotide
  Sense strand starting at position 3453 of SEQ ID NO: 316959
guuugugagaauuaaguaa

SEQ ID NO: 453488 - RNA, 19 nt, Artificial Sequence
  Description of Artificial Sequence: Synthetic oligonucleotide
  Antisense Strand to SEQ ID NO: 453487
uuacuuaauucucacaaac

SEQ ID NO: 453489 - RNA, 19 nt, Artificial Sequence
  Description of Artificial Sequence: Synthetic oligonucleotide
  Sense strand starting at position 3492 of SEQ ID NO: 316959
gcaaguguucucuaaauac

SEQ ID NO: 453490 - RNA, 19 nt, Artificial Sequence
  Description of Artificial Sequence: Synthetic oligonucleotide
  Antisense Strand to SEQ ID NO: 453489
guauuuagagaacacuugc

SEQ ID NO: 453491 - RNA, 19 nt, Artificial Sequence
  Description of Artificial Sequence: Synthetic oligonucleotide
  Sense strand starting at position 3583 of SEQ ID NO: 316959
gcaacucaguuuguccaaa

SEQ ID NO: 453492 - RNA, 19 nt, Artificial Sequence
  Description of Artificial Sequence: Synthetic oligonucleotide
  Antisense Strand to SEQ ID NO: 453491
uuuggacaaacugaguugc

SEQ ID NO: 453493 - RNA, 19 nt, Artificial Sequence
  Description of Artificial Sequence: Synthetic oligonucleotide
  Sense strand starting at position 3673 of SEQ ID NO: 316959
aggacagguugcucaaacu

SEQ ID NO: 453494 - RNA, 19 nt, Artificial Sequence
  Description of Artificial Sequence: Synthetic oligonucleotide
  Antisense Strand to SEQ ID NO: 453493
aguuugagcaaccuguccu

SEQ ID NO: 453495 - RNA, 19 nt, Artificial Sequence
  Description of Artificial Sequence: Synthetic oligonucleotide
  Sense strand starting at position 3777 of SEQ ID NO: 316959
augcuuggcccuuggaaga

SEQ ID NO: 453496 - RNA, 19 nt, Artificial Sequence
  Description of Artificial Sequence: Synthetic oligonucleotide
  Antisense Strand to SEQ ID NO: 453495
ucuuccaagggccaagcau

SEQ ID NO: 453497 - RNA, 19 nt, Artificial Sequence
  Description of Artificial Sequence: Synthetic oligonucleotide
  Sense strand starting at position 3827 of SEQ ID NO: 316959
accugagugccuuaggaga

SEQ ID NO: 453498 - RNA, 19 nt, Artificial Sequence
  Description of Artificial Sequence: Synthetic oligonucleotide
  Antisense Strand to SEQ ID NO: 453497
ucuccuaaggcacucaggu

SEQ ID NO: 453499 - RNA, 19 nt, Artificial Sequence
  Description of Artificial Sequence: Synthetic oligonucleotide
  Sense strand starting at position 3887 of SEQ ID NO: 316959
auucuucuagagggaguua

SEQ ID NO: 453500 - RNA, 19 nt, Artificial Sequence
  Description of Artificial Sequence: Synthetic oligonucleotide
  Antisense Strand to SEQ ID NO: 453499
uaacucccucuagaagaau

SEQ ID NO: 453501 - RNA, 19 nt, Artificial Sequence
  Description of Artificial Sequence: Synthetic oligonucleotide
  Sense strand starting at position 3898 of SEQ ID NO: 316959
gggaguuacagucaaguuu

SEQ ID NO: 453502 - RNA, 19 nt, Artificial Sequence
  Description of Artificial Sequence: Synthetic oligonucleotide
  Antisense Strand to SEQ ID NO: 453501
aaacuugacuguaacuccc

SEQ ID NO: 453503 - RNA, 19 nt, Artificial Sequence
  Description of Artificial Sequence: Synthetic oligonucleotide
  Sense strand starting at position 216 of SEQ ID NO: 316960
gcgagcaaaugguugaaua

SEQ ID NO: 453504 - RNA, 19 nt, Artificial Sequence
  Description of Artificial Sequence: Synthetic oligonucleotide
  Antisense Strand to SEQ ID NO: 453503
uauucaaccauuugcucgc

SEQ ID NO: 453505 - RNA, 19 nt, Artificial Sequence
  Description of Artificial Sequence: Synthetic oligonucleotide
  Sense strand starting at position 217 of SEQ ID NO: 316960
cgagcaaaugguugaauaa

SEQ ID NO: 453506 - RNA, 19 nt, Artificial Sequence
  Description of Artificial Sequence: Synthetic oligonucleotide
  Antisense Strand to SEQ ID NO: 453505
uuauucaaccauuugcucg

SEQ ID NO: 453507 - RNA, 19 nt, Artificial Sequence
  Description of Artificial Sequence: Synthetic oligonucleotide
  Sense strand starting at position 303 of SEQ ID NO: 316960
cacuuuggauguucuguua

SEQ ID NO: 453508 - RNA, 19 nt, Artificial Sequence
  Description of Artificial Sequence: Synthetic oligonucleotide
  Antisense Strand to SEQ ID NO: 453507
uaacagaacauccaaagug

SEQ ID NO: 453509 - RNA, 19 nt, Artificial Sequence
  Description of Artificial Sequence: Synthetic oligonucleotide
  Sense strand starting at position 379 of SEQ ID NO: 316960
cuagaaauccuguguacuu

SEQ ID NO: 453510 - RNA, 19 nt, Artificial Sequence
  Description of Artificial Sequence: Synthetic oligonucleotide
  Antisense Strand to SEQ ID NO: 453509
aaguacacaggauuucuag

SEQ ID NO: 453511 - RNA, 19 nt, Artificial Sequence
  Description of Artificial Sequence: Synthetic oligonucleotide
  Sense strand starting at position 381 of SEQ ID NO: 316960
agaaauccuguguacuuau

SEQ ID NO: 453512 - RNA, 19 nt, Artificial Sequence
  Description of Artificial Sequence: Synthetic oligonucleotide
  Antisense Strand to SEQ ID NO: 453511
auaaguacacaggauuucu

SEQ ID NO: 453513 - RNA, 19 nt, Artificial Sequence
  Description of Artificial Sequence: Synthetic oligonucleotide
  Sense strand starting at position 403 of SEQ ID NO: 316960
uaucuuagaucuguggaaa

SEQ ID NO: 453514 - RNA, 19 nt, Artificial Sequence
  Description of Artificial Sequence: Synthetic oligonucleotide
  Antisense Strand to SEQ ID NO: 453513
uuuccacagaucuaagaua

SEQ ID NO: 453515 - RNA, 19 nt, Artificial Sequence
  Description of Artificial Sequence: Synthetic oligonucleotide
  Sense strand starting at position 404 of SEQ ID NO: 316960
aucuuagaucuguggaaag

SEQ ID NO: 453516 - RNA, 19 nt, Artificial Sequence
  Description of Artificial Sequence: Synthetic oligonucleotide
  Antisense Strand to SEQ ID NO: 453515
cuuuccacagaucuaagau

SEQ ID NO: 453517 - RNA, 19 nt, Artificial Sequence
  Description of Artificial Sequence: Synthetic oligonucleotide
  Sense strand starting at position 429 of SEQ ID NO: 316960
aguggaagccuccauuaca

SEQ ID NO: 453518 - RNA, 19 nt, Artificial Sequence
  Description of Artificial Sequence: Synthetic oligonucleotide
  Antisense Strand to SEQ ID NO: 453517
uguaauggaggcuuccacu

SEQ ID NO: 453519 - RNA, 19 nt, Artificial Sequence
  Description of Artificial Sequence: Synthetic oligonucleotide
  Sense strand starting at position 694 of SEQ ID NO: 316960
ucucguucugcagagggaa

SEQ ID NO: 453520 - RNA, 19 nt, Artificial Sequence
  Description of Artificial Sequence: Synthetic oligonucleotide
  Antisense Strand to SEQ ID NO: 453519
uucccucugcagaacgaga

SEQ ID NO: 453521 - RNA, 19 nt, Artificial Sequence
  Description of Artificial Sequence: Synthetic oligonucleotide
  Sense strand starting at position 726 of SEQ ID NO: 316960
aagccuaguuacucugaga

SEQ ID NO: 453522 - RNA, 19 nt, Artificial Sequence
  Description of Artificial Sequence: Synthetic oligonucleotide
  Antisense Strand to SEQ ID NO: 453521
ucucagaguaacuaggcuu

SEQ ID NO: 453523 - RNA, 19 nt, Artificial Sequence
  Description of Artificial Sequence: Synthetic oligonucleotide
  Sense strand starting at position 737 of SEQ ID NO: 316960
cucugagagcuaugacuac

SEQ ID NO: 453524 - RNA, 19 nt, Artificial Sequence
  Description of Artificial Sequence: Synthetic oligonucleotide
  Antisense Strand to SEQ ID NO: 453523
guagucauagcucucagag

SEQ ID NO: 453525 - RNA, 19 nt, Artificial Sequence
  Description of Artificial Sequence: Synthetic oligonucleotide
  Sense strand starting at position 741 of SEQ ID NO: 316960
gagagcuaugacuaccagu

SEQ ID NO: 453526 - RNA, 19 nt, Artificial Sequence
  Description of Artificial Sequence: Synthetic oligonucleotide
  Antisense Strand to SEQ ID NO: 453525
acugguagucauagcucuc

SEQ ID NO: 453527 - RNA, 19 nt, Artificial Sequence
  Description of Artificial Sequence: Synthetic oligonucleotide
  Sense strand starting at position 780 of SEQ ID NO: 316960
aguugagcaucuuuccaca

SEQ ID NO: 453528 - RNA, 19 nt, Artificial Sequence
  Description of Artificial Sequence: Synthetic oligonucleotide
  Antisense Strand to SEQ ID NO: 453527
uguggaaagaugcucaacu

SEQ ID NO: 453529 - RNA, 19 nt, Artificial Sequence
  Description of Artificial Sequence: Synthetic oligonucleotide
  Sense strand starting at position 1231 of SEQ ID NO: 316960
ugugcccuugucuaaacaa

SEQ ID NO: 453530 - RNA, 19 nt, Artificial Sequence
  Description of Artificial Sequence: Synthetic oligonucleotide
  Antisense Strand to SEQ ID NO: 453529
uuguuuagacaagggcaca

SEQ ID NO: 453531 - RNA, 19 nt, Artificial Sequence
  Description of Artificial Sequence: Synthetic oligonucleotide
  Sense strand starting at position 1317 of SEQ ID NO: 316960
gaaggaauucgaggucgag

SEQ ID NO: 453532 - RNA, 19 nt, Artificial Sequence
  Description of Artificial Sequence: Synthetic oligonucleotide
  Antisense Strand to SEQ ID NO: 453531
cucgaccucgaauuccuuc

SEQ ID NO: 453533 - RNA, 19 nt, Artificial Sequence
  Description of Artificial Sequence: Synthetic oligonucleotide
  Sense strand starting at position 2069 of SEQ ID NO: 316960
uccuguuauggacaggcaa

SEQ ID NO: 453534 - RNA, 19 nt, Artificial Sequence
  Description of Artificial Sequence: Synthetic oligonucleotide
  Antisense Strand to SEQ ID NO: 453533
uugccuguccauaacagga

SEQ ID NO: 453535 - RNA, 19 nt, Artificial Sequence
  Description of Artificial Sequence: Synthetic oligonucleotide
  Sense strand starting at position 2071 of SEQ ID NO: 316960
cuguuauggacaggcaaua

SEQ ID NO: 453536 - RNA, 19 nt, Artificial Sequence
  Description of Artificial Sequence: Synthetic oligonucleotide
  Antisense Strand to SEQ ID NO: 453535
uauugccuguccauaacag

SEQ ID NO: 453537 - RNA, 19 nt, Artificial Sequence
  Description of Artificial Sequence: Synthetic oligonucleotide
  Sense strand starting at position 2082 of SEQ ID NO: 316960
aggcaauagucaccaauaa

SEQ ID NO: 453538 - RNA, 19 nt, Artificial Sequence
  Description of Artificial Sequence: Synthetic oligonucleotide
  Antisense Strand to SEQ ID NO: 453537
uuauuggugacuauugccu

SEQ ID NO: 453539 - RNA, 19 nt, Artificial Sequence
  Description of Artificial Sequence: Synthetic oligonucleotide
  Sense strand starting at position 2083 of SEQ ID NO: 316960
ggcaauagucaccaauaau

SEQ ID NO: 453540 - RNA, 19 nt, Artificial Sequence
  Description of Artificial Sequence: Synthetic oligonucleotide
  Antisense Strand to SEQ ID NO: 453539
auuauuggugacuauugcc

SEQ ID NO: 453541 - RNA, 19 nt, Artificial Sequence
  Description of Artificial Sequence: Synthetic oligonucleotide
  Sense strand starting at position 2097 of SEQ ID NO: 316960
auaauugugggucacggaa

SEQ ID NO: 453542 - RNA, 19 nt, Artificial Sequence
  Description of Artificial Sequence: Synthetic oligonucleotide
  Antisense Strand to SEQ ID NO: 453541
uuccgugacccacaauuau

SEQ ID NO: 453543 - RNA, 19 nt, Artificial Sequence
  Description of Artificial Sequence: Synthetic oligonucleotide
  Sense strand starting at position 2392 of SEQ ID NO: 316960
cuuccuuugcucugggaac

SEQ ID NO: 453544 - RNA, 19 nt, Artificial Sequence
  Description of Artificial Sequence: Synthetic oligonucleotide
  Antisense Strand to SEQ ID NO: 453543
guucccagagcaaaggaag

SEQ ID NO: 453545 - RNA, 19 nt, Artificial Sequence
  Description of Artificial Sequence: Synthetic oligonucleotide
  Sense strand starting at position 2465 of SEQ ID NO: 316960
acuccauguuugcuaaaug

SEQ ID NO: 453546 - RNA, 19 nt, Artificial Sequence
  Description of Artificial Sequence: Synthetic oligonucleotide
  Antisense Strand to SEQ ID NO: 453545
cauuuagcaaacauggagu

SEQ ID NO: 453547 - RNA, 19 nt, Artificial Sequence
  Description of Artificial Sequence: Synthetic oligonucleotide
  Sense strand starting at position 2999 of SEQ ID NO: 316960
ccaagaucugagggcugua

SEQ ID NO: 453548 - RNA, 19 nt, Artificial Sequence
  Description of Artificial Sequence: Synthetic oligonucleotide
  Antisense Strand to SEQ ID NO: 453547
uacagcccucagaucuugg

SEQ ID NO: 453549 - RNA, 19 nt, Artificial Sequence
  Description of Artificial Sequence: Synthetic oligonucleotide
  Sense strand starting at position 3177 of SEQ ID NO: 316960
cuuguuacauuagugaaug

SEQ ID NO: 453550 - RNA, 19 nt, Artificial Sequence
  Description of Artificial Sequence: Synthetic oligonucleotide
  Antisense Strand to SEQ ID NO: 453549
cauucacuaauguaacaag

SEQ ID NO: 453551 - RNA, 19 nt, Artificial Sequence
  Description of Artificial Sequence: Synthetic oligonucleotide
  Sense strand starting at position 3179 of SEQ ID NO: 316960
uguuacauuagugaaugua

SEQ ID NO: 453552 - RNA, 19 nt, Artificial Sequence
  Description of Artificial Sequence: Synthetic oligonucleotide
  Antisense Strand to SEQ ID NO: 453551
uacauucacuaauguaaca

SEQ ID NO: 453553 - RNA, 19 nt, Artificial Sequence
  Description of Artificial Sequence: Synthetic oligonucleotide
  Sense strand starting at position 3182 of SEQ ID NO: 316960
uacauuagugaauguagga

SEQ ID NO: 453554 - RNA, 19 nt, Artificial Sequence
  Description of Artificial Sequence: Synthetic oligonucleotide
  Antisense Strand to SEQ ID NO: 453553
uccuacauucacuaaugua

SEQ ID NO: 453555 - RNA, 19 nt, Artificial Sequence
  Description of Artificial Sequence: Synthetic oligonucleotide
  Sense strand starting at position 3281 of SEQ ID NO: 316960
cuguuugccagguaauaug

SEQ ID NO: 453556 - RNA, 19 nt, Artificial Sequence
  Description of Artificial Sequence: Synthetic oligonucleotide
  Antisense Strand to SEQ ID NO: 453555
cauauuaccuggcaaacag

SEQ ID NO: 453557 - RNA, 19 nt, Artificial Sequence
  Description of Artificial Sequence: Synthetic oligonucleotide
  Sense strand starting at position 3338 of SEQ ID NO: 316960
ggauguuguacaggacaaa

SEQ ID NO: 453558 - RNA, 19 nt, Artificial Sequence
  Description of Artificial Sequence: Synthetic oligonucleotide
  Antisense Strand to SEQ ID NO: 453557
uuuguccuguacaacaucc

SEQ ID NO: 453559 - RNA, 19 nt, Artificial Sequence
  Description of Artificial Sequence: Synthetic oligonucleotide
  Sense strand starting at position 3349 of SEQ ID NO: 316960
aggacaaaugaccguguca

SEQ ID NO: 453560 - RNA, 19 nt, Artificial Sequence
  Description of Artificial Sequence: Synthetic oligonucleotide
  Antisense Strand to SEQ ID NO: 453559
ugacacggucauuuguccu

SEQ ID NO: 453561 - RNA, 19 nt, Artificial Sequence
  Description of Artificial Sequence: Synthetic oligonucleotide
  Sense strand starting at position 3351 of SEQ ID NO: 316960
gacaaaugaccgugucaau

SEQ ID NO: 453562 - RNA, 19 nt, Artificial Sequence
  Description of Artificial Sequence: Synthetic oligonucleotide
  Antisense Strand to SEQ ID NO: 453561
auugacacggucauuuguc

SEQ ID NO: 453563 - RNA, 19 nt, Artificial Sequence
  Description of Artificial Sequence: Synthetic oligonucleotide
  Sense strand starting at position 3451 of SEQ ID NO: 316960
acugaacuauuagagaaua

SEQ ID NO: 453564 - RNA, 19 nt, Artificial Sequence
  Description of Artificial Sequence: Synthetic oligonucleotide
  Antisense Strand to SEQ ID NO: 453563
uauucucuaauaguucagu

SEQ ID NO: 453565 - RNA, 19 nt, Artificial Sequence
  Description of Artificial Sequence: Synthetic oligonucleotide
  Sense strand starting at position 3484 of SEQ ID NO: 316960
acgucauugaauggaaugu

SEQ ID NO: 453566 - RNA, 19 nt, Artificial Sequence
  Description of Artificial Sequence: Synthetic oligonucleotide
  Antisense Strand to SEQ ID NO: 453565
acauuccauucaaugacgu

SEQ ID NO: 453567 - RNA, 19 nt, Artificial Sequence
  Description of Artificial Sequence: Synthetic oligonucleotide
  Sense strand starting at position 3503 of SEQ ID NO: 316960
guggaacuuacuuggauca

SEQ ID NO: 453568 - RNA, 19 nt, Artificial Sequence
  Description of Artificial Sequence: Synthetic oligonucleotide
  Antisense Strand to SEQ ID NO: 453567
ugauccaaguaaguuccac

SEQ ID NO: 453569 - RNA, 19 nt, Artificial Sequence
  Description of Artificial Sequence: Synthetic oligonucleotide
  Sense strand starting at position 3575 of SEQ ID NO: 316960
ggaauauaaagcuggguau

SEQ ID NO: 453570 - RNA, 19 nt, Artificial Sequence
  Description of Artificial Sequence: Synthetic oligonucleotide
  Antisense Strand to SEQ ID NO: 453569
auacccagcuuuauauucc

SEQ ID NO: 453571 - RNA, 19 nt, Artificial Sequence
  Description of Artificial Sequence: Synthetic oligonucleotide
  Sense strand starting at position 3576 of SEQ ID NO: 316960
gaauauaaagcuggguauu

SEQ ID NO: 453572 - RNA, 19 nt, Artificial Sequence
  Description of Artificial Sequence: Synthetic oligonucleotide
  Antisense Strand to SEQ ID NO: 453571
aauacccagcuuuauauuc

SEQ ID NO: 453573 - RNA, 19 nt, Artificial Sequence
  Description of Artificial Sequence: Synthetic oligonucleotide
  Sense strand starting at position 3577 of SEQ ID NO: 316960
aauauaaagcuggguauua

SEQ ID NO: 453574 - RNA, 19 nt, Artificial Sequence
  Description of Artificial Sequence: Synthetic oligonucleotide
  Antisense Strand to SEQ ID NO: 453573
uaauacccagcuuuauauu

SEQ ID NO: 453575 - RNA, 19 nt, Artificial Sequence
  Description of Artificial Sequence: Synthetic oligonucleotide
  Sense strand starting at position 3655 of SEQ ID NO: 316960
uguccuaaccuuuagagau

SEQ ID NO: 453576 - RNA, 19 nt, Artificial Sequence
  Description of Artificial Sequence: Synthetic oligonucleotide
  Antisense Strand to SEQ ID NO: 453575
aucucuaaagguuaggaca

SEQ ID NO: 453577 - RNA, 19 nt, Artificial Sequence
  Description of Artificial Sequence: Synthetic oligonucleotide
  Sense strand starting at position 3774 of SEQ ID NO: 316960
aauguuaguaacgguugaa

SEQ ID NO: 453578 - RNA, 19 nt, Artificial Sequence
  Description of Artificial Sequence: Synthetic oligonucleotide
  Antisense Strand to SEQ ID NO: 453577
uucaaccguuacuaacauu

SEQ ID NO: 453579 - RNA, 19 nt, Artificial Sequence
  Description of Artificial Sequence: Synthetic oligonucleotide
  Sense strand starting at position 3794 of SEQ ID NO: 316960
cugggugaugaaugccaua

SEQ ID NO: 453580 - RNA, 19 nt, Artificial Sequence
  Description of Artificial Sequence: Synthetic oligonucleotide
  Antisense Strand to SEQ ID NO: 453579
uauggcauucaucacccag

SEQ ID NO: 453581 - RNA, 19 nt, Artificial Sequence
  Description of Artificial Sequence: Synthetic oligonucleotide
  Sense strand starting at position 3801 of SEQ ID NO: 316960
augaaugccauaggaguua

SEQ ID NO: 453582 - RNA, 19 nt, Artificial Sequence
  Description of Artificial Sequence: Synthetic oligonucleotide
  Antisense Strand to SEQ ID NO: 453581
uaacuccuauggcauucau

SEQ ID NO: 453583 - RNA, 19 nt, Artificial Sequence
  Description of Artificial Sequence: Synthetic oligonucleotide
  Sense strand starting at position 6 of SEQ ID NO: 316961
agcugagaucucggcauuu

SEQ ID NO: 453584 - RNA, 19 nt, Artificial Sequence
  Description of Artificial Sequence: Synthetic oligonucleotide
  Antisense Strand to SEQ ID NO: 453583
aaaugccgagaucucagcu

SEQ ID NO: 453585 - RNA, 19 nt, Artificial Sequence
  Description of Artificial Sequence: Synthetic oligonucleotide
  Sense strand starting at position 341 of SEQ ID NO: 316961
ugguuagccugcuaucgaa

SEQ ID NO: 453586 - RNA, 19 nt, Artificial Sequence
  Description of Artificial Sequence: Synthetic oligonucleotide
  Antisense Strand to SEQ ID NO: 453585
uucgauagcaggcuaacca

SEQ ID NO: 453587 - RNA, 19 nt, Artificial Sequence
  Description of Artificial Sequence: Synthetic oligonucleotide
  Sense strand starting at position 757 of SEQ ID NO: 316961
gaauaaauguaagcagugu

SEQ ID NO: 453588 - RNA, 19 nt, Artificial Sequence
  Description of Artificial Sequence: Synthetic oligonucleotide
  Antisense Strand to SEQ ID NO: 453587
acacugcuuacauuuauuc

SEQ ID NO: 453589 - RNA, 19 nt, Artificial Sequence
  Description of Artificial Sequence: Synthetic oligonucleotide
  Sense strand starting at position 761 of SEQ ID NO: 316961
aaauguaagcagugucuaa

SEQ ID NO: 453590 - RNA, 19 nt, Artificial Sequence
  Description of Artificial Sequence: Synthetic oligonucleotide
  Antisense Strand to SEQ ID NO: 453589
uuagacacugcuuacauuu

SEQ ID NO: 453591 - RNA, 19 nt, Artificial Sequence
  Description of Artificial Sequence: Synthetic oligonucleotide
  Sense strand starting at position 765 of SEQ ID NO: 316961
guaagcagugucuaacaca

SEQ ID NO: 453592 - RNA, 19 nt, Artificial Sequence
  Description of Artificial Sequence: Synthetic oligonucleotide
  Antisense Strand to SEQ ID NO: 453591
uguguuagacacugcuuac

SEQ ID NO: 453593 - RNA, 19 nt, Artificial Sequence
  Description of Artificial Sequence: Synthetic oligonucleotide
  Sense strand starting at position 786 of SEQ ID NO: 316961
guagaugcucuacagauau

SEQ ID NO: 453594 - RNA, 19 nt, Artificial Sequence
  Description of Artificial Sequence: Synthetic oligonucleotide
  Antisense Strand to SEQ ID NO: 453593
auaucuguagagcaucuac

SEQ ID NO: 453595 - RNA, 19 nt, Artificial Sequence
  Description of Artificial Sequence: Synthetic oligonucleotide
  Sense strand starting at position 798 of SEQ ID NO: 316961
cagauaucaccgcagucaa

SEQ ID NO: 453596 - RNA, 19 nt, Artificial Sequence
  Description of Artificial Sequence: Synthetic oligonucleotide
  Antisense Strand to SEQ ID NO: 453595
uugacugcggugauaucug

SEQ ID NO: 453597 - RNA, 19 nt, Artificial Sequence
  Description of Artificial Sequence: Synthetic oligonucleotide
  Sense strand starting at position 834 of SEQ ID NO: 316961
gagagaagcuagcucacaa

SEQ ID NO: 453598 - RNA, 19 nt, Artificial Sequence
  Description of Artificial Sequence: Synthetic oligonucleotide
  Antisense Strand to SEQ ID NO: 453597
uugugagcuagcuucucuc

SEQ ID NO: 453599 - RNA, 19 nt, Artificial Sequence
  Description of Artificial Sequence: Synthetic oligonucleotide
  Sense strand starting at position 853 of SEQ ID NO: 316961
agguuuacuggagaugguu

SEQ ID NO: 453600 - RNA, 19 nt, Artificial Sequence
  Description of Artificial Sequence: Synthetic oligonucleotide
  Antisense Strand to SEQ ID NO: 453599
aaccaucuccaguaaaccu

SEQ ID NO: 453601 - RNA, 19 nt, Artificial Sequence
  Description of Artificial Sequence: Synthetic oligonucleotide
  Sense strand starting at position 956 of SEQ ID NO: 316961
aguauugggccaggauuca

SEQ ID NO: 453602 - RNA, 19 nt, Artificial Sequence
  Description of Artificial Sequence: Synthetic oligonucleotide
  Antisense Strand to SEQ ID NO: 453601
ugaauccuggcccaauacu

SEQ ID NO: 453603 - RNA, 19 nt, Artificial Sequence
  Description of Artificial Sequence: Synthetic oligonucleotide
  Sense strand starting at position 1021 of SEQ ID NO: 316961
cucccagucucccuaaguu

SEQ ID NO: 453604 - RNA, 19 nt, Artificial Sequence
  Description of Artificial Sequence: Synthetic oligonucleotide
  Antisense Strand to SEQ ID NO: 453603
aacuuagggagacugggag

SEQ ID NO: 453605 - RNA, 19 nt, Artificial Sequence
  Description of Artificial Sequence: Synthetic oligonucleotide
  Sense strand starting at position 1360 of SEQ ID NO: 316961
aaagaccuucuguaugagu

SEQ ID NO: 453606 - RNA, 19 nt, Artificial Sequence
  Description of Artificial Sequence: Synthetic oligonucleotide
  Antisense Strand to SEQ ID NO: 453605
acucauacagaaggucuuu

SEQ ID NO: 453607 - RNA, 19 nt, Artificial Sequence
  Description of Artificial Sequence: Synthetic oligonucleotide
  Sense strand starting at position 1784 of SEQ ID NO: 316961
gggagagcuucccuuguuc

SEQ ID NO: 453608 - RNA, 19 nt, Artificial Sequence
  Description of Artificial Sequence: Synthetic oligonucleotide
  Antisense Strand to SEQ ID NO: 453607
gaacaagggaagcucuccc

SEQ ID NO: 453609 - RNA, 19 nt, Artificial Sequence
  Description of Artificial Sequence: Synthetic oligonucleotide
  Sense strand starting at position 1786 of SEQ ID NO: 316961
gagagcuucccuuguucca

SEQ ID NO: 453610 - RNA, 19 nt, Artificial Sequence
  Description of Artificial Sequence: Synthetic oligonucleotide
  Antisense Strand to SEQ ID NO: 453609
uggaacaagggaagcucuc

SEQ ID NO: 453611 - RNA, 19 nt, Artificial Sequence
  Description of Artificial Sequence: Synthetic oligonucleotide
  Sense strand starting at position 2756 of SEQ ID NO: 316961
ggaagugggugcaaucgaa

SEQ ID NO: 453612 - RNA, 19 nt, Artificial Sequence
  Description of Artificial Sequence: Synthetic oligonucleotide
  Antisense Strand to SEQ ID NO: 453611
uucgauugcacccacuucc

SEQ ID NO: 453613 - RNA, 19 nt, Artificial Sequence
  Description of Artificial Sequence: Synthetic oligonucleotide
  Sense strand starting at position 2764 of SEQ ID NO: 316961
gugcaaucgaacugcucuu

SEQ ID NO: 453614 - RNA, 19 nt, Artificial Sequence
  Description of Artificial Sequence: Synthetic oligonucleotide
  Antisense Strand to SEQ ID NO: 453613
aagagcaguucgauugcac

SEQ ID NO: 453615 - RNA, 19 nt, Artificial Sequence
  Description of Artificial Sequence: Synthetic oligonucleotide
  Sense strand starting at position 2836 of SEQ ID NO: 316961
cagugacucauucguagug

SEQ ID NO: 453616 - RNA, 19 nt, Artificial Sequence
  Description of Artificial Sequence: Synthetic oligonucleotide
  Antisense Strand to SEQ ID NO: 453615
cacuacgaaugagucacug

SEQ ID NO: 453617 - RNA, 19 nt, Artificial Sequence
  Description of Artificial Sequence: Synthetic oligonucleotide
  Sense strand starting at position 2837 of SEQ ID NO: 316961
agugacucauucguaguga

SEQ ID NO: 453618 - RNA, 19 nt, Artificial Sequence
  Description of Artificial Sequence: Synthetic oligonucleotide
  Antisense Strand to SEQ ID NO: 453617
ucacuacgaaugagucacu

SEQ ID NO: 453619 - RNA, 19 nt, Artificial Sequence
  Description of Artificial Sequence: Synthetic oligonucleotide
  Sense strand starting at position 2838 of SEQ ID NO: 316961
gugacucauucguagugac

SEQ ID NO: 453620 - RNA, 19 nt, Artificial Sequence
  Description of Artificial Sequence: Synthetic oligonucleotide
  Antisense Strand to SEQ ID NO: 453619
gucacuacgaaugagucac

SEQ ID NO: 453621 - RNA, 19 nt, Artificial Sequence
  Description of Artificial Sequence: Synthetic oligonucleotide
  Sense strand starting at position 2841 of SEQ ID NO: 316961
acucauucguagugacuca

SEQ ID NO: 453622 - RNA, 19 nt, Artificial Sequence
  Description of Artificial Sequence: Synthetic oligonucleotide
  Antisense Strand to SEQ ID NO: 453621
ugagucacuacgaaugagu

SEQ ID NO: 453623 - RNA, 19 nt, Artificial Sequence
  Description of Artificial Sequence: Synthetic oligonucleotide
  Sense strand starting at position 2848 of SEQ ID NO: 316961
cguagugacucauucuugu

SEQ ID NO: 453624 - RNA, 19 nt, Artificial Sequence
  Description of Artificial Sequence: Synthetic oligonucleotide
  Antisense Strand to SEQ ID NO: 453623
acaagaaugagucacuacg

SEQ ID NO: 453625 - RNA, 19 nt, Artificial Sequence
  Description of Artificial Sequence: Synthetic oligonucleotide
  Sense strand starting at position 3361 of SEQ ID NO: 316961
ccguggugugaguggcuaa

SEQ ID NO: 453626 - RNA, 19 nt, Artificial Sequence
  Description of Artificial Sequence: Synthetic oligonucleotide
  Antisense Strand to SEQ ID NO: 453625
uuagccacucacaccacgg

SEQ ID NO: 453627 - RNA, 19 nt, Artificial Sequence
  Description of Artificial Sequence: Synthetic oligonucleotide
  Sense strand starting at position 3362 of SEQ ID NO: 316961
cguggugugaguggcuaaa

SEQ ID NO: 453628 - RNA, 19 nt, Artificial Sequence
  Description of Artificial Sequence: Synthetic oligonucleotide
  Antisense Strand to SEQ ID NO: 453627
uuuagccacucacaccacg

SEQ ID NO: 453629 - RNA, 19 nt, Artificial Sequence
  Description of Artificial Sequence: Synthetic oligonucleotide
  Sense strand starting at position 3364 of SEQ ID NO: 316961
uggugugaguggcuaaaga

SEQ ID NO: 453630 - RNA, 19 nt, Artificial Sequence
  Description of Artificial Sequence: Synthetic oligonucleotide
  Antisense Strand to SEQ ID NO: 453629
ucuuuagccacucacacca

SEQ ID NO: 453631 - RNA, 19 nt, Artificial Sequence
  Description of Artificial Sequence: Synthetic oligonucleotide
  Sense strand starting at position 3380 of SEQ ID NO: 316961
agaacccuuucugaaagga

SEQ ID NO: 453632 - RNA, 19 nt, Artificial Sequence
  Description of Artificial Sequence: Synthetic oligonucleotide
  Antisense Strand to SEQ ID NO: 453631
uccuuucagaaaggguucu

SEQ ID NO: 453633 - RNA, 19 nt, Artificial Sequence
  Description of Artificial Sequence: Synthetic oligonucleotide
  Sense strand starting at position 3394 of SEQ ID NO: 316961
aaggaauugugauaccuug

SEQ ID NO: 453634 - RNA, 19 nt, Artificial Sequence
  Description of Artificial Sequence: Synthetic oligonucleotide
  Antisense Strand to SEQ ID NO: 453633
caagguaucacaauuccuu

SEQ ID NO: 453635 - RNA, 19 nt, Artificial Sequence
  Description of Artificial Sequence: Synthetic oligonucleotide
  Sense strand starting at position 3400 of SEQ ID NO: 316961
uugugauaccuugguuaua

SEQ ID NO: 453636 - RNA, 19 nt, Artificial Sequence
  Description of Artificial Sequence: Synthetic oligonucleotide
  Antisense Strand to SEQ ID NO: 453635
uauaaccaagguaucacaa

SEQ ID NO: 453637 - RNA, 19 nt, Artificial Sequence
  Description of Artificial Sequence: Synthetic oligonucleotide
  Sense strand starting at position 3401 of SEQ ID NO: 316961
ugugauaccuugguuauaa

SEQ ID NO: 453638 - RNA, 19 nt, Artificial Sequence
  Description of Artificial Sequence: Synthetic oligonucleotide
  Antisense Strand to SEQ ID NO: 453637
uuauaaccaagguaucaca

SEQ ID NO: 453639 - RNA, 19 nt, Artificial Sequence
  Description of Artificial Sequence: Synthetic oligonucleotide
  Sense strand starting at position 3402 of SEQ ID NO: 316961
gugauaccuugguuauaaa

SEQ ID NO: 453640 - RNA, 19 nt, Artificial Sequence
  Description of Artificial Sequence: Synthetic oligonucleotide
  Antisense Strand to SEQ ID NO: 453639
uuuauaaccaagguaucac

SEQ ID NO: 453641 - RNA, 19 nt, Artificial Sequence
  Description of Artificial Sequence: Synthetic oligonucleotide
  Sense strand starting at position 3428 of SEQ ID NO: 316961
uugggauaauaucagagau

SEQ ID NO: 453642 - RNA, 19 nt, Artificial Sequence
  Description of Artificial Sequence: Synthetic oligonucleotide
  Antisense Strand to SEQ ID NO: 453641
aucucugauauuaucccaa

SEQ ID NO: 453643 - RNA, 19 nt, Artificial Sequence
  Description of Artificial Sequence: Synthetic oligonucleotide
  Sense strand starting at position 3464 of SEQ ID NO: 316961
ugagguaugugaggaagga

SEQ ID NO: 453644 - RNA, 19 nt, Artificial Sequence
  Description of Artificial Sequence: Synthetic oligonucleotide
  Antisense Strand to SEQ ID NO: 453643
uccuuccucacauaccuca

SEQ ID NO: 453645 - RNA, 19 nt, Artificial Sequence
  Description of Artificial Sequence: Synthetic oligonucleotide
  Sense strand starting at position 3477 of SEQ ID NO: 316961
gaaggagaacuucguuguu

SEQ ID NO: 453646 - RNA, 19 nt, Artificial Sequence
  Description of Artificial Sequence: Synthetic oligonucleotide
  Antisense Strand to SEQ ID NO: 453645
aacaacgaaguucuccuuc

SEQ ID NO: 453647 - RNA, 19 nt, Artificial Sequence
  Description of Artificial Sequence: Synthetic oligonucleotide
  Sense strand starting at position 3636 of SEQ ID NO: 316961
uaaauaaagcuggguguga

SEQ ID NO: 453648 - RNA, 19 nt, Artificial Sequence
  Description of Artificial Sequence: Synthetic oligonucleotide
  Antisense Strand to SEQ ID NO: 453647
ucacacccagcuuuauuua

SEQ ID NO: 453649 - RNA, 19 nt, Artificial Sequence
  Description of Artificial Sequence: Synthetic oligonucleotide
  Sense strand starting at position 3637 of SEQ ID NO: 316961
aaauaaagcugggugugau

SEQ ID NO: 453650 - RNA, 19 nt, Artificial Sequence
  Description of Artificial Sequence: Synthetic oligonucleotide
  Antisense Strand to SEQ ID NO: 453649
aucacacccagcuuuauuu

SEQ ID NO: 453651 - RNA, 19 nt, Artificial Sequence
  Description of Artificial Sequence: Synthetic oligonucleotide
  Sense strand starting at position 3931 of SEQ ID NO: 316961
ugagccaggacuugucaaa

SEQ ID NO: 453652 - RNA, 19 nt, Artificial Sequence
  Description of Artificial Sequence: Synthetic oligonucleotide
  Antisense Strand to SEQ ID NO: 453651
uuugacaaguccuggcuca

SEQ ID NO: 453653 - RNA, 19 nt, Artificial Sequence
  Description of Artificial Sequence: Synthetic oligonucleotide
  Sense strand starting at position 3958 of SEQ ID NO: 316961
aaaggaaguuguuagagua

SEQ ID NO: 453654 - RNA, 19 nt, Artificial Sequence
  Description of Artificial Sequence: Synthetic oligonucleotide
  Antisense Strand to SEQ ID NO: 453653
uacucuaacaacuuccuuu

SEQ ID NO: 453655 - RNA, 19 nt, Artificial Sequence
  Description of Artificial Sequence: Synthetic oligonucleotide
  Sense strand starting at position 350 of SEQ ID NO: 316962
gaauaaauguaagcagugu

SEQ ID NO: 453656 - RNA, 19 nt, Artificial Sequence
  Description of Artificial Sequence: Synthetic oligonucleotide
  Antisense Strand to SEQ ID NO: 453655
acacugcuuacauuuauuc

SEQ ID NO: 453657 - RNA, 19 nt, Artificial Sequence
  Description of Artificial Sequence: Synthetic oligonucleotide
  Sense strand starting at position 354 of SEQ ID NO: 316962
aaauguaagcagugucuaa

SEQ ID NO: 453658 - RNA, 19 nt, Artificial Sequence
  Description of Artificial Sequence: Synthetic oligonucleotide
  Antisense Strand to SEQ ID NO: 453657
uuagacacugcuuacauuu

SEQ ID NO: 453659 - RNA, 19 nt, Artificial Sequence
  Description of Artificial Sequence: Synthetic oligonucleotide
  Sense strand starting at position 358 of SEQ ID NO: 316962
guaagcagugucuaacaca

SEQ ID NO: 453660 - RNA, 19 nt, Artificial Sequence
  Description of Artificial Sequence: Synthetic oligonucleotide
  Antisense Strand to SEQ ID NO: 453659
uguguuagacacugcuuac

SEQ ID NO: 453661 - RNA, 19 nt, Artificial Sequence
  Description of Artificial Sequence: Synthetic oligonucleotide
  Sense strand starting at position 379 of SEQ ID NO: 316962
guagaugcucuacagauau

SEQ ID NO: 453662 - RNA, 19 nt, Artificial Sequence
  Description of Artificial Sequence: Synthetic oligonucleotide
  Antisense Strand to SEQ ID NO: 453661
auaucuguagagcaucuac

SEQ ID NO: 453663 - RNA, 19 nt, Artificial Sequence
  Description of Artificial Sequence: Synthetic oligonucleotide
  Sense strand starting at position 391 of SEQ ID NO: 316962
cagauaucaccgcagucaa

SEQ ID NO: 453664 - RNA, 19 nt, Artificial Sequence
  Description of Artificial Sequence: Synthetic oligonucleotide
  Antisense Strand to SEQ ID NO: 453663
uugacugcggugauaucug

SEQ ID NO: 453665 - RNA, 19 nt, Artificial Sequence
  Description of Artificial Sequence: Synthetic oligonucleotide
  Sense strand starting at position 427 of SEQ ID NO: 316962
gagagaagcuagcucacaa

SEQ ID NO: 453666 - RNA, 19 nt, Artificial Sequence
  Description of Artificial Sequence: Synthetic oligonucleotide
  Antisense Strand to SEQ ID NO: 453665
uugugagcuagcuucucuc

SEQ ID NO: 453667 - RNA, 19 nt, Artificial Sequence
  Description of Artificial Sequence: Synthetic oligonucleotide
  Sense strand starting at position 446 of SEQ ID NO: 316962
agguuuacuggagaugguu

SEQ ID NO: 453668 - RNA, 19 nt, Artificial Sequence
  Description of Artificial Sequence: Synthetic oligonucleotide
  Antisense Strand to SEQ ID NO: 453667
aaccaucuccaguaaaccu

SEQ ID NO: 453669 - RNA, 19 nt, Artificial Sequence
  Description of Artificial Sequence: Synthetic oligonucleotide
  Sense strand starting at position 549 of SEQ ID NO: 316962
aguauugggccaggauuca

SEQ ID NO: 453670 - RNA, 19 nt, Artificial Sequence
  Description of Artificial Sequence: Synthetic oligonucleotide
  Antisense Strand to SEQ ID NO: 453669
ugaauccuggcccaauacu

SEQ ID NO: 453671 - RNA, 19 nt, Artificial Sequence
  Description of Artificial Sequence: Synthetic oligonucleotide
  Sense strand starting at position 614 of SEQ ID NO: 316962
cucccagucucccuaaguu

SEQ ID NO: 453672 - RNA, 19 nt, Artificial Sequence
  Description of Artificial Sequence: Synthetic oligonucleotide
  Antisense Strand to SEQ ID NO: 453671
aacuuagggagacugggag

SEQ ID NO: 453673 - RNA, 19 nt, Artificial Sequence
  Description of Artificial Sequence: Synthetic oligonucleotide
  Sense strand starting at position 953 of SEQ ID NO: 316962
aaagaccuucuguaugagu

SEQ ID NO: 453674 - RNA, 19 nt, Artificial Sequence
  Description of Artificial Sequence: Synthetic oligonucleotide
  Antisense Strand to SEQ ID NO: 453673
acucauacagaaggucuuu

SEQ ID NO: 453675 - RNA, 19 nt, Artificial Sequence
  Description of Artificial Sequence: Synthetic oligonucleotide
  Sense strand starting at position 1377 of SEQ ID NO: 316962
gggagagcuucccuuguuc

SEQ ID NO: 453676 - RNA, 19 nt, Artificial Sequence
  Description of Artificial Sequence: Synthetic oligonucleotide
  Antisense Strand to SEQ ID NO: 453675
gaacaagggaagcucuccc

SEQ ID NO: 453677 - RNA, 19 nt, Artificial Sequence
  Description of Artificial Sequence: Synthetic oligonucleotide
  Sense strand starting at position 1379 of SEQ ID NO: 316962
gagagcuucccuuguucca

SEQ ID NO: 453678 - RNA, 19 nt, Artificial Sequence
  Description of Artificial Sequence: Synthetic oligonucleotide
  Antisense Strand to SEQ ID NO: 453677
uggaacaagggaagcucuc

SEQ ID NO: 453679 - RNA, 19 nt, Artificial Sequence
  Description of Artificial Sequence: Synthetic oligonucleotide
  Sense strand starting at position 2349 of SEQ ID NO: 316962
ggaagugggugcaaucgaa

SEQ ID NO: 453680 - RNA, 19 nt, Artificial Sequence
  Description of Artificial Sequence: Synthetic oligonucleotide
  Antisense Strand to SEQ ID NO: 453679
uucgauugcacccacuucc

SEQ ID NO: 453681 - RNA, 19 nt, Artificial Sequence
  Description of Artificial Sequence: Synthetic oligonucleotide
  Sense strand starting at position 2357 of SEQ ID NO: 316962
gugcaaucgaacugcucuu

SEQ ID NO: 453682 - RNA, 19 nt, Artificial Sequence
  Description of Artificial Sequence: Synthetic oligonucleotide
  Antisense Strand to SEQ ID NO: 453681
aagagcaguucgauugcac

SEQ ID NO: 453683 - RNA, 19 nt, Artificial Sequence
  Description of Artificial Sequence: Synthetic oligonucleotide
  Sense strand starting at position 2429 of SEQ ID NO: 316962
cagugacucauucguagug

SEQ ID NO: 453684 - RNA, 19 nt, Artificial Sequence
  Description of Artificial Sequence: Synthetic oligonucleotide
  Antisense Strand to SEQ ID NO: 453683
cacuacgaaugagucacug

SEQ ID NO: 453685 - RNA, 19 nt, Artificial Sequence
  Description of Artificial Sequence: Synthetic oligonucleotide
  Sense strand starting at position 2430 of SEQ ID NO: 316962
agugacucauucguaguga

SEQ ID NO: 453686 - RNA, 19 nt, Artificial Sequence
  Description of Artificial Sequence: Synthetic oligonucleotide
  Antisense Strand to SEQ ID NO: 453685
ucacuacgaaugagucacu

SEQ ID NO: 453687 - RNA, 19 nt, Artificial Sequence
  Description of Artificial Sequence: Synthetic oligonucleotide
  Sense strand starting at position 2441 of SEQ ID NO: 316962
cguagugacucauucuugu

SEQ ID NO: 453688 - RNA, 19 nt, Artificial Sequence
  Description of Artificial Sequence: Synthetic oligonucleotide
  Antisense Strand to SEQ ID NO: 453687
acaagaaugagucacuacg

SEQ ID NO: 453689 - RNA, 19 nt, Artificial Sequence
  Description of Artificial Sequence: Synthetic oligonucleotide
  Sense strand starting at position 2954 of SEQ ID NO: 316962
ccguggugugaguggcuaa

SEQ ID NO: 453690 - RNA, 19 nt, Artificial Sequence
  Description of Artificial Sequence: Synthetic oligonucleotide
  Antisense Strand to SEQ ID NO: 453689
uuagccacucacaccacgg

SEQ ID NO: 453691 - RNA, 19 nt, Artificial Sequence
  Description of Artificial Sequence: Synthetic oligonucleotide
  Sense strand starting at position 2955 of SEQ ID NO: 316962
cguggugugaguggcuaaa

SEQ ID NO: 453692 - RNA, 19 nt, Artificial Sequence
  Description of Artificial Sequence: Synthetic oligonucleotide
  Antisense Strand to SEQ ID NO: 453691
uuuagccacucacaccacg

SEQ ID NO: 453693 - RNA, 19 nt, Artificial Sequence
  Description of Artificial Sequence: Synthetic oligonucleotide
  Sense strand starting at position 2957 of SEQ ID NO: 316962
uggugugaguggcuaaaga

SEQ ID NO: 453694 - RNA, 19 nt, Artificial Sequence
  Description of Artificial Sequence: Synthetic oligonucleotide
  Antisense Strand to SEQ ID NO: 453693
ucuuuagccacucacacca

SEQ ID NO: 453695 - RNA, 19 nt, Artificial Sequence
  Description of Artificial Sequence: Synthetic oligonucleotide
  Sense strand starting at position 2973 of SEQ ID NO: 316962
agaacccuuucugaaagga

SEQ ID NO: 453696 - RNA, 19 nt, Artificial Sequence
  Description of Artificial Sequence: Synthetic oligonucleotide
  Antisense Strand to SEQ ID NO: 453695
uccuuucagaaaggguucu

SEQ ID NO: 453697 - RNA, 19 nt, Artificial Sequence
  Description of Artificial Sequence: Synthetic oligonucleotide
  Sense strand starting at position 2987 of SEQ ID NO: 316962
aaggaauugugauaccuug

SEQ ID NO: 453698 - RNA, 19 nt, Artificial Sequence
  Description of Artificial Sequence: Synthetic oligonucleotide
  Antisense Strand to SEQ ID NO: 453697
caagguaucacaauuccuu

SEQ ID NO: 453699 - RNA, 19 nt, Artificial Sequence
  Description of Artificial Sequence: Synthetic oligonucleotide
  Sense strand starting at position 2993 of SEQ ID NO: 316962
uugugauaccuugguuaua

SEQ ID NO: 453700 - RNA, 19 nt, Artificial Sequence
  Description of Artificial Sequence: Synthetic oligonucleotide
  Antisense Strand to SEQ ID NO: 453699
uauaaccaagguaucacaa

SEQ ID NO: 453701 - RNA, 19 nt, Artificial Sequence
  Description of Artificial Sequence: Synthetic oligonucleotide
  Sense strand starting at position 2994 of SEQ ID NO: 316962
ugugauaccuugguuauaa

SEQ ID NO: 453702 - RNA, 19 nt, Artificial Sequence
  Description of Artificial Sequence: Synthetic oligonucleotide
  Antisense Strand to SEQ ID NO: 453701
uuauaaccaagguaucaca

SEQ ID NO: 453703 - RNA, 19 nt, Artificial Sequence
  Description of Artificial Sequence: Synthetic oligonucleotide
  Sense strand starting at position 2995 of SEQ ID NO: 316962
gugauaccuugguuauaaa

SEQ ID NO: 453704 - RNA, 19 nt, Artificial Sequence
  Description of Artificial Sequence: Synthetic oligonucleotide
  Antisense Strand to SEQ ID NO: 453703
uuuauaaccaagguaucac

SEQ ID NO: 453705 - RNA, 19 nt, Artificial Sequence
  Description of Artificial Sequence: Synthetic oligonucleotide
  Sense strand starting at position 3021 of SEQ ID NO: 316962
uugggauaauaucagagau

SEQ ID NO: 453706 - RNA, 19 nt, Artificial Sequence
  Description of Artificial Sequence: Synthetic oligonucleotide
  Antisense Strand to SEQ ID NO: 453705
aucucugauauuaucccaa

SEQ ID NO: 453707 - RNA, 19 nt, Artificial Sequence
  Description of Artificial Sequence: Synthetic oligonucleotide
  Sense strand starting at position 3057 of SEQ ID NO: 316962
ugagguaugugaggaagga

SEQ ID NO: 453708 - RNA, 19 nt, Artificial Sequence
  Description of Artificial Sequence: Synthetic oligonucleotide
  Antisense Strand to SEQ ID NO: 453707
uccuuccucacauaccuca

SEQ ID NO: 453709 - RNA, 19 nt, Artificial Sequence
  Description of Artificial Sequence: Synthetic oligonucleotide
  Sense strand starting at position 3070 of SEQ ID NO: 316962
gaaggagaacuucguuguu

SEQ ID NO: 453710 - RNA, 19 nt, Artificial Sequence
  Description of Artificial Sequence: Synthetic oligonucleotide
  Antisense Strand to SEQ ID NO: 453709
aacaacgaaguucuccuuc

SEQ ID NO: 453711 - RNA, 19 nt, Artificial Sequence
  Description of Artificial Sequence: Synthetic oligonucleotide
  Sense strand starting at position 3229 of SEQ ID NO: 316962
uaaauaaagcuggguguga

SEQ ID NO: 453712 - RNA, 19 nt, Artificial Sequence
  Description of Artificial Sequence: Synthetic oligonucleotide
  Antisense Strand to SEQ ID NO: 453711
ucacacccagcuuuauuua

SEQ ID NO: 453713 - RNA, 19 nt, Artificial Sequence
  Description of Artificial Sequence: Synthetic oligonucleotide
  Sense strand starting at position 3230 of SEQ ID NO: 316962
aaauaaagcugggugugau

SEQ ID NO: 453714 - RNA, 19 nt, Artificial Sequence
  Description of Artificial Sequence: Synthetic oligonucleotide
  Antisense Strand to SEQ ID NO: 453713
aucacacccagcuuuauuu

SEQ ID NO: 453715 - RNA, 19 nt, Artificial Sequence
  Description of Artificial Sequence: Synthetic oligonucleotide
  Sense strand starting at position 3524 of SEQ ID NO: 316962
ugagccaggacuugucaaa

SEQ ID NO: 453716 - RNA, 19 nt, Artificial Sequence
  Description of Artificial Sequence: Synthetic oligonucleotide
  Antisense Strand to SEQ ID NO: 453715
uuugacaaguccuggcuca

SEQ ID NO: 453717 - RNA, 19 nt, Artificial Sequence
  Description of Artificial Sequence: Synthetic oligonucleotide
  Sense strand starting at position 3551 of SEQ ID NO: 316962
aaaggaaguuguuagagua

SEQ ID NO: 453718 - RNA, 19 nt, Artificial Sequence
  Description of Artificial Sequence: Synthetic oligonucleotide
  Antisense Strand to SEQ ID NO: 453717
uacucuaacaacuuccuuu

SEQ ID NO: 453719 - RNA, 19 nt, Artificial Sequence
  Description of Artificial Sequence: Synthetic oligonucleotide
  Sense strand starting at position 3741 of SEQ ID NO: 316962
agcaauggguauuacauuu

SEQ ID NO: 453720 - RNA, 19 nt, Artificial Sequence
  Description of Artificial Sequence: Synthetic oligonucleotide
  Antisense Strand to SEQ ID NO: 453719
aaauguaauacccauugcu

SEQ ID NO: 453721 - RNA, 19 nt, Artificial Sequence
  Description of Artificial Sequence: Synthetic oligonucleotide
  Sense strand starting at position 3770 of SEQ ID NO: 316962
uuguuuaaccuggacuacu

SEQ ID NO: 453722 - RNA, 19 nt, Artificial Sequence
  Description of Artificial Sequence: Synthetic oligonucleotide
  Antisense Strand to SEQ ID NO: 453721
aguaguccagguuaaacaa

SEQ ID NO: 453723 - RNA, 19 nt, Artificial Sequence
  Description of Artificial Sequence: Synthetic oligonucleotide
  Sense strand starting at position 3859 of SEQ ID NO: 316962
aauugauaggcuuggcucu

SEQ ID NO: 453724 - RNA, 19 nt, Artificial Sequence
  Description of Artificial Sequence: Synthetic oligonucleotide
  Antisense Strand to SEQ ID NO: 453723
agagccaagccuaucaauu

SEQ ID NO: 453725 - RNA, 19 nt, Artificial Sequence
  Description of Artificial Sequence: Synthetic oligonucleotide
  Sense strand starting at position 3860 of SEQ ID NO: 316962
auugauaggcuuggcucua

SEQ ID NO: 453726 - RNA, 19 nt, Artificial Sequence
  Description of Artificial Sequence: Synthetic oligonucleotide
  Antisense Strand to SEQ ID NO: 453725
uagagccaagccuaucaau

SEQ ID NO: 453727 - RNA, 19 nt, Artificial Sequence
  Description of Artificial Sequence: Synthetic oligonucleotide
  Sense strand starting at position 3861 of SEQ ID NO: 316962
uugauaggcuuggcucuau

SEQ ID NO: 453728 - RNA, 19 nt, Artificial Sequence
  Description of Artificial Sequence: Synthetic oligonucleotide
  Antisense Strand to SEQ ID NO: 453727
auagagccaagccuaucaa

SEQ ID NO: 453729 - RNA, 19 nt, Artificial Sequence
  Description of Artificial Sequence: Synthetic oligonucleotide
  Sense strand starting at position 3865 of SEQ ID NO: 316962
uaggcuuggcucuaugaac

SEQ ID NO: 453730 - RNA, 19 nt, Artificial Sequence
  Description of Artificial Sequence: Synthetic oligonucleotide
  Antisense Strand to SEQ ID NO: 453729
guucauagagccaagccua

SEQ ID NO: 453731 - RNA, 19 nt, Artificial Sequence
  Description of Artificial Sequence: Synthetic oligonucleotide
  Sense strand starting at position 3873 of SEQ ID NO: 316962
gcucuaugaaccuggagua

SEQ ID NO: 453732 - RNA, 19 nt, Artificial Sequence
  Description of Artificial Sequence: Synthetic oligonucleotide
  Antisense Strand to SEQ ID NO: 453731
uacuccagguucauagagc

SEQ ID NO: 453733 - RNA, 19 nt, Artificial Sequence
  Description of Artificial Sequence: Synthetic oligonucleotide
  Sense strand starting at position 3874 of SEQ ID NO: 316962
cucuaugaaccuggaguau

SEQ ID NO: 453734 - RNA, 19 nt, Artificial Sequence
  Description of Artificial Sequence: Synthetic oligonucleotide
  Antisense Strand to SEQ ID NO: 453733
auacuccagguucauagag

SEQ ID NO: 453735 - RNA, 19 nt, Artificial Sequence
  Description of Artificial Sequence: Synthetic oligonucleotide
  Sense strand starting at position 13 of SEQ ID NO: 316963
gggcuauggaacuaugcau

SEQ ID NO: 453736 - RNA, 19 nt, Artificial Sequence
  Description of Artificial Sequence: Synthetic oligonucleotide
  Antisense Strand to SEQ ID NO: 453735
augcauaguuccauagccc

SEQ ID NO: 453737 - RNA, 19 nt, Artificial Sequence
  Description of Artificial Sequence: Synthetic oligonucleotide
  Sense strand starting at position 364 of SEQ ID NO: 316963
uggucuacuccuuagcaau

SEQ ID NO: 453738 - RNA, 19 nt, Artificial Sequence
  Description of Artificial Sequence: Synthetic oligonucleotide
  Antisense Strand to SEQ ID NO: 453737
auugcuaaggaguagacca

SEQ ID NO: 453739 - RNA, 19 nt, Artificial Sequence
  Description of Artificial Sequence: Synthetic oligonucleotide
  Sense strand starting at position 387 of SEQ ID NO: 316963
auuucugcauuuggugaaa

SEQ ID NO: 453740 - RNA, 19 nt, Artificial Sequence
  Description of Artificial Sequence: Synthetic oligonucleotide
  Antisense Strand to SEQ ID NO: 453739
uuucaccaaaugcagaaau

SEQ ID NO: 453741 - RNA, 19 nt, Artificial Sequence
  Description of Artificial Sequence: Synthetic oligonucleotide
  Sense strand starting at position 402 of SEQ ID NO: 316963
gaaacuugguggccacuaa

SEQ ID NO: 453742 - RNA, 19 nt, Artificial Sequence
  Description of Artificial Sequence: Synthetic oligonucleotide
  Antisense Strand to SEQ ID NO: 453741
uuaguggccaccaaguuuc

SEQ ID NO: 453743 - RNA, 19 nt, Artificial Sequence
  Description of Artificial Sequence: Synthetic oligonucleotide
  Sense strand starting at position 406 of SEQ ID NO: 316963
cuugguggccacuaagauu

SEQ ID NO: 453744 - RNA, 19 nt, Artificial Sequence
  Description of Artificial Sequence: Synthetic oligonucleotide
  Antisense Strand to SEQ ID NO: 453743
aaucuuaguggccaccaag

SEQ ID NO: 453745 - RNA, 19 nt, Artificial Sequence
  Description of Artificial Sequence: Synthetic oligonucleotide
  Sense strand starting at position 460 of SEQ ID NO: 316963
acaagauuguugccaaccu

SEQ ID NO: 453746 - RNA, 19 nt, Artificial Sequence
  Description of Artificial Sequence: Synthetic oligonucleotide
  Antisense Strand to SEQ ID NO: 453745
agguuggcaacaaucuugu

SEQ ID NO: 453747 - RNA, 19 nt, Artificial Sequence
  Description of Artificial Sequence: Synthetic oligonucleotide
  Sense strand starting at position 546 of SEQ ID NO: 316963
cgguaauugccauauauua

SEQ ID NO: 453748 - RNA, 19 nt, Artificial Sequence
  Description of Artificial Sequence: Synthetic oligonucleotide
  Antisense Strand to SEQ ID NO: 453747
uaauauauggcaauuaccg

SEQ ID NO: 453749 - RNA, 19 nt, Artificial Sequence
  Description of Artificial Sequence: Synthetic oligonucleotide
  Sense strand starting at position 825 of SEQ ID NO: 316963
uuccauucccgacauaaug

SEQ ID NO: 453750 - RNA, 19 nt, Artificial Sequence
  Description of Artificial Sequence: Synthetic oligonucleotide
  Antisense Strand to SEQ ID NO: 453749
cauuaugucgggaauggaa

SEQ ID NO: 453751 - RNA, 19 nt, Artificial Sequence
  Description of Artificial Sequence: Synthetic oligonucleotide
  Sense strand starting at position 1021 of SEQ ID NO: 316963
ucuguacauuuauagagga

SEQ ID NO: 453752 - RNA, 19 nt, Artificial Sequence
  Description of Artificial Sequence: Synthetic oligonucleotide
  Antisense Strand to SEQ ID NO: 453751
uccucuauaaauguacaga

SEQ ID NO: 453753 - RNA, 19 nt, Artificial Sequence
  Description of Artificial Sequence: Synthetic oligonucleotide
  Sense strand starting at position 1073 of SEQ ID NO: 316963
ugggcaauuuaauagagaa

SEQ ID NO: 453754 - RNA, 19 nt, Artificial Sequence
  Description of Artificial Sequence: Synthetic oligonucleotide
  Antisense Strand to SEQ ID NO: 453753
uucucuauuaaauugccca

SEQ ID NO: 453755 - RNA, 19 nt, Artificial Sequence
  Description of Artificial Sequence: Synthetic oligonucleotide
  Sense strand starting at position 1110 of SEQ ID NO: 316963
cugcaaccuccucaggaau

SEQ ID NO: 453756 - RNA, 19 nt, Artificial Sequence
  Description of Artificial Sequence: Synthetic oligonucleotide
  Antisense Strand to SEQ ID NO: 453755
auuccugaggagguugcag

SEQ ID NO: 453757 - RNA, 19 nt, Artificial Sequence
  Description of Artificial Sequence: Synthetic oligonucleotide
  Sense strand starting at position 1213 of SEQ ID NO: 316963
ugguguaaauaucuacaua

SEQ ID NO: 453758 - RNA, 19 nt, Artificial Sequence
  Description of Artificial Sequence: Synthetic oligonucleotide
  Antisense Strand to SEQ ID NO: 453757
uauguagauauuuacacca

SEQ ID NO: 453759 - RNA, 19 nt, Artificial Sequence
  Description of Artificial Sequence: Synthetic oligonucleotide
  Sense strand starting at position 1351 of SEQ ID NO: 316963
agguuauauuagucaucac

SEQ ID NO: 453760 - RNA, 19 nt, Artificial Sequence
  Description of Artificial Sequence: Synthetic oligonucleotide
  Antisense Strand to SEQ ID NO: 453759
gugaugacuaauauaaccu

SEQ ID NO: 453761 - RNA, 19 nt, Artificial Sequence
  Description of Artificial Sequence: Synthetic oligonucleotide
  Sense strand starting at position 1388 of SEQ ID NO: 316963
gaccacuuauguguuagaa

SEQ ID NO: 453762 - RNA, 19 nt, Artificial Sequence
  Description of Artificial Sequence: Synthetic oligonucleotide
  Antisense Strand to SEQ ID NO: 453761
uucuaacacauaagugguc

SEQ ID NO: 453763 - RNA, 19 nt, Artificial Sequence
  Description of Artificial Sequence: Synthetic oligonucleotide
  Sense strand starting at position 1398 of SEQ ID NO: 316963
guguuagaaauuuggcuuu

SEQ ID NO: 453764 - RNA, 19 nt, Artificial Sequence
  Description of Artificial Sequence: Synthetic oligonucleotide
  Antisense Strand to SEQ ID NO: 453763
aaagccaaauuucuaacac

SEQ ID NO: 453765 - RNA, 19 nt, Artificial Sequence
  Description of Artificial Sequence: Synthetic oligonucleotide
  Sense strand starting at position 1468 of SEQ ID NO: 316963
cuguuaggacaguaucuua

SEQ ID NO: 453766 - RNA, 19 nt, Artificial Sequence
  Description of Artificial Sequence: Synthetic oligonucleotide
  Antisense Strand to SEQ ID NO: 453765
uaagauacuguccuaacag

SEQ ID NO: 453767 - RNA, 19 nt, Artificial Sequence
  Description of Artificial Sequence: Synthetic oligonucleotide
  Sense strand starting at position 1477 of SEQ ID NO: 316963
caguaucuuagguggagga

SEQ ID NO: 453768 - RNA, 19 nt, Artificial Sequence
  Description of Artificial Sequence: Synthetic oligonucleotide
  Antisense Strand to SEQ ID NO: 453767
uccuccaccuaagauacug

SEQ ID NO: 453769 - RNA, 19 nt, Artificial Sequence
  Description of Artificial Sequence: Synthetic oligonucleotide
  Sense strand starting at position 1501 of SEQ ID NO: 316963
ucaugaagcauguaggagu

SEQ ID NO: 453770 - RNA, 19 nt, Artificial Sequence
  Description of Artificial Sequence: Synthetic oligonucleotide
  Antisense Strand to SEQ ID NO: 453769
acuccuacaugcuucauga

SEQ ID NO: 453771 - RNA, 19 nt, Artificial Sequence
  Description of Artificial Sequence: Synthetic oligonucleotide
  Sense strand starting at position 1525 of SEQ ID NO: 316963
auaagagaggcuugcuuua

SEQ ID NO: 453772 - RNA, 19 nt, Artificial Sequence
  Description of Artificial Sequence: Synthetic oligonucleotide
  Antisense Strand to SEQ ID NO: 453771
uaaagcaagccucucuuau

SEQ ID NO: 453773 - RNA, 19 nt, Artificial Sequence
  Description of Artificial Sequence: Synthetic oligonucleotide
  Sense strand starting at position 1527 of SEQ ID NO: 316963
aagagaggcuugcuuuaac

SEQ ID NO: 453774 - RNA, 19 nt, Artificial Sequence
  Description of Artificial Sequence: Synthetic oligonucleotide
  Antisense Strand to SEQ ID NO: 453773
guuaaagcaagccucucuu

SEQ ID NO: 453775 - RNA, 19 nt, Artificial Sequence
  Description of Artificial Sequence: Synthetic oligonucleotide
  Sense strand starting at position 1536 of SEQ ID NO: 316963
uugcuuuaacuggagaacu

SEQ ID NO: 453776 - RNA, 19 nt, Artificial Sequence
  Description of Artificial Sequence: Synthetic oligonucleotide
  Antisense Strand to SEQ ID NO: 453775
aguucuccaguuaaagcaa

SEQ ID NO: 453777 - RNA, 19 nt, Artificial Sequence
  Description of Artificial Sequence: Synthetic oligonucleotide
  Sense strand starting at position 1563 of SEQ ID NO: 316963
uucagauggugaguuagga

SEQ ID NO: 453778 - RNA, 19 nt, Artificial Sequence
  Description of Artificial Sequence: Synthetic oligonucleotide
  Antisense Strand to SEQ ID NO: 453777
uccuaacucaccaucugaa

SEQ ID NO: 453779 - RNA, 19 nt, Artificial Sequence
  Description of Artificial Sequence: Synthetic oligonucleotide
  Sense strand starting at position 2067 of SEQ ID NO: 316963
gccagauagcaauaucaga

SEQ ID NO: 453780 - RNA, 19 nt, Artificial Sequence
  Description of Artificial Sequence: Synthetic oligonucleotide
  Antisense Strand to SEQ ID NO: 453779
ucugauauugcuaucuggc

SEQ ID NO: 453781 - RNA, 19 nt, Artificial Sequence
  Description of Artificial Sequence: Synthetic oligonucleotide
  Sense strand starting at position 2086 of SEQ ID NO: 316963
gccaauucuagugauggca

SEQ ID NO: 453782 - RNA, 19 nt, Artificial Sequence
  Description of Artificial Sequence: Synthetic oligonucleotide
  Antisense Strand to SEQ ID NO: 453781
ugccaucacuagaauuggc

SEQ ID NO: 453783 - RNA, 19 nt, Artificial Sequence
  Description of Artificial Sequence: Synthetic oligonucleotide
  Sense strand starting at position 2246 of SEQ ID NO: 316963
auuaaauagccauggugga

SEQ ID NO: 453784 - RNA, 19 nt, Artificial Sequence
  Description of Artificial Sequence: Synthetic oligonucleotide
  Antisense Strand to SEQ ID NO: 453783
uccaccauggcuauuuaau

SEQ ID NO: 453785 - RNA, 19 nt, Artificial Sequence
  Description of Artificial Sequence: Synthetic oligonucleotide
  Sense strand starting at position 2386 of SEQ ID NO: 316963
uggacaugucucuacuauu

SEQ ID NO: 453786 - RNA, 19 nt, Artificial Sequence
  Description of Artificial Sequence: Synthetic oligonucleotide
  Antisense Strand to SEQ ID NO: 453785
aauaguagagacaugucca

SEQ ID NO: 453787 - RNA, 19 nt, Artificial Sequence
  Description of Artificial Sequence: Synthetic oligonucleotide
  Sense strand starting at position 2409 of SEQ ID NO: 316963
guccaaaccagagguuaga

SEQ ID NO: 453788 - RNA, 19 nt, Artificial Sequence
  Description of Artificial Sequence: Synthetic oligonucleotide
  Antisense Strand to SEQ ID NO: 453787
ucuaaccucugguuuggac

SEQ ID NO: 453789 - RNA, 19 nt, Artificial Sequence
  Description of Artificial Sequence: Synthetic oligonucleotide
  Sense strand starting at position 2589 of SEQ ID NO: 316963
gcauaagaugaauguccaa

SEQ ID NO: 453790 - RNA, 19 nt, Artificial Sequence
  Description of Artificial Sequence: Synthetic oligonucleotide
  Antisense Strand to SEQ ID NO: 453789
uuggacauucaucuuaugc

SEQ ID NO: 453791 - RNA, 19 nt, Artificial Sequence
  Description of Artificial Sequence: Synthetic oligonucleotide
  Sense strand starting at position 2827 of SEQ ID NO: 316963
ccagguaaucagcauugau

SEQ ID NO: 453792 - RNA, 19 nt, Artificial Sequence
  Description of Artificial Sequence: Synthetic oligonucleotide
  Antisense Strand to SEQ ID NO: 453791
aucaaugcugauuaccugg

SEQ ID NO: 453793 - RNA, 19 nt, Artificial Sequence
  Description of Artificial Sequence: Synthetic oligonucleotide
  Sense strand starting at position 2830 of SEQ ID NO: 316963
gguaaucagcauugauaaa

SEQ ID NO: 453794 - RNA, 19 nt, Artificial Sequence
  Description of Artificial Sequence: Synthetic oligonucleotide
  Antisense Strand to SEQ ID NO: 453793
uuuaucaaugcugauuacc

SEQ ID NO: 453795 - RNA, 19 nt, Artificial Sequence
  Description of Artificial Sequence: Synthetic oligonucleotide
  Sense strand starting at position 2874 of SEQ ID NO: 316963
agagaaaguuccuccucau

SEQ ID NO: 453796 - RNA, 19 nt, Artificial Sequence
  Description of Artificial Sequence: Synthetic oligonucleotide
  Antisense Strand to SEQ ID NO: 453795
augaggaggaacuuucucu

SEQ ID NO: 453797 - RNA, 19 nt, Artificial Sequence
  Description of Artificial Sequence: Synthetic oligonucleotide
  Sense strand starting at position 2941 of SEQ ID NO: 316963
uguuacgauauauaagguu

SEQ ID NO: 453798 - RNA, 19 nt, Artificial Sequence
  Description of Artificial Sequence: Synthetic oligonucleotide
  Antisense Strand to SEQ ID NO: 453797
aaccuuauauaucguaaca

SEQ ID NO: 453799 - RNA, 19 nt, Artificial Sequence
  Description of Artificial Sequence: Synthetic oligonucleotide
  Sense strand starting at position 3019 of SEQ ID NO: 316963
agcagcuugcgugcauaaa

SEQ ID NO: 453800 - RNA, 19 nt, Artificial Sequence
  Description of Artificial Sequence: Synthetic oligonucleotide
  Antisense Strand to SEQ ID NO: 453799
uuuaugcacgcaagcugcu

SEQ ID NO: 453801 - RNA, 19 nt, Artificial Sequence
  Description of Artificial Sequence: Synthetic oligonucleotide
  Sense strand starting at position 3180 of SEQ ID NO: 316963
uuucuuccaguguauaaug

SEQ ID NO: 453802 - RNA, 19 nt, Artificial Sequence
  Description of Artificial Sequence: Synthetic oligonucleotide
  Antisense Strand to SEQ ID NO: 453801
cauuauacacuggaagaaa

SEQ ID NO: 453803 - RNA, 19 nt, Artificial Sequence
  Description of Artificial Sequence: Synthetic oligonucleotide
  Sense strand starting at position 3260 of SEQ ID NO: 316963
ggaacaagugccuagcuuu

SEQ ID NO: 453804 - RNA, 19 nt, Artificial Sequence
  Description of Artificial Sequence: Synthetic oligonucleotide
  Antisense Strand to SEQ ID NO: 453803
aaagcuaggcacuuguucc

SEQ ID NO: 453805 - RNA, 19 nt, Artificial Sequence
  Description of Artificial Sequence: Synthetic oligonucleotide
  Sense strand starting at position 3420 of SEQ ID NO: 316963
gcuugucagaguuacagag

SEQ ID NO: 453806 - RNA, 19 nt, Artificial Sequence
  Description of Artificial Sequence: Synthetic oligonucleotide
  Antisense Strand to SEQ ID NO: 453805
cucuguaacucugacaagc

SEQ ID NO: 453807 - RNA, 19 nt, Artificial Sequence
  Description of Artificial Sequence: Synthetic oligonucleotide
  Sense strand starting at position 3499 of SEQ ID NO: 316963
uguguuaagcaaugaagau

SEQ ID NO: 453808 - RNA, 19 nt, Artificial Sequence
  Description of Artificial Sequence: Synthetic oligonucleotide
  Antisense Strand to SEQ ID NO: 453807
aucuucauugcuuaacaca

SEQ ID NO: 453809 - RNA, 19 nt, Artificial Sequence
  Description of Artificial Sequence: Synthetic oligonucleotide
  Sense strand starting at position 3500 of SEQ ID NO: 316963
guguuaagcaaugaagauu

SEQ ID NO: 453810 - RNA, 19 nt, Artificial Sequence
  Description of Artificial Sequence: Synthetic oligonucleotide
  Antisense Strand to SEQ ID NO: 453809
aaucuucauugcuuaacac

SEQ ID NO: 453811 - RNA, 19 nt, Artificial Sequence
  Description of Artificial Sequence: Synthetic oligonucleotide
  Sense strand starting at position 3735 of SEQ ID NO: 316963
ucuggauugcuagauguuc

SEQ ID NO: 453812 - RNA, 19 nt, Artificial Sequence
  Description of Artificial Sequence: Synthetic oligonucleotide
  Antisense Strand to SEQ ID NO: 453811
gaacaucuagcaauccaga

SEQ ID NO: 453813 - RNA, 19 nt, Artificial Sequence
  Description of Artificial Sequence: Synthetic oligonucleotide
  Sense strand starting at position 3938 of SEQ ID NO: 316963
cuucuacuaguauaugagu

SEQ ID NO: 453814 - RNA, 19 nt, Artificial Sequence
  Description of Artificial Sequence: Synthetic oligonucleotide
  Antisense Strand to SEQ ID NO: 453813
acucauauacuaguagaag

SEQ ID NO: 453815 - RNA, 19 nt, Artificial Sequence
  Description of Artificial Sequence: Synthetic oligonucleotide
  Sense strand starting at position 149 of SEQ ID NO: 316964
aagucaucgccagugcuua

SEQ ID NO: 453816 - RNA, 19 nt, Artificial Sequence
  Description of Artificial Sequence: Synthetic oligonucleotide
  Antisense Strand to SEQ ID NO: 453815
uaagcacuggcgaugacuu

SEQ ID NO: 453817 - RNA, 19 nt, Artificial Sequence
  Description of Artificial Sequence: Synthetic oligonucleotide
  Sense strand starting at position 233 of SEQ ID NO: 316964
acaacagggugauccuuaa

SEQ ID NO: 453818 - RNA, 19 nt, Artificial Sequence
  Description of Artificial Sequence: Synthetic oligonucleotide
  Antisense Strand to SEQ ID NO: 453817
uuaaggaucacccuguugu

SEQ ID NO: 453819 - RNA, 19 nt, Artificial Sequence
  Description of Artificial Sequence: Synthetic oligonucleotide
  Sense strand starting at position 558 of SEQ ID NO: 316964
ucuccugacugccugaauu

SEQ ID NO: 453820 - RNA, 19 nt, Artificial Sequence
  Description of Artificial Sequence: Synthetic oligonucleotide
  Antisense Strand to SEQ ID NO: 453819
aauucaggcagucaggaga

SEQ ID NO: 453821 - RNA, 19 nt, Artificial Sequence
  Description of Artificial Sequence: Synthetic oligonucleotide
  Sense strand starting at position 560 of SEQ ID NO: 316964
uccugacugccugaauuga

SEQ ID NO: 453822 - RNA, 19 nt, Artificial Sequence
  Description of Artificial Sequence: Synthetic oligonucleotide
  Antisense Strand to SEQ ID NO: 453821
ucaauucaggcagucagga

SEQ ID NO: 453823 - RNA, 19 nt, Artificial Sequence
  Description of Artificial Sequence: Synthetic oligonucleotide
  Sense strand starting at position 648 of SEQ ID NO: 316964
aucuccagugcuuaaugaa

SEQ ID NO: 453824 - RNA, 19 nt, Artificial Sequence
  Description of Artificial Sequence: Synthetic oligonucleotide
  Antisense Strand to SEQ ID NO: 453823
uucauuaagcacuggagau

SEQ ID NO: 453825 - RNA, 19 nt, Artificial Sequence
  Description of Artificial Sequence: Synthetic oligonucleotide
  Sense strand starting at position 699 of SEQ ID NO: 316964
auaugaaugucagaaauca

SEQ ID NO: 453826 - RNA, 19 nt, Artificial Sequence
  Description of Artificial Sequence: Synthetic oligonucleotide
  Antisense Strand to SEQ ID NO: 453825
ugauuucugacauucauau

SEQ ID NO: 453827 - RNA, 19 nt, Artificial Sequence
  Description of Artificial Sequence: Synthetic oligonucleotide
  Sense strand starting at position 707 of SEQ ID NO: 316964
gucagaaaucacugucuga

SEQ ID NO: 453828 - RNA, 19 nt, Artificial Sequence
  Description of Artificial Sequence: Synthetic oligonucleotide
  Antisense Strand to SEQ ID NO: 453827
ucagacagugauuucugac

SEQ ID NO: 453829 - RNA, 19 nt, Artificial Sequence
  Description of Artificial Sequence: Synthetic oligonucleotide
  Sense strand starting at position 711 of SEQ ID NO: 316964
gaaaucacugucugagagu

SEQ ID NO: 453830 - RNA, 19 nt, Artificial Sequence
  Description of Artificial Sequence: Synthetic oligonucleotide
  Antisense Strand to SEQ ID NO: 453829
acucucagacagugauuuc

SEQ ID NO: 453831 - RNA, 19 nt, Artificial Sequence
  Description of Artificial Sequence: Synthetic oligonucleotide
  Sense strand starting at position 717 of SEQ ID NO: 316964
acugucugagaguauuauu

SEQ ID NO: 453832 - RNA, 19 nt, Artificial Sequence
  Description of Artificial Sequence: Synthetic oligonucleotide
  Antisense Strand to SEQ ID NO: 453831
aauaauacucucagacagu

SEQ ID NO: 453833 - RNA, 19 nt, Artificial Sequence
  Description of Artificial Sequence: Synthetic oligonucleotide
  Sense strand starting at position 740 of SEQ ID NO: 316964
acuuuagucuugguacaau

SEQ ID NO: 453834 - RNA, 19 nt, Artificial Sequence
  Description of Artificial Sequence: Synthetic oligonucleotide
  Antisense Strand to SEQ ID NO: 453833
auuguaccaagacuaaagu

SEQ ID NO: 453835 - RNA, 19 nt, Artificial Sequence
  Description of Artificial Sequence: Synthetic oligonucleotide
  Sense strand starting at position 940 of SEQ ID NO: 316964
acuuauauccagggcaaag

SEQ ID NO: 453836 - RNA, 19 nt, Artificial Sequence
  Description of Artificial Sequence: Synthetic oligonucleotide
  Antisense Strand to SEQ ID NO: 453835
cuuugcccuggauauaagu

SEQ ID NO: 453837 - RNA, 19 nt, Artificial Sequence
  Description of Artificial Sequence: Synthetic oligonucleotide
  Sense strand starting at position 989 of SEQ ID NO: 316964
ugugccuagcaagaauauu

SEQ ID NO: 453838 - RNA, 19 nt, Artificial Sequence
  Description of Artificial Sequence: Synthetic oligonucleotide
  Antisense Strand to SEQ ID NO: 453837
aauauucuugcuaggcaca

SEQ ID NO: 453839 - RNA, 19 nt, Artificial Sequence
  Description of Artificial Sequence: Synthetic oligonucleotide
  Sense strand starting at position 1031 of SEQ ID NO: 316964
auagauuagagccgagacu

SEQ ID NO: 453840 - RNA, 19 nt, Artificial Sequence
  Description of Artificial Sequence: Synthetic oligonucleotide
  Antisense Strand to SEQ ID NO: 453839
agucucggcucuaaucuau

SEQ ID NO: 453841 - RNA, 19 nt, Artificial Sequence
  Description of Artificial Sequence: Synthetic oligonucleotide
  Sense strand starting at position 1084 of SEQ ID NO: 316964
uucugauucuuaguagcua

SEQ ID NO: 453842 - RNA, 19 nt, Artificial Sequence
  Description of Artificial Sequence: Synthetic oligonucleotide
  Antisense Strand to SEQ ID NO: 453841
uagcuacuaagaaucagaa

SEQ ID NO: 453843 - RNA, 19 nt, Artificial Sequence
  Description of Artificial Sequence: Synthetic oligonucleotide
  Sense strand starting at position 1175 of SEQ ID NO: 316964
uguagugugccauacagaa

SEQ ID NO: 453844 - RNA, 19 nt, Artificial Sequence
  Description of Artificial Sequence: Synthetic oligonucleotide
  Antisense Strand to SEQ ID NO: 453843
uucuguauggcacacuaca

SEQ ID NO: 453845 - RNA, 19 nt, Artificial Sequence
  Description of Artificial Sequence: Synthetic oligonucleotide
  Sense strand starting at position 1202 of SEQ ID NO: 316964
gucacauauuaaguccuua

SEQ ID NO: 453846 - RNA, 19 nt, Artificial Sequence
  Description of Artificial Sequence: Synthetic oligonucleotide
  Antisense Strand to SEQ ID NO: 453845
uaaggacuuaauaugugac

SEQ ID NO: 453847 - RNA, 19 nt, Artificial Sequence
  Description of Artificial Sequence: Synthetic oligonucleotide
  Sense strand starting at position 1338 of SEQ ID NO: 316964
agcuucuuuccaugaaagg

SEQ ID NO: 453848 - RNA, 19 nt, Artificial Sequence
  Description of Artificial Sequence: Synthetic oligonucleotide
  Antisense Strand to SEQ ID NO: 453847
ccuuucauggaaagaagcu

SEQ ID NO: 453849 - RNA, 19 nt, Artificial Sequence
  Description of Artificial Sequence: Synthetic oligonucleotide
  Sense strand starting at position 1339 of SEQ ID NO: 316964
gcuucuuuccaugaaaggu

SEQ ID NO: 453850 - RNA, 19 nt, Artificial Sequence
  Description of Artificial Sequence: Synthetic oligonucleotide
  Antisense Strand to SEQ ID NO: 453849
accuuucauggaaagaagc

SEQ ID NO: 453851 - RNA, 19 nt, Artificial Sequence
  Description of Artificial Sequence: Synthetic oligonucleotide
  Sense strand starting at position 1463 of SEQ ID NO: 316964
acgugaaacccuuaaucca

SEQ ID NO: 453852 - RNA, 19 nt, Artificial Sequence
  Description of Artificial Sequence: Synthetic oligonucleotide
  Antisense Strand to SEQ ID NO: 453851
uggauuaaggguuucacgu

SEQ ID NO: 453853 - RNA, 19 nt, Artificial Sequence
  Description of Artificial Sequence: Synthetic oligonucleotide
  Sense strand starting at position 1774 of SEQ ID NO: 316964
cuuaaauauuuagggucaa

SEQ ID NO: 453854 - RNA, 19 nt, Artificial Sequence
  Description of Artificial Sequence: Synthetic oligonucleotide
  Antisense Strand to SEQ ID NO: 453853
uugacccuaaauauuuaag

SEQ ID NO: 453855 - RNA, 19 nt, Artificial Sequence
  Description of Artificial Sequence: Synthetic oligonucleotide
  Sense strand starting at position 1834 of SEQ ID NO: 316964
auacguaauaugggaugca

SEQ ID NO: 453856 - RNA, 19 nt, Artificial Sequence
  Description of Artificial Sequence: Synthetic oligonucleotide
  Antisense Strand to SEQ ID NO: 453855
ugcaucccauauuacguau

SEQ ID NO: 453857 - RNA, 19 nt, Artificial Sequence
  Description of Artificial Sequence: Synthetic oligonucleotide
  Sense strand starting at position 1837 of SEQ ID NO: 316964
cguaauaugggaugcaguu

SEQ ID NO: 453858 - RNA, 19 nt, Artificial Sequence
  Description of Artificial Sequence: Synthetic oligonucleotide
  Antisense Strand to SEQ ID NO: 453857
aacugcaucccauauuacg

SEQ ID NO: 453859 - RNA, 19 nt, Artificial Sequence
  Description of Artificial Sequence: Synthetic oligonucleotide
  Sense strand starting at position 1998 of SEQ ID NO: 316964
aucuguugccauggaguca

SEQ ID NO: 453860 - RNA, 19 nt, Artificial Sequence
  Description of Artificial Sequence: Synthetic oligonucleotide
  Antisense Strand to SEQ ID NO: 453859
ugacuccauggcaacagau

SEQ ID NO: 453861 - RNA, 19 nt, Artificial Sequence
  Description of Artificial Sequence: Synthetic oligonucleotide
  Sense strand starting at position 1999 of SEQ ID NO: 316964
ucuguugccauggagucau

SEQ ID NO: 453862 - RNA, 19 nt, Artificial Sequence
  Description of Artificial Sequence: Synthetic oligonucleotide
  Antisense Strand to SEQ ID NO: 453861
augacuccauggcaacaga

SEQ ID NO: 453863 - RNA, 19 nt, Artificial Sequence
  Description of Artificial Sequence: Synthetic oligonucleotide
  Sense strand starting at position 2003 of SEQ ID NO: 316964
uugccauggagucauaaug

SEQ ID NO: 453864 - RNA, 19 nt, Artificial Sequence
  Description of Artificial Sequence: Synthetic oligonucleotide
  Antisense Strand to SEQ ID NO: 453863
cauuaugacuccauggcaa

SEQ ID NO: 453865 - RNA, 19 nt, Artificial Sequence
  Description of Artificial Sequence: Synthetic oligonucleotide
  Sense strand starting at position 2042 of SEQ ID NO: 316964
cauaauuaacagugaucga

SEQ ID NO: 453866 - RNA, 19 nt, Artificial Sequence
  Description of Artificial Sequence: Synthetic oligonucleotide
  Antisense Strand to SEQ ID NO: 453865
ucgaucacuguuaauuaug

SEQ ID NO: 453867 - RNA, 19 nt, Artificial Sequence
  Description of Artificial Sequence: Synthetic oligonucleotide
  Sense strand starting at position 2072 of SEQ ID NO: 316964
gcuaacauguuaccaagua

SEQ ID NO: 453868 - RNA, 19 nt, Artificial Sequence
  Description of Artificial Sequence: Synthetic oligonucleotide
  Antisense Strand to SEQ ID NO: 453867
uacuugguaacauguuagc

SEQ ID NO: 453869 - RNA, 19 nt, Artificial Sequence
  Description of Artificial Sequence: Synthetic oligonucleotide
  Sense strand starting at position 2079 of SEQ ID NO: 316964
uguuaccaaguaugaaaua

SEQ ID NO: 453870 - RNA, 19 nt, Artificial Sequence
  Description of Artificial Sequence: Synthetic oligonucleotide
  Antisense Strand to SEQ ID NO: 453869
uauuucauacuugguaaca

SEQ ID NO: 453871 - RNA, 19 nt, Artificial Sequence
  Description of Artificial Sequence: Synthetic oligonucleotide
  Sense strand starting at position 2195 of SEQ ID NO: 316964
cuaauuggauacucaguau

SEQ ID NO: 453872 - RNA, 19 nt, Artificial Sequence
  Description of Artificial Sequence: Synthetic oligonucleotide
  Antisense Strand to SEQ ID NO: 453871
auacugaguauccaauuag

SEQ ID NO: 453873 - RNA, 19 nt, Artificial Sequence
  Description of Artificial Sequence: Synthetic oligonucleotide
  Sense strand starting at position 2424 of SEQ ID NO: 316964
aaaggagccgagugugauu

SEQ ID NO: 453874 - RNA, 19 nt, Artificial Sequence
  Description of Artificial Sequence: Synthetic oligonucleotide
  Antisense Strand to SEQ ID NO: 453873
aaucacacucggcuccuuu

SEQ ID NO: 453875 - RNA, 19 nt, Artificial Sequence
  Description of Artificial Sequence: Synthetic oligonucleotide
  Sense strand starting at position 2613 of SEQ ID NO: 316964
uugagcuguguuuaaauua

SEQ ID NO: 453876 - RNA, 19 nt, Artificial Sequence
  Description of Artificial Sequence: Synthetic oligonucleotide
  Antisense Strand to SEQ ID NO: 453875
uaauuuaaacacagcucaa

SEQ ID NO: 453877 - RNA, 19 nt, Artificial Sequence
  Description of Artificial Sequence: Synthetic oligonucleotide
  Sense strand starting at position 2771 of SEQ ID NO: 316964
uaguaaugagugugcuuaa

SEQ ID NO: 453878 - RNA, 19 nt, Artificial Sequence
  Description of Artificial Sequence: Synthetic oligonucleotide
  Antisense Strand to SEQ ID NO: 453877
uuaagcacacucauuacua

SEQ ID NO: 453879 - RNA, 19 nt, Artificial Sequence
  Description of Artificial Sequence: Synthetic oligonucleotide
  Sense strand starting at position 2772 of SEQ ID NO: 316964
aguaaugagugugcuuaaa

SEQ ID NO: 453880 - RNA, 19 nt, Artificial Sequence
  Description of Artificial Sequence: Synthetic oligonucleotide
  Antisense Strand to SEQ ID NO: 453879
uuuaagcacacucauuacu

SEQ ID NO: 453881 - RNA, 19 nt, Artificial Sequence
  Description of Artificial Sequence: Synthetic oligonucleotide
  Sense strand starting at position 2792 of SEQ ID NO: 316964
caauccucucaguggugua

SEQ ID NO: 453882 - RNA, 19 nt, Artificial Sequence
  Description of Artificial Sequence: Synthetic oligonucleotide
  Antisense Strand to SEQ ID NO: 453881
uacaccacugagaggauug

SEQ ID NO: 453883 - RNA, 19 nt, Artificial Sequence
  Description of Artificial Sequence: Synthetic oligonucleotide
  Sense strand starting at position 2886 of SEQ ID NO: 316964
ucacuuaguuguguuauaa

SEQ ID NO: 453884 - RNA, 19 nt, Artificial Sequence
  Description of Artificial Sequence: Synthetic oligonucleotide
  Antisense Strand to SEQ ID NO: 453883
uuauaacacaacuaaguga

SEQ ID NO: 453885 - RNA, 19 nt, Artificial Sequence
  Description of Artificial Sequence: Synthetic oligonucleotide
  Sense strand starting at position 3193 of SEQ ID NO: 316964
augggaaguacguguauua

SEQ ID NO: 453886 - RNA, 19 nt, Artificial Sequence
  Description of Artificial Sequence: Synthetic oligonucleotide
  Antisense Strand to SEQ ID NO: 453885
uaauacacguacuucccau

SEQ ID NO: 453887 - RNA, 19 nt, Artificial Sequence
  Description of Artificial Sequence: Synthetic oligonucleotide
  Sense strand starting at position 3279 of SEQ ID NO: 316964
gagauacugcugugaugac

SEQ ID NO: 453888 - RNA, 19 nt, Artificial Sequence
  Description of Artificial Sequence: Synthetic oligonucleotide
  Antisense Strand to SEQ ID NO: 453887
gucaucacagcaguaucuc

SEQ ID NO: 453889 - RNA, 19 nt, Artificial Sequence
  Description of Artificial Sequence: Synthetic oligonucleotide
  Sense strand starting at position 3324 of SEQ ID NO: 316964
aagcaaguccuuuggagua

SEQ ID NO: 453890 - RNA, 19 nt, Artificial Sequence
  Description of Artificial Sequence: Synthetic oligonucleotide
  Antisense Strand to SEQ ID NO: 453889
uacuccaaaggacuugcuu

SEQ ID NO: 453891 - RNA, 19 nt, Artificial Sequence
  Description of Artificial Sequence: Synthetic oligonucleotide
  Sense strand starting at position 3329 of SEQ ID NO: 316964
aguccuuuggaguaaaugu

SEQ ID NO: 453892 - RNA, 19 nt, Artificial Sequence
  Description of Artificial Sequence: Synthetic oligonucleotide
  Antisense Strand to SEQ ID NO: 453891
acauuuacuccaaaggacu

SEQ ID NO: 453893 - RNA, 19 nt, Artificial Sequence
  Description of Artificial Sequence: Synthetic oligonucleotide
  Sense strand starting at position 3426 of SEQ ID NO: 316964
aaguuagugugacccaaga

SEQ ID NO: 453894 - RNA, 19 nt, Artificial Sequence
  Description of Artificial Sequence: Synthetic oligonucleotide
  Antisense Strand to SEQ ID NO: 453893
ucuugggucacacuaacuu

SEQ ID NO: 453895 - RNA, 19 nt, Artificial Sequence
  Description of Artificial Sequence: Synthetic oligonucleotide
  Sense strand starting at position 13 of SEQ ID NO: 316965
cauaauuaacagugaucga

SEQ ID NO: 453896 - RNA, 19 nt, Artificial Sequence
  Description of Artificial Sequence: Synthetic oligonucleotide
  Antisense Strand to SEQ ID NO: 453895
ucgaucacuguuaauuaug

SEQ ID NO: 453897 - RNA, 19 nt, Artificial Sequence
  Description of Artificial Sequence: Synthetic oligonucleotide
  Sense strand starting at position 43 of SEQ ID NO: 316965
gcuaacauguuaccaagua

SEQ ID NO: 453898 - RNA, 19 nt, Artificial Sequence
  Description of Artificial Sequence: Synthetic oligonucleotide
  Antisense Strand to SEQ ID NO: 453897
uacuugguaacauguuagc

SEQ ID NO: 453899 - RNA, 19 nt, Artificial Sequence
  Description of Artificial Sequence: Synthetic oligonucleotide
  Sense strand starting at position 50 of SEQ ID NO: 316965
uguuaccaaguaugaaaua

SEQ ID NO: 453900 - RNA, 19 nt, Artificial Sequence
  Description of Artificial Sequence: Synthetic oligonucleotide
  Antisense Strand to SEQ ID NO: 453899
uauuucauacuugguaaca

SEQ ID NO: 453901 - RNA, 19 nt, Artificial Sequence
  Description of Artificial Sequence: Synthetic oligonucleotide
  Sense strand starting at position 166 of SEQ ID NO: 316965
cuaauuggauacucaguau

SEQ ID NO: 453902 - RNA, 19 nt, Artificial Sequence
  Description of Artificial Sequence: Synthetic oligonucleotide
  Antisense Strand to SEQ ID NO: 453901
auacugaguauccaauuag

SEQ ID NO: 453903 - RNA, 19 nt, Artificial Sequence
  Description of Artificial Sequence: Synthetic oligonucleotide
  Sense strand starting at position 395 of SEQ ID NO: 316965
aaaggagccgagugugauu

SEQ ID NO: 453904 - RNA, 19 nt, Artificial Sequence
  Description of Artificial Sequence: Synthetic oligonucleotide
  Antisense Strand to SEQ ID NO: 453903
aaucacacucggcuccuuu

SEQ ID NO: 453905 - RNA, 19 nt, Artificial Sequence
  Description of Artificial Sequence: Synthetic oligonucleotide
  Sense strand starting at position 584 of SEQ ID NO: 316965
uugagcuguguuuaaauua

SEQ ID NO: 453906 - RNA, 19 nt, Artificial Sequence
  Description of Artificial Sequence: Synthetic oligonucleotide
  Antisense Strand to SEQ ID NO: 453905
uaauuuaaacacagcucaa

SEQ ID NO: 453907 - RNA, 19 nt, Artificial Sequence
  Description of Artificial Sequence: Synthetic oligonucleotide
  Sense strand starting at position 743 of SEQ ID NO: 316965
aguaaugagugugcuuaaa

SEQ ID NO: 453908 - RNA, 19 nt, Artificial Sequence
  Description of Artificial Sequence: Synthetic oligonucleotide
  Antisense Strand to SEQ ID NO: 453907
uuuaagcacacucauuacu

SEQ ID NO: 453909 - RNA, 19 nt, Artificial Sequence
  Description of Artificial Sequence: Synthetic oligonucleotide
  Sense strand starting at position 1164 of SEQ ID NO: 316965
augggaaguacguguauua

SEQ ID NO: 453910 - RNA, 19 nt, Artificial Sequence
  Description of Artificial Sequence: Synthetic oligonucleotide
  Antisense Strand to SEQ ID NO: 453909
uaauacacguacuucccau

SEQ ID NO: 453911 - RNA, 19 nt, Artificial Sequence
  Description of Artificial Sequence: Synthetic oligonucleotide
  Sense strand starting at position 1250 of SEQ ID NO: 316965
gagauacugcugugaugac

SEQ ID NO: 453912 - RNA, 19 nt, Artificial Sequence
  Description of Artificial Sequence: Synthetic oligonucleotide
  Antisense Strand to SEQ ID NO: 453911
gucaucacagcaguaucuc

SEQ ID NO: 453913 - RNA, 19 nt, Artificial Sequence
  Description of Artificial Sequence: Synthetic oligonucleotide
  Sense strand starting at position 1295 of SEQ ID NO: 316965
aagcaaguccuuuggagua

SEQ ID NO: 453914 - RNA, 19 nt, Artificial Sequence
  Description of Artificial Sequence: Synthetic oligonucleotide
  Antisense Strand to SEQ ID NO: 453913
uacuccaaaggacuugcuu

SEQ ID NO: 453915 - RNA, 19 nt, Artificial Sequence
  Description of Artificial Sequence: Synthetic oligonucleotide
  Sense strand starting at position 1300 of SEQ ID NO: 316965
aguccuuuggaguaaaugu

SEQ ID NO: 453916 - RNA, 19 nt, Artificial Sequence
  Description of Artificial Sequence: Synthetic oligonucleotide
  Antisense Strand to SEQ ID NO: 453915
acauuuacuccaaaggacu

SEQ ID NO: 453917 - RNA, 19 nt, Artificial Sequence
  Description of Artificial Sequence: Synthetic oligonucleotide
  Sense strand starting at position 1397 of SEQ ID NO: 316965
aaguuagugugacccaaga

SEQ ID NO: 453918 - RNA, 19 nt, Artificial Sequence
  Description of Artificial Sequence: Synthetic oligonucleotide
  Antisense Strand to SEQ ID NO: 453917
ucuugggucacacuaacuu

SEQ ID NO: 453919 - RNA, 19 nt, Artificial Sequence
  Description of Artificial Sequence: Synthetic oligonucleotide
  Sense strand starting at position 1994 of SEQ ID NO: 316965
gaaguaacgucacuuccua

SEQ ID NO: 453920 - RNA, 19 nt, Artificial Sequence
  Description of Artificial Sequence: Synthetic oligonucleotide
  Antisense Strand to SEQ ID NO: 453919
uaggaagugacguuacuuc

SEQ ID NO: 453921 - RNA, 19 nt, Artificial Sequence
  Description of Artificial Sequence: Synthetic oligonucleotide
  Sense strand starting at position 2138 of SEQ ID NO: 316965
gggcggaacggugaguuau

SEQ ID NO: 453922 - RNA, 19 nt, Artificial Sequence
  Description of Artificial Sequence: Synthetic oligonucleotide
  Antisense Strand to SEQ ID NO: 453921
auaacucaccguuccgccc

SEQ ID NO: 453923 - RNA, 19 nt, Artificial Sequence
  Description of Artificial Sequence: Synthetic oligonucleotide
  Sense strand starting at position 2139 of SEQ ID NO: 316965
ggcggaacggugaguuaug

SEQ ID NO: 453924 - RNA, 19 nt, Artificial Sequence
  Description of Artificial Sequence: Synthetic oligonucleotide
  Antisense Strand to SEQ ID NO: 453923
cauaacucaccguuccgcc

SEQ ID NO: 453925 - RNA, 19 nt, Artificial Sequence
  Description of Artificial Sequence: Synthetic oligonucleotide
  Sense strand starting at position 2265 of SEQ ID NO: 316965
ucauaauuuacgggcgguu

SEQ ID NO: 453926 - RNA, 19 nt, Artificial Sequence
  Description of Artificial Sequence: Synthetic oligonucleotide
  Antisense Strand to SEQ ID NO: 453925
aaccgcccguaaauuauga

SEQ ID NO: 453927 - RNA, 19 nt, Artificial Sequence
  Description of Artificial Sequence: Synthetic oligonucleotide
  Sense strand starting at position 2325 of SEQ ID NO: 316965
gugcuuccuccgagggagu

SEQ ID NO: 453928 - RNA, 19 nt, Artificial Sequence
  Description of Artificial Sequence: Synthetic oligonucleotide
  Antisense Strand to SEQ ID NO: 453927
acucccucggaggaagcac

SEQ ID NO: 453929 - RNA, 19 nt, Artificial Sequence
  Description of Artificial Sequence: Synthetic oligonucleotide
  Sense strand starting at position 2373 of SEQ ID NO: 316965
uuucuaggucuagggacaa

SEQ ID NO: 453930 - RNA, 19 nt, Artificial Sequence
  Description of Artificial Sequence: Synthetic oligonucleotide
  Antisense Strand to SEQ ID NO: 453929
uugucccuagaccuagaaa

SEQ ID NO: 453931 - RNA, 19 nt, Artificial Sequence
  Description of Artificial Sequence: Synthetic oligonucleotide
  Sense strand starting at position 2399 of SEQ ID NO: 316965
ggaauccugccucggacuu

SEQ ID NO: 453932 - RNA, 19 nt, Artificial Sequence
  Description of Artificial Sequence: Synthetic oligonucleotide
  Antisense Strand to SEQ ID NO: 453931
aaguccgaggcaggauucc

SEQ ID NO: 453933 - RNA, 19 nt, Artificial Sequence
  Description of Artificial Sequence: Synthetic oligonucleotide
  Sense strand starting at position 2431 of SEQ ID NO: 316965
uagugacuucucuacguag

SEQ ID NO: 453934 - RNA, 19 nt, Artificial Sequence
  Description of Artificial Sequence: Synthetic oligonucleotide
  Antisense Strand to SEQ ID NO: 453933
cuacguagagaagucacua

SEQ ID NO: 453935 - RNA, 19 nt, Artificial Sequence
  Description of Artificial Sequence: Synthetic oligonucleotide
  Sense strand starting at position 2503 of SEQ ID NO: 316965
cuaggacuucgauguguga

SEQ ID NO: 453936 - RNA, 19 nt, Artificial Sequence
  Description of Artificial Sequence: Synthetic oligonucleotide
  Antisense Strand to SEQ ID NO: 453935
ucacacaucgaaguccuag

SEQ ID NO: 453937 - RNA, 19 nt, Artificial Sequence
  Description of Artificial Sequence: Synthetic oligonucleotide
  Sense strand starting at position 2505 of SEQ ID NO: 316965
aggacuucgaugugugaug

SEQ ID NO: 453938 - RNA, 19 nt, Artificial Sequence
  Description of Artificial Sequence: Synthetic oligonucleotide
  Antisense Strand to SEQ ID NO: 453937
caucacacaucgaaguccu

SEQ ID NO: 453939 - RNA, 19 nt, Artificial Sequence
  Description of Artificial Sequence: Synthetic oligonucleotide
  Sense strand starting at position 2554 of SEQ ID NO: 316965
aaguguuugcugucagcuu

SEQ ID NO: 453940 - RNA, 19 nt, Artificial Sequence
  Description of Artificial Sequence: Synthetic oligonucleotide
  Antisense Strand to SEQ ID NO: 453939
aagcugacagcaaacacuu

SEQ ID NO: 453941 - RNA, 19 nt, Artificial Sequence
  Description of Artificial Sequence: Synthetic oligonucleotide
  Sense strand starting at position 2577 of SEQ ID NO: 316965
ccacuugauugguuuggaa

SEQ ID NO: 453942 - RNA, 19 nt, Artificial Sequence
  Description of Artificial Sequence: Synthetic oligonucleotide
  Antisense Strand to SEQ ID NO: 453941
uuccaaaccaaucaagugg

SEQ ID NO: 453943 - RNA, 19 nt, Artificial Sequence
  Description of Artificial Sequence: Synthetic oligonucleotide
  Sense strand starting at position 2579 of SEQ ID NO: 316965
acuugauugguuuggaauc

SEQ ID NO: 453944 - RNA, 19 nt, Artificial Sequence
  Description of Artificial Sequence: Synthetic oligonucleotide
  Antisense Strand to SEQ ID NO: 453943
gauuccaaaccaaucaagu

SEQ ID NO: 453945 - RNA, 19 nt, Artificial Sequence
  Description of Artificial Sequence: Synthetic oligonucleotide
  Sense strand starting at position 2634 of SEQ ID NO: 316965
guaucaguguuauccagaa

SEQ ID NO: 453946 - RNA, 19 nt, Artificial Sequence
  Description of Artificial Sequence: Synthetic oligonucleotide
  Antisense Strand to SEQ ID NO: 453945
uucuggauaacacugauac

SEQ ID NO: 453947 - RNA, 19 nt, Artificial Sequence
  Description of Artificial Sequence: Synthetic oligonucleotide
  Sense strand starting at position 2725 of SEQ ID NO: 316965
uugcgaagucaugaagaac

SEQ ID NO: 453948 - RNA, 19 nt, Artificial Sequence
  Description of Artificial Sequence: Synthetic oligonucleotide
  Antisense Strand to SEQ ID NO: 453947
guucuucaugacuucgcaa

SEQ ID NO: 453949 - RNA, 19 nt, Artificial Sequence
  Description of Artificial Sequence: Synthetic oligonucleotide
  Sense strand starting at position 2763 of SEQ ID NO: 316965
augaaauggcaacgauaau

SEQ ID NO: 453950 - RNA, 19 nt, Artificial Sequence
  Description of Artificial Sequence: Synthetic oligonucleotide
  Antisense Strand to SEQ ID NO: 453949
auuaucguugccauuucau

SEQ ID NO: 453951 - RNA, 19 nt, Artificial Sequence
  Description of Artificial Sequence: Synthetic oligonucleotide
  Sense strand starting at position 2774 of SEQ ID NO: 316965
acgauaauacugcacucua

SEQ ID NO: 453952 - RNA, 19 nt, Artificial Sequence
  Description of Artificial Sequence: Synthetic oligonucleotide
  Antisense Strand to SEQ ID NO: 453951
uagagugcaguauuaucgu

SEQ ID NO: 453953 - RNA, 19 nt, Artificial Sequence
  Description of Artificial Sequence: Synthetic oligonucleotide
  Sense strand starting at position 2825 of SEQ ID NO: 316965
acgugcauaugaucaacuu

SEQ ID NO: 453954 - RNA, 19 nt, Artificial Sequence
  Description of Artificial Sequence: Synthetic oligonucleotide
  Antisense Strand to SEQ ID NO: 453953
aaguugaucauaugcacgu

SEQ ID NO: 453955 - RNA, 19 nt, Artificial Sequence
  Description of Artificial Sequence: Synthetic oligonucleotide
  Sense strand starting at position 2826 of SEQ ID NO: 316965
cgugcauaugaucaacuuu

SEQ ID NO: 453956 - RNA, 19 nt, Artificial Sequence
  Description of Artificial Sequence: Synthetic oligonucleotide
  Antisense Strand to SEQ ID NO: 453955
aaaguugaucauaugcacg

SEQ ID NO: 453957 - RNA, 19 nt, Artificial Sequence
  Description of Artificial Sequence: Synthetic oligonucleotide
  Sense strand starting at position 3076 of SEQ ID NO: 316965
uuuacagaccagugggauu

SEQ ID NO: 453958 - RNA, 19 nt, Artificial Sequence
  Description of Artificial Sequence: Synthetic oligonucleotide
  Antisense Strand to SEQ ID NO: 453957
aaucccacuggucuguaaa

SEQ ID NO: 453959 - RNA, 19 nt, Artificial Sequence
  Description of Artificial Sequence: Synthetic oligonucleotide
  Sense strand starting at position 3165 of SEQ ID NO: 316965
agucgugaaagaggugauu

SEQ ID NO: 453960 - RNA, 19 nt, Artificial Sequence
  Description of Artificial Sequence: Synthetic oligonucleotide
  Antisense Strand to SEQ ID NO: 453959
aaucaccucuuucacgacu

SEQ ID NO: 453961 - RNA, 19 nt, Artificial Sequence
  Description of Artificial Sequence: Synthetic oligonucleotide
  Sense strand starting at position 3269 of SEQ ID NO: 316965
uggaaauggcuacaauugu

SEQ ID NO: 453962 - RNA, 19 nt, Artificial Sequence
  Description of Artificial Sequence: Synthetic oligonucleotide
  Antisense Strand to SEQ ID NO: 453961
acaauuguagccauuucca

SEQ ID NO: 453963 - RNA, 19 nt, Artificial Sequence
  Description of Artificial Sequence: Synthetic oligonucleotide
  Sense strand starting at position 3401 of SEQ ID NO: 316965
agacucugcccuuaaagua

SEQ ID NO: 453964 - RNA, 19 nt, Artificial Sequence
  Description of Artificial Sequence: Synthetic oligonucleotide
  Antisense Strand to SEQ ID NO: 453963
uacuuuaagggcagagucu

SEQ ID NO: 453965 - RNA, 19 nt, Artificial Sequence
  Description of Artificial Sequence: Synthetic oligonucleotide
  Sense strand starting at position 3409 of SEQ ID NO: 316965
cccuuaaaguacucagagu

SEQ ID NO: 453966 - RNA, 19 nt, Artificial Sequence
  Description of Artificial Sequence: Synthetic oligonucleotide
  Antisense Strand to SEQ ID NO: 453965
acucugaguacuuuaaggg

SEQ ID NO: 453967 - RNA, 19 nt, Artificial Sequence
  Description of Artificial Sequence: Synthetic oligonucleotide
  Sense strand starting at position 3604 of SEQ ID NO: 316965
agggucuugauaggaugua

SEQ ID NO: 453968 - RNA, 19 nt, Artificial Sequence
  Description of Artificial Sequence: Synthetic oligonucleotide
  Antisense Strand to SEQ ID NO: 453967
uacauccuaucaagacccu

SEQ ID NO: 453969 - RNA, 19 nt, Artificial Sequence
  Description of Artificial Sequence: Synthetic oligonucleotide
  Sense strand starting at position 3743 of SEQ ID NO: 316965
cuuaaaugcuaggccaaga

SEQ ID NO: 453970 - RNA, 19 nt, Artificial Sequence
  Description of Artificial Sequence: Synthetic oligonucleotide
  Antisense Strand to SEQ ID NO: 453969
ucuuggccuagcauuuaag

SEQ ID NO: 453971 - RNA, 19 nt, Artificial Sequence
  Description of Artificial Sequence: Synthetic oligonucleotide
  Sense strand starting at position 3770 of SEQ ID NO: 316965
cuuuauuucgaagguggua

SEQ ID NO: 453972 - RNA, 19 nt, Artificial Sequence
  Description of Artificial Sequence: Synthetic oligonucleotide
  Antisense Strand to SEQ ID NO: 453971
uaccaccuucgaaauaaag

SEQ ID NO: 453973 - RNA, 19 nt, Artificial Sequence
  Description of Artificial Sequence: Synthetic oligonucleotide
  Sense strand starting at position 3785 of SEQ ID NO: 316965
gguagaaagcccuaacuuc

SEQ ID NO: 453974 - RNA, 19 nt, Artificial Sequence
  Description of Artificial Sequence: Synthetic oligonucleotide
  Antisense Strand to SEQ ID NO: 453973
gaaguuagggcuuucuacc

SEQ ID NO: 453975 - RNA, 19 nt, Artificial Sequence
  Description of Artificial Sequence: Synthetic oligonucleotide
  Sense strand starting at position 41 of SEQ ID NO: 316966
uucguuucuucuccagaug

SEQ ID NO: 453976 - RNA, 19 nt, Artificial Sequence
  Description of Artificial Sequence: Synthetic oligonucleotide
  Antisense Strand to SEQ ID NO: 453975
caucuggagaagaaacgaa

SEQ ID NO: 453977 - RNA, 19 nt, Artificial Sequence
  Description of Artificial Sequence: Synthetic oligonucleotide
  Sense strand starting at position 44 of SEQ ID NO: 316966
guuucuucuccagauggga

SEQ ID NO: 453978 - RNA, 19 nt, Artificial Sequence
  Description of Artificial Sequence: Synthetic oligonucleotide
  Antisense Strand to SEQ ID NO: 453977
ucccaucuggagaagaaac

SEQ ID NO: 453979 - RNA, 19 nt, Artificial Sequence
  Description of Artificial Sequence: Synthetic oligonucleotide
  Sense strand starting at position 704 of SEQ ID NO: 316966
ugcgaagucacaggauuaa

SEQ ID NO: 453980 - RNA, 19 nt, Artificial Sequence
  Description of Artificial Sequence: Synthetic oligonucleotide
  Antisense Strand to SEQ ID NO: 453979
uuaauccugugacuucgca

SEQ ID NO: 453981 - RNA, 19 nt, Artificial Sequence
  Description of Artificial Sequence: Synthetic oligonucleotide
  Sense strand starting at position 869 of SEQ ID NO: 316966
gcaguuaaccucugguuua

SEQ ID NO: 453982 - RNA, 19 nt, Artificial Sequence
  Description of Artificial Sequence: Synthetic oligonucleotide
  Antisense Strand to SEQ ID NO: 453981
uaaaccagagguuaacugc

SEQ ID NO: 453983 - RNA, 19 nt, Artificial Sequence
  Description of Artificial Sequence: Synthetic oligonucleotide
  Sense strand starting at position 882 of SEQ ID NO: 316966
gguuuauccgccgugacgu

SEQ ID NO: 453984 - RNA, 19 nt, Artificial Sequence
  Description of Artificial Sequence: Synthetic oligonucleotide
  Antisense Strand to SEQ ID NO: 453983
acgucacggcggauaaacc

SEQ ID NO: 453985 - RNA, 19 nt, Artificial Sequence
  Description of Artificial Sequence: Synthetic oligonucleotide
  Sense strand starting at position 1010 of SEQ ID NO: 316966
guggaacuucuguggcuga

SEQ ID NO: 453986 - RNA, 19 nt, Artificial Sequence
  Description of Artificial Sequence: Synthetic oligonucleotide
  Antisense Strand to SEQ ID NO: 453985
ucagccacagaaguuccac

SEQ ID NO: 453987 - RNA, 19 nt, Artificial Sequence
  Description of Artificial Sequence: Synthetic oligonucleotide
  Sense strand starting at position 1101 of SEQ ID NO: 316966
uggaaaguuugcuccagga

SEQ ID NO: 453988 - RNA, 19 nt, Artificial Sequence
  Description of Artificial Sequence: Synthetic oligonucleotide
  Antisense Strand to SEQ ID NO: 453987
uccuggagcaaacuuucca

SEQ ID NO: 453989 - RNA, 19 nt, Artificial Sequence
  Description of Artificial Sequence: Synthetic oligonucleotide
  Sense strand starting at position 2284 of SEQ ID NO: 316966
aggcuuauuuaauaggaau

SEQ ID NO: 453990 - RNA, 19 nt, Artificial Sequence
  Description of Artificial Sequence: Synthetic oligonucleotide
  Antisense Strand to SEQ ID NO: 453989
auuccuauuaaauaagccu

SEQ ID NO: 453991 - RNA, 19 nt, Artificial Sequence
  Description of Artificial Sequence: Synthetic oligonucleotide
  Sense strand starting at position 2296 of SEQ ID NO: 316966
uaggaaugcucaguguuuc

SEQ ID NO: 453992 - RNA, 19 nt, Artificial Sequence
  Description of Artificial Sequence: Synthetic oligonucleotide
  Antisense Strand to SEQ ID NO: 453991
gaaacacugagcauuccua

SEQ ID NO: 453993 - RNA, 19 nt, Artificial Sequence
  Description of Artificial Sequence: Synthetic oligonucleotide
  Sense strand starting at position 2463 of SEQ ID NO: 316966
ggacuuggcagaggucauu

SEQ ID NO: 453994 - RNA, 19 nt, Artificial Sequence
  Description of Artificial Sequence: Synthetic oligonucleotide
  Antisense Strand to SEQ ID NO: 453993
aaugaccucugccaagucc

SEQ ID NO: 453995 - RNA, 19 nt, Artificial Sequence
  Description of Artificial Sequence: Synthetic oligonucleotide
  Sense strand starting at position 2475 of SEQ ID NO: 316966
ggucauucaggugguuagu

SEQ ID NO: 453996 - RNA, 19 nt, Artificial Sequence
  Description of Artificial Sequence: Synthetic oligonucleotide
  Antisense Strand to SEQ ID NO: 453995
acuaaccaccugaaugacc

SEQ ID NO: 453997 - RNA, 19 nt, Artificial Sequence
  Description of Artificial Sequence: Synthetic oligonucleotide
  Sense strand starting at position 2531 of SEQ ID NO: 316966
cuaagaaaccgucaagcuu

SEQ ID NO: 453998 - RNA, 19 nt, Artificial Sequence
  Description of Artificial Sequence: Synthetic oligonucleotide
  Antisense Strand to SEQ ID NO: 453997
aagcuugacgguuucuuag

SEQ ID NO: 453999 - RNA, 19 nt, Artificial Sequence
  Description of Artificial Sequence: Synthetic oligonucleotide
  Sense strand starting at position 2551 of SEQ ID NO: 316966
ucaugcugauguucgacaa

SEQ ID NO: 454000 - RNA, 19 nt, Artificial Sequence
  Description of Artificial Sequence: Synthetic oligonucleotide
  Antisense Strand to SEQ ID NO: 453999
uugucgaacaucagcauga

SEQ ID NO: 454001 - RNA, 19 nt, Artificial Sequence
  Description of Artificial Sequence: Synthetic oligonucleotide
  Sense strand starting at position 2572 of SEQ ID NO: 316966
ucugaagugucuuuguacu

SEQ ID NO: 454002 - RNA, 19 nt, Artificial Sequence
  Description of Artificial Sequence: Synthetic oligonucleotide
  Antisense Strand to SEQ ID NO: 454001
aguacaaagacacuucaga

SEQ ID NO: 454003 - RNA, 19 nt, Artificial Sequence
  Description of Artificial Sequence: Synthetic oligonucleotide
  Sense strand starting at position 2709 of SEQ ID NO: 316966
guaguaacaccauggcauu

SEQ ID NO: 454004 - RNA, 19 nt, Artificial Sequence
  Description of Artificial Sequence: Synthetic oligonucleotide
  Antisense Strand to SEQ ID NO: 454003
aaugccaugguguuacuac

SEQ ID NO: 454005 - RNA, 19 nt, Artificial Sequence
  Description of Artificial Sequence: Synthetic oligonucleotide
  Sense strand starting at position 2719 of SEQ ID NO: 316966
cauggcauuccagggcaau

SEQ ID NO: 454006 - RNA, 19 nt, Artificial Sequence
  Description of Artificial Sequence: Synthetic oligonucleotide
  Antisense Strand to SEQ ID NO: 454005
auugcccuggaaugccaug

SEQ ID NO: 454007 - RNA, 19 nt, Artificial Sequence
  Description of Artificial Sequence: Synthetic oligonucleotide
  Sense strand starting at position 2952 of SEQ ID NO: 316966
cagggaaucuugccucuga

SEQ ID NO: 454008 - RNA, 19 nt, Artificial Sequence
  Description of Artificial Sequence: Synthetic oligonucleotide
  Antisense Strand to SEQ ID NO: 454007
ucagaggcaagauucccug

SEQ ID NO: 454009 - RNA, 19 nt, Artificial Sequence
  Description of Artificial Sequence: Synthetic oligonucleotide
  Sense strand starting at position 2953 of SEQ ID NO: 316966
agggaaucuugccucugau

SEQ ID NO: 454010 - RNA, 19 nt, Artificial Sequence
  Description of Artificial Sequence: Synthetic oligonucleotide
  Antisense Strand to SEQ ID NO: 454009
aucagaggcaagauucccu

SEQ ID NO: 454011 - RNA, 19 nt, Artificial Sequence
  Description of Artificial Sequence: Synthetic oligonucleotide
  Sense strand starting at position 2961 of SEQ ID NO: 316966
uugccucugauuggcagaa

SEQ ID NO: 454012 - RNA, 19 nt, Artificial Sequence
  Description of Artificial Sequence: Synthetic oligonucleotide
  Antisense Strand to SEQ ID NO: 454011
uucugccaaucagaggcaa

SEQ ID NO: 454013 - RNA, 19 nt, Artificial Sequence
  Description of Artificial Sequence: Synthetic oligonucleotide
  Sense strand starting at position 2999 of SEQ ID NO: 316966
cucucugguccauggaagu

SEQ ID NO: 454014 - RNA, 19 nt, Artificial Sequence
  Description of Artificial Sequence: Synthetic oligonucleotide
  Antisense Strand to SEQ ID NO: 454013
acuuccauggaccagagag

SEQ ID NO: 454015 - RNA, 19 nt, Artificial Sequence
  Description of Artificial Sequence: Synthetic oligonucleotide
  Sense strand starting at position 3068 of SEQ ID NO: 316966
cuauuuaucuucggagaag

SEQ ID NO: 454016 - RNA, 19 nt, Artificial Sequence
  Description of Artificial Sequence: Synthetic oligonucleotide
  Antisense Strand to SEQ ID NO: 454015
cuucuccgaagauaaauag

SEQ ID NO: 454017 - RNA, 19 nt, Artificial Sequence
  Description of Artificial Sequence: Synthetic oligonucleotide
  Sense strand starting at position 3069 of SEQ ID NO: 316966
uauuuaucuucggagaagg

SEQ ID NO: 454018 - RNA, 19 nt, Artificial Sequence
  Description of Artificial Sequence: Synthetic oligonucleotide
  Antisense Strand to SEQ ID NO: 454017
ccuucuccgaagauaaaua

SEQ ID NO: 454019 - RNA, 19 nt, Artificial Sequence
  Description of Artificial Sequence: Synthetic oligonucleotide
  Sense strand starting at position 3071 of SEQ ID NO: 316966
uuuaucuucggagaaggca

SEQ ID NO: 454020 - RNA, 19 nt, Artificial Sequence
  Description of Artificial Sequence: Synthetic oligonucleotide
  Antisense Strand to SEQ ID NO: 454019
ugccuucuccgaagauaaa

SEQ ID NO: 454021 - RNA, 19 nt, Artificial Sequence
  Description of Artificial Sequence: Synthetic oligonucleotide
  Sense strand starting at position 3165 of SEQ ID NO: 316966
uaguuagaagucugauccu

SEQ ID NO: 454022 - RNA, 19 nt, Artificial Sequence
  Description of Artificial Sequence: Synthetic oligonucleotide
  Antisense Strand to SEQ ID NO: 454021
aggaucagacuucuaacua

SEQ ID NO: 454023 - RNA, 19 nt, Artificial Sequence
  Description of Artificial Sequence: Synthetic oligonucleotide
  Sense strand starting at position 3210 of SEQ ID NO: 316966
ugaguucaugauggugcua

SEQ ID NO: 454024 - RNA, 19 nt, Artificial Sequence
  Description of Artificial Sequence: Synthetic oligonucleotide
  Antisense Strand to SEQ ID NO: 454023
uagcaccaucaugaacuca

SEQ ID NO: 454025 - RNA, 19 nt, Artificial Sequence
  Description of Artificial Sequence: Synthetic oligonucleotide
  Sense strand starting at position 3335 of SEQ ID NO: 316966
ucuccaucucugugacagu

SEQ ID NO: 454026 - RNA, 19 nt, Artificial Sequence
  Description of Artificial Sequence: Synthetic oligonucleotide
  Antisense Strand to SEQ ID NO: 454025
acugucacagagauggaga

SEQ ID NO: 454027 - RNA, 19 nt, Artificial Sequence
  Description of Artificial Sequence: Synthetic oligonucleotide
  Sense strand starting at position 3363 of SEQ ID NO: 316966
cugcuagagaaguguaauu

SEQ ID NO: 454028 - RNA, 19 nt, Artificial Sequence
  Description of Artificial Sequence: Synthetic oligonucleotide
  Antisense Strand to SEQ ID NO: 454027
aauuacacuucucuagcag

SEQ ID NO: 454029 - RNA, 19 nt, Artificial Sequence
  Description of Artificial Sequence: Synthetic oligonucleotide
  Sense strand starting at position 3368 of SEQ ID NO: 316966
agagaaguguaauuggguu

SEQ ID NO: 454030 - RNA, 19 nt, Artificial Sequence
  Description of Artificial Sequence: Synthetic oligonucleotide
  Antisense Strand to SEQ ID NO: 454029
aacccaauuacacuucucu

SEQ ID NO: 454031 - RNA, 19 nt, Artificial Sequence
  Description of Artificial Sequence: Synthetic oligonucleotide
  Sense strand starting at position 3417 of SEQ ID NO: 316966
auuuauggauggcaauuaa

SEQ ID NO: 454032 - RNA, 19 nt, Artificial Sequence
  Description of Artificial Sequence: Synthetic oligonucleotide
  Antisense Strand to SEQ ID NO: 454031
uuaauugccauccauaaau

SEQ ID NO: 454033 - RNA, 19 nt, Artificial Sequence
  Description of Artificial Sequence: Synthetic oligonucleotide
  Sense strand starting at position 3451 of SEQ ID NO: 316966
agcugaggcugguuauuga

SEQ ID NO: 454034 - RNA, 19 nt, Artificial Sequence
  Description of Artificial Sequence: Synthetic oligonucleotide
  Antisense Strand to SEQ ID NO: 454033
ucaauaaccagccucagcu

SEQ ID NO: 454035 - RNA, 19 nt, Artificial Sequence
  Description of Artificial Sequence: Synthetic oligonucleotide
  Sense strand starting at position 3458 of SEQ ID NO: 316966
gcugguuauugagcuauuu

SEQ ID NO: 454036 - RNA, 19 nt, Artificial Sequence
  Description of Artificial Sequence: Synthetic oligonucleotide
  Antisense Strand to SEQ ID NO: 454035
aaauagcucaauaaccagc

SEQ ID NO: 454037 - RNA, 19 nt, Artificial Sequence
  Description of Artificial Sequence: Synthetic oligonucleotide
  Sense strand starting at position 3471 of SEQ ID NO: 316966
cuauuugaaugugauuaga

SEQ ID NO: 454038 - RNA, 19 nt, Artificial Sequence
  Description of Artificial Sequence: Synthetic oligonucleotide
  Antisense Strand to SEQ ID NO: 454037
ucuaaucacauucaaauag

SEQ ID NO: 454039 - RNA, 19 nt, Artificial Sequence
  Description of Artificial Sequence: Synthetic oligonucleotide
  Sense strand starting at position 3519 of SEQ ID NO: 316966
gggucucuggaguguaaac

SEQ ID NO: 454040 - RNA, 19 nt, Artificial Sequence
  Description of Artificial Sequence: Synthetic oligonucleotide
  Antisense Strand to SEQ ID NO: 454039
guuuacacuccagagaccc

SEQ ID NO: 454041 - RNA, 19 nt, Artificial Sequence
  Description of Artificial Sequence: Synthetic oligonucleotide
  Sense strand starting at position 3540 of SEQ ID NO: 316966
acagcuauuccagaaaugu

SEQ ID NO: 454042 - RNA, 19 nt, Artificial Sequence
  Description of Artificial Sequence: Synthetic oligonucleotide
  Antisense Strand to SEQ ID NO: 454041
acauuucuggaauagcugu

SEQ ID NO: 454043 - RNA, 19 nt, Artificial Sequence
  Description of Artificial Sequence: Synthetic oligonucleotide
  Sense strand starting at position 3741 of SEQ ID NO: 316966
ggagccacugauggagaau

SEQ ID NO: 454044 - RNA, 19 nt, Artificial Sequence
  Description of Artificial Sequence: Synthetic oligonucleotide
  Antisense Strand to SEQ ID NO: 454043
auucuccaucaguggcucc

SEQ ID NO: 454045 - RNA, 19 nt, Artificial Sequence
  Description of Artificial Sequence: Synthetic oligonucleotide
  Sense strand starting at position 3750 of SEQ ID NO: 316966
gauggagaauggcaauaaa

SEQ ID NO: 454046 - RNA, 19 nt, Artificial Sequence
  Description of Artificial Sequence: Synthetic oligonucleotide
  Antisense Strand to SEQ ID NO: 454045
uuuauugccauucuccauc

SEQ ID NO: 454047 - RNA, 19 nt, Artificial Sequence
  Description of Artificial Sequence: Synthetic oligonucleotide
  Sense strand starting at position 3779 of SEQ ID NO: 316966
ugcugaauggcaggauauu

SEQ ID NO: 454048 - RNA, 19 nt, Artificial Sequence
  Description of Artificial Sequence: Synthetic oligonucleotide
  Antisense Strand to SEQ ID NO: 454047
aauauccugccauucagca

SEQ ID NO: 454049 - RNA, 19 nt, Artificial Sequence
  Description of Artificial Sequence: Synthetic oligonucleotide
  Sense strand starting at position 3805 of SEQ ID NO: 316966
guccuaaacuguccaaaua

SEQ ID NO: 454050 - RNA, 19 nt, Artificial Sequence
  Description of Artificial Sequence: Synthetic oligonucleotide
  Antisense Strand to SEQ ID NO: 454049
uauuuggacaguuuaggac

SEQ ID NO: 454051 - RNA, 19 nt, Artificial Sequence
  Description of Artificial Sequence: Synthetic oligonucleotide
  Sense strand starting at position 3817 of SEQ ID NO: 316966
ccaaauagaugacucgauu

SEQ ID NO: 454052 - RNA, 19 nt, Artificial Sequence
  Description of Artificial Sequence: Synthetic oligonucleotide
  Antisense Strand to SEQ ID NO: 454051
aaucgagucaucuauuugg

SEQ ID NO: 454053 - RNA, 19 nt, Artificial Sequence
  Description of Artificial Sequence: Synthetic oligonucleotide
  Sense strand starting at position 3964 of SEQ ID NO: 316966
gaugguuugagucacaaug

SEQ ID NO: 454054 - RNA, 19 nt, Artificial Sequence
  Description of Artificial Sequence: Synthetic oligonucleotide
  Antisense Strand to SEQ ID NO: 454053
cauugugacucaaaccauc

SEQ ID NO: 454055 - RNA, 19 nt, Artificial Sequence
  Description of Artificial Sequence: Synthetic oligonucleotide
  Sense strand starting at position 160 of SEQ ID NO: 316967
aguucuaguaagugguaga

SEQ ID NO: 454056 - RNA, 19 nt, Artificial Sequence
  Description of Artificial Sequence: Synthetic oligonucleotide
  Antisense Strand to SEQ ID NO: 454055
ucuaccacuuacuagaacu

SEQ ID NO: 454057 - RNA, 19 nt, Artificial Sequence
  Description of Artificial Sequence: Synthetic oligonucleotide
  Sense strand starting at position 167 of SEQ ID NO: 316967
guaagugguagagauguau

SEQ ID NO: 454058 - RNA, 19 nt, Artificial Sequence
  Description of Artificial Sequence: Synthetic oligonucleotide
  Antisense Strand to SEQ ID NO: 454057
auacaucucuaccacuuac

SEQ ID NO: 454059 - RNA, 19 nt, Artificial Sequence
  Description of Artificial Sequence: Synthetic oligonucleotide
  Sense strand starting at position 173 of SEQ ID NO: 316967
gguagagauguaugaaauc

SEQ ID NO: 454060 - RNA, 19 nt, Artificial Sequence
  Description of Artificial Sequence: Synthetic oligonucleotide
  Antisense Strand to SEQ ID NO: 454059
gauuucauacaucucuacc

SEQ ID NO: 454061 - RNA, 19 nt, Artificial Sequence
  Description of Artificial Sequence: Synthetic oligonucleotide
  Sense strand starting at position 356 of SEQ ID NO: 316967
accagucaucguuaaguga

SEQ ID NO: 454062 - RNA, 19 nt, Artificial Sequence
  Description of Artificial Sequence: Synthetic oligonucleotide
  Antisense Strand to SEQ ID NO: 454061
ucacuuaacgaugacuggu

SEQ ID NO: 454063 - RNA, 19 nt, Artificial Sequence
  Description of Artificial Sequence: Synthetic oligonucleotide
  Sense strand starting at position 365 of SEQ ID NO: 316967
cguuaagugagccauacaa

SEQ ID NO: 454064 - RNA, 19 nt, Artificial Sequence
  Description of Artificial Sequence: Synthetic oligonucleotide
  Antisense Strand to SEQ ID NO: 454063
uuguauggcucacuuaacg

SEQ ID NO: 454065 - RNA, 19 nt, Artificial Sequence
  Description of Artificial Sequence: Synthetic oligonucleotide
  Sense strand starting at position 404 of SEQ ID NO: 316967
gauguaaacuguuuaucga

SEQ ID NO: 454066 - RNA, 19 nt, Artificial Sequence
  Description of Artificial Sequence: Synthetic oligonucleotide
  Antisense Strand to SEQ ID NO: 454065
ucgauaaacaguuuacauc

SEQ ID NO: 454067 - RNA, 19 nt, Artificial Sequence
  Description of Artificial Sequence: Synthetic oligonucleotide
  Sense strand starting at position 475 of SEQ ID NO: 316967
cgaaauccauagccugaaa

SEQ ID NO: 454068 - RNA, 19 nt, Artificial Sequence
  Description of Artificial Sequence: Synthetic oligonucleotide
  Antisense Strand to SEQ ID NO: 454067
uuucaggcuauggauuucg

SEQ ID NO: 454069 - RNA, 19 nt, Artificial Sequence
  Description of Artificial Sequence: Synthetic oligonucleotide
  Sense strand starting at position 639 of SEQ ID NO: 316967
gggacugcuaagcaguaaa

SEQ ID NO: 454070 - RNA, 19 nt, Artificial Sequence
  Description of Artificial Sequence: Synthetic oligonucleotide
  Antisense Strand to SEQ ID NO: 454069
uuuacugcuuagcaguccc

SEQ ID NO: 454071 - RNA, 19 nt, Artificial Sequence
  Description of Artificial Sequence: Synthetic oligonucleotide
  Sense strand starting at position 642 of SEQ ID NO: 316967
acugcuaagcaguaaauca

SEQ ID NO: 454072 - RNA, 19 nt, Artificial Sequence
  Description of Artificial Sequence: Synthetic oligonucleotide
  Antisense Strand to SEQ ID NO: 454071
ugauuuacugcuuagcagu

SEQ ID NO: 454073 - RNA, 19 nt, Artificial Sequence
  Description of Artificial Sequence: Synthetic oligonucleotide
  Sense strand starting at position 1986 of SEQ ID NO: 316967
cagaaaucacuguguggag

SEQ ID NO: 454074 - RNA, 19 nt, Artificial Sequence
  Description of Artificial Sequence: Synthetic oligonucleotide
  Antisense Strand to SEQ ID NO: 454073
cuccacacagugauuucug

SEQ ID NO: 454075 - RNA, 19 nt, Artificial Sequence
  Description of Artificial Sequence: Synthetic oligonucleotide
  Sense strand starting at position 1987 of SEQ ID NO: 316967
agaaaucacuguguggaga

SEQ ID NO: 454076 - RNA, 19 nt, Artificial Sequence
  Description of Artificial Sequence: Synthetic oligonucleotide
  Antisense Strand to SEQ ID NO: 454075
ucuccacacagugauuucu

SEQ ID NO: 454077 - RNA, 19 nt, Artificial Sequence
  Description of Artificial Sequence: Synthetic oligonucleotide
  Sense strand starting at position 2199 of SEQ ID NO: 316967
gacaucugcgcugaugacu

SEQ ID NO: 454078 - RNA, 19 nt, Artificial Sequence
  Description of Artificial Sequence: Synthetic oligonucleotide
  Antisense Strand to SEQ ID NO: 454077
agucaucagcgcagauguc

SEQ ID NO: 454079 - RNA, 19 nt, Artificial Sequence
  Description of Artificial Sequence: Synthetic oligonucleotide
  Sense strand starting at position 2335 of SEQ ID NO: 316967
uaguuauauuuguuaccgu

SEQ ID NO: 454080 - RNA, 19 nt, Artificial Sequence
  Description of Artificial Sequence: Synthetic oligonucleotide
  Antisense Strand to SEQ ID NO: 454079
acgguaacaaauauaacua

SEQ ID NO: 454081 - RNA, 19 nt, Artificial Sequence
  Description of Artificial Sequence: Synthetic oligonucleotide
  Sense strand starting at position 2650 of SEQ ID NO: 316967
uuaagaaagucagcaauau

SEQ ID NO: 454082 - RNA, 19 nt, Artificial Sequence
  Description of Artificial Sequence: Synthetic oligonucleotide
  Antisense Strand to SEQ ID NO: 454081
auauugcugacuuucuuaa

SEQ ID NO: 454083 - RNA, 19 nt, Artificial Sequence
  Description of Artificial Sequence: Synthetic oligonucleotide
  Sense strand starting at position 2750 of SEQ ID NO: 316967
cuuagaucaguaggacauu

SEQ ID NO: 454084 - RNA, 19 nt, Artificial Sequence
  Description of Artificial Sequence: Synthetic oligonucleotide
  Antisense Strand to SEQ ID NO: 454083
aauguccuacugaucuaag

SEQ ID NO: 454085 - RNA, 19 nt, Artificial Sequence
  Description of Artificial Sequence: Synthetic oligonucleotide
  Sense strand starting at position 2751 of SEQ ID NO: 316967
uuagaucaguaggacauuu

SEQ ID NO: 454086 - RNA, 19 nt, Artificial Sequence
  Description of Artificial Sequence: Synthetic oligonucleotide
  Antisense Strand to SEQ ID NO: 454085
aaauguccuacugaucuaa

SEQ ID NO: 454087 - RNA, 19 nt, Artificial Sequence
  Description of Artificial Sequence: Synthetic oligonucleotide
  Sense strand starting at position 2759 of SEQ ID NO: 316967
guaggacauuuguacuaag

SEQ ID NO: 454088 - RNA, 19 nt, Artificial Sequence
  Description of Artificial Sequence: Synthetic oligonucleotide
  Antisense Strand to SEQ ID NO: 454087
cuuaguacaaauguccuac

SEQ ID NO: 454089 - RNA, 19 nt, Artificial Sequence
  Description of Artificial Sequence: Synthetic oligonucleotide
  Sense strand starting at position 2762 of SEQ ID NO: 316967
ggacauuuguacuaagaau

SEQ ID NO: 454090 - RNA, 19 nt, Artificial Sequence
  Description of Artificial Sequence: Synthetic oligonucleotide
  Antisense Strand to SEQ ID NO: 454089
auucuuaguacaaaugucc

SEQ ID NO: 454091 - RNA, 19 nt, Artificial Sequence
  Description of Artificial Sequence: Synthetic oligonucleotide
  Sense strand starting at position 2894 of SEQ ID NO: 316967
augagauauugucugacag

SEQ ID NO: 454092 - RNA, 19 nt, Artificial Sequence
  Description of Artificial Sequence: Synthetic oligonucleotide
  Antisense Strand to SEQ ID NO: 454091
cugucagacaauaucucau

SEQ ID NO: 454093 - RNA, 19 nt, Artificial Sequence
  Description of Artificial Sequence: Synthetic oligonucleotide
  Sense strand starting at position 2895 of SEQ ID NO: 316967
ugagauauugucugacagg

SEQ ID NO: 454094 - RNA, 19 nt, Artificial Sequence
  Description of Artificial Sequence: Synthetic oligonucleotide
  Antisense Strand to SEQ ID NO: 454093
ccugucagacaauaucuca

SEQ ID NO: 454095 - RNA, 19 nt, Artificial Sequence
  Description of Artificial Sequence: Synthetic oligonucleotide
  Sense strand starting at position 2943 of SEQ ID NO: 316967
acuugaaggauugguuaug

SEQ ID NO: 454096 - RNA, 19 nt, Artificial Sequence
  Description of Artificial Sequence: Synthetic oligonucleotide
  Antisense Strand to SEQ ID NO: 454095
cauaaccaauccuucaagu

SEQ ID NO: 454097 - RNA, 19 nt, Artificial Sequence
  Description of Artificial Sequence: Synthetic oligonucleotide
  Sense strand starting at position 2949 of SEQ ID NO: 316967
aggauugguuauguuugga

SEQ ID NO: 454098 - RNA, 19 nt, Artificial Sequence
  Description of Artificial Sequence: Synthetic oligonucleotide
  Antisense Strand to SEQ ID NO: 454097
uccaaacauaaccaauccu

SEQ ID NO: 454099 - RNA, 19 nt, Artificial Sequence
  Description of Artificial Sequence: Synthetic oligonucleotide
  Sense strand starting at position 3019 of SEQ ID NO: 316967
ggaaacuugugagcaaaca

SEQ ID NO: 454100 - RNA, 19 nt, Artificial Sequence
  Description of Artificial Sequence: Synthetic oligonucleotide
  Antisense Strand to SEQ ID NO: 454099
uguuugcucacaaguuucc

SEQ ID NO: 454101 - RNA, 19 nt, Artificial Sequence
  Description of Artificial Sequence: Synthetic oligonucleotide
  Sense strand starting at position 3045 of SEQ ID NO: 316967
guuggaaaggcaugacacu

SEQ ID NO: 454102 - RNA, 19 nt, Artificial Sequence
  Description of Artificial Sequence: Synthetic oligonucleotide
  Antisense Strand to SEQ ID NO: 454101
agugucaugccuuuccaac

SEQ ID NO: 454103 - RNA, 19 nt, Artificial Sequence
  Description of Artificial Sequence: Synthetic oligonucleotide
  Sense strand starting at position 3051 of SEQ ID NO: 316967
aaggcaugacacuguuauu

SEQ ID NO: 454104 - RNA, 19 nt, Artificial Sequence
  Description of Artificial Sequence: Synthetic oligonucleotide
  Antisense Strand to SEQ ID NO: 454103
aauaacagugucaugccuu

SEQ ID NO: 454105 - RNA, 19 nt, Artificial Sequence
  Description of Artificial Sequence: Synthetic oligonucleotide
  Sense strand starting at position 3141 of SEQ ID NO: 316967
gaaagauaggccggguuca

SEQ ID NO: 454106 - RNA, 19 nt, Artificial Sequence
  Description of Artificial Sequence: Synthetic oligonucleotide
  Antisense Strand to SEQ ID NO: 454105
ugaacccggccuaucuuuc

SEQ ID NO: 454107 - RNA, 19 nt, Artificial Sequence
  Description of Artificial Sequence: Synthetic oligonucleotide
  Sense strand starting at position 3163 of SEQ ID NO: 316967
gccugauccgcaguuguca

SEQ ID NO: 454108 - RNA, 19 nt, Artificial Sequence
  Description of Artificial Sequence: Synthetic oligonucleotide
  Antisense Strand to SEQ ID NO: 454107
ugacaacugcggaucaggc

SEQ ID NO: 454109 - RNA, 19 nt, Artificial Sequence
  Description of Artificial Sequence: Synthetic oligonucleotide
  Sense strand starting at position 3181 of SEQ ID NO: 316967
acguguugcaggcuuguau

SEQ ID NO: 454110 - RNA, 19 nt, Artificial Sequence
  Description of Artificial Sequence: Synthetic oligonucleotide
  Antisense Strand to SEQ ID NO: 454109
auacaagccugcaacacgu

SEQ ID NO: 454111 - RNA, 19 nt, Artificial Sequence
  Description of Artificial Sequence: Synthetic oligonucleotide
  Sense strand starting at position 3182 of SEQ ID NO: 316967
cguguugcaggcuuguaua

SEQ ID NO: 454112 - RNA, 19 nt, Artificial Sequence
  Description of Artificial Sequence: Synthetic oligonucleotide
  Antisense Strand to SEQ ID NO: 454111
uauacaagccugcaacacg

SEQ ID NO: 454113 - RNA, 19 nt, Artificial Sequence
  Description of Artificial Sequence: Synthetic oligonucleotide
  Sense strand starting at position 3436 of SEQ ID NO: 316967
auccuuucugacugucaga

SEQ ID NO: 454114 - RNA, 19 nt, Artificial Sequence
  Description of Artificial Sequence: Synthetic oligonucleotide
  Antisense Strand to SEQ ID NO: 454113
ucugacagucagaaaggau

SEQ ID NO: 454115 - RNA, 19 nt, Artificial Sequence
  Description of Artificial Sequence: Synthetic oligonucleotide
  Sense strand starting at position 3446 of SEQ ID NO: 316967
acugucagacaauggguaa

SEQ ID NO: 454116 - RNA, 19 nt, Artificial Sequence
  Description of Artificial Sequence: Synthetic oligonucleotide
  Antisense Strand to SEQ ID NO: 454115
uuacccauugucugacagu

SEQ ID NO: 454117 - RNA, 19 nt, Artificial Sequence
  Description of Artificial Sequence: Synthetic oligonucleotide
  Sense strand starting at position 3527 of SEQ ID NO: 316967
gacauucuguaaucuggau

SEQ ID NO: 454118 - RNA, 19 nt, Artificial Sequence
  Description of Artificial Sequence: Synthetic oligonucleotide
  Antisense Strand to SEQ ID NO: 454117
auccagauuacagaauguc

SEQ ID NO: 454119 - RNA, 19 nt, Artificial Sequence
  Description of Artificial Sequence: Synthetic oligonucleotide
  Sense strand starting at position 3531 of SEQ ID NO: 316967
uucuguaaucuggauguuu

SEQ ID NO: 454120 - RNA, 19 nt, Artificial Sequence
  Description of Artificial Sequence: Synthetic oligonucleotide
  Antisense Strand to SEQ ID NO: 454119
aaacauccagauuacagaa

SEQ ID NO: 454121 - RNA, 19 nt, Artificial Sequence
  Description of Artificial Sequence: Synthetic oligonucleotide
  Sense strand starting at position 3533 of SEQ ID NO: 316967
cuguaaucuggauguuuga

SEQ ID NO: 454122 - RNA, 19 nt, Artificial Sequence
  Description of Artificial Sequence: Synthetic oligonucleotide
  Antisense Strand to SEQ ID NO: 454121
ucaaacauccagauuacag

SEQ ID NO: 454123 - RNA, 19 nt, Artificial Sequence
  Description of Artificial Sequence: Synthetic oligonucleotide
  Sense strand starting at position 3536 of SEQ ID NO: 316967
uaaucuggauguuugauau

SEQ ID NO: 454124 - RNA, 19 nt, Artificial Sequence
  Description of Artificial Sequence: Synthetic oligonucleotide
  Antisense Strand to SEQ ID NO: 454123
auaucaaacauccagauua

SEQ ID NO: 454125 - RNA, 19 nt, Artificial Sequence
  Description of Artificial Sequence: Synthetic oligonucleotide
  Sense strand starting at position 3542 of SEQ ID NO: 316967
ggauguuugauaugcucua

SEQ ID NO: 454126 - RNA, 19 nt, Artificial Sequence
  Description of Artificial Sequence: Synthetic oligonucleotide
  Antisense Strand to SEQ ID NO: 454125
uagagcauaucaaacaucc

SEQ ID NO: 454127 - RNA, 19 nt, Artificial Sequence
  Description of Artificial Sequence: Synthetic oligonucleotide
  Sense strand starting at position 3543 of SEQ ID NO: 316967
gauguuugauaugcucuaa

SEQ ID NO: 454128 - RNA, 19 nt, Artificial Sequence
  Description of Artificial Sequence: Synthetic oligonucleotide
  Antisense Strand to SEQ ID NO: 454127
uuagagcauaucaaacauc

SEQ ID NO: 454129 - RNA, 19 nt, Artificial Sequence
  Description of Artificial Sequence: Synthetic oligonucleotide
  Sense strand starting at position 3658 of SEQ ID NO: 316967
gccugcugaguggauaaau

SEQ ID NO: 454130 - RNA, 19 nt, Artificial Sequence
  Description of Artificial Sequence: Synthetic oligonucleotide
  Antisense Strand to SEQ ID NO: 454129
auuuauccacucagcaggc

SEQ ID NO: 454131 - RNA, 19 nt, Artificial Sequence
  Description of Artificial Sequence: Synthetic oligonucleotide
  Sense strand starting at position 3725 of SEQ ID NO: 316967
aguugacuuauggguuaaa

SEQ ID NO: 454132 - RNA, 19 nt, Artificial Sequence
  Description of Artificial Sequence: Synthetic oligonucleotide
  Antisense Strand to SEQ ID NO: 454131
uuuaacccauaagucaacu

SEQ ID NO: 454133 - RNA, 19 nt, Artificial Sequence
  Description of Artificial Sequence: Synthetic oligonucleotide
  Sense strand starting at position 3770 of SEQ ID NO: 316967
auaagaaaguugucaugac

SEQ ID NO: 454134 - RNA, 19 nt, Artificial Sequence
  Description of Artificial Sequence: Synthetic oligonucleotide
  Antisense Strand to SEQ ID NO: 454133
gucaugacaacuuucuuau

SEQ ID NO: 454135 - RNA, 19 nt, Artificial Sequence
  Description of Artificial Sequence: Synthetic oligonucleotide
  Sense strand starting at position 126 of SEQ ID NO: 316968
uuguuuaauggcugaacaa

SEQ ID NO: 454136 - RNA, 19 nt, Artificial Sequence
  Description of Artificial Sequence: Synthetic oligonucleotide
  Antisense Strand to SEQ ID NO: 454135
uuguucagccauuaaacaa

SEQ ID NO: 454137 - RNA, 19 nt, Artificial Sequence
  Description of Artificial Sequence: Synthetic oligonucleotide
  Sense strand starting at position 127 of SEQ ID NO: 316968
uguuuaauggcugaacaaa

SEQ ID NO: 454138 - RNA, 19 nt, Artificial Sequence
  Description of Artificial Sequence: Synthetic oligonucleotide
  Antisense Strand to SEQ ID NO: 454137
uuuguucagccauuaaaca

SEQ ID NO: 454139 - RNA, 19 nt, Artificial Sequence
  Description of Artificial Sequence: Synthetic oligonucleotide
  Sense strand starting at position 231 of SEQ ID NO: 316968
gguuacaucgucguugcua

SEQ ID NO: 454140 - RNA, 19 nt, Artificial Sequence
  Description of Artificial Sequence: Synthetic oligonucleotide
  Antisense Strand to SEQ ID NO: 454139
uagcaacgacgauguaacc

SEQ ID NO: 454141 - RNA, 19 nt, Artificial Sequence
  Description of Artificial Sequence: Synthetic oligonucleotide
  Sense strand starting at position 454 of SEQ ID NO: 316968
guaagugguagagauguau

SEQ ID NO: 454142 - RNA, 19 nt, Artificial Sequence
  Description of Artificial Sequence: Synthetic oligonucleotide
  Antisense Strand to SEQ ID NO: 454141
auacaucucuaccacuuac

SEQ ID NO: 454143 - RNA, 19 nt, Artificial Sequence
  Description of Artificial Sequence: Synthetic oligonucleotide
  Sense strand starting at position 460 of SEQ ID NO: 316968
gguagagauguaugaaauc

SEQ ID NO: 454144 - RNA, 19 nt, Artificial Sequence
  Description of Artificial Sequence: Synthetic oligonucleotide
  Antisense Strand to SEQ ID NO: 454143
gauuucauacaucucuacc

SEQ ID NO: 454145 - RNA, 19 nt, Artificial Sequence
  Description of Artificial Sequence: Synthetic oligonucleotide
  Sense strand starting at position 643 of SEQ ID NO: 316968
accagucaucguuaaguga

SEQ ID NO: 454146 - RNA, 19 nt, Artificial Sequence
  Description of Artificial Sequence: Synthetic oligonucleotide
  Antisense Strand to SEQ ID NO: 454145
ucacuuaacgaugacuggu

SEQ ID NO: 454147 - RNA, 19 nt, Artificial Sequence
  Description of Artificial Sequence: Synthetic oligonucleotide
  Sense strand starting at position 652 of SEQ ID NO: 316968
cguuaagugagccauacaa

SEQ ID NO: 454148 - RNA, 19 nt, Artificial Sequence
  Description of Artificial Sequence: Synthetic oligonucleotide
  Antisense Strand to SEQ ID NO: 454147
uuguauggcucacuuaacg

SEQ ID NO: 454149 - RNA, 19 nt, Artificial Sequence
  Description of Artificial Sequence: Synthetic oligonucleotide
  Sense strand starting at position 691 of SEQ ID NO: 316968
gauguaaacuguuuaucga

SEQ ID NO: 454150 - RNA, 19 nt, Artificial Sequence
  Description of Artificial Sequence: Synthetic oligonucleotide
  Antisense Strand to SEQ ID NO: 454149
ucgauaaacaguuuacauc

SEQ ID NO: 454151 - RNA, 19 nt, Artificial Sequence
  Description of Artificial Sequence: Synthetic oligonucleotide
  Sense strand starting at position 762 of SEQ ID NO: 316968
cgaaauccauagccugaaa

SEQ ID NO: 454152 - RNA, 19 nt, Artificial Sequence
  Description of Artificial Sequence: Synthetic oligonucleotide
  Antisense Strand to SEQ ID NO: 454151
uuucaggcuauggauuucg

SEQ ID NO: 454153 - RNA, 19 nt, Artificial Sequence
  Description of Artificial Sequence: Synthetic oligonucleotide
  Sense strand starting at position 926 of SEQ ID NO: 316968
gggacugcuaagcaguaaa

SEQ ID NO: 454154 - RNA, 19 nt, Artificial Sequence
  Description of Artificial Sequence: Synthetic oligonucleotide
  Antisense Strand to SEQ ID NO: 454153
uuuacugcuuagcaguccc

SEQ ID NO: 454155 - RNA, 19 nt, Artificial Sequence
  Description of Artificial Sequence: Synthetic oligonucleotide
  Sense strand starting at position 929 of SEQ ID NO: 316968
acugcuaagcaguaaauca

SEQ ID NO: 454156 - RNA, 19 nt, Artificial Sequence
  Description of Artificial Sequence: Synthetic oligonucleotide
  Antisense Strand to SEQ ID NO: 454155
ugauuuacugcuuagcagu

SEQ ID NO: 454157 - RNA, 19 nt, Artificial Sequence
  Description of Artificial Sequence: Synthetic oligonucleotide
  Sense strand starting at position 2273 of SEQ ID NO: 316968
cagaaaucacuguguggag

SEQ ID NO: 454158 - RNA, 19 nt, Artificial Sequence
  Description of Artificial Sequence: Synthetic oligonucleotide
  Antisense Strand to SEQ ID NO: 454157
cuccacacagugauuucug

SEQ ID NO: 454159 - RNA, 19 nt, Artificial Sequence
  Description of Artificial Sequence: Synthetic oligonucleotide
  Sense strand starting at position 2274 of SEQ ID NO: 316968
agaaaucacuguguggaga

SEQ ID NO: 454160 - RNA, 19 nt, Artificial Sequence
  Description of Artificial Sequence: Synthetic oligonucleotide
  Antisense Strand to SEQ ID NO: 454159
ucuccacacagugauuucu

SEQ ID NO: 454161 - RNA, 19 nt, Artificial Sequence
  Description of Artificial Sequence: Synthetic oligonucleotide
  Sense strand starting at position 2486 of SEQ ID NO: 316968
gacaucugcgcugaugacu

SEQ ID NO: 454162 - RNA, 19 nt, Artificial Sequence
  Description of Artificial Sequence: Synthetic oligonucleotide
  Antisense Strand to SEQ ID NO: 454161
agucaucagcgcagauguc

SEQ ID NO: 454163 - RNA, 19 nt, Artificial Sequence
  Description of Artificial Sequence: Synthetic oligonucleotide
  Sense strand starting at position 2622 of SEQ ID NO: 316968
uaguuauauuuguuaccgu

SEQ ID NO: 454164 - RNA, 19 nt, Artificial Sequence
  Description of Artificial Sequence: Synthetic oligonucleotide
  Antisense Strand to SEQ ID NO: 454163
acgguaacaaauauaacua

SEQ ID NO: 454165 - RNA, 19 nt, Artificial Sequence
  Description of Artificial Sequence: Synthetic oligonucleotide
  Sense strand starting at position 2937 of SEQ ID NO: 316968
uuaagaaagucagcaauau

SEQ ID NO: 454166 - RNA, 19 nt, Artificial Sequence
  Description of Artificial Sequence: Synthetic oligonucleotide
  Antisense Strand to SEQ ID NO: 454165
auauugcugacuuucuuaa

SEQ ID NO: 454167 - RNA, 19 nt, Artificial Sequence
  Description of Artificial Sequence: Synthetic oligonucleotide
  Sense strand starting at position 3037 of SEQ ID NO: 316968
cuuagaucaguaggacauu

SEQ ID NO: 454168 - RNA, 19 nt, Artificial Sequence
  Description of Artificial Sequence: Synthetic oligonucleotide
  Antisense Strand to SEQ ID NO: 454167
aauguccuacugaucuaag

SEQ ID NO: 454169 - RNA, 19 nt, Artificial Sequence
  Description of Artificial Sequence: Synthetic oligonucleotide
  Sense strand starting at position 3038 of SEQ ID NO: 316968
uuagaucaguaggacauuu

SEQ ID NO: 454170 - RNA, 19 nt, Artificial Sequence
  Description of Artificial Sequence: Synthetic oligonucleotide
  Antisense Strand to SEQ ID NO: 454169
aaauguccuacugaucuaa

SEQ ID NO: 454171 - RNA, 19 nt, Artificial Sequence
  Description of Artificial Sequence: Synthetic oligonucleotide
  Sense strand starting at position 3046 of SEQ ID NO: 316968
guaggacauuuguacuaag

SEQ ID NO: 454172 - RNA, 19 nt, Artificial Sequence
  Description of Artificial Sequence: Synthetic oligonucleotide
  Antisense Strand to SEQ ID NO: 454171
cuuaguacaaauguccuac

SEQ ID NO: 454173 - RNA, 19 nt, Artificial Sequence
  Description of Artificial Sequence: Synthetic oligonucleotide
  Sense strand starting at position 3049 of SEQ ID NO: 316968
ggacauuuguacuaagaau

SEQ ID NO: 454174 - RNA, 19 nt, Artificial Sequence
  Description of Artificial Sequence: Synthetic oligonucleotide
  Antisense Strand to SEQ ID NO: 454173
auucuuaguacaaaugucc

SEQ ID NO: 454175 - RNA, 19 nt, Artificial Sequence
  Description of Artificial Sequence: Synthetic oligonucleotide
  Sense strand starting at position 3181 of SEQ ID NO: 316968
augagauauugucugacag

SEQ ID NO: 454176 - RNA, 19 nt, Artificial Sequence
  Description of Artificial Sequence: Synthetic oligonucleotide
  Antisense Strand to SEQ ID NO: 454175
cugucagacaauaucucau

SEQ ID NO: 454177 - RNA, 19 nt, Artificial Sequence
  Description of Artificial Sequence: Synthetic oligonucleotide
  Sense strand starting at position 3182 of SEQ ID NO: 316968
ugagauauugucugacagg

SEQ ID NO: 454178 - RNA, 19 nt, Artificial Sequence
  Description of Artificial Sequence: Synthetic oligonucleotide
  Antisense Strand to SEQ ID NO: 454177
ccugucagacaauaucuca

SEQ ID NO: 454179 - RNA, 19 nt, Artificial Sequence
  Description of Artificial Sequence: Synthetic oligonucleotide
  Sense strand starting at position 3230 of SEQ ID NO: 316968
acuugaaggauugguuaug

SEQ ID NO: 454180 - RNA, 19 nt, Artificial Sequence
  Description of Artificial Sequence: Synthetic oligonucleotide
  Antisense Strand to SEQ ID NO: 454179
cauaaccaauccuucaagu

SEQ ID NO: 454181 - RNA, 19 nt, Artificial Sequence
  Description of Artificial Sequence: Synthetic oligonucleotide
  Sense strand starting at position 3236 of SEQ ID NO: 316968
aggauugguuauguuugga

SEQ ID NO: 454182 - RNA, 19 nt, Artificial Sequence
  Description of Artificial Sequence: Synthetic oligonucleotide
  Antisense Strand to SEQ ID NO: 454181
uccaaacauaaccaauccu

SEQ ID NO: 454183 - RNA, 19 nt, Artificial Sequence
  Description of Artificial Sequence: Synthetic oligonucleotide
  Sense strand starting at position 3306 of SEQ ID NO: 316968
ggaaacuugugagcaaaca

SEQ ID NO: 454184 - RNA, 19 nt, Artificial Sequence
  Description of Artificial Sequence: Synthetic oligonucleotide
  Antisense Strand to SEQ ID NO: 454183
uguuugcucacaaguuucc

SEQ ID NO: 454185 - RNA, 19 nt, Artificial Sequence
  Description of Artificial Sequence: Synthetic oligonucleotide
  Sense strand starting at position 3332 of SEQ ID NO: 316968
guuggaaaggcaugacacu

SEQ ID NO: 454186 - RNA, 19 nt, Artificial Sequence
  Description of Artificial Sequence: Synthetic oligonucleotide
  Antisense Strand to SEQ ID NO: 454185
agugucaugccuuuccaac

SEQ ID NO: 454187 - RNA, 19 nt, Artificial Sequence
  Description of Artificial Sequence: Synthetic oligonucleotide
  Sense strand starting at position 3338 of SEQ ID NO: 316968
aaggcaugacacuguuauu

SEQ ID NO: 454188 - RNA, 19 nt, Artificial Sequence
  Description of Artificial Sequence: Synthetic oligonucleotide
  Antisense Strand to SEQ ID NO: 454187
aauaacagugucaugccuu

SEQ ID NO: 454189 - RNA, 19 nt, Artificial Sequence
  Description of Artificial Sequence: Synthetic oligonucleotide
  Sense strand starting at position 3428 of SEQ ID NO: 316968
gaaagauaggccggguuca

SEQ ID NO: 454190 - RNA, 19 nt, Artificial Sequence
  Description of Artificial Sequence: Synthetic oligonucleotide
  Antisense Strand to SEQ ID NO: 454189
ugaacccggccuaucuuuc

SEQ ID NO: 454191 - RNA, 19 nt, Artificial Sequence
  Description of Artificial Sequence: Synthetic oligonucleotide
  Sense strand starting at position 3450 of SEQ ID NO: 316968
gccugauccgcaguuguca

SEQ ID NO: 454192 - RNA, 19 nt, Artificial Sequence
  Description of Artificial Sequence: Synthetic oligonucleotide
  Antisense Strand to SEQ ID NO: 454191
ugacaacugcggaucaggc

SEQ ID NO: 454193 - RNA, 19 nt, Artificial Sequence
  Description of Artificial Sequence: Synthetic oligonucleotide
  Sense strand starting at position 3468 of SEQ ID NO: 316968
acguguugcaggcuuguau

SEQ ID NO: 454194 - RNA, 19 nt, Artificial Sequence
  Description of Artificial Sequence: Synthetic oligonucleotide
  Antisense Strand to SEQ ID NO: 454193
auacaagccugcaacacgu

SEQ ID NO: 454195 - RNA, 19 nt, Artificial Sequence
  Description of Artificial Sequence: Synthetic oligonucleotide
  Sense strand starting at position 3469 of SEQ ID NO: 316968
cguguugcaggcuuguaua

SEQ ID NO: 454196 - RNA, 19 nt, Artificial Sequence
  Description of Artificial Sequence: Synthetic oligonucleotide
  Antisense Strand to SEQ ID NO: 454195
uauacaagccugcaacacg

SEQ ID NO: 454197 - RNA, 19 nt, Artificial Sequence
  Description of Artificial Sequence: Synthetic oligonucleotide
  Sense strand starting at position 3723 of SEQ ID NO: 316968
auccuuucugacugucaga

SEQ ID NO: 454198 - RNA, 19 nt, Artificial Sequence
  Description of Artificial Sequence: Synthetic oligonucleotide
  Antisense Strand to SEQ ID NO: 454197
ucugacagucagaaaggau

SEQ ID NO: 454199 - RNA, 19 nt, Artificial Sequence
  Description of Artificial Sequence: Synthetic oligonucleotide
  Sense strand starting at position 3733 of SEQ ID NO: 316968
acugucagacaauggguaa

SEQ ID NO: 454200 - RNA, 19 nt, Artificial Sequence
  Description of Artificial Sequence: Synthetic oligonucleotide
  Antisense Strand to SEQ ID NO: 454199
uuacccauugucugacagu

SEQ ID NO: 454201 - RNA, 19 nt, Artificial Sequence
  Description of Artificial Sequence: Synthetic oligonucleotide
  Sense strand starting at position 3814 of SEQ ID NO: 316968
gacauucuguaaucuggau

SEQ ID NO: 454202 - RNA, 19 nt, Artificial Sequence
  Description of Artificial Sequence: Synthetic oligonucleotide
  Antisense Strand to SEQ ID NO: 454201
auccagauuacagaauguc

SEQ ID NO: 454203 - RNA, 19 nt, Artificial Sequence
  Description of Artificial Sequence: Synthetic oligonucleotide
  Sense strand starting at position 3818 of SEQ ID NO: 316968
uucuguaaucuggauguuu

SEQ ID NO: 454204 - RNA, 19 nt, Artificial Sequence
  Description of Artificial Sequence: Synthetic oligonucleotide
  Antisense Strand to SEQ ID NO: 454203
aaacauccagauuacagaa

SEQ ID NO: 454205 - RNA, 19 nt, Artificial Sequence
  Description of Artificial Sequence: Synthetic oligonucleotide
  Sense strand starting at position 3820 of SEQ ID NO: 316968
cuguaaucuggauguuuga

SEQ ID NO: 454206 - RNA, 19 nt, Artificial Sequence
  Description of Artificial Sequence: Synthetic oligonucleotide
  Antisense Strand to SEQ ID NO: 454205
ucaaacauccagauuacag

SEQ ID NO: 454207 - RNA, 19 nt, Artificial Sequence
  Description of Artificial Sequence: Synthetic oligonucleotide
  Sense strand starting at position 3823 of SEQ ID NO: 316968
uaaucuggauguuugauau

SEQ ID NO: 454208 - RNA, 19 nt, Artificial Sequence
  Description of Artificial Sequence: Synthetic oligonucleotide
  Antisense Strand to SEQ ID NO: 454207
auaucaaacauccagauua

SEQ ID NO: 454209 - RNA, 19 nt, Artificial Sequence
  Description of Artificial Sequence: Synthetic oligonucleotide
  Sense strand starting at position 3829 of SEQ ID NO: 316968
ggauguuugauaugcucua

SEQ ID NO: 454210 - RNA, 19 nt, Artificial Sequence
  Description of Artificial Sequence: Synthetic oligonucleotide
  Antisense Strand to SEQ ID NO: 454209
uagagcauaucaaacaucc

SEQ ID NO: 454211 - RNA, 19 nt, Artificial Sequence
  Description of Artificial Sequence: Synthetic oligonucleotide
  Sense strand starting at position 3830 of SEQ ID NO: 316968
gauguuugauaugcucuaa

SEQ ID NO: 454212 - RNA, 19 nt, Artificial Sequence
  Description of Artificial Sequence: Synthetic oligonucleotide
  Antisense Strand to SEQ ID NO: 454211
uuagagcauaucaaacauc

SEQ ID NO: 454213 - RNA, 19 nt, Artificial Sequence
  Description of Artificial Sequence: Synthetic oligonucleotide
  Sense strand starting at position 3945 of SEQ ID NO: 316968
gccugcugaguggauaaau

SEQ ID NO: 454214 - RNA, 19 nt, Artificial Sequence
  Description of Artificial Sequence: Synthetic oligonucleotide
  Antisense Strand to SEQ ID NO: 454213
auuuauccacucagcaggc

SEQ ID NO: 454215 - RNA, 19 nt, Artificial Sequence
  Description of Artificial Sequence: Synthetic oligonucleotide
  Sense strand starting at position 30 of SEQ ID NO: 316969
cuuguuuguagugaaauau

SEQ ID NO: 454216 - RNA, 19 nt, Artificial Sequence
  Description of Artificial Sequence: Synthetic oligonucleotide
  Antisense Strand to SEQ ID NO: 454215
auauuucacuacaaacaag

SEQ ID NO: 454217 - RNA, 19 nt, Artificial Sequence
  Description of Artificial Sequence: Synthetic oligonucleotide
  Sense strand starting at position 113 of SEQ ID NO: 316969
aguacuaagcauugugaag

SEQ ID NO: 454218 - RNA, 19 nt, Artificial Sequence
  Description of Artificial Sequence: Synthetic oligonucleotide
  Antisense Strand to SEQ ID NO: 454217
cuucacaaugcuuaguacu

SEQ ID NO: 454219 - RNA, 19 nt, Artificial Sequence
  Description of Artificial Sequence: Synthetic oligonucleotide
  Sense strand starting at position 150 of SEQ ID NO: 316969
uugguauugccauaaauaa

SEQ ID NO: 454220 - RNA, 19 nt, Artificial Sequence
  Description of Artificial Sequence: Synthetic oligonucleotide
  Antisense Strand to SEQ ID NO: 454219
uuauuuauggcaauaccaa

SEQ ID NO: 454221 - RNA, 19 nt, Artificial Sequence
  Description of Artificial Sequence: Synthetic oligonucleotide
  Sense strand starting at position 190 of SEQ ID NO: 316969
uuccucauucuccgaauga

SEQ ID NO: 454222 - RNA, 19 nt, Artificial Sequence
  Description of Artificial Sequence: Synthetic oligonucleotide
  Antisense Strand to SEQ ID NO: 454221
ucauucggagaaugaggaa

SEQ ID NO: 454223 - RNA, 19 nt, Artificial Sequence
  Description of Artificial Sequence: Synthetic oligonucleotide
  Sense strand starting at position 194 of SEQ ID NO: 316969
ucauucuccgaaugacaga

SEQ ID NO: 454224 - RNA, 19 nt, Artificial Sequence
  Description of Artificial Sequence: Synthetic oligonucleotide
  Antisense Strand to SEQ ID NO: 454223
ucugucauucggagaauga

SEQ ID NO: 454225 - RNA, 19 nt, Artificial Sequence
  Description of Artificial Sequence: Synthetic oligonucleotide
  Sense strand starting at position 528 of SEQ ID NO: 316969
auauuuaacuacgguaaca

SEQ ID NO: 454226 - RNA, 19 nt, Artificial Sequence
  Description of Artificial Sequence: Synthetic oligonucleotide
  Antisense Strand to SEQ ID NO: 454225
uguuaccguaguuaaauau

SEQ ID NO: 454227 - RNA, 19 nt, Artificial Sequence
  Description of Artificial Sequence: Synthetic oligonucleotide
  Sense strand starting at position 791 of SEQ ID NO: 316969
guuguuuaauggcugaaca

SEQ ID NO: 454228 - RNA, 19 nt, Artificial Sequence
  Description of Artificial Sequence: Synthetic oligonucleotide
  Antisense Strand to SEQ ID NO: 454227
uguucagccauuaaacaac

SEQ ID NO: 454229 - RNA, 19 nt, Artificial Sequence
  Description of Artificial Sequence: Synthetic oligonucleotide
  Sense strand starting at position 792 of SEQ ID NO: 316969
uuguuuaauggcugaacaa

SEQ ID NO: 454230 - RNA, 19 nt, Artificial Sequence
  Description of Artificial Sequence: Synthetic oligonucleotide
  Antisense Strand to SEQ ID NO: 454229
uuguucagccauuaaacaa

SEQ ID NO: 454231 - RNA, 19 nt, Artificial Sequence
  Description of Artificial Sequence: Synthetic oligonucleotide
  Sense strand starting at position 793 of SEQ ID NO: 316969
uguuuaauggcugaacaaa

SEQ ID NO: 454232 - RNA, 19 nt, Artificial Sequence
  Description of Artificial Sequence: Synthetic oligonucleotide
  Antisense Strand to SEQ ID NO: 454231
uuuguucagccauuaaaca

SEQ ID NO: 454233 - RNA, 19 nt, Artificial Sequence
  Description of Artificial Sequence: Synthetic oligonucleotide
  Sense strand starting at position 897 of SEQ ID NO: 316969
gguuacaucgucguugcua

SEQ ID NO: 454234 - RNA, 19 nt, Artificial Sequence
  Description of Artificial Sequence: Synthetic oligonucleotide
  Antisense Strand to SEQ ID NO: 454233
uagcaacgacgauguaacc

SEQ ID NO: 454235 - RNA, 19 nt, Artificial Sequence
  Description of Artificial Sequence: Synthetic oligonucleotide
  Sense strand starting at position 1073 of SEQ ID NO: 316969
acccauauguaacaggaaa

SEQ ID NO: 454236 - RNA, 19 nt, Artificial Sequence
  Description of Artificial Sequence: Synthetic oligonucleotide
  Antisense Strand to SEQ ID NO: 454235
uuuccuguuacauaugggu

SEQ ID NO: 454237 - RNA, 19 nt, Artificial Sequence
  Description of Artificial Sequence: Synthetic oligonucleotide
  Sense strand starting at position 1090 of SEQ ID NO: 316969
aaguuugacguuuguacaa

SEQ ID NO: 454238 - RNA, 19 nt, Artificial Sequence
  Description of Artificial Sequence: Synthetic oligonucleotide
  Antisense Strand to SEQ ID NO: 454237
uuguacaaacgucaaacuu

SEQ ID NO: 454239 - RNA, 19 nt, Artificial Sequence
  Description of Artificial Sequence: Synthetic oligonucleotide
  Sense strand starting at position 1106 of SEQ ID NO: 316969
caaagacaguucuaguaag

SEQ ID NO: 454240 - RNA, 19 nt, Artificial Sequence
  Description of Artificial Sequence: Synthetic oligonucleotide
  Antisense Strand to SEQ ID NO: 454239
cuuacuagaacugucuuug

SEQ ID NO: 454241 - RNA, 19 nt, Artificial Sequence
  Description of Artificial Sequence: Synthetic oligonucleotide
  Sense strand starting at position 1113 of SEQ ID NO: 316969
aguucuaguaagugguaga

SEQ ID NO: 454242 - RNA, 19 nt, Artificial Sequence
  Description of Artificial Sequence: Synthetic oligonucleotide
  Antisense Strand to SEQ ID NO: 454241
ucuaccacuuacuagaacu

SEQ ID NO: 454243 - RNA, 19 nt, Artificial Sequence
  Description of Artificial Sequence: Synthetic oligonucleotide
  Sense strand starting at position 1120 of SEQ ID NO: 316969
guaagugguagagauguau

SEQ ID NO: 454244 - RNA, 19 nt, Artificial Sequence
  Description of Artificial Sequence: Synthetic oligonucleotide
  Antisense Strand to SEQ ID NO: 454243
auacaucucuaccacuuac

SEQ ID NO: 454245 - RNA, 19 nt, Artificial Sequence
  Description of Artificial Sequence: Synthetic oligonucleotide
  Sense strand starting at position 1126 of SEQ ID NO: 316969
gguagagauguaugaaauc

SEQ ID NO: 454246 - RNA, 19 nt, Artificial Sequence
  Description of Artificial Sequence: Synthetic oligonucleotide
  Antisense Strand to SEQ ID NO: 454245
gauuucauacaucucuacc

SEQ ID NO: 454247 - RNA, 19 nt, Artificial Sequence
  Description of Artificial Sequence: Synthetic oligonucleotide
  Sense strand starting at position 1169 of SEQ ID NO: 316969
uagugaaauuaccauagga

SEQ ID NO: 454248 - RNA, 19 nt, Artificial Sequence
  Description of Artificial Sequence: Synthetic oligonucleotide
  Antisense Strand to SEQ ID NO: 454247
uccuaugguaauuucacua

SEQ ID NO: 454249 - RNA, 19 nt, Artificial Sequence
  Description of Artificial Sequence: Synthetic oligonucleotide
  Sense strand starting at position 1309 of SEQ ID NO: 316969
accagucaucguuaaguga

SEQ ID NO: 454250 - RNA, 19 nt, Artificial Sequence
  Description of Artificial Sequence: Synthetic oligonucleotide
  Antisense Strand to SEQ ID NO: 454249
ucacuuaacgaugacuggu

SEQ ID NO: 454251 - RNA, 19 nt, Artificial Sequence
  Description of Artificial Sequence: Synthetic oligonucleotide
  Sense strand starting at position 1318 of SEQ ID NO: 316969
cguuaagugagccauacaa

SEQ ID NO: 454252 - RNA, 19 nt, Artificial Sequence
  Description of Artificial Sequence: Synthetic oligonucleotide
  Antisense Strand to SEQ ID NO: 454251
uuguauggcucacuuaacg

SEQ ID NO: 454253 - RNA, 19 nt, Artificial Sequence
  Description of Artificial Sequence: Synthetic oligonucleotide
  Sense strand starting at position 1357 of SEQ ID NO: 316969
gauguaaacuguuuaucga

SEQ ID NO: 454254 - RNA, 19 nt, Artificial Sequence
  Description of Artificial Sequence: Synthetic oligonucleotide
  Antisense Strand to SEQ ID NO: 454253
ucgauaaacaguuuacauc

SEQ ID NO: 454255 - RNA, 19 nt, Artificial Sequence
  Description of Artificial Sequence: Synthetic oligonucleotide
  Sense strand starting at position 1428 of SEQ ID NO: 316969
cgaaauccauagccugaaa

SEQ ID NO: 454256 - RNA, 19 nt, Artificial Sequence
  Description of Artificial Sequence: Synthetic oligonucleotide
  Antisense Strand to SEQ ID NO: 454255
uuucaggcuauggauuucg

SEQ ID NO: 454257 - RNA, 19 nt, Artificial Sequence
  Description of Artificial Sequence: Synthetic oligonucleotide
  Sense strand starting at position 1592 of SEQ ID NO: 316969
gggacugcuaagcaguaaa

SEQ ID NO: 454258 - RNA, 19 nt, Artificial Sequence
  Description of Artificial Sequence: Synthetic oligonucleotide
  Antisense Strand to SEQ ID NO: 454257
uuuacugcuuagcaguccc

SEQ ID NO: 454259 - RNA, 19 nt, Artificial Sequence
  Description of Artificial Sequence: Synthetic oligonucleotide
  Sense strand starting at position 1595 of SEQ ID NO: 316969
acugcuaagcaguaaauca

SEQ ID NO: 454260 - RNA, 19 nt, Artificial Sequence
  Description of Artificial Sequence: Synthetic oligonucleotide
  Antisense Strand to SEQ ID NO: 454259
ugauuuacugcuuagcagu

SEQ ID NO: 454261 - RNA, 19 nt, Artificial Sequence
  Description of Artificial Sequence: Synthetic oligonucleotide
  Sense strand starting at position 2939 of SEQ ID NO: 316969
cagaaaucacuguguggag

SEQ ID NO: 454262 - RNA, 19 nt, Artificial Sequence
  Description of Artificial Sequence: Synthetic oligonucleotide
  Antisense Strand to SEQ ID NO: 454261
cuccacacagugauuucug

SEQ ID NO: 454263 - RNA, 19 nt, Artificial Sequence
  Description of Artificial Sequence: Synthetic oligonucleotide
  Sense strand starting at position 2940 of SEQ ID NO: 316969
agaaaucacuguguggaga

SEQ ID NO: 454264 - RNA, 19 nt, Artificial Sequence
  Description of Artificial Sequence: Synthetic oligonucleotide
  Antisense Strand to SEQ ID NO: 454263
ucuccacacagugauuucu

SEQ ID NO: 454265 - RNA, 19 nt, Artificial Sequence
  Description of Artificial Sequence: Synthetic oligonucleotide
  Sense strand starting at position 3148 of SEQ ID NO: 316969
aguugacaucugcgcugau

SEQ ID NO: 454266 - RNA, 19 nt, Artificial Sequence
  Description of Artificial Sequence: Synthetic oligonucleotide
  Antisense Strand to SEQ ID NO: 454265
aucagcgcagaugucaacu

SEQ ID NO: 454267 - RNA, 19 nt, Artificial Sequence
  Description of Artificial Sequence: Synthetic oligonucleotide
  Sense strand starting at position 3152 of SEQ ID NO: 316969
gacaucugcgcugaugacu

SEQ ID NO: 454268 - RNA, 19 nt, Artificial Sequence
  Description of Artificial Sequence: Synthetic oligonucleotide
  Antisense Strand to SEQ ID NO: 454267
agucaucagcgcagauguc

SEQ ID NO: 454269 - RNA, 19 nt, Artificial Sequence
  Description of Artificial Sequence: Synthetic oligonucleotide
  Sense strand starting at position 3288 of SEQ ID NO: 316969
uaguuauauuuguuaccgu

SEQ ID NO: 454270 - RNA, 19 nt, Artificial Sequence
  Description of Artificial Sequence: Synthetic oligonucleotide
  Antisense Strand to SEQ ID NO: 454269
acgguaacaaauauaacua

SEQ ID NO: 454271 - RNA, 19 nt, Artificial Sequence
  Description of Artificial Sequence: Synthetic oligonucleotide
  Sense strand starting at position 3295 of SEQ ID NO: 316969
auuuguuaccguugugugu

SEQ ID NO: 454272 - RNA, 19 nt, Artificial Sequence
  Description of Artificial Sequence: Synthetic oligonucleotide
  Antisense Strand to SEQ ID NO: 454271
acacacaacgguaacaaau

SEQ ID NO: 454273 - RNA, 19 nt, Artificial Sequence
  Description of Artificial Sequence: Synthetic oligonucleotide
  Sense strand starting at position 3603 of SEQ ID NO: 316969
uuaagaaagucagcaauau

SEQ ID NO: 454274 - RNA, 19 nt, Artificial Sequence
  Description of Artificial Sequence: Synthetic oligonucleotide
  Antisense Strand to SEQ ID NO: 454273
auauugcugacuuucuuaa

SEQ ID NO: 454275 - RNA, 19 nt, Artificial Sequence
  Description of Artificial Sequence: Synthetic oligonucleotide
  Sense strand starting at position 3703 of SEQ ID NO: 316969
cuuagaucaguaggacauu

SEQ ID NO: 454276 - RNA, 19 nt, Artificial Sequence
  Description of Artificial Sequence: Synthetic oligonucleotide
  Antisense Strand to SEQ ID NO: 454275
aauguccuacugaucuaag

SEQ ID NO: 454277 - RNA, 19 nt, Artificial Sequence
  Description of Artificial Sequence: Synthetic oligonucleotide
  Sense strand starting at position 3704 of SEQ ID NO: 316969
uuagaucaguaggacauuu

SEQ ID NO: 454278 - RNA, 19 nt, Artificial Sequence
  Description of Artificial Sequence: Synthetic oligonucleotide
  Antisense Strand to SEQ ID NO: 454277
aaauguccuacugaucuaa

SEQ ID NO: 454279 - RNA, 19 nt, Artificial Sequence
  Description of Artificial Sequence: Synthetic oligonucleotide
  Sense strand starting at position 3712 of SEQ ID NO: 316969
guaggacauuuguacuaag

SEQ ID NO: 454280 - RNA, 19 nt, Artificial Sequence
  Description of Artificial Sequence: Synthetic oligonucleotide
  Antisense Strand to SEQ ID NO: 454279
cuuaguacaaauguccuac

SEQ ID NO: 454281 - RNA, 19 nt, Artificial Sequence
  Description of Artificial Sequence: Synthetic oligonucleotide
  Sense strand starting at position 3715 of SEQ ID NO: 316969
ggacauuuguacuaagaau

SEQ ID NO: 454282 - RNA, 19 nt, Artificial Sequence
  Description of Artificial Sequence: Synthetic oligonucleotide
  Antisense Strand to SEQ ID NO: 454281
auucuuaguacaaaugucc

SEQ ID NO: 454283 - RNA, 19 nt, Artificial Sequence
  Description of Artificial Sequence: Synthetic oligonucleotide
  Sense strand starting at position 3847 of SEQ ID NO: 316969
augagauauugucugacag

SEQ ID NO: 454284 - RNA, 19 nt, Artificial Sequence
  Description of Artificial Sequence: Synthetic oligonucleotide
  Antisense Strand to SEQ ID NO: 454283
cugucagacaauaucucau

SEQ ID NO: 454285 - RNA, 19 nt, Artificial Sequence
  Description of Artificial Sequence: Synthetic oligonucleotide
  Sense strand starting at position 3848 of SEQ ID NO: 316969
ugagauauugucugacagg

SEQ ID NO: 454286 - RNA, 19 nt, Artificial Sequence
  Description of Artificial Sequence: Synthetic oligonucleotide
  Antisense Strand to SEQ ID NO: 454285
ccugucagacaauaucuca

SEQ ID NO: 454287 - RNA, 19 nt, Artificial Sequence
  Description of Artificial Sequence: Synthetic oligonucleotide
  Sense strand starting at position 3874 of SEQ ID NO: 316969
aaggaacaguacuagagau

SEQ ID NO: 454288 - RNA, 19 nt, Artificial Sequence
  Description of Artificial Sequence: Synthetic oligonucleotide
  Antisense Strand to SEQ ID NO: 454287
aucucuaguacuguuccuu

SEQ ID NO: 454289 - RNA, 19 nt, Artificial Sequence
  Description of Artificial Sequence: Synthetic oligonucleotide
  Sense strand starting at position 3896 of SEQ ID NO: 316969
acuugaaggauugguuaug

SEQ ID NO: 454290 - RNA, 19 nt, Artificial Sequence
  Description of Artificial Sequence: Synthetic oligonucleotide
  Antisense Strand to SEQ ID NO: 454289
cauaaccaauccuucaagu

SEQ ID NO: 454291 - RNA, 19 nt, Artificial Sequence
  Description of Artificial Sequence: Synthetic oligonucleotide
  Sense strand starting at position 3902 of SEQ ID NO: 316969
aggauugguuauguuugga

SEQ ID NO: 454292 - RNA, 19 nt, Artificial Sequence
  Description of Artificial Sequence: Synthetic oligonucleotide
  Antisense Strand to SEQ ID NO: 454291
uccaaacauaaccaauccu

SEQ ID NO: 454293 - RNA, 19 nt, Artificial Sequence
  Description of Artificial Sequence: Synthetic oligonucleotide
  Sense strand starting at position 3972 of SEQ ID NO: 316969
ggaaacuugugagcaaaca

SEQ ID NO: 454294 - RNA, 19 nt, Artificial Sequence
  Description of Artificial Sequence: Synthetic oligonucleotide
  Antisense Strand to SEQ ID NO: 454293
uguuugcucacaaguuucc

SEQ ID NO: 454295 - RNA, 19 nt, Artificial Sequence
  Description of Artificial Sequence: Synthetic oligonucleotide
  Sense strand starting at position 92 of SEQ ID NO: 316970
uuguuuaauggcugaacaa

SEQ ID NO: 454296 - RNA, 19 nt, Artificial Sequence
  Description of Artificial Sequence: Synthetic oligonucleotide
  Antisense Strand to SEQ ID NO: 454295
uuguucagccauuaaacaa

SEQ ID NO: 454297 - RNA, 19 nt, Artificial Sequence
  Description of Artificial Sequence: Synthetic oligonucleotide
  Sense strand starting at position 93 of SEQ ID NO: 316970
uguuuaauggcugaacaaa

SEQ ID NO: 454298 - RNA, 19 nt, Artificial Sequence
  Description of Artificial Sequence: Synthetic oligonucleotide
  Antisense Strand to SEQ ID NO: 454297
uuuguucagccauuaaaca

SEQ ID NO: 454299 - RNA, 19 nt, Artificial Sequence
  Description of Artificial Sequence: Synthetic oligonucleotide
  Sense strand starting at position 197 of SEQ ID NO: 316970
gguuacaucgucguugcua

SEQ ID NO: 454300 - RNA, 19 nt, Artificial Sequence
  Description of Artificial Sequence: Synthetic oligonucleotide
  Antisense Strand to SEQ ID NO: 454299
uagcaacgacgauguaacc

SEQ ID NO: 454301 - RNA, 19 nt, Artificial Sequence
  Description of Artificial Sequence: Synthetic oligonucleotide
  Sense strand starting at position 420 of SEQ ID NO: 316970
guaagugguagagauguau

SEQ ID NO: 454302 - RNA, 19 nt, Artificial Sequence
  Description of Artificial Sequence: Synthetic oligonucleotide
  Antisense Strand to SEQ ID NO: 454301
auacaucucuaccacuuac

SEQ ID NO: 454303 - RNA, 19 nt, Artificial Sequence
  Description of Artificial Sequence: Synthetic oligonucleotide
  Sense strand starting at position 426 of SEQ ID NO: 316970
gguagagauguaugaaauc

SEQ ID NO: 454304 - RNA, 19 nt, Artificial Sequence
  Description of Artificial Sequence: Synthetic oligonucleotide
  Antisense Strand to SEQ ID NO: 454303
gauuucauacaucucuacc

SEQ ID NO: 454305 - RNA, 19 nt, Artificial Sequence
  Description of Artificial Sequence: Synthetic oligonucleotide
  Sense strand starting at position 609 of SEQ ID NO: 316970
accagucaucguuaaguga

SEQ ID NO: 454306 - RNA, 19 nt, Artificial Sequence
  Description of Artificial Sequence: Synthetic oligonucleotide
  Antisense Strand to SEQ ID NO: 454305
ucacuuaacgaugacuggu

SEQ ID NO: 454307 - RNA, 19 nt, Artificial Sequence
  Description of Artificial Sequence: Synthetic oligonucleotide
  Sense strand starting at position 618 of SEQ ID NO: 316970
cguuaagugagccauacaa

SEQ ID NO: 454308 - RNA, 19 nt, Artificial Sequence
  Description of Artificial Sequence: Synthetic oligonucleotide
  Antisense Strand to SEQ ID NO: 454307
uuguauggcucacuuaacg

SEQ ID NO: 454309 - RNA, 19 nt, Artificial Sequence
  Description of Artificial Sequence: Synthetic oligonucleotide
  Sense strand starting at position 657 of SEQ ID NO: 316970
gauguaaacuguuuaucga

SEQ ID NO: 454310 - RNA, 19 nt, Artificial Sequence
  Description of Artificial Sequence: Synthetic oligonucleotide
  Antisense Strand to SEQ ID NO: 454309
ucgauaaacaguuuacauc

SEQ ID NO: 454311 - RNA, 19 nt, Artificial Sequence
  Description of Artificial Sequence: Synthetic oligonucleotide
  Sense strand starting at position 728 of SEQ ID NO: 316970
cgaaauccauagccugaaa

SEQ ID NO: 454312 - RNA, 19 nt, Artificial Sequence
  Description of Artificial Sequence: Synthetic oligonucleotide
  Antisense Strand to SEQ ID NO: 454311
uuucaggcuauggauuucg

SEQ ID NO: 454313 - RNA, 19 nt, Artificial Sequence
  Description of Artificial Sequence: Synthetic oligonucleotide
  Sense strand starting at position 892 of SEQ ID NO: 316970
gggacugcuaagcaguaaa

SEQ ID NO: 454314 - RNA, 19 nt, Artificial Sequence
  Description of Artificial Sequence: Synthetic oligonucleotide
  Antisense Strand to SEQ ID NO: 454313
uuuacugcuuagcaguccc

SEQ ID NO: 454315 - RNA, 19 nt, Artificial Sequence
  Description of Artificial Sequence: Synthetic oligonucleotide
  Sense strand starting at position 895 of SEQ ID NO: 316970
acugcuaagcaguaaauca

SEQ ID NO: 454316 - RNA, 19 nt, Artificial Sequence
  Description of Artificial Sequence: Synthetic oligonucleotide
  Antisense Strand to SEQ ID NO: 454315
ugauuuacugcuuagcagu

SEQ ID NO: 454317 - RNA, 19 nt, Artificial Sequence
  Description of Artificial Sequence: Synthetic oligonucleotide
  Sense strand starting at position 2239 of SEQ ID NO: 316970
cagaaaucacuguguggag

SEQ ID NO: 454318 - RNA, 19 nt, Artificial Sequence
  Description of Artificial Sequence: Synthetic oligonucleotide
  Antisense Strand to SEQ ID NO: 454317
cuccacacagugauuucug

SEQ ID NO: 454319 - RNA, 19 nt, Artificial Sequence
  Description of Artificial Sequence: Synthetic oligonucleotide
  Sense strand starting at position 2240 of SEQ ID NO: 316970
agaaaucacuguguggaga

SEQ ID NO: 454320 - RNA, 19 nt, Artificial Sequence
  Description of Artificial Sequence: Synthetic oligonucleotide
  Antisense Strand to SEQ ID NO: 454319
ucuccacacagugauuucu

SEQ ID NO: 454321 - RNA, 19 nt, Artificial Sequence
  Description of Artificial Sequence: Synthetic oligonucleotide
  Sense strand starting at position 2588 of SEQ ID NO: 316970
uaguuauauuuguuaccgu

SEQ ID NO: 454322 - RNA, 19 nt, Artificial Sequence
  Description of Artificial Sequence: Synthetic oligonucleotide
  Antisense Strand to SEQ ID NO: 454321
acgguaacaaauauaacua

SEQ ID NO: 454323 - RNA, 19 nt, Artificial Sequence
  Description of Artificial Sequence: Synthetic oligonucleotide
  Sense strand starting at position 2903 of SEQ ID NO: 316970
uuaagaaagucagcaauau

SEQ ID NO: 454324 - RNA, 19 nt, Artificial Sequence
  Description of Artificial Sequence: Synthetic oligonucleotide
  Antisense Strand to SEQ ID NO: 454323
auauugcugacuuucuuaa

SEQ ID NO: 454325 - RNA, 19 nt, Artificial Sequence
  Description of Artificial Sequence: Synthetic oligonucleotide
  Sense strand starting at position 3003 of SEQ ID NO: 316970
cuuagaucaguaggacauu

SEQ ID NO: 454326 - RNA, 19 nt, Artificial Sequence
  Description of Artificial Sequence: Synthetic oligonucleotide
  Antisense Strand to SEQ ID NO: 454325
aauguccuacugaucuaag

SEQ ID NO: 454327 - RNA, 19 nt, Artificial Sequence
  Description of Artificial Sequence: Synthetic oligonucleotide
  Sense strand starting at position 3004 of SEQ ID NO: 316970
uuagaucaguaggacauuu

SEQ ID NO: 454328 - RNA, 19 nt, Artificial Sequence
  Description of Artificial Sequence: Synthetic oligonucleotide
  Antisense Strand to SEQ ID NO: 454327
aaauguccuacugaucuaa

SEQ ID NO: 454329 - RNA, 19 nt, Artificial Sequence
  Description of Artificial Sequence: Synthetic oligonucleotide
  Sense strand starting at position 3012 of SEQ ID NO: 316970
guaggacauuuguacuaag

SEQ ID NO: 454330 - RNA, 19 nt, Artificial Sequence
  Description of Artificial Sequence: Synthetic oligonucleotide
  Antisense Strand to SEQ ID NO: 454329
cuuaguacaaauguccuac

SEQ ID NO: 454331 - RNA, 19 nt, Artificial Sequence
  Description of Artificial Sequence: Synthetic oligonucleotide
  Sense strand starting at position 3015 of SEQ ID NO: 316970
ggacauuuguacuaagaau

SEQ ID NO: 454332 - RNA, 19 nt, Artificial Sequence
  Description of Artificial Sequence: Synthetic oligonucleotide
  Antisense Strand to SEQ ID NO: 454331
auucuuaguacaaaugucc

SEQ ID NO: 454333 - RNA, 19 nt, Artificial Sequence
  Description of Artificial Sequence: Synthetic oligonucleotide
  Sense strand starting at position 3147 of SEQ ID NO: 316970
augagauauugucugacag

SEQ ID NO: 454334 - RNA, 19 nt, Artificial Sequence
  Description of Artificial Sequence: Synthetic oligonucleotide
  Antisense Strand to SEQ ID NO: 454333
cugucagacaauaucucau

SEQ ID NO: 454335 - RNA, 19 nt, Artificial Sequence
  Description of Artificial Sequence: Synthetic oligonucleotide
  Sense strand starting at position 3148 of SEQ ID NO: 316970
ugagauauugucugacagg

SEQ ID NO: 454336 - RNA, 19 nt, Artificial Sequence
  Description of Artificial Sequence: Synthetic oligonucleotide
  Antisense Strand to SEQ ID NO: 454335
ccugucagacaauaucuca

SEQ ID NO: 454337 - RNA, 19 nt, Artificial Sequence
  Description of Artificial Sequence: Synthetic oligonucleotide
  Sense strand starting at position 3196 of SEQ ID NO: 316970
acuugaaggauugguuaug

SEQ ID NO: 454338 - RNA, 19 nt, Artificial Sequence
  Description of Artificial Sequence: Synthetic oligonucleotide
  Antisense Strand to SEQ ID NO: 454337
cauaaccaauccuucaagu

SEQ ID NO: 454339 - RNA, 19 nt, Artificial Sequence
  Description of Artificial Sequence: Synthetic oligonucleotide
  Sense strand starting at position 3202 of SEQ ID NO: 316970
aggauugguuauguuugga

SEQ ID NO: 454340 - RNA, 19 nt, Artificial Sequence
  Description of Artificial Sequence: Synthetic oligonucleotide
  Antisense Strand to SEQ ID NO: 454339
uccaaacauaaccaauccu

SEQ ID NO: 454341 - RNA, 19 nt, Artificial Sequence
  Description of Artificial Sequence: Synthetic oligonucleotide
  Sense strand starting at position 3272 of SEQ ID NO: 316970
ggaaacuugugagcaaaca

SEQ ID NO: 454342 - RNA, 19 nt, Artificial Sequence
  Description of Artificial Sequence: Synthetic oligonucleotide
  Antisense Strand to SEQ ID NO: 454341
uguuugcucacaaguuucc

SEQ ID NO: 454343 - RNA, 19 nt, Artificial Sequence
  Description of Artificial Sequence: Synthetic oligonucleotide
  Sense strand starting at position 3298 of SEQ ID NO: 316970
guuggaaaggcaugacacu

SEQ ID NO: 454344 - RNA, 19 nt, Artificial Sequence
  Description of Artificial Sequence: Synthetic oligonucleotide
  Antisense Strand to SEQ ID NO: 454343
agugucaugccuuuccaac

SEQ ID NO: 454345 - RNA, 19 nt, Artificial Sequence
  Description of Artificial Sequence: Synthetic oligonucleotide
  Sense strand starting at position 3304 of SEQ ID NO: 316970
aaggcaugacacuguuauu

SEQ ID NO: 454346 - RNA, 19 nt, Artificial Sequence
  Description of Artificial Sequence: Synthetic oligonucleotide
  Antisense Strand to SEQ ID NO: 454345
aauaacagugucaugccuu

SEQ ID NO: 454347 - RNA, 19 nt, Artificial Sequence
  Description of Artificial Sequence: Synthetic oligonucleotide
  Sense strand starting at position 3394 of SEQ ID NO: 316970
gaaagauaggccggguuca

SEQ ID NO: 454348 - RNA, 19 nt, Artificial Sequence
  Description of Artificial Sequence: Synthetic oligonucleotide
  Antisense Strand to SEQ ID NO: 454347
ugaacccggccuaucuuuc

SEQ ID NO: 454349 - RNA, 19 nt, Artificial Sequence
  Description of Artificial Sequence: Synthetic oligonucleotide
  Sense strand starting at position 3416 of SEQ ID NO: 316970
gccugauccgcaguuguca

SEQ ID NO: 454350 - RNA, 19 nt, Artificial Sequence
  Description of Artificial Sequence: Synthetic oligonucleotide
  Antisense Strand to SEQ ID NO: 454349
ugacaacugcggaucaggc

SEQ ID NO: 454351 - RNA, 19 nt, Artificial Sequence
  Description of Artificial Sequence: Synthetic oligonucleotide
  Sense strand starting at position 3434 of SEQ ID NO: 316970
acguguugcaggcuuguau

SEQ ID NO: 454352 - RNA, 19 nt, Artificial Sequence
  Description of Artificial Sequence: Synthetic oligonucleotide
  Antisense Strand to SEQ ID NO: 454351
auacaagccugcaacacgu

SEQ ID NO: 454353 - RNA, 19 nt, Artificial Sequence
  Description of Artificial Sequence: Synthetic oligonucleotide
  Sense strand starting at position 3435 of SEQ ID NO: 316970
cguguugcaggcuuguaua

SEQ ID NO: 454354 - RNA, 19 nt, Artificial Sequence
  Description of Artificial Sequence: Synthetic oligonucleotide
  Antisense Strand to SEQ ID NO: 454353
uauacaagccugcaacacg

SEQ ID NO: 454355 - RNA, 19 nt, Artificial Sequence
  Description of Artificial Sequence: Synthetic oligonucleotide
  Sense strand starting at position 3689 of SEQ ID NO: 316970
auccuuucugacugucaga

SEQ ID NO: 454356 - RNA, 19 nt, Artificial Sequence
  Description of Artificial Sequence: Synthetic oligonucleotide
  Antisense Strand to SEQ ID NO: 454355
ucugacagucagaaaggau

SEQ ID NO: 454357 - RNA, 19 nt, Artificial Sequence
  Description of Artificial Sequence: Synthetic oligonucleotide
  Sense strand starting at position 3699 of SEQ ID NO: 316970
acugucagacaauggguaa

SEQ ID NO: 454358 - RNA, 19 nt, Artificial Sequence
  Description of Artificial Sequence: Synthetic oligonucleotide
  Antisense Strand to SEQ ID NO: 454357
uuacccauugucugacagu

SEQ ID NO: 454359 - RNA, 19 nt, Artificial Sequence
  Description of Artificial Sequence: Synthetic oligonucleotide
  Sense strand starting at position 3780 of SEQ ID NO: 316970
gacauucuguaaucuggau

SEQ ID NO: 454360 - RNA, 19 nt, Artificial Sequence
  Description of Artificial Sequence: Synthetic oligonucleotide
  Antisense Strand to SEQ ID NO: 454359
auccagauuacagaauguc

SEQ ID NO: 454361 - RNA, 19 nt, Artificial Sequence
  Description of Artificial Sequence: Synthetic oligonucleotide
  Sense strand starting at position 3784 of SEQ ID NO: 316970
uucuguaaucuggauguuu

SEQ ID NO: 454362 - RNA, 19 nt, Artificial Sequence
  Description of Artificial Sequence: Synthetic oligonucleotide
  Antisense Strand to SEQ ID NO: 454361
aaacauccagauuacagaa

SEQ ID NO: 454363 - RNA, 19 nt, Artificial Sequence
  Description of Artificial Sequence: Synthetic oligonucleotide
  Sense strand starting at position 3786 of SEQ ID NO: 316970
cuguaaucuggauguuuga

SEQ ID NO: 454364 - RNA, 19 nt, Artificial Sequence
  Description of Artificial Sequence: Synthetic oligonucleotide
  Antisense Strand to SEQ ID NO: 454363
ucaaacauccagauuacag

SEQ ID NO: 454365 - RNA, 19 nt, Artificial Sequence
  Description of Artificial Sequence: Synthetic oligonucleotide
  Sense strand starting at position 3789 of SEQ ID NO: 316970
uaaucuggauguuugauau

SEQ ID NO: 454366 - RNA, 19 nt, Artificial Sequence
  Description of Artificial Sequence: Synthetic oligonucleotide
  Antisense Strand to SEQ ID NO: 454365
auaucaaacauccagauua

SEQ ID NO: 454367 - RNA, 19 nt, Artificial Sequence
  Description of Artificial Sequence: Synthetic oligonucleotide
  Sense strand starting at position 3795 of SEQ ID NO: 316970
ggauguuugauaugcucua

SEQ ID NO: 454368 - RNA, 19 nt, Artificial Sequence
  Description of Artificial Sequence: Synthetic oligonucleotide
  Antisense Strand to SEQ ID NO: 454367
uagagcauaucaaacaucc

SEQ ID NO: 454369 - RNA, 19 nt, Artificial Sequence
  Description of Artificial Sequence: Synthetic oligonucleotide
  Sense strand starting at position 3796 of SEQ ID NO: 316970
gauguuugauaugcucuaa

SEQ ID NO: 454370 - RNA, 19 nt, Artificial Sequence
  Description of Artificial Sequence: Synthetic oligonucleotide
  Antisense Strand to SEQ ID NO: 454369
uuagagcauaucaaacauc

SEQ ID NO: 454371 - RNA, 19 nt, Artificial Sequence
  Description of Artificial Sequence: Synthetic oligonucleotide
  Sense strand starting at position 3911 of SEQ ID NO: 316970
gccugcugaguggauaaau

SEQ ID NO: 454372 - RNA, 19 nt, Artificial Sequence
  Description of Artificial Sequence: Synthetic oligonucleotide
  Antisense Strand to SEQ ID NO: 454371
auuuauccacucagcaggc

SEQ ID NO: 454373 - RNA, 19 nt, Artificial Sequence
  Description of Artificial Sequence: Synthetic oligonucleotide
  Sense strand starting at position 3978 of SEQ ID NO: 316970
aguugacuuauggguuaaa

SEQ ID NO: 454374 - RNA, 19 nt, Artificial Sequence
  Description of Artificial Sequence: Synthetic oligonucleotide
  Antisense Strand to SEQ ID NO: 454373
uuuaacccauaagucaacu

SEQ ID NO: 454375 - RNA, 19 nt, Artificial Sequence
  Description of Artificial Sequence: Synthetic oligonucleotide
  Sense strand starting at position 24 of SEQ ID NO: 316971
cauaauaaggccuguuaga

SEQ ID NO: 454376 - RNA, 19 nt, Artificial Sequence
  Description of Artificial Sequence: Synthetic oligonucleotide
  Antisense Strand to SEQ ID NO: 454375
ucuaacaggccuuauuaug

SEQ ID NO: 454377 - RNA, 19 nt, Artificial Sequence
  Description of Artificial Sequence: Synthetic oligonucleotide
  Sense strand starting at position 37 of SEQ ID NO: 316971
guuagaauugauugcuaau

SEQ ID NO: 454378 - RNA, 19 nt, Artificial Sequence
  Description of Artificial Sequence: Synthetic oligonucleotide
  Antisense Strand to SEQ ID NO: 454377
auuagcaaucaauucuaac

SEQ ID NO: 454379 - RNA, 19 nt, Artificial Sequence
  Description of Artificial Sequence: Synthetic oligonucleotide
  Sense strand starting at position 57 of SEQ ID NO: 316971
auuguaaugugcuuaggga

SEQ ID NO: 454380 - RNA, 19 nt, Artificial Sequence
  Description of Artificial Sequence: Synthetic oligonucleotide
  Antisense Strand to SEQ ID NO: 454379
ucccuaagcacauuacaau

SEQ ID NO: 454381 - RNA, 19 nt, Artificial Sequence
  Description of Artificial Sequence: Synthetic oligonucleotide
  Sense strand starting at position 58 of SEQ ID NO: 316971
uuguaaugugcuuagggaa

SEQ ID NO: 454382 - RNA, 19 nt, Artificial Sequence
  Description of Artificial Sequence: Synthetic oligonucleotide
  Antisense Strand to SEQ ID NO: 454381
uucccuaagcacauuacaa

SEQ ID NO: 454383 - RNA, 19 nt, Artificial Sequence
  Description of Artificial Sequence: Synthetic oligonucleotide
  Sense strand starting at position 278 of SEQ ID NO: 316971
ucagcuguaccauaaguua

SEQ ID NO: 454384 - RNA, 19 nt, Artificial Sequence
  Description of Artificial Sequence: Synthetic oligonucleotide
  Antisense Strand to SEQ ID NO: 454383
uaacuuaugguacagcuga

SEQ ID NO: 454385 - RNA, 19 nt, Artificial Sequence
  Description of Artificial Sequence: Synthetic oligonucleotide
  Sense strand starting at position 281 of SEQ ID NO: 316971
gcuguaccauaaguuaaau

SEQ ID NO: 454386 - RNA, 19 nt, Artificial Sequence
  Description of Artificial Sequence: Synthetic oligonucleotide
  Antisense Strand to SEQ ID NO: 454385
auuuaacuuaugguacagc

SEQ ID NO: 454387 - RNA, 19 nt, Artificial Sequence
  Description of Artificial Sequence: Synthetic oligonucleotide
  Sense strand starting at position 331 of SEQ ID NO: 316971
gagacaacuuuauuagagu

SEQ ID NO: 454388 - RNA, 19 nt, Artificial Sequence
  Description of Artificial Sequence: Synthetic oligonucleotide
  Antisense Strand to SEQ ID NO: 454387
acucuaauaaaguugucuc

SEQ ID NO: 454389 - RNA, 19 nt, Artificial Sequence
  Description of Artificial Sequence: Synthetic oligonucleotide
  Sense strand starting at position 420 of SEQ ID NO: 316971
ugugguauuuccguucaca

SEQ ID NO: 454390 - RNA, 19 nt, Artificial Sequence
  Description of Artificial Sequence: Synthetic oligonucleotide
  Antisense Strand to SEQ ID NO: 454389
ugugaacggaaauaccaca

SEQ ID NO: 454391 - RNA, 19 nt, Artificial Sequence
  Description of Artificial Sequence: Synthetic oligonucleotide
  Sense strand starting at position 605 of SEQ ID NO: 316971
augaauaaaugcgcuuaau

SEQ ID NO: 454392 - RNA, 19 nt, Artificial Sequence
  Description of Artificial Sequence: Synthetic oligonucleotide
  Antisense Strand to SEQ ID NO: 454391
auuaagcgcauuuauucau

SEQ ID NO: 454393 - RNA, 19 nt, Artificial Sequence
  Description of Artificial Sequence: Synthetic oligonucleotide
  Sense strand starting at position 626 of SEQ ID NO: 316971
acuguugcucaagaaauaa

SEQ ID NO: 454394 - RNA, 19 nt, Artificial Sequence
  Description of Artificial Sequence: Synthetic oligonucleotide
  Antisense Strand to SEQ ID NO: 454393
uuauuucuugagcaacagu

SEQ ID NO: 454395 - RNA, 19 nt, Artificial Sequence
  Description of Artificial Sequence: Synthetic oligonucleotide
  Sense strand starting at position 2070 of SEQ ID NO: 316971
gaauucggaugcucucaau

SEQ ID NO: 454396 - RNA, 19 nt, Artificial Sequence
  Description of Artificial Sequence: Synthetic oligonucleotide
  Antisense Strand to SEQ ID NO: 454395
auugagagcauccgaauuc

SEQ ID NO: 454397 - RNA, 19 nt, Artificial Sequence
  Description of Artificial Sequence: Synthetic oligonucleotide
  Sense strand starting at position 2143 of SEQ ID NO: 316971
aggccauaacaaugacagu

SEQ ID NO: 454398 - RNA, 19 nt, Artificial Sequence
  Description of Artificial Sequence: Synthetic oligonucleotide
  Antisense Strand to SEQ ID NO: 454397
acugucauuguuauggccu

SEQ ID NO: 454399 - RNA, 19 nt, Artificial Sequence
  Description of Artificial Sequence: Synthetic oligonucleotide
  Sense strand starting at position 2186 of SEQ ID NO: 316971
gcaugaauucuggagcaga

SEQ ID NO: 454400 - RNA, 19 nt, Artificial Sequence
  Description of Artificial Sequence: Synthetic oligonucleotide
  Antisense Strand to SEQ ID NO: 454399
ucugcuccagaauucaugc

SEQ ID NO: 454401 - RNA, 19 nt, Artificial Sequence
  Description of Artificial Sequence: Synthetic oligonucleotide
  Sense strand starting at position 2255 of SEQ ID NO: 316971
gcccucagugguuaacaca

SEQ ID NO: 454402 - RNA, 19 nt, Artificial Sequence
  Description of Artificial Sequence: Synthetic oligonucleotide
  Antisense Strand to SEQ ID NO: 454401
uguguuaaccacugagggc

SEQ ID NO: 454403 - RNA, 19 nt, Artificial Sequence
  Description of Artificial Sequence: Synthetic oligonucleotide
  Sense strand starting at position 2319 of SEQ ID NO: 316971
guacuuugcaauggacaga

SEQ ID NO: 454404 - RNA, 19 nt, Artificial Sequence
  Description of Artificial Sequence: Synthetic oligonucleotide
  Antisense Strand to SEQ ID NO: 454403
ucuguccauugcaaaguac

SEQ ID NO: 454405 - RNA, 19 nt, Artificial Sequence
  Description of Artificial Sequence: Synthetic oligonucleotide
  Sense strand starting at position 2343 of SEQ ID NO: 316971
aaaggaauauccucuguug

SEQ ID NO: 454406 - RNA, 19 nt, Artificial Sequence
  Description of Artificial Sequence: Synthetic oligonucleotide
  Antisense Strand to SEQ ID NO: 454405
caacagaggauauuccuuu

SEQ ID NO: 454407 - RNA, 19 nt, Artificial Sequence
  Description of Artificial Sequence: Synthetic oligonucleotide
  Sense strand starting at position 2475 of SEQ ID NO: 316971
acuucuagucaaugagacu

SEQ ID NO: 454408 - RNA, 19 nt, Artificial Sequence
  Description of Artificial Sequence: Synthetic oligonucleotide
  Antisense Strand to SEQ ID NO: 454407
agucucauugacuagaagu

SEQ ID NO: 454409 - RNA, 19 nt, Artificial Sequence
  Description of Artificial Sequence: Synthetic oligonucleotide
  Sense strand starting at position 2489 of SEQ ID NO: 316971
agacuaguugagugaagca

SEQ ID NO: 454410 - RNA, 19 nt, Artificial Sequence
  Description of Artificial Sequence: Synthetic oligonucleotide
  Antisense Strand to SEQ ID NO: 454409
ugcuucacucaacuagucu

SEQ ID NO: 454411 - RNA, 19 nt, Artificial Sequence
  Description of Artificial Sequence: Synthetic oligonucleotide
  Sense strand starting at position 2526 of SEQ ID NO: 316971
guaguuugguggacguuau

SEQ ID NO: 454412 - RNA, 19 nt, Artificial Sequence
  Description of Artificial Sequence: Synthetic oligonucleotide
  Antisense Strand to SEQ ID NO: 454411
auaacguccaccaaacuac

SEQ ID NO: 454413 - RNA, 19 nt, Artificial Sequence
  Description of Artificial Sequence: Synthetic oligonucleotide
  Sense strand starting at position 2597 of SEQ ID NO: 316971
aggcuugaucccuguggga

SEQ ID NO: 454414 - RNA, 19 nt, Artificial Sequence
  Description of Artificial Sequence: Synthetic oligonucleotide
  Antisense Strand to SEQ ID NO: 454413
ucccacagggaucaagccu

SEQ ID NO: 454415 - RNA, 19 nt, Artificial Sequence
  Description of Artificial Sequence: Synthetic oligonucleotide
  Sense strand starting at position 2599 of SEQ ID NO: 316971
gcuugaucccugugggaca

SEQ ID NO: 454416 - RNA, 19 nt, Artificial Sequence
  Description of Artificial Sequence: Synthetic oligonucleotide
  Antisense Strand to SEQ ID NO: 454415
ugucccacagggaucaagc

SEQ ID NO: 454417 - RNA, 19 nt, Artificial Sequence
  Description of Artificial Sequence: Synthetic oligonucleotide
  Sense strand starting at position 2642 of SEQ ID NO: 316971
gccauaauuccagggaguu

SEQ ID NO: 454418 - RNA, 19 nt, Artificial Sequence
  Description of Artificial Sequence: Synthetic oligonucleotide
  Antisense Strand to SEQ ID NO: 454417
aacucccuggaauuauggc

SEQ ID NO: 454419 - RNA, 19 nt, Artificial Sequence
  Description of Artificial Sequence: Synthetic oligonucleotide
  Sense strand starting at position 2643 of SEQ ID NO: 316971
ccauaauuccagggaguuu

SEQ ID NO: 454420 - RNA, 19 nt, Artificial Sequence
  Description of Artificial Sequence: Synthetic oligonucleotide
  Antisense Strand to SEQ ID NO: 454419
aaacucccuggaauuaugg

SEQ ID NO: 454421 - RNA, 19 nt, Artificial Sequence
  Description of Artificial Sequence: Synthetic oligonucleotide
  Sense strand starting at position 2654 of SEQ ID NO: 316971
gggaguuuguaacccucua

SEQ ID NO: 454422 - RNA, 19 nt, Artificial Sequence
  Description of Artificial Sequence: Synthetic oligonucleotide
  Antisense Strand to SEQ ID NO: 454421
uagaggguuacaaacuccc

SEQ ID NO: 454423 - RNA, 19 nt, Artificial Sequence
  Description of Artificial Sequence: Synthetic oligonucleotide
  Sense strand starting at position 2691 of SEQ ID NO: 316971
guuucuuagcaacagacga

SEQ ID NO: 454424 - RNA, 19 nt, Artificial Sequence
  Description of Artificial Sequence: Synthetic oligonucleotide
  Antisense Strand to SEQ ID NO: 454423
ucgucuguugcuaagaaac

SEQ ID NO: 454425 - RNA, 19 nt, Artificial Sequence
  Description of Artificial Sequence: Synthetic oligonucleotide
  Sense strand starting at position 2854 of SEQ ID NO: 316971
cuguuuguaccugagguau

SEQ ID NO: 454426 - RNA, 19 nt, Artificial Sequence
  Description of Artificial Sequence: Synthetic oligonucleotide
  Antisense Strand to SEQ ID NO: 454425
auaccucagguacaaacag

SEQ ID NO: 454427 - RNA, 19 nt, Artificial Sequence
  Description of Artificial Sequence: Synthetic oligonucleotide
  Sense strand starting at position 2869 of SEQ ID NO: 316971
guauauggacuccaguuga

SEQ ID NO: 454428 - RNA, 19 nt, Artificial Sequence
  Description of Artificial Sequence: Synthetic oligonucleotide
  Antisense Strand to SEQ ID NO: 454427
ucaacuggaguccauauac

SEQ ID NO: 454429 - RNA, 19 nt, Artificial Sequence
  Description of Artificial Sequence: Synthetic oligonucleotide
  Sense strand starting at position 2934 of SEQ ID NO: 316971
ugagaagccagaugguauu

SEQ ID NO: 454430 - RNA, 19 nt, Artificial Sequence
  Description of Artificial Sequence: Synthetic oligonucleotide
  Antisense Strand to SEQ ID NO: 454429
aauaccaucuggcuucuca

SEQ ID NO: 454431 - RNA, 19 nt, Artificial Sequence
  Description of Artificial Sequence: Synthetic oligonucleotide
  Sense strand starting at position 2983 of SEQ ID NO: 316971
gucucaauaugguuagaga

SEQ ID NO: 454432 - RNA, 19 nt, Artificial Sequence
  Description of Artificial Sequence: Synthetic oligonucleotide
  Antisense Strand to SEQ ID NO: 454431
ucucuaaccauauugagac

SEQ ID NO: 454433 - RNA, 19 nt, Artificial Sequence
  Description of Artificial Sequence: Synthetic oligonucleotide
  Sense strand starting at position 3014 of SEQ ID NO: 316971
caauaagauugugcugaca

SEQ ID NO: 454434 - RNA, 19 nt, Artificial Sequence
  Description of Artificial Sequence: Synthetic oligonucleotide
  Antisense Strand to SEQ ID NO: 454433
ugucagcacaaucuuauug

SEQ ID NO: 454435 - RNA, 19 nt, Artificial Sequence
  Description of Artificial Sequence: Synthetic oligonucleotide
  Sense strand starting at position 3017 of SEQ ID NO: 316971
uaagauugugcugacauca

SEQ ID NO: 454436 - RNA, 19 nt, Artificial Sequence
  Description of Artificial Sequence: Synthetic oligonucleotide
  Antisense Strand to SEQ ID NO: 454435
ugaugucagcacaaucuua

SEQ ID NO: 454437 - RNA, 19 nt, Artificial Sequence
  Description of Artificial Sequence: Synthetic oligonucleotide
  Sense strand starting at position 3028 of SEQ ID NO: 316971
ugacaucagcaccgagaga

SEQ ID NO: 454438 - RNA, 19 nt, Artificial Sequence
  Description of Artificial Sequence: Synthetic oligonucleotide
  Antisense Strand to SEQ ID NO: 454437
ucucucggugcugauguca

SEQ ID NO: 454439 - RNA, 19 nt, Artificial Sequence
  Description of Artificial Sequence: Synthetic oligonucleotide
  Sense strand starting at position 3039 of SEQ ID NO: 316971
ccgagagagcuaugaugaa

SEQ ID NO: 454440 - RNA, 19 nt, Artificial Sequence
  Description of Artificial Sequence: Synthetic oligonucleotide
  Antisense Strand to SEQ ID NO: 454439
uucaucauagcucucucgg

SEQ ID NO: 454441 - RNA, 19 nt, Artificial Sequence
  Description of Artificial Sequence: Synthetic oligonucleotide
  Sense strand starting at position 3055 of SEQ ID NO: 316971
gaaggaaacugauacagaa

SEQ ID NO: 454442 - RNA, 19 nt, Artificial Sequence
  Description of Artificial Sequence: Synthetic oligonucleotide
  Antisense Strand to SEQ ID NO: 454441
uucuguaucaguuuccuuc

SEQ ID NO: 454443 - RNA, 19 nt, Artificial Sequence
  Description of Artificial Sequence: Synthetic oligonucleotide
  Sense strand starting at position 3120 of SEQ ID NO: 316971
uuuccauuauugguggaau

SEQ ID NO: 454444 - RNA, 19 nt, Artificial Sequence
  Description of Artificial Sequence: Synthetic oligonucleotide
  Antisense Strand to SEQ ID NO: 454443
auuccaccaauaauggaaa

SEQ ID NO: 454445 - RNA, 19 nt, Artificial Sequence
  Description of Artificial Sequence: Synthetic oligonucleotide
  Sense strand starting at position 3122 of SEQ ID NO: 316971
uccauuauugguggaauga

SEQ ID NO: 454446 - RNA, 19 nt, Artificial Sequence
  Description of Artificial Sequence: Synthetic oligonucleotide
  Antisense Strand to SEQ ID NO: 454445
ucauuccaccaauaaugga

SEQ ID NO: 454447 - RNA, 19 nt, Artificial Sequence
  Description of Artificial Sequence: Synthetic oligonucleotide
  Sense strand starting at position 3274 of SEQ ID NO: 316971
gcaggagggugacuagaaa

SEQ ID NO: 454448 - RNA, 19 nt, Artificial Sequence
  Description of Artificial Sequence: Synthetic oligonucleotide
  Antisense Strand to SEQ ID NO: 454447
uuucuagucacccuccugc

SEQ ID NO: 454449 - RNA, 19 nt, Artificial Sequence
  Description of Artificial Sequence: Synthetic oligonucleotide
  Sense strand starting at position 3380 of SEQ ID NO: 316971
gugcuauguggguaauaac

SEQ ID NO: 454450 - RNA, 19 nt, Artificial Sequence
  Description of Artificial Sequence: Synthetic oligonucleotide
  Antisense Strand to SEQ ID NO: 454449
guuauuacccacauagcac

SEQ ID NO: 454451 - RNA, 19 nt, Artificial Sequence
  Description of Artificial Sequence: Synthetic oligonucleotide
  Sense strand starting at position 3465 of SEQ ID NO: 316971
uaucgucuguaauuagaac

SEQ ID NO: 454452 - RNA, 19 nt, Artificial Sequence
  Description of Artificial Sequence: Synthetic oligonucleotide
  Antisense Strand to SEQ ID NO: 454451
guucuaauuacagacgaua

SEQ ID NO: 454453 - RNA, 19 nt, Artificial Sequence
  Description of Artificial Sequence: Synthetic oligonucleotide
  Sense strand starting at position 3627 of SEQ ID NO: 316971
uuuguuauauaggccaauu

SEQ ID NO: 454454 - RNA, 19 nt, Artificial Sequence
  Description of Artificial Sequence: Synthetic oligonucleotide
  Antisense Strand to SEQ ID NO: 454453
aauuggccuauauaacaaa

SEQ ID NO: 454455 - RNA, 19 nt, Artificial Sequence
  Description of Artificial Sequence: Synthetic oligonucleotide
  Sense strand starting at position 60 of SEQ ID NO: 316972
aucguugaacaauaucauu

SEQ ID NO: 454456 - RNA, 19 nt, Artificial Sequence
  Description of Artificial Sequence: Synthetic oligonucleotide
  Antisense Strand to SEQ ID NO: 454455
aaugauauuguucaacgau

SEQ ID NO: 454457 - RNA, 19 nt, Artificial Sequence
  Description of Artificial Sequence: Synthetic oligonucleotide
  Sense strand starting at position 242 of SEQ ID NO: 316972
uauuaucgugaauggagaa

SEQ ID NO: 454458 - RNA, 19 nt, Artificial Sequence
  Description of Artificial Sequence: Synthetic oligonucleotide
  Antisense Strand to SEQ ID NO: 454457
uucuccauucacgauaaua

SEQ ID NO: 454459 - RNA, 19 nt, Artificial Sequence
  Description of Artificial Sequence: Synthetic oligonucleotide
  Sense strand starting at position 277 of SEQ ID NO: 316972
cuucuaaaggccugagaau

SEQ ID NO: 454460 - RNA, 19 nt, Artificial Sequence
  Description of Artificial Sequence: Synthetic oligonucleotide
  Antisense Strand to SEQ ID NO: 454459
auucucaggccuuuagaag

SEQ ID NO: 454461 - RNA, 19 nt, Artificial Sequence
  Description of Artificial Sequence: Synthetic oligonucleotide
  Sense strand starting at position 288 of SEQ ID NO: 316972
cugagaauaccuugucuag

SEQ ID NO: 454462 - RNA, 19 nt, Artificial Sequence
  Description of Artificial Sequence: Synthetic oligonucleotide
  Antisense Strand to SEQ ID NO: 454461
cuagacaagguauucucag

SEQ ID NO: 454463 - RNA, 19 nt, Artificial Sequence
  Description of Artificial Sequence: Synthetic oligonucleotide
  Sense strand starting at position 290 of SEQ ID NO: 316972
gagaauaccuugucuagua

SEQ ID NO: 454464 - RNA, 19 nt, Artificial Sequence
  Description of Artificial Sequence: Synthetic oligonucleotide
  Antisense Strand to SEQ ID NO: 454463
uacuagacaagguauucuc

SEQ ID NO: 454465 - RNA, 19 nt, Artificial Sequence
  Description of Artificial Sequence: Synthetic oligonucleotide
  Sense strand starting at position 291 of SEQ ID NO: 316972
agaauaccuugucuaguaa

SEQ ID NO: 454466 - RNA, 19 nt, Artificial Sequence
  Description of Artificial Sequence: Synthetic oligonucleotide
  Antisense Strand to SEQ ID NO: 454465
uuacuagacaagguauucu

SEQ ID NO: 454467 - RNA, 19 nt, Artificial Sequence
  Description of Artificial Sequence: Synthetic oligonucleotide
  Sense strand starting at position 761 of SEQ ID NO: 316972
gcacaauuauagcugaaag

SEQ ID NO: 454468 - RNA, 19 nt, Artificial Sequence
  Description of Artificial Sequence: Synthetic oligonucleotide
  Antisense Strand to SEQ ID NO: 454467
cuuucagcuauaauugugc

SEQ ID NO: 454469 - RNA, 19 nt, Artificial Sequence
  Description of Artificial Sequence: Synthetic oligonucleotide
  Sense strand starting at position 763 of SEQ ID NO: 316972
acaauuauagcugaaaguc

SEQ ID NO: 454470 - RNA, 19 nt, Artificial Sequence
  Description of Artificial Sequence: Synthetic oligonucleotide
  Antisense Strand to SEQ ID NO: 454469
gacuuucagcuauaauugu

SEQ ID NO: 454471 - RNA, 19 nt, Artificial Sequence
  Description of Artificial Sequence: Synthetic oligonucleotide
  Sense strand starting at position 848 of SEQ ID NO: 316972
agagaauugcaccaucuuu

SEQ ID NO: 454472 - RNA, 19 nt, Artificial Sequence
  Description of Artificial Sequence: Synthetic oligonucleotide
  Antisense Strand to SEQ ID NO: 454471
aaagauggugcaauucucu

SEQ ID NO: 454473 - RNA, 19 nt, Artificial Sequence
  Description of Artificial Sequence: Synthetic oligonucleotide
  Sense strand starting at position 861 of SEQ ID NO: 316972
aucuuuauacuucgaauug

SEQ ID NO: 454474 - RNA, 19 nt, Artificial Sequence
  Description of Artificial Sequence: Synthetic oligonucleotide
  Antisense Strand to SEQ ID NO: 454473
caauucgaaguauaaagau

SEQ ID NO: 454475 - RNA, 19 nt, Artificial Sequence
  Description of Artificial Sequence: Synthetic oligonucleotide
  Sense strand starting at position 908 of SEQ ID NO: 316972
gcauauuagggccaaaguu

SEQ ID NO: 454476 - RNA, 19 nt, Artificial Sequence
  Description of Artificial Sequence: Synthetic oligonucleotide
  Antisense Strand to SEQ ID NO: 454475
aacuuuggcccuaauaugc

SEQ ID NO: 454477 - RNA, 19 nt, Artificial Sequence
  Description of Artificial Sequence: Synthetic oligonucleotide
  Sense strand starting at position 1178 of SEQ ID NO: 316972
caaauuagccacuggaugu

SEQ ID NO: 454478 - RNA, 19 nt, Artificial Sequence
  Description of Artificial Sequence: Synthetic oligonucleotide
  Antisense Strand to SEQ ID NO: 454477
acauccaguggcuaauuug

SEQ ID NO: 454479 - RNA, 19 nt, Artificial Sequence
  Description of Artificial Sequence: Synthetic oligonucleotide
  Sense strand starting at position 1266 of SEQ ID NO: 316972
cuacuuaauuugcaggaaa

SEQ ID NO: 454480 - RNA, 19 nt, Artificial Sequence
  Description of Artificial Sequence: Synthetic oligonucleotide
  Antisense Strand to SEQ ID NO: 454479
uuuccugcaaauuaaguag

SEQ ID NO: 454481 - RNA, 19 nt, Artificial Sequence
  Description of Artificial Sequence: Synthetic oligonucleotide
  Sense strand starting at position 1621 of SEQ ID NO: 316972
ggcagucaccuugaauucu

SEQ ID NO: 454482 - RNA, 19 nt, Artificial Sequence
  Description of Artificial Sequence: Synthetic oligonucleotide
  Antisense Strand to SEQ ID NO: 454481
agaauucaaggugacugcc

SEQ ID NO: 454483 - RNA, 19 nt, Artificial Sequence
  Description of Artificial Sequence: Synthetic oligonucleotide
  Sense strand starting at position 2317 of SEQ ID NO: 316972
gucuuaguccagggacuua

SEQ ID NO: 454484 - RNA, 19 nt, Artificial Sequence
  Description of Artificial Sequence: Synthetic oligonucleotide
  Antisense Strand to SEQ ID NO: 454483
uaagucccuggacuaagac

SEQ ID NO: 454485 - RNA, 19 nt, Artificial Sequence
  Description of Artificial Sequence: Synthetic oligonucleotide
  Sense strand starting at position 2328 of SEQ ID NO: 316972
gggacuuaaagaugcuauu

SEQ ID NO: 454486 - RNA, 19 nt, Artificial Sequence
  Description of Artificial Sequence: Synthetic oligonucleotide
  Antisense Strand to SEQ ID NO: 454485
aauagcaucuuuaaguccc

SEQ ID NO: 454487 - RNA, 19 nt, Artificial Sequence
  Description of Artificial Sequence: Synthetic oligonucleotide
  Sense strand starting at position 2342 of SEQ ID NO: 316972
cuauuauuagcacaacguu

SEQ ID NO: 454488 - RNA, 19 nt, Artificial Sequence
  Description of Artificial Sequence: Synthetic oligonucleotide
  Antisense Strand to SEQ ID NO: 454487
aacguugugcuaauaauag

SEQ ID NO: 454489 - RNA, 19 nt, Artificial Sequence
  Description of Artificial Sequence: Synthetic oligonucleotide
  Sense strand starting at position 2433 of SEQ ID NO: 316972
cauguugucagugacagag

SEQ ID NO: 454490 - RNA, 19 nt, Artificial Sequence
  Description of Artificial Sequence: Synthetic oligonucleotide
  Antisense Strand to SEQ ID NO: 454489
cucugucacugacaacaug

SEQ ID NO: 454491 - RNA, 19 nt, Artificial Sequence
  Description of Artificial Sequence: Synthetic oligonucleotide
  Sense strand starting at position 2437 of SEQ ID NO: 316972
uugucagugacagagcuaa

SEQ ID NO: 454492 - RNA, 19 nt, Artificial Sequence
  Description of Artificial Sequence: Synthetic oligonucleotide
  Antisense Strand to SEQ ID NO: 454491
uuagcucugucacugacaa

SEQ ID NO: 454493 - RNA, 19 nt, Artificial Sequence
  Description of Artificial Sequence: Synthetic oligonucleotide
  Sense strand starting at position 2597 of SEQ ID NO: 316972
uggaaugagcucugacgaa

SEQ ID NO: 454494 - RNA, 19 nt, Artificial Sequence
  Description of Artificial Sequence: Synthetic oligonucleotide
  Antisense Strand to SEQ ID NO: 454493
uucgucagagcucauucca

SEQ ID NO: 454495 - RNA, 19 nt, Artificial Sequence
  Description of Artificial Sequence: Synthetic oligonucleotide
  Sense strand starting at position 2601 of SEQ ID NO: 316972
augagcucugacgaaguaa

SEQ ID NO: 454496 - RNA, 19 nt, Artificial Sequence
  Description of Artificial Sequence: Synthetic oligonucleotide
  Antisense Strand to SEQ ID NO: 454495
uuacuucgucagagcucau

SEQ ID NO: 454497 - RNA, 19 nt, Artificial Sequence
  Description of Artificial Sequence: Synthetic oligonucleotide
  Sense strand starting at position 2645 of SEQ ID NO: 316972
gaggauugcauccaguguu

SEQ ID NO: 454498 - RNA, 19 nt, Artificial Sequence
  Description of Artificial Sequence: Synthetic oligonucleotide
  Antisense Strand to SEQ ID NO: 454497
aacacuggaugcaauccuc

SEQ ID NO: 454499 - RNA, 19 nt, Artificial Sequence
  Description of Artificial Sequence: Synthetic oligonucleotide
  Sense strand starting at position 2744 of SEQ ID NO: 316972
ucaucauugugacugaaga

SEQ ID NO: 454500 - RNA, 19 nt, Artificial Sequence
  Description of Artificial Sequence: Synthetic oligonucleotide
  Antisense Strand to SEQ ID NO: 454499
ucuucagucacaaugauga

SEQ ID NO: 454501 - RNA, 19 nt, Artificial Sequence
  Description of Artificial Sequence: Synthetic oligonucleotide
  Sense strand starting at position 2745 of SEQ ID NO: 316972
caucauugugacugaagac

SEQ ID NO: 454502 - RNA, 19 nt, Artificial Sequence
  Description of Artificial Sequence: Synthetic oligonucleotide
  Antisense Strand to SEQ ID NO: 454501
gucuucagucacaaugaug

SEQ ID NO: 454503 - RNA, 19 nt, Artificial Sequence
  Description of Artificial Sequence: Synthetic oligonucleotide
  Sense strand starting at position 2759 of SEQ ID NO: 316972
aagacagaaucauucguau

SEQ ID NO: 454504 - RNA, 19 nt, Artificial Sequence
  Description of Artificial Sequence: Synthetic oligonucleotide
  Antisense Strand to SEQ ID NO: 454503
auacgaaugauucugucuu

SEQ ID NO: 454505 - RNA, 19 nt, Artificial Sequence
  Description of Artificial Sequence: Synthetic oligonucleotide
  Sense strand starting at position 2811 of SEQ ID NO: 316972
gaggauuucuuaggaucaa

SEQ ID NO: 454506 - RNA, 19 nt, Artificial Sequence
  Description of Artificial Sequence: Synthetic oligonucleotide
  Antisense Strand to SEQ ID NO: 454505
uugauccuaagaaauccuc

SEQ ID NO: 454507 - RNA, 19 nt, Artificial Sequence
  Description of Artificial Sequence: Synthetic oligonucleotide
  Sense strand starting at position 2812 of SEQ ID NO: 316972
aggauuucuuaggaucaag

SEQ ID NO: 454508 - RNA, 19 nt, Artificial Sequence
  Description of Artificial Sequence: Synthetic oligonucleotide
  Antisense Strand to SEQ ID NO: 454507
cuugauccuaagaaauccu

SEQ ID NO: 454509 - RNA, 19 nt, Artificial Sequence
  Description of Artificial Sequence: Synthetic oligonucleotide
  Sense strand starting at position 3187 of SEQ ID NO: 316972
guacuugauagacgacuaa

SEQ ID NO: 454510 - RNA, 19 nt, Artificial Sequence
  Description of Artificial Sequence: Synthetic oligonucleotide
  Antisense Strand to SEQ ID NO: 454509
uuagucgucuaucaaguac

SEQ ID NO: 454511 - RNA, 19 nt, Artificial Sequence
  Description of Artificial Sequence: Synthetic oligonucleotide
  Sense strand starting at position 3440 of SEQ ID NO: 316972
uccagaggcgacuguauuu

SEQ ID NO: 454512 - RNA, 19 nt, Artificial Sequence
  Description of Artificial Sequence: Synthetic oligonucleotide
  Antisense Strand to SEQ ID NO: 454511
aaauacagucgccucugga

SEQ ID NO: 454513 - RNA, 19 nt, Artificial Sequence
  Description of Artificial Sequence: Synthetic oligonucleotide
  Sense strand starting at position 3560 of SEQ ID NO: 316972
gaaauccaucuggguugua

SEQ ID NO: 454514 - RNA, 19 nt, Artificial Sequence
  Description of Artificial Sequence: Synthetic oligonucleotide
  Antisense Strand to SEQ ID NO: 454513
uacaacccagauggauuuc

SEQ ID NO: 454515 - RNA, 19 nt, Artificial Sequence
  Description of Artificial Sequence: Synthetic oligonucleotide
  Sense strand starting at position 3561 of SEQ ID NO: 316972
aaauccaucuggguuguaa

SEQ ID NO: 454516 - RNA, 19 nt, Artificial Sequence
  Description of Artificial Sequence: Synthetic oligonucleotide
  Antisense Strand to SEQ ID NO: 454515
uuacaacccagauggauuu

SEQ ID NO: 454517 - RNA, 19 nt, Artificial Sequence
  Description of Artificial Sequence: Synthetic oligonucleotide
  Sense strand starting at position 3563 of SEQ ID NO: 316972
auccaucuggguuguaaac

SEQ ID NO: 454518 - RNA, 19 nt, Artificial Sequence
  Description of Artificial Sequence: Synthetic oligonucleotide
  Antisense Strand to SEQ ID NO: 454517
guuuacaacccagauggau

SEQ ID NO: 454519 - RNA, 19 nt, Artificial Sequence
  Description of Artificial Sequence: Synthetic oligonucleotide
  Sense strand starting at position 3577 of SEQ ID NO: 316972
uaaacuguugcuuauggaa

SEQ ID NO: 454520 - RNA, 19 nt, Artificial Sequence
  Description of Artificial Sequence: Synthetic oligonucleotide
  Antisense Strand to SEQ ID NO: 454519
uuccauaagcaacaguuua

SEQ ID NO: 454521 - RNA, 19 nt, Artificial Sequence
  Description of Artificial Sequence: Synthetic oligonucleotide
  Sense strand starting at position 3623 of SEQ ID NO: 316972
cuaggaaaugagugcuacu

SEQ ID NO: 454522 - RNA, 19 nt, Artificial Sequence
  Description of Artificial Sequence: Synthetic oligonucleotide
  Antisense Strand to SEQ ID NO: 454521
aguagcacucauuuccuag

SEQ ID NO: 454523 - RNA, 19 nt, Artificial Sequence
  Description of Artificial Sequence: Synthetic oligonucleotide
  Sense strand starting at position 3680 of SEQ ID NO: 316972
ucuugagcuuucucagaca

SEQ ID NO: 454524 - RNA, 19 nt, Artificial Sequence
  Description of Artificial Sequence: Synthetic oligonucleotide
  Antisense Strand to SEQ ID NO: 454523
ugucugagaaagcucaaga

SEQ ID NO: 454525 - RNA, 19 nt, Artificial Sequence
  Description of Artificial Sequence: Synthetic oligonucleotide
  Sense strand starting at position 3853 of SEQ ID NO: 316972
ugaggcuuugcugauaaga

SEQ ID NO: 454526 - RNA, 19 nt, Artificial Sequence
  Description of Artificial Sequence: Synthetic oligonucleotide
  Antisense Strand to SEQ ID NO: 454525
ucuuaucagcaaagccuca

SEQ ID NO: 454527 - RNA, 19 nt, Artificial Sequence
  Description of Artificial Sequence: Synthetic oligonucleotide
  Sense strand starting at position 3889 of SEQ ID NO: 316972
gcuagaguuuggucaagaa

SEQ ID NO: 454528 - RNA, 19 nt, Artificial Sequence
  Description of Artificial Sequence: Synthetic oligonucleotide
  Antisense Strand to SEQ ID NO: 454527
uucuugaccaaacucuagc

SEQ ID NO: 454529 - RNA, 19 nt, Artificial Sequence
  Description of Artificial Sequence: Synthetic oligonucleotide
  Sense strand starting at position 3893 of SEQ ID NO: 316972
gaguuuggucaagaaucuu

SEQ ID NO: 454530 - RNA, 19 nt, Artificial Sequence
  Description of Artificial Sequence: Synthetic oligonucleotide
  Antisense Strand to SEQ ID NO: 454529
aagauucuugaccaaacuc

SEQ ID NO: 454531 - RNA, 19 nt, Artificial Sequence
  Description of Artificial Sequence: Synthetic oligonucleotide
  Sense strand starting at position 3899 of SEQ ID NO: 316972
ggucaagaaucuuugucaa

SEQ ID NO: 454532 - RNA, 19 nt, Artificial Sequence
  Description of Artificial Sequence: Synthetic oligonucleotide
  Antisense Strand to SEQ ID NO: 454531
uugacaaagauucuugacc

SEQ ID NO: 454533 - RNA, 19 nt, Artificial Sequence
  Description of Artificial Sequence: Synthetic oligonucleotide
  Sense strand starting at position 3918 of SEQ ID NO: 316972
uccucauaccgauauuaug

SEQ ID NO: 454534 - RNA, 19 nt, Artificial Sequence
  Description of Artificial Sequence: Synthetic oligonucleotide
  Antisense Strand to SEQ ID NO: 454533
cauaauaucgguaugagga

SEQ ID NO: 454535 - RNA, 19 nt, Artificial Sequence
  Description of Artificial Sequence: Synthetic oligonucleotide
  Sense strand starting at position 149 of SEQ ID NO: 316973
gugaccaagugccauuuaa

SEQ ID NO: 454536 - RNA, 19 nt, Artificial Sequence
  Description of Artificial Sequence: Synthetic oligonucleotide
  Antisense Strand to SEQ ID NO: 454535
uuaaauggcacuuggucac

SEQ ID NO: 454537 - RNA, 19 nt, Artificial Sequence
  Description of Artificial Sequence: Synthetic oligonucleotide
  Sense strand starting at position 177 of SEQ ID NO: 316973
acacuaucugcuuguguag

SEQ ID NO: 454538 - RNA, 19 nt, Artificial Sequence
  Description of Artificial Sequence: Synthetic oligonucleotide
  Antisense Strand to SEQ ID NO: 454537
cuacacaagcagauagugu

SEQ ID NO: 454539 - RNA, 19 nt, Artificial Sequence
  Description of Artificial Sequence: Synthetic oligonucleotide
  Sense strand starting at position 590 of SEQ ID NO: 316973
uucccuagucuguaacuau

SEQ ID NO: 454540 - RNA, 19 nt, Artificial Sequence
  Description of Artificial Sequence: Synthetic oligonucleotide
  Antisense Strand to SEQ ID NO: 454539
auaguuacagacuagggaa

SEQ ID NO: 454541 - RNA, 19 nt, Artificial Sequence
  Description of Artificial Sequence: Synthetic oligonucleotide
  Sense strand starting at position 593 of SEQ ID NO: 316973
ccuagucuguaacuauuga

SEQ ID NO: 454542 - RNA, 19 nt, Artificial Sequence
  Description of Artificial Sequence: Synthetic oligonucleotide
  Antisense Strand to SEQ ID NO: 454541
ucaauaguuacagacuagg

SEQ ID NO: 454543 - RNA, 19 nt, Artificial Sequence
  Description of Artificial Sequence: Synthetic oligonucleotide
  Sense strand starting at position 597 of SEQ ID NO: 316973
gucuguaacuauugauagc

SEQ ID NO: 454544 - RNA, 19 nt, Artificial Sequence
  Description of Artificial Sequence: Synthetic oligonucleotide
  Antisense Strand to SEQ ID NO: 454543
gcuaucaauaguuacagac

SEQ ID NO: 454545 - RNA, 19 nt, Artificial Sequence
  Description of Artificial Sequence: Synthetic oligonucleotide
  Sense strand starting at position 607 of SEQ ID NO: 316973
auugauagcuacugcuuau

SEQ ID NO: 454546 - RNA, 19 nt, Artificial Sequence
  Description of Artificial Sequence: Synthetic oligonucleotide
  Antisense Strand to SEQ ID NO: 454545
auaagcaguagcuaucaau

SEQ ID NO: 454547 - RNA, 19 nt, Artificial Sequence
  Description of Artificial Sequence: Synthetic oligonucleotide
  Sense strand starting at position 993 of SEQ ID NO: 316973
ucaguagcuccuugauacu

SEQ ID NO: 454548 - RNA, 19 nt, Artificial Sequence
  Description of Artificial Sequence: Synthetic oligonucleotide
  Antisense Strand to SEQ ID NO: 454547
aguaucaaggagcuacuga

SEQ ID NO: 454549 - RNA, 19 nt, Artificial Sequence
  Description of Artificial Sequence: Synthetic oligonucleotide
  Sense strand starting at position 1012 of SEQ ID NO: 316973
ugcucucacuugggauaca

SEQ ID NO: 454550 - RNA, 19 nt, Artificial Sequence
  Description of Artificial Sequence: Synthetic oligonucleotide
  Antisense Strand to SEQ ID NO: 454549
uguaucccaagugagagca

SEQ ID NO: 454551 - RNA, 19 nt, Artificial Sequence
  Description of Artificial Sequence: Synthetic oligonucleotide
  Sense strand starting at position 1023 of SEQ ID NO: 316973
gggauacagcaaugucuaa

SEQ ID NO: 454552 - RNA, 19 nt, Artificial Sequence
  Description of Artificial Sequence: Synthetic oligonucleotide
  Antisense Strand to SEQ ID NO: 454551
uuagacauugcuguauccc

SEQ ID NO: 454553 - RNA, 19 nt, Artificial Sequence
  Description of Artificial Sequence: Synthetic oligonucleotide
  Sense strand starting at position 1303 of SEQ ID NO: 316973
uaccuaagccaguaagagu

SEQ ID NO: 454554 - RNA, 19 nt, Artificial Sequence
  Description of Artificial Sequence: Synthetic oligonucleotide
  Antisense Strand to SEQ ID NO: 454553
acucuuacuggcuuaggua

SEQ ID NO: 454555 - RNA, 19 nt, Artificial Sequence
  Description of Artificial Sequence: Synthetic oligonucleotide
  Sense strand starting at position 1418 of SEQ ID NO: 316973
cucgccauuuggcagaaau

SEQ ID NO: 454556 - RNA, 19 nt, Artificial Sequence
  Description of Artificial Sequence: Synthetic oligonucleotide
  Antisense Strand to SEQ ID NO: 454555
auuucugccaaauggcgag

SEQ ID NO: 454557 - RNA, 19 nt, Artificial Sequence
  Description of Artificial Sequence: Synthetic oligonucleotide
  Sense strand starting at position 1556 of SEQ ID NO: 316973
agagguauuucucauagca

SEQ ID NO: 454558 - RNA, 19 nt, Artificial Sequence
  Description of Artificial Sequence: Synthetic oligonucleotide
  Antisense Strand to SEQ ID NO: 454557
ugcuaugagaaauaccucu

SEQ ID NO: 454559 - RNA, 19 nt, Artificial Sequence
  Description of Artificial Sequence: Synthetic oligonucleotide
  Sense strand starting at position 1558 of SEQ ID NO: 316973
agguauuucucauagcauu

SEQ ID NO: 454560 - RNA, 19 nt, Artificial Sequence
  Description of Artificial Sequence: Synthetic oligonucleotide
  Antisense Strand to SEQ ID NO: 454559
aaugcuaugagaaauaccu

SEQ ID NO: 454561 - RNA, 19 nt, Artificial Sequence
  Description of Artificial Sequence: Synthetic oligonucleotide
  Sense strand starting at position 1945 of SEQ ID NO: 316973
gugucagugucugaccuua

SEQ ID NO: 454562 - RNA, 19 nt, Artificial Sequence
  Description of Artificial Sequence: Synthetic oligonucleotide
  Antisense Strand to SEQ ID NO: 454561
uaaggucagacacugacac

SEQ ID NO: 454563 - RNA, 19 nt, Artificial Sequence
  Description of Artificial Sequence: Synthetic oligonucleotide
  Sense strand starting at position 2090 of SEQ ID NO: 316973
cuaugaaagugguaaguaa

SEQ ID NO: 454564 - RNA, 19 nt, Artificial Sequence
  Description of Artificial Sequence: Synthetic oligonucleotide
  Antisense Strand to SEQ ID NO: 454563
uuacuuaccacuuucauag

SEQ ID NO: 454565 - RNA, 19 nt, Artificial Sequence
  Description of Artificial Sequence: Synthetic oligonucleotide
  Sense strand starting at position 2126 of SEQ ID NO: 316973
acagguugcuacuugugau

SEQ ID NO: 454566 - RNA, 19 nt, Artificial Sequence
  Description of Artificial Sequence: Synthetic oligonucleotide
  Antisense Strand to SEQ ID NO: 454565
aucacaaguagcaaccugu

SEQ ID NO: 454567 - RNA, 19 nt, Artificial Sequence
  Description of Artificial Sequence: Synthetic oligonucleotide
  Sense strand starting at position 2129 of SEQ ID NO: 316973
gguugcuacuugugauauu

SEQ ID NO: 454568 - RNA, 19 nt, Artificial Sequence
  Description of Artificial Sequence: Synthetic oligonucleotide
  Antisense Strand to SEQ ID NO: 454567
aauaucacaaguagcaacc

SEQ ID NO: 454569 - RNA, 19 nt, Artificial Sequence
  Description of Artificial Sequence: Synthetic oligonucleotide
  Sense strand starting at position 2130 of SEQ ID NO: 316973
guugcuacuugugauauua

SEQ ID NO: 454570 - RNA, 19 nt, Artificial Sequence
  Description of Artificial Sequence: Synthetic oligonucleotide
  Antisense Strand to SEQ ID NO: 454569
uaauaucacaaguagcaac

SEQ ID NO: 454571 - RNA, 19 nt, Artificial Sequence
  Description of Artificial Sequence: Synthetic oligonucleotide
  Sense strand starting at position 2132 of SEQ ID NO: 316973
ugcuacuugugauauuaac

SEQ ID NO: 454572 - RNA, 19 nt, Artificial Sequence
  Description of Artificial Sequence: Synthetic oligonucleotide
  Antisense Strand to SEQ ID NO: 454571
guuaauaucacaaguagca

SEQ ID NO: 454573 - RNA, 19 nt, Artificial Sequence
  Description of Artificial Sequence: Synthetic oligonucleotide
  Sense strand starting at position 2479 of SEQ ID NO: 316973
gcuaguacugcgcagcuau

SEQ ID NO: 454574 - RNA, 19 nt, Artificial Sequence
  Description of Artificial Sequence: Synthetic oligonucleotide
  Antisense Strand to SEQ ID NO: 454573
auagcugcgcaguacuagc

SEQ ID NO: 454575 - RNA, 19 nt, Artificial Sequence
  Description of Artificial Sequence: Synthetic oligonucleotide
  Sense strand starting at position 2608 of SEQ ID NO: 316973
uuaugaguaaaguagguua

SEQ ID NO: 454576 - RNA, 19 nt, Artificial Sequence
  Description of Artificial Sequence: Synthetic oligonucleotide
  Antisense Strand to SEQ ID NO: 454575
uaaccuacuuuacucauaa

SEQ ID NO: 454577 - RNA, 19 nt, Artificial Sequence
  Description of Artificial Sequence: Synthetic oligonucleotide
  Sense strand starting at position 2610 of SEQ ID NO: 316973
augaguaaaguagguuaaa

SEQ ID NO: 454578 - RNA, 19 nt, Artificial Sequence
  Description of Artificial Sequence: Synthetic oligonucleotide
  Antisense Strand to SEQ ID NO: 454577
uuuaaccuacuuuacucau

SEQ ID NO: 454579 - RNA, 19 nt, Artificial Sequence
  Description of Artificial Sequence: Synthetic oligonucleotide
  Sense strand starting at position 2794 of SEQ ID NO: 316973
ucaauuugcuaugugagca

SEQ ID NO: 454580 - RNA, 19 nt, Artificial Sequence
  Description of Artificial Sequence: Synthetic oligonucleotide
  Antisense Strand to SEQ ID NO: 454579
ugcucacauagcaaauuga

SEQ ID NO: 454581 - RNA, 19 nt, Artificial Sequence
  Description of Artificial Sequence: Synthetic oligonucleotide
  Sense strand starting at position 2798 of SEQ ID NO: 316973
uuugcuaugugagcaauuu

SEQ ID NO: 454582 - RNA, 19 nt, Artificial Sequence
  Description of Artificial Sequence: Synthetic oligonucleotide
  Antisense Strand to SEQ ID NO: 454581
aaauugcucacauagcaaa

SEQ ID NO: 454583 - RNA, 19 nt, Artificial Sequence
  Description of Artificial Sequence: Synthetic oligonucleotide
  Sense strand starting at position 2806 of SEQ ID NO: 316973
gugagcaauuugccacaua

SEQ ID NO: 454584 - RNA, 19 nt, Artificial Sequence
  Description of Artificial Sequence: Synthetic oligonucleotide
  Antisense Strand to SEQ ID NO: 454583
uauguggcaaauugcucac

SEQ ID NO: 454585 - RNA, 19 nt, Artificial Sequence
  Description of Artificial Sequence: Synthetic oligonucleotide
  Sense strand starting at position 2807 of SEQ ID NO: 316973
ugagcaauuugccacauau

SEQ ID NO: 454586 - RNA, 19 nt, Artificial Sequence
  Description of Artificial Sequence: Synthetic oligonucleotide
  Antisense Strand to SEQ ID NO: 454585
auauguggcaaauugcuca

SEQ ID NO: 454587 - RNA, 19 nt, Artificial Sequence
  Description of Artificial Sequence: Synthetic oligonucleotide
  Sense strand starting at position 3238 of SEQ ID NO: 316973
gcucaagagucagccaagu

SEQ ID NO: 454588 - RNA, 19 nt, Artificial Sequence
  Description of Artificial Sequence: Synthetic oligonucleotide
  Antisense Strand to SEQ ID NO: 454587
acuuggcugacucuugagc

SEQ ID NO: 454589 - RNA, 19 nt, Artificial Sequence
  Description of Artificial Sequence: Synthetic oligonucleotide
  Sense strand starting at position 3599 of SEQ ID NO: 316973
gucucaauugaauaguacu

SEQ ID NO: 454590 - RNA, 19 nt, Artificial Sequence
  Description of Artificial Sequence: Synthetic oligonucleotide
  Antisense Strand to SEQ ID NO: 454589
aguacuauucaauugagac

SEQ ID NO: 454591 - RNA, 19 nt, Artificial Sequence
  Description of Artificial Sequence: Synthetic oligonucleotide
  Sense strand starting at position 3722 of SEQ ID NO: 316973
uugcaaucauugugucucu

SEQ ID NO: 454592 - RNA, 19 nt, Artificial Sequence
  Description of Artificial Sequence: Synthetic oligonucleotide
  Antisense Strand to SEQ ID NO: 454591
agagacacaaugauugcaa

SEQ ID NO: 454593 - RNA, 19 nt, Artificial Sequence
  Description of Artificial Sequence: Synthetic oligonucleotide
  Sense strand starting at position 3723 of SEQ ID NO: 316973
ugcaaucauugugucucua

SEQ ID NO: 454594 - RNA, 19 nt, Artificial Sequence
  Description of Artificial Sequence: Synthetic oligonucleotide
  Antisense Strand to SEQ ID NO: 454593
uagagacacaaugauugca

SEQ ID NO: 454595 - RNA, 19 nt, Artificial Sequence
  Description of Artificial Sequence: Synthetic oligonucleotide
  Sense strand starting at position 3731 of SEQ ID NO: 316973
uugugucucuacuggacua

SEQ ID NO: 454596 - RNA, 19 nt, Artificial Sequence
  Description of Artificial Sequence: Synthetic oligonucleotide
  Antisense Strand to SEQ ID NO: 454595
uaguccaguagagacacaa

SEQ ID NO: 454597 - RNA, 19 nt, Artificial Sequence
  Description of Artificial Sequence: Synthetic oligonucleotide
  Sense strand starting at position 3848 of SEQ ID NO: 316973
uaaauauugcagugcagag

SEQ ID NO: 454598 - RNA, 19 nt, Artificial Sequence
  Description of Artificial Sequence: Synthetic oligonucleotide
  Antisense Strand to SEQ ID NO: 454597
cucugcacugcaauauuua

SEQ ID NO: 454599 - RNA, 19 nt, Artificial Sequence
  Description of Artificial Sequence: Synthetic oligonucleotide
  Sense strand starting at position 3882 of SEQ ID NO: 316973
caggcaguccuggguguau

SEQ ID NO: 454600 - RNA, 19 nt, Artificial Sequence
  Description of Artificial Sequence: Synthetic oligonucleotide
  Antisense Strand to SEQ ID NO: 454599
auacacccaggacugccug

SEQ ID NO: 454601 - RNA, 19 nt, Artificial Sequence
  Description of Artificial Sequence: Synthetic oligonucleotide
  Sense strand starting at position 3926 of SEQ ID NO: 316973
gcggguaaccuaugucaug

SEQ ID NO: 454602 - RNA, 19 nt, Artificial Sequence
  Description of Artificial Sequence: Synthetic oligonucleotide
  Antisense Strand to SEQ ID NO: 454601
caugacauagguuacccgc

SEQ ID NO: 454603 - RNA, 19 nt, Artificial Sequence
  Description of Artificial Sequence: Synthetic oligonucleotide
  Sense strand starting at position 3927 of SEQ ID NO: 316973
cggguaaccuaugucaugu

SEQ ID NO: 454604 - RNA, 19 nt, Artificial Sequence
  Description of Artificial Sequence: Synthetic oligonucleotide
  Antisense Strand to SEQ ID NO: 454603
acaugacauagguuacccg

SEQ ID NO: 454605 - RNA, 19 nt, Artificial Sequence
  Description of Artificial Sequence: Synthetic oligonucleotide
  Sense strand starting at position 37 of SEQ ID NO: 316974
cauguuuagucuucggcua

SEQ ID NO: 454606 - RNA, 19 nt, Artificial Sequence
  Description of Artificial Sequence: Synthetic oligonucleotide
  Antisense Strand to SEQ ID NO: 454605
uagccgaagacuaaacaug

SEQ ID NO: 454607 - RNA, 19 nt, Artificial Sequence
  Description of Artificial Sequence: Synthetic oligonucleotide
  Sense strand starting at position 38 of SEQ ID NO: 316974
auguuuagucuucggcuaa

SEQ ID NO: 454608 - RNA, 19 nt, Artificial Sequence
  Description of Artificial Sequence: Synthetic oligonucleotide
  Antisense Strand to SEQ ID NO: 454607
uuagccgaagacuaaacau

SEQ ID NO: 454609 - RNA, 19 nt, Artificial Sequence
  Description of Artificial Sequence: Synthetic oligonucleotide
  Sense strand starting at position 45 of SEQ ID NO: 316974
gucuucggcuaaucaguau

SEQ ID NO: 454610 - RNA, 19 nt, Artificial Sequence
  Description of Artificial Sequence: Synthetic oligonucleotide
  Antisense Strand to SEQ ID NO: 454609
auacugauuagccgaagac

SEQ ID NO: 454611 - RNA, 19 nt, Artificial Sequence
  Description of Artificial Sequence: Synthetic oligonucleotide
  Sense strand starting at position 90 of SEQ ID NO: 316974
ucuguuauacuauaaagug

SEQ ID NO: 454612 - RNA, 19 nt, Artificial Sequence
  Description of Artificial Sequence: Synthetic oligonucleotide
  Antisense Strand to SEQ ID NO: 454611
cacuuuauaguauaacaga

SEQ ID NO: 454613 - RNA, 19 nt, Artificial Sequence
  Description of Artificial Sequence: Synthetic oligonucleotide
  Sense strand starting at position 107 of SEQ ID NO: 316974
uggccacauccagagaguu

SEQ ID NO: 454614 - RNA, 19 nt, Artificial Sequence
  Description of Artificial Sequence: Synthetic oligonucleotide
  Antisense Strand to SEQ ID NO: 454613
aacucucuggauguggcca

SEQ ID NO: 454615 - RNA, 19 nt, Artificial Sequence
  Description of Artificial Sequence: Synthetic oligonucleotide
  Sense strand starting at position 115 of SEQ ID NO: 316974
uccagagaguuuccuugga

SEQ ID NO: 454616 - RNA, 19 nt, Artificial Sequence
  Description of Artificial Sequence: Synthetic oligonucleotide
  Antisense Strand to SEQ ID NO: 454615
uccaaggaaacucucugga

SEQ ID NO: 454617 - RNA, 19 nt, Artificial Sequence
  Description of Artificial Sequence: Synthetic oligonucleotide
  Sense strand starting at position 117 of SEQ ID NO: 316974
cagagaguuuccuuggagg

SEQ ID NO: 454618 - RNA, 19 nt, Artificial Sequence
  Description of Artificial Sequence: Synthetic oligonucleotide
  Antisense Strand to SEQ ID NO: 454617
ccuccaaggaaacucucug

SEQ ID NO: 454619 - RNA, 19 nt, Artificial Sequence
  Description of Artificial Sequence: Synthetic oligonucleotide
  Sense strand starting at position 134 of SEQ ID NO: 316974
ggguuucugcuacgaagau

SEQ ID NO: 454620 - RNA, 19 nt, Artificial Sequence
  Description of Artificial Sequence: Synthetic oligonucleotide
  Antisense Strand to SEQ ID NO: 454619
aucuucguagcagaaaccc

SEQ ID NO: 454621 - RNA, 19 nt, Artificial Sequence
  Description of Artificial Sequence: Synthetic oligonucleotide
  Sense strand starting at position 138 of SEQ ID NO: 316974
uucugcuacgaagaugaua

SEQ ID NO: 454622 - RNA, 19 nt, Artificial Sequence
  Description of Artificial Sequence: Synthetic oligonucleotide
  Antisense Strand to SEQ ID NO: 454621
uaucaucuucguagcagaa

SEQ ID NO: 454623 - RNA, 19 nt, Artificial Sequence
  Description of Artificial Sequence: Synthetic oligonucleotide
  Sense strand starting at position 368 of SEQ ID NO: 316974
uagaguacgcagugucuaa

SEQ ID NO: 454624 - RNA, 19 nt, Artificial Sequence
  Description of Artificial Sequence: Synthetic oligonucleotide
  Antisense Strand to SEQ ID NO: 454623
uuagacacugcguacucua

SEQ ID NO: 454625 - RNA, 19 nt, Artificial Sequence
  Description of Artificial Sequence: Synthetic oligonucleotide
  Sense strand starting at position 643 of SEQ ID NO: 316974
agguuuguucccuagucua

SEQ ID NO: 454626 - RNA, 19 nt, Artificial Sequence
  Description of Artificial Sequence: Synthetic oligonucleotide
  Antisense Strand to SEQ ID NO: 454625
uagacuagggaacaaaccu

SEQ ID NO: 454627 - RNA, 19 nt, Artificial Sequence
  Description of Artificial Sequence: Synthetic oligonucleotide
  Sense strand starting at position 646 of SEQ ID NO: 316974
uuuguucccuagucuauaa

SEQ ID NO: 454628 - RNA, 19 nt, Artificial Sequence
  Description of Artificial Sequence: Synthetic oligonucleotide
  Antisense Strand to SEQ ID NO: 454627
uuauagacuagggaacaaa

SEQ ID NO: 454629 - RNA, 19 nt, Artificial Sequence
  Description of Artificial Sequence: Synthetic oligonucleotide
  Sense strand starting at position 648 of SEQ ID NO: 316974
uguucccuagucuauaauu

SEQ ID NO: 454630 - RNA, 19 nt, Artificial Sequence
  Description of Artificial Sequence: Synthetic oligonucleotide
  Antisense Strand to SEQ ID NO: 454629
aauuauagacuagggaaca

SEQ ID NO: 454631 - RNA, 19 nt, Artificial Sequence
  Description of Artificial Sequence: Synthetic oligonucleotide
  Sense strand starting at position 747 of SEQ ID NO: 316974
augcguaguacgcuuaaca

SEQ ID NO: 454632 - RNA, 19 nt, Artificial Sequence
  Description of Artificial Sequence: Synthetic oligonucleotide
  Antisense Strand to SEQ ID NO: 454631
uguuaagcguacuacgcau

SEQ ID NO: 454633 - RNA, 19 nt, Artificial Sequence
  Description of Artificial Sequence: Synthetic oligonucleotide
  Sense strand starting at position 748 of SEQ ID NO: 316974
ugcguaguacgcuuaacau

SEQ ID NO: 454634 - RNA, 19 nt, Artificial Sequence
  Description of Artificial Sequence: Synthetic oligonucleotide
  Antisense Strand to SEQ ID NO: 454633
auguuaagcguacuacgca

SEQ ID NO: 454635 - RNA, 19 nt, Artificial Sequence
  Description of Artificial Sequence: Synthetic oligonucleotide
  Sense strand starting at position 773 of SEQ ID NO: 316974
uuguuucuggcaucgcuaa

SEQ ID NO: 454636 - RNA, 19 nt, Artificial Sequence
  Description of Artificial Sequence: Synthetic oligonucleotide
  Antisense Strand to SEQ ID NO: 454635
uuagcgaugccagaaacaa

SEQ ID NO: 454637 - RNA, 19 nt, Artificial Sequence
  Description of Artificial Sequence: Synthetic oligonucleotide
  Sense strand starting at position 780 of SEQ ID NO: 316974
uggcaucgcuaaguguauu

SEQ ID NO: 454638 - RNA, 19 nt, Artificial Sequence
  Description of Artificial Sequence: Synthetic oligonucleotide
  Antisense Strand to SEQ ID NO: 454637
aauacacuuagcgaugcca

SEQ ID NO: 454639 - RNA, 19 nt, Artificial Sequence
  Description of Artificial Sequence: Synthetic oligonucleotide
  Sense strand starting at position 786 of SEQ ID NO: 316974
cgcuaaguguauuccauua

SEQ ID NO: 454640 - RNA, 19 nt, Artificial Sequence
  Description of Artificial Sequence: Synthetic oligonucleotide
  Antisense Strand to SEQ ID NO: 454639
uaauggaauacacuuagcg

SEQ ID NO: 454641 - RNA, 19 nt, Artificial Sequence
  Description of Artificial Sequence: Synthetic oligonucleotide
  Sense strand starting at position 788 of SEQ ID NO: 316974
cuaaguguauuccauuaaa

SEQ ID NO: 454642 - RNA, 19 nt, Artificial Sequence
  Description of Artificial Sequence: Synthetic oligonucleotide
  Antisense Strand to SEQ ID NO: 454641
uuuaauggaauacacuuag

SEQ ID NO: 454643 - RNA, 19 nt, Artificial Sequence
  Description of Artificial Sequence: Synthetic oligonucleotide
  Sense strand starting at position 836 of SEQ ID NO: 316974
ugagguaaguaccaacauu

SEQ ID NO: 454644 - RNA, 19 nt, Artificial Sequence
  Description of Artificial Sequence: Synthetic oligonucleotide
  Antisense Strand to SEQ ID NO: 454643
aauguugguacuuaccuca

SEQ ID NO: 454645 - RNA, 19 nt, Artificial Sequence
  Description of Artificial Sequence: Synthetic oligonucleotide
  Sense strand starting at position 1087 of SEQ ID NO: 316974
ggguuacagcaaugucuaa

SEQ ID NO: 454646 - RNA, 19 nt, Artificial Sequence
  Description of Artificial Sequence: Synthetic oligonucleotide
  Antisense Strand to SEQ ID NO: 454645
uuagacauugcuguaaccc

SEQ ID NO: 454647 - RNA, 19 nt, Artificial Sequence
  Description of Artificial Sequence: Synthetic oligonucleotide
  Sense strand starting at position 1363 of SEQ ID NO: 316974
caccuaagccaguaagagu

SEQ ID NO: 454648 - RNA, 19 nt, Artificial Sequence
  Description of Artificial Sequence: Synthetic oligonucleotide
  Antisense Strand to SEQ ID NO: 454647
acucuuacuggcuuaggug

SEQ ID NO: 454649 - RNA, 19 nt, Artificial Sequence
  Description of Artificial Sequence: Synthetic oligonucleotide
  Sense strand starting at position 2148 of SEQ ID NO: 316974
ggcugugaaagugguaagu

SEQ ID NO: 454650 - RNA, 19 nt, Artificial Sequence
  Description of Artificial Sequence: Synthetic oligonucleotide
  Antisense Strand to SEQ ID NO: 454649
acuuaccacuuucacagcc

SEQ ID NO: 454651 - RNA, 19 nt, Artificial Sequence
  Description of Artificial Sequence: Synthetic oligonucleotide
  Sense strand starting at position 2150 of SEQ ID NO: 316974
cugugaaagugguaaguac

SEQ ID NO: 454652 - RNA, 19 nt, Artificial Sequence
  Description of Artificial Sequence: Synthetic oligonucleotide
  Antisense Strand to SEQ ID NO: 454651
guacuuaccacuuucacag

SEQ ID NO: 454653 - RNA, 19 nt, Artificial Sequence
  Description of Artificial Sequence: Synthetic oligonucleotide
  Sense strand starting at position 2214 of SEQ ID NO: 316974
gcauaaguuaaaugggcau

SEQ ID NO: 454654 - RNA, 19 nt, Artificial Sequence
  Description of Artificial Sequence: Synthetic oligonucleotide
  Antisense Strand to SEQ ID NO: 454653
augcccauuuaacuuaugc

SEQ ID NO: 454655 - RNA, 19 nt, Artificial Sequence
  Description of Artificial Sequence: Synthetic oligonucleotide
  Sense strand starting at position 2218 of SEQ ID NO: 316974
aaguuaaaugggcauggua

SEQ ID NO: 454656 - RNA, 19 nt, Artificial Sequence
  Description of Artificial Sequence: Synthetic oligonucleotide
  Antisense Strand to SEQ ID NO: 454655
uaccaugcccauuuaacuu

SEQ ID NO: 454657 - RNA, 19 nt, Artificial Sequence
  Description of Artificial Sequence: Synthetic oligonucleotide
  Sense strand starting at position 2220 of SEQ ID NO: 316974
guuaaaugggcaugguaag

SEQ ID NO: 454658 - RNA, 19 nt, Artificial Sequence
  Description of Artificial Sequence: Synthetic oligonucleotide
  Antisense Strand to SEQ ID NO: 454657
cuuaccaugcccauuuaac

SEQ ID NO: 454659 - RNA, 19 nt, Artificial Sequence
  Description of Artificial Sequence: Synthetic oligonucleotide
  Sense strand starting at position 2698 of SEQ ID NO: 316974
auggaaaugugaggacauu

SEQ ID NO: 454660 - RNA, 19 nt, Artificial Sequence
  Description of Artificial Sequence: Synthetic oligonucleotide
  Antisense Strand to SEQ ID NO: 454659
aauguccucacauuuccau

SEQ ID NO: 454661 - RNA, 19 nt, Artificial Sequence
  Description of Artificial Sequence: Synthetic oligonucleotide
  Sense strand starting at position 2927 of SEQ ID NO: 316974
gaaguuaauguuugcagcu

SEQ ID NO: 454662 - RNA, 19 nt, Artificial Sequence
  Description of Artificial Sequence: Synthetic oligonucleotide
  Antisense Strand to SEQ ID NO: 454661
agcugcaaacauuaacuuc

SEQ ID NO: 454663 - RNA, 19 nt, Artificial Sequence
  Description of Artificial Sequence: Synthetic oligonucleotide
  Sense strand starting at position 2928 of SEQ ID NO: 316974
aaguuaauguuugcagcuu

SEQ ID NO: 454664 - RNA, 19 nt, Artificial Sequence
  Description of Artificial Sequence: Synthetic oligonucleotide
  Antisense Strand to SEQ ID NO: 454663
aagcugcaaacauuaacuu

SEQ ID NO: 454665 - RNA, 19 nt, Artificial Sequence
  Description of Artificial Sequence: Synthetic oligonucleotide
  Sense strand starting at position 3039 of SEQ ID NO: 316974
gauugaggcuccucuaaug

SEQ ID NO: 454666 - RNA, 19 nt, Artificial Sequence
  Description of Artificial Sequence: Synthetic oligonucleotide
  Antisense Strand to SEQ ID NO: 454665
cauuagaggagccucaauc

SEQ ID NO: 454667 - RNA, 19 nt, Artificial Sequence
  Description of Artificial Sequence: Synthetic oligonucleotide
  Sense strand starting at position 3115 of SEQ ID NO: 316974
ggguaaucugagcagcaag

SEQ ID NO: 454668 - RNA, 19 nt, Artificial Sequence
  Description of Artificial Sequence: Synthetic oligonucleotide
  Antisense Strand to SEQ ID NO: 454667
cuugcugcucagauuaccc

SEQ ID NO: 454669 - RNA, 19 nt, Artificial Sequence
  Description of Artificial Sequence: Synthetic oligonucleotide
  Sense strand starting at position 3241 of SEQ ID NO: 316974
ccauaaagucaguguuugu

SEQ ID NO: 454670 - RNA, 19 nt, Artificial Sequence
  Description of Artificial Sequence: Synthetic oligonucleotide
  Antisense Strand to SEQ ID NO: 454669
acaaacacugacuuuaugg

SEQ ID NO: 454671 - RNA, 19 nt, Artificial Sequence
  Description of Artificial Sequence: Synthetic oligonucleotide
  Sense strand starting at position 3244 of SEQ ID NO: 316974
uaaagucaguguuuguuau

SEQ ID NO: 454672 - RNA, 19 nt, Artificial Sequence
  Description of Artificial Sequence: Synthetic oligonucleotide
  Antisense Strand to SEQ ID NO: 454671
auaacaaacacugacuuua

SEQ ID NO: 454673 - RNA, 19 nt, Artificial Sequence
  Description of Artificial Sequence: Synthetic oligonucleotide
  Sense strand starting at position 3654 of SEQ ID NO: 316974
uuaggcucuuaauugaaua

SEQ ID NO: 454674 - RNA, 19 nt, Artificial Sequence
  Description of Artificial Sequence: Synthetic oligonucleotide
  Antisense Strand to SEQ ID NO: 454673
uauucaauuaagagccuaa

SEQ ID NO: 454675 - RNA, 19 nt, Artificial Sequence
  Description of Artificial Sequence: Synthetic oligonucleotide
  Sense strand starting at position 3829 of SEQ ID NO: 316974
cccugacuaugucuaucuu

SEQ ID NO: 454676 - RNA, 19 nt, Artificial Sequence
  Description of Artificial Sequence: Synthetic oligonucleotide
  Antisense Strand to SEQ ID NO: 454675
aagauagacauagucaggg

SEQ ID NO: 454677 - RNA, 19 nt, Artificial Sequence
  Description of Artificial Sequence: Synthetic oligonucleotide
  Sense strand starting at position 3830 of SEQ ID NO: 316974
ccugacuaugucuaucuua

SEQ ID NO: 454678 - RNA, 19 nt, Artificial Sequence
  Description of Artificial Sequence: Synthetic oligonucleotide
  Antisense Strand to SEQ ID NO: 454677
uaagauagacauagucagg

SEQ ID NO: 454679 - RNA, 19 nt, Artificial Sequence
  Description of Artificial Sequence: Synthetic oligonucleotide
  Sense strand starting at position 3912 of SEQ ID NO: 316974
ugaauauugcagugcaaag

SEQ ID NO: 454680 - RNA, 19 nt, Artificial Sequence
  Description of Artificial Sequence: Synthetic oligonucleotide
  Antisense Strand to SEQ ID NO: 454679
cuuugcacugcaauauuca

SEQ ID NO: 454681 - RNA, 19 nt, Artificial Sequence
  Description of Artificial Sequence: Synthetic oligonucleotide
  Sense strand starting at position 3979 of SEQ ID NO: 316974
uuauauauccuacggguaa

SEQ ID NO: 454682 - RNA, 19 nt, Artificial Sequence
  Description of Artificial Sequence: Synthetic oligonucleotide
  Antisense Strand to SEQ ID NO: 454681
uuacccguaggauauauaa

SEQ ID NO: 454683 - RNA, 19 nt, Artificial Sequence
  Description of Artificial Sequence: Synthetic oligonucleotide
  Sense strand starting at position 3983 of SEQ ID NO: 316974
auauccuacggguaaccua

SEQ ID NO: 454684 - RNA, 19 nt, Artificial Sequence
  Description of Artificial Sequence: Synthetic oligonucleotide
  Antisense Strand to SEQ ID NO: 454683
uagguuacccguaggauau

SEQ ID NO: 454685 - RNA, 19 nt, Artificial Sequence
  Description of Artificial Sequence: Synthetic oligonucleotide
  Sense strand starting at position 58 of SEQ ID NO: 316975
cuguuauacuauuaaguag

SEQ ID NO: 454686 - RNA, 19 nt, Artificial Sequence
  Description of Artificial Sequence: Synthetic oligonucleotide
  Antisense Strand to SEQ ID NO: 454685
cuacuuaauaguauaacag

SEQ ID NO: 454687 - RNA, 19 nt, Artificial Sequence
  Description of Artificial Sequence: Synthetic oligonucleotide
  Sense strand starting at position 225 of SEQ ID NO: 316975
uguguaguuguagaaauua

SEQ ID NO: 454688 - RNA, 19 nt, Artificial Sequence
  Description of Artificial Sequence: Synthetic oligonucleotide
  Antisense Strand to SEQ ID NO: 454687
uaauuucuacaacuacaca

SEQ ID NO: 454689 - RNA, 19 nt, Artificial Sequence
  Description of Artificial Sequence: Synthetic oligonucleotide
  Sense strand starting at position 642 of SEQ ID NO: 316975
acugauagcuacugcuuau

SEQ ID NO: 454690 - RNA, 19 nt, Artificial Sequence
  Description of Artificial Sequence: Synthetic oligonucleotide
  Antisense Strand to SEQ ID NO: 454689
auaagcaguagcuaucagu

SEQ ID NO: 454691 - RNA, 19 nt, Artificial Sequence
  Description of Artificial Sequence: Synthetic oligonucleotide
  Sense strand starting at position 762 of SEQ ID NO: 316975
aguguauuccauuaaacau

SEQ ID NO: 454692 - RNA, 19 nt, Artificial Sequence
  Description of Artificial Sequence: Synthetic oligonucleotide
  Antisense Strand to SEQ ID NO: 454691
auguuuaauggaauacacu

SEQ ID NO: 454693 - RNA, 19 nt, Artificial Sequence
  Description of Artificial Sequence: Synthetic oligonucleotide
  Sense strand starting at position 781 of SEQ ID NO: 316975
uuuguuuaaucuuuacgca

SEQ ID NO: 454694 - RNA, 19 nt, Artificial Sequence
  Description of Artificial Sequence: Synthetic oligonucleotide
  Antisense Strand to SEQ ID NO: 454693
ugcguaaagauuaaacaaa

SEQ ID NO: 454695 - RNA, 19 nt, Artificial Sequence
  Description of Artificial Sequence: Synthetic oligonucleotide
  Sense strand starting at position 782 of SEQ ID NO: 316975
uuguuuaaucuuuacgcaa

SEQ ID NO: 454696 - RNA, 19 nt, Artificial Sequence
  Description of Artificial Sequence: Synthetic oligonucleotide
  Antisense Strand to SEQ ID NO: 454695
uugcguaaagauuaaacaa

SEQ ID NO: 454697 - RNA, 19 nt, Artificial Sequence
  Description of Artificial Sequence: Synthetic oligonucleotide
  Sense strand starting at position 784 of SEQ ID NO: 316975
guuuaaucuuuacgcaauu

SEQ ID NO: 454698 - RNA, 19 nt, Artificial Sequence
  Description of Artificial Sequence: Synthetic oligonucleotide
  Antisense Strand to SEQ ID NO: 454697
aauugcguaaagauuaaac

SEQ ID NO: 454699 - RNA, 19 nt, Artificial Sequence
  Description of Artificial Sequence: Synthetic oligonucleotide
  Sense strand starting at position 817 of SEQ ID NO: 316975
gccaacauugccugcauuu

SEQ ID NO: 454700 - RNA, 19 nt, Artificial Sequence
  Description of Artificial Sequence: Synthetic oligonucleotide
  Antisense Strand to SEQ ID NO: 454699
aaaugcaggcaauguuggc

SEQ ID NO: 454701 - RNA, 19 nt, Artificial Sequence
  Description of Artificial Sequence: Synthetic oligonucleotide
  Sense strand starting at position 920 of SEQ ID NO: 316975
aguucuguguguuccucau

SEQ ID NO: 454702 - RNA, 19 nt, Artificial Sequence
  Description of Artificial Sequence: Synthetic oligonucleotide
  Antisense Strand to SEQ ID NO: 454701
augaggaacacacagaacu

SEQ ID NO: 454703 - RNA, 19 nt, Artificial Sequence
  Description of Artificial Sequence: Synthetic oligonucleotide
  Sense strand starting at position 1008 of SEQ ID NO: 316975
cccuguaugcuacagagua

SEQ ID NO: 454704 - RNA, 19 nt, Artificial Sequence
  Description of Artificial Sequence: Synthetic oligonucleotide
  Antisense Strand to SEQ ID NO: 454703
uacucuguagcauacaggg

SEQ ID NO: 454705 - RNA, 19 nt, Artificial Sequence
  Description of Artificial Sequence: Synthetic oligonucleotide
  Sense strand starting at position 1058 of SEQ ID NO: 316975
acuguaugcucaguagauc

SEQ ID NO: 454706 - RNA, 19 nt, Artificial Sequence
  Description of Artificial Sequence: Synthetic oligonucleotide
  Antisense Strand to SEQ ID NO: 454705
gaucuacugagcauacagu

SEQ ID NO: 454707 - RNA, 19 nt, Artificial Sequence
  Description of Artificial Sequence: Synthetic oligonucleotide
  Sense strand starting at position 1086 of SEQ ID NO: 316975
ugcucucacuuggauuaca

SEQ ID NO: 454708 - RNA, 19 nt, Artificial Sequence
  Description of Artificial Sequence: Synthetic oligonucleotide
  Antisense Strand to SEQ ID NO: 454707
uguaauccaagugagagca

SEQ ID NO: 454709 - RNA, 19 nt, Artificial Sequence
  Description of Artificial Sequence: Synthetic oligonucleotide
  Sense strand starting at position 1097 of SEQ ID NO: 316975
ggauuacagcaaugucuaa

SEQ ID NO: 454710 - RNA, 19 nt, Artificial Sequence
  Description of Artificial Sequence: Synthetic oligonucleotide
  Antisense Strand to SEQ ID NO: 454709
uuagacauugcuguaaucc

SEQ ID NO: 454711 - RNA, 19 nt, Artificial Sequence
  Description of Artificial Sequence: Synthetic oligonucleotide
  Sense strand starting at position 1369 of SEQ ID NO: 316975
caucuaagccaguaagagu

SEQ ID NO: 454712 - RNA, 19 nt, Artificial Sequence
  Description of Artificial Sequence: Synthetic oligonucleotide
  Antisense Strand to SEQ ID NO: 454711
acucuuacuggcuuagaug

SEQ ID NO: 454713 - RNA, 19 nt, Artificial Sequence
  Description of Artificial Sequence: Synthetic oligonucleotide
  Sense strand starting at position 1398 of SEQ ID NO: 316975
uuuguuucuuccuauguga

SEQ ID NO: 454714 - RNA, 19 nt, Artificial Sequence
  Description of Artificial Sequence: Synthetic oligonucleotide
  Antisense Strand to SEQ ID NO: 454713
ucacauaggaagaaacaaa

SEQ ID NO: 454715 - RNA, 19 nt, Artificial Sequence
  Description of Artificial Sequence: Synthetic oligonucleotide
  Sense strand starting at position 1400 of SEQ ID NO: 316975
uguuucuuccuaugugaca

SEQ ID NO: 454716 - RNA, 19 nt, Artificial Sequence
  Description of Artificial Sequence: Synthetic oligonucleotide
  Antisense Strand to SEQ ID NO: 454715
ugucacauaggaagaaaca

SEQ ID NO: 454717 - RNA, 19 nt, Artificial Sequence
  Description of Artificial Sequence: Synthetic oligonucleotide
  Sense strand starting at position 1648 of SEQ ID NO: 316975
guuuaauucuagcuagacu

SEQ ID NO: 454718 - RNA, 19 nt, Artificial Sequence
  Description of Artificial Sequence: Synthetic oligonucleotide
  Antisense Strand to SEQ ID NO: 454717
agucuagcuagaauuaaac

SEQ ID NO: 454719 - RNA, 19 nt, Artificial Sequence
  Description of Artificial Sequence: Synthetic oligonucleotide
  Sense strand starting at position 1955 of SEQ ID NO: 316975
cgagcuggcuccugaaguu

SEQ ID NO: 454720 - RNA, 19 nt, Artificial Sequence
  Description of Artificial Sequence: Synthetic oligonucleotide
  Antisense Strand to SEQ ID NO: 454719
aacuucaggagccagcucg

SEQ ID NO: 454721 - RNA, 19 nt, Artificial Sequence
  Description of Artificial Sequence: Synthetic oligonucleotide
  Sense strand starting at position 2060 of SEQ ID NO: 316975
uggccaucaucagcugaua

SEQ ID NO: 454722 - RNA, 19 nt, Artificial Sequence
  Description of Artificial Sequence: Synthetic oligonucleotide
  Antisense Strand to SEQ ID NO: 454721
uaucagcugaugauggcca

SEQ ID NO: 454723 - RNA, 19 nt, Artificial Sequence
  Description of Artificial Sequence: Synthetic oligonucleotide
  Sense strand starting at position 2150 of SEQ ID NO: 316975
cuaugaaagugguaaguac

SEQ ID NO: 454724 - RNA, 19 nt, Artificial Sequence
  Description of Artificial Sequence: Synthetic oligonucleotide
  Antisense Strand to SEQ ID NO: 454723
guacuuaccacuuucauag

SEQ ID NO: 454725 - RNA, 19 nt, Artificial Sequence
  Description of Artificial Sequence: Synthetic oligonucleotide
  Sense strand starting at position 2361 of SEQ ID NO: 316975
cccggugguccagaugaaa

SEQ ID NO: 454726 - RNA, 19 nt, Artificial Sequence
  Description of Artificial Sequence: Synthetic oligonucleotide
  Antisense Strand to SEQ ID NO: 454725
uuucaucuggaccaccggg

SEQ ID NO: 454727 - RNA, 19 nt, Artificial Sequence
  Description of Artificial Sequence: Synthetic oligonucleotide
  Sense strand starting at position 2372 of SEQ ID NO: 316975
agaugaaagugacuuccua

SEQ ID NO: 454728 - RNA, 19 nt, Artificial Sequence
  Description of Artificial Sequence: Synthetic oligonucleotide
  Antisense Strand to SEQ ID NO: 454727
uaggaagucacuuucaucu

SEQ ID NO: 454729 - RNA, 19 nt, Artificial Sequence
  Description of Artificial Sequence: Synthetic oligonucleotide
  Sense strand starting at position 2933 of SEQ ID NO: 316975
ugaagcuaauguuugcaga

SEQ ID NO: 454730 - RNA, 19 nt, Artificial Sequence
  Description of Artificial Sequence: Synthetic oligonucleotide
  Antisense Strand to SEQ ID NO: 454729
ucugcaaacauuagcuuca

SEQ ID NO: 454731 - RNA, 19 nt, Artificial Sequence
  Description of Artificial Sequence: Synthetic oligonucleotide
  Sense strand starting at position 2934 of SEQ ID NO: 316975
gaagcuaauguuugcagau

SEQ ID NO: 454732 - RNA, 19 nt, Artificial Sequence
  Description of Artificial Sequence: Synthetic oligonucleotide
  Antisense Strand to SEQ ID NO: 454731
aucugcaaacauuagcuuc

SEQ ID NO: 454733 - RNA, 19 nt, Artificial Sequence
  Description of Artificial Sequence: Synthetic oligonucleotide
  Sense strand starting at position 2935 of SEQ ID NO: 316975
aagcuaauguuugcagauu

SEQ ID NO: 454734 - RNA, 19 nt, Artificial Sequence
  Description of Artificial Sequence: Synthetic oligonucleotide
  Antisense Strand to SEQ ID NO: 454733
aaucugcaaacauuagcuu

SEQ ID NO: 454735 - RNA, 19 nt, Artificial Sequence
  Description of Artificial Sequence: Synthetic oligonucleotide
  Sense strand starting at position 3040 of SEQ ID NO: 316975
gccugagauugagggacua

SEQ ID NO: 454736 - RNA, 19 nt, Artificial Sequence
  Description of Artificial Sequence: Synthetic oligonucleotide
  Antisense Strand to SEQ ID NO: 454735
uagucccucaaucucaggc

SEQ ID NO: 454737 - RNA, 19 nt, Artificial Sequence
  Description of Artificial Sequence: Synthetic oligonucleotide
  Sense strand starting at position 3645 of SEQ ID NO: 316975
cuccaauucugcuuagggu

SEQ ID NO: 454738 - RNA, 19 nt, Artificial Sequence
  Description of Artificial Sequence: Synthetic oligonucleotide
  Antisense Strand to SEQ ID NO: 454737
acccuaagcagaauuggag

SEQ ID NO: 454739 - RNA, 19 nt, Artificial Sequence
  Description of Artificial Sequence: Synthetic oligonucleotide
  Sense strand starting at position 3783 of SEQ ID NO: 316975
cguugcaaucauugugucu

SEQ ID NO: 454740 - RNA, 19 nt, Artificial Sequence
  Description of Artificial Sequence: Synthetic oligonucleotide
  Antisense Strand to SEQ ID NO: 454739
agacacaaugauugcaacg

SEQ ID NO: 454741 - RNA, 19 nt, Artificial Sequence
  Description of Artificial Sequence: Synthetic oligonucleotide
  Sense strand starting at position 3833 of SEQ ID NO: 316975
ccugacuauggcuaucuua

SEQ ID NO: 454742 - RNA, 19 nt, Artificial Sequence
  Description of Artificial Sequence: Synthetic oligonucleotide
  Antisense Strand to SEQ ID NO: 454741
uaagauagccauagucagg

SEQ ID NO: 454743 - RNA, 19 nt, Artificial Sequence
  Description of Artificial Sequence: Synthetic oligonucleotide
  Sense strand starting at position 3915 of SEQ ID NO: 316975
ugaauauugcagugcagag

SEQ ID NO: 454744 - RNA, 19 nt, Artificial Sequence
  Description of Artificial Sequence: Synthetic oligonucleotide
  Antisense Strand to SEQ ID NO: 454743
cucugcacugcaauauuca

SEQ ID NO: 454745 - RNA, 19 nt, Artificial Sequence
  Description of Artificial Sequence: Synthetic oligonucleotide
  Sense strand starting at position 51 of SEQ ID NO: 316976
cuggacagcuguuagagua

SEQ ID NO: 454746 - RNA, 19 nt, Artificial Sequence
  Description of Artificial Sequence: Synthetic oligonucleotide
  Antisense Strand to SEQ ID NO: 454745
uacucuaacagcuguccag

SEQ ID NO: 454747 - RNA, 19 nt, Artificial Sequence
  Description of Artificial Sequence: Synthetic oligonucleotide
  Sense strand starting at position 231 of SEQ ID NO: 316976
caagaaaguguauacuguu

SEQ ID NO: 454748 - RNA, 19 nt, Artificial Sequence
  Description of Artificial Sequence: Synthetic oligonucleotide
  Antisense Strand to SEQ ID NO: 454747
aacaguauacacuuucuug

SEQ ID NO: 454749 - RNA, 19 nt, Artificial Sequence
  Description of Artificial Sequence: Synthetic oligonucleotide
  Sense strand starting at position 277 of SEQ ID NO: 316976
gcagcucaaguaugaagua

SEQ ID NO: 454750 - RNA, 19 nt, Artificial Sequence
  Description of Artificial Sequence: Synthetic oligonucleotide
  Antisense Strand to SEQ ID NO: 454749
uacuucauacuugagcugc

SEQ ID NO: 454751 - RNA, 19 nt, Artificial Sequence
  Description of Artificial Sequence: Synthetic oligonucleotide
  Sense strand starting at position 278 of SEQ ID NO: 316976
cagcucaaguaugaaguaa

SEQ ID NO: 454752 - RNA, 19 nt, Artificial Sequence
  Description of Artificial Sequence: Synthetic oligonucleotide
  Antisense Strand to SEQ ID NO: 454751
uuacuucauacuugagcug

SEQ ID NO: 454753 - RNA, 19 nt, Artificial Sequence
  Description of Artificial Sequence: Synthetic oligonucleotide
  Sense strand starting at position 439 of SEQ ID NO: 316976
guuagaaguuaacauacca

SEQ ID NO: 454754 - RNA, 19 nt, Artificial Sequence
  Description of Artificial Sequence: Synthetic oligonucleotide
  Antisense Strand to SEQ ID NO: 454753
ugguauguuaacuucuaac

SEQ ID NO: 454755 - RNA, 19 nt, Artificial Sequence
  Description of Artificial Sequence: Synthetic oligonucleotide
  Sense strand starting at position 532 of SEQ ID NO: 316976
gguaauacgcuuuaccuuu

SEQ ID NO: 454756 - RNA, 19 nt, Artificial Sequence
  Description of Artificial Sequence: Synthetic oligonucleotide
  Antisense Strand to SEQ ID NO: 454755
aaagguaaagcguauuacc

SEQ ID NO: 454757 - RNA, 19 nt, Artificial Sequence
  Description of Artificial Sequence: Synthetic oligonucleotide
  Sense strand starting at position 678 of SEQ ID NO: 316976
cuggaaucguuccucacua

SEQ ID NO: 454758 - RNA, 19 nt, Artificial Sequence
  Description of Artificial Sequence: Synthetic oligonucleotide
  Antisense Strand to SEQ ID NO: 454757
uagugaggaacgauuccag

SEQ ID NO: 454759 - RNA, 19 nt, Artificial Sequence
  Description of Artificial Sequence: Synthetic oligonucleotide
  Sense strand starting at position 679 of SEQ ID NO: 316976
uggaaucguuccucacuau

SEQ ID NO: 454760 - RNA, 19 nt, Artificial Sequence
  Description of Artificial Sequence: Synthetic oligonucleotide
  Antisense Strand to SEQ ID NO: 454759
auagugaggaacgauucca

SEQ ID NO: 454761 - RNA, 19 nt, Artificial Sequence
  Description of Artificial Sequence: Synthetic oligonucleotide
  Sense strand starting at position 694 of SEQ ID NO: 316976
cuaucugacuggcaagaua

SEQ ID NO: 454762 - RNA, 19 nt, Artificial Sequence
  Description of Artificial Sequence: Synthetic oligonucleotide
  Antisense Strand to SEQ ID NO: 454761
uaucuugccagucagauag

SEQ ID NO: 454763 - RNA, 19 nt, Artificial Sequence
  Description of Artificial Sequence: Synthetic oligonucleotide
  Sense strand starting at position 749 of SEQ ID NO: 316976
aacucaagcucaguaggau

SEQ ID NO: 454764 - RNA, 19 nt, Artificial Sequence
  Description of Artificial Sequence: Synthetic oligonucleotide
  Antisense Strand to SEQ ID NO: 454763
auccuacugagcuugaguu

SEQ ID NO: 454765 - RNA, 19 nt, Artificial Sequence
  Description of Artificial Sequence: Synthetic oligonucleotide
  Sense strand starting at position 758 of SEQ ID NO: 316976
ucaguaggauccuuguuga

SEQ ID NO: 454766 - RNA, 19 nt, Artificial Sequence
  Description of Artificial Sequence: Synthetic oligonucleotide
  Antisense Strand to SEQ ID NO: 454765
ucaacaaggauccuacuga

SEQ ID NO: 454767 - RNA, 19 nt, Artificial Sequence
  Description of Artificial Sequence: Synthetic oligonucleotide
  Sense strand starting at position 761 of SEQ ID NO: 316976
guaggauccuuguugaaca

SEQ ID NO: 454768 - RNA, 19 nt, Artificial Sequence
  Description of Artificial Sequence: Synthetic oligonucleotide
  Antisense Strand to SEQ ID NO: 454767
uguucaacaaggauccuac

SEQ ID NO: 454769 - RNA, 19 nt, Artificial Sequence
  Description of Artificial Sequence: Synthetic oligonucleotide
  Sense strand starting at position 879 of SEQ ID NO: 316976
cccaaaccuucuccggauu

SEQ ID NO: 454770 - RNA, 19 nt, Artificial Sequence
  Description of Artificial Sequence: Synthetic oligonucleotide
  Antisense Strand to SEQ ID NO: 454769
aauccggagaagguuuggg

SEQ ID NO: 454771 - RNA, 19 nt, Artificial Sequence
  Description of Artificial Sequence: Synthetic oligonucleotide
  Sense strand starting at position 880 of SEQ ID NO: 316976
ccaaaccuucuccggauua

SEQ ID NO: 454772 - RNA, 19 nt, Artificial Sequence
  Description of Artificial Sequence: Synthetic oligonucleotide
  Antisense Strand to SEQ ID NO: 454771
uaauccggagaagguuugg

SEQ ID NO: 454773 - RNA, 19 nt, Artificial Sequence
  Description of Artificial Sequence: Synthetic oligonucleotide
  Sense strand starting at position 910 of SEQ ID NO: 316976
ccauuuaccucugcgguga

SEQ ID NO: 454774 - RNA, 19 nt, Artificial Sequence
  Description of Artificial Sequence: Synthetic oligonucleotide
  Antisense Strand to SEQ ID NO: 454773
ucaccgcagagguaaaugg

SEQ ID NO: 454775 - RNA, 19 nt, Artificial Sequence
  Description of Artificial Sequence: Synthetic oligonucleotide
  Sense strand starting at position 914 of SEQ ID NO: 316976
uuaccucugcggugaggua

SEQ ID NO: 454776 - RNA, 19 nt, Artificial Sequence
  Description of Artificial Sequence: Synthetic oligonucleotide
  Antisense Strand to SEQ ID NO: 454775
uaccucaccgcagagguaa

SEQ ID NO: 454777 - RNA, 19 nt, Artificial Sequence
  Description of Artificial Sequence: Synthetic oligonucleotide
  Sense strand starting at position 980 of SEQ ID NO: 316976
caugacuggucguccuaga

SEQ ID NO: 454778 - RNA, 19 nt, Artificial Sequence
  Description of Artificial Sequence: Synthetic oligonucleotide
  Antisense Strand to SEQ ID NO: 454777
ucuaggacgaccagucaug

SEQ ID NO: 454779 - RNA, 19 nt, Artificial Sequence
  Description of Artificial Sequence: Synthetic oligonucleotide
  Sense strand starting at position 1088 of SEQ ID NO: 316976
gaaauuauaugcgcgccaa

SEQ ID NO: 454780 - RNA, 19 nt, Artificial Sequence
  Description of Artificial Sequence: Synthetic oligonucleotide
  Antisense Strand to SEQ ID NO: 454779
uuggcgcgcauauaauuuc

SEQ ID NO: 454781 - RNA, 19 nt, Artificial Sequence
  Description of Artificial Sequence: Synthetic oligonucleotide
  Sense strand starting at position 1089 of SEQ ID NO: 316976
aaauuauaugcgcgccaaa

SEQ ID NO: 454782 - RNA, 19 nt, Artificial Sequence
  Description of Artificial Sequence: Synthetic oligonucleotide
  Antisense Strand to SEQ ID NO: 454781
uuuggcgcgcauauaauuu

SEQ ID NO: 454783 - RNA, 19 nt, Artificial Sequence
  Description of Artificial Sequence: Synthetic oligonucleotide
  Sense strand starting at position 1227 of SEQ ID NO: 316976
cccaucgagagcgaugaau

SEQ ID NO: 454784 - RNA, 19 nt, Artificial Sequence
  Description of Artificial Sequence: Synthetic oligonucleotide
  Antisense Strand to SEQ ID NO: 454783
auucaucgcucucgauggg

SEQ ID NO: 454785 - RNA, 19 nt, Artificial Sequence
  Description of Artificial Sequence: Synthetic oligonucleotide
  Sense strand starting at position 1229 of SEQ ID NO: 316976
caucgagagcgaugaauaa

SEQ ID NO: 454786 - RNA, 19 nt, Artificial Sequence
  Description of Artificial Sequence: Synthetic oligonucleotide
  Antisense Strand to SEQ ID NO: 454785
uuauucaucgcucucgaug

SEQ ID NO: 454787 - RNA, 19 nt, Artificial Sequence
  Description of Artificial Sequence: Synthetic oligonucleotide
  Sense strand starting at position 1783 of SEQ ID NO: 316976
ggagucaucgagcgucucu

SEQ ID NO: 454788 - RNA, 19 nt, Artificial Sequence
  Description of Artificial Sequence: Synthetic oligonucleotide
  Antisense Strand to SEQ ID NO: 454787
agagacgcucgaugacucc

SEQ ID NO: 454789 - RNA, 19 nt, Artificial Sequence
  Description of Artificial Sequence: Synthetic oligonucleotide
  Sense strand starting at position 1791 of SEQ ID NO: 316976
cgagcgucucugcgaaguu

SEQ ID NO: 454790 - RNA, 19 nt, Artificial Sequence
  Description of Artificial Sequence: Synthetic oligonucleotide
  Antisense Strand to SEQ ID NO: 454789
aacuucgcagagacgcucg

SEQ ID NO: 454791 - RNA, 19 nt, Artificial Sequence
  Description of Artificial Sequence: Synthetic oligonucleotide
  Sense strand starting at position 1792 of SEQ ID NO: 316976
gagcgucucugcgaaguuu

SEQ ID NO: 454792 - RNA, 19 nt, Artificial Sequence
  Description of Artificial Sequence: Synthetic oligonucleotide
  Antisense Strand to SEQ ID NO: 454791
aaacuucgcagagacgcuc

SEQ ID NO: 454793 - RNA, 19 nt, Artificial Sequence
  Description of Artificial Sequence: Synthetic oligonucleotide
  Sense strand starting at position 1816 of SEQ ID NO: 316976
uucgaauuccgcugaagcu

SEQ ID NO: 454794 - RNA, 19 nt, Artificial Sequence
  Description of Artificial Sequence: Synthetic oligonucleotide
  Antisense Strand to SEQ ID NO: 454793
agcuucagcggaauucgaa

SEQ ID NO: 454795 - RNA, 19 nt, Artificial Sequence
  Description of Artificial Sequence: Synthetic oligonucleotide
  Sense strand starting at position 1945 of SEQ ID NO: 316976
cuuuauacugcagaauguu

SEQ ID NO: 454796 - RNA, 19 nt, Artificial Sequence
  Description of Artificial Sequence: Synthetic oligonucleotide
  Antisense Strand to SEQ ID NO: 454795
aacauucugcaguauaaag

SEQ ID NO: 454797 - RNA, 19 nt, Artificial Sequence
  Description of Artificial Sequence: Synthetic oligonucleotide
  Sense strand starting at position 1953 of SEQ ID NO: 316976
ugcagaauguucccucauc

SEQ ID NO: 454798 - RNA, 19 nt, Artificial Sequence
  Description of Artificial Sequence: Synthetic oligonucleotide
  Antisense Strand to SEQ ID NO: 454797
gaugagggaacauucugca

SEQ ID NO: 454799 - RNA, 19 nt, Artificial Sequence
  Description of Artificial Sequence: Synthetic oligonucleotide
  Sense strand starting at position 2019 of SEQ ID NO: 316976
ggacgcguccuugagacuu

SEQ ID NO: 454800 - RNA, 19 nt, Artificial Sequence
  Description of Artificial Sequence: Synthetic oligonucleotide
  Antisense Strand to SEQ ID NO: 454799
aagucucaaggacgcgucc

SEQ ID NO: 454801 - RNA, 19 nt, Artificial Sequence
  Description of Artificial Sequence: Synthetic oligonucleotide
  Sense strand starting at position 17 of SEQ ID NO: 316977
uugaguauaaccuguggaa

SEQ ID NO: 454802 - RNA, 19 nt, Artificial Sequence
  Description of Artificial Sequence: Synthetic oligonucleotide
  Antisense Strand to SEQ ID NO: 454801
uuccacagguuauacucaa

SEQ ID NO: 454803 - RNA, 19 nt, Artificial Sequence
  Description of Artificial Sequence: Synthetic oligonucleotide
  Sense strand starting at position 19 of SEQ ID NO: 316977
gaguauaaccuguggaacu

SEQ ID NO: 454804 - RNA, 19 nt, Artificial Sequence
  Description of Artificial Sequence: Synthetic oligonucleotide
  Antisense Strand to SEQ ID NO: 454803
aguuccacagguuauacuc

SEQ ID NO: 454805 - RNA, 19 nt, Artificial Sequence
  Description of Artificial Sequence: Synthetic oligonucleotide
  Sense strand starting at position 21 of SEQ ID NO: 316977
guauaaccuguggaacuuu

SEQ ID NO: 454806 - RNA, 19 nt, Artificial Sequence
  Description of Artificial Sequence: Synthetic oligonucleotide
  Antisense Strand to SEQ ID NO: 454805
aaaguuccacagguuauac

SEQ ID NO: 454807 - RNA, 19 nt, Artificial Sequence
  Description of Artificial Sequence: Synthetic oligonucleotide
  Sense strand starting at position 49 of SEQ ID NO: 316977
gggaguuacuccucccagu

SEQ ID NO: 454808 - RNA, 19 nt, Artificial Sequence
  Description of Artificial Sequence: Synthetic oligonucleotide
  Antisense Strand to SEQ ID NO: 454807
acugggaggaguaacuccc

SEQ ID NO: 454809 - RNA, 19 nt, Artificial Sequence
  Description of Artificial Sequence: Synthetic oligonucleotide
  Sense strand starting at position 131 of SEQ ID NO: 316977
agggcaauguauguccaaa

SEQ ID NO: 454810 - RNA, 19 nt, Artificial Sequence
  Description of Artificial Sequence: Synthetic oligonucleotide
  Antisense Strand to SEQ ID NO: 454809
uuuggacauacauugcccu

SEQ ID NO: 454811 - RNA, 19 nt, Artificial Sequence
  Description of Artificial Sequence: Synthetic oligonucleotide
  Sense strand starting at position 345 of SEQ ID NO: 316977
guggacuugguuggaaaca

SEQ ID NO: 454812 - RNA, 19 nt, Artificial Sequence
  Description of Artificial Sequence: Synthetic oligonucleotide
  Antisense Strand to SEQ ID NO: 454811
uguuuccaaccaaguccac

SEQ ID NO: 454813 - RNA, 19 nt, Artificial Sequence
  Description of Artificial Sequence: Synthetic oligonucleotide
  Sense strand starting at position 517 of SEQ ID NO: 316977
ucuccaaugugagcugaaa

SEQ ID NO: 454814 - RNA, 19 nt, Artificial Sequence
  Description of Artificial Sequence: Synthetic oligonucleotide
  Antisense Strand to SEQ ID NO: 454813
uuucagcucacauuggaga

SEQ ID NO: 454815 - RNA, 19 nt, Artificial Sequence
  Description of Artificial Sequence: Synthetic oligonucleotide
  Sense strand starting at position 519 of SEQ ID NO: 316977
uccaaugugagcugaaaug

SEQ ID NO: 454816 - RNA, 19 nt, Artificial Sequence
  Description of Artificial Sequence: Synthetic oligonucleotide
  Antisense Strand to SEQ ID NO: 454815
cauuucagcucacauugga

SEQ ID NO: 454817 - RNA, 19 nt, Artificial Sequence
  Description of Artificial Sequence: Synthetic oligonucleotide
  Sense strand starting at position 525 of SEQ ID NO: 316977
gugagcugaaauggaauaa

SEQ ID NO: 454818 - RNA, 19 nt, Artificial Sequence
  Description of Artificial Sequence: Synthetic oligonucleotide
  Antisense Strand to SEQ ID NO: 454817
uuauuccauuucagcucac

SEQ ID NO: 454819 - RNA, 19 nt, Artificial Sequence
  Description of Artificial Sequence: Synthetic oligonucleotide
  Sense strand starting at position 1051 of SEQ ID NO: 316977
ccaggaccucagcaaucuu

SEQ ID NO: 454820 - RNA, 19 nt, Artificial Sequence
  Description of Artificial Sequence: Synthetic oligonucleotide
  Antisense Strand to SEQ ID NO: 454819
aagauugcugagguccugg

SEQ ID NO: 454821 - RNA, 19 nt, Artificial Sequence
  Description of Artificial Sequence: Synthetic oligonucleotide
  Sense strand starting at position 1062 of SEQ ID NO: 316977
gcaaucuuccauuagguga

SEQ ID NO: 454822 - RNA, 19 nt, Artificial Sequence
  Description of Artificial Sequence: Synthetic oligonucleotide
  Antisense Strand to SEQ ID NO: 454821
ucaccuaauggaagauugc

SEQ ID NO: 454823 - RNA, 19 nt, Artificial Sequence
  Description of Artificial Sequence: Synthetic oligonucleotide
  Sense strand starting at position 1067 of SEQ ID NO: 316977
cuuccauuaggugacuuua

SEQ ID NO: 454824 - RNA, 19 nt, Artificial Sequence
  Description of Artificial Sequence: Synthetic oligonucleotide
  Antisense Strand to SEQ ID NO: 454823
uaaagucaccuaauggaag

SEQ ID NO: 454825 - RNA, 19 nt, Artificial Sequence
  Description of Artificial Sequence: Synthetic oligonucleotide
  Sense strand starting at position 1069 of SEQ ID NO: 316977
uccauuaggugacuuuaca

SEQ ID NO: 454826 - RNA, 19 nt, Artificial Sequence
  Description of Artificial Sequence: Synthetic oligonucleotide
  Antisense Strand to SEQ ID NO: 454825
uguaaagucaccuaaugga

SEQ ID NO: 454827 - RNA, 19 nt, Artificial Sequence
  Description of Artificial Sequence: Synthetic oligonucleotide
  Sense strand starting at position 2195 of SEQ ID NO: 316977
auaucuaggcucugaagaa

SEQ ID NO: 454828 - RNA, 19 nt, Artificial Sequence
  Description of Artificial Sequence: Synthetic oligonucleotide
  Antisense Strand to SEQ ID NO: 454827
uucuucagagccuagauau

SEQ ID NO: 454829 - RNA, 19 nt, Artificial Sequence
  Description of Artificial Sequence: Synthetic oligonucleotide
  Sense strand starting at position 2208 of SEQ ID NO: 316977
gaagaaauaugugcugcuu

SEQ ID NO: 454830 - RNA, 19 nt, Artificial Sequence
  Description of Artificial Sequence: Synthetic oligonucleotide
  Antisense Strand to SEQ ID NO: 454829
aagcagcacauauuucuuc

SEQ ID NO: 454831 - RNA, 19 nt, Artificial Sequence
  Description of Artificial Sequence: Synthetic oligonucleotide
  Sense strand starting at position 2367 of SEQ ID NO: 316977
augucuagugaccaugagu

SEQ ID NO: 454832 - RNA, 19 nt, Artificial Sequence
  Description of Artificial Sequence: Synthetic oligonucleotide
  Antisense Strand to SEQ ID NO: 454831
acucauggucacuagacau

SEQ ID NO: 454833 - RNA, 19 nt, Artificial Sequence
  Description of Artificial Sequence: Synthetic oligonucleotide
  Sense strand starting at position 2372 of SEQ ID NO: 316977
uagugaccaugaguuacaa

SEQ ID NO: 454834 - RNA, 19 nt, Artificial Sequence
  Description of Artificial Sequence: Synthetic oligonucleotide
  Antisense Strand to SEQ ID NO: 454833
uuguaacucauggucacua

SEQ ID NO: 454835 - RNA, 19 nt, Artificial Sequence
  Description of Artificial Sequence: Synthetic oligonucleotide
  Sense strand starting at position 2422 of SEQ ID NO: 316977
agaguugaccuuuaguuac

SEQ ID NO: 454836 - RNA, 19 nt, Artificial Sequence
  Description of Artificial Sequence: Synthetic oligonucleotide
  Antisense Strand to SEQ ID NO: 454835
guaacuaaaggucaacucu

SEQ ID NO: 454837 - RNA, 19 nt, Artificial Sequence
  Description of Artificial Sequence: Synthetic oligonucleotide
  Sense strand starting at position 2473 of SEQ ID NO: 316977
gaacauguggacgguuuaa

SEQ ID NO: 454838 - RNA, 19 nt, Artificial Sequence
  Description of Artificial Sequence: Synthetic oligonucleotide
  Antisense Strand to SEQ ID NO: 454837
uuaaaccguccacauguuc

SEQ ID NO: 454839 - RNA, 19 nt, Artificial Sequence
  Description of Artificial Sequence: Synthetic oligonucleotide
  Sense strand starting at position 2498 of SEQ ID NO: 316977
agagcaaccuuucuggaau

SEQ ID NO: 454840 - RNA, 19 nt, Artificial Sequence
  Description of Artificial Sequence: Synthetic oligonucleotide
  Antisense Strand to SEQ ID NO: 454839
auuccagaaagguugcucu

SEQ ID NO: 454841 - RNA, 19 nt, Artificial Sequence
  Description of Artificial Sequence: Synthetic oligonucleotide
  Sense strand starting at position 2501 of SEQ ID NO: 316977
gcaaccuuucuggaauaac

SEQ ID NO: 454842 - RNA, 19 nt, Artificial Sequence
  Description of Artificial Sequence: Synthetic oligonucleotide
  Antisense Strand to SEQ ID NO: 454841
guuauuccagaaagguugc

SEQ ID NO: 454843 - RNA, 19 nt, Artificial Sequence
  Description of Artificial Sequence: Synthetic oligonucleotide
  Sense strand starting at position 2544 of SEQ ID NO: 316977
agaaaugucuugucaaaua

SEQ ID NO: 454844 - RNA, 19 nt, Artificial Sequence
  Description of Artificial Sequence: Synthetic oligonucleotide
  Antisense Strand to SEQ ID NO: 454843
uauuugacaagacauuucu

SEQ ID NO: 454845 - RNA, 19 nt, Artificial Sequence
  Description of Artificial Sequence: Synthetic oligonucleotide
  Sense strand starting at position 2600 of SEQ ID NO: 316977
ucaggugaauacuuucuaa

SEQ ID NO: 454846 - RNA, 19 nt, Artificial Sequence
  Description of Artificial Sequence: Synthetic oligonucleotide
  Antisense Strand to SEQ ID NO: 454845
uuagaaaguauucaccuga

SEQ ID NO: 454847 - RNA, 19 nt, Artificial Sequence
  Description of Artificial Sequence: Synthetic oligonucleotide
  Sense strand starting at position 2603 of SEQ ID NO: 316977
ggugaauacuuucuaauua

SEQ ID NO: 454848 - RNA, 19 nt, Artificial Sequence
  Description of Artificial Sequence: Synthetic oligonucleotide
  Antisense Strand to SEQ ID NO: 454847
uaauuagaaaguauucacc

SEQ ID NO: 454849 - RNA, 19 nt, Artificial Sequence
  Description of Artificial Sequence: Synthetic oligonucleotide
  Sense strand starting at position 2697 of SEQ ID NO: 316977
acaaguuuagcagaguuua

SEQ ID NO: 454850 - RNA, 19 nt, Artificial Sequence
  Description of Artificial Sequence: Synthetic oligonucleotide
  Antisense Strand to SEQ ID NO: 454849
uaaacucugcuaaacuugu

SEQ ID NO: 454851 - RNA, 19 nt, Artificial Sequence
  Description of Artificial Sequence: Synthetic oligonucleotide
  Sense strand starting at position 2789 of SEQ ID NO: 316977
ugggcaagccgcguuuaua

SEQ ID NO: 454852 - RNA, 19 nt, Artificial Sequence
  Description of Artificial Sequence: Synthetic oligonucleotide
  Antisense Strand to SEQ ID NO: 454851
uauaaacgcggcuugccca

SEQ ID NO: 454853 - RNA, 19 nt, Artificial Sequence
  Description of Artificial Sequence: Synthetic oligonucleotide
  Sense strand starting at position 2881 of SEQ ID NO: 316977
agaagaacguacucucaaa

SEQ ID NO: 454854 - RNA, 19 nt, Artificial Sequence
  Description of Artificial Sequence: Synthetic oligonucleotide
  Antisense Strand to SEQ ID NO: 454853
uuugagaguacguucuucu

SEQ ID NO: 454855 - RNA, 19 nt, Artificial Sequence
  Description of Artificial Sequence: Synthetic oligonucleotide
  Sense strand starting at position 3063 of SEQ ID NO: 316977
ugucaaauuaguugaguga

SEQ ID NO: 454856 - RNA, 19 nt, Artificial Sequence
  Description of Artificial Sequence: Synthetic oligonucleotide
  Antisense Strand to SEQ ID NO: 454855
ucacucaacuaauuugaca

SEQ ID NO: 454857 - RNA, 19 nt, Artificial Sequence
  Description of Artificial Sequence: Synthetic oligonucleotide
  Sense strand starting at position 3064 of SEQ ID NO: 316977
gucaaauuaguugagugau

SEQ ID NO: 454858 - RNA, 19 nt, Artificial Sequence
  Description of Artificial Sequence: Synthetic oligonucleotide
  Antisense Strand to SEQ ID NO: 454857
aucacucaacuaauuugac

SEQ ID NO: 454859 - RNA, 19 nt, Artificial Sequence
  Description of Artificial Sequence: Synthetic oligonucleotide
  Sense strand starting at position 3066 of SEQ ID NO: 316977
caaauuaguugagugauua

SEQ ID NO: 454860 - RNA, 19 nt, Artificial Sequence
  Description of Artificial Sequence: Synthetic oligonucleotide
  Antisense Strand to SEQ ID NO: 454859
uaaucacucaacuaauuug

SEQ ID NO: 454861 - RNA, 19 nt, Artificial Sequence
  Description of Artificial Sequence: Synthetic oligonucleotide
  Sense strand starting at position 3070 of SEQ ID NO: 316977
uuaguugagugauuauacu

SEQ ID NO: 454862 - RNA, 19 nt, Artificial Sequence
  Description of Artificial Sequence: Synthetic oligonucleotide
  Antisense Strand to SEQ ID NO: 454861
aguauaaucacucaacuaa

SEQ ID NO: 454863 - RNA, 19 nt, Artificial Sequence
  Description of Artificial Sequence: Synthetic oligonucleotide
  Sense strand starting at position 3142 of SEQ ID NO: 316977
gcugcauagagacauugaa

SEQ ID NO: 454864 - RNA, 19 nt, Artificial Sequence
  Description of Artificial Sequence: Synthetic oligonucleotide
  Antisense Strand to SEQ ID NO: 454863
uucaaugucucuaugcagc

SEQ ID NO: 454865 - RNA, 19 nt, Artificial Sequence
  Description of Artificial Sequence: Synthetic oligonucleotide
  Sense strand starting at position 3192 of SEQ ID NO: 316977
gacuauuauggccacgaga

SEQ ID NO: 454866 - RNA, 19 nt, Artificial Sequence
  Description of Artificial Sequence: Synthetic oligonucleotide
  Antisense Strand to SEQ ID NO: 454865
ucucguggccauaauaguc

SEQ ID NO: 454867 - RNA, 19 nt, Artificial Sequence
  Description of Artificial Sequence: Synthetic oligonucleotide
  Sense strand starting at position 3194 of SEQ ID NO: 316977
cuauuauggccacgagaag

SEQ ID NO: 454868 - RNA, 19 nt, Artificial Sequence
  Description of Artificial Sequence: Synthetic oligonucleotide
  Antisense Strand to SEQ ID NO: 454867
cuucucguggccauaauag

SEQ ID NO: 454869 - RNA, 19 nt, Artificial Sequence
  Description of Artificial Sequence: Synthetic oligonucleotide
  Sense strand starting at position 3322 of SEQ ID NO: 316977
gaguccaauuggucauggu

SEQ ID NO: 454870 - RNA, 19 nt, Artificial Sequence
  Description of Artificial Sequence: Synthetic oligonucleotide
  Antisense Strand to SEQ ID NO: 454869
accaugaccaauuggacuc

SEQ ID NO: 454871 - RNA, 19 nt, Artificial Sequence
  Description of Artificial Sequence: Synthetic oligonucleotide
  Sense strand starting at position 3326 of SEQ ID NO: 316977
ccaauuggucauggucuaa

SEQ ID NO: 454872 - RNA, 19 nt, Artificial Sequence
  Description of Artificial Sequence: Synthetic oligonucleotide
  Antisense Strand to SEQ ID NO: 454871
uuagaccaugaccaauugg

SEQ ID NO: 454873 - RNA, 19 nt, Artificial Sequence
  Description of Artificial Sequence: Synthetic oligonucleotide
  Sense strand starting at position 3449 of SEQ ID NO: 316977
uuacuuucugcggaaagag

SEQ ID NO: 454874 - RNA, 19 nt, Artificial Sequence
  Description of Artificial Sequence: Synthetic oligonucleotide
  Antisense Strand to SEQ ID NO: 454873
cucuuuccgcagaaaguaa

SEQ ID NO: 454875 - RNA, 19 nt, Artificial Sequence
  Description of Artificial Sequence: Synthetic oligonucleotide
  Sense strand starting at position 3738 of SEQ ID NO: 316977
gcccacuuggaccaguaua

SEQ ID NO: 454876 - RNA, 19 nt, Artificial Sequence
  Description of Artificial Sequence: Synthetic oligonucleotide
  Antisense Strand to SEQ ID NO: 454875
uauacugguccaagugggc

SEQ ID NO: 454877 - RNA, 19 nt, Artificial Sequence
  Description of Artificial Sequence: Synthetic oligonucleotide
  Sense strand starting at position 3850 of SEQ ID NO: 316977
guuaacaggucuuugaaua

SEQ ID NO: 454878 - RNA, 19 nt, Artificial Sequence
  Description of Artificial Sequence: Synthetic oligonucleotide
  Antisense Strand to SEQ ID NO: 454877
uauucaaagaccuguuaac

SEQ ID NO: 454879 - RNA, 19 nt, Artificial Sequence
  Description of Artificial Sequence: Synthetic oligonucleotide
  Sense strand starting at position 3851 of SEQ ID NO: 316977
uuaacaggucuuugaauaa

SEQ ID NO: 454880 - RNA, 19 nt, Artificial Sequence
  Description of Artificial Sequence: Synthetic oligonucleotide
  Antisense Strand to SEQ ID NO: 454879
uuauucaaagaccuguuaa

SEQ ID NO: 454881 - RNA, 19 nt, Artificial Sequence
  Description of Artificial Sequence: Synthetic oligonucleotide
  Sense strand starting at position 68 of SEQ ID NO: 316978
gggugcgaucaauagugaa

SEQ ID NO: 454882 - RNA, 19 nt, Artificial Sequence
  Description of Artificial Sequence: Synthetic oligonucleotide
  Antisense Strand to SEQ ID NO: 454881
uucacuauugaucgcaccc

SEQ ID NO: 454883 - RNA, 19 nt, Artificial Sequence
  Description of Artificial Sequence: Synthetic oligonucleotide
  Sense strand starting at position 72 of SEQ ID NO: 316978
gcgaucaauagugaaauaa

SEQ ID NO: 454884 - RNA, 19 nt, Artificial Sequence
  Description of Artificial Sequence: Synthetic oligonucleotide
  Antisense Strand to SEQ ID NO: 454883
uuauuucacuauugaucgc

SEQ ID NO: 454885 - RNA, 19 nt, Artificial Sequence
  Description of Artificial Sequence: Synthetic oligonucleotide
  Sense strand starting at position 82 of SEQ ID NO: 316978
gugaaauaauuggaaucaa

SEQ ID NO: 454886 - RNA, 19 nt, Artificial Sequence
  Description of Artificial Sequence: Synthetic oligonucleotide
  Antisense Strand to SEQ ID NO: 454885
uugauuccaauuauuucac

SEQ ID NO: 454887 - RNA, 19 nt, Artificial Sequence
  Description of Artificial Sequence: Synthetic oligonucleotide
  Sense strand starting at position 101 of SEQ ID NO: 316978
gggcuucuucgagacuuau

SEQ ID NO: 454888 - RNA, 19 nt, Artificial Sequence
  Description of Artificial Sequence: Synthetic oligonucleotide
  Antisense Strand to SEQ ID NO: 454887
auaagucucgaagaagccc

SEQ ID NO: 454889 - RNA, 19 nt, Artificial Sequence
  Description of Artificial Sequence: Synthetic oligonucleotide
  Sense strand starting at position 107 of SEQ ID NO: 316978
cuucgagacuuauucugga

SEQ ID NO: 454890 - RNA, 19 nt, Artificial Sequence
  Description of Artificial Sequence: Synthetic oligonucleotide
  Antisense Strand to SEQ ID NO: 454889
uccagaauaagucucgaag

SEQ ID NO: 454891 - RNA, 19 nt, Artificial Sequence
  Description of Artificial Sequence: Synthetic oligonucleotide
  Sense strand starting at position 193 of SEQ ID NO: 316978
agaccagugcgaucgcgau

SEQ ID NO: 454892 - RNA, 19 nt, Artificial Sequence
  Description of Artificial Sequence: Synthetic oligonucleotide
  Antisense Strand to SEQ ID NO: 454891
aucgcgaucgcacuggucu

SEQ ID NO: 454893 - RNA, 19 nt, Artificial Sequence
  Description of Artificial Sequence: Synthetic oligonucleotide
  Sense strand starting at position 259 of SEQ ID NO: 316978
cagcgauaacccggaggua

SEQ ID NO: 454894 - RNA, 19 nt, Artificial Sequence
  Description of Artificial Sequence: Synthetic oligonucleotide
  Antisense Strand to SEQ ID NO: 454893
uaccuccggguuaucgcug

SEQ ID NO: 454895 - RNA, 19 nt, Artificial Sequence
  Description of Artificial Sequence: Synthetic oligonucleotide
  Sense strand starting at position 260 of SEQ ID NO: 316978
agcgauaacccggagguaa

SEQ ID NO: 454896 - RNA, 19 nt, Artificial Sequence
  Description of Artificial Sequence: Synthetic oligonucleotide
  Antisense Strand to SEQ ID NO: 454895
uuaccuccggguuaucgcu

SEQ ID NO: 454897 - RNA, 19 nt, Artificial Sequence
  Description of Artificial Sequence: Synthetic oligonucleotide
  Sense strand starting at position 547 of SEQ ID NO: 316978
cuugaucucugccuugaag

SEQ ID NO: 454898 - RNA, 19 nt, Artificial Sequence
  Description of Artificial Sequence: Synthetic oligonucleotide
  Antisense Strand to SEQ ID NO: 454897
cuucaaggcagagaucaag

SEQ ID NO: 454899 - RNA, 19 nt, Artificial Sequence
  Description of Artificial Sequence: Synthetic oligonucleotide
  Sense strand starting at position 1418 of SEQ ID NO: 316978
uccucucgugcucauacaa

SEQ ID NO: 454900 - RNA, 19 nt, Artificial Sequence
  Description of Artificial Sequence: Synthetic oligonucleotide
  Antisense Strand to SEQ ID NO: 454899
uuguaugagcacgagagga

SEQ ID NO: 454901 - RNA, 19 nt, Artificial Sequence
  Description of Artificial Sequence: Synthetic oligonucleotide
  Sense strand starting at position 1664 of SEQ ID NO: 316978
ggguucuugggcgcuuauu

SEQ ID NO: 454902 - RNA, 19 nt, Artificial Sequence
  Description of Artificial Sequence: Synthetic oligonucleotide
  Antisense Strand to SEQ ID NO: 454901
aauaagcgcccaagaaccc

SEQ ID NO: 454903 - RNA, 19 nt, Artificial Sequence
  Description of Artificial Sequence: Synthetic oligonucleotide
  Sense strand starting at position 1764 of SEQ ID NO: 316978
gcgcucucucggaggguuu

SEQ ID NO: 454904 - RNA, 19 nt, Artificial Sequence
  Description of Artificial Sequence: Synthetic oligonucleotide
  Antisense Strand to SEQ ID NO: 454903
aaacccuccgagagagcgc

SEQ ID NO: 454905 - RNA, 19 nt, Artificial Sequence
  Description of Artificial Sequence: Synthetic oligonucleotide
  Sense strand starting at position 1979 of SEQ ID NO: 316978
ccagcaagaucuccaugua

SEQ ID NO: 454906 - RNA, 19 nt, Artificial Sequence
  Description of Artificial Sequence: Synthetic oligonucleotide
  Antisense Strand to SEQ ID NO: 454905
uacauggagaucuugcugg

SEQ ID NO: 454907 - RNA, 19 nt, Artificial Sequence
  Description of Artificial Sequence: Synthetic oligonucleotide
  Sense strand starting at position 1982 of SEQ ID NO: 316978
gcaagaucuccauguacag

SEQ ID NO: 454908 - RNA, 19 nt, Artificial Sequence
  Description of Artificial Sequence: Synthetic oligonucleotide
  Antisense Strand to SEQ ID NO: 454907
cuguacauggagaucuugc

SEQ ID NO: 454909 - RNA, 19 nt, Artificial Sequence
  Description of Artificial Sequence: Synthetic oligonucleotide
  Sense strand starting at position 2021 of SEQ ID NO: 316978
ggguuaauauaugucguca

SEQ ID NO: 454910 - RNA, 19 nt, Artificial Sequence
  Description of Artificial Sequence: Synthetic oligonucleotide
  Antisense Strand to SEQ ID NO: 454909
ugacgacauauauuaaccc

SEQ ID NO: 454911 - RNA, 19 nt, Artificial Sequence
  Description of Artificial Sequence: Synthetic oligonucleotide
  Sense strand starting at position 2025 of SEQ ID NO: 316978
uaauauaugucgucagagg

SEQ ID NO: 454912 - RNA, 19 nt, Artificial Sequence
  Description of Artificial Sequence: Synthetic oligonucleotide
  Antisense Strand to SEQ ID NO: 454911
ccucugacgacauauauua

SEQ ID NO: 454913 - RNA, 19 nt, Artificial Sequence
  Description of Artificial Sequence: Synthetic oligonucleotide
  Sense strand starting at position 2081 of SEQ ID NO: 316978
ucgagcucucggcaauaaa

SEQ ID NO: 454914 - RNA, 19 nt, Artificial Sequence
  Description of Artificial Sequence: Synthetic oligonucleotide
  Antisense Strand to SEQ ID NO: 454913
uuuauugccgagagcucga

SEQ ID NO: 454915 - RNA, 19 nt, Artificial Sequence
  Description of Artificial Sequence: Synthetic oligonucleotide
  Sense strand starting at position 2393 of SEQ ID NO: 316978
guagguaaucgagguaaga

SEQ ID NO: 454916 - RNA, 19 nt, Artificial Sequence
  Description of Artificial Sequence: Synthetic oligonucleotide
  Antisense Strand to SEQ ID NO: 454915
ucuuaccucgauuaccuac

SEQ ID NO: 454917 - RNA, 19 nt, Artificial Sequence
  Description of Artificial Sequence: Synthetic oligonucleotide
  Sense strand starting at position 2542 of SEQ ID NO: 316978
ggagaaggguguuucuuug

SEQ ID NO: 454918 - RNA, 19 nt, Artificial Sequence
  Description of Artificial Sequence: Synthetic oligonucleotide
  Antisense Strand to SEQ ID NO: 454917
caaagaaacacccuucucc

SEQ ID NO: 454919 - RNA, 19 nt, Artificial Sequence
  Description of Artificial Sequence: Synthetic oligonucleotide
  Sense strand starting at position 2600 of SEQ ID NO: 316978
ugaguuacccaccaaguua

SEQ ID NO: 454920 - RNA, 19 nt, Artificial Sequence
  Description of Artificial Sequence: Synthetic oligonucleotide
  Antisense Strand to SEQ ID NO: 454919
uaacuugguggguaacuca

SEQ ID NO: 454921 - RNA, 19 nt, Artificial Sequence
  Description of Artificial Sequence: Synthetic oligonucleotide
  Sense strand starting at position 2646 of SEQ ID NO: 316978
cacguuauugcggcaaacu

SEQ ID NO: 454922 - RNA, 19 nt, Artificial Sequence
  Description of Artificial Sequence: Synthetic oligonucleotide
  Antisense Strand to SEQ ID NO: 454921
aguuugccgcaauaacgug

SEQ ID NO: 454923 - RNA, 19 nt, Artificial Sequence
  Description of Artificial Sequence: Synthetic oligonucleotide
  Sense strand starting at position 2695 of SEQ ID NO: 316978
acaugucaagccgauugua

SEQ ID NO: 454924 - RNA, 19 nt, Artificial Sequence
  Description of Artificial Sequence: Synthetic oligonucleotide
  Antisense Strand to SEQ ID NO: 454923
uacaaucggcuugacaugu

SEQ ID NO: 454925 - RNA, 19 nt, Artificial Sequence
  Description of Artificial Sequence: Synthetic oligonucleotide
  Sense strand starting at position 2837 of SEQ ID NO: 316978
uaacuagccuguuugguaa

SEQ ID NO: 454926 - RNA, 19 nt, Artificial Sequence
  Description of Artificial Sequence: Synthetic oligonucleotide
  Antisense Strand to SEQ ID NO: 454925
uuaccaaacaggcuaguua

SEQ ID NO: 454927 - RNA, 19 nt, Artificial Sequence
  Description of Artificial Sequence: Synthetic oligonucleotide
  Sense strand starting at position 2845 of SEQ ID NO: 316978
cuguuugguaaguaacuga

SEQ ID NO: 454928 - RNA, 19 nt, Artificial Sequence
  Description of Artificial Sequence: Synthetic oligonucleotide
  Antisense Strand to SEQ ID NO: 454927
ucaguuacuuaccaaacag

SEQ ID NO: 454929 - RNA, 19 nt, Artificial Sequence
  Description of Artificial Sequence: Synthetic oligonucleotide
  Sense strand starting at position 2848 of SEQ ID NO: 316978
uuugguaaguaacugaaua

SEQ ID NO: 454930 - RNA, 19 nt, Artificial Sequence
  Description of Artificial Sequence: Synthetic oligonucleotide
  Antisense Strand to SEQ ID NO: 454929
uauucaguuacuuaccaaa

SEQ ID NO: 454931 - RNA, 19 nt, Artificial Sequence
  Description of Artificial Sequence: Synthetic oligonucleotide
  Sense strand starting at position 2994 of SEQ ID NO: 316978
accauuaaacgccaguuua

SEQ ID NO: 454932 - RNA, 19 nt, Artificial Sequence
  Description of Artificial Sequence: Synthetic oligonucleotide
  Antisense Strand to SEQ ID NO: 454931
uaaacuggcguuuaauggu

SEQ ID NO: 454933 - RNA, 19 nt, Artificial Sequence
  Description of Artificial Sequence: Synthetic oligonucleotide
  Sense strand starting at position 3054 of SEQ ID NO: 316978
uggccuuggugaucuugaa

SEQ ID NO: 454934 - RNA, 19 nt, Artificial Sequence
  Description of Artificial Sequence: Synthetic oligonucleotide
  Antisense Strand to SEQ ID NO: 454933
uucaagaucaccaaggcca

SEQ ID NO: 454935 - RNA, 19 nt, Artificial Sequence
  Description of Artificial Sequence: Synthetic oligonucleotide
  Sense strand starting at position 3058 of SEQ ID NO: 316978
cuuggugaucuugaacgca

SEQ ID NO: 454936 - RNA, 19 nt, Artificial Sequence
  Description of Artificial Sequence: Synthetic oligonucleotide
  Antisense Strand to SEQ ID NO: 454935
ugcguucaagaucaccaag

SEQ ID NO: 454937 - RNA, 19 nt, Artificial Sequence
  Description of Artificial Sequence: Synthetic oligonucleotide
  Sense strand starting at position 3061 of SEQ ID NO: 316978
ggugaucuugaacgcauua

SEQ ID NO: 454938 - RNA, 19 nt, Artificial Sequence
  Description of Artificial Sequence: Synthetic oligonucleotide
  Antisense Strand to SEQ ID NO: 454937
uaaugcguucaagaucacc

SEQ ID NO: 454939 - RNA, 19 nt, Artificial Sequence
  Description of Artificial Sequence: Synthetic oligonucleotide
  Sense strand starting at position 3259 of SEQ ID NO: 316978
gcagauuccacccgaagga

SEQ ID NO: 454940 - RNA, 19 nt, Artificial Sequence
  Description of Artificial Sequence: Synthetic oligonucleotide
  Antisense Strand to SEQ ID NO: 454939
uccuucggguggaaucugc

SEQ ID NO: 454941 - RNA, 19 nt, Artificial Sequence
  Description of Artificial Sequence: Synthetic oligonucleotide
  Sense strand starting at position 3271 of SEQ ID NO: 316978
cgaaggaguucggugugga

SEQ ID NO: 454942 - RNA, 19 nt, Artificial Sequence
  Description of Artificial Sequence: Synthetic oligonucleotide
  Antisense Strand to SEQ ID NO: 454941
uccacaccgaacuccuucg

SEQ ID NO: 454943 - RNA, 19 nt, Artificial Sequence
  Description of Artificial Sequence: Synthetic oligonucleotide
  Sense strand starting at position 3272 of SEQ ID NO: 316978
gaaggaguucgguguggaa

SEQ ID NO: 454944 - RNA, 19 nt, Artificial Sequence
  Description of Artificial Sequence: Synthetic oligonucleotide
  Antisense Strand to SEQ ID NO: 454943
uuccacaccgaacuccuuc

SEQ ID NO: 454945 - RNA, 19 nt, Artificial Sequence
  Description of Artificial Sequence: Synthetic oligonucleotide
  Sense strand starting at position 3620 of SEQ ID NO: 316978
ccacuagcccuagagucuu

SEQ ID NO: 454946 - RNA, 19 nt, Artificial Sequence
  Description of Artificial Sequence: Synthetic oligonucleotide
  Antisense Strand to SEQ ID NO: 454945
aagacucuagggcuagugg

SEQ ID NO: 454947 - RNA, 19 nt, Artificial Sequence
  Description of Artificial Sequence: Synthetic oligonucleotide
  Sense strand starting at position 3758 of SEQ ID NO: 316978
gguuaacauccuugaacgu

SEQ ID NO: 454948 - RNA, 19 nt, Artificial Sequence
  Description of Artificial Sequence: Synthetic oligonucleotide
  Antisense Strand to SEQ ID NO: 454947
acguucaaggauguuaacc

SEQ ID NO: 454949 - RNA, 19 nt, Artificial Sequence
  Description of Artificial Sequence: Synthetic oligonucleotide
  Sense strand starting at position 3786 of SEQ ID NO: 316978
agcgucuuaaagcauugaa

SEQ ID NO: 454950 - RNA, 19 nt, Artificial Sequence
  Description of Artificial Sequence: Synthetic oligonucleotide
  Antisense Strand to SEQ ID NO: 454949
uucaaugcuuuaagacgcu

SEQ ID NO: 454951 - RNA, 19 nt, Artificial Sequence
  Description of Artificial Sequence: Synthetic oligonucleotide
  Sense strand starting at position 3789 of SEQ ID NO: 316978
gucuuaaagcauugaaccu

SEQ ID NO: 454952 - RNA, 19 nt, Artificial Sequence
  Description of Artificial Sequence: Synthetic oligonucleotide
  Antisense Strand to SEQ ID NO: 454951
agguucaaugcuuuaagac

SEQ ID NO: 454953 - RNA, 19 nt, Artificial Sequence
  Description of Artificial Sequence: Synthetic oligonucleotide
  Sense strand starting at position 3825 of SEQ ID NO: 316978
aaacuaggcucguugguaa

SEQ ID NO: 454954 - RNA, 19 nt, Artificial Sequence
  Description of Artificial Sequence: Synthetic oligonucleotide
  Antisense Strand to SEQ ID NO: 454953
uuaccaacgagccuaguuu

SEQ ID NO: 454955 - RNA, 19 nt, Artificial Sequence
  Description of Artificial Sequence: Synthetic oligonucleotide
  Sense strand starting at position 3857 of SEQ ID NO: 316978
gcaguugagcucggaacaa

SEQ ID NO: 454956 - RNA, 19 nt, Artificial Sequence
  Description of Artificial Sequence: Synthetic oligonucleotide
  Antisense Strand to SEQ ID NO: 454955
uuguuccgagcucaacugc

SEQ ID NO: 454957 - RNA, 19 nt, Artificial Sequence
  Description of Artificial Sequence: Synthetic oligonucleotide
  Sense strand starting at position 3880 of SEQ ID NO: 316978
gugaccuacugcucuaaac

SEQ ID NO: 454958 - RNA, 19 nt, Artificial Sequence
  Description of Artificial Sequence: Synthetic oligonucleotide
  Antisense Strand to SEQ ID NO: 454957
guuuagagcaguaggucac

SEQ ID NO: 454959 - RNA, 19 nt, Artificial Sequence
  Description of Artificial Sequence: Synthetic oligonucleotide
  Sense strand starting at position 3906 of SEQ ID NO: 316978
uugcgugggucugcaauuu

SEQ ID NO: 454960 - RNA, 19 nt, Artificial Sequence
  Description of Artificial Sequence: Synthetic oligonucleotide
  Antisense Strand to SEQ ID NO: 454959
aaauugcagacccacgcaa

SEQ ID NO: 454961 - RNA, 19 nt, Artificial Sequence
  Description of Artificial Sequence: Synthetic oligonucleotide
  Sense strand starting at position 36 of SEQ ID NO: 316979
gucgucucuccucaaggau

SEQ ID NO: 454962 - RNA, 19 nt, Artificial Sequence
  Description of Artificial Sequence: Synthetic oligonucleotide
  Antisense Strand to SEQ ID NO: 454961
auccuugaggagagacgac

SEQ ID NO: 454963 - RNA, 19 nt, Artificial Sequence
  Description of Artificial Sequence: Synthetic oligonucleotide
  Sense strand starting at position 70 of SEQ ID NO: 316979
aauagauggugucuguaua

SEQ ID NO: 454964 - RNA, 19 nt, Artificial Sequence
  Description of Artificial Sequence: Synthetic oligonucleotide
  Antisense Strand to SEQ ID NO: 454963
uauacagacaccaucuauu

SEQ ID NO: 454965 - RNA, 19 nt, Artificial Sequence
  Description of Artificial Sequence: Synthetic oligonucleotide
  Sense strand starting at position 71 of SEQ ID NO: 316979
auagauggugucuguauau

SEQ ID NO: 454966 - RNA, 19 nt, Artificial Sequence
  Description of Artificial Sequence: Synthetic oligonucleotide
  Antisense Strand to SEQ ID NO: 454965
auauacagacaccaucuau

SEQ ID NO: 454967 - RNA, 19 nt, Artificial Sequence
  Description of Artificial Sequence: Synthetic oligonucleotide
  Sense strand starting at position 131 of SEQ ID NO: 316979
ucauguauacccugaaaga

SEQ ID NO: 454968 - RNA, 19 nt, Artificial Sequence
  Description of Artificial Sequence: Synthetic oligonucleotide
  Antisense Strand to SEQ ID NO: 454967
ucuuucaggguauacauga

SEQ ID NO: 454969 - RNA, 19 nt, Artificial Sequence
  Description of Artificial Sequence: Synthetic oligonucleotide
  Sense strand starting at position 181 of SEQ ID NO: 316979
ugugcuuugcucuuccuga

SEQ ID NO: 454970 - RNA, 19 nt, Artificial Sequence
  Description of Artificial Sequence: Synthetic oligonucleotide
  Antisense Strand to SEQ ID NO: 454969
ucaggaagagcaaagcaca

SEQ ID NO: 454971 - RNA, 19 nt, Artificial Sequence
  Description of Artificial Sequence: Synthetic oligonucleotide
  Sense strand starting at position 257 of SEQ ID NO: 316979
ccuaaauuagaaugucuga

SEQ ID NO: 454972 - RNA, 19 nt, Artificial Sequence
  Description of Artificial Sequence: Synthetic oligonucleotide
  Antisense Strand to SEQ ID NO: 454971
ucagacauucuaauuuagg

SEQ ID NO: 454973 - RNA, 19 nt, Artificial Sequence
  Description of Artificial Sequence: Synthetic oligonucleotide
  Sense strand starting at position 281 of SEQ ID NO: 316979
aucaucaauuguguaacuu

SEQ ID NO: 454974 - RNA, 19 nt, Artificial Sequence
  Description of Artificial Sequence: Synthetic oligonucleotide
  Antisense Strand to SEQ ID NO: 454973
aaguuacacaauugaugau

SEQ ID NO: 454975 - RNA, 19 nt, Artificial Sequence
  Description of Artificial Sequence: Synthetic oligonucleotide
  Sense strand starting at position 282 of SEQ ID NO: 316979
ucaucaauuguguaacuuc

SEQ ID NO: 454976 - RNA, 19 nt, Artificial Sequence
  Description of Artificial Sequence: Synthetic oligonucleotide
  Antisense Strand to SEQ ID NO: 454975
gaaguuacacaauugauga

SEQ ID NO: 454977 - RNA, 19 nt, Artificial Sequence
  Description of Artificial Sequence: Synthetic oligonucleotide
  Sense strand starting at position 302 of SEQ ID NO: 316979
ucaguaagagccugaaguu

SEQ ID NO: 454978 - RNA, 19 nt, Artificial Sequence
  Description of Artificial Sequence: Synthetic oligonucleotide
  Antisense Strand to SEQ ID NO: 454977
aacuucaggcucuuacuga

SEQ ID NO: 454979 - RNA, 19 nt, Artificial Sequence
  Description of Artificial Sequence: Synthetic oligonucleotide
  Sense strand starting at position 328 of SEQ ID NO: 316979
gaucuuagugaucauugca

SEQ ID NO: 454980 - RNA, 19 nt, Artificial Sequence
  Description of Artificial Sequence: Synthetic oligonucleotide
  Antisense Strand to SEQ ID NO: 454979
ugcaaugaucacuaagauc

SEQ ID NO: 454981 - RNA, 19 nt, Artificial Sequence
  Description of Artificial Sequence: Synthetic oligonucleotide
  Sense strand starting at position 331 of SEQ ID NO: 316979
cuuagugaucauugcauuu

SEQ ID NO: 454982 - RNA, 19 nt, Artificial Sequence
  Description of Artificial Sequence: Synthetic oligonucleotide
  Antisense Strand to SEQ ID NO: 454981
aaaugcaaugaucacuaag

SEQ ID NO: 454983 - RNA, 19 nt, Artificial Sequence
  Description of Artificial Sequence: Synthetic oligonucleotide
  Sense strand starting at position 446 of SEQ ID NO: 316979
cauuuauuacgucgcugaa

SEQ ID NO: 454984 - RNA, 19 nt, Artificial Sequence
  Description of Artificial Sequence: Synthetic oligonucleotide
  Antisense Strand to SEQ ID NO: 454983
uucagcgacguaauaaaug

SEQ ID NO: 454985 - RNA, 19 nt, Artificial Sequence
  Description of Artificial Sequence: Synthetic oligonucleotide
  Sense strand starting at position 449 of SEQ ID NO: 316979
uuauuacgucgcugaauuu

SEQ ID NO: 454986 - RNA, 19 nt, Artificial Sequence
  Description of Artificial Sequence: Synthetic oligonucleotide
  Antisense Strand to SEQ ID NO: 454985
aaauucagcgacguaauaa

SEQ ID NO: 454987 - RNA, 19 nt, Artificial Sequence
  Description of Artificial Sequence: Synthetic oligonucleotide
  Sense strand starting at position 597 of SEQ ID NO: 316979
cuagaauaggcuugccuga

SEQ ID NO: 454988 - RNA, 19 nt, Artificial Sequence
  Description of Artificial Sequence: Synthetic oligonucleotide
  Antisense Strand to SEQ ID NO: 454987
ucaggcaagccuauucuag

SEQ ID NO: 454989 - RNA, 19 nt, Artificial Sequence
  Description of Artificial Sequence: Synthetic oligonucleotide
  Sense strand starting at position 599 of SEQ ID NO: 316979
agaauaggcuugccugauu

SEQ ID NO: 454990 - RNA, 19 nt, Artificial Sequence
  Description of Artificial Sequence: Synthetic oligonucleotide
  Antisense Strand to SEQ ID NO: 454989
aaucaggcaagccuauucu

SEQ ID NO: 454991 - RNA, 19 nt, Artificial Sequence
  Description of Artificial Sequence: Synthetic oligonucleotide
  Sense strand starting at position 604 of SEQ ID NO: 316979
aggcuugccugauuucuga

SEQ ID NO: 454992 - RNA, 19 nt, Artificial Sequence
  Description of Artificial Sequence: Synthetic oligonucleotide
  Antisense Strand to SEQ ID NO: 454991
ucagaaaucaggcaagccu

SEQ ID NO: 454993 - RNA, 19 nt, Artificial Sequence
  Description of Artificial Sequence: Synthetic oligonucleotide
  Sense strand starting at position 730 of SEQ ID NO: 316979
gucaaagucuucuccauua

SEQ ID NO: 454994 - RNA, 19 nt, Artificial Sequence
  Description of Artificial Sequence: Synthetic oligonucleotide
  Antisense Strand to SEQ ID NO: 454993
uaauggagaagacuuugac

SEQ ID NO: 454995 - RNA, 19 nt, Artificial Sequence
  Description of Artificial Sequence: Synthetic oligonucleotide
  Sense strand starting at position 750 of SEQ ID NO: 316979
gauuaucagcuuugggaua

SEQ ID NO: 454996 - RNA, 19 nt, Artificial Sequence
  Description of Artificial Sequence: Synthetic oligonucleotide
  Antisense Strand to SEQ ID NO: 454995
uaucccaaagcugauaauc

SEQ ID NO: 454997 - RNA, 19 nt, Artificial Sequence
  Description of Artificial Sequence: Synthetic oligonucleotide
  Sense strand starting at position 836 of SEQ ID NO: 316979
uuguaucugauauggguuu

SEQ ID NO: 454998 - RNA, 19 nt, Artificial Sequence
  Description of Artificial Sequence: Synthetic oligonucleotide
  Antisense Strand to SEQ ID NO: 454997
aaacccauaucagauacaa

SEQ ID NO: 454999 - RNA, 19 nt, Artificial Sequence
  Description of Artificial Sequence: Synthetic oligonucleotide
  Sense strand starting at position 991 of SEQ ID NO: 316979
caaauaugacgacaguguu

SEQ ID NO: 455000 - RNA, 19 nt, Artificial Sequence
  Description of Artificial Sequence: Synthetic oligonucleotide
  Antisense Strand to SEQ ID NO: 454999
aacacugucgucauauuug

SEQ ID NO: 455001 - RNA, 19 nt, Artificial Sequence
  Description of Artificial Sequence: Synthetic oligonucleotide
  Sense strand starting at position 1044 of SEQ ID NO: 316979
auccgagagcgggauaaau

SEQ ID NO: 455002 - RNA, 19 nt, Artificial Sequence
  Description of Artificial Sequence: Synthetic oligonucleotide
  Antisense Strand to SEQ ID NO: 455001
auuuaucccgcucucggau

SEQ ID NO: 455003 - RNA, 19 nt, Artificial Sequence
  Description of Artificial Sequence: Synthetic oligonucleotide
  Sense strand starting at position 1046 of SEQ ID NO: 316979
ccgagagcgggauaaauga

SEQ ID NO: 455004 - RNA, 19 nt, Artificial Sequence
  Description of Artificial Sequence: Synthetic oligonucleotide
  Antisense Strand to SEQ ID NO: 455003
ucauuuaucccgcucucgg

SEQ ID NO: 455005 - RNA, 19 nt, Artificial Sequence
  Description of Artificial Sequence: Synthetic oligonucleotide
  Sense strand starting at position 1055 of SEQ ID NO: 316979
ggauaaaugacagguaguc

SEQ ID NO: 455006 - RNA, 19 nt, Artificial Sequence
  Description of Artificial Sequence: Synthetic oligonucleotide
  Antisense Strand to SEQ ID NO: 455005
gacuaccugucauuuaucc

SEQ ID NO: 455007 - RNA, 19 nt, Artificial Sequence
  Description of Artificial Sequence: Synthetic oligonucleotide
  Sense strand starting at position 1116 of SEQ ID NO: 316979
uuaggcuaguucucagaaa

SEQ ID NO: 455008 - RNA, 19 nt, Artificial Sequence
  Description of Artificial Sequence: Synthetic oligonucleotide
  Antisense Strand to SEQ ID NO: 455007
uuucugagaacuagccuaa

SEQ ID NO: 455009 - RNA, 19 nt, Artificial Sequence
  Description of Artificial Sequence: Synthetic oligonucleotide
  Sense strand starting at position 1224 of SEQ ID NO: 316979
ugcauuacacuuuauagag

SEQ ID NO: 455010 - RNA, 19 nt, Artificial Sequence
  Description of Artificial Sequence: Synthetic oligonucleotide
  Antisense Strand to SEQ ID NO: 455009
cucuauaaaguguaaugca

SEQ ID NO: 455011 - RNA, 19 nt, Artificial Sequence
  Description of Artificial Sequence: Synthetic oligonucleotide
  Sense strand starting at position 2490 of SEQ ID NO: 316979
agacgaguucccggaacau

SEQ ID NO: 455012 - RNA, 19 nt, Artificial Sequence
  Description of Artificial Sequence: Synthetic oligonucleotide
  Antisense Strand to SEQ ID NO: 455011
auguuccgggaacucgucu

SEQ ID NO: 455013 - RNA, 19 nt, Artificial Sequence
  Description of Artificial Sequence: Synthetic oligonucleotide
  Sense strand starting at position 2549 of SEQ ID NO: 316979
agggauuguucgcuuagag

SEQ ID NO: 455014 - RNA, 19 nt, Artificial Sequence
  Description of Artificial Sequence: Synthetic oligonucleotide
  Antisense Strand to SEQ ID NO: 455013
cucuaagcgaacaaucccu

SEQ ID NO: 455015 - RNA, 19 nt, Artificial Sequence
  Description of Artificial Sequence: Synthetic oligonucleotide
  Sense strand starting at position 2999 of SEQ ID NO: 316979
aacggaauggccugaguua

SEQ ID NO: 455016 - RNA, 19 nt, Artificial Sequence
  Description of Artificial Sequence: Synthetic oligonucleotide
  Antisense Strand to SEQ ID NO: 455015
uaacucaggccauuccguu

SEQ ID NO: 455017 - RNA, 19 nt, Artificial Sequence
  Description of Artificial Sequence: Synthetic oligonucleotide
  Sense strand starting at position 3000 of SEQ ID NO: 316979
acggaauggccugaguuaa

SEQ ID NO: 455018 - RNA, 19 nt, Artificial Sequence
  Description of Artificial Sequence: Synthetic oligonucleotide
  Antisense Strand to SEQ ID NO: 455017
uuaacucaggccauuccgu

SEQ ID NO: 455019 - RNA, 19 nt, Artificial Sequence
  Description of Artificial Sequence: Synthetic oligonucleotide
  Sense strand starting at position 3066 of SEQ ID NO: 316979
gaggauggcagucagugaa

SEQ ID NO: 455020 - RNA, 19 nt, Artificial Sequence
  Description of Artificial Sequence: Synthetic oligonucleotide
  Antisense Strand to SEQ ID NO: 455019
uucacugacugccauccuc

SEQ ID NO: 455021 - RNA, 19 nt, Artificial Sequence
  Description of Artificial Sequence: Synthetic oligonucleotide
  Sense strand starting at position 3069 of SEQ ID NO: 316979
gauggcagucagugaaaga

SEQ ID NO: 455022 - RNA, 19 nt, Artificial Sequence
  Description of Artificial Sequence: Synthetic oligonucleotide
  Antisense Strand to SEQ ID NO: 455021
ucuuucacugacugccauc

SEQ ID NO: 455023 - RNA, 19 nt, Artificial Sequence
  Description of Artificial Sequence: Synthetic oligonucleotide
  Sense strand starting at position 3070 of SEQ ID NO: 316979
auggcagucagugaaagau

SEQ ID NO: 455024 - RNA, 19 nt, Artificial Sequence
  Description of Artificial Sequence: Synthetic oligonucleotide
  Antisense Strand to SEQ ID NO: 455023
aucuuucacugacugccau

SEQ ID NO: 455025 - RNA, 19 nt, Artificial Sequence
  Description of Artificial Sequence: Synthetic oligonucleotide
  Sense strand starting at position 3076 of SEQ ID NO: 316979
gucagugaaagaugacuga

SEQ ID NO: 455026 - RNA, 19 nt, Artificial Sequence
  Description of Artificial Sequence: Synthetic oligonucleotide
  Antisense Strand to SEQ ID NO: 455025
ucagucaucuuucacugac

SEQ ID NO: 455027 - RNA, 19 nt, Artificial Sequence
  Description of Artificial Sequence: Synthetic oligonucleotide
  Sense strand starting at position 3091 of SEQ ID NO: 316979
cugaaacgggauugcuaaa

SEQ ID NO: 455028 - RNA, 19 nt, Artificial Sequence
  Description of Artificial Sequence: Synthetic oligonucleotide
  Antisense Strand to SEQ ID NO: 455027
uuuagcaaucccguuucag

SEQ ID NO: 455029 - RNA, 19 nt, Artificial Sequence
  Description of Artificial Sequence: Synthetic oligonucleotide
  Sense strand starting at position 3213 of SEQ ID NO: 316979
cucagucuuccacagguua

SEQ ID NO: 455030 - RNA, 19 nt, Artificial Sequence
  Description of Artificial Sequence: Synthetic oligonucleotide
  Antisense Strand to SEQ ID NO: 455029
uaaccuguggaagacugag

SEQ ID NO: 455031 - RNA, 19 nt, Artificial Sequence
  Description of Artificial Sequence: Synthetic oligonucleotide
  Sense strand starting at position 3240 of SEQ ID NO: 316979
uuuggucauggguaaauau

SEQ ID NO: 455032 - RNA, 19 nt, Artificial Sequence
  Description of Artificial Sequence: Synthetic oligonucleotide
  Antisense Strand to SEQ ID NO: 455031
auauuuacccaugaccaaa

SEQ ID NO: 455033 - RNA, 19 nt, Artificial Sequence
  Description of Artificial Sequence: Synthetic oligonucleotide
  Sense strand starting at position 3294 of SEQ ID NO: 316979
aaagguggcuuguuagaca

SEQ ID NO: 455034 - RNA, 19 nt, Artificial Sequence
  Description of Artificial Sequence: Synthetic oligonucleotide
  Antisense Strand to SEQ ID NO: 455033
ugucuaacaagccaccuuu

SEQ ID NO: 455035 - RNA, 19 nt, Artificial Sequence
  Description of Artificial Sequence: Synthetic oligonucleotide
  Sense strand starting at position 3404 of SEQ ID NO: 316979
auuguaaucugaucgaguc

SEQ ID NO: 455036 - RNA, 19 nt, Artificial Sequence
  Description of Artificial Sequence: Synthetic oligonucleotide
  Antisense Strand to SEQ ID NO: 455035
gacucgaucagauuacaau

SEQ ID NO: 455037 - RNA, 19 nt, Artificial Sequence
  Description of Artificial Sequence: Synthetic oligonucleotide
  Sense strand starting at position 3406 of SEQ ID NO: 316979
uguaaucugaucgagucaa

SEQ ID NO: 455038 - RNA, 19 nt, Artificial Sequence
  Description of Artificial Sequence: Synthetic oligonucleotide
  Antisense Strand to SEQ ID NO: 455037
uugacucgaucagauuaca

SEQ ID NO: 455039 - RNA, 19 nt, Artificial Sequence
  Description of Artificial Sequence: Synthetic oligonucleotide
  Sense strand starting at position 3698 of SEQ ID NO: 316979
ccagaaauguugcugauga

SEQ ID NO: 455040 - RNA, 19 nt, Artificial Sequence
  Description of Artificial Sequence: Synthetic oligonucleotide
  Antisense Strand to SEQ ID NO: 455039
ucaucagcaacauuucugg

SEQ ID NO: 455041 - RNA, 19 nt, Artificial Sequence
  Description of Artificial Sequence: Synthetic oligonucleotide
  Sense strand starting at position 500 of SEQ ID NO: 316980
gaguguuacgaugauacug

SEQ ID NO: 455042 - RNA, 19 nt, Artificial Sequence
  Description of Artificial Sequence: Synthetic oligonucleotide
  Antisense Strand to SEQ ID NO: 455041
caguaucaucguaacacuc

SEQ ID NO: 455043 - RNA, 19 nt, Artificial Sequence
  Description of Artificial Sequence: Synthetic oligonucleotide
  Sense strand starting at position 841 of SEQ ID NO: 316980
gccagauuguaauucuuaa

SEQ ID NO: 455044 - RNA, 19 nt, Artificial Sequence
  Description of Artificial Sequence: Synthetic oligonucleotide
  Antisense Strand to SEQ ID NO: 455043
uuaagaauuacaaucuggc

SEQ ID NO: 455045 - RNA, 19 nt, Artificial Sequence
  Description of Artificial Sequence: Synthetic oligonucleotide
  Sense strand starting at position 884 of SEQ ID NO: 316980
cugguagacgucuacugaa

SEQ ID NO: 455046 - RNA, 19 nt, Artificial Sequence
  Description of Artificial Sequence: Synthetic oligonucleotide
  Antisense Strand to SEQ ID NO: 455045
uucaguagacgucuaccag

SEQ ID NO: 455047 - RNA, 19 nt, Artificial Sequence
  Description of Artificial Sequence: Synthetic oligonucleotide
  Sense strand starting at position 909 of SEQ ID NO: 316980
gcgcauucgaaguuucuga

SEQ ID NO: 455048 - RNA, 19 nt, Artificial Sequence
  Description of Artificial Sequence: Synthetic oligonucleotide
  Antisense Strand to SEQ ID NO: 455047
ucagaaacuucgaaugcgc

SEQ ID NO: 455049 - RNA, 19 nt, Artificial Sequence
  Description of Artificial Sequence: Synthetic oligonucleotide
  Sense strand starting at position 964 of SEQ ID NO: 316980
gugacuggccucuaacaga

SEQ ID NO: 455050 - RNA, 19 nt, Artificial Sequence
  Description of Artificial Sequence: Synthetic oligonucleotide
  Antisense Strand to SEQ ID NO: 455049
ucuguuagaggccagucac

SEQ ID NO: 455051 - RNA, 19 nt, Artificial Sequence
  Description of Artificial Sequence: Synthetic oligonucleotide
  Sense strand starting at position 1010 of SEQ ID NO: 316980
aggaguuccuaggaauuug

SEQ ID NO: 455052 - RNA, 19 nt, Artificial Sequence
  Description of Artificial Sequence: Synthetic oligonucleotide
  Antisense Strand to SEQ ID NO: 455051
caaauuccuaggaacuccu

SEQ ID NO: 455053 - RNA, 19 nt, Artificial Sequence
  Description of Artificial Sequence: Synthetic oligonucleotide
  Sense strand starting at position 1062 of SEQ ID NO: 316980
aguggucugcuacacagaa

SEQ ID NO: 455054 - RNA, 19 nt, Artificial Sequence
  Description of Artificial Sequence: Synthetic oligonucleotide
  Antisense Strand to SEQ ID NO: 455053
uucuguguagcagaccacu

SEQ ID NO: 455055 - RNA, 19 nt, Artificial Sequence
  Description of Artificial Sequence: Synthetic oligonucleotide
  Sense strand starting at position 1064 of SEQ ID NO: 316980
uggucugcuacacagaaga

SEQ ID NO: 455056 - RNA, 19 nt, Artificial Sequence
  Description of Artificial Sequence: Synthetic oligonucleotide
  Antisense Strand to SEQ ID NO: 455055
ucuucuguguagcagacca

SEQ ID NO: 455057 - RNA, 19 nt, Artificial Sequence
  Description of Artificial Sequence: Synthetic oligonucleotide
  Sense strand starting at position 1134 of SEQ ID NO: 316980
uggagcaagaacuguacua

SEQ ID NO: 455058 - RNA, 19 nt, Artificial Sequence
  Description of Artificial Sequence: Synthetic oligonucleotide
  Antisense Strand to SEQ ID NO: 455057
uaguacaguucuugcucca

SEQ ID NO: 455059 - RNA, 19 nt, Artificial Sequence
  Description of Artificial Sequence: Synthetic oligonucleotide
  Sense strand starting at position 1136 of SEQ ID NO: 316980
gagcaagaacuguacuauc

SEQ ID NO: 455060 - RNA, 19 nt, Artificial Sequence
  Description of Artificial Sequence: Synthetic oligonucleotide
  Antisense Strand to SEQ ID NO: 455059
gauaguacaguucuugcuc

SEQ ID NO: 455061 - RNA, 19 nt, Artificial Sequence
  Description of Artificial Sequence: Synthetic oligonucleotide
  Sense strand starting at position 1389 of SEQ ID NO: 316980
cuaagugccgauuaacagu

SEQ ID NO: 455062 - RNA, 19 nt, Artificial Sequence
  Description of Artificial Sequence: Synthetic oligonucleotide
  Antisense Strand to SEQ ID NO: 455061
acuguuaaucggcacuuag

SEQ ID NO: 455063 - RNA, 19 nt, Artificial Sequence
  Description of Artificial Sequence: Synthetic oligonucleotide
  Sense strand starting at position 1453 of SEQ ID NO: 316980
acucuuugcaucugggaag

SEQ ID NO: 455064 - RNA, 19 nt, Artificial Sequence
  Description of Artificial Sequence: Synthetic oligonucleotide
  Antisense Strand to SEQ ID NO: 455063
cuucccagaugcaaagagu

SEQ ID NO: 455065 - RNA, 19 nt, Artificial Sequence
  Description of Artificial Sequence: Synthetic oligonucleotide
  Sense strand starting at position 1831 of SEQ ID NO: 316980
uucagacgucguucucagu

SEQ ID NO: 455066 - RNA, 19 nt, Artificial Sequence
  Description of Artificial Sequence: Synthetic oligonucleotide
  Antisense Strand to SEQ ID NO: 455065
acugagaacgacgucugaa

SEQ ID NO: 455067 - RNA, 19 nt, Artificial Sequence
  Description of Artificial Sequence: Synthetic oligonucleotide
  Sense strand starting at position 1857 of SEQ ID NO: 316980
acgcuaagcccauauggaa

SEQ ID NO: 455068 - RNA, 19 nt, Artificial Sequence
  Description of Artificial Sequence: Synthetic oligonucleotide
  Antisense Strand to SEQ ID NO: 455067
uuccauaugggcuuagcgu

SEQ ID NO: 455069 - RNA, 19 nt, Artificial Sequence
  Description of Artificial Sequence: Synthetic oligonucleotide
  Sense strand starting at position 1903 of SEQ ID NO: 316980
cuacauccaccuugggaaa

SEQ ID NO: 455070 - RNA, 19 nt, Artificial Sequence
  Description of Artificial Sequence: Synthetic oligonucleotide
  Antisense Strand to SEQ ID NO: 455069
uuucccaagguggauguag

SEQ ID NO: 455071 - RNA, 19 nt, Artificial Sequence
  Description of Artificial Sequence: Synthetic oligonucleotide
  Sense strand starting at position 2345 of SEQ ID NO: 316980
uaguccuaaugguuagagu

SEQ ID NO: 455072 - RNA, 19 nt, Artificial Sequence
  Description of Artificial Sequence: Synthetic oligonucleotide
  Antisense Strand to SEQ ID NO: 455071
acucuaaccauuaggacua

SEQ ID NO: 455073 - RNA, 19 nt, Artificial Sequence
  Description of Artificial Sequence: Synthetic oligonucleotide
  Sense strand starting at position 2387 of SEQ ID NO: 316980
ugguuucuaggcgauuaag

SEQ ID NO: 455074 - RNA, 19 nt, Artificial Sequence
  Description of Artificial Sequence: Synthetic oligonucleotide
  Antisense Strand to SEQ ID NO: 455073
cuuaaucgccuagaaacca

SEQ ID NO: 455075 - RNA, 19 nt, Artificial Sequence
  Description of Artificial Sequence: Synthetic oligonucleotide
  Sense strand starting at position 2390 of SEQ ID NO: 316980
uuucuaggcgauuaaguuu

SEQ ID NO: 455076 - RNA, 19 nt, Artificial Sequence
  Description of Artificial Sequence: Synthetic oligonucleotide
  Antisense Strand to SEQ ID NO: 455075
aaacuuaaucgccuagaaa

SEQ ID NO: 455077 - RNA, 19 nt, Artificial Sequence
  Description of Artificial Sequence: Synthetic oligonucleotide
  Sense strand starting at position 2398 of SEQ ID NO: 316980
cgauuaaguuucuccaaga

SEQ ID NO: 455078 - RNA, 19 nt, Artificial Sequence
  Description of Artificial Sequence: Synthetic oligonucleotide
  Antisense Strand to SEQ ID NO: 455077
ucuuggagaaacuuaaucg

SEQ ID NO: 455079 - RNA, 19 nt, Artificial Sequence
  Description of Artificial Sequence: Synthetic oligonucleotide
  Sense strand starting at position 2403 of SEQ ID NO: 316980
aaguuucuccaagaugggu

SEQ ID NO: 455080 - RNA, 19 nt, Artificial Sequence
  Description of Artificial Sequence: Synthetic oligonucleotide
  Antisense Strand to SEQ ID NO: 455079
acccaucuuggagaaacuu

SEQ ID NO: 455081 - RNA, 19 nt, Artificial Sequence
  Description of Artificial Sequence: Synthetic oligonucleotide
  Sense strand starting at position 2409 of SEQ ID NO: 316980
cuccaagaugggugggaau

SEQ ID NO: 455082 - RNA, 19 nt, Artificial Sequence
  Description of Artificial Sequence: Synthetic oligonucleotide
  Antisense Strand to SEQ ID NO: 455081
auucccacccaucuuggag

SEQ ID NO: 455083 - RNA, 19 nt, Artificial Sequence
  Description of Artificial Sequence: Synthetic oligonucleotide
  Sense strand starting at position 2422 of SEQ ID NO: 316980
gggaaucuguaauugccuu

SEQ ID NO: 455084 - RNA, 19 nt, Artificial Sequence
  Description of Artificial Sequence: Synthetic oligonucleotide
  Antisense Strand to SEQ ID NO: 455083
aaggcaauuacagauuccc

SEQ ID NO: 455085 - RNA, 19 nt, Artificial Sequence
  Description of Artificial Sequence: Synthetic oligonucleotide
  Sense strand starting at position 2493 of SEQ ID NO: 316980
ggaaguuggagugguucuu

SEQ ID NO: 455086 - RNA, 19 nt, Artificial Sequence
  Description of Artificial Sequence: Synthetic oligonucleotide
  Antisense Strand to SEQ ID NO: 455085
aagaaccacuccaacuucc

SEQ ID NO: 455087 - RNA, 19 nt, Artificial Sequence
  Description of Artificial Sequence: Synthetic oligonucleotide
  Sense strand starting at position 2516 of SEQ ID NO: 316980
agcagagacuuuccuaaga

SEQ ID NO: 455088 - RNA, 19 nt, Artificial Sequence
  Description of Artificial Sequence: Synthetic oligonucleotide
  Antisense Strand to SEQ ID NO: 455087
ucuuaggaaagucucugcu

SEQ ID NO: 455089 - RNA, 19 nt, Artificial Sequence
  Description of Artificial Sequence: Synthetic oligonucleotide
  Sense strand starting at position 2526 of SEQ ID NO: 316980
uuccuaagaucucuggaua

SEQ ID NO: 455090 - RNA, 19 nt, Artificial Sequence
  Description of Artificial Sequence: Synthetic oligonucleotide
  Antisense Strand to SEQ ID NO: 455089
uauccagagaucuuaggaa

SEQ ID NO: 455091 - RNA, 19 nt, Artificial Sequence
  Description of Artificial Sequence: Synthetic oligonucleotide
  Sense strand starting at position 2527 of SEQ ID NO: 316980
uccuaagaucucuggauaa

SEQ ID NO: 455092 - RNA, 19 nt, Artificial Sequence
  Description of Artificial Sequence: Synthetic oligonucleotide
  Antisense Strand to SEQ ID NO: 455091
uuauccagagaucuuagga

SEQ ID NO: 455093 - RNA, 19 nt, Artificial Sequence
  Description of Artificial Sequence: Synthetic oligonucleotide
  Sense strand starting at position 2754 of SEQ ID NO: 316980
uucucuaaccauggaauga

SEQ ID NO: 455094 - RNA, 19 nt, Artificial Sequence
  Description of Artificial Sequence: Synthetic oligonucleotide
  Antisense Strand to SEQ ID NO: 455093
ucauuccaugguuagagaa

SEQ ID NO: 455095 - RNA, 19 nt, Artificial Sequence
  Description of Artificial Sequence: Synthetic oligonucleotide
  Sense strand starting at position 3013 of SEQ ID NO: 316980
uguuuaaucgcagugcuuu

SEQ ID NO: 455096 - RNA, 19 nt, Artificial Sequence
  Description of Artificial Sequence: Synthetic oligonucleotide
  Antisense Strand to SEQ ID NO: 455095
aaagcacugcgauuaaaca

SEQ ID NO: 455097 - RNA, 19 nt, Artificial Sequence
  Description of Artificial Sequence: Synthetic oligonucleotide
  Sense strand starting at position 3177 of SEQ ID NO: 316980
uagcuacuugaauagaguu

SEQ ID NO: 455098 - RNA, 19 nt, Artificial Sequence
  Description of Artificial Sequence: Synthetic oligonucleotide
  Antisense Strand to SEQ ID NO: 455097
aacucuauucaaguagcua

SEQ ID NO: 455099 - RNA, 19 nt, Artificial Sequence
  Description of Artificial Sequence: Synthetic oligonucleotide
  Sense strand starting at position 3190 of SEQ ID NO: 316980
agaguucugccguaggaca

SEQ ID NO: 455100 - RNA, 19 nt, Artificial Sequence
  Description of Artificial Sequence: Synthetic oligonucleotide
  Antisense Strand to SEQ ID NO: 455099
uguccuacggcagaacucu

SEQ ID NO: 455101 - RNA, 19 nt, Artificial Sequence
  Description of Artificial Sequence: Synthetic oligonucleotide
  Sense strand starting at position 3215 of SEQ ID NO: 316980
uuugauaauuacucugagu

SEQ ID NO: 455102 - RNA, 19 nt, Artificial Sequence
  Description of Artificial Sequence: Synthetic oligonucleotide
  Antisense Strand to SEQ ID NO: 455101
acucagaguaauuaucaaa

SEQ ID NO: 455103 - RNA, 19 nt, Artificial Sequence
  Description of Artificial Sequence: Synthetic oligonucleotide
  Sense strand starting at position 3217 of SEQ ID NO: 316980
ugauaauuacucugaguuc

SEQ ID NO: 455104 - RNA, 19 nt, Artificial Sequence
  Description of Artificial Sequence: Synthetic oligonucleotide
  Antisense Strand to SEQ ID NO: 455103
gaacucagaguaauuauca

SEQ ID NO: 455105 - RNA, 19 nt, Artificial Sequence
  Description of Artificial Sequence: Synthetic oligonucleotide
  Sense strand starting at position 3244 of SEQ ID NO: 316980
ugaugaauugauuguaguc

SEQ ID NO: 455106 - RNA, 19 nt, Artificial Sequence
  Description of Artificial Sequence: Synthetic oligonucleotide
  Antisense Strand to SEQ ID NO: 455105
gacuacaaucaauucauca

SEQ ID NO: 455107 - RNA, 19 nt, Artificial Sequence
  Description of Artificial Sequence: Synthetic oligonucleotide
  Sense strand starting at position 3249 of SEQ ID NO: 316980
aauugauuguagucaugua

SEQ ID NO: 455108 - RNA, 19 nt, Artificial Sequence
  Description of Artificial Sequence: Synthetic oligonucleotide
  Antisense Strand to SEQ ID NO: 455107
uacaugacuacaaucaauu

SEQ ID NO: 455109 - RNA, 19 nt, Artificial Sequence
  Description of Artificial Sequence: Synthetic oligonucleotide
  Sense strand starting at position 3250 of SEQ ID NO: 316980
auugauuguagucauguag

SEQ ID NO: 455110 - RNA, 19 nt, Artificial Sequence
  Description of Artificial Sequence: Synthetic oligonucleotide
  Antisense Strand to SEQ ID NO: 455109
cuacaugacuacaaucaau

SEQ ID NO: 455111 - RNA, 19 nt, Artificial Sequence
  Description of Artificial Sequence: Synthetic oligonucleotide
  Sense strand starting at position 3431 of SEQ ID NO: 316980
gguaguuugggugagcaga

SEQ ID NO: 455112 - RNA, 19 nt, Artificial Sequence
  Description of Artificial Sequence: Synthetic oligonucleotide
  Antisense Strand to SEQ ID NO: 455111
ucugcucacccaaacuacc

SEQ ID NO: 455113 - RNA, 19 nt, Artificial Sequence
  Description of Artificial Sequence: Synthetic oligonucleotide
  Sense strand starting at position 3433 of SEQ ID NO: 316980
uaguuugggugagcagaau

SEQ ID NO: 455114 - RNA, 19 nt, Artificial Sequence
  Description of Artificial Sequence: Synthetic oligonucleotide
  Antisense Strand to SEQ ID NO: 455113
auucugcucacccaaacua

SEQ ID NO: 455115 - RNA, 19 nt, Artificial Sequence
  Description of Artificial Sequence: Synthetic oligonucleotide
  Sense strand starting at position 3489 of SEQ ID NO: 316980
auagguuggcuauaguauu

SEQ ID NO: 455116 - RNA, 19 nt, Artificial Sequence
  Description of Artificial Sequence: Synthetic oligonucleotide
  Antisense Strand to SEQ ID NO: 455115
aauacuauagccaaccuau

SEQ ID NO: 455117 - RNA, 19 nt, Artificial Sequence
  Description of Artificial Sequence: Synthetic oligonucleotide
  Sense strand starting at position 3762 of SEQ ID NO: 316980
cuuugucucuaaucaaagu

SEQ ID NO: 455118 - RNA, 19 nt, Artificial Sequence
  Description of Artificial Sequence: Synthetic oligonucleotide
  Antisense Strand to SEQ ID NO: 455117
acuuugauuagagacaaag

SEQ ID NO: 455119 - RNA, 19 nt, Artificial Sequence
  Description of Artificial Sequence: Synthetic oligonucleotide
  Sense strand starting at position 3835 of SEQ ID NO: 316980
auacgauuacagggaguca

SEQ ID NO: 455120 - RNA, 19 nt, Artificial Sequence
  Description of Artificial Sequence: Synthetic oligonucleotide
  Antisense Strand to SEQ ID NO: 455119
ugacucccuguaaucguau

SEQ ID NO: 455121 - RNA, 19 nt, Artificial Sequence
  Description of Artificial Sequence: Synthetic oligonucleotide
  Sense strand starting at position 33 of SEQ ID NO: 316981
gcccaaagcgaggagaaau

SEQ ID NO: 455122 - RNA, 19 nt, Artificial Sequence
  Description of Artificial Sequence: Synthetic oligonucleotide
  Antisense Strand to SEQ ID NO: 455121
auuucuccucgcuuugggc

SEQ ID NO: 455123 - RNA, 19 nt, Artificial Sequence
  Description of Artificial Sequence: Synthetic oligonucleotide
  Sense strand starting at position 557 of SEQ ID NO: 316981
gcuagaaguucugcuggag

SEQ ID NO: 455124 - RNA, 19 nt, Artificial Sequence
  Description of Artificial Sequence: Synthetic oligonucleotide
  Antisense Strand to SEQ ID NO: 455123
cuccagcagaacuucuagc

SEQ ID NO: 455125 - RNA, 19 nt, Artificial Sequence
  Description of Artificial Sequence: Synthetic oligonucleotide
  Sense strand starting at position 560 of SEQ ID NO: 316981
agaaguucugcuggaggaa

SEQ ID NO: 455126 - RNA, 19 nt, Artificial Sequence
  Description of Artificial Sequence: Synthetic oligonucleotide
  Antisense Strand to SEQ ID NO: 455125
uuccuccagcagaacuucu

SEQ ID NO: 455127 - RNA, 19 nt, Artificial Sequence
  Description of Artificial Sequence: Synthetic oligonucleotide
  Sense strand starting at position 561 of SEQ ID NO: 316981
gaaguucugcuggaggaac

SEQ ID NO: 455128 - RNA, 19 nt, Artificial Sequence
  Description of Artificial Sequence: Synthetic oligonucleotide
  Antisense Strand to SEQ ID NO: 455127
guuccuccagcagaacuuc

SEQ ID NO: 455129 - RNA, 19 nt, Artificial Sequence
  Description of Artificial Sequence: Synthetic oligonucleotide
  Sense strand starting at position 668 of SEQ ID NO: 316981
ggccaaaguucccauuuga

SEQ ID NO: 455130 - RNA, 19 nt, Artificial Sequence
  Description of Artificial Sequence: Synthetic oligonucleotide
  Antisense Strand to SEQ ID NO: 455129
ucaaaugggaacuuuggcc

SEQ ID NO: 455131 - RNA, 19 nt, Artificial Sequence
  Description of Artificial Sequence: Synthetic oligonucleotide
  Sense strand starting at position 698 of SEQ ID NO: 316981
uccucugcgcagucuuaga

SEQ ID NO: 455132 - RNA, 19 nt, Artificial Sequence
  Description of Artificial Sequence: Synthetic oligonucleotide
  Antisense Strand to SEQ ID NO: 455131
ucuaagacugcgcagagga

SEQ ID NO: 455133 - RNA, 19 nt, Artificial Sequence
  Description of Artificial Sequence: Synthetic oligonucleotide
  Sense strand starting at position 896 of SEQ ID NO: 316981
aguagagcucucgggaaca

SEQ ID NO: 455134 - RNA, 19 nt, Artificial Sequence
  Description of Artificial Sequence: Synthetic oligonucleotide
  Antisense Strand to SEQ ID NO: 455133
uguucccgagagcucuacu

SEQ ID NO: 455135 - RNA, 19 nt, Artificial Sequence
  Description of Artificial Sequence: Synthetic oligonucleotide
  Sense strand starting at position 898 of SEQ ID NO: 316981
uagagcucucgggaacacu

SEQ ID NO: 455136 - RNA, 19 nt, Artificial Sequence
  Description of Artificial Sequence: Synthetic oligonucleotide
  Antisense Strand to SEQ ID NO: 455135
aguguucccgagagcucua

SEQ ID NO: 455137 - RNA, 19 nt, Artificial Sequence
  Description of Artificial Sequence: Synthetic oligonucleotide
  Sense strand starting at position 1459 of SEQ ID NO: 316981
cgaagagaggguuguaugu

SEQ ID NO: 455138 - RNA, 19 nt, Artificial Sequence
  Description of Artificial Sequence: Synthetic oligonucleotide
  Antisense Strand to SEQ ID NO: 455137
acauacaacccucucuucg

SEQ ID NO: 455139 - RNA, 19 nt, Artificial Sequence
  Description of Artificial Sequence: Synthetic oligonucleotide
  Sense strand starting at position 1466 of SEQ ID NO: 316981
aggguuguauguuuaggau

SEQ ID NO: 455140 - RNA, 19 nt, Artificial Sequence
  Description of Artificial Sequence: Synthetic oligonucleotide
  Antisense Strand to SEQ ID NO: 455139
auccuaaacauacaacccu

SEQ ID NO: 455141 - RNA, 19 nt, Artificial Sequence
  Description of Artificial Sequence: Synthetic oligonucleotide
  Sense strand starting at position 1472 of SEQ ID NO: 316981
guauguuuaggauggcuuu

SEQ ID NO: 455142 - RNA, 19 nt, Artificial Sequence
  Description of Artificial Sequence: Synthetic oligonucleotide
  Antisense Strand to SEQ ID NO: 455141
aaagccauccuaaacauac

SEQ ID NO: 455143 - RNA, 19 nt, Artificial Sequence
  Description of Artificial Sequence: Synthetic oligonucleotide
  Sense strand starting at position 1561 of SEQ ID NO: 316981
ucagauucgcucuaggaag

SEQ ID NO: 455144 - RNA, 19 nt, Artificial Sequence
  Description of Artificial Sequence: Synthetic oligonucleotide
  Antisense Strand to SEQ ID NO: 455143
cuuccuagagcgaaucuga

SEQ ID NO: 455145 - RNA, 19 nt, Artificial Sequence
  Description of Artificial Sequence: Synthetic oligonucleotide
  Sense strand starting at position 1700 of SEQ ID NO: 316981
aggacuucuaccugguuga

SEQ ID NO: 455146 - RNA, 19 nt, Artificial Sequence
  Description of Artificial Sequence: Synthetic oligonucleotide
  Antisense Strand to SEQ ID NO: 455145
ucaaccagguagaaguccu

SEQ ID NO: 455147 - RNA, 19 nt, Artificial Sequence
  Description of Artificial Sequence: Synthetic oligonucleotide
  Sense strand starting at position 1703 of SEQ ID NO: 316981
acuucuaccugguugagca

SEQ ID NO: 455148 - RNA, 19 nt, Artificial Sequence
  Description of Artificial Sequence: Synthetic oligonucleotide
  Antisense Strand to SEQ ID NO: 455147
ugcucaaccagguagaagu

SEQ ID NO: 455149 - RNA, 19 nt, Artificial Sequence
  Description of Artificial Sequence: Synthetic oligonucleotide
  Sense strand starting at position 2058 of SEQ ID NO: 316981
agaugcauucacgaguuga

SEQ ID NO: 455150 - RNA, 19 nt, Artificial Sequence
  Description of Artificial Sequence: Synthetic oligonucleotide
  Antisense Strand to SEQ ID NO: 455149
ucaacucgugaaugcaucu

SEQ ID NO: 455151 - RNA, 19 nt, Artificial Sequence
  Description of Artificial Sequence: Synthetic oligonucleotide
  Sense strand starting at position 2069 of SEQ ID NO: 316981
cgaguugaauuauuccaua

SEQ ID NO: 455152 - RNA, 19 nt, Artificial Sequence
  Description of Artificial Sequence: Synthetic oligonucleotide
  Antisense Strand to SEQ ID NO: 455151
uauggaauaauucaacucg

SEQ ID NO: 455153 - RNA, 19 nt, Artificial Sequence
  Description of Artificial Sequence: Synthetic oligonucleotide
  Sense strand starting at position 2100 of SEQ ID NO: 316981
cugcguuuggaggauguau

SEQ ID NO: 455154 - RNA, 19 nt, Artificial Sequence
  Description of Artificial Sequence: Synthetic oligonucleotide
  Antisense Strand to SEQ ID NO: 455153
auacauccuccaaacgcag

SEQ ID NO: 455155 - RNA, 19 nt, Artificial Sequence
  Description of Artificial Sequence: Synthetic oligonucleotide
  Sense strand starting at position 2188 of SEQ ID NO: 316981
gcagaucagcuuuguuaau

SEQ ID NO: 455156 - RNA, 19 nt, Artificial Sequence
  Description of Artificial Sequence: Synthetic oligonucleotide
  Antisense Strand to SEQ ID NO: 455155
auuaacaaagcugaucugc

SEQ ID NO: 455157 - RNA, 19 nt, Artificial Sequence
  Description of Artificial Sequence: Synthetic oligonucleotide
  Sense strand starting at position 2228 of SEQ ID NO: 316981
acgugaucggcccaggaau

SEQ ID NO: 455158 - RNA, 19 nt, Artificial Sequence
  Description of Artificial Sequence: Synthetic oligonucleotide
  Antisense Strand to SEQ ID NO: 455157
auuccugggccgaucacgu

SEQ ID NO: 455159 - RNA, 19 nt, Artificial Sequence
  Description of Artificial Sequence: Synthetic oligonucleotide
  Sense strand starting at position 2230 of SEQ ID NO: 316981
gugaucggcccaggaauaa

SEQ ID NO: 455160 - RNA, 19 nt, Artificial Sequence
  Description of Artificial Sequence: Synthetic oligonucleotide
  Antisense Strand to SEQ ID NO: 455159
uuauuccugggccgaucac

SEQ ID NO: 455161 - RNA, 19 nt, Artificial Sequence
  Description of Artificial Sequence: Synthetic oligonucleotide
  Sense strand starting at position 2427 of SEQ ID NO: 316981
augaucgccuguuuacaaa

SEQ ID NO: 455162 - RNA, 19 nt, Artificial Sequence
  Description of Artificial Sequence: Synthetic oligonucleotide
  Antisense Strand to SEQ ID NO: 455161
uuuguaaacaggcgaucau

SEQ ID NO: 455163 - RNA, 19 nt, Artificial Sequence
  Description of Artificial Sequence: Synthetic oligonucleotide
  Sense strand starting at position 2484 of SEQ ID NO: 316981
aaagccuguccagagucau

SEQ ID NO: 455164 - RNA, 19 nt, Artificial Sequence
  Description of Artificial Sequence: Synthetic oligonucleotide
  Antisense Strand to SEQ ID NO: 455163
augacucuggacaggcuuu

SEQ ID NO: 455165 - RNA, 19 nt, Artificial Sequence
  Description of Artificial Sequence: Synthetic oligonucleotide
  Sense strand starting at position 2490 of SEQ ID NO: 316981
uguccagagucauuaaagu

SEQ ID NO: 455166 - RNA, 19 nt, Artificial Sequence
  Description of Artificial Sequence: Synthetic oligonucleotide
  Antisense Strand to SEQ ID NO: 455165
acuuuaaugacucuggaca

SEQ ID NO: 455167 - RNA, 19 nt, Artificial Sequence
  Description of Artificial Sequence: Synthetic oligonucleotide
  Sense strand starting at position 2507 of SEQ ID NO: 316981
guaauuaaguaagccuuua

SEQ ID NO: 455168 - RNA, 19 nt, Artificial Sequence
  Description of Artificial Sequence: Synthetic oligonucleotide
  Antisense Strand to SEQ ID NO: 455167
uaaaggcuuacuuaauuac

SEQ ID NO: 455169 - RNA, 19 nt, Artificial Sequence
  Description of Artificial Sequence: Synthetic oligonucleotide
  Sense strand starting at position 2643 of SEQ ID NO: 316981
cgcuuuauuuguccggaca

SEQ ID NO: 455170 - RNA, 19 nt, Artificial Sequence
  Description of Artificial Sequence: Synthetic oligonucleotide
  Antisense Strand to SEQ ID NO: 455169
uguccggacaaauaaagcg

SEQ ID NO: 455171 - RNA, 19 nt, Artificial Sequence
  Description of Artificial Sequence: Synthetic oligonucleotide
  Sense strand starting at position 2644 of SEQ ID NO: 316981
gcuuuauuuguccggacau

SEQ ID NO: 455172 - RNA, 19 nt, Artificial Sequence
  Description of Artificial Sequence: Synthetic oligonucleotide
  Antisense Strand to SEQ ID NO: 455171
auguccggacaaauaaagc

SEQ ID NO: 455173 - RNA, 19 nt, Artificial Sequence
  Description of Artificial Sequence: Synthetic oligonucleotide
  Sense strand starting at position 3138 of SEQ ID NO: 316981
uggcuuugucagggagggu

SEQ ID NO: 455174 - RNA, 19 nt, Artificial Sequence
  Description of Artificial Sequence: Synthetic oligonucleotide
  Antisense Strand to SEQ ID NO: 455173
acccucccugacaaagcca

SEQ ID NO: 455175 - RNA, 19 nt, Artificial Sequence
  Description of Artificial Sequence: Synthetic oligonucleotide
  Sense strand starting at position 3157 of SEQ ID NO: 316981
gaagccuucugaucgaauu

SEQ ID NO: 455176 - RNA, 19 nt, Artificial Sequence
  Description of Artificial Sequence: Synthetic oligonucleotide
  Antisense Strand to SEQ ID NO: 455175
aauucgaucagaaggcuuc

SEQ ID NO: 455177 - RNA, 19 nt, Artificial Sequence
  Description of Artificial Sequence: Synthetic oligonucleotide
  Sense strand starting at position 3169 of SEQ ID NO: 316981
ucgaauuaacagcauguuu

SEQ ID NO: 455178 - RNA, 19 nt, Artificial Sequence
  Description of Artificial Sequence: Synthetic oligonucleotide
  Antisense Strand to SEQ ID NO: 455177
aaacaugcuguuaauucga

SEQ ID NO: 455179 - RNA, 19 nt, Artificial Sequence
  Description of Artificial Sequence: Synthetic oligonucleotide
  Sense strand starting at position 3193 of SEQ ID NO: 316981
cgguaaaugucauuagaaa

SEQ ID NO: 455180 - RNA, 19 nt, Artificial Sequence
  Description of Artificial Sequence: Synthetic oligonucleotide
  Antisense Strand to SEQ ID NO: 455179
uuucuaaugacauuuaccg

SEQ ID NO: 455181 - RNA, 19 nt, Artificial Sequence
  Description of Artificial Sequence: Synthetic oligonucleotide
  Sense strand starting at position 3212 of SEQ ID NO: 316981
gggagaaacaaucgcgcuu

SEQ ID NO: 455182 - RNA, 19 nt, Artificial Sequence
  Description of Artificial Sequence: Synthetic oligonucleotide
  Antisense Strand to SEQ ID NO: 455181
aagcgcgauuguuucuccc

SEQ ID NO: 455183 - RNA, 19 nt, Artificial Sequence
  Description of Artificial Sequence: Synthetic oligonucleotide
  Sense strand starting at position 3228 of SEQ ID NO: 316981
cuuagagggcucugaguaa

SEQ ID NO: 455184 - RNA, 19 nt, Artificial Sequence
  Description of Artificial Sequence: Synthetic oligonucleotide
  Antisense Strand to SEQ ID NO: 455183
uuacucagagcccucuaag

SEQ ID NO: 455185 - RNA, 19 nt, Artificial Sequence
  Description of Artificial Sequence: Synthetic oligonucleotide
  Sense strand starting at position 3364 of SEQ ID NO: 316981
cuugaauacguuuaaucca

SEQ ID NO: 455186 - RNA, 19 nt, Artificial Sequence
  Description of Artificial Sequence: Synthetic oligonucleotide
  Antisense Strand to SEQ ID NO: 455185
uggauuaaacguauucaag

SEQ ID NO: 455187 - RNA, 19 nt, Artificial Sequence
  Description of Artificial Sequence: Synthetic oligonucleotide
  Sense strand starting at position 3372 of SEQ ID NO: 316981
cguuuaauccaacgauugu

SEQ ID NO: 455188 - RNA, 19 nt, Artificial Sequence
  Description of Artificial Sequence: Synthetic oligonucleotide
  Antisense Strand to SEQ ID NO: 455187
acaaucguuggauuaaacg

SEQ ID NO: 455189 - RNA, 19 nt, Artificial Sequence
  Description of Artificial Sequence: Synthetic oligonucleotide
  Sense strand starting at position 3533 of SEQ ID NO: 316981
uugggaaguugaucucuuu

SEQ ID NO: 455190 - RNA, 19 nt, Artificial Sequence
  Description of Artificial Sequence: Synthetic oligonucleotide
  Antisense Strand to SEQ ID NO: 455189
aaagagaucaacuucccaa

SEQ ID NO: 455191 - RNA, 19 nt, Artificial Sequence
  Description of Artificial Sequence: Synthetic oligonucleotide
  Sense strand starting at position 3813 of SEQ ID NO: 316981
gggugagcuuucuugcaga

SEQ ID NO: 455192 - RNA, 19 nt, Artificial Sequence
  Description of Artificial Sequence: Synthetic oligonucleotide
  Antisense Strand to SEQ ID NO: 455191
ucugcaagaaagcucaccc

SEQ ID NO: 455193 - RNA, 19 nt, Artificial Sequence
  Description of Artificial Sequence: Synthetic oligonucleotide
  Sense strand starting at position 3818 of SEQ ID NO: 316981
agcuuucuugcagauugaa

SEQ ID NO: 455194 - RNA, 19 nt, Artificial Sequence
  Description of Artificial Sequence: Synthetic oligonucleotide
  Antisense Strand to SEQ ID NO: 455193
uucaaucugcaagaaagcu

SEQ ID NO: 455195 - RNA, 19 nt, Artificial Sequence
  Description of Artificial Sequence: Synthetic oligonucleotide
  Sense strand starting at position 3920 of SEQ ID NO: 316981
ugagaccgcuucucagauu

SEQ ID NO: 455196 - RNA, 19 nt, Artificial Sequence
  Description of Artificial Sequence: Synthetic oligonucleotide
  Antisense Strand to SEQ ID NO: 455195
aaucugagaagcggucuca

SEQ ID NO: 455197 - RNA, 19 nt, Artificial Sequence
  Description of Artificial Sequence: Synthetic oligonucleotide
  Sense strand starting at position 3921 of SEQ ID NO: 316981
gagaccgcuucucagauuu

SEQ ID NO: 455198 - RNA, 19 nt, Artificial Sequence
  Description of Artificial Sequence: Synthetic oligonucleotide
  Antisense Strand to SEQ ID NO: 455197
aaaucugagaagcggucuc

SEQ ID NO: 455199 - RNA, 19 nt, Artificial Sequence
  Description of Artificial Sequence: Synthetic oligonucleotide
  Sense strand starting at position 3979 of SEQ ID NO: 316981
cucuguucugcagggagau

SEQ ID NO: 455200 - RNA, 19 nt, Artificial Sequence
  Description of Artificial Sequence: Synthetic oligonucleotide
  Antisense Strand to SEQ ID NO: 455199
aucucccugcagaacagag

SEQ ID NO: 455201 - RNA, 19 nt, Artificial Sequence
  Description of Artificial Sequence: Synthetic oligonucleotide
  Sense strand starting at position 55 of SEQ ID NO: 316982
ucccauucgaucuggagaa

SEQ ID NO: 455202 - RNA, 19 nt, Artificial Sequence
  Description of Artificial Sequence: Synthetic oligonucleotide
  Antisense Strand to SEQ ID NO: 455201
uucuccagaucgaauggga

SEQ ID NO: 455203 - RNA, 19 nt, Artificial Sequence
  Description of Artificial Sequence: Synthetic oligonucleotide
  Sense strand starting at position 125 of SEQ ID NO: 316982
ggguacuacuacucucauu

SEQ ID NO: 455204 - RNA, 19 nt, Artificial Sequence
  Description of Artificial Sequence: Synthetic oligonucleotide
  Antisense Strand to SEQ ID NO: 455203
aaugagaguaguaguaccc

SEQ ID NO: 455205 - RNA, 19 nt, Artificial Sequence
  Description of Artificial Sequence: Synthetic oligonucleotide
  Sense strand starting at position 315 of SEQ ID NO: 316982
gcuagugcuaaugugcuaa

SEQ ID NO: 455206 - RNA, 19 nt, Artificial Sequence
  Description of Artificial Sequence: Synthetic oligonucleotide
  Antisense Strand to SEQ ID NO: 455205
uuagcacauuagcacuagc

SEQ ID NO: 455207 - RNA, 19 nt, Artificial Sequence
  Description of Artificial Sequence: Synthetic oligonucleotide
  Sense strand starting at position 414 of SEQ ID NO: 316982
gaaaguuccuagccucgaa

SEQ ID NO: 455208 - RNA, 19 nt, Artificial Sequence
  Description of Artificial Sequence: Synthetic oligonucleotide
  Antisense Strand to SEQ ID NO: 455207
uucgaggcuaggaacuuuc

SEQ ID NO: 455209 - RNA, 19 nt, Artificial Sequence
  Description of Artificial Sequence: Synthetic oligonucleotide
  Sense strand starting at position 435 of SEQ ID NO: 316982
cgguacgaccaugauguaa

SEQ ID NO: 455210 - RNA, 19 nt, Artificial Sequence
  Description of Artificial Sequence: Synthetic oligonucleotide
  Antisense Strand to SEQ ID NO: 455209
uuacaucauggucguaccg

SEQ ID NO: 455211 - RNA, 19 nt, Artificial Sequence
  Description of Artificial Sequence: Synthetic oligonucleotide
  Sense strand starting at position 472 of SEQ ID NO: 316982
uuugcuuuaggauaugcaa

SEQ ID NO: 455212 - RNA, 19 nt, Artificial Sequence
  Description of Artificial Sequence: Synthetic oligonucleotide
  Antisense Strand to SEQ ID NO: 455211
uugcauauccuaaagcaaa

SEQ ID NO: 455213 - RNA, 19 nt, Artificial Sequence
  Description of Artificial Sequence: Synthetic oligonucleotide
  Sense strand starting at position 573 of SEQ ID NO: 316982
caguaaucugccgacuaaa

SEQ ID NO: 455214 - RNA, 19 nt, Artificial Sequence
  Description of Artificial Sequence: Synthetic oligonucleotide
  Antisense Strand to SEQ ID NO: 455213
uuuagucggcagauuacug

SEQ ID NO: 455215 - RNA, 19 nt, Artificial Sequence
  Description of Artificial Sequence: Synthetic oligonucleotide
  Sense strand starting at position 636 of SEQ ID NO: 316982
uucucucaagucuagaguu

SEQ ID NO: 455216 - RNA, 19 nt, Artificial Sequence
  Description of Artificial Sequence: Synthetic oligonucleotide
  Antisense Strand to SEQ ID NO: 455215
aacucuagacuugagagaa

SEQ ID NO: 455217 - RNA, 19 nt, Artificial Sequence
  Description of Artificial Sequence: Synthetic oligonucleotide
  Sense strand starting at position 638 of SEQ ID NO: 316982
cucucaagucuagaguuga

SEQ ID NO: 455218 - RNA, 19 nt, Artificial Sequence
  Description of Artificial Sequence: Synthetic oligonucleotide
  Antisense Strand to SEQ ID NO: 455217
ucaacucuagacuugagag

SEQ ID NO: 455219 - RNA, 19 nt, Artificial Sequence
  Description of Artificial Sequence: Synthetic oligonucleotide
  Sense strand starting at position 752 of SEQ ID NO: 316982
aagagagcucuugaaucgu

SEQ ID NO: 455220 - RNA, 19 nt, Artificial Sequence
  Description of Artificial Sequence: Synthetic oligonucleotide
  Antisense Strand to SEQ ID NO: 455219
acgauucaagagcucucuu

SEQ ID NO: 455221 - RNA, 19 nt, Artificial Sequence
  Description of Artificial Sequence: Synthetic oligonucleotide
  Sense strand starting at position 763 of SEQ ID NO: 316982
ugaaucgucuuucccaaag

SEQ ID NO: 455222 - RNA, 19 nt, Artificial Sequence
  Description of Artificial Sequence: Synthetic oligonucleotide
  Antisense Strand to SEQ ID NO: 455221
cuuugggaaagacgauuca

SEQ ID NO: 455223 - RNA, 19 nt, Artificial Sequence
  Description of Artificial Sequence: Synthetic oligonucleotide
  Sense strand starting at position 782 of SEQ ID NO: 316982
cauucuaugcgugaugaau

SEQ ID NO: 455224 - RNA, 19 nt, Artificial Sequence
  Description of Artificial Sequence: Synthetic oligonucleotide
  Antisense Strand to SEQ ID NO: 455223
auucaucacgcauagaaug

SEQ ID NO: 455225 - RNA, 19 nt, Artificial Sequence
  Description of Artificial Sequence: Synthetic oligonucleotide
  Sense strand starting at position 829 of SEQ ID NO: 316982
ugaauuagguacuuccuaa

SEQ ID NO: 455226 - RNA, 19 nt, Artificial Sequence
  Description of Artificial Sequence: Synthetic oligonucleotide
  Antisense Strand to SEQ ID NO: 455225
uuaggaaguaccuaauuca

SEQ ID NO: 455227 - RNA, 19 nt, Artificial Sequence
  Description of Artificial Sequence: Synthetic oligonucleotide
  Sense strand starting at position 926 of SEQ ID NO: 316982
auacuuauucccuggagcu

SEQ ID NO: 455228 - RNA, 19 nt, Artificial Sequence
  Description of Artificial Sequence: Synthetic oligonucleotide
  Antisense Strand to SEQ ID NO: 455227
agcuccagggaauaaguau

SEQ ID NO: 455229 - RNA, 19 nt, Artificial Sequence
  Description of Artificial Sequence: Synthetic oligonucleotide
  Sense strand starting at position 928 of SEQ ID NO: 316982
acuuauucccuggagcuca

SEQ ID NO: 455230 - RNA, 19 nt, Artificial Sequence
  Description of Artificial Sequence: Synthetic oligonucleotide
  Antisense Strand to SEQ ID NO: 455229
ugagcuccagggaauaagu

SEQ ID NO: 455231 - RNA, 19 nt, Artificial Sequence
  Description of Artificial Sequence: Synthetic oligonucleotide
  Sense strand starting at position 1477 of SEQ ID NO: 316982
ugacuuucugcgucgcaau

SEQ ID NO: 455232 - RNA, 19 nt, Artificial Sequence
  Description of Artificial Sequence: Synthetic oligonucleotide
  Antisense Strand to SEQ ID NO: 455231
auugcgacgcagaaaguca

SEQ ID NO: 455233 - RNA, 19 nt, Artificial Sequence
  Description of Artificial Sequence: Synthetic oligonucleotide
  Sense strand starting at position 2178 of SEQ ID NO: 316982
cgggugugucagccgaaau

SEQ ID NO: 455234 - RNA, 19 nt, Artificial Sequence
  Description of Artificial Sequence: Synthetic oligonucleotide
  Antisense Strand to SEQ ID NO: 455233
auuucggcugacacacccg

SEQ ID NO: 455235 - RNA, 19 nt, Artificial Sequence
  Description of Artificial Sequence: Synthetic oligonucleotide
  Sense strand starting at position 2190 of SEQ ID NO: 316982
ccgaaaucggacugcaaga

SEQ ID NO: 455236 - RNA, 19 nt, Artificial Sequence
  Description of Artificial Sequence: Synthetic oligonucleotide
  Antisense Strand to SEQ ID NO: 455235
ucuugcaguccgauuucgg

SEQ ID NO: 455237 - RNA, 19 nt, Artificial Sequence
  Description of Artificial Sequence: Synthetic oligonucleotide
  Sense strand starting at position 2362 of SEQ ID NO: 316982
gugacaauugagggagagu

SEQ ID NO: 455238 - RNA, 19 nt, Artificial Sequence
  Description of Artificial Sequence: Synthetic oligonucleotide
  Antisense Strand to SEQ ID NO: 455237
acucucccucaauugucac

SEQ ID NO: 455239 - RNA, 19 nt, Artificial Sequence
  Description of Artificial Sequence: Synthetic oligonucleotide
  Sense strand starting at position 2579 of SEQ ID NO: 316982
ggagcauagcaagaagagu

SEQ ID NO: 455240 - RNA, 19 nt, Artificial Sequence
  Description of Artificial Sequence: Synthetic oligonucleotide
  Antisense Strand to SEQ ID NO: 455239
acucuucuugcuaugcucc

SEQ ID NO: 455241 - RNA, 19 nt, Artificial Sequence
  Description of Artificial Sequence: Synthetic oligonucleotide
  Sense strand starting at position 2596 of SEQ ID NO: 316982
gucugagcaccagaucuua

SEQ ID NO: 455242 - RNA, 19 nt, Artificial Sequence
  Description of Artificial Sequence: Synthetic oligonucleotide
  Antisense Strand to SEQ ID NO: 455241
uaagaucuggugcucagac

SEQ ID NO: 455243 - RNA, 19 nt, Artificial Sequence
  Description of Artificial Sequence: Synthetic oligonucleotide
  Sense strand starting at position 2764 of SEQ ID NO: 316982
ugaucugauccacagcuaa

SEQ ID NO: 455244 - RNA, 19 nt, Artificial Sequence
  Description of Artificial Sequence: Synthetic oligonucleotide
  Antisense Strand to SEQ ID NO: 455243
uuagcuguggaucagauca

SEQ ID NO: 455245 - RNA, 19 nt, Artificial Sequence
  Description of Artificial Sequence: Synthetic oligonucleotide
  Sense strand starting at position 2931 of SEQ ID NO: 316982
gcccuuugaggauagauuc

SEQ ID NO: 455246 - RNA, 19 nt, Artificial Sequence
  Description of Artificial Sequence: Synthetic oligonucleotide
  Antisense Strand to SEQ ID NO: 455245
gaaucuauccucaaagggc

SEQ ID NO: 455247 - RNA, 19 nt, Artificial Sequence
  Description of Artificial Sequence: Synthetic oligonucleotide
  Sense strand starting at position 2981 of SEQ ID NO: 316982
gcaaucgcucguccugaga

SEQ ID NO: 455248 - RNA, 19 nt, Artificial Sequence
  Description of Artificial Sequence: Synthetic oligonucleotide
  Antisense Strand to SEQ ID NO: 455247
ucucaggacgagcgauugc

SEQ ID NO: 455249 - RNA, 19 nt, Artificial Sequence
  Description of Artificial Sequence: Synthetic oligonucleotide
  Sense strand starting at position 3085 of SEQ ID NO: 316982
ugagcccuccgugaaauaa

SEQ ID NO: 455250 - RNA, 19 nt, Artificial Sequence
  Description of Artificial Sequence: Synthetic oligonucleotide
  Antisense Strand to SEQ ID NO: 455249
uuauuucacggagggcuca

SEQ ID NO: 455251 - RNA, 19 nt, Artificial Sequence
  Description of Artificial Sequence: Synthetic oligonucleotide
  Sense strand starting at position 3094 of SEQ ID NO: 316982
cgugaaauaaugcaaauug

SEQ ID NO: 455252 - RNA, 19 nt, Artificial Sequence
  Description of Artificial Sequence: Synthetic oligonucleotide
  Antisense Strand to SEQ ID NO: 455251
caauuugcauuauuucacg

SEQ ID NO: 455253 - RNA, 19 nt, Artificial Sequence
  Description of Artificial Sequence: Synthetic oligonucleotide
  Sense strand starting at position 3103 of SEQ ID NO: 316982
augcaaauuguccaguaca

SEQ ID NO: 455254 - RNA, 19 nt, Artificial Sequence
  Description of Artificial Sequence: Synthetic oligonucleotide
  Antisense Strand to SEQ ID NO: 455253
uguacuggacaauuugcau

SEQ ID NO: 455255 - RNA, 19 nt, Artificial Sequence
  Description of Artificial Sequence: Synthetic oligonucleotide
  Sense strand starting at position 3143 of SEQ ID NO: 316982
agcagaaucuaaguuauca

SEQ ID NO: 455256 - RNA, 19 nt, Artificial Sequence
  Description of Artificial Sequence: Synthetic oligonucleotide
  Antisense Strand to SEQ ID NO: 455255
ugauaacuuagauucugcu

SEQ ID NO: 455257 - RNA, 19 nt, Artificial Sequence
  Description of Artificial Sequence: Synthetic oligonucleotide
  Sense strand starting at position 3147 of SEQ ID NO: 316982
gaaucuaaguuaucagguc

SEQ ID NO: 455258 - RNA, 19 nt, Artificial Sequence
  Description of Artificial Sequence: Synthetic oligonucleotide
  Antisense Strand to SEQ ID NO: 455257
gaccugauaacuuagauuc

SEQ ID NO: 455259 - RNA, 19 nt, Artificial Sequence
  Description of Artificial Sequence: Synthetic oligonucleotide
  Sense strand starting at position 3155 of SEQ ID NO: 316982
guuaucaggucaucuaaga

SEQ ID NO: 455260 - RNA, 19 nt, Artificial Sequence
  Description of Artificial Sequence: Synthetic oligonucleotide
  Antisense Strand to SEQ ID NO: 455259
ucuuagaugaccugauaac

SEQ ID NO: 455261 - RNA, 19 nt, Artificial Sequence
  Description of Artificial Sequence: Synthetic oligonucleotide
  Sense strand starting at position 3186 of SEQ ID NO: 316982
cuuugaaauuuggaucaca

SEQ ID NO: 455262 - RNA, 19 nt, Artificial Sequence
  Description of Artificial Sequence: Synthetic oligonucleotide
  Antisense Strand to SEQ ID NO: 455261
ugugauccaaauuucaaag

SEQ ID NO: 455263 - RNA, 19 nt, Artificial Sequence
  Description of Artificial Sequence: Synthetic oligonucleotide
  Sense strand starting at position 3204 of SEQ ID NO: 316982
acuugacacguuuagaaac

SEQ ID NO: 455264 - RNA, 19 nt, Artificial Sequence
  Description of Artificial Sequence: Synthetic oligonucleotide
  Antisense Strand to SEQ ID NO: 455263
guuucuaaacgugucaagu

SEQ ID NO: 455265 - RNA, 19 nt, Artificial Sequence
  Description of Artificial Sequence: Synthetic oligonucleotide
  Sense strand starting at position 3674 of SEQ ID NO: 316982
cugguuaaaugcccaaaga

SEQ ID NO: 455266 - RNA, 19 nt, Artificial Sequence
  Description of Artificial Sequence: Synthetic oligonucleotide
  Antisense Strand to SEQ ID NO: 455265
ucuuugggcauuuaaccag

SEQ ID NO: 455267 - RNA, 19 nt, Artificial Sequence
  Description of Artificial Sequence: Synthetic oligonucleotide
  Sense strand starting at position 3721 of SEQ ID NO: 316982
gguacuugcaaaggagaaa

SEQ ID NO: 455268 - RNA, 19 nt, Artificial Sequence
  Description of Artificial Sequence: Synthetic oligonucleotide
  Antisense Strand to SEQ ID NO: 455267
uuucuccuuugcaaguacc

SEQ ID NO: 455269 - RNA, 19 nt, Artificial Sequence
  Description of Artificial Sequence: Synthetic oligonucleotide
  Sense strand starting at position 3758 of SEQ ID NO: 316982
aggugucacauaugagguu

SEQ ID NO: 455270 - RNA, 19 nt, Artificial Sequence
  Description of Artificial Sequence: Synthetic oligonucleotide
  Antisense Strand to SEQ ID NO: 455269
aaccucauaugugacaccu

SEQ ID NO: 455271 - RNA, 19 nt, Artificial Sequence
  Description of Artificial Sequence: Synthetic oligonucleotide
  Sense strand starting at position 3765 of SEQ ID NO: 316982
acauaugagguuuguaauc

SEQ ID NO: 455272 - RNA, 19 nt, Artificial Sequence
  Description of Artificial Sequence: Synthetic oligonucleotide
  Antisense Strand to SEQ ID NO: 455271
gauuacaaaccucauaugu

SEQ ID NO: 455273 - RNA, 19 nt, Artificial Sequence
  Description of Artificial Sequence: Synthetic oligonucleotide
  Sense strand starting at position 3770 of SEQ ID NO: 316982
ugagguuuguaaucaauca

SEQ ID NO: 455274 - RNA, 19 nt, Artificial Sequence
  Description of Artificial Sequence: Synthetic oligonucleotide
  Antisense Strand to SEQ ID NO: 455273
ugauugauuacaaaccuca

SEQ ID NO: 455275 - RNA, 19 nt, Artificial Sequence
  Description of Artificial Sequence: Synthetic oligonucleotide
  Sense strand starting at position 3785 of SEQ ID NO: 316982
aucaguguuuggguugaua

SEQ ID NO: 455276 - RNA, 19 nt, Artificial Sequence
  Description of Artificial Sequence: Synthetic oligonucleotide
  Antisense Strand to SEQ ID NO: 455275
uaucaacccaaacacugau

SEQ ID NO: 455277 - RNA, 19 nt, Artificial Sequence
  Description of Artificial Sequence: Synthetic oligonucleotide
  Sense strand starting at position 3788 of SEQ ID NO: 316982
aguguuuggguugauaugu

SEQ ID NO: 455278 - RNA, 19 nt, Artificial Sequence
  Description of Artificial Sequence: Synthetic oligonucleotide
  Antisense Strand to SEQ ID NO: 455277
acauaucaacccaaacacu

SEQ ID NO: 455279 - RNA, 19 nt, Artificial Sequence
  Description of Artificial Sequence: Synthetic oligonucleotide
  Sense strand starting at position 3789 of SEQ ID NO: 316982
guguuuggguugauauguc

SEQ ID NO: 455280 - RNA, 19 nt, Artificial Sequence
  Description of Artificial Sequence: Synthetic oligonucleotide
  Antisense Strand to SEQ ID NO: 455279
gacauaucaacccaaacac

SEQ ID NO: 455281 - RNA, 19 nt, Artificial Sequence
  Description of Artificial Sequence: Synthetic oligonucleotide
  Sense strand starting at position 48 of SEQ ID NO: 316983
gguucuuguuuauuaagac

SEQ ID NO: 455282 - RNA, 19 nt, Artificial Sequence
  Description of Artificial Sequence: Synthetic oligonucleotide
  Antisense Strand to SEQ ID NO: 455281
gucuuaauaaacaagaacc

SEQ ID NO: 455283 - RNA, 19 nt, Artificial Sequence
  Description of Artificial Sequence: Synthetic oligonucleotide
  Sense strand starting at position 54 of SEQ ID NO: 316983
uguuuauuaagacgaacga

SEQ ID NO: 455284 - RNA, 19 nt, Artificial Sequence
  Description of Artificial Sequence: Synthetic oligonucleotide
  Antisense Strand to SEQ ID NO: 455283
ucguucgucuuaauaaaca

SEQ ID NO: 455285 - RNA, 19 nt, Artificial Sequence
  Description of Artificial Sequence: Synthetic oligonucleotide
  Sense strand starting at position 55 of SEQ ID NO: 316983
guuuauuaagacgaacgaa

SEQ ID NO: 455286 - RNA, 19 nt, Artificial Sequence
  Description of Artificial Sequence: Synthetic oligonucleotide
  Antisense Strand to SEQ ID NO: 455285
uucguucgucuuaauaaac

SEQ ID NO: 455287 - RNA, 19 nt, Artificial Sequence
  Description of Artificial Sequence: Synthetic oligonucleotide
  Sense strand starting at position 58 of SEQ ID NO: 316983
uauuaagacgaacgaaauu

SEQ ID NO: 455288 - RNA, 19 nt, Artificial Sequence
  Description of Artificial Sequence: Synthetic oligonucleotide
  Antisense Strand to SEQ ID NO: 455287
aauuucguucgucuuaaua

SEQ ID NO: 455289 - RNA, 19 nt, Artificial Sequence
  Description of Artificial Sequence: Synthetic oligonucleotide
  Sense strand starting at position 334 of SEQ ID NO: 316983
uucugaaguuaagagauua

SEQ ID NO: 455290 - RNA, 19 nt, Artificial Sequence
  Description of Artificial Sequence: Synthetic oligonucleotide
  Antisense Strand to SEQ ID NO: 455289
uaaucucuuaacuucagaa

SEQ ID NO: 455291 - RNA, 19 nt, Artificial Sequence
  Description of Artificial Sequence: Synthetic oligonucleotide
  Sense strand starting at position 347 of SEQ ID NO: 316983
agauuaaacuguccacuag

SEQ ID NO: 455292 - RNA, 19 nt, Artificial Sequence
  Description of Artificial Sequence: Synthetic oligonucleotide
  Antisense Strand to SEQ ID NO: 455291
cuaguggacaguuuaaucu

SEQ ID NO: 455293 - RNA, 19 nt, Artificial Sequence
  Description of Artificial Sequence: Synthetic oligonucleotide
  Sense strand starting at position 449 of SEQ ID NO: 316983
aauagaaucuauucgugua

SEQ ID NO: 455294 - RNA, 19 nt, Artificial Sequence
  Description of Artificial Sequence: Synthetic oligonucleotide
  Antisense Strand to SEQ ID NO: 455293
uacacgaauagauucuauu

SEQ ID NO: 455295 - RNA, 19 nt, Artificial Sequence
  Description of Artificial Sequence: Synthetic oligonucleotide
  Sense strand starting at position 451 of SEQ ID NO: 316983
uagaaucuauucguguaaa

SEQ ID NO: 455296 - RNA, 19 nt, Artificial Sequence
  Description of Artificial Sequence: Synthetic oligonucleotide
  Antisense Strand to SEQ ID NO: 455295
uuuacacgaauagauucua

SEQ ID NO: 455297 - RNA, 19 nt, Artificial Sequence
  Description of Artificial Sequence: Synthetic oligonucleotide
  Sense strand starting at position 521 of SEQ ID NO: 316983
gguaauaagaaauggucca

SEQ ID NO: 455298 - RNA, 19 nt, Artificial Sequence
  Description of Artificial Sequence: Synthetic oligonucleotide
  Antisense Strand to SEQ ID NO: 455297
uggaccauuucuuauuacc

SEQ ID NO: 455299 - RNA, 19 nt, Artificial Sequence
  Description of Artificial Sequence: Synthetic oligonucleotide
  Sense strand starting at position 557 of SEQ ID NO: 316983
uuuaaagagucucagcauu

SEQ ID NO: 455300 - RNA, 19 nt, Artificial Sequence
  Description of Artificial Sequence: Synthetic oligonucleotide
  Antisense Strand to SEQ ID NO: 455299
aaugcugagacucuuuaaa

SEQ ID NO: 455301 - RNA, 19 nt, Artificial Sequence
  Description of Artificial Sequence: Synthetic oligonucleotide
  Sense strand starting at position 599 of SEQ ID NO: 316983
guauuaagaaaugguauug

SEQ ID NO: 455302 - RNA, 19 nt, Artificial Sequence
  Description of Artificial Sequence: Synthetic oligonucleotide
  Antisense Strand to SEQ ID NO: 455301
caauaccauuucuuaauac

SEQ ID NO: 455303 - RNA, 19 nt, Artificial Sequence
  Description of Artificial Sequence: Synthetic oligonucleotide
  Sense strand starting at position 604 of SEQ ID NO: 316983
aagaaaugguauugggaca

SEQ ID NO: 455304 - RNA, 19 nt, Artificial Sequence
  Description of Artificial Sequence: Synthetic oligonucleotide
  Antisense Strand to SEQ ID NO: 455303
ugucccaauaccauuucuu

SEQ ID NO: 455305 - RNA, 19 nt, Artificial Sequence
  Description of Artificial Sequence: Synthetic oligonucleotide
  Sense strand starting at position 611 of SEQ ID NO: 316983
gguauugggacauaggcua

SEQ ID NO: 455306 - RNA, 19 nt, Artificial Sequence
  Description of Artificial Sequence: Synthetic oligonucleotide
  Antisense Strand to SEQ ID NO: 455305
uagccuaugucccaauacc

SEQ ID NO: 455307 - RNA, 19 nt, Artificial Sequence
  Description of Artificial Sequence: Synthetic oligonucleotide
  Sense strand starting at position 1051 of SEQ ID NO: 316983
auaaacucgcagcaagaua

SEQ ID NO: 455308 - RNA, 19 nt, Artificial Sequence
  Description of Artificial Sequence: Synthetic oligonucleotide
  Antisense Strand to SEQ ID NO: 455307
uaucuugcugcgaguuuau

SEQ ID NO: 455309 - RNA, 19 nt, Artificial Sequence
  Description of Artificial Sequence: Synthetic oligonucleotide
  Sense strand starting at position 1187 of SEQ ID NO: 316983
gagaacgacucccaaaguu

SEQ ID NO: 455310 - RNA, 19 nt, Artificial Sequence
  Description of Artificial Sequence: Synthetic oligonucleotide
  Antisense Strand to SEQ ID NO: 455309
aacuuugggagucguucuc

SEQ ID NO: 455311 - RNA, 19 nt, Artificial Sequence
  Description of Artificial Sequence: Synthetic oligonucleotide
  Sense strand starting at position 1208 of SEQ ID NO: 316983
agcagugacuacuuucuca

SEQ ID NO: 455312 - RNA, 19 nt, Artificial Sequence
  Description of Artificial Sequence: Synthetic oligonucleotide
  Antisense Strand to SEQ ID NO: 455311
ugagaaaguagucacugcu

SEQ ID NO: 455313 - RNA, 19 nt, Artificial Sequence
  Description of Artificial Sequence: Synthetic oligonucleotide
  Sense strand starting at position 1278 of SEQ ID NO: 316983
acagaaaccuaugagaaag

SEQ ID NO: 455314 - RNA, 19 nt, Artificial Sequence
  Description of Artificial Sequence: Synthetic oligonucleotide
  Antisense Strand to SEQ ID NO: 455313
cuuucucauagguuucugu

SEQ ID NO: 455315 - RNA, 19 nt, Artificial Sequence
  Description of Artificial Sequence: Synthetic oligonucleotide
  Sense strand starting at position 2119 of SEQ ID NO: 316983
aggaaacuguaaugagagu

SEQ ID NO: 455316 - RNA, 19 nt, Artificial Sequence
  Description of Artificial Sequence: Synthetic oligonucleotide
  Antisense Strand to SEQ ID NO: 455315
acucucauuacaguuuccu

SEQ ID NO: 455317 - RNA, 19 nt, Artificial Sequence
  Description of Artificial Sequence: Synthetic oligonucleotide
  Sense strand starting at position 2125 of SEQ ID NO: 316983
cuguaaugagagugacuug

SEQ ID NO: 455318 - RNA, 19 nt, Artificial Sequence
  Description of Artificial Sequence: Synthetic oligonucleotide
  Antisense Strand to SEQ ID NO: 455317
caagucacucucauuacag

SEQ ID NO: 455319 - RNA, 19 nt, Artificial Sequence
  Description of Artificial Sequence: Synthetic oligonucleotide
  Sense strand starting at position 2787 of SEQ ID NO: 316983
gcaacagugaugugcuuua

SEQ ID NO: 455320 - RNA, 19 nt, Artificial Sequence
  Description of Artificial Sequence: Synthetic oligonucleotide
  Antisense Strand to SEQ ID NO: 455319
uaaagcacaucacuguugc

SEQ ID NO: 455321 - RNA, 19 nt, Artificial Sequence
  Description of Artificial Sequence: Synthetic oligonucleotide
  Sense strand starting at position 2841 of SEQ ID NO: 316983
cuaagugaugucuggcuuu

SEQ ID NO: 455322 - RNA, 19 nt, Artificial Sequence
  Description of Artificial Sequence: Synthetic oligonucleotide
  Antisense Strand to SEQ ID NO: 455321
aaagccagacaucacuuag

SEQ ID NO: 455323 - RNA, 19 nt, Artificial Sequence
  Description of Artificial Sequence: Synthetic oligonucleotide
  Sense strand starting at position 2912 of SEQ ID NO: 316983
ucauuuguguuauuguuga

SEQ ID NO: 455324 - RNA, 19 nt, Artificial Sequence
  Description of Artificial Sequence: Synthetic oligonucleotide
  Antisense Strand to SEQ ID NO: 455323
ucaacaauaacacaaauga

SEQ ID NO: 455325 - RNA, 19 nt, Artificial Sequence
  Description of Artificial Sequence: Synthetic oligonucleotide
  Sense strand starting at position 2917 of SEQ ID NO: 316983
uguguuauuguugaauggu

SEQ ID NO: 455326 - RNA, 19 nt, Artificial Sequence
  Description of Artificial Sequence: Synthetic oligonucleotide
  Antisense Strand to SEQ ID NO: 455325
accauucaacaauaacaca

SEQ ID NO: 455327 - RNA, 19 nt, Artificial Sequence
  Description of Artificial Sequence: Synthetic oligonucleotide
  Sense strand starting at position 2920 of SEQ ID NO: 316983
guuauuguugaaugguagu

SEQ ID NO: 455328 - RNA, 19 nt, Artificial Sequence
  Description of Artificial Sequence: Synthetic oligonucleotide
  Antisense Strand to SEQ ID NO: 455327
acuaccauucaacaauaac

SEQ ID NO: 455329 - RNA, 19 nt, Artificial Sequence
  Description of Artificial Sequence: Synthetic oligonucleotide
  Sense strand starting at position 2926 of SEQ ID NO: 316983
guugaaugguagucuauca

SEQ ID NO: 455330 - RNA, 19 nt, Artificial Sequence
  Description of Artificial Sequence: Synthetic oligonucleotide
  Antisense Strand to SEQ ID NO: 455329
ugauagacuaccauucaac

SEQ ID NO: 455331 - RNA, 19 nt, Artificial Sequence
  Description of Artificial Sequence: Synthetic oligonucleotide
  Sense strand starting at position 2939 of SEQ ID NO: 316983
cuaucauauggguaagcca

SEQ ID NO: 455332 - RNA, 19 nt, Artificial Sequence
  Description of Artificial Sequence: Synthetic oligonucleotide
  Antisense Strand to SEQ ID NO: 455331
uggcuuacccauaugauag

SEQ ID NO: 455333 - RNA, 19 nt, Artificial Sequence
  Description of Artificial Sequence: Synthetic oligonucleotide
  Sense strand starting at position 2946 of SEQ ID NO: 316983
auggguaagccacaguuua

SEQ ID NO: 455334 - RNA, 19 nt, Artificial Sequence
  Description of Artificial Sequence: Synthetic oligonucleotide
  Antisense Strand to SEQ ID NO: 455333
uaaacuguggcuuacccau

SEQ ID NO: 455335 - RNA, 19 nt, Artificial Sequence
  Description of Artificial Sequence: Synthetic oligonucleotide
  Sense strand starting at position 3110 of SEQ ID NO: 316983
gcaggaggaucucuucuuu

SEQ ID NO: 455336 - RNA, 19 nt, Artificial Sequence
  Description of Artificial Sequence: Synthetic oligonucleotide
  Antisense Strand to SEQ ID NO: 455335
aaagaagagauccuccugc

SEQ ID NO: 455337 - RNA, 19 nt, Artificial Sequence
  Description of Artificial Sequence: Synthetic oligonucleotide
  Sense strand starting at position 3114 of SEQ ID NO: 316983
gaggaucucuucuuuguga

SEQ ID NO: 455338 - RNA, 19 nt, Artificial Sequence
  Description of Artificial Sequence: Synthetic oligonucleotide
  Antisense Strand to SEQ ID NO: 455337
ucacaaagaagagauccuc

SEQ ID NO: 455339 - RNA, 19 nt, Artificial Sequence
  Description of Artificial Sequence: Synthetic oligonucleotide
  Sense strand starting at position 3115 of SEQ ID NO: 316983
aggaucucuucuuugugaa

SEQ ID NO: 455340 - RNA, 19 nt, Artificial Sequence
  Description of Artificial Sequence: Synthetic oligonucleotide
  Antisense Strand to SEQ ID NO: 455339
uucacaaagaagagauccu

SEQ ID NO: 455341 - RNA, 19 nt, Artificial Sequence
  Description of Artificial Sequence: Synthetic oligonucleotide
  Sense strand starting at position 3116 of SEQ ID NO: 316983
ggaucucuucuuugugaag

SEQ ID NO: 455342 - RNA, 19 nt, Artificial Sequence
  Description of Artificial Sequence: Synthetic oligonucleotide
  Antisense Strand to SEQ ID NO: 455341
cuucacaaagaagagaucc

SEQ ID NO: 455343 - RNA, 19 nt, Artificial Sequence
  Description of Artificial Sequence: Synthetic oligonucleotide
  Sense strand starting at position 3228 of SEQ ID NO: 316983
auaccauguucuuuauuag

SEQ ID NO: 455344 - RNA, 19 nt, Artificial Sequence
  Description of Artificial Sequence: Synthetic oligonucleotide
  Antisense Strand to SEQ ID NO: 455343
cuaauaaagaacaugguau

SEQ ID NO: 455345 - RNA, 19 nt, Artificial Sequence
  Description of Artificial Sequence: Synthetic oligonucleotide
  Sense strand starting at position 3231 of SEQ ID NO: 316983
ccauguucuuuauuagcua

SEQ ID NO: 455346 - RNA, 19 nt, Artificial Sequence
  Description of Artificial Sequence: Synthetic oligonucleotide
  Antisense Strand to SEQ ID NO: 455345
uagcuaauaaagaacaugg

SEQ ID NO: 455347 - RNA, 19 nt, Artificial Sequence
  Description of Artificial Sequence: Synthetic oligonucleotide
  Sense strand starting at position 3238 of SEQ ID NO: 316983
cuuuauuagcuauacguuu

SEQ ID NO: 455348 - RNA, 19 nt, Artificial Sequence
  Description of Artificial Sequence: Synthetic oligonucleotide
  Antisense Strand to SEQ ID NO: 455347
aaacguauagcuaauaaag

SEQ ID NO: 455349 - RNA, 19 nt, Artificial Sequence
  Description of Artificial Sequence: Synthetic oligonucleotide
  Sense strand starting at position 3430 of SEQ ID NO: 316983
uguuaccuucuggaaguuu

SEQ ID NO: 455350 - RNA, 19 nt, Artificial Sequence
  Description of Artificial Sequence: Synthetic oligonucleotide
  Antisense Strand to SEQ ID NO: 455349
aaacuuccagaagguaaca

SEQ ID NO: 455351 - RNA, 19 nt, Artificial Sequence
  Description of Artificial Sequence: Synthetic oligonucleotide
  Sense strand starting at position 3666 of SEQ ID NO: 316983
agccuuaugcagcagggau

SEQ ID NO: 455352 - RNA, 19 nt, Artificial Sequence
  Description of Artificial Sequence: Synthetic oligonucleotide
  Antisense Strand to SEQ ID NO: 455351
aucccugcugcauaaggcu

SEQ ID NO: 455353 - RNA, 19 nt, Artificial Sequence
  Description of Artificial Sequence: Synthetic oligonucleotide
  Sense strand starting at position 3707 of SEQ ID NO: 316983
guguguuggccuguuauuc

SEQ ID NO: 455354 - RNA, 19 nt, Artificial Sequence
  Description of Artificial Sequence: Synthetic oligonucleotide
  Antisense Strand to SEQ ID NO: 455353
gaauaacaggccaacacac

SEQ ID NO: 455355 - RNA, 19 nt, Artificial Sequence
  Description of Artificial Sequence: Synthetic oligonucleotide
  Sense strand starting at position 3822 of SEQ ID NO: 316983
gccuaauuguuccugguca

SEQ ID NO: 455356 - RNA, 19 nt, Artificial Sequence
  Description of Artificial Sequence: Synthetic oligonucleotide
  Antisense Strand to SEQ ID NO: 455355
ugaccaggaacaauuaggc

SEQ ID NO: 455357 - RNA, 19 nt, Artificial Sequence
  Description of Artificial Sequence: Synthetic oligonucleotide
  Sense strand starting at position 3930 of SEQ ID NO: 316983
uggauuuccagucguucca

SEQ ID NO: 455358 - RNA, 19 nt, Artificial Sequence
  Description of Artificial Sequence: Synthetic oligonucleotide
  Antisense Strand to SEQ ID NO: 455357
uggaacgacuggaaaucca

SEQ ID NO: 455359 - RNA, 19 nt, Artificial Sequence
  Description of Artificial Sequence: Synthetic oligonucleotide
  Sense strand starting at position 3963 of SEQ ID NO: 316983
auggaauugccuuggcauc

SEQ ID NO: 455360 - RNA, 19 nt, Artificial Sequence
  Description of Artificial Sequence: Synthetic oligonucleotide
  Antisense Strand to SEQ ID NO: 455359
gaugccaaggcaauuccau

SEQ ID NO: 455361 - RNA, 19 nt, Artificial Sequence
  Description of Artificial Sequence: Synthetic oligonucleotide
  Sense strand starting at position 300 of SEQ ID NO: 316984
ggccuauuauguguauaua

SEQ ID NO: 455362 - RNA, 19 nt, Artificial Sequence
  Description of Artificial Sequence: Synthetic oligonucleotide
  Antisense Strand to SEQ ID NO: 455361
uauauacacauaauaggcc

SEQ ID NO: 455363 - RNA, 19 nt, Artificial Sequence
  Description of Artificial Sequence: Synthetic oligonucleotide
  Sense strand starting at position 301 of SEQ ID NO: 316984
gccuauuauguguauauau

SEQ ID NO: 455364 - RNA, 19 nt, Artificial Sequence
  Description of Artificial Sequence: Synthetic oligonucleotide
  Antisense Strand to SEQ ID NO: 455363
auauauacacauaauaggc

SEQ ID NO: 455365 - RNA, 19 nt, Artificial Sequence
  Description of Artificial Sequence: Synthetic oligonucleotide
  Sense strand starting at position 1131 of SEQ ID NO: 316984
guguauuucuaagggagau

SEQ ID NO: 455366 - RNA, 19 nt, Artificial Sequence
  Description of Artificial Sequence: Synthetic oligonucleotide
  Antisense Strand to SEQ ID NO: 455365
aucucccuuagaaauacac

SEQ ID NO: 455367 - RNA, 19 nt, Artificial Sequence
  Description of Artificial Sequence: Synthetic oligonucleotide
  Sense strand starting at position 1143 of SEQ ID NO: 316984
gggagauacaggugucuga

SEQ ID NO: 455368 - RNA, 19 nt, Artificial Sequence
  Description of Artificial Sequence: Synthetic oligonucleotide
  Antisense Strand to SEQ ID NO: 455367
ucagacaccuguaucuccc

SEQ ID NO: 455369 - RNA, 19 nt, Artificial Sequence
  Description of Artificial Sequence: Synthetic oligonucleotide
  Sense strand starting at position 1150 of SEQ ID NO: 316984
acaggugucugacccacaa

SEQ ID NO: 455370 - RNA, 19 nt, Artificial Sequence
  Description of Artificial Sequence: Synthetic oligonucleotide
  Antisense Strand to SEQ ID NO: 455369
uugugggucagacaccugu

SEQ ID NO: 455371 - RNA, 19 nt, Artificial Sequence
  Description of Artificial Sequence: Synthetic oligonucleotide
  Sense strand starting at position 1189 of SEQ ID NO: 316984
cugccuucuccagguagaa

SEQ ID NO: 455372 - RNA, 19 nt, Artificial Sequence
  Description of Artificial Sequence: Synthetic oligonucleotide
  Antisense Strand to SEQ ID NO: 455371
uucuaccuggagaaggcag

SEQ ID NO: 455373 - RNA, 19 nt, Artificial Sequence
  Description of Artificial Sequence: Synthetic oligonucleotide
  Sense strand starting at position 1209 of SEQ ID NO: 316984
cgcgcaggcgaggauuuau

SEQ ID NO: 455374 - RNA, 19 nt, Artificial Sequence
  Description of Artificial Sequence: Synthetic oligonucleotide
  Antisense Strand to SEQ ID NO: 455373
auaaauccucgccugcgcg

SEQ ID NO: 455375 - RNA, 19 nt, Artificial Sequence
  Description of Artificial Sequence: Synthetic oligonucleotide
  Sense strand starting at position 1280 of SEQ ID NO: 316984
guuaguuucggcucucagu

SEQ ID NO: 455376 - RNA, 19 nt, Artificial Sequence
  Description of Artificial Sequence: Synthetic oligonucleotide
  Antisense Strand to SEQ ID NO: 455375
acugagagccgaaacuaac

SEQ ID NO: 455377 - RNA, 19 nt, Artificial Sequence
  Description of Artificial Sequence: Synthetic oligonucleotide
  Sense strand starting at position 2014 of SEQ ID NO: 316984
gggcgucccagggaauaaa

SEQ ID NO: 455378 - RNA, 19 nt, Artificial Sequence
  Description of Artificial Sequence: Synthetic oligonucleotide
  Antisense Strand to SEQ ID NO: 455377
uuuauucccugggacgccc

SEQ ID NO: 455379 - RNA, 19 nt, Artificial Sequence
  Description of Artificial Sequence: Synthetic oligonucleotide
  Sense strand starting at position 2050 of SEQ ID NO: 316984
agccauuuaugagucguga

SEQ ID NO: 455380 - RNA, 19 nt, Artificial Sequence
  Description of Artificial Sequence: Synthetic oligonucleotide
  Antisense Strand to SEQ ID NO: 455379
ucacgacucauaaauggcu

SEQ ID NO: 455381 - RNA, 19 nt, Artificial Sequence
  Description of Artificial Sequence: Synthetic oligonucleotide
  Sense strand starting at position 2078 of SEQ ID NO: 316984
ugggcaaguuaccuaauga

SEQ ID NO: 455382 - RNA, 19 nt, Artificial Sequence
  Description of Artificial Sequence: Synthetic oligonucleotide
  Antisense Strand to SEQ ID NO: 455381
ucauuagguaacuugccca

SEQ ID NO: 455383 - RNA, 19 nt, Artificial Sequence
  Description of Artificial Sequence: Synthetic oligonucleotide
  Sense strand starting at position 2079 of SEQ ID NO: 316984
gggcaaguuaccuaaugau

SEQ ID NO: 455384 - RNA, 19 nt, Artificial Sequence
  Description of Artificial Sequence: Synthetic oligonucleotide
  Antisense Strand to SEQ ID NO: 455383
aucauuagguaacuugccc

SEQ ID NO: 455385 - RNA, 19 nt, Artificial Sequence
  Description of Artificial Sequence: Synthetic oligonucleotide
  Sense strand starting at position 2122 of SEQ ID NO: 316984
cgaaauauggacugcaauu

SEQ ID NO: 455386 - RNA, 19 nt, Artificial Sequence
  Description of Artificial Sequence: Synthetic oligonucleotide
  Antisense Strand to SEQ ID NO: 455385
aauugcaguccauauuucg

SEQ ID NO: 455387 - RNA, 19 nt, Artificial Sequence
  Description of Artificial Sequence: Synthetic oligonucleotide
  Sense strand starting at position 2147 of SEQ ID NO: 316984
aucuaauaugucgggauaa

SEQ ID NO: 455388 - RNA, 19 nt, Artificial Sequence
  Description of Artificial Sequence: Synthetic oligonucleotide
  Antisense Strand to SEQ ID NO: 455387
uuaucccgacauauuagau

SEQ ID NO: 455389 - RNA, 19 nt, Artificial Sequence
  Description of Artificial Sequence: Synthetic oligonucleotide
  Sense strand starting at position 2149 of SEQ ID NO: 316984
cuaauaugucgggauaauu

SEQ ID NO: 455390 - RNA, 19 nt, Artificial Sequence
  Description of Artificial Sequence: Synthetic oligonucleotide
  Antisense Strand to SEQ ID NO: 455389
aauuaucccgacauauuag

SEQ ID NO: 455391 - RNA, 19 nt, Artificial Sequence
  Description of Artificial Sequence: Synthetic oligonucleotide
  Sense strand starting at position 2172 of SEQ ID NO: 316984
aggcacauaaaguguuaga

SEQ ID NO: 455392 - RNA, 19 nt, Artificial Sequence
  Description of Artificial Sequence: Synthetic oligonucleotide
  Antisense Strand to SEQ ID NO: 455391
ucuaacacuuuaugugccu

SEQ ID NO: 455393 - RNA, 19 nt, Artificial Sequence
  Description of Artificial Sequence: Synthetic oligonucleotide
  Sense strand starting at position 2192 of SEQ ID NO: 316984
uaauaccuagagugguuaa

SEQ ID NO: 455394 - RNA, 19 nt, Artificial Sequence
  Description of Artificial Sequence: Synthetic oligonucleotide
  Antisense Strand to SEQ ID NO: 455393
uuaaccacucuagguauua

SEQ ID NO: 455395 - RNA, 19 nt, Artificial Sequence
  Description of Artificial Sequence: Synthetic oligonucleotide
  Sense strand starting at position 2195 of SEQ ID NO: 316984
uaccuagagugguuaauaa

SEQ ID NO: 455396 - RNA, 19 nt, Artificial Sequence
  Description of Artificial Sequence: Synthetic oligonucleotide
  Antisense Strand to SEQ ID NO: 455395
uuauuaaccacucuaggua

SEQ ID NO: 455397 - RNA, 19 nt, Artificial Sequence
  Description of Artificial Sequence: Synthetic oligonucleotide
  Sense strand starting at position 2717 of SEQ ID NO: 316984
gcggaaggcacugguauuu

SEQ ID NO: 455398 - RNA, 19 nt, Artificial Sequence
  Description of Artificial Sequence: Synthetic oligonucleotide
  Antisense Strand to SEQ ID NO: 455397
aaauaccagugccuuccgc

SEQ ID NO: 455399 - RNA, 19 nt, Artificial Sequence
  Description of Artificial Sequence: Synthetic oligonucleotide
  Sense strand starting at position 2726 of SEQ ID NO: 316984
acugguauuugagaugaua

SEQ ID NO: 455400 - RNA, 19 nt, Artificial Sequence
  Description of Artificial Sequence: Synthetic oligonucleotide
  Antisense Strand to SEQ ID NO: 455399
uaucaucucaaauaccagu

SEQ ID NO: 455401 - RNA, 19 nt, Artificial Sequence
  Description of Artificial Sequence: Synthetic oligonucleotide
  Sense strand starting at position 2734 of SEQ ID NO: 316984
uugagaugauauuagggaa

SEQ ID NO: 455402 - RNA, 19 nt, Artificial Sequence
  Description of Artificial Sequence: Synthetic oligonucleotide
  Antisense Strand to SEQ ID NO: 455401
uucccuaauaucaucucaa

SEQ ID NO: 455403 - RNA, 19 nt, Artificial Sequence
  Description of Artificial Sequence: Synthetic oligonucleotide
  Sense strand starting at position 2750 of SEQ ID NO: 316984
gaagaucucucugaugaag

SEQ ID NO: 455404 - RNA, 19 nt, Artificial Sequence
  Description of Artificial Sequence: Synthetic oligonucleotide
  Antisense Strand to SEQ ID NO: 455403
cuucaucagagagaucuuc

SEQ ID NO: 455405 - RNA, 19 nt, Artificial Sequence
  Description of Artificial Sequence: Synthetic oligonucleotide
  Sense strand starting at position 2806 of SEQ ID NO: 316984
gagggaaugagucgugauc

SEQ ID NO: 455406 - RNA, 19 nt, Artificial Sequence
  Description of Artificial Sequence: Synthetic oligonucleotide
  Antisense Strand to SEQ ID NO: 455405
gaucacgacucauucccuc

SEQ ID NO: 455407 - RNA, 19 nt, Artificial Sequence
  Description of Artificial Sequence: Synthetic oligonucleotide
  Sense strand starting at position 3062 of SEQ ID NO: 316984
cagauuugaugauggauua

SEQ ID NO: 455408 - RNA, 19 nt, Artificial Sequence
  Description of Artificial Sequence: Synthetic oligonucleotide
  Antisense Strand to SEQ ID NO: 455407
uaauccaucaucaaaucug

SEQ ID NO: 455409 - RNA, 19 nt, Artificial Sequence
  Description of Artificial Sequence: Synthetic oligonucleotide
  Sense strand starting at position 3136 of SEQ ID NO: 316984
ggguuacuccaagguaaac

SEQ ID NO: 455410 - RNA, 19 nt, Artificial Sequence
  Description of Artificial Sequence: Synthetic oligonucleotide
  Antisense Strand to SEQ ID NO: 455409
guuuaccuuggaguaaccc

SEQ ID NO: 455411 - RNA, 19 nt, Artificial Sequence
  Description of Artificial Sequence: Synthetic oligonucleotide
  Sense strand starting at position 3176 of SEQ ID NO: 316984
gaggaaggugcagguuuaa

SEQ ID NO: 455412 - RNA, 19 nt, Artificial Sequence
  Description of Artificial Sequence: Synthetic oligonucleotide
  Antisense Strand to SEQ ID NO: 455411
uuaaaccugcaccuuccuc

SEQ ID NO: 455413 - RNA, 19 nt, Artificial Sequence
  Description of Artificial Sequence: Synthetic oligonucleotide
  Sense strand starting at position 3200 of SEQ ID NO: 316984
gugugucuggaauacagau

SEQ ID NO: 455414 - RNA, 19 nt, Artificial Sequence
  Description of Artificial Sequence: Synthetic oligonucleotide
  Antisense Strand to SEQ ID NO: 455413
aucuguauuccagacacac

SEQ ID NO: 455415 - RNA, 19 nt, Artificial Sequence
  Description of Artificial Sequence: Synthetic oligonucleotide
  Sense strand starting at position 3220 of SEQ ID NO: 316984
gguaaugauaacuguaaga

SEQ ID NO: 455416 - RNA, 19 nt, Artificial Sequence
  Description of Artificial Sequence: Synthetic oligonucleotide
  Antisense Strand to SEQ ID NO: 455415
ucuuacaguuaucauuacc

SEQ ID NO: 455417 - RNA, 19 nt, Artificial Sequence
  Description of Artificial Sequence: Synthetic oligonucleotide
  Sense strand starting at position 3230 of SEQ ID NO: 316984
acuguaagaugcuuguuaa

SEQ ID NO: 455418 - RNA, 19 nt, Artificial Sequence
  Description of Artificial Sequence: Synthetic oligonucleotide
  Antisense Strand to SEQ ID NO: 455417
uuaacaagcaucuuacagu

SEQ ID NO: 455419 - RNA, 19 nt, Artificial Sequence
  Description of Artificial Sequence: Synthetic oligonucleotide
  Sense strand starting at position 3231 of SEQ ID NO: 316984
cuguaagaugcuuguuaau

SEQ ID NO: 455420 - RNA, 19 nt, Artificial Sequence
  Description of Artificial Sequence: Synthetic oligonucleotide
  Antisense Strand to SEQ ID NO: 455419
auuaacaagcaucuuacag

SEQ ID NO: 455421 - RNA, 19 nt, Artificial Sequence
  Description of Artificial Sequence: Synthetic oligonucleotide
  Sense strand starting at position 3233 of SEQ ID NO: 316984
guaagaugcuuguuaauca

SEQ ID NO: 455422 - RNA, 19 nt, Artificial Sequence
  Description of Artificial Sequence: Synthetic oligonucleotide
  Antisense Strand to SEQ ID NO: 455421
ugauuaacaagcaucuuac

SEQ ID NO: 455423 - RNA, 19 nt, Artificial Sequence
  Description of Artificial Sequence: Synthetic oligonucleotide
  Sense strand starting at position 3241 of SEQ ID NO: 316984
cuuguuaaucaagaaggca

SEQ ID NO: 455424 - RNA, 19 nt, Artificial Sequence
  Description of Artificial Sequence: Synthetic oligonucleotide
  Antisense Strand to SEQ ID NO: 455423
ugccuucuugauuaacaag

SEQ ID NO: 455425 - RNA, 19 nt, Artificial Sequence
  Description of Artificial Sequence: Synthetic oligonucleotide
  Sense strand starting at position 3287 of SEQ ID NO: 316984
agagaagcuuggguguagu

SEQ ID NO: 455426 - RNA, 19 nt, Artificial Sequence
  Description of Artificial Sequence: Synthetic oligonucleotide
  Antisense Strand to SEQ ID NO: 455425
acuacacccaagcuucucu

SEQ ID NO: 455427 - RNA, 19 nt, Artificial Sequence
  Description of Artificial Sequence: Synthetic oligonucleotide
  Sense strand starting at position 3317 of SEQ ID NO: 316984
gagccaucaguguagaggu

SEQ ID NO: 455428 - RNA, 19 nt, Artificial Sequence
  Description of Artificial Sequence: Synthetic oligonucleotide
  Antisense Strand to SEQ ID NO: 455427
accucuacacugauggcuc

SEQ ID NO: 455429 - RNA, 19 nt, Artificial Sequence
  Description of Artificial Sequence: Synthetic oligonucleotide
  Sense strand starting at position 3375 of SEQ ID NO: 316984
ggugaauguggugacagua

SEQ ID NO: 455430 - RNA, 19 nt, Artificial Sequence
  Description of Artificial Sequence: Synthetic oligonucleotide
  Antisense Strand to SEQ ID NO: 455429
uacugucaccacauucacc

SEQ ID NO: 455431 - RNA, 19 nt, Artificial Sequence
  Description of Artificial Sequence: Synthetic oligonucleotide
  Sense strand starting at position 3400 of SEQ ID NO: 316984
aggcuagaggacugaucau

SEQ ID NO: 455432 - RNA, 19 nt, Artificial Sequence
  Description of Artificial Sequence: Synthetic oligonucleotide
  Antisense Strand to SEQ ID NO: 455431
augaucaguccucuagccu

SEQ ID NO: 455433 - RNA, 19 nt, Artificial Sequence
  Description of Artificial Sequence: Synthetic oligonucleotide
  Sense strand starting at position 3409 of SEQ ID NO: 316984
gacugaucauaggaggaaa

SEQ ID NO: 455434 - RNA, 19 nt, Artificial Sequence
  Description of Artificial Sequence: Synthetic oligonucleotide
  Antisense Strand to SEQ ID NO: 455433
uuuccuccuaugaucaguc

SEQ ID NO: 455435 - RNA, 19 nt, Artificial Sequence
  Description of Artificial Sequence: Synthetic oligonucleotide
  Sense strand starting at position 3472 of SEQ ID NO: 316984
aggaucaacucugucaauu

SEQ ID NO: 455436 - RNA, 19 nt, Artificial Sequence
  Description of Artificial Sequence: Synthetic oligonucleotide
  Antisense Strand to SEQ ID NO: 455435
aauugacagaguugauccu

SEQ ID NO: 455437 - RNA, 19 nt, Artificial Sequence
  Description of Artificial Sequence: Synthetic oligonucleotide
  Sense strand starting at position 3856 of SEQ ID NO: 316984
uugauaauguuagccauca

SEQ ID NO: 455438 - RNA, 19 nt, Artificial Sequence
  Description of Artificial Sequence: Synthetic oligonucleotide
  Antisense Strand to SEQ ID NO: 455437
ugauggcuaacauuaucaa

SEQ ID NO: 455439 - RNA, 19 nt, Artificial Sequence
  Description of Artificial Sequence: Synthetic oligonucleotide
  Sense strand starting at position 3857 of SEQ ID NO: 316984
ugauaauguuagccaucau

SEQ ID NO: 455440 - RNA, 19 nt, Artificial Sequence
  Description of Artificial Sequence: Synthetic oligonucleotide
  Antisense Strand to SEQ ID NO: 455439
augauggcuaacauuauca

SEQ ID NO: 455441 - RNA, 19 nt, Artificial Sequence
  Description of Artificial Sequence: Synthetic oligonucleotide
  Sense strand starting at position 1276 of SEQ ID NO: 316985
cccugagccuguuuccaua

SEQ ID NO: 455442 - RNA, 19 nt, Artificial Sequence
  Description of Artificial Sequence: Synthetic oligonucleotide
  Antisense Strand to SEQ ID NO: 455441
uauggaaacaggcucaggg

SEQ ID NO: 455443 - RNA, 19 nt, Artificial Sequence
  Description of Artificial Sequence: Synthetic oligonucleotide
  Sense strand starting at position 1992 of SEQ ID NO: 316985
gggucaaggcuucguggaa

SEQ ID NO: 455444 - RNA, 19 nt, Artificial Sequence
  Description of Artificial Sequence: Synthetic oligonucleotide
  Antisense Strand to SEQ ID NO: 455443
uuccacgaagccuugaccc

SEQ ID NO: 455445 - RNA, 19 nt, Artificial Sequence
  Description of Artificial Sequence: Synthetic oligonucleotide
  Sense strand starting at position 1993 of SEQ ID NO: 316985
ggucaaggcuucguggaaa

SEQ ID NO: 455446 - RNA, 19 nt, Artificial Sequence
  Description of Artificial Sequence: Synthetic oligonucleotide
  Antisense Strand to SEQ ID NO: 455445
uuuccacgaagccuugacc

SEQ ID NO: 455447 - RNA, 19 nt, Artificial Sequence
  Description of Artificial Sequence: Synthetic oligonucleotide
  Sense strand starting at position 1996 of SEQ ID NO: 316985
caaggcuucguggaaauga

SEQ ID NO: 455448 - RNA, 19 nt, Artificial Sequence
  Description of Artificial Sequence: Synthetic oligonucleotide
  Antisense Strand to SEQ ID NO: 455447
ucauuuccacgaagccuug

SEQ ID NO: 455449 - RNA, 19 nt, Artificial Sequence
  Description of Artificial Sequence: Synthetic oligonucleotide
  Sense strand starting at position 2209 of SEQ ID NO: 316985
ggaagucuuccaggauaau

SEQ ID NO: 455450 - RNA, 19 nt, Artificial Sequence
  Description of Artificial Sequence: Synthetic oligonucleotide
  Antisense Strand to SEQ ID NO: 455449
auuauccuggaagacuucc

SEQ ID NO: 455451 - RNA, 19 nt, Artificial Sequence
  Description of Artificial Sequence: Synthetic oligonucleotide
  Sense strand starting at position 2291 of SEQ ID NO: 316985
ccaccaucugccugugaau

SEQ ID NO: 455452 - RNA, 19 nt, Artificial Sequence
  Description of Artificial Sequence: Synthetic oligonucleotide
  Antisense Strand to SEQ ID NO: 455451
auucacaggcagauggugg

SEQ ID NO: 455453 - RNA, 19 nt, Artificial Sequence
  Description of Artificial Sequence: Synthetic oligonucleotide
  Sense strand starting at position 2294 of SEQ ID NO: 316985
ccaucugccugugaauugu

SEQ ID NO: 455454 - RNA, 19 nt, Artificial Sequence
  Description of Artificial Sequence: Synthetic oligonucleotide
  Antisense Strand to SEQ ID NO: 455453
acaauucacaggcagaugg

SEQ ID NO: 455455 - RNA, 19 nt, Artificial Sequence
  Description of Artificial Sequence: Synthetic oligonucleotide
  Sense strand starting at position 2300 of SEQ ID NO: 316985
gccugugaauuguccauga

SEQ ID NO: 455456 - RNA, 19 nt, Artificial Sequence
  Description of Artificial Sequence: Synthetic oligonucleotide
  Antisense Strand to SEQ ID NO: 455455
ucauggacaauucacaggc

SEQ ID NO: 455457 - RNA, 19 nt, Artificial Sequence
  Description of Artificial Sequence: Synthetic oligonucleotide
  Sense strand starting at position 2302 of SEQ ID NO: 316985
cugugaauuguccaugaug

SEQ ID NO: 455458 - RNA, 19 nt, Artificial Sequence
  Description of Artificial Sequence: Synthetic oligonucleotide
  Antisense Strand to SEQ ID NO: 455457
caucauggacaauucacag

SEQ ID NO: 455459 - RNA, 19 nt, Artificial Sequence
  Description of Artificial Sequence: Synthetic oligonucleotide
  Sense strand starting at position 2396 of SEQ ID NO: 316985
ugggauugucccuguccca

SEQ ID NO: 455460 - RNA, 19 nt, Artificial Sequence
  Description of Artificial Sequence: Synthetic oligonucleotide
  Antisense Strand to SEQ ID NO: 455459
ugggacagggacaauccca

SEQ ID NO: 455461 - RNA, 19 nt, Artificial Sequence
  Description of Artificial Sequence: Synthetic oligonucleotide
  Sense strand starting at position 2814 of SEQ ID NO: 316985
ugaggaaccucuucugcaa

SEQ ID NO: 455462 - RNA, 19 nt, Artificial Sequence
  Description of Artificial Sequence: Synthetic oligonucleotide
  Antisense Strand to SEQ ID NO: 455461
uugcagaagagguuccuca

SEQ ID NO: 455463 - RNA, 19 nt, Artificial Sequence
  Description of Artificial Sequence: Synthetic oligonucleotide
  Sense strand starting at position 2816 of SEQ ID NO: 316985
aggaaccucuucugcaaua

SEQ ID NO: 455464 - RNA, 19 nt, Artificial Sequence
  Description of Artificial Sequence: Synthetic oligonucleotide
  Antisense Strand to SEQ ID NO: 455463
uauugcagaagagguuccu

SEQ ID NO: 455465 - RNA, 19 nt, Artificial Sequence
  Description of Artificial Sequence: Synthetic oligonucleotide
  Sense strand starting at position 2817 of SEQ ID NO: 316985
ggaaccucuucugcaauau

SEQ ID NO: 455466 - RNA, 19 nt, Artificial Sequence
  Description of Artificial Sequence: Synthetic oligonucleotide
  Antisense Strand to SEQ ID NO: 455465
auauugcagaagagguucc

SEQ ID NO: 455467 - RNA, 19 nt, Artificial Sequence
  Description of Artificial Sequence: Synthetic oligonucleotide
  Sense strand starting at position 2821 of SEQ ID NO: 316985
ccucuucugcaauauugga

SEQ ID NO: 455468 - RNA, 19 nt, Artificial Sequence
  Description of Artificial Sequence: Synthetic oligonucleotide
  Antisense Strand to SEQ ID NO: 455467
uccaauauugcagaagagg

SEQ ID NO: 455469 - RNA, 19 nt, Artificial Sequence
  Description of Artificial Sequence: Synthetic oligonucleotide
  Sense strand starting at position 2857 of SEQ ID NO: 316985
ucggguuccuccugaguca

SEQ ID NO: 455470 - RNA, 19 nt, Artificial Sequence
  Description of Artificial Sequence: Synthetic oligonucleotide
  Antisense Strand to SEQ ID NO: 455469
ugacucaggaggaacccga

SEQ ID NO: 455471 - RNA, 19 nt, Artificial Sequence
  Description of Artificial Sequence: Synthetic oligonucleotide
  Sense strand starting at position 3457 of SEQ ID NO: 316985
ccuggaagcuucuagaaca

SEQ ID NO: 455472 - RNA, 19 nt, Artificial Sequence
  Description of Artificial Sequence: Synthetic oligonucleotide
  Antisense Strand to SEQ ID NO: 455471
uguucuagaagcuuccagg

SEQ ID NO: 455473 - RNA, 19 nt, Artificial Sequence
  Description of Artificial Sequence: Synthetic oligonucleotide
  Sense strand starting at position 3650 of SEQ ID NO: 316985
cugguucccuuucuguaau

SEQ ID NO: 455474 - RNA, 19 nt, Artificial Sequence
  Description of Artificial Sequence: Synthetic oligonucleotide
  Antisense Strand to SEQ ID NO: 455473
auuacagaaagggaaccag

SEQ ID NO: 455475 - RNA, 19 nt, Artificial Sequence
  Description of Artificial Sequence: Synthetic oligonucleotide
  Sense strand starting at position 3652 of SEQ ID NO: 316985
gguucccuuucuguaauca

SEQ ID NO: 455476 - RNA, 19 nt, Artificial Sequence
  Description of Artificial Sequence: Synthetic oligonucleotide
  Antisense Strand to SEQ ID NO: 455475
ugauuacagaaagggaacc

SEQ ID NO: 455477 - RNA, 19 nt, Artificial Sequence
  Description of Artificial Sequence: Synthetic oligonucleotide
  Sense strand starting at position 3705 of SEQ ID NO: 316985
cagggcucuuucuagacuu

SEQ ID NO: 455478 - RNA, 19 nt, Artificial Sequence
  Description of Artificial Sequence: Synthetic oligonucleotide
  Antisense Strand to SEQ ID NO: 455477
aagucuagaaagagcccug

SEQ ID NO: 455479 - RNA, 19 nt, Artificial Sequence
  Description of Artificial Sequence: Synthetic oligonucleotide
  Sense strand starting at position 3929 of SEQ ID NO: 316985
cccucuguuuccugcauga

SEQ ID NO: 455480 - RNA, 19 nt, Artificial Sequence
  Description of Artificial Sequence: Synthetic oligonucleotide
  Antisense Strand to SEQ ID NO: 455479
ucaugcaggaaacagaggg

SEQ ID NO: 455481 - RNA, 19 nt, Artificial Sequence
  Description of Artificial Sequence: Synthetic oligonucleotide
  Sense strand starting at position 66 of SEQ ID NO: 316986
gacaacuggcaguguucua

SEQ ID NO: 455482 - RNA, 19 nt, Artificial Sequence
  Description of Artificial Sequence: Synthetic oligonucleotide
  Antisense Strand to SEQ ID NO: 455481
uagaacacugccaguuguc

SEQ ID NO: 455483 - RNA, 19 nt, Artificial Sequence
  Description of Artificial Sequence: Synthetic oligonucleotide
  Sense strand starting at position 163 of SEQ ID NO: 316986
gugauuguuaaugauguga

SEQ ID NO: 455484 - RNA, 19 nt, Artificial Sequence
  Description of Artificial Sequence: Synthetic oligonucleotide
  Antisense Strand to SEQ ID NO: 455483
ucacaucauuaacaaucac

SEQ ID NO: 455485 - RNA, 19 nt, Artificial Sequence
  Description of Artificial Sequence: Synthetic oligonucleotide
  Sense strand starting at position 167 of SEQ ID NO: 316986
uuguuaaugaugugagcca

SEQ ID NO: 455486 - RNA, 19 nt, Artificial Sequence
  Description of Artificial Sequence: Synthetic oligonucleotide
  Antisense Strand to SEQ ID NO: 455485
uggcucacaucauuaacaa

SEQ ID NO: 455487 - RNA, 19 nt, Artificial Sequence
  Description of Artificial Sequence: Synthetic oligonucleotide
  Sense strand starting at position 185 of SEQ ID NO: 316986
agcaaugauuccuuggagu

SEQ ID NO: 455488 - RNA, 19 nt, Artificial Sequence
  Description of Artificial Sequence: Synthetic oligonucleotide
  Antisense Strand to SEQ ID NO: 455487
acuccaaggaaucauugcu

SEQ ID NO: 455489 - RNA, 19 nt, Artificial Sequence
  Description of Artificial Sequence: Synthetic oligonucleotide
  Sense strand starting at position 187 of SEQ ID NO: 316986
caaugauuccuuggaguac

SEQ ID NO: 455490 - RNA, 19 nt, Artificial Sequence
  Description of Artificial Sequence: Synthetic oligonucleotide
  Antisense Strand to SEQ ID NO: 455489
guacuccaaggaaucauug

SEQ ID NO: 455491 - RNA, 19 nt, Artificial Sequence
  Description of Artificial Sequence: Synthetic oligonucleotide
  Sense strand starting at position 191 of SEQ ID NO: 316986
gauuccuuggaguacagua

SEQ ID NO: 455492 - RNA, 19 nt, Artificial Sequence
  Description of Artificial Sequence: Synthetic oligonucleotide
  Antisense Strand to SEQ ID NO: 455491
uacuguacuccaaggaauc

SEQ ID NO: 455493 - RNA, 19 nt, Artificial Sequence
  Description of Artificial Sequence: Synthetic oligonucleotide
  Sense strand starting at position 223 of SEQ ID NO: 316986
acugcaucuccuggcaaga

SEQ ID NO: 455494 - RNA, 19 nt, Artificial Sequence
  Description of Artificial Sequence: Synthetic oligonucleotide
  Antisense Strand to SEQ ID NO: 455493
ucuugccaggagaugcagu

SEQ ID NO: 455495 - RNA, 19 nt, Artificial Sequence
  Description of Artificial Sequence: Synthetic oligonucleotide
  Sense strand starting at position 287 of SEQ ID NO: 316986
acaccauguuaguauuuaa

SEQ ID NO: 455496 - RNA, 19 nt, Artificial Sequence
  Description of Artificial Sequence: Synthetic oligonucleotide
  Antisense Strand to SEQ ID NO: 455495
uuaaauacuaacauggugu

SEQ ID NO: 455497 - RNA, 19 nt, Artificial Sequence
  Description of Artificial Sequence: Synthetic oligonucleotide
  Sense strand starting at position 326 of SEQ ID NO: 316986
cguaaaugccauuacucuu

SEQ ID NO: 455498 - RNA, 19 nt, Artificial Sequence
  Description of Artificial Sequence: Synthetic oligonucleotide
  Antisense Strand to SEQ ID NO: 455497
aagaguaauggcauuuacg

SEQ ID NO: 455499 - RNA, 19 nt, Artificial Sequence
  Description of Artificial Sequence: Synthetic oligonucleotide
  Sense strand starting at position 357 of SEQ ID NO: 316986
uagaguagaucuuccaaga

SEQ ID NO: 455500 - RNA, 19 nt, Artificial Sequence
  Description of Artificial Sequence: Synthetic oligonucleotide
  Antisense Strand to SEQ ID NO: 455499
ucuuggaagaucuacucua

SEQ ID NO: 455501 - RNA, 19 nt, Artificial Sequence
  Description of Artificial Sequence: Synthetic oligonucleotide
  Sense strand starting at position 419 of SEQ ID NO: 316986
gacggagaaucgucucagu

SEQ ID NO: 455502 - RNA, 19 nt, Artificial Sequence
  Description of Artificial Sequence: Synthetic oligonucleotide
  Antisense Strand to SEQ ID NO: 455501
acugagacgauucuccguc

SEQ ID NO: 455503 - RNA, 19 nt, Artificial Sequence
  Description of Artificial Sequence: Synthetic oligonucleotide
  Sense strand starting at position 855 of SEQ ID NO: 316986
aggaaaugcuacuugcuua

SEQ ID NO: 455504 - RNA, 19 nt, Artificial Sequence
  Description of Artificial Sequence: Synthetic oligonucleotide
  Antisense Strand to SEQ ID NO: 455503
uaagcaaguagcauuuccu

SEQ ID NO: 455505 - RNA, 19 nt, Artificial Sequence
  Description of Artificial Sequence: Synthetic oligonucleotide
  Sense strand starting at position 2490 of SEQ ID NO: 316986
agcucaaguccucaaagau

SEQ ID NO: 455506 - RNA, 19 nt, Artificial Sequence
  Description of Artificial Sequence: Synthetic oligonucleotide
  Antisense Strand to SEQ ID NO: 455505
aucuuugaggacuugagcu

SEQ ID NO: 455507 - RNA, 19 nt, Artificial Sequence
  Description of Artificial Sequence: Synthetic oligonucleotide
  Sense strand starting at position 2553 of SEQ ID NO: 316986
cguugaguaggcugagaug

SEQ ID NO: 455508 - RNA, 19 nt, Artificial Sequence
  Description of Artificial Sequence: Synthetic oligonucleotide
  Antisense Strand to SEQ ID NO: 455507
caucucagccuacucaacg

SEQ ID NO: 455509 - RNA, 19 nt, Artificial Sequence
  Description of Artificial Sequence: Synthetic oligonucleotide
  Sense strand starting at position 2737 of SEQ ID NO: 316986
cccacauguguucgggaau

SEQ ID NO: 455510 - RNA, 19 nt, Artificial Sequence
  Description of Artificial Sequence: Synthetic oligonucleotide
  Antisense Strand to SEQ ID NO: 455509
auucccgaacacauguggg

SEQ ID NO: 455511 - RNA, 19 nt, Artificial Sequence
  Description of Artificial Sequence: Synthetic oligonucleotide
  Sense strand starting at position 2740 of SEQ ID NO: 316986
acauguguucgggaauaag

SEQ ID NO: 455512 - RNA, 19 nt, Artificial Sequence
  Description of Artificial Sequence: Synthetic oligonucleotide
  Antisense Strand to SEQ ID NO: 455511
cuuauucccgaacacaugu

SEQ ID NO: 455513 - RNA, 19 nt, Artificial Sequence
  Description of Artificial Sequence: Synthetic oligonucleotide
  Sense strand starting at position 2828 of SEQ ID NO: 316986
cgcggaauuaguguucguu

SEQ ID NO: 455514 - RNA, 19 nt, Artificial Sequence
  Description of Artificial Sequence: Synthetic oligonucleotide
  Antisense Strand to SEQ ID NO: 455513
aacgaacacuaauuccgcg

SEQ ID NO: 455515 - RNA, 19 nt, Artificial Sequence
  Description of Artificial Sequence: Synthetic oligonucleotide
  Sense strand starting at position 2829 of SEQ ID NO: 316986
gcggaauuaguguucguuu

SEQ ID NO: 455516 - RNA, 19 nt, Artificial Sequence
  Description of Artificial Sequence: Synthetic oligonucleotide
  Antisense Strand to SEQ ID NO: 455515
aaacgaacacuaauuccgc

SEQ ID NO: 455517 - RNA, 19 nt, Artificial Sequence
  Description of Artificial Sequence: Synthetic oligonucleotide
  Sense strand starting at position 2945 of SEQ ID NO: 316986
aggcguuagaucuggagaa

SEQ ID NO: 455518 - RNA, 19 nt, Artificial Sequence
  Description of Artificial Sequence: Synthetic oligonucleotide
  Antisense Strand to SEQ ID NO: 455517
uucuccagaucuaacgccu

SEQ ID NO: 455519 - RNA, 19 nt, Artificial Sequence
  Description of Artificial Sequence: Synthetic oligonucleotide
  Sense strand starting at position 2947 of SEQ ID NO: 316986
gcguuagaucuggagaaag

SEQ ID NO: 455520 - RNA, 19 nt, Artificial Sequence
  Description of Artificial Sequence: Synthetic oligonucleotide
  Antisense Strand to SEQ ID NO: 455519
cuuucuccagaucuaacgc

SEQ ID NO: 455521 - RNA, 19 nt, Artificial Sequence
  Description of Artificial Sequence: Synthetic oligonucleotide
  Sense strand starting at position 2959 of SEQ ID NO: 316986
gagaaagaauuagaugcaa

SEQ ID NO: 455522 - RNA, 19 nt, Artificial Sequence
  Description of Artificial Sequence: Synthetic oligonucleotide
  Antisense Strand to SEQ ID NO: 455521
uugcaucuaauucuuucuc

SEQ ID NO: 455523 - RNA, 19 nt, Artificial Sequence
  Description of Artificial Sequence: Synthetic oligonucleotide
  Sense strand starting at position 2994 of SEQ ID NO: 316986
aagcgcugugcucuacuua

SEQ ID NO: 455524 - RNA, 19 nt, Artificial Sequence
  Description of Artificial Sequence: Synthetic oligonucleotide
  Antisense Strand to SEQ ID NO: 455523
uaaguagagcacagcgcuu

SEQ ID NO: 455525 - RNA, 19 nt, Artificial Sequence
  Description of Artificial Sequence: Synthetic oligonucleotide
  Sense strand starting at position 3049 of SEQ ID NO: 316986
cuagacaaagucuguguaa

SEQ ID NO: 455526 - RNA, 19 nt, Artificial Sequence
  Description of Artificial Sequence: Synthetic oligonucleotide
  Antisense Strand to SEQ ID NO: 455525
uuacacagacuuugucuag

SEQ ID NO: 455527 - RNA, 19 nt, Artificial Sequence
  Description of Artificial Sequence: Synthetic oligonucleotide
  Sense strand starting at position 3050 of SEQ ID NO: 316986
uagacaaagucuguguaaa

SEQ ID NO: 455528 - RNA, 19 nt, Artificial Sequence
  Description of Artificial Sequence: Synthetic oligonucleotide
  Antisense Strand to SEQ ID NO: 455527
uuuacacagacuuugucua

SEQ ID NO: 455529 - RNA, 19 nt, Artificial Sequence
  Description of Artificial Sequence: Synthetic oligonucleotide
  Sense strand starting at position 3052 of SEQ ID NO: 316986
gacaaagucuguguaaaua

SEQ ID NO: 455530 - RNA, 19 nt, Artificial Sequence
  Description of Artificial Sequence: Synthetic oligonucleotide
  Antisense Strand to SEQ ID NO: 455529
uauuuacacagacuuuguc

SEQ ID NO: 455531 - RNA, 19 nt, Artificial Sequence
  Description of Artificial Sequence: Synthetic oligonucleotide
  Sense strand starting at position 3063 of SEQ ID NO: 316986
uguaaauagugugucuaaa

SEQ ID NO: 455532 - RNA, 19 nt, Artificial Sequence
  Description of Artificial Sequence: Synthetic oligonucleotide
  Antisense Strand to SEQ ID NO: 455531
uuuagacacacuauuuaca

SEQ ID NO: 455533 - RNA, 19 nt, Artificial Sequence
  Description of Artificial Sequence: Synthetic oligonucleotide
  Sense strand starting at position 3081 of SEQ ID NO: 316986
aaagaugucuacguuauca

SEQ ID NO: 455534 - RNA, 19 nt, Artificial Sequence
  Description of Artificial Sequence: Synthetic oligonucleotide
  Antisense Strand to SEQ ID NO: 455533
ugauaacguagacaucuuu

SEQ ID NO: 455535 - RNA, 19 nt, Artificial Sequence
  Description of Artificial Sequence: Synthetic oligonucleotide
  Sense strand starting at position 3191 of SEQ ID NO: 316986
uuggguauuuaacagagaa

SEQ ID NO: 455536 - RNA, 19 nt, Artificial Sequence
  Description of Artificial Sequence: Synthetic oligonucleotide
  Antisense Strand to SEQ ID NO: 455535
uucucuguuaaauacccaa

SEQ ID NO: 455537 - RNA, 19 nt, Artificial Sequence
  Description of Artificial Sequence: Synthetic oligonucleotide
  Sense strand starting at position 3301 of SEQ ID NO: 316986
ucacuuguuggacauugau

SEQ ID NO: 455538 - RNA, 19 nt, Artificial Sequence
  Description of Artificial Sequence: Synthetic oligonucleotide
  Antisense Strand to SEQ ID NO: 455537
aucaauguccaacaaguga

SEQ ID NO: 455539 - RNA, 19 nt, Artificial Sequence
  Description of Artificial Sequence: Synthetic oligonucleotide
  Sense strand starting at position 3311 of SEQ ID NO: 316986
gacauugauuucgccaagu

SEQ ID NO: 455540 - RNA, 19 nt, Artificial Sequence
  Description of Artificial Sequence: Synthetic oligonucleotide
  Antisense Strand to SEQ ID NO: 455539
acuuggcgaaaucaauguc

SEQ ID NO: 455541 - RNA, 19 nt, Artificial Sequence
  Description of Artificial Sequence: Synthetic oligonucleotide
  Sense strand starting at position 3356 of SEQ ID NO: 316986
gugggcaguugauuaaauu

SEQ ID NO: 455542 - RNA, 19 nt, Artificial Sequence
  Description of Artificial Sequence: Synthetic oligonucleotide
  Antisense Strand to SEQ ID NO: 455541
aauuuaaucaacugcccac

SEQ ID NO: 455543 - RNA, 19 nt, Artificial Sequence
  Description of Artificial Sequence: Synthetic oligonucleotide
  Sense strand starting at position 3357 of SEQ ID NO: 316986
ugggcaguugauuaaauua

SEQ ID NO: 455544 - RNA, 19 nt, Artificial Sequence
  Description of Artificial Sequence: Synthetic oligonucleotide
  Antisense Strand to SEQ ID NO: 455543
uaauuuaaucaacugccca

SEQ ID NO: 455545 - RNA, 19 nt, Artificial Sequence
  Description of Artificial Sequence: Synthetic oligonucleotide
  Sense strand starting at position 3421 of SEQ ID NO: 316986
cuuccugagccuggauauu

SEQ ID NO: 455546 - RNA, 19 nt, Artificial Sequence
  Description of Artificial Sequence: Synthetic oligonucleotide
  Antisense Strand to SEQ ID NO: 455545
aauauccaggcucaggaag

SEQ ID NO: 455547 - RNA, 19 nt, Artificial Sequence
  Description of Artificial Sequence: Synthetic oligonucleotide
  Sense strand starting at position 3489 of SEQ ID NO: 316986
aagaaucugcuaggauguu

SEQ ID NO: 455548 - RNA, 19 nt, Artificial Sequence
  Description of Artificial Sequence: Synthetic oligonucleotide
  Antisense Strand to SEQ ID NO: 455547
aacauccuagcagauucuu

SEQ ID NO: 455549 - RNA, 19 nt, Artificial Sequence
  Description of Artificial Sequence: Synthetic oligonucleotide
  Sense strand starting at position 3566 of SEQ ID NO: 316986
ggcuguuguauacacauga

SEQ ID NO: 455550 - RNA, 19 nt, Artificial Sequence
  Description of Artificial Sequence: Synthetic oligonucleotide
  Antisense Strand to SEQ ID NO: 455549
ucauguguauacaacagcc

SEQ ID NO: 455551 - RNA, 19 nt, Artificial Sequence
  Description of Artificial Sequence: Synthetic oligonucleotide
  Sense strand starting at position 3596 of SEQ ID NO: 316986
augugauuguaaguccacu

SEQ ID NO: 455552 - RNA, 19 nt, Artificial Sequence
  Description of Artificial Sequence: Synthetic oligonucleotide
  Antisense Strand to SEQ ID NO: 455551
aguggacuuacaaucacau

SEQ ID NO: 455553 - RNA, 19 nt, Artificial Sequence
  Description of Artificial Sequence: Synthetic oligonucleotide
  Sense strand starting at position 3772 of SEQ ID NO: 316986
cucauuagguaguuugaga

SEQ ID NO: 455554 - RNA, 19 nt, Artificial Sequence
  Description of Artificial Sequence: Synthetic oligonucleotide
  Antisense Strand to SEQ ID NO: 455553
ucucaaacuaccuaaugag

SEQ ID NO: 455555 - RNA, 19 nt, Artificial Sequence
  Description of Artificial Sequence: Synthetic oligonucleotide
  Sense strand starting at position 3814 of SEQ ID NO: 316986
ggugcuuuccacuaucuaa

SEQ ID NO: 455556 - RNA, 19 nt, Artificial Sequence
  Description of Artificial Sequence: Synthetic oligonucleotide
  Antisense Strand to SEQ ID NO: 455555
uuagauaguggaaagcacc

SEQ ID NO: 455557 - RNA, 19 nt, Artificial Sequence
  Description of Artificial Sequence: Synthetic oligonucleotide
  Sense strand starting at position 3899 of SEQ ID NO: 316986
ucaguaguuugagcuccua

SEQ ID NO: 455558 - RNA, 19 nt, Artificial Sequence
  Description of Artificial Sequence: Synthetic oligonucleotide
  Antisense Strand to SEQ ID NO: 455557
uaggagcucaaacuacuga

SEQ ID NO: 455559 - RNA, 19 nt, Artificial Sequence
  Description of Artificial Sequence: Synthetic oligonucleotide
  Sense strand starting at position 3907 of SEQ ID NO: 316986
uugagcuccuacucugaua

SEQ ID NO: 455560 - RNA, 19 nt, Artificial Sequence
  Description of Artificial Sequence: Synthetic oligonucleotide
  Antisense Strand to SEQ ID NO: 455559
uaucagaguaggagcucaa

SEQ ID NO: 455561 - RNA, 19 nt, Artificial Sequence
  Description of Artificial Sequence: Synthetic oligonucleotide
  Sense strand starting at position 57 of SEQ ID NO: 316987
aaugacaaggguugcgaua

SEQ ID NO: 455562 - RNA, 19 nt, Artificial Sequence
  Description of Artificial Sequence: Synthetic oligonucleotide
  Antisense Strand to SEQ ID NO: 455561
uaucgcaacccuugucauu

SEQ ID NO: 455563 - RNA, 19 nt, Artificial Sequence
  Description of Artificial Sequence: Synthetic oligonucleotide
  Sense strand starting at position 246 of SEQ ID NO: 316987
acaagucugucugcaggaa

SEQ ID NO: 455564 - RNA, 19 nt, Artificial Sequence
  Description of Artificial Sequence: Synthetic oligonucleotide
  Antisense Strand to SEQ ID NO: 455563
uuccugcagacagacuugu

SEQ ID NO: 455565 - RNA, 19 nt, Artificial Sequence
  Description of Artificial Sequence: Synthetic oligonucleotide
  Sense strand starting at position 247 of SEQ ID NO: 316987
caagucugucugcaggaau

SEQ ID NO: 455566 - RNA, 19 nt, Artificial Sequence
  Description of Artificial Sequence: Synthetic oligonucleotide
  Antisense Strand to SEQ ID NO: 455565
auuccugcagacagacuug

SEQ ID NO: 455567 - RNA, 19 nt, Artificial Sequence
  Description of Artificial Sequence: Synthetic oligonucleotide
  Sense strand starting at position 250 of SEQ ID NO: 316987
gucugucugcaggaauaua

SEQ ID NO: 455568 - RNA, 19 nt, Artificial Sequence
  Description of Artificial Sequence: Synthetic oligonucleotide
  Antisense Strand to SEQ ID NO: 455567
uauauuccugcagacagac

SEQ ID NO: 455569 - RNA, 19 nt, Artificial Sequence
  Description of Artificial Sequence: Synthetic oligonucleotide
  Sense strand starting at position 309 of SEQ ID NO: 316987
caauuaccuuguguugaag

SEQ ID NO: 455570 - RNA, 19 nt, Artificial Sequence
  Description of Artificial Sequence: Synthetic oligonucleotide
  Antisense Strand to SEQ ID NO: 455569
cuucaacacaagguaauug

SEQ ID NO: 455571 - RNA, 19 nt, Artificial Sequence
  Description of Artificial Sequence: Synthetic oligonucleotide
  Sense strand starting at position 318 of SEQ ID NO: 316987
uguguugaaguguacaauu

SEQ ID NO: 455572 - RNA, 19 nt, Artificial Sequence
  Description of Artificial Sequence: Synthetic oligonucleotide
  Antisense Strand to SEQ ID NO: 455571
aauuguacacuucaacaca

SEQ ID NO: 455573 - RNA, 19 nt, Artificial Sequence
  Description of Artificial Sequence: Synthetic oligonucleotide
  Sense strand starting at position 789 of SEQ ID NO: 316987
cugucauagcgagcuuugu

SEQ ID NO: 455574 - RNA, 19 nt, Artificial Sequence
  Description of Artificial Sequence: Synthetic oligonucleotide
  Antisense Strand to SEQ ID NO: 455573
acaaagcucgcuaugacag

SEQ ID NO: 455575 - RNA, 19 nt, Artificial Sequence
  Description of Artificial Sequence: Synthetic oligonucleotide
  Sense strand starting at position 791 of SEQ ID NO: 316987
gucauagcgagcuuuguca

SEQ ID NO: 455576 - RNA, 19 nt, Artificial Sequence
  Description of Artificial Sequence: Synthetic oligonucleotide
  Antisense Strand to SEQ ID NO: 455575
ugacaaagcucgcuaugac

SEQ ID NO: 455577 - RNA, 19 nt, Artificial Sequence
  Description of Artificial Sequence: Synthetic oligonucleotide
  Sense strand starting at position 847 of SEQ ID NO: 316987
cagacauggucuguggaca

SEQ ID NO: 455578 - RNA, 19 nt, Artificial Sequence
  Description of Artificial Sequence: Synthetic oligonucleotide
  Antisense Strand to SEQ ID NO: 455577
uguccacagaccaugucug

SEQ ID NO: 455579 - RNA, 19 nt, Artificial Sequence
  Description of Artificial Sequence: Synthetic oligonucleotide
  Sense strand starting at position 848 of SEQ ID NO: 316987
agacauggucuguggacau

SEQ ID NO: 455580 - RNA, 19 nt, Artificial Sequence
  Description of Artificial Sequence: Synthetic oligonucleotide
  Antisense Strand to SEQ ID NO: 455579
auguccacagaccaugucu

SEQ ID NO: 455581 - RNA, 19 nt, Artificial Sequence
  Description of Artificial Sequence: Synthetic oligonucleotide
  Sense strand starting at position 917 of SEQ ID NO: 316987
acgacaagaucaucuuuaa

SEQ ID NO: 455582 - RNA, 19 nt, Artificial Sequence
  Description of Artificial Sequence: Synthetic oligonucleotide
  Antisense Strand to SEQ ID NO: 455581
uuaaagaugaucuugucgu

SEQ ID NO: 455583 - RNA, 19 nt, Artificial Sequence
  Description of Artificial Sequence: Synthetic oligonucleotide
  Sense strand starting at position 1045 of SEQ ID NO: 316987
aaaguugaagcucaugagu

SEQ ID NO: 455584 - RNA, 19 nt, Artificial Sequence
  Description of Artificial Sequence: Synthetic oligonucleotide
  Antisense Strand to SEQ ID NO: 455583
acucaugagcuucaacuuu

SEQ ID NO: 455585 - RNA, 19 nt, Artificial Sequence
  Description of Artificial Sequence: Synthetic oligonucleotide
  Sense strand starting at position 1152 of SEQ ID NO: 316987
uccgaacacuucuuggaga

SEQ ID NO: 455586 - RNA, 19 nt, Artificial Sequence
  Description of Artificial Sequence: Synthetic oligonucleotide
  Antisense Strand to SEQ ID NO: 455585
ucuccaagaaguguucgga

SEQ ID NO: 455587 - RNA, 19 nt, Artificial Sequence
  Description of Artificial Sequence: Synthetic oligonucleotide
  Sense strand starting at position 1154 of SEQ ID NO: 316987
cgaacacuucuuggagaau

SEQ ID NO: 455588 - RNA, 19 nt, Artificial Sequence
  Description of Artificial Sequence: Synthetic oligonucleotide
  Antisense Strand to SEQ ID NO: 455587
auucuccaagaaguguucg

SEQ ID NO: 455589 - RNA, 19 nt, Artificial Sequence
  Description of Artificial Sequence: Synthetic oligonucleotide
  Sense strand starting at position 1165 of SEQ ID NO: 316987
uggagaauuccgcgaaauu

SEQ ID NO: 455590 - RNA, 19 nt, Artificial Sequence
  Description of Artificial Sequence: Synthetic oligonucleotide
  Antisense Strand to SEQ ID NO: 455589
aauuucgcggaauucucca

SEQ ID NO: 455591 - RNA, 19 nt, Artificial Sequence
  Description of Artificial Sequence: Synthetic oligonucleotide
  Sense strand starting at position 1166 of SEQ ID NO: 316987
ggagaauuccgcgaaauug

SEQ ID NO: 455592 - RNA, 19 nt, Artificial Sequence
  Description of Artificial Sequence: Synthetic oligonucleotide
  Antisense Strand to SEQ ID NO: 455591
caauuucgcggaauucucc

SEQ ID NO: 455593 - RNA, 19 nt, Artificial Sequence
  Description of Artificial Sequence: Synthetic oligonucleotide
  Sense strand starting at position 1176 of SEQ ID NO: 316987
gcgaaauugacggaagagu

SEQ ID NO: 455594 - RNA, 19 nt, Artificial Sequence
  Description of Artificial Sequence: Synthetic oligonucleotide
  Antisense Strand to SEQ ID NO: 455593
acucuuccgucaauuucgc

SEQ ID NO: 455595 - RNA, 19 nt, Artificial Sequence
  Description of Artificial Sequence: Synthetic oligonucleotide
  Sense strand starting at position 1685 of SEQ ID NO: 316987
ccucgugaccgacauugaa

SEQ ID NO: 455596 - RNA, 19 nt, Artificial Sequence
  Description of Artificial Sequence: Synthetic oligonucleotide
  Antisense Strand to SEQ ID NO: 455595
uucaaugucggucacgagg

SEQ ID NO: 455597 - RNA, 19 nt, Artificial Sequence
  Description of Artificial Sequence: Synthetic oligonucleotide
  Sense strand starting at position 1880 of SEQ ID NO: 316987
ccacgaacccgaggguauu

SEQ ID NO: 455598 - RNA, 19 nt, Artificial Sequence
  Description of Artificial Sequence: Synthetic oligonucleotide
  Antisense Strand to SEQ ID NO: 455597
aauacccucggguucgugg

SEQ ID NO: 455599 - RNA, 19 nt, Artificial Sequence
  Description of Artificial Sequence: Synthetic oligonucleotide
  Sense strand starting at position 1890 of SEQ ID NO: 316987
gaggguauuggaggguauu

SEQ ID NO: 455600 - RNA, 19 nt, Artificial Sequence
  Description of Artificial Sequence: Synthetic oligonucleotide
  Antisense Strand to SEQ ID NO: 455599
aauacccuccaauacccuc

SEQ ID NO: 455601 - RNA, 19 nt, Artificial Sequence
  Description of Artificial Sequence: Synthetic oligonucleotide
  Sense strand starting at position 1893 of SEQ ID NO: 316987
gguauuggaggguauucuu

SEQ ID NO: 455602 - RNA, 19 nt, Artificial Sequence
  Description of Artificial Sequence: Synthetic oligonucleotide
  Antisense Strand to SEQ ID NO: 455601
aagaauacccuccaauacc

SEQ ID NO: 455603 - RNA, 19 nt, Artificial Sequence
  Description of Artificial Sequence: Synthetic oligonucleotide
  Sense strand starting at position 1990 of SEQ ID NO: 316987
ugaacugguuuaucucuaa

SEQ ID NO: 455604 - RNA, 19 nt, Artificial Sequence
  Description of Artificial Sequence: Synthetic oligonucleotide
  Antisense Strand to SEQ ID NO: 455603
uuagagauaaaccaguuca

SEQ ID NO: 455605 - RNA, 19 nt, Artificial Sequence
  Description of Artificial Sequence: Synthetic oligonucleotide
  Sense strand starting at position 2085 of SEQ ID NO: 316987
ccacuaaucugauugguuc

SEQ ID NO: 455606 - RNA, 19 nt, Artificial Sequence
  Description of Artificial Sequence: Synthetic oligonucleotide
  Antisense Strand to SEQ ID NO: 455605
gaaccaaucagauuagugg

SEQ ID NO: 455607 - RNA, 19 nt, Artificial Sequence
  Description of Artificial Sequence: Synthetic oligonucleotide
  Sense strand starting at position 2096 of SEQ ID NO: 316987
auugguucugacgauuauu

SEQ ID NO: 455608 - RNA, 19 nt, Artificial Sequence
  Description of Artificial Sequence: Synthetic oligonucleotide
  Antisense Strand to SEQ ID NO: 455607
aauaaucgucagaaccaau

SEQ ID NO: 455609 - RNA, 19 nt, Artificial Sequence
  Description of Artificial Sequence: Synthetic oligonucleotide
  Sense strand starting at position 2607 of SEQ ID NO: 316987
cccagagaauaauaaauga

SEQ ID NO: 455610 - RNA, 19 nt, Artificial Sequence
  Description of Artificial Sequence: Synthetic oligonucleotide
  Antisense Strand to SEQ ID NO: 455609
ucauuuauuauucucuggg

SEQ ID NO: 455611 - RNA, 19 nt, Artificial Sequence
  Description of Artificial Sequence: Synthetic oligonucleotide
  Sense strand starting at position 2810 of SEQ ID NO: 316987
gagggaguuucccucagaa

SEQ ID NO: 455612 - RNA, 19 nt, Artificial Sequence
  Description of Artificial Sequence: Synthetic oligonucleotide
  Antisense Strand to SEQ ID NO: 455611
uucugagggaaacucccuc

SEQ ID NO: 455613 - RNA, 19 nt, Artificial Sequence
  Description of Artificial Sequence: Synthetic oligonucleotide
  Sense strand starting at position 2849 of SEQ ID NO: 316987
uuugucucgggugacaaau

SEQ ID NO: 455614 - RNA, 19 nt, Artificial Sequence
  Description of Artificial Sequence: Synthetic oligonucleotide
  Antisense Strand to SEQ ID NO: 455613
auuugucacccgagacaaa

SEQ ID NO: 455615 - RNA, 19 nt, Artificial Sequence
  Description of Artificial Sequence: Synthetic oligonucleotide
  Sense strand starting at position 3197 of SEQ ID NO: 316987
cuccaagcuuggguuaaga

SEQ ID NO: 455616 - RNA, 19 nt, Artificial Sequence
  Description of Artificial Sequence: Synthetic oligonucleotide
  Antisense Strand to SEQ ID NO: 455615
ucuuaacccaagcuuggag

SEQ ID NO: 455617 - RNA, 19 nt, Artificial Sequence
  Description of Artificial Sequence: Synthetic oligonucleotide
  Sense strand starting at position 3323 of SEQ ID NO: 316987
ugugcuauuucugugguau

SEQ ID NO: 455618 - RNA, 19 nt, Artificial Sequence
  Description of Artificial Sequence: Synthetic oligonucleotide
  Antisense Strand to SEQ ID NO: 455617
auaccacagaaauagcaca

SEQ ID NO: 455619 - RNA, 19 nt, Artificial Sequence
  Description of Artificial Sequence: Synthetic oligonucleotide
  Sense strand starting at position 3324 of SEQ ID NO: 316987
gugcuauuucugugguauu

SEQ ID NO: 455620 - RNA, 19 nt, Artificial Sequence
  Description of Artificial Sequence: Synthetic oligonucleotide
  Antisense Strand to SEQ ID NO: 455619
aauaccacagaaauagcac

SEQ ID NO: 455621 - RNA, 19 nt, Artificial Sequence
  Description of Artificial Sequence: Synthetic oligonucleotide
  Sense strand starting at position 3327 of SEQ ID NO: 316987
cuauuucugugguauuuag

SEQ ID NO: 455622 - RNA, 19 nt, Artificial Sequence
  Description of Artificial Sequence: Synthetic oligonucleotide
  Antisense Strand to SEQ ID NO: 455621
cuaaauaccacagaaauag

SEQ ID NO: 455623 - RNA, 19 nt, Artificial Sequence
  Description of Artificial Sequence: Synthetic oligonucleotide
  Sense strand starting at position 3563 of SEQ ID NO: 316987
auggauaaugguuguccaa

SEQ ID NO: 455624 - RNA, 19 nt, Artificial Sequence
  Description of Artificial Sequence: Synthetic oligonucleotide
  Antisense Strand to SEQ ID NO: 455623
uuggacaaccauuauccau

SEQ ID NO: 455625 - RNA, 19 nt, Artificial Sequence
  Description of Artificial Sequence: Synthetic oligonucleotide
  Sense strand starting at position 3565 of SEQ ID NO: 316987
ggauaaugguuguccaaca

SEQ ID NO: 455626 - RNA, 19 nt, Artificial Sequence
  Description of Artificial Sequence: Synthetic oligonucleotide
  Antisense Strand to SEQ ID NO: 455625
uguuggacaaccauuaucc

SEQ ID NO: 455627 - RNA, 19 nt, Artificial Sequence
  Description of Artificial Sequence: Synthetic oligonucleotide
  Sense strand starting at position 3566 of SEQ ID NO: 316987
gauaaugguuguccaacau

SEQ ID NO: 455628 - RNA, 19 nt, Artificial Sequence
  Description of Artificial Sequence: Synthetic oligonucleotide
  Antisense Strand to SEQ ID NO: 455627
auguuggacaaccauuauc

SEQ ID NO: 455629 - RNA, 19 nt, Artificial Sequence
  Description of Artificial Sequence: Synthetic oligonucleotide
  Sense strand starting at position 3716 of SEQ ID NO: 316987
auuuaagggucccagaauu

SEQ ID NO: 455630 - RNA, 19 nt, Artificial Sequence
  Description of Artificial Sequence: Synthetic oligonucleotide
  Antisense Strand to SEQ ID NO: 455629
aauucugggacccuuaaau

SEQ ID NO: 455631 - RNA, 19 nt, Artificial Sequence
  Description of Artificial Sequence: Synthetic oligonucleotide
  Sense strand starting at position 3799 of SEQ ID NO: 316987
auuaguuacaaggguguua

SEQ ID NO: 455632 - RNA, 19 nt, Artificial Sequence
  Description of Artificial Sequence: Synthetic oligonucleotide
  Antisense Strand to SEQ ID NO: 455631
uaacacccuuguaacuaau

SEQ ID NO: 455633 - RNA, 19 nt, Artificial Sequence
  Description of Artificial Sequence: Synthetic oligonucleotide
  Sense strand starting at position 3801 of SEQ ID NO: 316987
uaguuacaaggguguuaua

SEQ ID NO: 455634 - RNA, 19 nt, Artificial Sequence
  Description of Artificial Sequence: Synthetic oligonucleotide
  Antisense Strand to SEQ ID NO: 455633
uauaacacccuuguaacua

SEQ ID NO: 455635 - RNA, 19 nt, Artificial Sequence
  Description of Artificial Sequence: Synthetic oligonucleotide
  Sense strand starting at position 3873 of SEQ ID NO: 316987
agcaauuagcagugagauc

SEQ ID NO: 455636 - RNA, 19 nt, Artificial Sequence
  Description of Artificial Sequence: Synthetic oligonucleotide
  Antisense Strand to SEQ ID NO: 455635
gaucucacugcuaauugcu

SEQ ID NO: 455637 - RNA, 19 nt, Artificial Sequence
  Description of Artificial Sequence: Synthetic oligonucleotide
  Sense strand starting at position 3874 of SEQ ID NO: 316987
gcaauuagcagugagauca

SEQ ID NO: 455638 - RNA, 19 nt, Artificial Sequence
  Description of Artificial Sequence: Synthetic oligonucleotide
  Antisense Strand to SEQ ID NO: 455637
ugaucucacugcuaauugc

SEQ ID NO: 455639 - RNA, 19 nt, Artificial Sequence
  Description of Artificial Sequence: Synthetic oligonucleotide
  Sense strand starting at position 3882 of SEQ ID NO: 316987
cagugagaucacuaaugca

SEQ ID NO: 455640 - RNA, 19 nt, Artificial Sequence
  Description of Artificial Sequence: Synthetic oligonucleotide
  Antisense Strand to SEQ ID NO: 455639
ugcauuagugaucucacug

SEQ ID NO: 455641 - RNA, 19 nt, Artificial Sequence
  Description of Artificial Sequence: Synthetic oligonucleotide
  Sense strand starting at position 103 of SEQ ID NO: 316988
aaucuaacuguaugaguag

SEQ ID NO: 455642 - RNA, 19 nt, Artificial Sequence
  Description of Artificial Sequence: Synthetic oligonucleotide
  Antisense Strand to SEQ ID NO: 455641
cuacucauacaguuagauu

SEQ ID NO: 455643 - RNA, 19 nt, Artificial Sequence
  Description of Artificial Sequence: Synthetic oligonucleotide
  Sense strand starting at position 112 of SEQ ID NO: 316988
guaugaguagcccaucaaa

SEQ ID NO: 455644 - RNA, 19 nt, Artificial Sequence
  Description of Artificial Sequence: Synthetic oligonucleotide
  Antisense Strand to SEQ ID NO: 455643
uuugaugggcuacucauac

SEQ ID NO: 455645 - RNA, 19 nt, Artificial Sequence
  Description of Artificial Sequence: Synthetic oligonucleotide
  Sense strand starting at position 490 of SEQ ID NO: 316988
uaaagcauccgguaucauu

SEQ ID NO: 455646 - RNA, 19 nt, Artificial Sequence
  Description of Artificial Sequence: Synthetic oligonucleotide
  Antisense Strand to SEQ ID NO: 455645
aaugauaccggaugcuuua

SEQ ID NO: 455647 - RNA, 19 nt, Artificial Sequence
  Description of Artificial Sequence: Synthetic oligonucleotide
  Sense strand starting at position 498 of SEQ ID NO: 316988
ccgguaucauuacucaacu

SEQ ID NO: 455648 - RNA, 19 nt, Artificial Sequence
  Description of Artificial Sequence: Synthetic oligonucleotide
  Antisense Strand to SEQ ID NO: 455647
aguugaguaaugauaccgg

SEQ ID NO: 455649 - RNA, 19 nt, Artificial Sequence
  Description of Artificial Sequence: Synthetic oligonucleotide
  Sense strand starting at position 583 of SEQ ID NO: 316988
agguaaccagucuaaguuu

SEQ ID NO: 455650 - RNA, 19 nt, Artificial Sequence
  Description of Artificial Sequence: Synthetic oligonucleotide
  Antisense Strand to SEQ ID NO: 455649
aaacuuagacugguuaccu

SEQ ID NO: 455651 - RNA, 19 nt, Artificial Sequence
  Description of Artificial Sequence: Synthetic oligonucleotide
  Sense strand starting at position 646 of SEQ ID NO: 316988
aaugacaaggguugcgaua

SEQ ID NO: 455652 - RNA, 19 nt, Artificial Sequence
  Description of Artificial Sequence: Synthetic oligonucleotide
  Antisense Strand to SEQ ID NO: 455651
uaucgcaacccuugucauu

SEQ ID NO: 455653 - RNA, 19 nt, Artificial Sequence
  Description of Artificial Sequence: Synthetic oligonucleotide
  Sense strand starting at position 664 of SEQ ID NO: 316988
acagcaguaucaguacuuu

SEQ ID NO: 455654 - RNA, 19 nt, Artificial Sequence
  Description of Artificial Sequence: Synthetic oligonucleotide
  Antisense Strand to SEQ ID NO: 455653
aaaguacugauacugcugu

SEQ ID NO: 455655 - RNA, 19 nt, Artificial Sequence
  Description of Artificial Sequence: Synthetic oligonucleotide
  Sense strand starting at position 835 of SEQ ID NO: 316988
acaagucugucugcaggaa

SEQ ID NO: 455656 - RNA, 19 nt, Artificial Sequence
  Description of Artificial Sequence: Synthetic oligonucleotide
  Antisense Strand to SEQ ID NO: 455655
uuccugcagacagacuugu

SEQ ID NO: 455657 - RNA, 19 nt, Artificial Sequence
  Description of Artificial Sequence: Synthetic oligonucleotide
  Sense strand starting at position 836 of SEQ ID NO: 316988
caagucugucugcaggaau

SEQ ID NO: 455658 - RNA, 19 nt, Artificial Sequence
  Description of Artificial Sequence: Synthetic oligonucleotide
  Antisense Strand to SEQ ID NO: 455657
auuccugcagacagacuug

SEQ ID NO: 455659 - RNA, 19 nt, Artificial Sequence
  Description of Artificial Sequence: Synthetic oligonucleotide
  Sense strand starting at position 839 of SEQ ID NO: 316988
gucugucugcaggaauaua

SEQ ID NO: 455660 - RNA, 19 nt, Artificial Sequence
  Description of Artificial Sequence: Synthetic oligonucleotide
  Antisense Strand to SEQ ID NO: 455659
uauauuccugcagacagac

SEQ ID NO: 455661 - RNA, 19 nt, Artificial Sequence
  Description of Artificial Sequence: Synthetic oligonucleotide
  Sense strand starting at position 898 of SEQ ID NO: 316988
caauuaccuuguguugaag

SEQ ID NO: 455662 - RNA, 19 nt, Artificial Sequence
  Description of Artificial Sequence: Synthetic oligonucleotide
  Antisense Strand to SEQ ID NO: 455661
cuucaacacaagguaauug

SEQ ID NO: 455663 - RNA, 19 nt, Artificial Sequence
  Description of Artificial Sequence: Synthetic oligonucleotide
  Sense strand starting at position 907 of SEQ ID NO: 316988
uguguugaaguguacaauu

SEQ ID NO: 455664 - RNA, 19 nt, Artificial Sequence
  Description of Artificial Sequence: Synthetic oligonucleotide
  Antisense Strand to SEQ ID NO: 455663
aauuguacacuucaacaca

SEQ ID NO: 455665 - RNA, 19 nt, Artificial Sequence
  Description of Artificial Sequence: Synthetic oligonucleotide
  Sense strand starting at position 1378 of SEQ ID NO: 316988
cugucauagcgagcuuugu

SEQ ID NO: 455666 - RNA, 19 nt, Artificial Sequence
  Description of Artificial Sequence: Synthetic oligonucleotide
  Antisense Strand to SEQ ID NO: 455665
acaaagcucgcuaugacag

SEQ ID NO: 455667 - RNA, 19 nt, Artificial Sequence
  Description of Artificial Sequence: Synthetic oligonucleotide
  Sense strand starting at position 1380 of SEQ ID NO: 316988
gucauagcgagcuuuguca

SEQ ID NO: 455668 - RNA, 19 nt, Artificial Sequence
  Description of Artificial Sequence: Synthetic oligonucleotide
  Antisense Strand to SEQ ID NO: 455667
ugacaaagcucgcuaugac

SEQ ID NO: 455669 - RNA, 19 nt, Artificial Sequence
  Description of Artificial Sequence: Synthetic oligonucleotide
  Sense strand starting at position 1436 of SEQ ID NO: 316988
cagacauggucuguggaca

SEQ ID NO: 455670 - RNA, 19 nt, Artificial Sequence
  Description of Artificial Sequence: Synthetic oligonucleotide
  Antisense Strand to SEQ ID NO: 455669
uguccacagaccaugucug

SEQ ID NO: 455671 - RNA, 19 nt, Artificial Sequence
  Description of Artificial Sequence: Synthetic oligonucleotide
  Sense strand starting at position 1437 of SEQ ID NO: 316988
agacauggucuguggacau

SEQ ID NO: 455672 - RNA, 19 nt, Artificial Sequence
  Description of Artificial Sequence: Synthetic oligonucleotide
  Antisense Strand to SEQ ID NO: 455671
auguccacagaccaugucu

SEQ ID NO: 455673 - RNA, 19 nt, Artificial Sequence
  Description of Artificial Sequence: Synthetic oligonucleotide
  Sense strand starting at position 1506 of SEQ ID NO: 316988
acgacaagaucaucuuuaa

SEQ ID NO: 455674 - RNA, 19 nt, Artificial Sequence
  Description of Artificial Sequence: Synthetic oligonucleotide
  Antisense Strand to SEQ ID NO: 455673
uuaaagaugaucuugucgu

SEQ ID NO: 455675 - RNA, 19 nt, Artificial Sequence
  Description of Artificial Sequence: Synthetic oligonucleotide
  Sense strand starting at position 1634 of SEQ ID NO: 316988
aaaguugaagcucaugagu

SEQ ID NO: 455676 - RNA, 19 nt, Artificial Sequence
  Description of Artificial Sequence: Synthetic oligonucleotide
  Antisense Strand to SEQ ID NO: 455675
acucaugagcuucaacuuu

SEQ ID NO: 455677 - RNA, 19 nt, Artificial Sequence
  Description of Artificial Sequence: Synthetic oligonucleotide
  Sense strand starting at position 1741 of SEQ ID NO: 316988
uccgaacacuucuuggaga

SEQ ID NO: 455678 - RNA, 19 nt, Artificial Sequence
  Description of Artificial Sequence: Synthetic oligonucleotide
  Antisense Strand to SEQ ID NO: 455677
ucuccaagaaguguucgga

SEQ ID NO: 455679 - RNA, 19 nt, Artificial Sequence
  Description of Artificial Sequence: Synthetic oligonucleotide
  Sense strand starting at position 1743 of SEQ ID NO: 316988
cgaacacuucuuggagaau

SEQ ID NO: 455680 - RNA, 19 nt, Artificial Sequence
  Description of Artificial Sequence: Synthetic oligonucleotide
  Antisense Strand to SEQ ID NO: 455679
auucuccaagaaguguucg

SEQ ID NO: 455681 - RNA, 19 nt, Artificial Sequence
  Description of Artificial Sequence: Synthetic oligonucleotide
  Sense strand starting at position 1754 of SEQ ID NO: 316988
uggagaauuccgcgaaauu

SEQ ID NO: 455682 - RNA, 19 nt, Artificial Sequence
  Description of Artificial Sequence: Synthetic oligonucleotide
  Antisense Strand to SEQ ID NO: 455681
aauuucgcggaauucucca

SEQ ID NO: 455683 - RNA, 19 nt, Artificial Sequence
  Description of Artificial Sequence: Synthetic oligonucleotide
  Sense strand starting at position 1755 of SEQ ID NO: 316988
ggagaauuccgcgaaauug

SEQ ID NO: 455684 - RNA, 19 nt, Artificial Sequence
  Description of Artificial Sequence: Synthetic oligonucleotide
  Antisense Strand to SEQ ID NO: 455683
caauuucgcggaauucucc

SEQ ID NO: 455685 - RNA, 19 nt, Artificial Sequence
  Description of Artificial Sequence: Synthetic oligonucleotide
  Sense strand starting at position 1765 of SEQ ID NO: 316988
gcgaaauugacggaagagu

SEQ ID NO: 455686 - RNA, 19 nt, Artificial Sequence
  Description of Artificial Sequence: Synthetic oligonucleotide
  Antisense Strand to SEQ ID NO: 455685
acucuuccgucaauuucgc

SEQ ID NO: 455687 - RNA, 19 nt, Artificial Sequence
  Description of Artificial Sequence: Synthetic oligonucleotide
  Sense strand starting at position 2274 of SEQ ID NO: 316988
ccucgugaccgacauugaa

SEQ ID NO: 455688 - RNA, 19 nt, Artificial Sequence
  Description of Artificial Sequence: Synthetic oligonucleotide
  Antisense Strand to SEQ ID NO: 455687
uucaaugucggucacgagg

SEQ ID NO: 455689 - RNA, 19 nt, Artificial Sequence
  Description of Artificial Sequence: Synthetic oligonucleotide
  Sense strand starting at position 2469 of SEQ ID NO: 316988
ccacgaacccgaggguauu

SEQ ID NO: 455690 - RNA, 19 nt, Artificial Sequence
  Description of Artificial Sequence: Synthetic oligonucleotide
  Antisense Strand to SEQ ID NO: 455689
aauacccucggguucgugg

SEQ ID NO: 455691 - RNA, 19 nt, Artificial Sequence
  Description of Artificial Sequence: Synthetic oligonucleotide
  Sense strand starting at position 2479 of SEQ ID NO: 316988
gaggguauuggaggguauu

SEQ ID NO: 455692 - RNA, 19 nt, Artificial Sequence
  Description of Artificial Sequence: Synthetic oligonucleotide
  Antisense Strand to SEQ ID NO: 455691
aauacccuccaauacccuc

SEQ ID NO: 455693 - RNA, 19 nt, Artificial Sequence
  Description of Artificial Sequence: Synthetic oligonucleotide
  Sense strand starting at position 2482 of SEQ ID NO: 316988
gguauuggaggguauucuu

SEQ ID NO: 455694 - RNA, 19 nt, Artificial Sequence
  Description of Artificial Sequence: Synthetic oligonucleotide
  Antisense Strand to SEQ ID NO: 455693
aagaauacccuccaauacc

SEQ ID NO: 455695 - RNA, 19 nt, Artificial Sequence
  Description of Artificial Sequence: Synthetic oligonucleotide
  Sense strand starting at position 2579 of SEQ ID NO: 316988
ugaacugguuuaucucuaa

SEQ ID NO: 455696 - RNA, 19 nt, Artificial Sequence
  Description of Artificial Sequence: Synthetic oligonucleotide
  Antisense Strand to SEQ ID NO: 455695
uuagagauaaaccaguuca

SEQ ID NO: 455697 - RNA, 19 nt, Artificial Sequence
  Description of Artificial Sequence: Synthetic oligonucleotide
  Sense strand starting at position 2583 of SEQ ID NO: 316988
cugguuuaucucuaacgca

SEQ ID NO: 455698 - RNA, 19 nt, Artificial Sequence
  Description of Artificial Sequence: Synthetic oligonucleotide
  Antisense Strand to SEQ ID NO: 455697
ugcguuagagauaaaccag

SEQ ID NO: 455699 - RNA, 19 nt, Artificial Sequence
  Description of Artificial Sequence: Synthetic oligonucleotide
  Sense strand starting at position 2674 of SEQ ID NO: 316988
ccacuaaucugauugguuc

SEQ ID NO: 455700 - RNA, 19 nt, Artificial Sequence
  Description of Artificial Sequence: Synthetic oligonucleotide
  Antisense Strand to SEQ ID NO: 455699
gaaccaaucagauuagugg

SEQ ID NO: 455701 - RNA, 19 nt, Artificial Sequence
  Description of Artificial Sequence: Synthetic oligonucleotide
  Sense strand starting at position 2685 of SEQ ID NO: 316988
auugguucugacgauuauu

SEQ ID NO: 455702 - RNA, 19 nt, Artificial Sequence
  Description of Artificial Sequence: Synthetic oligonucleotide
  Antisense Strand to SEQ ID NO: 455701
aauaaucgucagaaccaau

SEQ ID NO: 455703 - RNA, 19 nt, Artificial Sequence
  Description of Artificial Sequence: Synthetic oligonucleotide
  Sense strand starting at position 3196 of SEQ ID NO: 316988
cccagagaauaauaaauga

SEQ ID NO: 455704 - RNA, 19 nt, Artificial Sequence
  Description of Artificial Sequence: Synthetic oligonucleotide
  Antisense Strand to SEQ ID NO: 455703
ucauuuauuauucucuggg

SEQ ID NO: 455705 - RNA, 19 nt, Artificial Sequence
  Description of Artificial Sequence: Synthetic oligonucleotide
  Sense strand starting at position 3399 of SEQ ID NO: 316988
gagggaguuucccucagaa

SEQ ID NO: 455706 - RNA, 19 nt, Artificial Sequence
  Description of Artificial Sequence: Synthetic oligonucleotide
  Antisense Strand to SEQ ID NO: 455705
uucugagggaaacucccuc

SEQ ID NO: 455707 - RNA, 19 nt, Artificial Sequence
  Description of Artificial Sequence: Synthetic oligonucleotide
  Sense strand starting at position 3437 of SEQ ID NO: 316988
cuuugucucgggugacaaa

SEQ ID NO: 455708 - RNA, 19 nt, Artificial Sequence
  Description of Artificial Sequence: Synthetic oligonucleotide
  Antisense Strand to SEQ ID NO: 455707
uuugucacccgagacaaag

SEQ ID NO: 455709 - RNA, 19 nt, Artificial Sequence
  Description of Artificial Sequence: Synthetic oligonucleotide
  Sense strand starting at position 3438 of SEQ ID NO: 316988
uuugucucgggugacaaau

SEQ ID NO: 455710 - RNA, 19 nt, Artificial Sequence
  Description of Artificial Sequence: Synthetic oligonucleotide
  Antisense Strand to SEQ ID NO: 455709
auuugucacccgagacaaa

SEQ ID NO: 455711 - RNA, 19 nt, Artificial Sequence
  Description of Artificial Sequence: Synthetic oligonucleotide
  Sense strand starting at position 3450 of SEQ ID NO: 316988
gacaaauacugggagguaa

SEQ ID NO: 455712 - RNA, 19 nt, Artificial Sequence
  Description of Artificial Sequence: Synthetic oligonucleotide
  Antisense Strand to SEQ ID NO: 455711
uuaccucccaguauuuguc

SEQ ID NO: 455713 - RNA, 19 nt, Artificial Sequence
  Description of Artificial Sequence: Synthetic oligonucleotide
  Sense strand starting at position 3786 of SEQ ID NO: 316988
cuccaagcuuggguuaaga

SEQ ID NO: 455714 - RNA, 19 nt, Artificial Sequence
  Description of Artificial Sequence: Synthetic oligonucleotide
  Antisense Strand to SEQ ID NO: 455713
ucuuaacccaagcuuggag

SEQ ID NO: 455715 - RNA, 19 nt, Artificial Sequence
  Description of Artificial Sequence: Synthetic oligonucleotide
  Sense strand starting at position 3912 of SEQ ID NO: 316988
ugugcuauuucugugguau

SEQ ID NO: 455716 - RNA, 19 nt, Artificial Sequence
  Description of Artificial Sequence: Synthetic oligonucleotide
  Antisense Strand to SEQ ID NO: 455715
auaccacagaaauagcaca

SEQ ID NO: 455717 - RNA, 19 nt, Artificial Sequence
  Description of Artificial Sequence: Synthetic oligonucleotide
  Sense strand starting at position 3913 of SEQ ID NO: 316988
gugcuauuucugugguauu

SEQ ID NO: 455718 - RNA, 19 nt, Artificial Sequence
  Description of Artificial Sequence: Synthetic oligonucleotide
  Antisense Strand to SEQ ID NO: 455717
aauaccacagaaauagcac

SEQ ID NO: 455719 - RNA, 19 nt, Artificial Sequence
  Description of Artificial Sequence: Synthetic oligonucleotide
  Sense strand starting at position 3916 of SEQ ID NO: 316988
cuauuucugugguauuuag

SEQ ID NO: 455720 - RNA, 19 nt, Artificial Sequence
  Description of Artificial Sequence: Synthetic oligonucleotide
  Antisense Strand to SEQ ID NO: 455719
cuaaauaccacagaaauag

SEQ ID NO: 455721 - RNA, 19 nt, Artificial Sequence
  Description of Artificial Sequence: Synthetic oligonucleotide
  Sense strand starting at position 160 of SEQ ID NO: 316989
acaagucugucugcaggaa

SEQ ID NO: 455722 - RNA, 19 nt, Artificial Sequence
  Description of Artificial Sequence: Synthetic oligonucleotide
  Antisense Strand to SEQ ID NO: 455721
uuccugcagacagacuugu

SEQ ID NO: 455723 - RNA, 19 nt, Artificial Sequence
  Description of Artificial Sequence: Synthetic oligonucleotide
  Sense strand starting at position 161 of SEQ ID NO: 316989
caagucugucugcaggaau

SEQ ID NO: 455724 - RNA, 19 nt, Artificial Sequence
  Description of Artificial Sequence: Synthetic oligonucleotide
  Antisense Strand to SEQ ID NO: 455723
auuccugcagacagacuug

SEQ ID NO: 455725 - RNA, 19 nt, Artificial Sequence
  Description of Artificial Sequence: Synthetic oligonucleotide
  Sense strand starting at position 164 of SEQ ID NO: 316989
gucugucugcaggaauaua

SEQ ID NO: 455726 - RNA, 19 nt, Artificial Sequence
  Description of Artificial Sequence: Synthetic oligonucleotide
  Antisense Strand to SEQ ID NO: 455725
uauauuccugcagacagac

SEQ ID NO: 455727 - RNA, 19 nt, Artificial Sequence
  Description of Artificial Sequence: Synthetic oligonucleotide
  Sense strand starting at position 223 of SEQ ID NO: 316989
caauuaccuuguguugaag

SEQ ID NO: 455728 - RNA, 19 nt, Artificial Sequence
  Description of Artificial Sequence: Synthetic oligonucleotide
  Antisense Strand to SEQ ID NO: 455727
cuucaacacaagguaauug

SEQ ID NO: 455729 - RNA, 19 nt, Artificial Sequence
  Description of Artificial Sequence: Synthetic oligonucleotide
  Sense strand starting at position 232 of SEQ ID NO: 316989
uguguugaaguguacaauu

SEQ ID NO: 455730 - RNA, 19 nt, Artificial Sequence
  Description of Artificial Sequence: Synthetic oligonucleotide
  Antisense Strand to SEQ ID NO: 455729
aauuguacacuucaacaca

SEQ ID NO: 455731 - RNA, 19 nt, Artificial Sequence
  Description of Artificial Sequence: Synthetic oligonucleotide
  Sense strand starting at position 703 of SEQ ID NO: 316989
cugucauagcgagcuuugu

SEQ ID NO: 455732 - RNA, 19 nt, Artificial Sequence
  Description of Artificial Sequence: Synthetic oligonucleotide
  Antisense Strand to SEQ ID NO: 455731
acaaagcucgcuaugacag

SEQ ID NO: 455733 - RNA, 19 nt, Artificial Sequence
  Description of Artificial Sequence: Synthetic oligonucleotide
  Sense strand starting at position 705 of SEQ ID NO: 316989
gucauagcgagcuuuguca

SEQ ID NO: 455734 - RNA, 19 nt, Artificial Sequence
  Description of Artificial Sequence: Synthetic oligonucleotide
  Antisense Strand to SEQ ID NO: 455733
ugacaaagcucgcuaugac

SEQ ID NO: 455735 - RNA, 19 nt, Artificial Sequence
  Description of Artificial Sequence: Synthetic oligonucleotide
  Sense strand starting at position 761 of SEQ ID NO: 316989
cagacauggucuguggaca

SEQ ID NO: 455736 - RNA, 19 nt, Artificial Sequence
  Description of Artificial Sequence: Synthetic oligonucleotide
  Antisense Strand to SEQ ID NO: 455735
uguccacagaccaugucug

SEQ ID NO: 455737 - RNA, 19 nt, Artificial Sequence
  Description of Artificial Sequence: Synthetic oligonucleotide
  Sense strand starting at position 762 of SEQ ID NO: 316989
agacauggucuguggacau

SEQ ID NO: 455738 - RNA, 19 nt, Artificial Sequence
  Description of Artificial Sequence: Synthetic oligonucleotide
  Antisense Strand to SEQ ID NO: 455737
auguccacagaccaugucu

SEQ ID NO: 455739 - RNA, 19 nt, Artificial Sequence
  Description of Artificial Sequence: Synthetic oligonucleotide
  Sense strand starting at position 831 of SEQ ID NO: 316989
acgacaagaucaucuuuaa

SEQ ID NO: 455740 - RNA, 19 nt, Artificial Sequence
  Description of Artificial Sequence: Synthetic oligonucleotide
  Antisense Strand to SEQ ID NO: 455739
uuaaagaugaucuugucgu

SEQ ID NO: 455741 - RNA, 19 nt, Artificial Sequence
  Description of Artificial Sequence: Synthetic oligonucleotide
  Sense strand starting at position 959 of SEQ ID NO: 316989
aaaguugaagcucaugagu

SEQ ID NO: 455742 - RNA, 19 nt, Artificial Sequence
  Description of Artificial Sequence: Synthetic oligonucleotide
  Antisense Strand to SEQ ID NO: 455741
acucaugagcuucaacuuu

SEQ ID NO: 455743 - RNA, 19 nt, Artificial Sequence
  Description of Artificial Sequence: Synthetic oligonucleotide
  Sense strand starting at position 1066 of SEQ ID NO: 316989
uccgaacacuucuuggaga

SEQ ID NO: 455744 - RNA, 19 nt, Artificial Sequence
  Description of Artificial Sequence: Synthetic oligonucleotide
  Antisense Strand to SEQ ID NO: 455743
ucuccaagaaguguucgga

SEQ ID NO: 455745 - RNA, 19 nt, Artificial Sequence
  Description of Artificial Sequence: Synthetic oligonucleotide
  Sense strand starting at position 1068 of SEQ ID NO: 316989
cgaacacuucuuggagaau

SEQ ID NO: 455746 - RNA, 19 nt, Artificial Sequence
  Description of Artificial Sequence: Synthetic oligonucleotide
  Antisense Strand to SEQ ID NO: 455745
auucuccaagaaguguucg

SEQ ID NO: 455747 - RNA, 19 nt, Artificial Sequence
  Description of Artificial Sequence: Synthetic oligonucleotide
  Sense strand starting at position 1080 of SEQ ID NO: 316989
ggagaauuccgcgaaauug

SEQ ID NO: 455748 - RNA, 19 nt, Artificial Sequence
  Description of Artificial Sequence: Synthetic oligonucleotide
  Antisense Strand to SEQ ID NO: 455747
caauuucgcggaauucucc

SEQ ID NO: 455749 - RNA, 19 nt, Artificial Sequence
  Description of Artificial Sequence: Synthetic oligonucleotide
  Sense strand starting at position 1090 of SEQ ID NO: 316989
gcgaaauugacggaagagu

SEQ ID NO: 455750 - RNA, 19 nt, Artificial Sequence
  Description of Artificial Sequence: Synthetic oligonucleotide
  Antisense Strand to SEQ ID NO: 455749
acucuuccgucaauuucgc

SEQ ID NO: 455751 - RNA, 19 nt, Artificial Sequence
  Description of Artificial Sequence: Synthetic oligonucleotide
  Sense strand starting at position 1599 of SEQ ID NO: 316989
ccucgugaccgacauugaa

SEQ ID NO: 455752 - RNA, 19 nt, Artificial Sequence
  Description of Artificial Sequence: Synthetic oligonucleotide
  Antisense Strand to SEQ ID NO: 455751
uucaaugucggucacgagg

SEQ ID NO: 455753 - RNA, 19 nt, Artificial Sequence
  Description of Artificial Sequence: Synthetic oligonucleotide
  Sense strand starting at position 1804 of SEQ ID NO: 316989
gaggguauuggaggguauu

SEQ ID NO: 455754 - RNA, 19 nt, Artificial Sequence
  Description of Artificial Sequence: Synthetic oligonucleotide
  Antisense Strand to SEQ ID NO: 455753
aauacccuccaauacccuc

SEQ ID NO: 455755 - RNA, 19 nt, Artificial Sequence
  Description of Artificial Sequence: Synthetic oligonucleotide
  Sense strand starting at position 1807 of SEQ ID NO: 316989
gguauuggaggguauucuu

SEQ ID NO: 455756 - RNA, 19 nt, Artificial Sequence
  Description of Artificial Sequence: Synthetic oligonucleotide
  Antisense Strand to SEQ ID NO: 455755
aagaauacccuccaauacc

SEQ ID NO: 455757 - RNA, 19 nt, Artificial Sequence
  Description of Artificial Sequence: Synthetic oligonucleotide
  Sense strand starting at position 1904 of SEQ ID NO: 316989
ugaacugguuuaucucuaa

SEQ ID NO: 455758 - RNA, 19 nt, Artificial Sequence
  Description of Artificial Sequence: Synthetic oligonucleotide
  Antisense Strand to SEQ ID NO: 455757
uuagagauaaaccaguuca

SEQ ID NO: 455759 - RNA, 19 nt, Artificial Sequence
  Description of Artificial Sequence: Synthetic oligonucleotide
  Sense strand starting at position 1999 of SEQ ID NO: 316989
ccacuaaucugauugguuc

SEQ ID NO: 455760 - RNA, 19 nt, Artificial Sequence
  Description of Artificial Sequence: Synthetic oligonucleotide
  Antisense Strand to SEQ ID NO: 455759
gaaccaaucagauuagugg

SEQ ID NO: 455761 - RNA, 19 nt, Artificial Sequence
  Description of Artificial Sequence: Synthetic oligonucleotide
  Sense strand starting at position 2010 of SEQ ID NO: 316989
auugguucugacgauuauu

SEQ ID NO: 455762 - RNA, 19 nt, Artificial Sequence
  Description of Artificial Sequence: Synthetic oligonucleotide
  Antisense Strand to SEQ ID NO: 455761
aauaaucgucagaaccaau

SEQ ID NO: 455763 - RNA, 19 nt, Artificial Sequence
  Description of Artificial Sequence: Synthetic oligonucleotide
  Sense strand starting at position 2521 of SEQ ID NO: 316989
cccagagaauaauaaauga

SEQ ID NO: 455764 - RNA, 19 nt, Artificial Sequence
  Description of Artificial Sequence: Synthetic oligonucleotide
  Antisense Strand to SEQ ID NO: 455763
ucauuuauuauucucuggg

SEQ ID NO: 455765 - RNA, 19 nt, Artificial Sequence
  Description of Artificial Sequence: Synthetic oligonucleotide
  Sense strand starting at position 2724 of SEQ ID NO: 316989
gagggaguuucccucagaa

SEQ ID NO: 455766 - RNA, 19 nt, Artificial Sequence
  Description of Artificial Sequence: Synthetic oligonucleotide
  Antisense Strand to SEQ ID NO: 455765
uucugagggaaacucccuc

SEQ ID NO: 455767 - RNA, 19 nt, Artificial Sequence
  Description of Artificial Sequence: Synthetic oligonucleotide
  Sense strand starting at position 2763 of SEQ ID NO: 316989
uuugucucgggugacaaau

SEQ ID NO: 455768 - RNA, 19 nt, Artificial Sequence
  Description of Artificial Sequence: Synthetic oligonucleotide
  Antisense Strand to SEQ ID NO: 455767
auuugucacccgagacaaa

SEQ ID NO: 455769 - RNA, 19 nt, Artificial Sequence
  Description of Artificial Sequence: Synthetic oligonucleotide
  Sense strand starting at position 3111 of SEQ ID NO: 316989
cuccaagcuuggguuaaga

SEQ ID NO: 455770 - RNA, 19 nt, Artificial Sequence
  Description of Artificial Sequence: Synthetic oligonucleotide
  Antisense Strand to SEQ ID NO: 455769
ucuuaacccaagcuuggag

SEQ ID NO: 455771 - RNA, 19 nt, Artificial Sequence
  Description of Artificial Sequence: Synthetic oligonucleotide
  Sense strand starting at position 3237 of SEQ ID NO: 316989
ugugcuauuucugugguau

SEQ ID NO: 455772 - RNA, 19 nt, Artificial Sequence
  Description of Artificial Sequence: Synthetic oligonucleotide
  Antisense Strand to SEQ ID NO: 455771
auaccacagaaauagcaca

SEQ ID NO: 455773 - RNA, 19 nt, Artificial Sequence
  Description of Artificial Sequence: Synthetic oligonucleotide
  Sense strand starting at position 3238 of SEQ ID NO: 316989
gugcuauuucugugguauu

SEQ ID NO: 455774 - RNA, 19 nt, Artificial Sequence
  Description of Artificial Sequence: Synthetic oligonucleotide
  Antisense Strand to SEQ ID NO: 455773
aauaccacagaaauagcac

SEQ ID NO: 455775 - RNA, 19 nt, Artificial Sequence
  Description of Artificial Sequence: Synthetic oligonucleotide
  Sense strand starting at position 3241 of SEQ ID NO: 316989
cuauuucugugguauuuag

SEQ ID NO: 455776 - RNA, 19 nt, Artificial Sequence
  Description of Artificial Sequence: Synthetic oligonucleotide
  Antisense Strand to SEQ ID NO: 455775
cuaaauaccacagaaauag

SEQ ID NO: 455777 - RNA, 19 nt, Artificial Sequence
  Description of Artificial Sequence: Synthetic oligonucleotide
  Sense strand starting at position 3477 of SEQ ID NO: 316989
auggauaaugguuguccaa

SEQ ID NO: 455778 - RNA, 19 nt, Artificial Sequence
  Description of Artificial Sequence: Synthetic oligonucleotide
  Antisense Strand to SEQ ID NO: 455777
uuggacaaccauuauccau

SEQ ID NO: 455779 - RNA, 19 nt, Artificial Sequence
  Description of Artificial Sequence: Synthetic oligonucleotide
  Sense strand starting at position 3479 of SEQ ID NO: 316989
ggauaaugguuguccaaca

SEQ ID NO: 455780 - RNA, 19 nt, Artificial Sequence
  Description of Artificial Sequence: Synthetic oligonucleotide
  Antisense Strand to SEQ ID NO: 455779
uguuggacaaccauuaucc

SEQ ID NO: 455781 - RNA, 19 nt, Artificial Sequence
  Description of Artificial Sequence: Synthetic oligonucleotide
  Sense strand starting at position 3480 of SEQ ID NO: 316989
gauaaugguuguccaacau

SEQ ID NO: 455782 - RNA, 19 nt, Artificial Sequence
  Description of Artificial Sequence: Synthetic oligonucleotide
  Antisense Strand to SEQ ID NO: 455781
auguuggacaaccauuauc

SEQ ID NO: 455783 - RNA, 19 nt, Artificial Sequence
  Description of Artificial Sequence: Synthetic oligonucleotide
  Sense strand starting at position 3630 of SEQ ID NO: 316989
auuuaagggucccagaauu

SEQ ID NO: 455784 - RNA, 19 nt, Artificial Sequence
  Description of Artificial Sequence: Synthetic oligonucleotide
  Antisense Strand to SEQ ID NO: 455783
aauucugggacccuuaaau

SEQ ID NO: 455785 - RNA, 19 nt, Artificial Sequence
  Description of Artificial Sequence: Synthetic oligonucleotide
  Sense strand starting at position 3713 of SEQ ID NO: 316989
auuaguuacaaggguguua

SEQ ID NO: 455786 - RNA, 19 nt, Artificial Sequence
  Description of Artificial Sequence: Synthetic oligonucleotide
  Antisense Strand to SEQ ID NO: 455785
uaacacccuuguaacuaau

SEQ ID NO: 455787 - RNA, 19 nt, Artificial Sequence
  Description of Artificial Sequence: Synthetic oligonucleotide
  Sense strand starting at position 3715 of SEQ ID NO: 316989
uaguuacaaggguguuaua

SEQ ID NO: 455788 - RNA, 19 nt, Artificial Sequence
  Description of Artificial Sequence: Synthetic oligonucleotide
  Antisense Strand to SEQ ID NO: 455787
uauaacacccuuguaacua

SEQ ID NO: 455789 - RNA, 19 nt, Artificial Sequence
  Description of Artificial Sequence: Synthetic oligonucleotide
  Sense strand starting at position 3787 of SEQ ID NO: 316989
agcaauuagcagugagauc

SEQ ID NO: 455790 - RNA, 19 nt, Artificial Sequence
  Description of Artificial Sequence: Synthetic oligonucleotide
  Antisense Strand to SEQ ID NO: 455789
gaucucacugcuaauugcu

SEQ ID NO: 455791 - RNA, 19 nt, Artificial Sequence
  Description of Artificial Sequence: Synthetic oligonucleotide
  Sense strand starting at position 3788 of SEQ ID NO: 316989
gcaauuagcagugagauca

SEQ ID NO: 455792 - RNA, 19 nt, Artificial Sequence
  Description of Artificial Sequence: Synthetic oligonucleotide
  Antisense Strand to SEQ ID NO: 455791
ugaucucacugcuaauugc

SEQ ID NO: 455793 - RNA, 19 nt, Artificial Sequence
  Description of Artificial Sequence: Synthetic oligonucleotide
  Sense strand starting at position 3796 of SEQ ID NO: 316989
cagugagaucacuaaugca

SEQ ID NO: 455794 - RNA, 19 nt, Artificial Sequence
  Description of Artificial Sequence: Synthetic oligonucleotide
  Antisense Strand to SEQ ID NO: 455793
ugcauuagugaucucacug

SEQ ID NO: 455795 - RNA, 19 nt, Artificial Sequence
  Description of Artificial Sequence: Synthetic oligonucleotide
  Sense strand starting at position 3916 of SEQ ID NO: 316989
cuguguauugaauaugcca

SEQ ID NO: 455796 - RNA, 19 nt, Artificial Sequence
  Description of Artificial Sequence: Synthetic oligonucleotide
  Antisense Strand to SEQ ID NO: 455795
uggcauauucaauacacag

SEQ ID NO: 455797 - RNA, 19 nt, Artificial Sequence
  Description of Artificial Sequence: Synthetic oligonucleotide
  Sense strand starting at position 3944 of SEQ ID NO: 316989
cuuggcagucgagauacaa

SEQ ID NO: 455798 - RNA, 19 nt, Artificial Sequence
  Description of Artificial Sequence: Synthetic oligonucleotide
  Antisense Strand to SEQ ID NO: 455797
uuguaucucgacugccaag

SEQ ID NO: 455799 - RNA, 19 nt, Artificial Sequence
  Description of Artificial Sequence: Synthetic oligonucleotide
  Sense strand starting at position 3948 of SEQ ID NO: 316989
gcagucgagauacaaagau

SEQ ID NO: 455800 - RNA, 19 nt, Artificial Sequence
  Description of Artificial Sequence: Synthetic oligonucleotide
  Antisense Strand to SEQ ID NO: 455799
aucuuuguaucucgacugc

SEQ ID NO: 455801 - RNA, 19 nt, Artificial Sequence
  Description of Artificial Sequence: Synthetic oligonucleotide
  Sense strand starting at position 121 of SEQ ID NO: 316990
uagacagagucgcucgauu

SEQ ID NO: 455802 - RNA, 19 nt, Artificial Sequence
  Description of Artificial Sequence: Synthetic oligonucleotide
  Antisense Strand to SEQ ID NO: 455801
aaucgagcgacucugucua

SEQ ID NO: 455803 - RNA, 19 nt, Artificial Sequence
  Description of Artificial Sequence: Synthetic oligonucleotide
  Sense strand starting at position 123 of SEQ ID NO: 316990
gacagagucgcucgauuuc

SEQ ID NO: 455804 - RNA, 19 nt, Artificial Sequence
  Description of Artificial Sequence: Synthetic oligonucleotide
  Antisense Strand to SEQ ID NO: 455803
gaaaucgagcgacucuguc

SEQ ID NO: 455805 - RNA, 19 nt, Artificial Sequence
  Description of Artificial Sequence: Synthetic oligonucleotide
  Sense strand starting at position 130 of SEQ ID NO: 316990
ucgcucgauuucugggaaa

SEQ ID NO: 455806 - RNA, 19 nt, Artificial Sequence
  Description of Artificial Sequence: Synthetic oligonucleotide
  Antisense Strand to SEQ ID NO: 455805
uuucccagaaaucgagcga

SEQ ID NO: 455807 - RNA, 19 nt, Artificial Sequence
  Description of Artificial Sequence: Synthetic oligonucleotide
  Sense strand starting at position 133 of SEQ ID NO: 316990
cucgauuucugggaaacca

SEQ ID NO: 455808 - RNA, 19 nt, Artificial Sequence
  Description of Artificial Sequence: Synthetic oligonucleotide
  Antisense Strand to SEQ ID NO: 455807
ugguuucccagaaaucgag

SEQ ID NO: 455809 - RNA, 19 nt, Artificial Sequence
  Description of Artificial Sequence: Synthetic oligonucleotide
  Sense strand starting at position 161 of SEQ ID NO: 316990
ugcucaagucuacgugaag

SEQ ID NO: 455810 - RNA, 19 nt, Artificial Sequence
  Description of Artificial Sequence: Synthetic oligonucleotide
  Antisense Strand to SEQ ID NO: 455809
cuucacguagacuugagca

SEQ ID NO: 455811 - RNA, 19 nt, Artificial Sequence
  Description of Artificial Sequence: Synthetic oligonucleotide
  Sense strand starting at position 258 of SEQ ID NO: 316990
aggguuaucuaacaaguga

SEQ ID NO: 455812 - RNA, 19 nt, Artificial Sequence
  Description of Artificial Sequence: Synthetic oligonucleotide
  Antisense Strand to SEQ ID NO: 455811
ucacuuguuagauaacccu

SEQ ID NO: 455813 - RNA, 19 nt, Artificial Sequence
  Description of Artificial Sequence: Synthetic oligonucleotide
  Sense strand starting at position 944 of SEQ ID NO: 316990
ucggaucacucuuggguuu

SEQ ID NO: 455814 - RNA, 19 nt, Artificial Sequence
  Description of Artificial Sequence: Synthetic oligonucleotide
  Antisense Strand to SEQ ID NO: 455813
aaacccaagagugauccga

SEQ ID NO: 455815 - RNA, 19 nt, Artificial Sequence
  Description of Artificial Sequence: Synthetic oligonucleotide
  Sense strand starting at position 1059 of SEQ ID NO: 316990
cgccuucuccuguaucuuu

SEQ ID NO: 455816 - RNA, 19 nt, Artificial Sequence
  Description of Artificial Sequence: Synthetic oligonucleotide
  Antisense Strand to SEQ ID NO: 455815
aaagauacaggagaaggcg

SEQ ID NO: 455817 - RNA, 19 nt, Artificial Sequence
  Description of Artificial Sequence: Synthetic oligonucleotide
  Sense strand starting at position 1725 of SEQ ID NO: 316990
gcagguucucgaugaggaa

SEQ ID NO: 455818 - RNA, 19 nt, Artificial Sequence
  Description of Artificial Sequence: Synthetic oligonucleotide
  Antisense Strand to SEQ ID NO: 455817
uuccucaucgagaaccugc

SEQ ID NO: 455819 - RNA, 19 nt, Artificial Sequence
  Description of Artificial Sequence: Synthetic oligonucleotide
  Sense strand starting at position 2256 of SEQ ID NO: 316990
guccgaucccgcgugauca

SEQ ID NO: 455820 - RNA, 19 nt, Artificial Sequence
  Description of Artificial Sequence: Synthetic oligonucleotide
  Antisense Strand to SEQ ID NO: 455819
ugaucacgcgggaucggac

SEQ ID NO: 455821 - RNA, 19 nt, Artificial Sequence
  Description of Artificial Sequence: Synthetic oligonucleotide
  Sense strand starting at position 2380 of SEQ ID NO: 316990
cggccagagccguaauuac

SEQ ID NO: 455822 - RNA, 19 nt, Artificial Sequence
  Description of Artificial Sequence: Synthetic oligonucleotide
  Antisense Strand to SEQ ID NO: 455821
guaauuacggcucuggccg

SEQ ID NO: 455823 - RNA, 19 nt, Artificial Sequence
  Description of Artificial Sequence: Synthetic oligonucleotide
  Sense strand starting at position 2463 of SEQ ID NO: 316990
gcacgagugugcguuugaa

SEQ ID NO: 455824 - RNA, 19 nt, Artificial Sequence
  Description of Artificial Sequence: Synthetic oligonucleotide
  Antisense Strand to SEQ ID NO: 455823
uucaaacgcacacucgugc

SEQ ID NO: 455825 - RNA, 19 nt, Artificial Sequence
  Description of Artificial Sequence: Synthetic oligonucleotide
  Sense strand starting at position 2465 of SEQ ID NO: 316990
acgagugugcguuugaaug

SEQ ID NO: 455826 - RNA, 19 nt, Artificial Sequence
  Description of Artificial Sequence: Synthetic oligonucleotide
  Antisense Strand to SEQ ID NO: 455825
cauucaaacgcacacucgu

SEQ ID NO: 455827 - RNA, 19 nt, Artificial Sequence
  Description of Artificial Sequence: Synthetic oligonucleotide
  Sense strand starting at position 2559 of SEQ ID NO: 316990
uauuuaagacuuugugugu

SEQ ID NO: 455828 - RNA, 19 nt, Artificial Sequence
  Description of Artificial Sequence: Synthetic oligonucleotide
  Antisense Strand to SEQ ID NO: 455827
acacacaaagucuuaaaua

SEQ ID NO: 455829 - RNA, 19 nt, Artificial Sequence
  Description of Artificial Sequence: Synthetic oligonucleotide
  Sense strand starting at position 2562 of SEQ ID NO: 316990
uuaagacuuuguguguaau

SEQ ID NO: 455830 - RNA, 19 nt, Artificial Sequence
  Description of Artificial Sequence: Synthetic oligonucleotide
  Antisense Strand to SEQ ID NO: 455829
auuacacacaaagucuuaa

SEQ ID NO: 455831 - RNA, 19 nt, Artificial Sequence
  Description of Artificial Sequence: Synthetic oligonucleotide
  Sense strand starting at position 2563 of SEQ ID NO: 316990
uaagacuuuguguguaauu

SEQ ID NO: 455832 - RNA, 19 nt, Artificial Sequence
  Description of Artificial Sequence: Synthetic oligonucleotide
  Antisense Strand to SEQ ID NO: 455831
aauuacacacaaagucuua

SEQ ID NO: 455833 - RNA, 19 nt, Artificial Sequence
  Description of Artificial Sequence: Synthetic oligonucleotide
  Sense strand starting at position 2608 of SEQ ID NO: 316990
gacugcgaaauguggcaua

SEQ ID NO: 455834 - RNA, 19 nt, Artificial Sequence
  Description of Artificial Sequence: Synthetic oligonucleotide
  Antisense Strand to SEQ ID NO: 455833
uaugccacauuucgcaguc

SEQ ID NO: 455835 - RNA, 19 nt, Artificial Sequence
  Description of Artificial Sequence: Synthetic oligonucleotide
  Sense strand starting at position 2611 of SEQ ID NO: 316990
ugcgaaauguggcauaucu

SEQ ID NO: 455836 - RNA, 19 nt, Artificial Sequence
  Description of Artificial Sequence: Synthetic oligonucleotide
  Antisense Strand to SEQ ID NO: 455835
agauaugccacauuucgca

SEQ ID NO: 455837 - RNA, 19 nt, Artificial Sequence
  Description of Artificial Sequence: Synthetic oligonucleotide
  Sense strand starting at position 2613 of SEQ ID NO: 316990
cgaaauguggcauaucuua

SEQ ID NO: 455838 - RNA, 19 nt, Artificial Sequence
  Description of Artificial Sequence: Synthetic oligonucleotide
  Antisense Strand to SEQ ID NO: 455837
uaagauaugccacauuucg

SEQ ID NO: 455839 - RNA, 19 nt, Artificial Sequence
  Description of Artificial Sequence: Synthetic oligonucleotide
  Sense strand starting at position 2664 of SEQ ID NO: 316990
ccaacuguaguucgguaga

SEQ ID NO: 455840 - RNA, 19 nt, Artificial Sequence
  Description of Artificial Sequence: Synthetic oligonucleotide
  Antisense Strand to SEQ ID NO: 455839
ucuaccgaacuacaguugg

SEQ ID NO: 455841 - RNA, 19 nt, Artificial Sequence
  Description of Artificial Sequence: Synthetic oligonucleotide
  Sense strand starting at position 2666 of SEQ ID NO: 316990
aacuguaguucgguagaac

SEQ ID NO: 455842 - RNA, 19 nt, Artificial Sequence
  Description of Artificial Sequence: Synthetic oligonucleotide
  Antisense Strand to SEQ ID NO: 455841
guucuaccgaacuacaguu

SEQ ID NO: 455843 - RNA, 19 nt, Artificial Sequence
  Description of Artificial Sequence: Synthetic oligonucleotide
  Sense strand starting at position 2667 of SEQ ID NO: 316990
acuguaguucgguagaacu

SEQ ID NO: 455844 - RNA, 19 nt, Artificial Sequence
  Description of Artificial Sequence: Synthetic oligonucleotide
  Antisense Strand to SEQ ID NO: 455843
aguucuaccgaacuacagu

SEQ ID NO: 455845 - RNA, 19 nt, Artificial Sequence
  Description of Artificial Sequence: Synthetic oligonucleotide
  Sense strand starting at position 2669 of SEQ ID NO: 316990
uguaguucgguagaacucu

SEQ ID NO: 455846 - RNA, 19 nt, Artificial Sequence
  Description of Artificial Sequence: Synthetic oligonucleotide
  Antisense Strand to SEQ ID NO: 455845
agaguucuaccgaacuaca

SEQ ID NO: 455847 - RNA, 19 nt, Artificial Sequence
  Description of Artificial Sequence: Synthetic oligonucleotide
  Sense strand starting at position 2703 of SEQ ID NO: 316990
gguaccaguauguaaggaa

SEQ ID NO: 455848 - RNA, 19 nt, Artificial Sequence
  Description of Artificial Sequence: Synthetic oligonucleotide
  Antisense Strand to SEQ ID NO: 455847
uuccuuacauacugguacc

SEQ ID NO: 455849 - RNA, 19 nt, Artificial Sequence
  Description of Artificial Sequence: Synthetic oligonucleotide
  Sense strand starting at position 2900 of SEQ ID NO: 316990
cuccguuucuucgcucuaa

SEQ ID NO: 455850 - RNA, 19 nt, Artificial Sequence
  Description of Artificial Sequence: Synthetic oligonucleotide
  Antisense Strand to SEQ ID NO: 455849
uuagagcgaagaaacggag

SEQ ID NO: 455851 - RNA, 19 nt, Artificial Sequence
  Description of Artificial Sequence: Synthetic oligonucleotide
  Sense strand starting at position 2901 of SEQ ID NO: 316990
uccguuucuucgcucuaaa

SEQ ID NO: 455852 - RNA, 19 nt, Artificial Sequence
  Description of Artificial Sequence: Synthetic oligonucleotide
  Antisense Strand to SEQ ID NO: 455851
uuuagagcgaagaaacgga

SEQ ID NO: 455853 - RNA, 19 nt, Artificial Sequence
  Description of Artificial Sequence: Synthetic oligonucleotide
  Sense strand starting at position 2948 of SEQ ID NO: 316990
gcgggaaguucgggaacau

SEQ ID NO: 455854 - RNA, 19 nt, Artificial Sequence
  Description of Artificial Sequence: Synthetic oligonucleotide
  Antisense Strand to SEQ ID NO: 455853
auguucccgaacuucccgc

SEQ ID NO: 455855 - RNA, 19 nt, Artificial Sequence
  Description of Artificial Sequence: Synthetic oligonucleotide
  Sense strand starting at position 2949 of SEQ ID NO: 316990
cgggaaguucgggaacaua

SEQ ID NO: 455856 - RNA, 19 nt, Artificial Sequence
  Description of Artificial Sequence: Synthetic oligonucleotide
  Antisense Strand to SEQ ID NO: 455855
uauguucccgaacuucccg

SEQ ID NO: 455857 - RNA, 19 nt, Artificial Sequence
  Description of Artificial Sequence: Synthetic oligonucleotide
  Sense strand starting at position 3060 of SEQ ID NO: 316990
cgaugcgaguuauuucgca

SEQ ID NO: 455858 - RNA, 19 nt, Artificial Sequence
  Description of Artificial Sequence: Synthetic oligonucleotide
  Antisense Strand to SEQ ID NO: 455857
ugcgaaauaacucgcaucg

SEQ ID NO: 455859 - RNA, 19 nt, Artificial Sequence
  Description of Artificial Sequence: Synthetic oligonucleotide
  Sense strand starting at position 3064 of SEQ ID NO: 316990
gcgaguuauuucgcagaga

SEQ ID NO: 455860 - RNA, 19 nt, Artificial Sequence
  Description of Artificial Sequence: Synthetic oligonucleotide
  Antisense Strand to SEQ ID NO: 455859
ucucugcgaaauaacucgc

SEQ ID NO: 455861 - RNA, 19 nt, Artificial Sequence
  Description of Artificial Sequence: Synthetic oligonucleotide
  Sense strand starting at position 3065 of SEQ ID NO: 316990
cgaguuauuucgcagagau

SEQ ID NO: 455862 - RNA, 19 nt, Artificial Sequence
  Description of Artificial Sequence: Synthetic oligonucleotide
  Antisense Strand to SEQ ID NO: 455861
aucucugcgaaauaacucg

SEQ ID NO: 455863 - RNA, 19 nt, Artificial Sequence
  Description of Artificial Sequence: Synthetic oligonucleotide
  Sense strand starting at position 3164 of SEQ ID NO: 316990
gggcuuccgcuuuguuuaa

SEQ ID NO: 455864 - RNA, 19 nt, Artificial Sequence
  Description of Artificial Sequence: Synthetic oligonucleotide
  Antisense Strand to SEQ ID NO: 455863
uuaaacaaagcggaagccc

SEQ ID NO: 455865 - RNA, 19 nt, Artificial Sequence
  Description of Artificial Sequence: Synthetic oligonucleotide
  Sense strand starting at position 3165 of SEQ ID NO: 316990
ggcuuccgcuuuguuuaau

SEQ ID NO: 455866 - RNA, 19 nt, Artificial Sequence
  Description of Artificial Sequence: Synthetic oligonucleotide
  Antisense Strand to SEQ ID NO: 455865
auuaaacaaagcggaagcc

SEQ ID NO: 455867 - RNA, 19 nt, Artificial Sequence
  Description of Artificial Sequence: Synthetic oligonucleotide
  Sense strand starting at position 3166 of SEQ ID NO: 316990
gcuuccgcuuuguuuaauu

SEQ ID NO: 455868 - RNA, 19 nt, Artificial Sequence
  Description of Artificial Sequence: Synthetic oligonucleotide
  Antisense Strand to SEQ ID NO: 455867
aauuaaacaaagcggaagc

SEQ ID NO: 455869 - RNA, 19 nt, Artificial Sequence
  Description of Artificial Sequence: Synthetic oligonucleotide
  Sense strand starting at position 3607 of SEQ ID NO: 316990
guuguuuagccuggaggca

SEQ ID NO: 455870 - RNA, 19 nt, Artificial Sequence
  Description of Artificial Sequence: Synthetic oligonucleotide
  Antisense Strand to SEQ ID NO: 455869
ugccuccaggcuaaacaac

SEQ ID NO: 455871 - RNA, 19 nt, Artificial Sequence
  Description of Artificial Sequence: Synthetic oligonucleotide
  Sense strand starting at position 3681 of SEQ ID NO: 316990
uggagagaguugggaucuu

SEQ ID NO: 455872 - RNA, 19 nt, Artificial Sequence
  Description of Artificial Sequence: Synthetic oligonucleotide
  Antisense Strand to SEQ ID NO: 455871
aagaucccaacucucucca

SEQ ID NO: 455873 - RNA, 19 nt, Artificial Sequence
  Description of Artificial Sequence: Synthetic oligonucleotide
  Sense strand starting at position 3734 of SEQ ID NO: 316990
ugggauguccagggucaga

SEQ ID NO: 455874 - RNA, 19 nt, Artificial Sequence
  Description of Artificial Sequence: Synthetic oligonucleotide
  Antisense Strand to SEQ ID NO: 455873
ucugacccuggacauccca

SEQ ID NO: 455875 - RNA, 19 nt, Artificial Sequence
  Description of Artificial Sequence: Synthetic oligonucleotide
  Sense strand starting at position 3815 of SEQ ID NO: 316990
gcgcccgauucgauuaguu

SEQ ID NO: 455876 - RNA, 19 nt, Artificial Sequence
  Description of Artificial Sequence: Synthetic oligonucleotide
  Antisense Strand to SEQ ID NO: 455875
aacuaaucgaaucgggcgc

SEQ ID NO: 455877 - RNA, 19 nt, Artificial Sequence
  Description of Artificial Sequence: Synthetic oligonucleotide
  Sense strand starting at position 3817 of SEQ ID NO: 316990
gcccgauucgauuaguuug

SEQ ID NO: 455878 - RNA, 19 nt, Artificial Sequence
  Description of Artificial Sequence: Synthetic oligonucleotide
  Antisense Strand to SEQ ID NO: 455877
caaacuaaucgaaucgggc

SEQ ID NO: 455879 - RNA, 19 nt, Artificial Sequence
  Description of Artificial Sequence: Synthetic oligonucleotide
  Sense strand starting at position 3825 of SEQ ID NO: 316990
cgauuaguuuggagcgcua

SEQ ID NO: 455880 - RNA, 19 nt, Artificial Sequence
  Description of Artificial Sequence: Synthetic oligonucleotide
  Antisense Strand to SEQ ID NO: 455879
uagcgcuccaaacuaaucg

SEQ ID NO: 455881 - RNA, 19 nt, Artificial Sequence
  Description of Artificial Sequence: Synthetic oligonucleotide
  Sense strand starting at position 56 of SEQ ID NO: 316991
ggcucuuucucaguaaagg

SEQ ID NO: 455882 - RNA, 19 nt, Artificial Sequence
  Description of Artificial Sequence: Synthetic oligonucleotide
  Antisense Strand to SEQ ID NO: 455881
ccuuuacugagaaagagcc

SEQ ID NO: 455883 - RNA, 19 nt, Artificial Sequence
  Description of Artificial Sequence: Synthetic oligonucleotide
  Sense strand starting at position 57 of SEQ ID NO: 316991
gcucuuucucaguaaagga

SEQ ID NO: 455884 - RNA, 19 nt, Artificial Sequence
  Description of Artificial Sequence: Synthetic oligonucleotide
  Antisense Strand to SEQ ID NO: 455883
uccuuuacugagaaagagc

SEQ ID NO: 455885 - RNA, 19 nt, Artificial Sequence
  Description of Artificial Sequence: Synthetic oligonucleotide
  Sense strand starting at position 67 of SEQ ID NO: 316991
aguaaaggaaaucguguuu

SEQ ID NO: 455886 - RNA, 19 nt, Artificial Sequence
  Description of Artificial Sequence: Synthetic oligonucleotide
  Antisense Strand to SEQ ID NO: 455885
aaacacgauuuccuuuacu

SEQ ID NO: 455887 - RNA, 19 nt, Artificial Sequence
  Description of Artificial Sequence: Synthetic oligonucleotide
  Sense strand starting at position 95 of SEQ ID NO: 316991
agauuaaagcgacaucuug

SEQ ID NO: 455888 - RNA, 19 nt, Artificial Sequence
  Description of Artificial Sequence: Synthetic oligonucleotide
  Antisense Strand to SEQ ID NO: 455887
caagaugucgcuuuaaucu

SEQ ID NO: 455889 - RNA, 19 nt, Artificial Sequence
  Description of Artificial Sequence: Synthetic oligonucleotide
  Sense strand starting at position 209 of SEQ ID NO: 316991
acgaucaucggucaguaau

SEQ ID NO: 455890 - RNA, 19 nt, Artificial Sequence
  Description of Artificial Sequence: Synthetic oligonucleotide
  Antisense Strand to SEQ ID NO: 455889
auuacugaccgaugaucgu

SEQ ID NO: 455891 - RNA, 19 nt, Artificial Sequence
  Description of Artificial Sequence: Synthetic oligonucleotide
  Sense strand starting at position 330 of SEQ ID NO: 316991
agauuuagguaguauauac

SEQ ID NO: 455892 - RNA, 19 nt, Artificial Sequence
  Description of Artificial Sequence: Synthetic oligonucleotide
  Antisense Strand to SEQ ID NO: 455891
guauauacuaccuaaaucu

SEQ ID NO: 455893 - RNA, 19 nt, Artificial Sequence
  Description of Artificial Sequence: Synthetic oligonucleotide
  Sense strand starting at position 479 of SEQ ID NO: 316991
ggaaacagauaucaagaca

SEQ ID NO: 455894 - RNA, 19 nt, Artificial Sequence
  Description of Artificial Sequence: Synthetic oligonucleotide
  Antisense Strand to SEQ ID NO: 455893
ugucuugauaucuguuucc

SEQ ID NO: 455895 - RNA, 19 nt, Artificial Sequence
  Description of Artificial Sequence: Synthetic oligonucleotide
  Sense strand starting at position 625 of SEQ ID NO: 316991
gggugcgcgguuagaauaa

SEQ ID NO: 455896 - RNA, 19 nt, Artificial Sequence
  Description of Artificial Sequence: Synthetic oligonucleotide
  Antisense Strand to SEQ ID NO: 455895
uuauucuaaccgcgcaccc

SEQ ID NO: 455897 - RNA, 19 nt, Artificial Sequence
  Description of Artificial Sequence: Synthetic oligonucleotide
  Sense strand starting at position 666 of SEQ ID NO: 316991
agaugcuaggccggagaua

SEQ ID NO: 455898 - RNA, 19 nt, Artificial Sequence
  Description of Artificial Sequence: Synthetic oligonucleotide
  Antisense Strand to SEQ ID NO: 455897
uaucuccggccuagcaucu

SEQ ID NO: 455899 - RNA, 19 nt, Artificial Sequence
  Description of Artificial Sequence: Synthetic oligonucleotide
  Sense strand starting at position 788 of SEQ ID NO: 316991
cccaauuuggucugcaugu

SEQ ID NO: 455900 - RNA, 19 nt, Artificial Sequence
  Description of Artificial Sequence: Synthetic oligonucleotide
  Antisense Strand to SEQ ID NO: 455899
acaugcagaccaaauuggg

SEQ ID NO: 455901 - RNA, 19 nt, Artificial Sequence
  Description of Artificial Sequence: Synthetic oligonucleotide
  Sense strand starting at position 809 of SEQ ID NO: 316991
aaauguagggccuguauga

SEQ ID NO: 455902 - RNA, 19 nt, Artificial Sequence
  Description of Artificial Sequence: Synthetic oligonucleotide
  Antisense Strand to SEQ ID NO: 455901
ucauacaggcccuacauuu

SEQ ID NO: 455903 - RNA, 19 nt, Artificial Sequence
  Description of Artificial Sequence: Synthetic oligonucleotide
  Sense strand starting at position 863 of SEQ ID NO: 316991
ugaguaaauccuuaggcga

SEQ ID NO: 455904 - RNA, 19 nt, Artificial Sequence
  Description of Artificial Sequence: Synthetic oligonucleotide
  Antisense Strand to SEQ ID NO: 455903
ucgccuaaggauuuacuca

SEQ ID NO: 455905 - RNA, 19 nt, Artificial Sequence
  Description of Artificial Sequence: Synthetic oligonucleotide
  Sense strand starting at position 1410 of SEQ ID NO: 316991
acuaguugggccugacuau

SEQ ID NO: 455906 - RNA, 19 nt, Artificial Sequence
  Description of Artificial Sequence: Synthetic oligonucleotide
  Antisense Strand to SEQ ID NO: 455905
auagucaggcccaacuagu

SEQ ID NO: 455907 - RNA, 19 nt, Artificial Sequence
  Description of Artificial Sequence: Synthetic oligonucleotide
  Sense strand starting at position 2174 of SEQ ID NO: 316991
ggaagugucgugagcuaag

SEQ ID NO: 455908 - RNA, 19 nt, Artificial Sequence
  Description of Artificial Sequence: Synthetic oligonucleotide
  Antisense Strand to SEQ ID NO: 455907
cuuagcucacgacacuucc

SEQ ID NO: 455909 - RNA, 19 nt, Artificial Sequence
  Description of Artificial Sequence: Synthetic oligonucleotide
  Sense strand starting at position 2278 of SEQ ID NO: 316991
cgaggauuccuggagucca

SEQ ID NO: 455910 - RNA, 19 nt, Artificial Sequence
  Description of Artificial Sequence: Synthetic oligonucleotide
  Antisense Strand to SEQ ID NO: 455909
uggacuccaggaauccucg

SEQ ID NO: 455911 - RNA, 19 nt, Artificial Sequence
  Description of Artificial Sequence: Synthetic oligonucleotide
  Sense strand starting at position 2432 of SEQ ID NO: 316991
gcggcuuaagccuggauuu

SEQ ID NO: 455912 - RNA, 19 nt, Artificial Sequence
  Description of Artificial Sequence: Synthetic oligonucleotide
  Antisense Strand to SEQ ID NO: 455911
aaauccaggcuuaagccgc

SEQ ID NO: 455913 - RNA, 19 nt, Artificial Sequence
  Description of Artificial Sequence: Synthetic oligonucleotide
  Sense strand starting at position 2433 of SEQ ID NO: 316991
cggcuuaagccuggauuua

SEQ ID NO: 455914 - RNA, 19 nt, Artificial Sequence
  Description of Artificial Sequence: Synthetic oligonucleotide
  Antisense Strand to SEQ ID NO: 455913
uaaauccaggcuuaagccg

SEQ ID NO: 455915 - RNA, 19 nt, Artificial Sequence
  Description of Artificial Sequence: Synthetic oligonucleotide
  Sense strand starting at position 2464 of SEQ ID NO: 316991
gggaauuagcccugagaug

SEQ ID NO: 455916 - RNA, 19 nt, Artificial Sequence
  Description of Artificial Sequence: Synthetic oligonucleotide
  Antisense Strand to SEQ ID NO: 455915
caucucagggcuaauuccc

SEQ ID NO: 455917 - RNA, 19 nt, Artificial Sequence
  Description of Artificial Sequence: Synthetic oligonucleotide
  Sense strand starting at position 2465 of SEQ ID NO: 316991
ggaauuagcccugagaugu

SEQ ID NO: 455918 - RNA, 19 nt, Artificial Sequence
  Description of Artificial Sequence: Synthetic oligonucleotide
  Antisense Strand to SEQ ID NO: 455917
acaucucagggcuaauucc

SEQ ID NO: 455919 - RNA, 19 nt, Artificial Sequence
  Description of Artificial Sequence: Synthetic oligonucleotide
  Sense strand starting at position 2729 of SEQ ID NO: 316991
agguaacuugcauaucuua

SEQ ID NO: 455920 - RNA, 19 nt, Artificial Sequence
  Description of Artificial Sequence: Synthetic oligonucleotide
  Antisense Strand to SEQ ID NO: 455919
uaagauaugcaaguuaccu

SEQ ID NO: 455921 - RNA, 19 nt, Artificial Sequence
  Description of Artificial Sequence: Synthetic oligonucleotide
  Sense strand starting at position 2814 of SEQ ID NO: 316991
cguuacuaauaauuggaaa

SEQ ID NO: 455922 - RNA, 19 nt, Artificial Sequence
  Description of Artificial Sequence: Synthetic oligonucleotide
  Antisense Strand to SEQ ID NO: 455921
uuuccaauuauuaguaacg

SEQ ID NO: 455923 - RNA, 19 nt, Artificial Sequence
  Description of Artificial Sequence: Synthetic oligonucleotide
  Sense strand starting at position 2822 of SEQ ID NO: 316991
auaauuggaaaguguguua

SEQ ID NO: 455924 - RNA, 19 nt, Artificial Sequence
  Description of Artificial Sequence: Synthetic oligonucleotide
  Antisense Strand to SEQ ID NO: 455923
uaacacacuuuccaauuau

SEQ ID NO: 455925 - RNA, 19 nt, Artificial Sequence
  Description of Artificial Sequence: Synthetic oligonucleotide
  Sense strand starting at position 2825 of SEQ ID NO: 316991
auuggaaaguguguuaaau

SEQ ID NO: 455926 - RNA, 19 nt, Artificial Sequence
  Description of Artificial Sequence: Synthetic oligonucleotide
  Antisense Strand to SEQ ID NO: 455925
auuuaacacacuuuccaau

SEQ ID NO: 455927 - RNA, 19 nt, Artificial Sequence
  Description of Artificial Sequence: Synthetic oligonucleotide
  Sense strand starting at position 2840 of SEQ ID NO: 316991
aaaucaaggguucgcuuaa

SEQ ID NO: 455928 - RNA, 19 nt, Artificial Sequence
  Description of Artificial Sequence: Synthetic oligonucleotide
  Antisense Strand to SEQ ID NO: 455927
uuaagcgaacccuugauuu

SEQ ID NO: 455929 - RNA, 19 nt, Artificial Sequence
  Description of Artificial Sequence: Synthetic oligonucleotide
  Sense strand starting at position 2886 of SEQ ID NO: 316991
uauaaaugucgugagucau

SEQ ID NO: 455930 - RNA, 19 nt, Artificial Sequence
  Description of Artificial Sequence: Synthetic oligonucleotide
  Antisense Strand to SEQ ID NO: 455929
augacucacgacauuuaua

SEQ ID NO: 455931 - RNA, 19 nt, Artificial Sequence
  Description of Artificial Sequence: Synthetic oligonucleotide
  Sense strand starting at position 2896 of SEQ ID NO: 316991
gugagucaucuuuacgagg

SEQ ID NO: 455932 - RNA, 19 nt, Artificial Sequence
  Description of Artificial Sequence: Synthetic oligonucleotide
  Antisense Strand to SEQ ID NO: 455931
ccucguaaagaugacucac

SEQ ID NO: 455933 - RNA, 19 nt, Artificial Sequence
  Description of Artificial Sequence: Synthetic oligonucleotide
  Sense strand starting at position 2905 of SEQ ID NO: 316991
cuuuacgagguuuaugagu

SEQ ID NO: 455934 - RNA, 19 nt, Artificial Sequence
  Description of Artificial Sequence: Synthetic oligonucleotide
  Antisense Strand to SEQ ID NO: 455933
acucauaaaccucguaaag

SEQ ID NO: 455935 - RNA, 19 nt, Artificial Sequence
  Description of Artificial Sequence: Synthetic oligonucleotide
  Sense strand starting at position 2986 of SEQ ID NO: 316991
accguuaggcguuucauua

SEQ ID NO: 455936 - RNA, 19 nt, Artificial Sequence
  Description of Artificial Sequence: Synthetic oligonucleotide
  Antisense Strand to SEQ ID NO: 455935
uaaugaaacgccuaacggu

SEQ ID NO: 455937 - RNA, 19 nt, Artificial Sequence
  Description of Artificial Sequence: Synthetic oligonucleotide
  Sense strand starting at position 2987 of SEQ ID NO: 316991
ccguuaggcguuucauuaa

SEQ ID NO: 455938 - RNA, 19 nt, Artificial Sequence
  Description of Artificial Sequence: Synthetic oligonucleotide
  Antisense Strand to SEQ ID NO: 455937
uuaaugaaacgccuaacgg

SEQ ID NO: 455939 - RNA, 19 nt, Artificial Sequence
  Description of Artificial Sequence: Synthetic oligonucleotide
  Sense strand starting at position 3128 of SEQ ID NO: 316991
uagguacuucuguagucaa

SEQ ID NO: 455940 - RNA, 19 nt, Artificial Sequence
  Description of Artificial Sequence: Synthetic oligonucleotide
  Antisense Strand to SEQ ID NO: 455939
uugacuacagaaguaccua

SEQ ID NO: 455941 - RNA, 19 nt, Artificial Sequence
  Description of Artificial Sequence: Synthetic oligonucleotide
  Sense strand starting at position 3131 of SEQ ID NO: 316991
guacuucuguagucaacaa

SEQ ID NO: 455942 - RNA, 19 nt, Artificial Sequence
  Description of Artificial Sequence: Synthetic oligonucleotide
  Antisense Strand to SEQ ID NO: 455941
uuguugacuacagaaguac

SEQ ID NO: 455943 - RNA, 19 nt, Artificial Sequence
  Description of Artificial Sequence: Synthetic oligonucleotide
  Sense strand starting at position 3615 of SEQ ID NO: 316991
ggaagauuauaaguaaguu

SEQ ID NO: 455944 - RNA, 19 nt, Artificial Sequence
  Description of Artificial Sequence: Synthetic oligonucleotide
  Antisense Strand to SEQ ID NO: 455943
aacuuacuuauaaucuucc

SEQ ID NO: 455945 - RNA, 19 nt, Artificial Sequence
  Description of Artificial Sequence: Synthetic oligonucleotide
  Sense strand starting at position 3766 of SEQ ID NO: 316991
caagaauguuuaccguaaa

SEQ ID NO: 455946 - RNA, 19 nt, Artificial Sequence
  Description of Artificial Sequence: Synthetic oligonucleotide
  Antisense Strand to SEQ ID NO: 455945
uuuacgguaaacauucuug

SEQ ID NO: 455947 - RNA, 19 nt, Artificial Sequence
  Description of Artificial Sequence: Synthetic oligonucleotide
  Sense strand starting at position 3769 of SEQ ID NO: 316991
gaauguuuaccguaaagug

SEQ ID NO: 455948 - RNA, 19 nt, Artificial Sequence
  Description of Artificial Sequence: Synthetic oligonucleotide
  Antisense Strand to SEQ ID NO: 455947
cacuuuacgguaaacauuc

SEQ ID NO: 455949 - RNA, 19 nt, Artificial Sequence
  Description of Artificial Sequence: Synthetic oligonucleotide
  Sense strand starting at position 3778 of SEQ ID NO: 316991
ccguaaagugguagugacu

SEQ ID NO: 455950 - RNA, 19 nt, Artificial Sequence
  Description of Artificial Sequence: Synthetic oligonucleotide
  Antisense Strand to SEQ ID NO: 455949
agucacuaccacuuuacgg

SEQ ID NO: 455951 - RNA, 19 nt, Artificial Sequence
  Description of Artificial Sequence: Synthetic oligonucleotide
  Sense strand starting at position 3841 of SEQ ID NO: 316991
ggauauggugcucaaacca

SEQ ID NO: 455952 - RNA, 19 nt, Artificial Sequence
  Description of Artificial Sequence: Synthetic oligonucleotide
  Antisense Strand to SEQ ID NO: 455951
ugguuugagcaccauaucc

SEQ ID NO: 455953 - RNA, 19 nt, Artificial Sequence
  Description of Artificial Sequence: Synthetic oligonucleotide
  Sense strand starting at position 3857 of SEQ ID NO: 316991
ccauauauuccggguuaga

SEQ ID NO: 455954 - RNA, 19 nt, Artificial Sequence
  Description of Artificial Sequence: Synthetic oligonucleotide
  Antisense Strand to SEQ ID NO: 455953
ucuaacccggaauauaugg

SEQ ID NO: 455955 - RNA, 19 nt, Artificial Sequence
  Description of Artificial Sequence: Synthetic oligonucleotide
  Sense strand starting at position 3860 of SEQ ID NO: 316991
uauauuccggguuagauac

SEQ ID NO: 455956 - RNA, 19 nt, Artificial Sequence
  Description of Artificial Sequence: Synthetic oligonucleotide
  Antisense Strand to SEQ ID NO: 455955
guaucuaacccggaauaua

SEQ ID NO: 455957 - RNA, 19 nt, Artificial Sequence
  Description of Artificial Sequence: Synthetic oligonucleotide
  Sense strand starting at position 3873 of SEQ ID NO: 316991
agauacaacuaagaugauu

SEQ ID NO: 455958 - RNA, 19 nt, Artificial Sequence
  Description of Artificial Sequence: Synthetic oligonucleotide
  Antisense Strand to SEQ ID NO: 455957
aaucaucuuaguuguaucu

SEQ ID NO: 455959 - RNA, 19 nt, Artificial Sequence
  Description of Artificial Sequence: Synthetic oligonucleotide
  Sense strand starting at position 3898 of SEQ ID NO: 316991
agggaagucuguuuaaucu

SEQ ID NO: 455960 - RNA, 19 nt, Artificial Sequence
  Description of Artificial Sequence: Synthetic oligonucleotide
  Antisense Strand to SEQ ID NO: 455959
agauuaaacagacuucccu

SEQ ID NO: 455961 - RNA, 19 nt, Artificial Sequence
  Description of Artificial Sequence: Synthetic oligonucleotide
  Sense strand starting at position 156 of SEQ ID NO: 316992
cgagacaaguacucuguca

SEQ ID NO: 455962 - RNA, 19 nt, Artificial Sequence
  Description of Artificial Sequence: Synthetic oligonucleotide
  Antisense Strand to SEQ ID NO: 455961
ugacagaguacuugucucg

SEQ ID NO: 455963 - RNA, 19 nt, Artificial Sequence
  Description of Artificial Sequence: Synthetic oligonucleotide
  Sense strand starting at position 158 of SEQ ID NO: 316992
agacaaguacucugucaga

SEQ ID NO: 455964 - RNA, 19 nt, Artificial Sequence
  Description of Artificial Sequence: Synthetic oligonucleotide
  Antisense Strand to SEQ ID NO: 455963
ucugacagaguacuugucu

SEQ ID NO: 455965 - RNA, 19 nt, Artificial Sequence
  Description of Artificial Sequence: Synthetic oligonucleotide
  Sense strand starting at position 279 of SEQ ID NO: 316992
cuggaauuaaaucgugaaa

SEQ ID NO: 455966 - RNA, 19 nt, Artificial Sequence
  Description of Artificial Sequence: Synthetic oligonucleotide
  Antisense Strand to SEQ ID NO: 455965
uuucacgauuuaauuccag

SEQ ID NO: 455967 - RNA, 19 nt, Artificial Sequence
  Description of Artificial Sequence: Synthetic oligonucleotide
  Sense strand starting at position 318 of SEQ ID NO: 316992
cccuaaguguaggcaauuu

SEQ ID NO: 455968 - RNA, 19 nt, Artificial Sequence
  Description of Artificial Sequence: Synthetic oligonucleotide
  Antisense Strand to SEQ ID NO: 455967
aaauugccuacacuuaggg

SEQ ID NO: 455969 - RNA, 19 nt, Artificial Sequence
  Description of Artificial Sequence: Synthetic oligonucleotide
  Sense strand starting at position 375 of SEQ ID NO: 316992
ccaauaucccaacgaaguu

SEQ ID NO: 455970 - RNA, 19 nt, Artificial Sequence
  Description of Artificial Sequence: Synthetic oligonucleotide
  Antisense Strand to SEQ ID NO: 455969
aacuucguugggauauugg

SEQ ID NO: 455971 - RNA, 19 nt, Artificial Sequence
  Description of Artificial Sequence: Synthetic oligonucleotide
  Sense strand starting at position 463 of SEQ ID NO: 316992
aguaaagguucugcccaga

SEQ ID NO: 455972 - RNA, 19 nt, Artificial Sequence
  Description of Artificial Sequence: Synthetic oligonucleotide
  Antisense Strand to SEQ ID NO: 455971
ucugggcagaaccuuuacu

SEQ ID NO: 455973 - RNA, 19 nt, Artificial Sequence
  Description of Artificial Sequence: Synthetic oligonucleotide
  Sense strand starting at position 474 of SEQ ID NO: 316992
ugcccagauuccuuuaggu

SEQ ID NO: 455974 - RNA, 19 nt, Artificial Sequence
  Description of Artificial Sequence: Synthetic oligonucleotide
  Antisense Strand to SEQ ID NO: 455973
accuaaaggaaucugggca

SEQ ID NO: 455975 - RNA, 19 nt, Artificial Sequence
  Description of Artificial Sequence: Synthetic oligonucleotide
  Sense strand starting at position 476 of SEQ ID NO: 316992
cccagauuccuuuagguag

SEQ ID NO: 455976 - RNA, 19 nt, Artificial Sequence
  Description of Artificial Sequence: Synthetic oligonucleotide
  Antisense Strand to SEQ ID NO: 455975
cuaccuaaaggaaucuggg

SEQ ID NO: 455977 - RNA, 19 nt, Artificial Sequence
  Description of Artificial Sequence: Synthetic oligonucleotide
  Sense strand starting at position 608 of SEQ ID NO: 316992
ugugaaucuggguaccagu

SEQ ID NO: 455978 - RNA, 19 nt, Artificial Sequence
  Description of Artificial Sequence: Synthetic oligonucleotide
  Antisense Strand to SEQ ID NO: 455977
acugguacccagauucaca

SEQ ID NO: 455979 - RNA, 19 nt, Artificial Sequence
  Description of Artificial Sequence: Synthetic oligonucleotide
  Sense strand starting at position 918 of SEQ ID NO: 316992
ggaaucgacucugagaaag

SEQ ID NO: 455980 - RNA, 19 nt, Artificial Sequence
  Description of Artificial Sequence: Synthetic oligonucleotide
  Antisense Strand to SEQ ID NO: 455979
cuuucucagagucgauucc

SEQ ID NO: 455981 - RNA, 19 nt, Artificial Sequence
  Description of Artificial Sequence: Synthetic oligonucleotide
  Sense strand starting at position 920 of SEQ ID NO: 316992
aaucgacucugagaaagaa

SEQ ID NO: 455982 - RNA, 19 nt, Artificial Sequence
  Description of Artificial Sequence: Synthetic oligonucleotide
  Antisense Strand to SEQ ID NO: 455981
uucuuucucagagucgauu

SEQ ID NO: 455983 - RNA, 19 nt, Artificial Sequence
  Description of Artificial Sequence: Synthetic oligonucleotide
  Sense strand starting at position 1035 of SEQ ID NO: 316992
ugauucuugcucgcguuga

SEQ ID NO: 455984 - RNA, 19 nt, Artificial Sequence
  Description of Artificial Sequence: Synthetic oligonucleotide
  Antisense Strand to SEQ ID NO: 455983
ucaacgcgagcaagaauca

SEQ ID NO: 455985 - RNA, 19 nt, Artificial Sequence
  Description of Artificial Sequence: Synthetic oligonucleotide
  Sense strand starting at position 1055 of SEQ ID NO: 316992
cuuggaucccucugcgaau

SEQ ID NO: 455986 - RNA, 19 nt, Artificial Sequence
  Description of Artificial Sequence: Synthetic oligonucleotide
  Antisense Strand to SEQ ID NO: 455985
auucgcagagggauccaag

SEQ ID NO: 455987 - RNA, 19 nt, Artificial Sequence
  Description of Artificial Sequence: Synthetic oligonucleotide
  Sense strand starting at position 1056 of SEQ ID NO: 316992
uuggaucccucugcgaauu

SEQ ID NO: 455988 - RNA, 19 nt, Artificial Sequence
  Description of Artificial Sequence: Synthetic oligonucleotide
  Antisense Strand to SEQ ID NO: 455987
aauucgcagagggauccaa

SEQ ID NO: 455989 - RNA, 19 nt, Artificial Sequence
  Description of Artificial Sequence: Synthetic oligonucleotide
  Sense strand starting at position 1064 of SEQ ID NO: 316992
cucugcgaauuccucuaua

SEQ ID NO: 455990 - RNA, 19 nt, Artificial Sequence
  Description of Artificial Sequence: Synthetic oligonucleotide
  Antisense Strand to SEQ ID NO: 455989
uauagaggaauucgcagag

SEQ ID NO: 455991 - RNA, 19 nt, Artificial Sequence
  Description of Artificial Sequence: Synthetic oligonucleotide
  Sense strand starting at position 1067 of SEQ ID NO: 316992
ugcgaauuccucuauauug

SEQ ID NO: 455992 - RNA, 19 nt, Artificial Sequence
  Description of Artificial Sequence: Synthetic oligonucleotide
  Antisense Strand to SEQ ID NO: 455991
caauauagaggaauucgca

SEQ ID NO: 455993 - RNA, 19 nt, Artificial Sequence
  Description of Artificial Sequence: Synthetic oligonucleotide
  Sense strand starting at position 1177 of SEQ ID NO: 316992
guuguauggagcuggauuu

SEQ ID NO: 455994 - RNA, 19 nt, Artificial Sequence
  Description of Artificial Sequence: Synthetic oligonucleotide
  Antisense Strand to SEQ ID NO: 455993
aaauccagcuccauacaac

SEQ ID NO: 455995 - RNA, 19 nt, Artificial Sequence
  Description of Artificial Sequence: Synthetic oligonucleotide
  Sense strand starting at position 1522 of SEQ ID NO: 316992
agagaagaaucagaagaga

SEQ ID NO: 455996 - RNA, 19 nt, Artificial Sequence
  Description of Artificial Sequence: Synthetic oligonucleotide
  Antisense Strand to SEQ ID NO: 455995
ucucuucugauucuucucu

SEQ ID NO: 455997 - RNA, 19 nt, Artificial Sequence
  Description of Artificial Sequence: Synthetic oligonucleotide
  Sense strand starting at position 2036 of SEQ ID NO: 316992
gccagaugacuguaucuau

SEQ ID NO: 455998 - RNA, 19 nt, Artificial Sequence
  Description of Artificial Sequence: Synthetic oligonucleotide
  Antisense Strand to SEQ ID NO: 455997
auagauacagucaucuggc

SEQ ID NO: 455999 - RNA, 19 nt, Artificial Sequence
  Description of Artificial Sequence: Synthetic oligonucleotide
  Sense strand starting at position 2673 of SEQ ID NO: 316992
gauugcuuucgugaaggug

SEQ ID NO: 456000 - RNA, 19 nt, Artificial Sequence
  Description of Artificial Sequence: Synthetic oligonucleotide
  Antisense Strand to SEQ ID NO: 455999
caccuucacgaaagcaauc

SEQ ID NO: 456001 - RNA, 19 nt, Artificial Sequence
  Description of Artificial Sequence: Synthetic oligonucleotide
  Sense strand starting at position 2897 of SEQ ID NO: 316992
gcgcuugguuggauccaga

SEQ ID NO: 456002 - RNA, 19 nt, Artificial Sequence
  Description of Artificial Sequence: Synthetic oligonucleotide
  Antisense Strand to SEQ ID NO: 456001
ucuggauccaaccaagcgc

SEQ ID NO: 456003 - RNA, 19 nt, Artificial Sequence
  Description of Artificial Sequence: Synthetic oligonucleotide
  Sense strand starting at position 3079 of SEQ ID NO: 316992
gcgauuuaaugguccuuaa

SEQ ID NO: 456004 - RNA, 19 nt, Artificial Sequence
  Description of Artificial Sequence: Synthetic oligonucleotide
  Antisense Strand to SEQ ID NO: 456003
uuaaggaccauuaaaucgc

SEQ ID NO: 456005 - RNA, 19 nt, Artificial Sequence
  Description of Artificial Sequence: Synthetic oligonucleotide
  Sense strand starting at position 3083 of SEQ ID NO: 316992
uuuaaugguccuuaaagcu

SEQ ID NO: 456006 - RNA, 19 nt, Artificial Sequence
  Description of Artificial Sequence: Synthetic oligonucleotide
  Antisense Strand to SEQ ID NO: 456005
agcuuuaaggaccauuaaa

SEQ ID NO: 456007 - RNA, 19 nt, Artificial Sequence
  Description of Artificial Sequence: Synthetic oligonucleotide
  Sense strand starting at position 3153 of SEQ ID NO: 316992
ccuggugucgggcaaucaa

SEQ ID NO: 456008 - RNA, 19 nt, Artificial Sequence
  Description of Artificial Sequence: Synthetic oligonucleotide
  Antisense Strand to SEQ ID NO: 456007
uugauugcccgacaccagg

SEQ ID NO: 456009 - RNA, 19 nt, Artificial Sequence
  Description of Artificial Sequence: Synthetic oligonucleotide
  Sense strand starting at position 3198 of SEQ ID NO: 316992
ugcuguuaguggccaaacu

SEQ ID NO: 456010 - RNA, 19 nt, Artificial Sequence
  Description of Artificial Sequence: Synthetic oligonucleotide
  Antisense Strand to SEQ ID NO: 456009
aguuuggccacuaacagca

SEQ ID NO: 456011 - RNA, 19 nt, Artificial Sequence
  Description of Artificial Sequence: Synthetic oligonucleotide
  Sense strand starting at position 3330 of SEQ ID NO: 316992
agcucuuauccagagcauu

SEQ ID NO: 456012 - RNA, 19 nt, Artificial Sequence
  Description of Artificial Sequence: Synthetic oligonucleotide
  Antisense Strand to SEQ ID NO: 456011
aaugcucuggauaagagcu

SEQ ID NO: 456013 - RNA, 19 nt, Artificial Sequence
  Description of Artificial Sequence: Synthetic oligonucleotide
  Sense strand starting at position 3404 of SEQ ID NO: 316992
gcggauuccuucuuuauuc

SEQ ID NO: 456014 - RNA, 19 nt, Artificial Sequence
  Description of Artificial Sequence: Synthetic oligonucleotide
  Antisense Strand to SEQ ID NO: 456013
gaauaaagaaggaauccgc

SEQ ID NO: 456015 - RNA, 19 nt, Artificial Sequence
  Description of Artificial Sequence: Synthetic oligonucleotide
  Sense strand starting at position 3414 of SEQ ID NO: 316992
ucuuuauucuuugucuguu

SEQ ID NO: 456016 - RNA, 19 nt, Artificial Sequence
  Description of Artificial Sequence: Synthetic oligonucleotide
  Antisense Strand to SEQ ID NO: 456015
aacagacaaagaauaaaga

SEQ ID NO: 456017 - RNA, 19 nt, Artificial Sequence
  Description of Artificial Sequence: Synthetic oligonucleotide
  Sense strand starting at position 3415 of SEQ ID NO: 316992
cuuuauucuuugucuguua

SEQ ID NO: 456018 - RNA, 19 nt, Artificial Sequence
  Description of Artificial Sequence: Synthetic oligonucleotide
  Antisense Strand to SEQ ID NO: 456017
uaacagacaaagaauaaag

SEQ ID NO: 456019 - RNA, 19 nt, Artificial Sequence
  Description of Artificial Sequence: Synthetic oligonucleotide
  Sense strand starting at position 3417 of SEQ ID NO: 316992
uuauucuuugucuguuaga

SEQ ID NO: 456020 - RNA, 19 nt, Artificial Sequence
  Description of Artificial Sequence: Synthetic oligonucleotide
  Antisense Strand to SEQ ID NO: 456019
ucuaacagacaaagaauaa

SEQ ID NO: 456021 - RNA, 19 nt, Artificial Sequence
  Description of Artificial Sequence: Synthetic oligonucleotide
  Sense strand starting at position 3428 of SEQ ID NO: 316992
cuguuagaauaagcaaaua

SEQ ID NO: 456022 - RNA, 19 nt, Artificial Sequence
  Description of Artificial Sequence: Synthetic oligonucleotide
  Antisense Strand to SEQ ID NO: 456021
uauuugcuuauucuaacag

SEQ ID NO: 456023 - RNA, 19 nt, Artificial Sequence
  Description of Artificial Sequence: Synthetic oligonucleotide
  Sense strand starting at position 3468 of SEQ ID NO: 316992
gaaagaauuccucgggccu

SEQ ID NO: 456024 - RNA, 19 nt, Artificial Sequence
  Description of Artificial Sequence: Synthetic oligonucleotide
  Antisense Strand to SEQ ID NO: 456023
aggcccgaggaauucuuuc

SEQ ID NO: 456025 - RNA, 19 nt, Artificial Sequence
  Description of Artificial Sequence: Synthetic oligonucleotide
  Sense strand starting at position 3469 of SEQ ID NO: 316992
aaagaauuccucgggccuu

SEQ ID NO: 456026 - RNA, 19 nt, Artificial Sequence
  Description of Artificial Sequence: Synthetic oligonucleotide
  Antisense Strand to SEQ ID NO: 456025
aaggcccgaggaauucuuu

SEQ ID NO: 456027 - RNA, 19 nt, Artificial Sequence
  Description of Artificial Sequence: Synthetic oligonucleotide
  Sense strand starting at position 3536 of SEQ ID NO: 316992
guacuucuuagaggugcuu

SEQ ID NO: 456028 - RNA, 19 nt, Artificial Sequence
  Description of Artificial Sequence: Synthetic oligonucleotide
  Antisense Strand to SEQ ID NO: 456027
aagcaccucuaagaaguac

SEQ ID NO: 456029 - RNA, 19 nt, Artificial Sequence
  Description of Artificial Sequence: Synthetic oligonucleotide
  Sense strand starting at position 3548 of SEQ ID NO: 316992
ggugcuugcaugcacaaua

SEQ ID NO: 456030 - RNA, 19 nt, Artificial Sequence
  Description of Artificial Sequence: Synthetic oligonucleotide
  Antisense Strand to SEQ ID NO: 456029
uauugugcaugcaagcacc

SEQ ID NO: 456031 - RNA, 19 nt, Artificial Sequence
  Description of Artificial Sequence: Synthetic oligonucleotide
  Sense strand starting at position 3559 of SEQ ID NO: 316992
gcacaauaauagucgagau

SEQ ID NO: 456032 - RNA, 19 nt, Artificial Sequence
  Description of Artificial Sequence: Synthetic oligonucleotide
  Antisense Strand to SEQ ID NO: 456031
aucucgacuauuauugugc

SEQ ID NO: 456033 - RNA, 19 nt, Artificial Sequence
  Description of Artificial Sequence: Synthetic oligonucleotide
  Sense strand starting at position 3957 of SEQ ID NO: 316992
gcgccuggccugaaugagu

SEQ ID NO: 456034 - RNA, 19 nt, Artificial Sequence
  Description of Artificial Sequence: Synthetic oligonucleotide
  Antisense Strand to SEQ ID NO: 456033
acucauucaggccaggcgc

SEQ ID NO: 456035 - RNA, 19 nt, Artificial Sequence
  Description of Artificial Sequence: Synthetic oligonucleotide
  Sense strand starting at position 3966 of SEQ ID NO: 316992
cugaaugaguuucuugaug

SEQ ID NO: 456036 - RNA, 19 nt, Artificial Sequence
  Description of Artificial Sequence: Synthetic oligonucleotide
  Antisense Strand to SEQ ID NO: 456035
caucaagaaacucauucag

SEQ ID NO: 456037 - RNA, 19 nt, Artificial Sequence
  Description of Artificial Sequence: Synthetic oligonucleotide
  Sense strand starting at position 3975 of SEQ ID NO: 316992
uuucuugauguagguuaua

SEQ ID NO: 456038 - RNA, 19 nt, Artificial Sequence
  Description of Artificial Sequence: Synthetic oligonucleotide
  Antisense Strand to SEQ ID NO: 456037
uauaaccuacaucaagaaa

SEQ ID NO: 456039 - RNA, 19 nt, Artificial Sequence
  Description of Artificial Sequence: Synthetic oligonucleotide
  Sense strand starting at position 3978 of SEQ ID NO: 316992
cuugauguagguuauaaua

SEQ ID NO: 456040 - RNA, 19 nt, Artificial Sequence
  Description of Artificial Sequence: Synthetic oligonucleotide
  Antisense Strand to SEQ ID NO: 456039
uauuauaaccuacaucaag

SEQ ID NO: 456041 - RNA, 19 nt, Artificial Sequence
  Description of Artificial Sequence: Synthetic oligonucleotide
  Sense strand starting at position 11 of SEQ ID NO: 316993
uuagacuuggguuacagua

SEQ ID NO: 456042 - RNA, 19 nt, Artificial Sequence
  Description of Artificial Sequence: Synthetic oligonucleotide
  Antisense Strand to SEQ ID NO: 456041
uacuguaacccaagucuaa

SEQ ID NO: 456043 - RNA, 19 nt, Artificial Sequence
  Description of Artificial Sequence: Synthetic oligonucleotide
  Sense strand starting at position 63 of SEQ ID NO: 316993
ccagacagcuguuccauuu

SEQ ID NO: 456044 - RNA, 19 nt, Artificial Sequence
  Description of Artificial Sequence: Synthetic oligonucleotide
  Antisense Strand to SEQ ID NO: 456043
aaauggaacagcugucugg

SEQ ID NO: 456045 - RNA, 19 nt, Artificial Sequence
  Description of Artificial Sequence: Synthetic oligonucleotide
  Sense strand starting at position 107 of SEQ ID NO: 316993
cuguuugaccuguaaauga

SEQ ID NO: 456046 - RNA, 19 nt, Artificial Sequence
  Description of Artificial Sequence: Synthetic oligonucleotide
  Antisense Strand to SEQ ID NO: 456045
ucauuuacaggucaaacag

SEQ ID NO: 456047 - RNA, 19 nt, Artificial Sequence
  Description of Artificial Sequence: Synthetic oligonucleotide
  Sense strand starting at position 138 of SEQ ID NO: 316993
uggacaagcucuccaaaga

SEQ ID NO: 456048 - RNA, 19 nt, Artificial Sequence
  Description of Artificial Sequence: Synthetic oligonucleotide
  Antisense Strand to SEQ ID NO: 456047
ucuuuggagagcuugucca

SEQ ID NO: 456049 - RNA, 19 nt, Artificial Sequence
  Description of Artificial Sequence: Synthetic oligonucleotide
  Sense strand starting at position 325 of SEQ ID NO: 316993
ugcuuuagaguugagguua

SEQ ID NO: 456050 - RNA, 19 nt, Artificial Sequence
  Description of Artificial Sequence: Synthetic oligonucleotide
  Antisense Strand to SEQ ID NO: 456049
uaaccucaacucuaaagca

SEQ ID NO: 456051 - RNA, 19 nt, Artificial Sequence
  Description of Artificial Sequence: Synthetic oligonucleotide
  Sense strand starting at position 330 of SEQ ID NO: 316993
uagaguugagguuagaagu

SEQ ID NO: 456052 - RNA, 19 nt, Artificial Sequence
  Description of Artificial Sequence: Synthetic oligonucleotide
  Antisense Strand to SEQ ID NO: 456051
acuucuaaccucaacucua

SEQ ID NO: 456053 - RNA, 19 nt, Artificial Sequence
  Description of Artificial Sequence: Synthetic oligonucleotide
  Sense strand starting at position 336 of SEQ ID NO: 316993
ugagguuagaagugugaag

SEQ ID NO: 456054 - RNA, 19 nt, Artificial Sequence
  Description of Artificial Sequence: Synthetic oligonucleotide
  Antisense Strand to SEQ ID NO: 456053
cuucacacuucuaaccuca

SEQ ID NO: 456055 - RNA, 19 nt, Artificial Sequence
  Description of Artificial Sequence: Synthetic oligonucleotide
  Sense strand starting at position 377 of SEQ ID NO: 316993
gaugcuagaucaguuccaa

SEQ ID NO: 456056 - RNA, 19 nt, Artificial Sequence
  Description of Artificial Sequence: Synthetic oligonucleotide
  Antisense Strand to SEQ ID NO: 456055
uuggaacugaucuagcauc

SEQ ID NO: 456057 - RNA, 19 nt, Artificial Sequence
  Description of Artificial Sequence: Synthetic oligonucleotide
  Sense strand starting at position 390 of SEQ ID NO: 316993
uuccaaguagucuaucaug

SEQ ID NO: 456058 - RNA, 19 nt, Artificial Sequence
  Description of Artificial Sequence: Synthetic oligonucleotide
  Antisense Strand to SEQ ID NO: 456057
caugauagacuacuuggaa

SEQ ID NO: 456059 - RNA, 19 nt, Artificial Sequence
  Description of Artificial Sequence: Synthetic oligonucleotide
  Sense strand starting at position 411 of SEQ ID NO: 316993
aaaggauugucuuuccaug

SEQ ID NO: 456060 - RNA, 19 nt, Artificial Sequence
  Description of Artificial Sequence: Synthetic oligonucleotide
  Antisense Strand to SEQ ID NO: 456059
cauggaaagacaauccuuu

SEQ ID NO: 456061 - RNA, 19 nt, Artificial Sequence
  Description of Artificial Sequence: Synthetic oligonucleotide
  Sense strand starting at position 413 of SEQ ID NO: 316993
aggauugucuuuccaugac

SEQ ID NO: 456062 - RNA, 19 nt, Artificial Sequence
  Description of Artificial Sequence: Synthetic oligonucleotide
  Antisense Strand to SEQ ID NO: 456061
gucauggaaagacaauccu

SEQ ID NO: 456063 - RNA, 19 nt, Artificial Sequence
  Description of Artificial Sequence: Synthetic oligonucleotide
  Sense strand starting at position 518 of SEQ ID NO: 316993
ggccguguugcauucuuua

SEQ ID NO: 456064 - RNA, 19 nt, Artificial Sequence
  Description of Artificial Sequence: Synthetic oligonucleotide
  Antisense Strand to SEQ ID NO: 456063
uaaagaaugcaacacggcc

SEQ ID NO: 456065 - RNA, 19 nt, Artificial Sequence
  Description of Artificial Sequence: Synthetic oligonucleotide
  Sense strand starting at position 628 of SEQ ID NO: 316993
cugaaauguuagcuaucua

SEQ ID NO: 456066 - RNA, 19 nt, Artificial Sequence
  Description of Artificial Sequence: Synthetic oligonucleotide
  Antisense Strand to SEQ ID NO: 456065
uagauagcuaacauuucag

SEQ ID NO: 456067 - RNA, 19 nt, Artificial Sequence
  Description of Artificial Sequence: Synthetic oligonucleotide
  Sense strand starting at position 892 of SEQ ID NO: 316993
gcgccuuccagcucugaca

SEQ ID NO: 456068 - RNA, 19 nt, Artificial Sequence
  Description of Artificial Sequence: Synthetic oligonucleotide
  Antisense Strand to SEQ ID NO: 456067
ugucagagcuggaaggcgc

SEQ ID NO: 456069 - RNA, 19 nt, Artificial Sequence
  Description of Artificial Sequence: Synthetic oligonucleotide
  Sense strand starting at position 923 of SEQ ID NO: 316993
auagaucuucccgaagguu

SEQ ID NO: 456070 - RNA, 19 nt, Artificial Sequence
  Description of Artificial Sequence: Synthetic oligonucleotide
  Antisense Strand to SEQ ID NO: 456069
aaccuucgggaagaucuau

SEQ ID NO: 456071 - RNA, 19 nt, Artificial Sequence
  Description of Artificial Sequence: Synthetic oligonucleotide
  Sense strand starting at position 935 of SEQ ID NO: 316993
gaagguuucgcagacagac

SEQ ID NO: 456072 - RNA, 19 nt, Artificial Sequence
  Description of Artificial Sequence: Synthetic oligonucleotide
  Antisense Strand to SEQ ID NO: 456071
gucugucugcgaaaccuuc

SEQ ID NO: 456073 - RNA, 19 nt, Artificial Sequence
  Description of Artificial Sequence: Synthetic oligonucleotide
  Sense strand starting at position 1336 of SEQ ID NO: 316993
ugggucuccuccucggaaa

SEQ ID NO: 456074 - RNA, 19 nt, Artificial Sequence
  Description of Artificial Sequence: Synthetic oligonucleotide
  Antisense Strand to SEQ ID NO: 456073
uuuccgaggaggagaccca

SEQ ID NO: 456075 - RNA, 19 nt, Artificial Sequence
  Description of Artificial Sequence: Synthetic oligonucleotide
  Sense strand starting at position 1416 of SEQ ID NO: 316993
gaaguuguacuccaggauu

SEQ ID NO: 456076 - RNA, 19 nt, Artificial Sequence
  Description of Artificial Sequence: Synthetic oligonucleotide
  Antisense Strand to SEQ ID NO: 456075
aauccuggaguacaacuuc

SEQ ID NO: 456077 - RNA, 19 nt, Artificial Sequence
  Description of Artificial Sequence: Synthetic oligonucleotide
  Sense strand starting at position 2080 of SEQ ID NO: 316993
acaaguuacuucucaaagu

SEQ ID NO: 456078 - RNA, 19 nt, Artificial Sequence
  Description of Artificial Sequence: Synthetic oligonucleotide
  Antisense Strand to SEQ ID NO: 456077
acuuugagaaguaacuugu

SEQ ID NO: 456079 - RNA, 19 nt, Artificial Sequence
  Description of Artificial Sequence: Synthetic oligonucleotide
  Sense strand starting at position 2147 of SEQ ID NO: 316993
ggagauagguccgcagaga

SEQ ID NO: 456080 - RNA, 19 nt, Artificial Sequence
  Description of Artificial Sequence: Synthetic oligonucleotide
  Antisense Strand to SEQ ID NO: 456079
ucucugcggaccuaucucc

SEQ ID NO: 456081 - RNA, 19 nt, Artificial Sequence
  Description of Artificial Sequence: Synthetic oligonucleotide
  Sense strand starting at position 2148 of SEQ ID NO: 316993
gagauagguccgcagagaa

SEQ ID NO: 456082 - RNA, 19 nt, Artificial Sequence
  Description of Artificial Sequence: Synthetic oligonucleotide
  Antisense Strand to SEQ ID NO: 456081
uucucugcggaccuaucuc

SEQ ID NO: 456083 - RNA, 19 nt, Artificial Sequence
  Description of Artificial Sequence: Synthetic oligonucleotide
  Sense strand starting at position 2277 of SEQ ID NO: 316993
cuaaguaugcuuuagugag

SEQ ID NO: 456084 - RNA, 19 nt, Artificial Sequence
  Description of Artificial Sequence: Synthetic oligonucleotide
  Antisense Strand to SEQ ID NO: 456083
cucacuaaagcauacuuag

SEQ ID NO: 456085 - RNA, 19 nt, Artificial Sequence
  Description of Artificial Sequence: Synthetic oligonucleotide
  Sense strand starting at position 2407 of SEQ ID NO: 316993
ggaggauccagucagcugu

SEQ ID NO: 456086 - RNA, 19 nt, Artificial Sequence
  Description of Artificial Sequence: Synthetic oligonucleotide
  Antisense Strand to SEQ ID NO: 456085
acagcugacuggauccucc

SEQ ID NO: 456087 - RNA, 19 nt, Artificial Sequence
  Description of Artificial Sequence: Synthetic oligonucleotide
  Sense strand starting at position 2513 of SEQ ID NO: 316993
uguaucuccuuacuuuaga

SEQ ID NO: 456088 - RNA, 19 nt, Artificial Sequence
  Description of Artificial Sequence: Synthetic oligonucleotide
  Antisense Strand to SEQ ID NO: 456087
ucuaaaguaaggagauaca

SEQ ID NO: 456089 - RNA, 19 nt, Artificial Sequence
  Description of Artificial Sequence: Synthetic oligonucleotide
  Sense strand starting at position 2592 of SEQ ID NO: 316993
cuacgaagucucugaauug

SEQ ID NO: 456090 - RNA, 19 nt, Artificial Sequence
  Description of Artificial Sequence: Synthetic oligonucleotide
  Antisense Strand to SEQ ID NO: 456089
caauucagagacuucguag

SEQ ID NO: 456091 - RNA, 19 nt, Artificial Sequence
  Description of Artificial Sequence: Synthetic oligonucleotide
  Sense strand starting at position 3037 of SEQ ID NO: 316993
gagagucuggcucaaguca

SEQ ID NO: 456092 - RNA, 19 nt, Artificial Sequence
  Description of Artificial Sequence: Synthetic oligonucleotide
  Antisense Strand to SEQ ID NO: 456091
ugacuugagccagacucuc

SEQ ID NO: 456093 - RNA, 19 nt, Artificial Sequence
  Description of Artificial Sequence: Synthetic oligonucleotide
  Sense strand starting at position 3154 of SEQ ID NO: 316993
agggucauaccaggucaga

SEQ ID NO: 456094 - RNA, 19 nt, Artificial Sequence
  Description of Artificial Sequence: Synthetic oligonucleotide
  Antisense Strand to SEQ ID NO: 456093
ucugaccugguaugacccu

SEQ ID NO: 456095 - RNA, 19 nt, Artificial Sequence
  Description of Artificial Sequence: Synthetic oligonucleotide
  Sense strand starting at position 3509 of SEQ ID NO: 316993
cuugcuucgcuugaaagaa

SEQ ID NO: 456096 - RNA, 19 nt, Artificial Sequence
  Description of Artificial Sequence: Synthetic oligonucleotide
  Antisense Strand to SEQ ID NO: 456095
uucuuucaagcgaagcaag

SEQ ID NO: 456097 - RNA, 19 nt, Artificial Sequence
  Description of Artificial Sequence: Synthetic oligonucleotide
  Sense strand starting at position 3809 of SEQ ID NO: 316993
guuacaggacuuuguauga

SEQ ID NO: 456098 - RNA, 19 nt, Artificial Sequence
  Description of Artificial Sequence: Synthetic oligonucleotide
  Antisense Strand to SEQ ID NO: 456097
ucauacaaaguccuguaac

SEQ ID NO: 456099 - RNA, 19 nt, Artificial Sequence
  Description of Artificial Sequence: Synthetic oligonucleotide
  Sense strand starting at position 3813 of SEQ ID NO: 316993
caggacuuuguaugagauu

SEQ ID NO: 456100 - RNA, 19 nt, Artificial Sequence
  Description of Artificial Sequence: Synthetic oligonucleotide
  Antisense Strand to SEQ ID NO: 456099
aaucucauacaaaguccug

SEQ ID NO: 456101 - RNA, 19 nt, Artificial Sequence
  Description of Artificial Sequence: Synthetic oligonucleotide
  Sense strand starting at position 3814 of SEQ ID NO: 316993
aggacuuuguaugagauuu

SEQ ID NO: 456102 - RNA, 19 nt, Artificial Sequence
  Description of Artificial Sequence: Synthetic oligonucleotide
  Antisense Strand to SEQ ID NO: 456101
aaaucucauacaaaguccu

SEQ ID NO: 456103 - RNA, 19 nt, Artificial Sequence
  Description of Artificial Sequence: Synthetic oligonucleotide
  Sense strand starting at position 3835 of SEQ ID NO: 316993
uggagagguccugguuaac

SEQ ID NO: 456104 - RNA, 19 nt, Artificial Sequence
  Description of Artificial Sequence: Synthetic oligonucleotide
  Antisense Strand to SEQ ID NO: 456103
guuaaccaggaccucucca

SEQ ID NO: 456105 - RNA, 19 nt, Artificial Sequence
  Description of Artificial Sequence: Synthetic oligonucleotide
  Sense strand starting at position 3841 of SEQ ID NO: 316993
gguccugguuaacuuuaaa

SEQ ID NO: 456106 - RNA, 19 nt, Artificial Sequence
  Description of Artificial Sequence: Synthetic oligonucleotide
  Antisense Strand to SEQ ID NO: 456105
uuuaaaguuaaccaggacc

SEQ ID NO: 456107 - RNA, 19 nt, Artificial Sequence
  Description of Artificial Sequence: Synthetic oligonucleotide
  Sense strand starting at position 3856 of SEQ ID NO: 316993
uaaagaacuccuuggguua

SEQ ID NO: 456108 - RNA, 19 nt, Artificial Sequence
  Description of Artificial Sequence: Synthetic oligonucleotide
  Antisense Strand to SEQ ID NO: 456107
uaacccaaggaguucuuua

SEQ ID NO: 456109 - RNA, 19 nt, Artificial Sequence
  Description of Artificial Sequence: Synthetic oligonucleotide
  Sense strand starting at position 3859 of SEQ ID NO: 316993
agaacuccuuggguuaguu

SEQ ID NO: 456110 - RNA, 19 nt, Artificial Sequence
  Description of Artificial Sequence: Synthetic oligonucleotide
  Antisense Strand to SEQ ID NO: 456109
aacuaacccaaggaguucu

SEQ ID NO: 456111 - RNA, 19 nt, Artificial Sequence
  Description of Artificial Sequence: Synthetic oligonucleotide
  Sense strand starting at position 3868 of SEQ ID NO: 316993
uggguuaguuggcugagaa

SEQ ID NO: 456112 - RNA, 19 nt, Artificial Sequence
  Description of Artificial Sequence: Synthetic oligonucleotide
  Antisense Strand to SEQ ID NO: 456111
uucucagccaacuaaccca

SEQ ID NO: 456113 - RNA, 19 nt, Artificial Sequence
  Description of Artificial Sequence: Synthetic oligonucleotide
  Sense strand starting at position 3869 of SEQ ID NO: 316993
ggguuaguuggcugagaau

SEQ ID NO: 456114 - RNA, 19 nt, Artificial Sequence
  Description of Artificial Sequence: Synthetic oligonucleotide
  Antisense Strand to SEQ ID NO: 456113
auucucagccaacuaaccc

SEQ ID NO: 456115 - RNA, 19 nt, Artificial Sequence
  Description of Artificial Sequence: Synthetic oligonucleotide
  Sense strand starting at position 3878 of SEQ ID NO: 316993
ggcugagaaucauuggcuu

SEQ ID NO: 456116 - RNA, 19 nt, Artificial Sequence
  Description of Artificial Sequence: Synthetic oligonucleotide
  Antisense Strand to SEQ ID NO: 456115
aagccaaugauucucagcc

SEQ ID NO: 456117 - RNA, 19 nt, Artificial Sequence
  Description of Artificial Sequence: Synthetic oligonucleotide
  Sense strand starting at position 3880 of SEQ ID NO: 316993
cugagaaucauuggcuuug

SEQ ID NO: 456118 - RNA, 19 nt, Artificial Sequence
  Description of Artificial Sequence: Synthetic oligonucleotide
  Antisense Strand to SEQ ID NO: 456117
caaagccaaugauucucag

SEQ ID NO: 456119 - RNA, 19 nt, Artificial Sequence
  Description of Artificial Sequence: Synthetic oligonucleotide
  Sense strand starting at position 3882 of SEQ ID NO: 316993
gagaaucauuggcuuuggu

SEQ ID NO: 456120 - RNA, 19 nt, Artificial Sequence
  Description of Artificial Sequence: Synthetic oligonucleotide
  Antisense Strand to SEQ ID NO: 456119
accaaagccaaugauucuc

SEQ ID NO: 456121 - RNA, 19 nt, Artificial Sequence
  Description of Artificial Sequence: Synthetic oligonucleotide
  Sense strand starting at position 326 of SEQ ID NO: 316994
caguuugguggcuaagaag

SEQ ID NO: 456122 - RNA, 19 nt, Artificial Sequence
  Description of Artificial Sequence: Synthetic oligonucleotide
  Antisense Strand to SEQ ID NO: 456121
cuucuuagccaccaaacug

SEQ ID NO: 456123 - RNA, 19 nt, Artificial Sequence
  Description of Artificial Sequence: Synthetic oligonucleotide
  Sense strand starting at position 450 of SEQ ID NO: 316994
cauuuagguccguggacuu

SEQ ID NO: 456124 - RNA, 19 nt, Artificial Sequence
  Description of Artificial Sequence: Synthetic oligonucleotide
  Antisense Strand to SEQ ID NO: 456123
aaguccacggaccuaaaug

SEQ ID NO: 456125 - RNA, 19 nt, Artificial Sequence
  Description of Artificial Sequence: Synthetic oligonucleotide
  Sense strand starting at position 842 of SEQ ID NO: 316994
uuaucugaacuaugugaua

SEQ ID NO: 456126 - RNA, 19 nt, Artificial Sequence
  Description of Artificial Sequence: Synthetic oligonucleotide
  Antisense Strand to SEQ ID NO: 456125
uaucacauaguucagauaa

SEQ ID NO: 456127 - RNA, 19 nt, Artificial Sequence
  Description of Artificial Sequence: Synthetic oligonucleotide
  Sense strand starting at position 1139 of SEQ ID NO: 316994
aaacgauauuaugucugau

SEQ ID NO: 456128 - RNA, 19 nt, Artificial Sequence
  Description of Artificial Sequence: Synthetic oligonucleotide
  Antisense Strand to SEQ ID NO: 456127
aucagacauaauaucguuu

SEQ ID NO: 456129 - RNA, 19 nt, Artificial Sequence
  Description of Artificial Sequence: Synthetic oligonucleotide
  Sense strand starting at position 1349 of SEQ ID NO: 316994
uuuguuuguaagggacuga

SEQ ID NO: 456130 - RNA, 19 nt, Artificial Sequence
  Description of Artificial Sequence: Synthetic oligonucleotide
  Antisense Strand to SEQ ID NO: 456129
ucagucccuuacaaacaaa

SEQ ID NO: 456131 - RNA, 19 nt, Artificial Sequence
  Description of Artificial Sequence: Synthetic oligonucleotide
  Sense strand starting at position 1350 of SEQ ID NO: 316994
uuguuuguaagggacugau

SEQ ID NO: 456132 - RNA, 19 nt, Artificial Sequence
  Description of Artificial Sequence: Synthetic oligonucleotide
  Antisense Strand to SEQ ID NO: 456131
aucagucccuuacaaacaa

SEQ ID NO: 456133 - RNA, 19 nt, Artificial Sequence
  Description of Artificial Sequence: Synthetic oligonucleotide
  Sense strand starting at position 1460 of SEQ ID NO: 316994
gagcaaauacgguaacgau

SEQ ID NO: 456134 - RNA, 19 nt, Artificial Sequence
  Description of Artificial Sequence: Synthetic oligonucleotide
  Antisense Strand to SEQ ID NO: 456133
aucguuaccguauuugcuc

SEQ ID NO: 456135 - RNA, 19 nt, Artificial Sequence
  Description of Artificial Sequence: Synthetic oligonucleotide
  Sense strand starting at position 1538 of SEQ ID NO: 316994
aagguacuuacguggaaga

SEQ ID NO: 456136 - RNA, 19 nt, Artificial Sequence
  Description of Artificial Sequence: Synthetic oligonucleotide
  Antisense Strand to SEQ ID NO: 456135
ucuuccacguaaguaccuu

SEQ ID NO: 456137 - RNA, 19 nt, Artificial Sequence
  Description of Artificial Sequence: Synthetic oligonucleotide
  Sense strand starting at position 1716 of SEQ ID NO: 316994
gagguaaaccacugaaagu

SEQ ID NO: 456138 - RNA, 19 nt, Artificial Sequence
  Description of Artificial Sequence: Synthetic oligonucleotide
  Antisense Strand to SEQ ID NO: 456137
acuuucagugguuuaccuc

SEQ ID NO: 456139 - RNA, 19 nt, Artificial Sequence
  Description of Artificial Sequence: Synthetic oligonucleotide
  Sense strand starting at position 1879 of SEQ ID NO: 316994
gagagauguggcugagaga

SEQ ID NO: 456140 - RNA, 19 nt, Artificial Sequence
  Description of Artificial Sequence: Synthetic oligonucleotide
  Antisense Strand to SEQ ID NO: 456139
ucucucagccacaucucuc

SEQ ID NO: 456141 - RNA, 19 nt, Artificial Sequence
  Description of Artificial Sequence: Synthetic oligonucleotide
  Sense strand starting at position 1963 of SEQ ID NO: 316994
guuagauguugccucauuu

SEQ ID NO: 456142 - RNA, 19 nt, Artificial Sequence
  Description of Artificial Sequence: Synthetic oligonucleotide
  Antisense Strand to SEQ ID NO: 456141
aaaugaggcaacaucuaac

SEQ ID NO: 456143 - RNA, 19 nt, Artificial Sequence
  Description of Artificial Sequence: Synthetic oligonucleotide
  Sense strand starting at position 1995 of SEQ ID NO: 316994
uggugcgguugauuucaca

SEQ ID NO: 456144 - RNA, 19 nt, Artificial Sequence
  Description of Artificial Sequence: Synthetic oligonucleotide
  Antisense Strand to SEQ ID NO: 456143
ugugaaaucaaccgcacca

SEQ ID NO: 456145 - RNA, 19 nt, Artificial Sequence
  Description of Artificial Sequence: Synthetic oligonucleotide
  Sense strand starting at position 2034 of SEQ ID NO: 316994
agcuaagagccuggacaau

SEQ ID NO: 456146 - RNA, 19 nt, Artificial Sequence
  Description of Artificial Sequence: Synthetic oligonucleotide
  Antisense Strand to SEQ ID NO: 456145
auuguccaggcucuuagcu

SEQ ID NO: 456147 - RNA, 19 nt, Artificial Sequence
  Description of Artificial Sequence: Synthetic oligonucleotide
  Sense strand starting at position 2044 of SEQ ID NO: 316994
cuggacaauugcccaauua

SEQ ID NO: 456148 - RNA, 19 nt, Artificial Sequence
  Description of Artificial Sequence: Synthetic oligonucleotide
  Antisense Strand to SEQ ID NO: 456147
uaauugggcaauuguccag

SEQ ID NO: 456149 - RNA, 19 nt, Artificial Sequence
  Description of Artificial Sequence: Synthetic oligonucleotide
  Sense strand starting at position 2227 of SEQ ID NO: 316994
ugaaauuccugucuaagag

SEQ ID NO: 456150 - RNA, 19 nt, Artificial Sequence
  Description of Artificial Sequence: Synthetic oligonucleotide
  Antisense Strand to SEQ ID NO: 456149
cucuuagacaggaauuuca

SEQ ID NO: 456151 - RNA, 19 nt, Artificial Sequence
  Description of Artificial Sequence: Synthetic oligonucleotide
  Sense strand starting at position 2235 of SEQ ID NO: 316994
cugucuaagaggugaaaga

SEQ ID NO: 456152 - RNA, 19 nt, Artificial Sequence
  Description of Artificial Sequence: Synthetic oligonucleotide
  Antisense Strand to SEQ ID NO: 456151
ucuuucaccucuuagacag

SEQ ID NO: 456153 - RNA, 19 nt, Artificial Sequence
  Description of Artificial Sequence: Synthetic oligonucleotide
  Sense strand starting at position 2314 of SEQ ID NO: 316994
cagagugugacagagaguu

SEQ ID NO: 456154 - RNA, 19 nt, Artificial Sequence
  Description of Artificial Sequence: Synthetic oligonucleotide
  Antisense Strand to SEQ ID NO: 456153
aacucucugucacacucug

SEQ ID NO: 456155 - RNA, 19 nt, Artificial Sequence
  Description of Artificial Sequence: Synthetic oligonucleotide
  Sense strand starting at position 2316 of SEQ ID NO: 316994
gagugugacagagaguuua

SEQ ID NO: 456156 - RNA, 19 nt, Artificial Sequence
  Description of Artificial Sequence: Synthetic oligonucleotide
  Antisense Strand to SEQ ID NO: 456155
uaaacucucugucacacuc

SEQ ID NO: 456157 - RNA, 19 nt, Artificial Sequence
  Description of Artificial Sequence: Synthetic oligonucleotide
  Sense strand starting at position 2344 of SEQ ID NO: 316994
gugacaauccguggaaaug

SEQ ID NO: 456158 - RNA, 19 nt, Artificial Sequence
  Description of Artificial Sequence: Synthetic oligonucleotide
  Antisense Strand to SEQ ID NO: 456157
cauuuccacggauugucac

SEQ ID NO: 456159 - RNA, 19 nt, Artificial Sequence
  Description of Artificial Sequence: Synthetic oligonucleotide
  Sense strand starting at position 2345 of SEQ ID NO: 316994
ugacaauccguggaaaugu

SEQ ID NO: 456160 - RNA, 19 nt, Artificial Sequence
  Description of Artificial Sequence: Synthetic oligonucleotide
  Antisense Strand to SEQ ID NO: 456159
acauuuccacggauuguca

SEQ ID NO: 456161 - RNA, 19 nt, Artificial Sequence
  Description of Artificial Sequence: Synthetic oligonucleotide
  Sense strand starting at position 2354 of SEQ ID NO: 316994
guggaaauguuucuaaagg

SEQ ID NO: 456162 - RNA, 19 nt, Artificial Sequence
  Description of Artificial Sequence: Synthetic oligonucleotide
  Antisense Strand to SEQ ID NO: 456161
ccuuuagaaacauuuccac

SEQ ID NO: 456163 - RNA, 19 nt, Artificial Sequence
  Description of Artificial Sequence: Synthetic oligonucleotide
  Sense strand starting at position 2454 of SEQ ID NO: 316994
auugcagugcacuaaacau

SEQ ID NO: 456164 - RNA, 19 nt, Artificial Sequence
  Description of Artificial Sequence: Synthetic oligonucleotide
  Antisense Strand to SEQ ID NO: 456163
auguuuagugcacugcaau

SEQ ID NO: 456165 - RNA, 19 nt, Artificial Sequence
  Description of Artificial Sequence: Synthetic oligonucleotide
  Sense strand starting at position 2467 of SEQ ID NO: 316994
aaacauuauuaggugggua

SEQ ID NO: 456166 - RNA, 19 nt, Artificial Sequence
  Description of Artificial Sequence: Synthetic oligonucleotide
  Antisense Strand to SEQ ID NO: 456165
uacccaccuaauaauguuu

SEQ ID NO: 456167 - RNA, 19 nt, Artificial Sequence
  Description of Artificial Sequence: Synthetic oligonucleotide
  Sense strand starting at position 2470 of SEQ ID NO: 316994
cauuauuagguggguauga

SEQ ID NO: 456168 - RNA, 19 nt, Artificial Sequence
  Description of Artificial Sequence: Synthetic oligonucleotide
  Antisense Strand to SEQ ID NO: 456167
ucauacccaccuaauaaug

SEQ ID NO: 456169 - RNA, 19 nt, Artificial Sequence
  Description of Artificial Sequence: Synthetic oligonucleotide
  Sense strand starting at position 2471 of SEQ ID NO: 316994
auuauuagguggguaugau

SEQ ID NO: 456170 - RNA, 19 nt, Artificial Sequence
  Description of Artificial Sequence: Synthetic oligonucleotide
  Antisense Strand to SEQ ID NO: 456169
aucauacccaccuaauaau

SEQ ID NO: 456171 - RNA, 19 nt, Artificial Sequence
  Description of Artificial Sequence: Synthetic oligonucleotide
  Sense strand starting at position 2472 of SEQ ID NO: 316994
uuauuagguggguaugauu

SEQ ID NO: 456172 - RNA, 19 nt, Artificial Sequence
  Description of Artificial Sequence: Synthetic oligonucleotide
  Antisense Strand to SEQ ID NO: 456171
aaucauacccaccuaauaa

SEQ ID NO: 456173 - RNA, 19 nt, Artificial Sequence
  Description of Artificial Sequence: Synthetic oligonucleotide
  Sense strand starting at position 2523 of SEQ ID NO: 316994
gugagaucaucugugggau

SEQ ID NO: 456174 - RNA, 19 nt, Artificial Sequence
  Description of Artificial Sequence: Synthetic oligonucleotide
  Antisense Strand to SEQ ID NO: 456173
aucccacagaugaucucac

SEQ ID NO: 456175 - RNA, 19 nt, Artificial Sequence
  Description of Artificial Sequence: Synthetic oligonucleotide
  Sense strand starting at position 2524 of SEQ ID NO: 316994
ugagaucaucugugggauu

SEQ ID NO: 456176 - RNA, 19 nt, Artificial Sequence
  Description of Artificial Sequence: Synthetic oligonucleotide
  Antisense Strand to SEQ ID NO: 456175
aaucccacagaugaucuca

SEQ ID NO: 456177 - RNA, 19 nt, Artificial Sequence
  Description of Artificial Sequence: Synthetic oligonucleotide
  Sense strand starting at position 2526 of SEQ ID NO: 316994
agaucaucugugggauuau

SEQ ID NO: 456178 - RNA, 19 nt, Artificial Sequence
  Description of Artificial Sequence: Synthetic oligonucleotide
  Antisense Strand to SEQ ID NO: 456177
auaaucccacagaugaucu

SEQ ID NO: 456179 - RNA, 19 nt, Artificial Sequence
  Description of Artificial Sequence: Synthetic oligonucleotide
  Sense strand starting at position 2538 of SEQ ID NO: 316994
ggauuaucuguguguauuu

SEQ ID NO: 456180 - RNA, 19 nt, Artificial Sequence
  Description of Artificial Sequence: Synthetic oligonucleotide
  Antisense Strand to SEQ ID NO: 456179
aaauacacacagauaaucc

SEQ ID NO: 456181 - RNA, 19 nt, Artificial Sequence
  Description of Artificial Sequence: Synthetic oligonucleotide
  Sense strand starting at position 2659 of SEQ ID NO: 316994
aguagccauaugugaaaga

SEQ ID NO: 456182 - RNA, 19 nt, Artificial Sequence
  Description of Artificial Sequence: Synthetic oligonucleotide
  Antisense Strand to SEQ ID NO: 456181
ucuuucacauauggcuacu

SEQ ID NO: 456183 - RNA, 19 nt, Artificial Sequence
  Description of Artificial Sequence: Synthetic oligonucleotide
  Sense strand starting at position 2785 of SEQ ID NO: 316994
uugguuaccagaggaauuc

SEQ ID NO: 456184 - RNA, 19 nt, Artificial Sequence
  Description of Artificial Sequence: Synthetic oligonucleotide
  Antisense Strand to SEQ ID NO: 456183
gaauuccucugguaaccaa

SEQ ID NO: 456185 - RNA, 19 nt, Artificial Sequence
  Description of Artificial Sequence: Synthetic oligonucleotide
  Sense strand starting at position 2848 of SEQ ID NO: 316994
uggccaaaucuggauucuu

SEQ ID NO: 456186 - RNA, 19 nt, Artificial Sequence
  Description of Artificial Sequence: Synthetic oligonucleotide
  Antisense Strand to SEQ ID NO: 456185
aagaauccagauuuggcca

SEQ ID NO: 456187 - RNA, 19 nt, Artificial Sequence
  Description of Artificial Sequence: Synthetic oligonucleotide
  Sense strand starting at position 3059 of SEQ ID NO: 316994
gaguuugucugcuuauuua

SEQ ID NO: 456188 - RNA, 19 nt, Artificial Sequence
  Description of Artificial Sequence: Synthetic oligonucleotide
  Antisense Strand to SEQ ID NO: 456187
uaaauaagcagacaaacuc

SEQ ID NO: 456189 - RNA, 19 nt, Artificial Sequence
  Description of Artificial Sequence: Synthetic oligonucleotide
  Sense strand starting at position 3542 of SEQ ID NO: 316994
cuuagaaaguugccuaaga

SEQ ID NO: 456190 - RNA, 19 nt, Artificial Sequence
  Description of Artificial Sequence: Synthetic oligonucleotide
  Antisense Strand to SEQ ID NO: 456189
ucuuaggcaacuuucuaag

SEQ ID NO: 456191 - RNA, 19 nt, Artificial Sequence
  Description of Artificial Sequence: Synthetic oligonucleotide
  Sense strand starting at position 3544 of SEQ ID NO: 316994
uagaaaguugccuaagagu

SEQ ID NO: 456192 - RNA, 19 nt, Artificial Sequence
  Description of Artificial Sequence: Synthetic oligonucleotide
  Antisense Strand to SEQ ID NO: 456191
acucuuaggcaacuuucua

SEQ ID NO: 456193 - RNA, 19 nt, Artificial Sequence
  Description of Artificial Sequence: Synthetic oligonucleotide
  Sense strand starting at position 3598 of SEQ ID NO: 316994
aucugucuuccagaaugug

SEQ ID NO: 456194 - RNA, 19 nt, Artificial Sequence
  Description of Artificial Sequence: Synthetic oligonucleotide
  Antisense Strand to SEQ ID NO: 456193
cacauucuggaagacagau

SEQ ID NO: 456195 - RNA, 19 nt, Artificial Sequence
  Description of Artificial Sequence: Synthetic oligonucleotide
  Sense strand starting at position 3650 of SEQ ID NO: 316994
uuacuccugugauccagaa

SEQ ID NO: 456196 - RNA, 19 nt, Artificial Sequence
  Description of Artificial Sequence: Synthetic oligonucleotide
  Antisense Strand to SEQ ID NO: 456195
uucuggaucacaggaguaa

SEQ ID NO: 456197 - RNA, 19 nt, Artificial Sequence
  Description of Artificial Sequence: Synthetic oligonucleotide
  Sense strand starting at position 3654 of SEQ ID NO: 316994
uccugugauccagaacagu

SEQ ID NO: 456198 - RNA, 19 nt, Artificial Sequence
  Description of Artificial Sequence: Synthetic oligonucleotide
  Antisense Strand to SEQ ID NO: 456197
acuguucuggaucacagga

SEQ ID NO: 456199 - RNA, 19 nt, Artificial Sequence
  Description of Artificial Sequence: Synthetic oligonucleotide
  Sense strand starting at position 3754 of SEQ ID NO: 316994
gauagagguccuggcauca

SEQ ID NO: 456200 - RNA, 19 nt, Artificial Sequence
  Description of Artificial Sequence: Synthetic oligonucleotide
  Antisense Strand to SEQ ID NO: 456199
ugaugccaggaccucuauc

SEQ ID NO: 456201 - RNA, 19 nt, Artificial Sequence
  Description of Artificial Sequence: Synthetic oligonucleotide
  Sense strand starting at position 395 of SEQ ID NO: 316995
ucacaaguagauuggucua

SEQ ID NO: 456202 - RNA, 19 nt, Artificial Sequence
  Description of Artificial Sequence: Synthetic oligonucleotide
  Antisense Strand to SEQ ID NO: 456201
uagaccaaucuacuuguga

SEQ ID NO: 456203 - RNA, 19 nt, Artificial Sequence
  Description of Artificial Sequence: Synthetic oligonucleotide
  Sense strand starting at position 397 of SEQ ID NO: 316995
acaaguagauuggucuauu

SEQ ID NO: 456204 - RNA, 19 nt, Artificial Sequence
  Description of Artificial Sequence: Synthetic oligonucleotide
  Antisense Strand to SEQ ID NO: 456203
aauagaccaaucuacuugu

SEQ ID NO: 456205 - RNA, 19 nt, Artificial Sequence
  Description of Artificial Sequence: Synthetic oligonucleotide
  Sense strand starting at position 416 of SEQ ID NO: 316995
uuaagugaguagccggaaa

SEQ ID NO: 456206 - RNA, 19 nt, Artificial Sequence
  Description of Artificial Sequence: Synthetic oligonucleotide
  Antisense Strand to SEQ ID NO: 456205
uuuccggcuacucacuuaa

SEQ ID NO: 456207 - RNA, 19 nt, Artificial Sequence
  Description of Artificial Sequence: Synthetic oligonucleotide
  Sense strand starting at position 418 of SEQ ID NO: 316995
aagugaguagccggaaaca

SEQ ID NO: 456208 - RNA, 19 nt, Artificial Sequence
  Description of Artificial Sequence: Synthetic oligonucleotide
  Antisense Strand to SEQ ID NO: 456207
uguuuccggcuacucacuu

SEQ ID NO: 456209 - RNA, 19 nt, Artificial Sequence
  Description of Artificial Sequence: Synthetic oligonucleotide
  Sense strand starting at position 454 of SEQ ID NO: 316995
ggcugauagagauguuucu

SEQ ID NO: 456210 - RNA, 19 nt, Artificial Sequence
  Description of Artificial Sequence: Synthetic oligonucleotide
  Antisense Strand to SEQ ID NO: 456209
agaaacaucucuaucagcc

SEQ ID NO: 456211 - RNA, 19 nt, Artificial Sequence
  Description of Artificial Sequence: Synthetic oligonucleotide
  Sense strand starting at position 577 of SEQ ID NO: 316995
ucuagcacuucugugauga

SEQ ID NO: 456212 - RNA, 19 nt, Artificial Sequence
  Description of Artificial Sequence: Synthetic oligonucleotide
  Antisense Strand to SEQ ID NO: 456211
ucaucacagaagugcuaga

SEQ ID NO: 456213 - RNA, 19 nt, Artificial Sequence
  Description of Artificial Sequence: Synthetic oligonucleotide
  Sense strand starting at position 590 of SEQ ID NO: 316995
ugaugaugcuccuugaacu

SEQ ID NO: 456214 - RNA, 19 nt, Artificial Sequence
  Description of Artificial Sequence: Synthetic oligonucleotide
  Antisense Strand to SEQ ID NO: 456213
aguucaaggagcaucauca

SEQ ID NO: 456215 - RNA, 19 nt, Artificial Sequence
  Description of Artificial Sequence: Synthetic oligonucleotide
  Sense strand starting at position 613 of SEQ ID NO: 316995
uucugauauguuuaaacga

SEQ ID NO: 456216 - RNA, 19 nt, Artificial Sequence
  Description of Artificial Sequence: Synthetic oligonucleotide
  Antisense Strand to SEQ ID NO: 456215
ucguuuaaacauaucagaa

SEQ ID NO: 456217 - RNA, 19 nt, Artificial Sequence
  Description of Artificial Sequence: Synthetic oligonucleotide
  Sense strand starting at position 639 of SEQ ID NO: 316995
ugccacauuugauugucau

SEQ ID NO: 456218 - RNA, 19 nt, Artificial Sequence
  Description of Artificial Sequence: Synthetic oligonucleotide
  Antisense Strand to SEQ ID NO: 456217
augacaaucaaauguggca

SEQ ID NO: 456219 - RNA, 19 nt, Artificial Sequence
  Description of Artificial Sequence: Synthetic oligonucleotide
  Sense strand starting at position 640 of SEQ ID NO: 316995
gccacauuugauugucauu

SEQ ID NO: 456220 - RNA, 19 nt, Artificial Sequence
  Description of Artificial Sequence: Synthetic oligonucleotide
  Antisense Strand to SEQ ID NO: 456219
aaugacaaucaaauguggc

SEQ ID NO: 456221 - RNA, 19 nt, Artificial Sequence
  Description of Artificial Sequence: Synthetic oligonucleotide
  Sense strand starting at position 643 of SEQ ID NO: 316995
acauuugauugucauugga

SEQ ID NO: 456222 - RNA, 19 nt, Artificial Sequence
  Description of Artificial Sequence: Synthetic oligonucleotide
  Antisense Strand to SEQ ID NO: 456221
uccaaugacaaucaaaugu

SEQ ID NO: 456223 - RNA, 19 nt, Artificial Sequence
  Description of Artificial Sequence: Synthetic oligonucleotide
  Sense strand starting at position 663 of SEQ ID NO: 316995
uccagcuuucugggagaag

SEQ ID NO: 456224 - RNA, 19 nt, Artificial Sequence
  Description of Artificial Sequence: Synthetic oligonucleotide
  Antisense Strand to SEQ ID NO: 456223
cuucucccagaaagcugga

SEQ ID NO: 456225 - RNA, 19 nt, Artificial Sequence
  Description of Artificial Sequence: Synthetic oligonucleotide
  Sense strand starting at position 674 of SEQ ID NO: 316995
gggagaaguuguuugucaa

SEQ ID NO: 456226 - RNA, 19 nt, Artificial Sequence
  Description of Artificial Sequence: Synthetic oligonucleotide
  Antisense Strand to SEQ ID NO: 456225
uugacaaacaacuucuccc

SEQ ID NO: 456227 - RNA, 19 nt, Artificial Sequence
  Description of Artificial Sequence: Synthetic oligonucleotide
  Sense strand starting at position 675 of SEQ ID NO: 316995
ggagaaguuguuugucaac

SEQ ID NO: 456228 - RNA, 19 nt, Artificial Sequence
  Description of Artificial Sequence: Synthetic oligonucleotide
  Antisense Strand to SEQ ID NO: 456227
guugacaaacaacuucucc

SEQ ID NO: 456229 - RNA, 19 nt, Artificial Sequence
  Description of Artificial Sequence: Synthetic oligonucleotide
  Sense strand starting at position 677 of SEQ ID NO: 316995
agaaguuguuugucaacag

SEQ ID NO: 456230 - RNA, 19 nt, Artificial Sequence
  Description of Artificial Sequence: Synthetic oligonucleotide
  Antisense Strand to SEQ ID NO: 456229
cuguugacaaacaacuucu

SEQ ID NO: 456231 - RNA, 19 nt, Artificial Sequence
  Description of Artificial Sequence: Synthetic oligonucleotide
  Sense strand starting at position 684 of SEQ ID NO: 316995
guuugucaacaguaccuua

SEQ ID NO: 456232 - RNA, 19 nt, Artificial Sequence
  Description of Artificial Sequence: Synthetic oligonucleotide
  Antisense Strand to SEQ ID NO: 456231
uaagguacuguugacaaac

SEQ ID NO: 456233 - RNA, 19 nt, Artificial Sequence
  Description of Artificial Sequence: Synthetic oligonucleotide
  Sense strand starting at position 889 of SEQ ID NO: 316995
ggaaacguaucaguccaaa

SEQ ID NO: 456234 - RNA, 19 nt, Artificial Sequence
  Description of Artificial Sequence: Synthetic oligonucleotide
  Antisense Strand to SEQ ID NO: 456233
uuuggacugauacguuucc

SEQ ID NO: 456235 - RNA, 19 nt, Artificial Sequence
  Description of Artificial Sequence: Synthetic oligonucleotide
  Sense strand starting at position 1259 of SEQ ID NO: 316995
ccugaaauuuggcaauuag

SEQ ID NO: 456236 - RNA, 19 nt, Artificial Sequence
  Description of Artificial Sequence: Synthetic oligonucleotide
  Antisense Strand to SEQ ID NO: 456235
cuaauugccaaauuucagg

SEQ ID NO: 456237 - RNA, 19 nt, Artificial Sequence
  Description of Artificial Sequence: Synthetic oligonucleotide
  Sense strand starting at position 1759 of SEQ ID NO: 316995
gcgaucuuugccuuccgga

SEQ ID NO: 456238 - RNA, 19 nt, Artificial Sequence
  Description of Artificial Sequence: Synthetic oligonucleotide
  Antisense Strand to SEQ ID NO: 456237
uccggaaggcaaagaucgc

SEQ ID NO: 456239 - RNA, 19 nt, Artificial Sequence
  Description of Artificial Sequence: Synthetic oligonucleotide
  Sense strand starting at position 1853 of SEQ ID NO: 316995
aagguuauuucugaagaag

SEQ ID NO: 456240 - RNA, 19 nt, Artificial Sequence
  Description of Artificial Sequence: Synthetic oligonucleotide
  Antisense Strand to SEQ ID NO: 456239
cuucuucagaaauaaccuu

SEQ ID NO: 456241 - RNA, 19 nt, Artificial Sequence
  Description of Artificial Sequence: Synthetic oligonucleotide
  Sense strand starting at position 2315 of SEQ ID NO: 316995
accaaauuguuggcucaau

SEQ ID NO: 456242 - RNA, 19 nt, Artificial Sequence
  Description of Artificial Sequence: Synthetic oligonucleotide
  Antisense Strand to SEQ ID NO: 456241
auugagccaacaauuuggu

SEQ ID NO: 456243 - RNA, 19 nt, Artificial Sequence
  Description of Artificial Sequence: Synthetic oligonucleotide
  Sense strand starting at position 2316 of SEQ ID NO: 316995
ccaaauuguuggcucaaug

SEQ ID NO: 456244 - RNA, 19 nt, Artificial Sequence
  Description of Artificial Sequence: Synthetic oligonucleotide
  Antisense Strand to SEQ ID NO: 456243
cauugagccaacaauuugg

SEQ ID NO: 456245 - RNA, 19 nt, Artificial Sequence
  Description of Artificial Sequence: Synthetic oligonucleotide
  Sense strand starting at position 2333 of SEQ ID NO: 316995
uggaaugcuuacuuguuga

SEQ ID NO: 456246 - RNA, 19 nt, Artificial Sequence
  Description of Artificial Sequence: Synthetic oligonucleotide
  Antisense Strand to SEQ ID NO: 456245
ucaacaaguaagcauucca

SEQ ID NO: 456247 - RNA, 19 nt, Artificial Sequence
  Description of Artificial Sequence: Synthetic oligonucleotide
  Sense strand starting at position 2338 of SEQ ID NO: 316995
ugcuuacuuguugaaauac

SEQ ID NO: 456248 - RNA, 19 nt, Artificial Sequence
  Description of Artificial Sequence: Synthetic oligonucleotide
  Antisense Strand to SEQ ID NO: 456247
guauuucaacaaguaagca

SEQ ID NO: 456249 - RNA, 19 nt, Artificial Sequence
  Description of Artificial Sequence: Synthetic oligonucleotide
  Sense strand starting at position 2373 of SEQ ID NO: 316995
cugagucaaguuugggaca

SEQ ID NO: 456250 - RNA, 19 nt, Artificial Sequence
  Description of Artificial Sequence: Synthetic oligonucleotide
  Antisense Strand to SEQ ID NO: 456249
ugucccaaacuugacucag

SEQ ID NO: 456251 - RNA, 19 nt, Artificial Sequence
  Description of Artificial Sequence: Synthetic oligonucleotide
  Sense strand starting at position 2425 of SEQ ID NO: 316995
gcuguaugcggacuugcau

SEQ ID NO: 456252 - RNA, 19 nt, Artificial Sequence
  Description of Artificial Sequence: Synthetic oligonucleotide
  Antisense Strand to SEQ ID NO: 456251
augcaaguccgcauacagc

SEQ ID NO: 456253 - RNA, 19 nt, Artificial Sequence
  Description of Artificial Sequence: Synthetic oligonucleotide
  Sense strand starting at position 2431 of SEQ ID NO: 316995
ugcggacuugcauaaauaa

SEQ ID NO: 456254 - RNA, 19 nt, Artificial Sequence
  Description of Artificial Sequence: Synthetic oligonucleotide
  Antisense Strand to SEQ ID NO: 456253
uuauuuaugcaaguccgca

SEQ ID NO: 456255 - RNA, 19 nt, Artificial Sequence
  Description of Artificial Sequence: Synthetic oligonucleotide
  Sense strand starting at position 2453 of SEQ ID NO: 316995
gggcuauuccacugacuuu

SEQ ID NO: 456256 - RNA, 19 nt, Artificial Sequence
  Description of Artificial Sequence: Synthetic oligonucleotide
  Antisense Strand to SEQ ID NO: 456255
aaagucaguggaauagccc

SEQ ID NO: 456257 - RNA, 19 nt, Artificial Sequence
  Description of Artificial Sequence: Synthetic oligonucleotide
  Sense strand starting at position 2585 of SEQ ID NO: 316995
ucuguuuggcuagaaugca

SEQ ID NO: 456258 - RNA, 19 nt, Artificial Sequence
  Description of Artificial Sequence: Synthetic oligonucleotide
  Antisense Strand to SEQ ID NO: 456257
ugcauucuagccaaacaga

SEQ ID NO: 456259 - RNA, 19 nt, Artificial Sequence
  Description of Artificial Sequence: Synthetic oligonucleotide
  Sense strand starting at position 2758 of SEQ ID NO: 316995
ggaaaugggaguugagcaa

SEQ ID NO: 456260 - RNA, 19 nt, Artificial Sequence
  Description of Artificial Sequence: Synthetic oligonucleotide
  Antisense Strand to SEQ ID NO: 456259
uugcucaacucccauuucc

SEQ ID NO: 456261 - RNA, 19 nt, Artificial Sequence
  Description of Artificial Sequence: Synthetic oligonucleotide
  Sense strand starting at position 2820 of SEQ ID NO: 316995
uuaccuucuuuacugggaa

SEQ ID NO: 456262 - RNA, 19 nt, Artificial Sequence
  Description of Artificial Sequence: Synthetic oligonucleotide
  Antisense Strand to SEQ ID NO: 456261
uucccaguaaagaagguaa

SEQ ID NO: 456263 - RNA, 19 nt, Artificial Sequence
  Description of Artificial Sequence: Synthetic oligonucleotide
  Sense strand starting at position 2866 of SEQ ID NO: 316995
guaugaggagacuguguaa

SEQ ID NO: 456264 - RNA, 19 nt, Artificial Sequence
  Description of Artificial Sequence: Synthetic oligonucleotide
  Antisense Strand to SEQ ID NO: 456263
uuacacagucuccucauac

SEQ ID NO: 456265 - RNA, 19 nt, Artificial Sequence
  Description of Artificial Sequence: Synthetic oligonucleotide
  Sense strand starting at position 2994 of SEQ ID NO: 316995
uguacucuaggaugauaau

SEQ ID NO: 456266 - RNA, 19 nt, Artificial Sequence
  Description of Artificial Sequence: Synthetic oligonucleotide
  Antisense Strand to SEQ ID NO: 456265
auuaucauccuagaguaca

SEQ ID NO: 456267 - RNA, 19 nt, Artificial Sequence
  Description of Artificial Sequence: Synthetic oligonucleotide
  Sense strand starting at position 3055 of SEQ ID NO: 316995
agggaauaauaguagaaga

SEQ ID NO: 456268 - RNA, 19 nt, Artificial Sequence
  Description of Artificial Sequence: Synthetic oligonucleotide
  Antisense Strand to SEQ ID NO: 456267
ucuucuacuauuauucccu

SEQ ID NO: 456269 - RNA, 19 nt, Artificial Sequence
  Description of Artificial Sequence: Synthetic oligonucleotide
  Sense strand starting at position 3223 of SEQ ID NO: 316995
gcucuugugggagaaauac

SEQ ID NO: 456270 - RNA, 19 nt, Artificial Sequence
  Description of Artificial Sequence: Synthetic oligonucleotide
  Antisense Strand to SEQ ID NO: 456269
guauuucucccacaagagc

SEQ ID NO: 456271 - RNA, 19 nt, Artificial Sequence
  Description of Artificial Sequence: Synthetic oligonucleotide
  Sense strand starting at position 3344 of SEQ ID NO: 316995
ugaguaaauuuagaaggca

SEQ ID NO: 456272 - RNA, 19 nt, Artificial Sequence
  Description of Artificial Sequence: Synthetic oligonucleotide
  Antisense Strand to SEQ ID NO: 456271
ugccuucuaaauuuacuca

SEQ ID NO: 456273 - RNA, 19 nt, Artificial Sequence
  Description of Artificial Sequence: Synthetic oligonucleotide
  Sense strand starting at position 3376 of SEQ ID NO: 316995
gcugaaaugaucugugaga

SEQ ID NO: 456274 - RNA, 19 nt, Artificial Sequence
  Description of Artificial Sequence: Synthetic oligonucleotide
  Antisense Strand to SEQ ID NO: 456273
ucucacagaucauuucagc

SEQ ID NO: 456275 - RNA, 19 nt, Artificial Sequence
  Description of Artificial Sequence: Synthetic oligonucleotide
  Sense strand starting at position 3525 of SEQ ID NO: 316995
agugcaaugagucaaggau

SEQ ID NO: 456276 - RNA, 19 nt, Artificial Sequence
  Description of Artificial Sequence: Synthetic oligonucleotide
  Antisense Strand to SEQ ID NO: 456275
auccuugacucauugcacu

SEQ ID NO: 456277 - RNA, 19 nt, Artificial Sequence
  Description of Artificial Sequence: Synthetic oligonucleotide
  Sense strand starting at position 3692 of SEQ ID NO: 316995
ggucucagauuccuuauua

SEQ ID NO: 456278 - RNA, 19 nt, Artificial Sequence
  Description of Artificial Sequence: Synthetic oligonucleotide
  Antisense Strand to SEQ ID NO: 456277
uaauaaggaaucugagacc

SEQ ID NO: 456279 - RNA, 19 nt, Artificial Sequence
  Description of Artificial Sequence: Synthetic oligonucleotide
  Sense strand starting at position 3693 of SEQ ID NO: 316995
gucucagauuccuuauuau

SEQ ID NO: 456280 - RNA, 19 nt, Artificial Sequence
  Description of Artificial Sequence: Synthetic oligonucleotide
  Antisense Strand to SEQ ID NO: 456279
auaauaaggaaucugagac

SEQ ID NO: 456281 - RNA, 19 nt, Artificial Sequence
  Description of Artificial Sequence: Synthetic oligonucleotide
  Sense strand starting at position 400 of SEQ ID NO: 316996
ucacaaguagauuggucua

SEQ ID NO: 456282 - RNA, 19 nt, Artificial Sequence
  Description of Artificial Sequence: Synthetic oligonucleotide
  Antisense Strand to SEQ ID NO: 456281
uagaccaaucuacuuguga

SEQ ID NO: 456283 - RNA, 19 nt, Artificial Sequence
  Description of Artificial Sequence: Synthetic oligonucleotide
  Sense strand starting at position 402 of SEQ ID NO: 316996
acaaguagauuggucuauu

SEQ ID NO: 456284 - RNA, 19 nt, Artificial Sequence
  Description of Artificial Sequence: Synthetic oligonucleotide
  Antisense Strand to SEQ ID NO: 456283
aauagaccaaucuacuugu

SEQ ID NO: 456285 - RNA, 19 nt, Artificial Sequence
  Description of Artificial Sequence: Synthetic oligonucleotide
  Sense strand starting at position 421 of SEQ ID NO: 316996
uuaagugaguagccggaaa

SEQ ID NO: 456286 - RNA, 19 nt, Artificial Sequence
  Description of Artificial Sequence: Synthetic oligonucleotide
  Antisense Strand to SEQ ID NO: 456285
uuuccggcuacucacuuaa

SEQ ID NO: 456287 - RNA, 19 nt, Artificial Sequence
  Description of Artificial Sequence: Synthetic oligonucleotide
  Sense strand starting at position 423 of SEQ ID NO: 316996
aagugaguagccggaaaca

SEQ ID NO: 456288 - RNA, 19 nt, Artificial Sequence
  Description of Artificial Sequence: Synthetic oligonucleotide
  Antisense Strand to SEQ ID NO: 456287
uguuuccggcuacucacuu

SEQ ID NO: 456289 - RNA, 19 nt, Artificial Sequence
  Description of Artificial Sequence: Synthetic oligonucleotide
  Sense strand starting at position 459 of SEQ ID NO: 316996
ggcugauagagauguuucu

SEQ ID NO: 456290 - RNA, 19 nt, Artificial Sequence
  Description of Artificial Sequence: Synthetic oligonucleotide
  Antisense Strand to SEQ ID NO: 456289
agaaacaucucuaucagcc

SEQ ID NO: 456291 - RNA, 19 nt, Artificial Sequence
  Description of Artificial Sequence: Synthetic oligonucleotide
  Sense strand starting at position 582 of SEQ ID NO: 316996
ucuagcacuucugugauga

SEQ ID NO: 456292 - RNA, 19 nt, Artificial Sequence
  Description of Artificial Sequence: Synthetic oligonucleotide
  Antisense Strand to SEQ ID NO: 456291
ucaucacagaagugcuaga

SEQ ID NO: 456293 - RNA, 19 nt, Artificial Sequence
  Description of Artificial Sequence: Synthetic oligonucleotide
  Sense strand starting at position 595 of SEQ ID NO: 316996
ugaugaugcuccuugaacu

SEQ ID NO: 456294 - RNA, 19 nt, Artificial Sequence
  Description of Artificial Sequence: Synthetic oligonucleotide
  Antisense Strand to SEQ ID NO: 456293
aguucaaggagcaucauca

SEQ ID NO: 456295 - RNA, 19 nt, Artificial Sequence
  Description of Artificial Sequence: Synthetic oligonucleotide
  Sense strand starting at position 618 of SEQ ID NO: 316996
uucugauauguuuaaacga

SEQ ID NO: 456296 - RNA, 19 nt, Artificial Sequence
  Description of Artificial Sequence: Synthetic oligonucleotide
  Antisense Strand to SEQ ID NO: 456295
ucguuuaaacauaucagaa

SEQ ID NO: 456297 - RNA, 19 nt, Artificial Sequence
  Description of Artificial Sequence: Synthetic oligonucleotide
  Sense strand starting at position 644 of SEQ ID NO: 316996
ugccacauuugauugucau

SEQ ID NO: 456298 - RNA, 19 nt, Artificial Sequence
  Description of Artificial Sequence: Synthetic oligonucleotide
  Antisense Strand to SEQ ID NO: 456297
augacaaucaaauguggca

SEQ ID NO: 456299 - RNA, 19 nt, Artificial Sequence
  Description of Artificial Sequence: Synthetic oligonucleotide
  Sense strand starting at position 645 of SEQ ID NO: 316996
gccacauuugauugucauu

SEQ ID NO: 456300 - RNA, 19 nt, Artificial Sequence
  Description of Artificial Sequence: Synthetic oligonucleotide
  Antisense Strand to SEQ ID NO: 456299
aaugacaaucaaauguggc

SEQ ID NO: 456301 - RNA, 19 nt, Artificial Sequence
  Description of Artificial Sequence: Synthetic oligonucleotide
  Sense strand starting at position 648 of SEQ ID NO: 316996
acauuugauugucauugga

SEQ ID NO: 456302 - RNA, 19 nt, Artificial Sequence
  Description of Artificial Sequence: Synthetic oligonucleotide
  Antisense Strand to SEQ ID NO: 456301
uccaaugacaaucaaaugu

SEQ ID NO: 456303 - RNA, 19 nt, Artificial Sequence
  Description of Artificial Sequence: Synthetic oligonucleotide
  Sense strand starting at position 668 of SEQ ID NO: 316996
uccagcuuucugggagaag

SEQ ID NO: 456304 - RNA, 19 nt, Artificial Sequence
  Description of Artificial Sequence: Synthetic oligonucleotide
  Antisense Strand to SEQ ID NO: 456303
cuucucccagaaagcugga

SEQ ID NO: 456305 - RNA, 19 nt, Artificial Sequence
  Description of Artificial Sequence: Synthetic oligonucleotide
  Sense strand starting at position 679 of SEQ ID NO: 316996
gggagaaguuguuugucaa

SEQ ID NO: 456306 - RNA, 19 nt, Artificial Sequence
  Description of Artificial Sequence: Synthetic oligonucleotide
  Antisense Strand to SEQ ID NO: 456305
uugacaaacaacuucuccc

SEQ ID NO: 456307 - RNA, 19 nt, Artificial Sequence
  Description of Artificial Sequence: Synthetic oligonucleotide
  Sense strand starting at position 680 of SEQ ID NO: 316996
ggagaaguuguuugucaac

SEQ ID NO: 456308 - RNA, 19 nt, Artificial Sequence
  Description of Artificial Sequence: Synthetic oligonucleotide
  Antisense Strand to SEQ ID NO: 456307
guugacaaacaacuucucc

SEQ ID NO: 456309 - RNA, 19 nt, Artificial Sequence
  Description of Artificial Sequence: Synthetic oligonucleotide
  Sense strand starting at position 682 of SEQ ID NO: 316996
agaaguuguuugucaacag

SEQ ID NO: 456310 - RNA, 19 nt, Artificial Sequence
  Description of Artificial Sequence: Synthetic oligonucleotide
  Antisense Strand to SEQ ID NO: 456309
cuguugacaaacaacuucu

SEQ ID NO: 456311 - RNA, 19 nt, Artificial Sequence
  Description of Artificial Sequence: Synthetic oligonucleotide
  Sense strand starting at position 689 of SEQ ID NO: 316996
guuugucaacaguaccuua

SEQ ID NO: 456312 - RNA, 19 nt, Artificial Sequence
  Description of Artificial Sequence: Synthetic oligonucleotide
  Antisense Strand to SEQ ID NO: 456311
uaagguacuguugacaaac

SEQ ID NO: 456313 - RNA, 19 nt, Artificial Sequence
  Description of Artificial Sequence: Synthetic oligonucleotide
  Sense strand starting at position 894 of SEQ ID NO: 316996
ggaaacguaucaguccaaa

SEQ ID NO: 456314 - RNA, 19 nt, Artificial Sequence
  Description of Artificial Sequence: Synthetic oligonucleotide
  Antisense Strand to SEQ ID NO: 456313
uuuggacugauacguuucc

SEQ ID NO: 456315 - RNA, 19 nt, Artificial Sequence
  Description of Artificial Sequence: Synthetic oligonucleotide
  Sense strand starting at position 1264 of SEQ ID NO: 316996
ccugaaauuuggcaauuag

SEQ ID NO: 456316 - RNA, 19 nt, Artificial Sequence
  Description of Artificial Sequence: Synthetic oligonucleotide
  Antisense Strand to SEQ ID NO: 456315
cuaauugccaaauuucagg

SEQ ID NO: 456317 - RNA, 19 nt, Artificial Sequence
  Description of Artificial Sequence: Synthetic oligonucleotide
  Sense strand starting at position 1764 of SEQ ID NO: 316996
gcgaucuuugccuuccgga

SEQ ID NO: 456318 - RNA, 19 nt, Artificial Sequence
  Description of Artificial Sequence: Synthetic oligonucleotide
  Antisense Strand to SEQ ID NO: 456317
uccggaaggcaaagaucgc

SEQ ID NO: 456319 - RNA, 19 nt, Artificial Sequence
  Description of Artificial Sequence: Synthetic oligonucleotide
  Sense strand starting at position 1858 of SEQ ID NO: 316996
aagguuauuucugaagaag

SEQ ID NO: 456320 - RNA, 19 nt, Artificial Sequence
  Description of Artificial Sequence: Synthetic oligonucleotide
  Antisense Strand to SEQ ID NO: 456319
cuucuucagaaauaaccuu

SEQ ID NO: 456321 - RNA, 19 nt, Artificial Sequence
  Description of Artificial Sequence: Synthetic oligonucleotide
  Sense strand starting at position 2320 of SEQ ID NO: 316996
accaaauuguuggcucaau

SEQ ID NO: 456322 - RNA, 19 nt, Artificial Sequence
  Description of Artificial Sequence: Synthetic oligonucleotide
  Antisense Strand to SEQ ID NO: 456321
auugagccaacaauuuggu

SEQ ID NO: 456323 - RNA, 19 nt, Artificial Sequence
  Description of Artificial Sequence: Synthetic oligonucleotide
  Sense strand starting at position 2321 of SEQ ID NO: 316996
ccaaauuguuggcucaaug

SEQ ID NO: 456324 - RNA, 19 nt, Artificial Sequence
  Description of Artificial Sequence: Synthetic oligonucleotide
  Antisense Strand to SEQ ID NO: 456323
cauugagccaacaauuugg

SEQ ID NO: 456325 - RNA, 19 nt, Artificial Sequence
  Description of Artificial Sequence: Synthetic oligonucleotide
  Sense strand starting at position 2338 of SEQ ID NO: 316996
uggaaugcuuacuuguuga

SEQ ID NO: 456326 - RNA, 19 nt, Artificial Sequence
  Description of Artificial Sequence: Synthetic oligonucleotide
  Antisense Strand to SEQ ID NO: 456325
ucaacaaguaagcauucca

SEQ ID NO: 456327 - RNA, 19 nt, Artificial Sequence
  Description of Artificial Sequence: Synthetic oligonucleotide
  Sense strand starting at position 2343 of SEQ ID NO: 316996
ugcuuacuuguugaaauac

SEQ ID NO: 456328 - RNA, 19 nt, Artificial Sequence
  Description of Artificial Sequence: Synthetic oligonucleotide
  Antisense Strand to SEQ ID NO: 456327
guauuucaacaaguaagca

SEQ ID NO: 456329 - RNA, 19 nt, Artificial Sequence
  Description of Artificial Sequence: Synthetic oligonucleotide
  Sense strand starting at position 2378 of SEQ ID NO: 316996
cugagucaaguuugggaca

SEQ ID NO: 456330 - RNA, 19 nt, Artificial Sequence
  Description of Artificial Sequence: Synthetic oligonucleotide
  Antisense Strand to SEQ ID NO: 456329
ugucccaaacuugacucag

SEQ ID NO: 456331 - RNA, 19 nt, Artificial Sequence
  Description of Artificial Sequence: Synthetic oligonucleotide
  Sense strand starting at position 2430 of SEQ ID NO: 316996
gcuguaugcggacuugcau

SEQ ID NO: 456332 - RNA, 19 nt, Artificial Sequence
  Description of Artificial Sequence: Synthetic oligonucleotide
  Antisense Strand to SEQ ID NO: 456331
augcaaguccgcauacagc

SEQ ID NO: 456333 - RNA, 19 nt, Artificial Sequence
  Description of Artificial Sequence: Synthetic oligonucleotide
  Sense strand starting at position 2436 of SEQ ID NO: 316996
ugcggacuugcauaaauaa

SEQ ID NO: 456334 - RNA, 19 nt, Artificial Sequence
  Description of Artificial Sequence: Synthetic oligonucleotide
  Antisense Strand to SEQ ID NO: 456333
uuauuuaugcaaguccgca

SEQ ID NO: 456335 - RNA, 19 nt, Artificial Sequence
  Description of Artificial Sequence: Synthetic oligonucleotide
  Sense strand starting at position 2458 of SEQ ID NO: 316996
gggcuauuccacugacuuu

SEQ ID NO: 456336 - RNA, 19 nt, Artificial Sequence
  Description of Artificial Sequence: Synthetic oligonucleotide
  Antisense Strand to SEQ ID NO: 456335
aaagucaguggaauagccc

SEQ ID NO: 456337 - RNA, 19 nt, Artificial Sequence
  Description of Artificial Sequence: Synthetic oligonucleotide
  Sense strand starting at position 2590 of SEQ ID NO: 316996
ucuguuuggcuagaaugca

SEQ ID NO: 456338 - RNA, 19 nt, Artificial Sequence
  Description of Artificial Sequence: Synthetic oligonucleotide
  Antisense Strand to SEQ ID NO: 456337
ugcauucuagccaaacaga

SEQ ID NO: 456339 - RNA, 19 nt, Artificial Sequence
  Description of Artificial Sequence: Synthetic oligonucleotide
  Sense strand starting at position 2763 of SEQ ID NO: 316996
ggaaaugggaguugagcaa

SEQ ID NO: 456340 - RNA, 19 nt, Artificial Sequence
  Description of Artificial Sequence: Synthetic oligonucleotide
  Antisense Strand to SEQ ID NO: 456339
uugcucaacucccauuucc

SEQ ID NO: 456341 - RNA, 19 nt, Artificial Sequence
  Description of Artificial Sequence: Synthetic oligonucleotide
  Sense strand starting at position 2825 of SEQ ID NO: 316996
uuaccuucuuuacugggaa

SEQ ID NO: 456342 - RNA, 19 nt, Artificial Sequence
  Description of Artificial Sequence: Synthetic oligonucleotide
  Antisense Strand to SEQ ID NO: 456341
uucccaguaaagaagguaa

SEQ ID NO: 456343 - RNA, 19 nt, Artificial Sequence
  Description of Artificial Sequence: Synthetic oligonucleotide
  Sense strand starting at position 2871 of SEQ ID NO: 316996
guaugaggagacuguguaa

SEQ ID NO: 456344 - RNA, 19 nt, Artificial Sequence
  Description of Artificial Sequence: Synthetic oligonucleotide
  Antisense Strand to SEQ ID NO: 456343
uuacacagucuccucauac

SEQ ID NO: 456345 - RNA, 19 nt, Artificial Sequence
  Description of Artificial Sequence: Synthetic oligonucleotide
  Sense strand starting at position 2999 of SEQ ID NO: 316996
uguacucuaggaugauaau

SEQ ID NO: 456346 - RNA, 19 nt, Artificial Sequence
  Description of Artificial Sequence: Synthetic oligonucleotide
  Antisense Strand to SEQ ID NO: 456345
auuaucauccuagaguaca

SEQ ID NO: 456347 - RNA, 19 nt, Artificial Sequence
  Description of Artificial Sequence: Synthetic oligonucleotide
  Sense strand starting at position 3060 of SEQ ID NO: 316996
agggaauaauaguagaaga

SEQ ID NO: 456348 - RNA, 19 nt, Artificial Sequence
  Description of Artificial Sequence: Synthetic oligonucleotide
  Antisense Strand to SEQ ID NO: 456347
ucuucuacuauuauucccu

SEQ ID NO: 456349 - RNA, 19 nt, Artificial Sequence
  Description of Artificial Sequence: Synthetic oligonucleotide
  Sense strand starting at position 3228 of SEQ ID NO: 316996
gcucuugugggagaaauac

SEQ ID NO: 456350 - RNA, 19 nt, Artificial Sequence
  Description of Artificial Sequence: Synthetic oligonucleotide
  Antisense Strand to SEQ ID NO: 456349
guauuucucccacaagagc

SEQ ID NO: 456351 - RNA, 19 nt, Artificial Sequence
  Description of Artificial Sequence: Synthetic oligonucleotide
  Sense strand starting at position 3349 of SEQ ID NO: 316996
ugaguaaauuuagaaggca

SEQ ID NO: 456352 - RNA, 19 nt, Artificial Sequence
  Description of Artificial Sequence: Synthetic oligonucleotide
  Antisense Strand to SEQ ID NO: 456351
ugccuucuaaauuuacuca

SEQ ID NO: 456353 - RNA, 19 nt, Artificial Sequence
  Description of Artificial Sequence: Synthetic oligonucleotide
  Sense strand starting at position 3381 of SEQ ID NO: 316996
gcugaaaugaucugugaga

SEQ ID NO: 456354 - RNA, 19 nt, Artificial Sequence
  Description of Artificial Sequence: Synthetic oligonucleotide
  Antisense Strand to SEQ ID NO: 456353
ucucacagaucauuucagc

SEQ ID NO: 456355 - RNA, 19 nt, Artificial Sequence
  Description of Artificial Sequence: Synthetic oligonucleotide
  Sense strand starting at position 3530 of SEQ ID NO: 316996
agugcaaugagucaaggau

SEQ ID NO: 456356 - RNA, 19 nt, Artificial Sequence
  Description of Artificial Sequence: Synthetic oligonucleotide
  Antisense Strand to SEQ ID NO: 456355
auccuugacucauugcacu

SEQ ID NO: 456357 - RNA, 19 nt, Artificial Sequence
  Description of Artificial Sequence: Synthetic oligonucleotide
  Sense strand starting at position 3697 of SEQ ID NO: 316996
ggucucagauuccuuauua

SEQ ID NO: 456358 - RNA, 19 nt, Artificial Sequence
  Description of Artificial Sequence: Synthetic oligonucleotide
  Antisense Strand to SEQ ID NO: 456357
uaauaaggaaucugagacc

SEQ ID NO: 456359 - RNA, 19 nt, Artificial Sequence
  Description of Artificial Sequence: Synthetic oligonucleotide
  Sense strand starting at position 3698 of SEQ ID NO: 316996
gucucagauuccuuauuau

SEQ ID NO: 456360 - RNA, 19 nt, Artificial Sequence
  Description of Artificial Sequence: Synthetic oligonucleotide
  Antisense Strand to SEQ ID NO: 456359
auaauaaggaaucugagac

SEQ ID NO: 456361 - RNA, 19 nt, Artificial Sequence
  Description of Artificial Sequence: Synthetic oligonucleotide
  Sense strand starting at position 487 of SEQ ID NO: 316997
gucucugugccagaaagau

SEQ ID NO: 456362 - RNA, 19 nt, Artificial Sequence
  Description of Artificial Sequence: Synthetic oligonucleotide
  Antisense Strand to SEQ ID NO: 456361
aucuuucuggcacagagac

SEQ ID NO: 456363 - RNA, 19 nt, Artificial Sequence
  Description of Artificial Sequence: Synthetic oligonucleotide
  Sense strand starting at position 756 of SEQ ID NO: 316997
gggcauuccagacacaguu

SEQ ID NO: 456364 - RNA, 19 nt, Artificial Sequence
  Description of Artificial Sequence: Synthetic oligonucleotide
  Antisense Strand to SEQ ID NO: 456363
aacugugucuggaaugccc

SEQ ID NO: 456365 - RNA, 19 nt, Artificial Sequence
  Description of Artificial Sequence: Synthetic oligonucleotide
  Sense strand starting at position 782 of SEQ ID NO: 316997
ugcuuaguaauugcgcaau

SEQ ID NO: 456366 - RNA, 19 nt, Artificial Sequence
  Description of Artificial Sequence: Synthetic oligonucleotide
  Antisense Strand to SEQ ID NO: 456365
auugcgcaauuacuaagca

SEQ ID NO: 456367 - RNA, 19 nt, Artificial Sequence
  Description of Artificial Sequence: Synthetic oligonucleotide
  Sense strand starting at position 796 of SEQ ID NO: 316997
gcaauaaucugaguuagag

SEQ ID NO: 456368 - RNA, 19 nt, Artificial Sequence
  Description of Artificial Sequence: Synthetic oligonucleotide
  Antisense Strand to SEQ ID NO: 456367
cucuaacucagauuauugc

SEQ ID NO: 456369 - RNA, 19 nt, Artificial Sequence
  Description of Artificial Sequence: Synthetic oligonucleotide
  Sense strand starting at position 826 of SEQ ID NO: 316997
aagauuacuugugaauuug

SEQ ID NO: 456370 - RNA, 19 nt, Artificial Sequence
  Description of Artificial Sequence: Synthetic oligonucleotide
  Antisense Strand to SEQ ID NO: 456369
caaauucacaaguaaucuu

SEQ ID NO: 456371 - RNA, 19 nt, Artificial Sequence
  Description of Artificial Sequence: Synthetic oligonucleotide
  Sense strand starting at position 853 of SEQ ID NO: 316997
cuucuuugaguuuaagaug

SEQ ID NO: 456372 - RNA, 19 nt, Artificial Sequence
  Description of Artificial Sequence: Synthetic oligonucleotide
  Antisense Strand to SEQ ID NO: 456371
caucuuaaacucaaagaag

SEQ ID NO: 456373 - RNA, 19 nt, Artificial Sequence
  Description of Artificial Sequence: Synthetic oligonucleotide
  Sense strand starting at position 858 of SEQ ID NO: 316997
uugaguuuaagaugcagau

SEQ ID NO: 456374 - RNA, 19 nt, Artificial Sequence
  Description of Artificial Sequence: Synthetic oligonucleotide
  Antisense Strand to SEQ ID NO: 456373
aucugcaucuuaaacucaa

SEQ ID NO: 456375 - RNA, 19 nt, Artificial Sequence
  Description of Artificial Sequence: Synthetic oligonucleotide
  Sense strand starting at position 862 of SEQ ID NO: 316997
guuuaagaugcagaucuua

SEQ ID NO: 456376 - RNA, 19 nt, Artificial Sequence
  Description of Artificial Sequence: Synthetic oligonucleotide
  Antisense Strand to SEQ ID NO: 456375
uaagaucugcaucuuaaac

SEQ ID NO: 456377 - RNA, 19 nt, Artificial Sequence
  Description of Artificial Sequence: Synthetic oligonucleotide
  Sense strand starting at position 907 of SEQ ID NO: 316997
aauguaauggccuagagca

SEQ ID NO: 456378 - RNA, 19 nt, Artificial Sequence
  Description of Artificial Sequence: Synthetic oligonucleotide
  Antisense Strand to SEQ ID NO: 456377
ugcucuaggccauuacauu

SEQ ID NO: 456379 - RNA, 19 nt, Artificial Sequence
  Description of Artificial Sequence: Synthetic oligonucleotide
  Sense strand starting at position 946 of SEQ ID NO: 316997
agacccugguguucugaaa

SEQ ID NO: 456380 - RNA, 19 nt, Artificial Sequence
  Description of Artificial Sequence: Synthetic oligonucleotide
  Antisense Strand to SEQ ID NO: 456379
uuucagaacaccagggucu

SEQ ID NO: 456381 - RNA, 19 nt, Artificial Sequence
  Description of Artificial Sequence: Synthetic oligonucleotide
  Sense strand starting at position 1070 of SEQ ID NO: 316997
gaugguaaagaauguuaau

SEQ ID NO: 456382 - RNA, 19 nt, Artificial Sequence
  Description of Artificial Sequence: Synthetic oligonucleotide
  Antisense Strand to SEQ ID NO: 456381
auuaacauucuuuaccauc

SEQ ID NO: 456383 - RNA, 19 nt, Artificial Sequence
  Description of Artificial Sequence: Synthetic oligonucleotide
  Sense strand starting at position 1177 of SEQ ID NO: 316997
auagaagaauuguuguuga

SEQ ID NO: 456384 - RNA, 19 nt, Artificial Sequence
  Description of Artificial Sequence: Synthetic oligonucleotide
  Antisense Strand to SEQ ID NO: 456383
ucaacaacaauucuucuau

SEQ ID NO: 456385 - RNA, 19 nt, Artificial Sequence
  Description of Artificial Sequence: Synthetic oligonucleotide
  Sense strand starting at position 1180 of SEQ ID NO: 316997
gaagaauuguuguugacug

SEQ ID NO: 456386 - RNA, 19 nt, Artificial Sequence
  Description of Artificial Sequence: Synthetic oligonucleotide
  Antisense Strand to SEQ ID NO: 456385
cagucaacaacaauucuuc

SEQ ID NO: 456387 - RNA, 19 nt, Artificial Sequence
  Description of Artificial Sequence: Synthetic oligonucleotide
  Sense strand starting at position 1225 of SEQ ID NO: 316997
cuggauguuuaacuuugaa

SEQ ID NO: 456388 - RNA, 19 nt, Artificial Sequence
  Description of Artificial Sequence: Synthetic oligonucleotide
  Antisense Strand to SEQ ID NO: 456387
uucaaaguuaaacauccag

SEQ ID NO: 456389 - RNA, 19 nt, Artificial Sequence
  Description of Artificial Sequence: Synthetic oligonucleotide
  Sense strand starting at position 1345 of SEQ ID NO: 316997
ugaaauauccuuugggagc

SEQ ID NO: 456390 - RNA, 19 nt, Artificial Sequence
  Description of Artificial Sequence: Synthetic oligonucleotide
  Antisense Strand to SEQ ID NO: 456389
gcucccaaaggauauuuca

SEQ ID NO: 456391 - RNA, 19 nt, Artificial Sequence
  Description of Artificial Sequence: Synthetic oligonucleotide
  Sense strand starting at position 1533 of SEQ ID NO: 316997
auugaacagccaugagaua

SEQ ID NO: 456392 - RNA, 19 nt, Artificial Sequence
  Description of Artificial Sequence: Synthetic oligonucleotide
  Antisense Strand to SEQ ID NO: 456391
uaucucauggcuguucaau

SEQ ID NO: 456393 - RNA, 19 nt, Artificial Sequence
  Description of Artificial Sequence: Synthetic oligonucleotide
  Sense strand starting at position 1758 of SEQ ID NO: 316997
ggagagguucuggguaaga

SEQ ID NO: 456394 - RNA, 19 nt, Artificial Sequence
  Description of Artificial Sequence: Synthetic oligonucleotide
  Antisense Strand to SEQ ID NO: 456393
ucuuacccagaaccucucc

SEQ ID NO: 456395 - RNA, 19 nt, Artificial Sequence
  Description of Artificial Sequence: Synthetic oligonucleotide
  Sense strand starting at position 1894 of SEQ ID NO: 316997
uguggaguucaguaauaug

SEQ ID NO: 456396 - RNA, 19 nt, Artificial Sequence
  Description of Artificial Sequence: Synthetic oligonucleotide
  Antisense Strand to SEQ ID NO: 456395
cauauuacugaacuccaca

SEQ ID NO: 456397 - RNA, 19 nt, Artificial Sequence
  Description of Artificial Sequence: Synthetic oligonucleotide
  Sense strand starting at position 1981 of SEQ ID NO: 316997
gguuuauaugacgaguaag

SEQ ID NO: 456398 - RNA, 19 nt, Artificial Sequence
  Description of Artificial Sequence: Synthetic oligonucleotide
  Antisense Strand to SEQ ID NO: 456397
cuuacucgucauauaaacc

SEQ ID NO: 456399 - RNA, 19 nt, Artificial Sequence
  Description of Artificial Sequence: Synthetic oligonucleotide
  Sense strand starting at position 1984 of SEQ ID NO: 316997
uuauaugacgaguaaguga

SEQ ID NO: 456400 - RNA, 19 nt, Artificial Sequence
  Description of Artificial Sequence: Synthetic oligonucleotide
  Antisense Strand to SEQ ID NO: 456399
ucacuuacucgucauauaa

SEQ ID NO: 456401 - RNA, 19 nt, Artificial Sequence
  Description of Artificial Sequence: Synthetic oligonucleotide
  Sense strand starting at position 1989 of SEQ ID NO: 316997
ugacgaguaagugauaauc

SEQ ID NO: 456402 - RNA, 19 nt, Artificial Sequence
  Description of Artificial Sequence: Synthetic oligonucleotide
  Antisense Strand to SEQ ID NO: 456401
gauuaucacuuacucguca

SEQ ID NO: 456403 - RNA, 19 nt, Artificial Sequence
  Description of Artificial Sequence: Synthetic oligonucleotide
  Sense strand starting at position 2101 of SEQ ID NO: 316997
gaagacugcugguuauaca

SEQ ID NO: 456404 - RNA, 19 nt, Artificial Sequence
  Description of Artificial Sequence: Synthetic oligonucleotide
  Antisense Strand to SEQ ID NO: 456403
uguauaaccagcagucuuc

SEQ ID NO: 456405 - RNA, 19 nt, Artificial Sequence
  Description of Artificial Sequence: Synthetic oligonucleotide
  Sense strand starting at position 2366 of SEQ ID NO: 316997
ugguguauuuaacuuguuu

SEQ ID NO: 456406 - RNA, 19 nt, Artificial Sequence
  Description of Artificial Sequence: Synthetic oligonucleotide
  Antisense Strand to SEQ ID NO: 456405
aaacaaguuaaauacacca

SEQ ID NO: 456407 - RNA, 19 nt, Artificial Sequence
  Description of Artificial Sequence: Synthetic oligonucleotide
  Sense strand starting at position 2368 of SEQ ID NO: 316997
guguauuuaacuuguuugu

SEQ ID NO: 456408 - RNA, 19 nt, Artificial Sequence
  Description of Artificial Sequence: Synthetic oligonucleotide
  Antisense Strand to SEQ ID NO: 456407
acaaacaaguuaaauacac

SEQ ID NO: 456409 - RNA, 19 nt, Artificial Sequence
  Description of Artificial Sequence: Synthetic oligonucleotide
  Sense strand starting at position 2481 of SEQ ID NO: 316997
gcaugucaugaccacuaau

SEQ ID NO: 456410 - RNA, 19 nt, Artificial Sequence
  Description of Artificial Sequence: Synthetic oligonucleotide
  Antisense Strand to SEQ ID NO: 456409
auuaguggucaugacaugc

SEQ ID NO: 456411 - RNA, 19 nt, Artificial Sequence
  Description of Artificial Sequence: Synthetic oligonucleotide
  Sense strand starting at position 2563 of SEQ ID NO: 316997
cauuguugcugguuuauuu

SEQ ID NO: 456412 - RNA, 19 nt, Artificial Sequence
  Description of Artificial Sequence: Synthetic oligonucleotide
  Antisense Strand to SEQ ID NO: 456411
aaauaaaccagcaacaaug

SEQ ID NO: 456413 - RNA, 19 nt, Artificial Sequence
  Description of Artificial Sequence: Synthetic oligonucleotide
  Sense strand starting at position 2605 of SEQ ID NO: 316997
agccaaaguguuuaaagua

SEQ ID NO: 456414 - RNA, 19 nt, Artificial Sequence
  Description of Artificial Sequence: Synthetic oligonucleotide
  Antisense Strand to SEQ ID NO: 456413
uacuuuaaacacuuuggcu

SEQ ID NO: 456415 - RNA, 19 nt, Artificial Sequence
  Description of Artificial Sequence: Synthetic oligonucleotide
  Sense strand starting at position 2713 of SEQ ID NO: 316997
cacuucuuagugcaggaau

SEQ ID NO: 456416 - RNA, 19 nt, Artificial Sequence
  Description of Artificial Sequence: Synthetic oligonucleotide
  Antisense Strand to SEQ ID NO: 456415
auuccugcacuaagaagug

SEQ ID NO: 456417 - RNA, 19 nt, Artificial Sequence
  Description of Artificial Sequence: Synthetic oligonucleotide
  Sense strand starting at position 2716 of SEQ ID NO: 316997
uucuuagugcaggaauuau

SEQ ID NO: 456418 - RNA, 19 nt, Artificial Sequence
  Description of Artificial Sequence: Synthetic oligonucleotide
  Antisense Strand to SEQ ID NO: 456417
auaauuccugcacuaagaa

SEQ ID NO: 456419 - RNA, 19 nt, Artificial Sequence
  Description of Artificial Sequence: Synthetic oligonucleotide
  Sense strand starting at position 2793 of SEQ ID NO: 316997
ccuuacugagccugaggau

SEQ ID NO: 456420 - RNA, 19 nt, Artificial Sequence
  Description of Artificial Sequence: Synthetic oligonucleotide
  Antisense Strand to SEQ ID NO: 456419
auccucaggcucaguaagg

SEQ ID NO: 456421 - RNA, 19 nt, Artificial Sequence
  Description of Artificial Sequence: Synthetic oligonucleotide
  Sense strand starting at position 2794 of SEQ ID NO: 316997
cuuacugagccugaggauu

SEQ ID NO: 456422 - RNA, 19 nt, Artificial Sequence
  Description of Artificial Sequence: Synthetic oligonucleotide
  Antisense Strand to SEQ ID NO: 456421
aauccucaggcucaguaag

SEQ ID NO: 456423 - RNA, 19 nt, Artificial Sequence
  Description of Artificial Sequence: Synthetic oligonucleotide
  Sense strand starting at position 2802 of SEQ ID NO: 316997
gccugaggauuauccauga

SEQ ID NO: 456424 - RNA, 19 nt, Artificial Sequence
  Description of Artificial Sequence: Synthetic oligonucleotide
  Antisense Strand to SEQ ID NO: 456423
ucauggauaauccucaggc

SEQ ID NO: 456425 - RNA, 19 nt, Artificial Sequence
  Description of Artificial Sequence: Synthetic oligonucleotide
  Sense strand starting at position 2954 of SEQ ID NO: 316997
uaguauaaacgucagaaau

SEQ ID NO: 456426 - RNA, 19 nt, Artificial Sequence
  Description of Artificial Sequence: Synthetic oligonucleotide
  Antisense Strand to SEQ ID NO: 456425
auuucugacguuuauacua

SEQ ID NO: 456427 - RNA, 19 nt, Artificial Sequence
  Description of Artificial Sequence: Synthetic oligonucleotide
  Sense strand starting at position 3039 of SEQ ID NO: 316997
aaggauacaugugugucaa

SEQ ID NO: 456428 - RNA, 19 nt, Artificial Sequence
  Description of Artificial Sequence: Synthetic oligonucleotide
  Antisense Strand to SEQ ID NO: 456427
uugacacacauguauccuu

SEQ ID NO: 456429 - RNA, 19 nt, Artificial Sequence
  Description of Artificial Sequence: Synthetic oligonucleotide
  Sense strand starting at position 3040 of SEQ ID NO: 316997
aggauacaugugugucaaa

SEQ ID NO: 456430 - RNA, 19 nt, Artificial Sequence
  Description of Artificial Sequence: Synthetic oligonucleotide
  Antisense Strand to SEQ ID NO: 456429
uuugacacacauguauccu

SEQ ID NO: 456431 - RNA, 19 nt, Artificial Sequence
  Description of Artificial Sequence: Synthetic oligonucleotide
  Sense strand starting at position 3226 of SEQ ID NO: 316997
guaaauugccugcgaauuu

SEQ ID NO: 456432 - RNA, 19 nt, Artificial Sequence
  Description of Artificial Sequence: Synthetic oligonucleotide
  Antisense Strand to SEQ ID NO: 456431
aaauucgcaggcaauuuac

SEQ ID NO: 456433 - RNA, 19 nt, Artificial Sequence
  Description of Artificial Sequence: Synthetic oligonucleotide
  Sense strand starting at position 3273 of SEQ ID NO: 316997
aggccuucugaugacacau

SEQ ID NO: 456434 - RNA, 19 nt, Artificial Sequence
  Description of Artificial Sequence: Synthetic oligonucleotide
  Antisense Strand to SEQ ID NO: 456433
augugucaucagaaggccu

SEQ ID NO: 456435 - RNA, 19 nt, Artificial Sequence
  Description of Artificial Sequence: Synthetic oligonucleotide
  Sense strand starting at position 3868 of SEQ ID NO: 316997
ucaccuuuagauggagauu

SEQ ID NO: 456436 - RNA, 19 nt, Artificial Sequence
  Description of Artificial Sequence: Synthetic oligonucleotide
  Antisense Strand to SEQ ID NO: 456435
aaucuccaucuaaagguga

SEQ ID NO: 456437 - RNA, 19 nt, Artificial Sequence
  Description of Artificial Sequence: Synthetic oligonucleotide
  Sense strand starting at position 3932 of SEQ ID NO: 316997
uguucugaacgcuagagau

SEQ ID NO: 456438 - RNA, 19 nt, Artificial Sequence
  Description of Artificial Sequence: Synthetic oligonucleotide
  Antisense Strand to SEQ ID NO: 456437
aucucuagcguucagaaca

SEQ ID NO: 456439 - RNA, 19 nt, Artificial Sequence
  Description of Artificial Sequence: Synthetic oligonucleotide
  Sense strand starting at position 3934 of SEQ ID NO: 316997
uucugaacgcuagagauau

SEQ ID NO: 456440 - RNA, 19 nt, Artificial Sequence
  Description of Artificial Sequence: Synthetic oligonucleotide
  Antisense Strand to SEQ ID NO: 456439
auaucucuagcguucagaa

SEQ ID NO: 456441 - RNA, 19 nt, Artificial Sequence
  Description of Artificial Sequence: Synthetic oligonucleotide
  Sense strand starting at position 213 of SEQ ID NO: 316998
auuguagugccagaaggaa

SEQ ID NO: 456442 - RNA, 19 nt, Artificial Sequence
  Description of Artificial Sequence: Synthetic oligonucleotide
  Antisense Strand to SEQ ID NO: 456441
uuccuucuggcacuacaau

SEQ ID NO: 456443 - RNA, 19 nt, Artificial Sequence
  Description of Artificial Sequence: Synthetic oligonucleotide
  Sense strand starting at position 236 of SEQ ID NO: 316998
agagguuaacuaugaucca

SEQ ID NO: 456444 - RNA, 19 nt, Artificial Sequence
  Description of Artificial Sequence: Synthetic oligonucleotide
  Antisense Strand to SEQ ID NO: 456443
uggaucauaguuaaccucu

SEQ ID NO: 456445 - RNA, 19 nt, Artificial Sequence
  Description of Artificial Sequence: Synthetic oligonucleotide
  Sense strand starting at position 239 of SEQ ID NO: 316998
gguuaacuaugauccaaag

SEQ ID NO: 456446 - RNA, 19 nt, Artificial Sequence
  Description of Artificial Sequence: Synthetic oligonucleotide
  Antisense Strand to SEQ ID NO: 456445
cuuuggaucauaguuaacc

SEQ ID NO: 456447 - RNA, 19 nt, Artificial Sequence
  Description of Artificial Sequence: Synthetic oligonucleotide
  Sense strand starting at position 306 of SEQ ID NO: 316998
agaaacaauucguuugaaa

SEQ ID NO: 456448 - RNA, 19 nt, Artificial Sequence
  Description of Artificial Sequence: Synthetic oligonucleotide
  Antisense Strand to SEQ ID NO: 456447
uuucaaacgaauuguuucu

SEQ ID NO: 456449 - RNA, 19 nt, Artificial Sequence
  Description of Artificial Sequence: Synthetic oligonucleotide
  Sense strand starting at position 308 of SEQ ID NO: 316998
aaacaauucguuugaaacg

SEQ ID NO: 456450 - RNA, 19 nt, Artificial Sequence
  Description of Artificial Sequence: Synthetic oligonucleotide
  Antisense Strand to SEQ ID NO: 456449
cguuucaaacgaauuguuu

SEQ ID NO: 456451 - RNA, 19 nt, Artificial Sequence
  Description of Artificial Sequence: Synthetic oligonucleotide
  Sense strand starting at position 371 of SEQ ID NO: 316998
ucaucaaauccucgggcaa

SEQ ID NO: 456452 - RNA, 19 nt, Artificial Sequence
  Description of Artificial Sequence: Synthetic oligonucleotide
  Antisense Strand to SEQ ID NO: 456451
uugcccgaggauuugauga

SEQ ID NO: 456453 - RNA, 19 nt, Artificial Sequence
  Description of Artificial Sequence: Synthetic oligonucleotide
  Sense strand starting at position 385 of SEQ ID NO: 316998
ggcaauaauccuugaggca

SEQ ID NO: 456454 - RNA, 19 nt, Artificial Sequence
  Description of Artificial Sequence: Synthetic oligonucleotide
  Antisense Strand to SEQ ID NO: 456453
ugccucaaggauuauugcc

SEQ ID NO: 456455 - RNA, 19 nt, Artificial Sequence
  Description of Artificial Sequence: Synthetic oligonucleotide
  Sense strand starting at position 386 of SEQ ID NO: 316998
gcaauaauccuugaggcaa

SEQ ID NO: 456456 - RNA, 19 nt, Artificial Sequence
  Description of Artificial Sequence: Synthetic oligonucleotide
  Antisense Strand to SEQ ID NO: 456455
uugccucaaggauuauugc

SEQ ID NO: 456457 - RNA, 19 nt, Artificial Sequence
  Description of Artificial Sequence: Synthetic oligonucleotide
  Sense strand starting at position 441 of SEQ ID NO: 316998
gguugguguggccaagaga

SEQ ID NO: 456458 - RNA, 19 nt, Artificial Sequence
  Description of Artificial Sequence: Synthetic oligonucleotide
  Antisense Strand to SEQ ID NO: 456457
ucucuuggccacaccaacc

SEQ ID NO: 456459 - RNA, 19 nt, Artificial Sequence
  Description of Artificial Sequence: Synthetic oligonucleotide
  Sense strand starting at position 444 of SEQ ID NO: 316998
ugguguggccaagagauau

SEQ ID NO: 456460 - RNA, 19 nt, Artificial Sequence
  Description of Artificial Sequence: Synthetic oligonucleotide
  Antisense Strand to SEQ ID NO: 456459
auaucucuuggccacacca

SEQ ID NO: 456461 - RNA, 19 nt, Artificial Sequence
  Description of Artificial Sequence: Synthetic oligonucleotide
  Sense strand starting at position 479 of SEQ ID NO: 316998
ucaucuuugccagagcuga

SEQ ID NO: 456462 - RNA, 19 nt, Artificial Sequence
  Description of Artificial Sequence: Synthetic oligonucleotide
  Antisense Strand to SEQ ID NO: 456461
ucagcucuggcaaagauga

SEQ ID NO: 456463 - RNA, 19 nt, Artificial Sequence
  Description of Artificial Sequence: Synthetic oligonucleotide
  Sense strand starting at position 610 of SEQ ID NO: 316998
aggugagauaauggugauc

SEQ ID NO: 456464 - RNA, 19 nt, Artificial Sequence
  Description of Artificial Sequence: Synthetic oligonucleotide
  Antisense Strand to SEQ ID NO: 456463
gaucaccauuaucucaccu

SEQ ID NO: 456465 - RNA, 19 nt, Artificial Sequence
  Description of Artificial Sequence: Synthetic oligonucleotide
  Sense strand starting at position 621 of SEQ ID NO: 316998
uggugaucuuucccucuau

SEQ ID NO: 456466 - RNA, 19 nt, Artificial Sequence
  Description of Artificial Sequence: Synthetic oligonucleotide
  Antisense Strand to SEQ ID NO: 456465
auagagggaaagaucacca

SEQ ID NO: 456467 - RNA, 19 nt, Artificial Sequence
  Description of Artificial Sequence: Synthetic oligonucleotide
  Sense strand starting at position 622 of SEQ ID NO: 316998
ggugaucuuucccucuauc

SEQ ID NO: 456468 - RNA, 19 nt, Artificial Sequence
  Description of Artificial Sequence: Synthetic oligonucleotide
  Antisense Strand to SEQ ID NO: 456467
gauagagggaaagaucacc

SEQ ID NO: 456469 - RNA, 19 nt, Artificial Sequence
  Description of Artificial Sequence: Synthetic oligonucleotide
  Sense strand starting at position 696 of SEQ ID NO: 316998
cuagaagaccugggauugu

SEQ ID NO: 456470 - RNA, 19 nt, Artificial Sequence
  Description of Artificial Sequence: Synthetic oligonucleotide
  Antisense Strand to SEQ ID NO: 456469
acaaucccaggucuucuag

SEQ ID NO: 456471 - RNA, 19 nt, Artificial Sequence
  Description of Artificial Sequence: Synthetic oligonucleotide
  Sense strand starting at position 865 of SEQ ID NO: 316998
uuauuaggacuuuguaagu

SEQ ID NO: 456472 - RNA, 19 nt, Artificial Sequence
  Description of Artificial Sequence: Synthetic oligonucleotide
  Antisense Strand to SEQ ID NO: 456471
acuuacaaaguccuaauaa

SEQ ID NO: 456473 - RNA, 19 nt, Artificial Sequence
  Description of Artificial Sequence: Synthetic oligonucleotide
  Sense strand starting at position 1037 of SEQ ID NO: 316998
acagaaggcuaugcacaau

SEQ ID NO: 456474 - RNA, 19 nt, Artificial Sequence
  Description of Artificial Sequence: Synthetic oligonucleotide
  Antisense Strand to SEQ ID NO: 456473
auugugcauagccuucugu

SEQ ID NO: 456475 - RNA, 19 nt, Artificial Sequence
  Description of Artificial Sequence: Synthetic oligonucleotide
  Sense strand starting at position 1247 of SEQ ID NO: 316998
uagagugggcgcuaaacaa

SEQ ID NO: 456476 - RNA, 19 nt, Artificial Sequence
  Description of Artificial Sequence: Synthetic oligonucleotide
  Antisense Strand to SEQ ID NO: 456475
uuguuuagcgcccacucua

SEQ ID NO: 456477 - RNA, 19 nt, Artificial Sequence
  Description of Artificial Sequence: Synthetic oligonucleotide
  Sense strand starting at position 1369 of SEQ ID NO: 316998
acaacauucgggugacagu

SEQ ID NO: 456478 - RNA, 19 nt, Artificial Sequence
  Description of Artificial Sequence: Synthetic oligonucleotide
  Antisense Strand to SEQ ID NO: 456477
acugucacccgaauguugu

SEQ ID NO: 456479 - RNA, 19 nt, Artificial Sequence
  Description of Artificial Sequence: Synthetic oligonucleotide
  Sense strand starting at position 1370 of SEQ ID NO: 316998
caacauucgggugacaguu

SEQ ID NO: 456480 - RNA, 19 nt, Artificial Sequence
  Description of Artificial Sequence: Synthetic oligonucleotide
  Antisense Strand to SEQ ID NO: 456479
aacugucacccgaauguug

SEQ ID NO: 456481 - RNA, 19 nt, Artificial Sequence
  Description of Artificial Sequence: Synthetic oligonucleotide
  Sense strand starting at position 1376 of SEQ ID NO: 316998
ucgggugacaguuacacua

SEQ ID NO: 456482 - RNA, 19 nt, Artificial Sequence
  Description of Artificial Sequence: Synthetic oligonucleotide
  Antisense Strand to SEQ ID NO: 456481
uaguguaacugucacccga

SEQ ID NO: 456483 - RNA, 19 nt, Artificial Sequence
  Description of Artificial Sequence: Synthetic oligonucleotide
  Sense strand starting at position 2609 of SEQ ID NO: 316998
gcaaucuuaaaggguuagu

SEQ ID NO: 456484 - RNA, 19 nt, Artificial Sequence
  Description of Artificial Sequence: Synthetic oligonucleotide
  Antisense Strand to SEQ ID NO: 456483
acuaacccuuuaagauugc

SEQ ID NO: 456485 - RNA, 19 nt, Artificial Sequence
  Description of Artificial Sequence: Synthetic oligonucleotide
  Sense strand starting at position 2771 of SEQ ID NO: 316998
ugaugcuuacacugaugua

SEQ ID NO: 456486 - RNA, 19 nt, Artificial Sequence
  Description of Artificial Sequence: Synthetic oligonucleotide
  Antisense Strand to SEQ ID NO: 456485
uacaucaguguaagcauca

SEQ ID NO: 456487 - RNA, 19 nt, Artificial Sequence
  Description of Artificial Sequence: Synthetic oligonucleotide
  Sense strand starting at position 2821 of SEQ ID NO: 316998
uacuguaugccugauacag

SEQ ID NO: 456488 - RNA, 19 nt, Artificial Sequence
  Description of Artificial Sequence: Synthetic oligonucleotide
  Antisense Strand to SEQ ID NO: 456487
cuguaucaggcauacagua

SEQ ID NO: 456489 - RNA, 19 nt, Artificial Sequence
  Description of Artificial Sequence: Synthetic oligonucleotide
  Sense strand starting at position 2842 of SEQ ID NO: 316998
gcuuuacuuguguucucuu

SEQ ID NO: 456490 - RNA, 19 nt, Artificial Sequence
  Description of Artificial Sequence: Synthetic oligonucleotide
  Antisense Strand to SEQ ID NO: 456489
aagagaacacaaguaaagc

SEQ ID NO: 456491 - RNA, 19 nt, Artificial Sequence
  Description of Artificial Sequence: Synthetic oligonucleotide
  Sense strand starting at position 2910 of SEQ ID NO: 316998
ggacccaagcucugagaca

SEQ ID NO: 456492 - RNA, 19 nt, Artificial Sequence
  Description of Artificial Sequence: Synthetic oligonucleotide
  Antisense Strand to SEQ ID NO: 456491
ugucucagagcuugggucc

SEQ ID NO: 456493 - RNA, 19 nt, Artificial Sequence
  Description of Artificial Sequence: Synthetic oligonucleotide
  Sense strand starting at position 2925 of SEQ ID NO: 316998
gacaguaacugggugaagu

SEQ ID NO: 456494 - RNA, 19 nt, Artificial Sequence
  Description of Artificial Sequence: Synthetic oligonucleotide
  Antisense Strand to SEQ ID NO: 456493
acuucacccaguuacuguc

SEQ ID NO: 456495 - RNA, 19 nt, Artificial Sequence
  Description of Artificial Sequence: Synthetic oligonucleotide
  Sense strand starting at position 2945 of SEQ ID NO: 316998
ucagaaucgggaugugaag

SEQ ID NO: 456496 - RNA, 19 nt, Artificial Sequence
  Description of Artificial Sequence: Synthetic oligonucleotide
  Antisense Strand to SEQ ID NO: 456495
cuucacaucccgauucuga

SEQ ID NO: 456497 - RNA, 19 nt, Artificial Sequence
  Description of Artificial Sequence: Synthetic oligonucleotide
  Sense strand starting at position 2952 of SEQ ID NO: 316998
cgggaugugaagugucaga

SEQ ID NO: 456498 - RNA, 19 nt, Artificial Sequence
  Description of Artificial Sequence: Synthetic oligonucleotide
  Antisense Strand to SEQ ID NO: 456497
ucugacacuucacaucccg

SEQ ID NO: 456499 - RNA, 19 nt, Artificial Sequence
  Description of Artificial Sequence: Synthetic oligonucleotide
  Sense strand starting at position 2966 of SEQ ID NO: 316998
ucagaaucgggaugugaau

SEQ ID NO: 456500 - RNA, 19 nt, Artificial Sequence
  Description of Artificial Sequence: Synthetic oligonucleotide
  Antisense Strand to SEQ ID NO: 456499
auucacaucccgauucuga

SEQ ID NO: 456501 - RNA, 19 nt, Artificial Sequence
  Description of Artificial Sequence: Synthetic oligonucleotide
  Sense strand starting at position 3067 of SEQ ID NO: 316998
ggcagcucuccaugacaca

SEQ ID NO: 456502 - RNA, 19 nt, Artificial Sequence
  Description of Artificial Sequence: Synthetic oligonucleotide
  Antisense Strand to SEQ ID NO: 456501
ugugucauggagagcugcc

SEQ ID NO: 456503 - RNA, 19 nt, Artificial Sequence
  Description of Artificial Sequence: Synthetic oligonucleotide
  Sense strand starting at position 3117 of SEQ ID NO: 316998
cucguagcauccucaauuu

SEQ ID NO: 456504 - RNA, 19 nt, Artificial Sequence
  Description of Artificial Sequence: Synthetic oligonucleotide
  Antisense Strand to SEQ ID NO: 456503
aaauugaggaugcuacgag

SEQ ID NO: 456505 - RNA, 19 nt, Artificial Sequence
  Description of Artificial Sequence: Synthetic oligonucleotide
  Sense strand starting at position 3173 of SEQ ID NO: 316998
ugugauguugcucaacauu

SEQ ID NO: 456506 - RNA, 19 nt, Artificial Sequence
  Description of Artificial Sequence: Synthetic oligonucleotide
  Antisense Strand to SEQ ID NO: 456505
aauguugagcaacaucaca

SEQ ID NO: 456507 - RNA, 19 nt, Artificial Sequence
  Description of Artificial Sequence: Synthetic oligonucleotide
  Sense strand starting at position 3227 of SEQ ID NO: 316998
agagauuaaguuugucuca

SEQ ID NO: 456508 - RNA, 19 nt, Artificial Sequence
  Description of Artificial Sequence: Synthetic oligonucleotide
  Antisense Strand to SEQ ID NO: 456507
ugagacaaacuuaaucucu

SEQ ID NO: 456509 - RNA, 19 nt, Artificial Sequence
  Description of Artificial Sequence: Synthetic oligonucleotide
  Sense strand starting at position 3228 of SEQ ID NO: 316998
gagauuaaguuugucucac

SEQ ID NO: 456510 - RNA, 19 nt, Artificial Sequence
  Description of Artificial Sequence: Synthetic oligonucleotide
  Antisense Strand to SEQ ID NO: 456509
gugagacaaacuuaaucuc

SEQ ID NO: 456511 - RNA, 19 nt, Artificial Sequence
  Description of Artificial Sequence: Synthetic oligonucleotide
  Sense strand starting at position 3229 of SEQ ID NO: 316998
agauuaaguuugucucaca

SEQ ID NO: 456512 - RNA, 19 nt, Artificial Sequence
  Description of Artificial Sequence: Synthetic oligonucleotide
  Antisense Strand to SEQ ID NO: 456511
ugugagacaaacuuaaucu

SEQ ID NO: 456513 - RNA, 19 nt, Artificial Sequence
  Description of Artificial Sequence: Synthetic oligonucleotide
  Sense strand starting at position 3307 of SEQ ID NO: 316998
aauauugguugaguaagca

SEQ ID NO: 456514 - RNA, 19 nt, Artificial Sequence
  Description of Artificial Sequence: Synthetic oligonucleotide
  Antisense Strand to SEQ ID NO: 456513
ugcuuacucaaccaauauu

SEQ ID NO: 456515 - RNA, 19 nt, Artificial Sequence
  Description of Artificial Sequence: Synthetic oligonucleotide
  Sense strand starting at position 3311 of SEQ ID NO: 316998
uugguugaguaagcaaaua

SEQ ID NO: 456516 - RNA, 19 nt, Artificial Sequence
  Description of Artificial Sequence: Synthetic oligonucleotide
  Antisense Strand to SEQ ID NO: 456515
uauuugcuuacucaaccaa

SEQ ID NO: 456517 - RNA, 19 nt, Artificial Sequence
  Description of Artificial Sequence: Synthetic oligonucleotide
  Sense strand starting at position 3669 of SEQ ID NO: 316998
ugcagugacccuuaaucac

SEQ ID NO: 456518 - RNA, 19 nt, Artificial Sequence
  Description of Artificial Sequence: Synthetic oligonucleotide
  Antisense Strand to SEQ ID NO: 456517
gugauuaagggucacugca

SEQ ID NO: 456519 - RNA, 19 nt, Artificial Sequence
  Description of Artificial Sequence: Synthetic oligonucleotide
  Sense strand starting at position 3885 of SEQ ID NO: 316998
cuaccagaagaguguaaua

SEQ ID NO: 456520 - RNA, 19 nt, Artificial Sequence
  Description of Artificial Sequence: Synthetic oligonucleotide
  Antisense Strand to SEQ ID NO: 456519
uauuacacucuucugguag

SEQ ID NO: 456521 - RNA, 19 nt, Artificial Sequence
  Description of Artificial Sequence: Synthetic oligonucleotide
  Sense strand starting at position 34 of SEQ ID NO: 316999
agaaacaauucguuugaaa

SEQ ID NO: 456522 - RNA, 19 nt, Artificial Sequence
  Description of Artificial Sequence: Synthetic oligonucleotide
  Antisense Strand to SEQ ID NO: 456521
uuucaaacgaauuguuucu

SEQ ID NO: 456523 - RNA, 19 nt, Artificial Sequence
  Description of Artificial Sequence: Synthetic oligonucleotide
  Sense strand starting at position 36 of SEQ ID NO: 316999
aaacaauucguuugaaacg

SEQ ID NO: 456524 - RNA, 19 nt, Artificial Sequence
  Description of Artificial Sequence: Synthetic oligonucleotide
  Antisense Strand to SEQ ID NO: 456523
cguuucaaacgaauuguuu

SEQ ID NO: 456525 - RNA, 19 nt, Artificial Sequence
  Description of Artificial Sequence: Synthetic oligonucleotide
  Sense strand starting at position 99 of SEQ ID NO: 316999
ucaucaaauccucgggcaa

SEQ ID NO: 456526 - RNA, 19 nt, Artificial Sequence
  Description of Artificial Sequence: Synthetic oligonucleotide
  Antisense Strand to SEQ ID NO: 456525
uugcccgaggauuugauga

SEQ ID NO: 456527 - RNA, 19 nt, Artificial Sequence
  Description of Artificial Sequence: Synthetic oligonucleotide
  Sense strand starting at position 113 of SEQ ID NO: 316999
ggcaauaauccuugaggca

SEQ ID NO: 456528 - RNA, 19 nt, Artificial Sequence
  Description of Artificial Sequence: Synthetic oligonucleotide
  Antisense Strand to SEQ ID NO: 456527
ugccucaaggauuauugcc

SEQ ID NO: 456529 - RNA, 19 nt, Artificial Sequence
  Description of Artificial Sequence: Synthetic oligonucleotide
  Sense strand starting at position 114 of SEQ ID NO: 316999
gcaauaauccuugaggcaa

SEQ ID NO: 456530 - RNA, 19 nt, Artificial Sequence
  Description of Artificial Sequence: Synthetic oligonucleotide
  Antisense Strand to SEQ ID NO: 456529
uugccucaaggauuauugc

SEQ ID NO: 456531 - RNA, 19 nt, Artificial Sequence
  Description of Artificial Sequence: Synthetic oligonucleotide
  Sense strand starting at position 169 of SEQ ID NO: 316999
gguugguguggccaagaga

SEQ ID NO: 456532 - RNA, 19 nt, Artificial Sequence
  Description of Artificial Sequence: Synthetic oligonucleotide
  Antisense Strand to SEQ ID NO: 456531
ucucuuggccacaccaacc

SEQ ID NO: 456533 - RNA, 19 nt, Artificial Sequence
  Description of Artificial Sequence: Synthetic oligonucleotide
  Sense strand starting at position 172 of SEQ ID NO: 316999
ugguguggccaagagauau

SEQ ID NO: 456534 - RNA, 19 nt, Artificial Sequence
  Description of Artificial Sequence: Synthetic oligonucleotide
  Antisense Strand to SEQ ID NO: 456533
auaucucuuggccacacca

SEQ ID NO: 456535 - RNA, 19 nt, Artificial Sequence
  Description of Artificial Sequence: Synthetic oligonucleotide
  Sense strand starting at position 207 of SEQ ID NO: 316999
ucaucuuugccagagcuga

SEQ ID NO: 456536 - RNA, 19 nt, Artificial Sequence
  Description of Artificial Sequence: Synthetic oligonucleotide
  Antisense Strand to SEQ ID NO: 456535
ucagcucuggcaaagauga

SEQ ID NO: 456537 - RNA, 19 nt, Artificial Sequence
  Description of Artificial Sequence: Synthetic oligonucleotide
  Sense strand starting at position 338 of SEQ ID NO: 316999
aggugagauaauggugauc

SEQ ID NO: 456538 - RNA, 19 nt, Artificial Sequence
  Description of Artificial Sequence: Synthetic oligonucleotide
  Antisense Strand to SEQ ID NO: 456537
gaucaccauuaucucaccu

SEQ ID NO: 456539 - RNA, 19 nt, Artificial Sequence
  Description of Artificial Sequence: Synthetic oligonucleotide
  Sense strand starting at position 349 of SEQ ID NO: 316999
uggugaucuuucccucuau

SEQ ID NO: 456540 - RNA, 19 nt, Artificial Sequence
  Description of Artificial Sequence: Synthetic oligonucleotide
  Antisense Strand to SEQ ID NO: 456539
auagagggaaagaucacca

SEQ ID NO: 456541 - RNA, 19 nt, Artificial Sequence
  Description of Artificial Sequence: Synthetic oligonucleotide
  Sense strand starting at position 350 of SEQ ID NO: 316999
ggugaucuuucccucuauc

SEQ ID NO: 456542 - RNA, 19 nt, Artificial Sequence
  Description of Artificial Sequence: Synthetic oligonucleotide
  Antisense Strand to SEQ ID NO: 456541
gauagagggaaagaucacc

SEQ ID NO: 456543 - RNA, 19 nt, Artificial Sequence
  Description of Artificial Sequence: Synthetic oligonucleotide
  Sense strand starting at position 424 of SEQ ID NO: 316999
cuagaagaccugggauugu

SEQ ID NO: 456544 - RNA, 19 nt, Artificial Sequence
  Description of Artificial Sequence: Synthetic oligonucleotide
  Antisense Strand to SEQ ID NO: 456543
acaaucccaggucuucuag

SEQ ID NO: 456545 - RNA, 19 nt, Artificial Sequence
  Description of Artificial Sequence: Synthetic oligonucleotide
  Sense strand starting at position 593 of SEQ ID NO: 316999
uuauuaggacuuuguaagu

SEQ ID NO: 456546 - RNA, 19 nt, Artificial Sequence
  Description of Artificial Sequence: Synthetic oligonucleotide
  Antisense Strand to SEQ ID NO: 456545
acuuacaaaguccuaauaa

SEQ ID NO: 456547 - RNA, 19 nt, Artificial Sequence
  Description of Artificial Sequence: Synthetic oligonucleotide
  Sense strand starting at position 765 of SEQ ID NO: 316999
acagaaggcuaugcacaau

SEQ ID NO: 456548 - RNA, 19 nt, Artificial Sequence
  Description of Artificial Sequence: Synthetic oligonucleotide
  Antisense Strand to SEQ ID NO: 456547
auugugcauagccuucugu

SEQ ID NO: 456549 - RNA, 19 nt, Artificial Sequence
  Description of Artificial Sequence: Synthetic oligonucleotide
  Sense strand starting at position 975 of SEQ ID NO: 316999
uagagugggcgcuaaacaa

SEQ ID NO: 456550 - RNA, 19 nt, Artificial Sequence
  Description of Artificial Sequence: Synthetic oligonucleotide
  Antisense Strand to SEQ ID NO: 456549
uuguuuagcgcccacucua

SEQ ID NO: 456551 - RNA, 19 nt, Artificial Sequence
  Description of Artificial Sequence: Synthetic oligonucleotide
  Sense strand starting at position 1097 of SEQ ID NO: 316999
acaacauucgggugacagu

SEQ ID NO: 456552 - RNA, 19 nt, Artificial Sequence
  Description of Artificial Sequence: Synthetic oligonucleotide
  Antisense Strand to SEQ ID NO: 456551
acugucacccgaauguugu

SEQ ID NO: 456553 - RNA, 19 nt, Artificial Sequence
  Description of Artificial Sequence: Synthetic oligonucleotide
  Sense strand starting at position 1098 of SEQ ID NO: 316999
caacauucgggugacaguu

SEQ ID NO: 456554 - RNA, 19 nt, Artificial Sequence
  Description of Artificial Sequence: Synthetic oligonucleotide
  Antisense Strand to SEQ ID NO: 456553
aacugucacccgaauguug

SEQ ID NO: 456555 - RNA, 19 nt, Artificial Sequence
  Description of Artificial Sequence: Synthetic oligonucleotide
  Sense strand starting at position 1104 of SEQ ID NO: 316999
ucgggugacaguuacacua

SEQ ID NO: 456556 - RNA, 19 nt, Artificial Sequence
  Description of Artificial Sequence: Synthetic oligonucleotide
  Antisense Strand to SEQ ID NO: 456555
uaguguaacugucacccga

SEQ ID NO: 456557 - RNA, 19 nt, Artificial Sequence
  Description of Artificial Sequence: Synthetic oligonucleotide
  Sense strand starting at position 2337 of SEQ ID NO: 316999
gcaaucuuaaaggguuagu

SEQ ID NO: 456558 - RNA, 19 nt, Artificial Sequence
  Description of Artificial Sequence: Synthetic oligonucleotide
  Antisense Strand to SEQ ID NO: 456557
acuaacccuuuaagauugc

SEQ ID NO: 456559 - RNA, 19 nt, Artificial Sequence
  Description of Artificial Sequence: Synthetic oligonucleotide
  Sense strand starting at position 2499 of SEQ ID NO: 316999
ugaugcuuacacugaugua

SEQ ID NO: 456560 - RNA, 19 nt, Artificial Sequence
  Description of Artificial Sequence: Synthetic oligonucleotide
  Antisense Strand to SEQ ID NO: 456559
uacaucaguguaagcauca

SEQ ID NO: 456561 - RNA, 19 nt, Artificial Sequence
  Description of Artificial Sequence: Synthetic oligonucleotide
  Sense strand starting at position 2549 of SEQ ID NO: 316999
uacuguaugccugauacag

SEQ ID NO: 456562 - RNA, 19 nt, Artificial Sequence
  Description of Artificial Sequence: Synthetic oligonucleotide
  Antisense Strand to SEQ ID NO: 456561
cuguaucaggcauacagua

SEQ ID NO: 456563 - RNA, 19 nt, Artificial Sequence
  Description of Artificial Sequence: Synthetic oligonucleotide
  Sense strand starting at position 2570 of SEQ ID NO: 316999
gcuuuacuuguguucucuu

SEQ ID NO: 456564 - RNA, 19 nt, Artificial Sequence
  Description of Artificial Sequence: Synthetic oligonucleotide
  Antisense Strand to SEQ ID NO: 456563
aagagaacacaaguaaagc

SEQ ID NO: 456565 - RNA, 19 nt, Artificial Sequence
  Description of Artificial Sequence: Synthetic oligonucleotide
  Sense strand starting at position 2638 of SEQ ID NO: 316999
ggacccaagcucugagaca

SEQ ID NO: 456566 - RNA, 19 nt, Artificial Sequence
  Description of Artificial Sequence: Synthetic oligonucleotide
  Antisense Strand to SEQ ID NO: 456565
ugucucagagcuugggucc

SEQ ID NO: 456567 - RNA, 19 nt, Artificial Sequence
  Description of Artificial Sequence: Synthetic oligonucleotide
  Sense strand starting at position 2653 of SEQ ID NO: 316999
gacaguaacugggugaagu

SEQ ID NO: 456568 - RNA, 19 nt, Artificial Sequence
  Description of Artificial Sequence: Synthetic oligonucleotide
  Antisense Strand to SEQ ID NO: 456567
acuucacccaguuacuguc

SEQ ID NO: 456569 - RNA, 19 nt, Artificial Sequence
  Description of Artificial Sequence: Synthetic oligonucleotide
  Sense strand starting at position 2673 of SEQ ID NO: 316999
ucagaaucgggaugugaag

SEQ ID NO: 456570 - RNA, 19 nt, Artificial Sequence
  Description of Artificial Sequence: Synthetic oligonucleotide
  Antisense Strand to SEQ ID NO: 456569
cuucacaucccgauucuga

SEQ ID NO: 456571 - RNA, 19 nt, Artificial Sequence
  Description of Artificial Sequence: Synthetic oligonucleotide
  Sense strand starting at position 2680 of SEQ ID NO: 316999
cgggaugugaagugucaga

SEQ ID NO: 456572 - RNA, 19 nt, Artificial Sequence
  Description of Artificial Sequence: Synthetic oligonucleotide
  Antisense Strand to SEQ ID NO: 456571
ucugacacuucacaucccg

SEQ ID NO: 456573 - RNA, 19 nt, Artificial Sequence
  Description of Artificial Sequence: Synthetic oligonucleotide
  Sense strand starting at position 2694 of SEQ ID NO: 316999
ucagaaucgggaugugaau

SEQ ID NO: 456574 - RNA, 19 nt, Artificial Sequence
  Description of Artificial Sequence: Synthetic oligonucleotide
  Antisense Strand to SEQ ID NO: 456573
auucacaucccgauucuga

SEQ ID NO: 456575 - RNA, 19 nt, Artificial Sequence
  Description of Artificial Sequence: Synthetic oligonucleotide
  Sense strand starting at position 2795 of SEQ ID NO: 316999
ggcagcucuccaugacaca

SEQ ID NO: 456576 - RNA, 19 nt, Artificial Sequence
  Description of Artificial Sequence: Synthetic oligonucleotide
  Antisense Strand to SEQ ID NO: 456575
ugugucauggagagcugcc

SEQ ID NO: 456577 - RNA, 19 nt, Artificial Sequence
  Description of Artificial Sequence: Synthetic oligonucleotide
  Sense strand starting at position 2845 of SEQ ID NO: 316999
cucguagcauccucaauuu

SEQ ID NO: 456578 - RNA, 19 nt, Artificial Sequence
  Description of Artificial Sequence: Synthetic oligonucleotide
  Antisense Strand to SEQ ID NO: 456577
aaauugaggaugcuacgag

SEQ ID NO: 456579 - RNA, 19 nt, Artificial Sequence
  Description of Artificial Sequence: Synthetic oligonucleotide
  Sense strand starting at position 2901 of SEQ ID NO: 316999
ugugauguugcucaacauu

SEQ ID NO: 456580 - RNA, 19 nt, Artificial Sequence
  Description of Artificial Sequence: Synthetic oligonucleotide
  Antisense Strand to SEQ ID NO: 456579
aauguugagcaacaucaca

SEQ ID NO: 456581 - RNA, 19 nt, Artificial Sequence
  Description of Artificial Sequence: Synthetic oligonucleotide
  Sense strand starting at position 2955 of SEQ ID NO: 316999
agagauuaaguuugucuca

SEQ ID NO: 456582 - RNA, 19 nt, Artificial Sequence
  Description of Artificial Sequence: Synthetic oligonucleotide
  Antisense Strand to SEQ ID NO: 456581
ugagacaaacuuaaucucu

SEQ ID NO: 456583 - RNA, 19 nt, Artificial Sequence
  Description of Artificial Sequence: Synthetic oligonucleotide
  Sense strand starting at position 2956 of SEQ ID NO: 316999
gagauuaaguuugucucac

SEQ ID NO: 456584 - RNA, 19 nt, Artificial Sequence
  Description of Artificial Sequence: Synthetic oligonucleotide
  Antisense Strand to SEQ ID NO: 456583
gugagacaaacuuaaucuc

SEQ ID NO: 456585 - RNA, 19 nt, Artificial Sequence
  Description of Artificial Sequence: Synthetic oligonucleotide
  Sense strand starting at position 2957 of SEQ ID NO: 316999
agauuaaguuugucucaca

SEQ ID NO: 456586 - RNA, 19 nt, Artificial Sequence
  Description of Artificial Sequence: Synthetic oligonucleotide
  Antisense Strand to SEQ ID NO: 456585
ugugagacaaacuuaaucu

SEQ ID NO: 456587 - RNA, 19 nt, Artificial Sequence
  Description of Artificial Sequence: Synthetic oligonucleotide
  Sense strand starting at position 3035 of SEQ ID NO: 316999
aauauugguugaguaagca

SEQ ID NO: 456588 - RNA, 19 nt, Artificial Sequence
  Description of Artificial Sequence: Synthetic oligonucleotide
  Antisense Strand to SEQ ID NO: 456587
ugcuuacucaaccaauauu

SEQ ID NO: 456589 - RNA, 19 nt, Artificial Sequence
  Description of Artificial Sequence: Synthetic oligonucleotide
  Sense strand starting at position 3039 of SEQ ID NO: 316999
uugguugaguaagcaaaua

SEQ ID NO: 456590 - RNA, 19 nt, Artificial Sequence
  Description of Artificial Sequence: Synthetic oligonucleotide
  Antisense Strand to SEQ ID NO: 456589
uauuugcuuacucaaccaa

SEQ ID NO: 456591 - RNA, 19 nt, Artificial Sequence
  Description of Artificial Sequence: Synthetic oligonucleotide
  Sense strand starting at position 3397 of SEQ ID NO: 316999
ugcagugacccuuaaucac

SEQ ID NO: 456592 - RNA, 19 nt, Artificial Sequence
  Description of Artificial Sequence: Synthetic oligonucleotide
  Antisense Strand to SEQ ID NO: 456591
gugauuaagggucacugca

SEQ ID NO: 456593 - RNA, 19 nt, Artificial Sequence
  Description of Artificial Sequence: Synthetic oligonucleotide
  Sense strand starting at position 3613 of SEQ ID NO: 316999
cuaccagaagaguguaaua

SEQ ID NO: 456594 - RNA, 19 nt, Artificial Sequence
  Description of Artificial Sequence: Synthetic oligonucleotide
  Antisense Strand to SEQ ID NO: 456593
uauuacacucuucugguag

SEQ ID NO: 456595 - RNA, 19 nt, Artificial Sequence
  Description of Artificial Sequence: Synthetic oligonucleotide
  Sense strand starting at position 3673 of SEQ ID NO: 316999
uuccacauuugucaugaca

SEQ ID NO: 456596 - RNA, 19 nt, Artificial Sequence
  Description of Artificial Sequence: Synthetic oligonucleotide
  Antisense Strand to SEQ ID NO: 456595
ugucaugacaaauguggaa

SEQ ID NO: 456597 - RNA, 19 nt, Artificial Sequence
  Description of Artificial Sequence: Synthetic oligonucleotide
  Sense strand starting at position 3724 of SEQ ID NO: 316999
ccuguugugagucaacagu

SEQ ID NO: 456598 - RNA, 19 nt, Artificial Sequence
  Description of Artificial Sequence: Synthetic oligonucleotide
  Antisense Strand to SEQ ID NO: 456597
acuguugacucacaacagg

SEQ ID NO: 456599 - RNA, 19 nt, Artificial Sequence
  Description of Artificial Sequence: Synthetic oligonucleotide
  Sense strand starting at position 3962 of SEQ ID NO: 316999
cugucaggauggucucaau

SEQ ID NO: 456600 - RNA, 19 nt, Artificial Sequence
  Description of Artificial Sequence: Synthetic oligonucleotide
  Antisense Strand to SEQ ID NO: 456599
auugagaccauccugacag

SEQ ID NO: 456601 - RNA, 19 nt, Artificial Sequence
  Description of Artificial Sequence: Synthetic oligonucleotide
  Sense strand starting at position 281 of SEQ ID NO: 317000
auuguagugccagaaggaa

SEQ ID NO: 456602 - RNA, 19 nt, Artificial Sequence
  Description of Artificial Sequence: Synthetic oligonucleotide
  Antisense Strand to SEQ ID NO: 456601
uuccuucuggcacuacaau

SEQ ID NO: 456603 - RNA, 19 nt, Artificial Sequence
  Description of Artificial Sequence: Synthetic oligonucleotide
  Sense strand starting at position 304 of SEQ ID NO: 317000
agagguuaacuaugaucca

SEQ ID NO: 456604 - RNA, 19 nt, Artificial Sequence
  Description of Artificial Sequence: Synthetic oligonucleotide
  Antisense Strand to SEQ ID NO: 456603
uggaucauaguuaaccucu

SEQ ID NO: 456605 - RNA, 19 nt, Artificial Sequence
  Description of Artificial Sequence: Synthetic oligonucleotide
  Sense strand starting at position 307 of SEQ ID NO: 317000
gguuaacuaugauccaaag

SEQ ID NO: 456606 - RNA, 19 nt, Artificial Sequence
  Description of Artificial Sequence: Synthetic oligonucleotide
  Antisense Strand to SEQ ID NO: 456605
cuuuggaucauaguuaacc

SEQ ID NO: 456607 - RNA, 19 nt, Artificial Sequence
  Description of Artificial Sequence: Synthetic oligonucleotide
  Sense strand starting at position 374 of SEQ ID NO: 317000
agaaacaauucguuugaaa

SEQ ID NO: 456608 - RNA, 19 nt, Artificial Sequence
  Description of Artificial Sequence: Synthetic oligonucleotide
  Antisense Strand to SEQ ID NO: 456607
uuucaaacgaauuguuucu

SEQ ID NO: 456609 - RNA, 19 nt, Artificial Sequence
  Description of Artificial Sequence: Synthetic oligonucleotide
  Sense strand starting at position 376 of SEQ ID NO: 317000
aaacaauucguuugaaacg

SEQ ID NO: 456610 - RNA, 19 nt, Artificial Sequence
  Description of Artificial Sequence: Synthetic oligonucleotide
  Antisense Strand to SEQ ID NO: 456609
cguuucaaacgaauuguuu

SEQ ID NO: 456611 - RNA, 19 nt, Artificial Sequence
  Description of Artificial Sequence: Synthetic oligonucleotide
  Sense strand starting at position 439 of SEQ ID NO: 317000
ucaucaaauccucgggcaa

SEQ ID NO: 456612 - RNA, 19 nt, Artificial Sequence
  Description of Artificial Sequence: Synthetic oligonucleotide
  Antisense Strand to SEQ ID NO: 456611
uugcccgaggauuugauga

SEQ ID NO: 456613 - RNA, 19 nt, Artificial Sequence
  Description of Artificial Sequence: Synthetic oligonucleotide
  Sense strand starting at position 453 of SEQ ID NO: 317000
ggcaauaauccuugaggca

SEQ ID NO: 456614 - RNA, 19 nt, Artificial Sequence
  Description of Artificial Sequence: Synthetic oligonucleotide
  Antisense Strand to SEQ ID NO: 456613
ugccucaaggauuauugcc

SEQ ID NO: 456615 - RNA, 19 nt, Artificial Sequence
  Description of Artificial Sequence: Synthetic oligonucleotide
  Sense strand starting at position 454 of SEQ ID NO: 317000
gcaauaauccuugaggcaa

SEQ ID NO: 456616 - RNA, 19 nt, Artificial Sequence
  Description of Artificial Sequence: Synthetic oligonucleotide
  Antisense Strand to SEQ ID NO: 456615
uugccucaaggauuauugc

SEQ ID NO: 456617 - RNA, 19 nt, Artificial Sequence
  Description of Artificial Sequence: Synthetic oligonucleotide
  Sense strand starting at position 509 of SEQ ID NO: 317000
gguugguguggccaagaga

SEQ ID NO: 456618 - RNA, 19 nt, Artificial Sequence
  Description of Artificial Sequence: Synthetic oligonucleotide
  Antisense Strand to SEQ ID NO: 456617
ucucuuggccacaccaacc

SEQ ID NO: 456619 - RNA, 19 nt, Artificial Sequence
  Description of Artificial Sequence: Synthetic oligonucleotide
  Sense strand starting at position 512 of SEQ ID NO: 317000
ugguguggccaagagauau

SEQ ID NO: 456620 - RNA, 19 nt, Artificial Sequence
  Description of Artificial Sequence: Synthetic oligonucleotide
  Antisense Strand to SEQ ID NO: 456619
auaucucuuggccacacca

SEQ ID NO: 456621 - RNA, 19 nt, Artificial Sequence
  Description of Artificial Sequence: Synthetic oligonucleotide
  Sense strand starting at position 547 of SEQ ID NO: 317000
ucaucuuugccagagcuga

SEQ ID NO: 456622 - RNA, 19 nt, Artificial Sequence
  Description of Artificial Sequence: Synthetic oligonucleotide
  Antisense Strand to SEQ ID NO: 456621
ucagcucuggcaaagauga

SEQ ID NO: 456623 - RNA, 19 nt, Artificial Sequence
  Description of Artificial Sequence: Synthetic oligonucleotide
  Sense strand starting at position 678 of SEQ ID NO: 317000
aggugagauaauggugauc

SEQ ID NO: 456624 - RNA, 19 nt, Artificial Sequence
  Description of Artificial Sequence: Synthetic oligonucleotide
  Antisense Strand to SEQ ID NO: 456623
gaucaccauuaucucaccu

SEQ ID NO: 456625 - RNA, 19 nt, Artificial Sequence
  Description of Artificial Sequence: Synthetic oligonucleotide
  Sense strand starting at position 689 of SEQ ID NO: 317000
uggugaucuuucccucuau

SEQ ID NO: 456626 - RNA, 19 nt, Artificial Sequence
  Description of Artificial Sequence: Synthetic oligonucleotide
  Antisense Strand to SEQ ID NO: 456625
auagagggaaagaucacca

SEQ ID NO: 456627 - RNA, 19 nt, Artificial Sequence
  Description of Artificial Sequence: Synthetic oligonucleotide
  Sense strand starting at position 690 of SEQ ID NO: 317000
ggugaucuuucccucuauc

SEQ ID NO: 456628 - RNA, 19 nt, Artificial Sequence
  Description of Artificial Sequence: Synthetic oligonucleotide
  Antisense Strand to SEQ ID NO: 456627
gauagagggaaagaucacc

SEQ ID NO: 456629 - RNA, 19 nt, Artificial Sequence
  Description of Artificial Sequence: Synthetic oligonucleotide
  Sense strand starting at position 764 of SEQ ID NO: 317000
cuagaagaccugggauugu

SEQ ID NO: 456630 - RNA, 19 nt, Artificial Sequence
  Description of Artificial Sequence: Synthetic oligonucleotide
  Antisense Strand to SEQ ID NO: 456629
acaaucccaggucuucuag

SEQ ID NO: 456631 - RNA, 19 nt, Artificial Sequence
  Description of Artificial Sequence: Synthetic oligonucleotide
  Sense strand starting at position 933 of SEQ ID NO: 317000
uuauuaggacuuuguaagu

SEQ ID NO: 456632 - RNA, 19 nt, Artificial Sequence
  Description of Artificial Sequence: Synthetic oligonucleotide
  Antisense Strand to SEQ ID NO: 456631
acuuacaaaguccuaauaa

SEQ ID NO: 456633 - RNA, 19 nt, Artificial Sequence
  Description of Artificial Sequence: Synthetic oligonucleotide
  Sense strand starting at position 1105 of SEQ ID NO: 317000
acagaaggcuaugcacaau

SEQ ID NO: 456634 - RNA, 19 nt, Artificial Sequence
  Description of Artificial Sequence: Synthetic oligonucleotide
  Antisense Strand to SEQ ID NO: 456633
auugugcauagccuucugu

SEQ ID NO: 456635 - RNA, 19 nt, Artificial Sequence
  Description of Artificial Sequence: Synthetic oligonucleotide
  Sense strand starting at position 1315 of SEQ ID NO: 317000
uagagugggcgcuaaacaa

SEQ ID NO: 456636 - RNA, 19 nt, Artificial Sequence
  Description of Artificial Sequence: Synthetic oligonucleotide
  Antisense Strand to SEQ ID NO: 456635
uuguuuagcgcccacucua

SEQ ID NO: 456637 - RNA, 19 nt, Artificial Sequence
  Description of Artificial Sequence: Synthetic oligonucleotide
  Sense strand starting at position 1437 of SEQ ID NO: 317000
acaacauucgggugacagu

SEQ ID NO: 456638 - RNA, 19 nt, Artificial Sequence
  Description of Artificial Sequence: Synthetic oligonucleotide
  Antisense Strand to SEQ ID NO: 456637
acugucacccgaauguugu

SEQ ID NO: 456639 - RNA, 19 nt, Artificial Sequence
  Description of Artificial Sequence: Synthetic oligonucleotide
  Sense strand starting at position 1438 of SEQ ID NO: 317000
caacauucgggugacaguu

SEQ ID NO: 456640 - RNA, 19 nt, Artificial Sequence
  Description of Artificial Sequence: Synthetic oligonucleotide
  Antisense Strand to SEQ ID NO: 456639
aacugucacccgaauguug

SEQ ID NO: 456641 - RNA, 19 nt, Artificial Sequence
  Description of Artificial Sequence: Synthetic oligonucleotide
  Sense strand starting at position 1444 of SEQ ID NO: 317000
ucgggugacaguuacacua

SEQ ID NO: 456642 - RNA, 19 nt, Artificial Sequence
  Description of Artificial Sequence: Synthetic oligonucleotide
  Antisense Strand to SEQ ID NO: 456641
uaguguaacugucacccga

SEQ ID NO: 456643 - RNA, 19 nt, Artificial Sequence
  Description of Artificial Sequence: Synthetic oligonucleotide
  Sense strand starting at position 2677 of SEQ ID NO: 317000
gcaaucuuaaaggguuagu

SEQ ID NO: 456644 - RNA, 19 nt, Artificial Sequence
  Description of Artificial Sequence: Synthetic oligonucleotide
  Antisense Strand to SEQ ID NO: 456643
acuaacccuuuaagauugc

SEQ ID NO: 456645 - RNA, 19 nt, Artificial Sequence
  Description of Artificial Sequence: Synthetic oligonucleotide
  Sense strand starting at position 2839 of SEQ ID NO: 317000
ugaugcuuacacugaugua

SEQ ID NO: 456646 - RNA, 19 nt, Artificial Sequence
  Description of Artificial Sequence: Synthetic oligonucleotide
  Antisense Strand to SEQ ID NO: 456645
uacaucaguguaagcauca

SEQ ID NO: 456647 - RNA, 19 nt, Artificial Sequence
  Description of Artificial Sequence: Synthetic oligonucleotide
  Sense strand starting at position 2889 of SEQ ID NO: 317000
uacuguaugccugauacag

SEQ ID NO: 456648 - RNA, 19 nt, Artificial Sequence
  Description of Artificial Sequence: Synthetic oligonucleotide
  Antisense Strand to SEQ ID NO: 456647
cuguaucaggcauacagua

SEQ ID NO: 456649 - RNA, 19 nt, Artificial Sequence
  Description of Artificial Sequence: Synthetic oligonucleotide
  Sense strand starting at position 2910 of SEQ ID NO: 317000
gcuuuacuuguguucucuu

SEQ ID NO: 456650 - RNA, 19 nt, Artificial Sequence
  Description of Artificial Sequence: Synthetic oligonucleotide
  Antisense Strand to SEQ ID NO: 456649
aagagaacacaaguaaagc

SEQ ID NO: 456651 - RNA, 19 nt, Artificial Sequence
  Description of Artificial Sequence: Synthetic oligonucleotide
  Sense strand starting at position 2978 of SEQ ID NO: 317000
ggacccaagcucugagaca

SEQ ID NO: 456652 - RNA, 19 nt, Artificial Sequence
  Description of Artificial Sequence: Synthetic oligonucleotide
  Antisense Strand to SEQ ID NO: 456651
ugucucagagcuugggucc

SEQ ID NO: 456653 - RNA, 19 nt, Artificial Sequence
  Description of Artificial Sequence: Synthetic oligonucleotide
  Sense strand starting at position 2993 of SEQ ID NO: 317000
gacaguaacugggugaagu

SEQ ID NO: 456654 - RNA, 19 nt, Artificial Sequence
  Description of Artificial Sequence: Synthetic oligonucleotide
  Antisense Strand to SEQ ID NO: 456653
acuucacccaguuacuguc

SEQ ID NO: 456655 - RNA, 19 nt, Artificial Sequence
  Description of Artificial Sequence: Synthetic oligonucleotide
  Sense strand starting at position 3013 of SEQ ID NO: 317000
ucagaaucgggaugugaag

SEQ ID NO: 456656 - RNA, 19 nt, Artificial Sequence
  Description of Artificial Sequence: Synthetic oligonucleotide
  Antisense Strand to SEQ ID NO: 456655
cuucacaucccgauucuga

SEQ ID NO: 456657 - RNA, 19 nt, Artificial Sequence
  Description of Artificial Sequence: Synthetic oligonucleotide
  Sense strand starting at position 3020 of SEQ ID NO: 317000
cgggaugugaagugucaga

SEQ ID NO: 456658 - RNA, 19 nt, Artificial Sequence
  Description of Artificial Sequence: Synthetic oligonucleotide
  Antisense Strand to SEQ ID NO: 456657
ucugacacuucacaucccg

SEQ ID NO: 456659 - RNA, 19 nt, Artificial Sequence
  Description of Artificial Sequence: Synthetic oligonucleotide
  Sense strand starting at position 3034 of SEQ ID NO: 317000
ucagaaucgggaugugaau

SEQ ID NO: 456660 - RNA, 19 nt, Artificial Sequence
  Description of Artificial Sequence: Synthetic oligonucleotide
  Antisense Strand to SEQ ID NO: 456659
auucacaucccgauucuga

SEQ ID NO: 456661 - RNA, 19 nt, Artificial Sequence
  Description of Artificial Sequence: Synthetic oligonucleotide
  Sense strand starting at position 3135 of SEQ ID NO: 317000
ggcagcucuccaugacaca

SEQ ID NO: 456662 - RNA, 19 nt, Artificial Sequence
  Description of Artificial Sequence: Synthetic oligonucleotide
  Antisense Strand to SEQ ID NO: 456661
ugugucauggagagcugcc

SEQ ID NO: 456663 - RNA, 19 nt, Artificial Sequence
  Description of Artificial Sequence: Synthetic oligonucleotide
  Sense strand starting at position 3185 of SEQ ID NO: 317000
cucguagcauccucaauuu

SEQ ID NO: 456664 - RNA, 19 nt, Artificial Sequence
  Description of Artificial Sequence: Synthetic oligonucleotide
  Antisense Strand to SEQ ID NO: 456663
aaauugaggaugcuacgag

SEQ ID NO: 456665 - RNA, 19 nt, Artificial Sequence
  Description of Artificial Sequence: Synthetic oligonucleotide
  Sense strand starting at position 3241 of SEQ ID NO: 317000
ugugauguugcucaacauu

SEQ ID NO: 456666 - RNA, 19 nt, Artificial Sequence
  Description of Artificial Sequence: Synthetic oligonucleotide
  Antisense Strand to SEQ ID NO: 456665
aauguugagcaacaucaca

SEQ ID NO: 456667 - RNA, 19 nt, Artificial Sequence
  Description of Artificial Sequence: Synthetic oligonucleotide
  Sense strand starting at position 3295 of SEQ ID NO: 317000
agagauuaaguuugucuca

SEQ ID NO: 456668 - RNA, 19 nt, Artificial Sequence
  Description of Artificial Sequence: Synthetic oligonucleotide
  Antisense Strand to SEQ ID NO: 456667
ugagacaaacuuaaucucu

SEQ ID NO: 456669 - RNA, 19 nt, Artificial Sequence
  Description of Artificial Sequence: Synthetic oligonucleotide
  Sense strand starting at position 3296 of SEQ ID NO: 317000
gagauuaaguuugucucac

SEQ ID NO: 456670 - RNA, 19 nt, Artificial Sequence
  Description of Artificial Sequence: Synthetic oligonucleotide
  Antisense Strand to SEQ ID NO: 456669
gugagacaaacuuaaucuc

SEQ ID NO: 456671 - RNA, 19 nt, Artificial Sequence
  Description of Artificial Sequence: Synthetic oligonucleotide
  Sense strand starting at position 3297 of SEQ ID NO: 317000
agauuaaguuugucucaca

SEQ ID NO: 456672 - RNA, 19 nt, Artificial Sequence
  Description of Artificial Sequence: Synthetic oligonucleotide
  Antisense Strand to SEQ ID NO: 456671
ugugagacaaacuuaaucu

SEQ ID NO: 456673 - RNA, 19 nt, Artificial Sequence
  Description of Artificial Sequence: Synthetic oligonucleotide
  Sense strand starting at position 3375 of SEQ ID NO: 317000
aauauugguugaguaagca

SEQ ID NO: 456674 - RNA, 19 nt, Artificial Sequence
  Description of Artificial Sequence: Synthetic oligonucleotide
  Antisense Strand to SEQ ID NO: 456673
ugcuuacucaaccaauauu

SEQ ID NO: 456675 - RNA, 19 nt, Artificial Sequence
  Description of Artificial Sequence: Synthetic oligonucleotide
  Sense strand starting at position 3379 of SEQ ID NO: 317000
uugguugaguaagcaaaua

SEQ ID NO: 456676 - RNA, 19 nt, Artificial Sequence
  Description of Artificial Sequence: Synthetic oligonucleotide
  Antisense Strand to SEQ ID NO: 456675
uauuugcuuacucaaccaa

SEQ ID NO: 456677 - RNA, 19 nt, Artificial Sequence
  Description of Artificial Sequence: Synthetic oligonucleotide
  Sense strand starting at position 3737 of SEQ ID NO: 317000
ugcagugacccuuaaucac

SEQ ID NO: 456678 - RNA, 19 nt, Artificial Sequence
  Description of Artificial Sequence: Synthetic oligonucleotide
  Antisense Strand to SEQ ID NO: 456677
gugauuaagggucacugca

SEQ ID NO: 456679 - RNA, 19 nt, Artificial Sequence
  Description of Artificial Sequence: Synthetic oligonucleotide
  Sense strand starting at position 3953 of SEQ ID NO: 317000
cuaccagaagaguguaaua

SEQ ID NO: 456680 - RNA, 19 nt, Artificial Sequence
  Description of Artificial Sequence: Synthetic oligonucleotide
  Antisense Strand to SEQ ID NO: 456679
uauuacacucuucugguag

SEQ ID NO: 456681 - RNA, 19 nt, Artificial Sequence
  Description of Artificial Sequence: Synthetic oligonucleotide
  Sense strand starting at position 45 of SEQ ID NO: 317001
guagguaaggcuuauucua

SEQ ID NO: 456682 - RNA, 19 nt, Artificial Sequence
  Description of Artificial Sequence: Synthetic oligonucleotide
  Antisense Strand to SEQ ID NO: 456681
uagaauaagccuuaccuac

SEQ ID NO: 456683 - RNA, 19 nt, Artificial Sequence
  Description of Artificial Sequence: Synthetic oligonucleotide
  Sense strand starting at position 47 of SEQ ID NO: 317001
agguaaggcuuauucuaau

SEQ ID NO: 456684 - RNA, 19 nt, Artificial Sequence
  Description of Artificial Sequence: Synthetic oligonucleotide
  Antisense Strand to SEQ ID NO: 456683
auuagaauaagccuuaccu

SEQ ID NO: 456685 - RNA, 19 nt, Artificial Sequence
  Description of Artificial Sequence: Synthetic oligonucleotide
  Sense strand starting at position 170 of SEQ ID NO: 317001
gguuauuucucccuccuuu

SEQ ID NO: 456686 - RNA, 19 nt, Artificial Sequence
  Description of Artificial Sequence: Synthetic oligonucleotide
  Antisense Strand to SEQ ID NO: 456685
aaaggagggagaaauaacc

SEQ ID NO: 456687 - RNA, 19 nt, Artificial Sequence
  Description of Artificial Sequence: Synthetic oligonucleotide
  Sense strand starting at position 222 of SEQ ID NO: 317001
gaauuaacccuugggugga

SEQ ID NO: 456688 - RNA, 19 nt, Artificial Sequence
  Description of Artificial Sequence: Synthetic oligonucleotide
  Antisense Strand to SEQ ID NO: 456687
uccacccaaggguuaauuc

SEQ ID NO: 456689 - RNA, 19 nt, Artificial Sequence
  Description of Artificial Sequence: Synthetic oligonucleotide
  Sense strand starting at position 565 of SEQ ID NO: 317001
gcgcaaagacaguggauuu

SEQ ID NO: 456690 - RNA, 19 nt, Artificial Sequence
  Description of Artificial Sequence: Synthetic oligonucleotide
  Antisense Strand to SEQ ID NO: 456689
aaauccacugucuuugcgc

SEQ ID NO: 456691 - RNA, 19 nt, Artificial Sequence
  Description of Artificial Sequence: Synthetic oligonucleotide
  Sense strand starting at position 645 of SEQ ID NO: 317001
ucaugauaacauuguggga

SEQ ID NO: 456692 - RNA, 19 nt, Artificial Sequence
  Description of Artificial Sequence: Synthetic oligonucleotide
  Antisense Strand to SEQ ID NO: 456691
ucccacaauguuaucauga

SEQ ID NO: 456693 - RNA, 19 nt, Artificial Sequence
  Description of Artificial Sequence: Synthetic oligonucleotide
  Sense strand starting at position 814 of SEQ ID NO: 317001
accuauagcgccuauaacu

SEQ ID NO: 456694 - RNA, 19 nt, Artificial Sequence
  Description of Artificial Sequence: Synthetic oligonucleotide
  Antisense Strand to SEQ ID NO: 456693
aguuauaggcgcuauaggu

SEQ ID NO: 456695 - RNA, 19 nt, Artificial Sequence
  Description of Artificial Sequence: Synthetic oligonucleotide
  Sense strand starting at position 821 of SEQ ID NO: 317001
gcgccuauaacugcagagu

SEQ ID NO: 456696 - RNA, 19 nt, Artificial Sequence
  Description of Artificial Sequence: Synthetic oligonucleotide
  Antisense Strand to SEQ ID NO: 456695
acucugcaguuauaggcgc

SEQ ID NO: 456697 - RNA, 19 nt, Artificial Sequence
  Description of Artificial Sequence: Synthetic oligonucleotide
  Sense strand starting at position 822 of SEQ ID NO: 317001
cgccuauaacugcagaguu

SEQ ID NO: 456698 - RNA, 19 nt, Artificial Sequence
  Description of Artificial Sequence: Synthetic oligonucleotide
  Antisense Strand to SEQ ID NO: 456697
aacucugcaguuauaggcg

SEQ ID NO: 456699 - RNA, 19 nt, Artificial Sequence
  Description of Artificial Sequence: Synthetic oligonucleotide
  Sense strand starting at position 824 of SEQ ID NO: 317001
ccuauaacugcagaguuau

SEQ ID NO: 456700 - RNA, 19 nt, Artificial Sequence
  Description of Artificial Sequence: Synthetic oligonucleotide
  Antisense Strand to SEQ ID NO: 456699
auaacucugcaguuauagg

SEQ ID NO: 456701 - RNA, 19 nt, Artificial Sequence
  Description of Artificial Sequence: Synthetic oligonucleotide
  Sense strand starting at position 1205 of SEQ ID NO: 317001
uguaauuggcauuagggau

SEQ ID NO: 456702 - RNA, 19 nt, Artificial Sequence
  Description of Artificial Sequence: Synthetic oligonucleotide
  Antisense Strand to SEQ ID NO: 456701
aucccuaaugccaauuaca

SEQ ID NO: 456703 - RNA, 19 nt, Artificial Sequence
  Description of Artificial Sequence: Synthetic oligonucleotide
  Sense strand starting at position 1220 of SEQ ID NO: 317001
ggaugagagguuuauuguc

SEQ ID NO: 456704 - RNA, 19 nt, Artificial Sequence
  Description of Artificial Sequence: Synthetic oligonucleotide
  Antisense Strand to SEQ ID NO: 456703
gacaauaaaccucucaucc

SEQ ID NO: 456705 - RNA, 19 nt, Artificial Sequence
  Description of Artificial Sequence: Synthetic oligonucleotide
  Sense strand starting at position 1523 of SEQ ID NO: 317001
gucagaaaucugggucccu

SEQ ID NO: 456706 - RNA, 19 nt, Artificial Sequence
  Description of Artificial Sequence: Synthetic oligonucleotide
  Antisense Strand to SEQ ID NO: 456705
agggacccagauuucugac

SEQ ID NO: 456707 - RNA, 19 nt, Artificial Sequence
  Description of Artificial Sequence: Synthetic oligonucleotide
  Sense strand starting at position 1534 of SEQ ID NO: 317001
gggucccuguccuuacaga

SEQ ID NO: 456708 - RNA, 19 nt, Artificial Sequence
  Description of Artificial Sequence: Synthetic oligonucleotide
  Antisense Strand to SEQ ID NO: 456707
ucuguaaggacagggaccc

SEQ ID NO: 456709 - RNA, 19 nt, Artificial Sequence
  Description of Artificial Sequence: Synthetic oligonucleotide
  Sense strand starting at position 1535 of SEQ ID NO: 317001
ggucccuguccuuacagau

SEQ ID NO: 456710 - RNA, 19 nt, Artificial Sequence
  Description of Artificial Sequence: Synthetic oligonucleotide
  Antisense Strand to SEQ ID NO: 456709
aucuguaaggacagggacc

SEQ ID NO: 456711 - RNA, 19 nt, Artificial Sequence
  Description of Artificial Sequence: Synthetic oligonucleotide
  Sense strand starting at position 1565 of SEQ ID NO: 317001
ucgggacuuccagagcaga

SEQ ID NO: 456712 - RNA, 19 nt, Artificial Sequence
  Description of Artificial Sequence: Synthetic oligonucleotide
  Antisense Strand to SEQ ID NO: 456711
ucugcucuggaagucccga

SEQ ID NO: 456713 - RNA, 19 nt, Artificial Sequence
  Description of Artificial Sequence: Synthetic oligonucleotide
  Sense strand starting at position 2610 of SEQ ID NO: 317001
ccagaauccgcgugaggag

SEQ ID NO: 456714 - RNA, 19 nt, Artificial Sequence
  Description of Artificial Sequence: Synthetic oligonucleotide
  Antisense Strand to SEQ ID NO: 456713
cuccucacgcggauucugg

SEQ ID NO: 456715 - RNA, 19 nt, Artificial Sequence
  Description of Artificial Sequence: Synthetic oligonucleotide
  Sense strand starting at position 2842 of SEQ ID NO: 317001
ugggagguucugugggaga

SEQ ID NO: 456716 - RNA, 19 nt, Artificial Sequence
  Description of Artificial Sequence: Synthetic oligonucleotide
  Antisense Strand to SEQ ID NO: 456715
ucucccacagaaccuccca

SEQ ID NO: 456717 - RNA, 19 nt, Artificial Sequence
  Description of Artificial Sequence: Synthetic oligonucleotide
  Sense strand starting at position 2916 of SEQ ID NO: 317001
uuggaaucgccuuggagaa

SEQ ID NO: 456718 - RNA, 19 nt, Artificial Sequence
  Description of Artificial Sequence: Synthetic oligonucleotide
  Antisense Strand to SEQ ID NO: 456717
uucuccaaggcgauuccaa

SEQ ID NO: 456719 - RNA, 19 nt, Artificial Sequence
  Description of Artificial Sequence: Synthetic oligonucleotide
  Sense strand starting at position 2917 of SEQ ID NO: 317001
uggaaucgccuuggagaaa

SEQ ID NO: 456720 - RNA, 19 nt, Artificial Sequence
  Description of Artificial Sequence: Synthetic oligonucleotide
  Antisense Strand to SEQ ID NO: 456719
uuucuccaaggcgauucca

SEQ ID NO: 456721 - RNA, 19 nt, Artificial Sequence
  Description of Artificial Sequence: Synthetic oligonucleotide
  Sense strand starting at position 3008 of SEQ ID NO: 317001
gcaaaugcacaucaaagua

SEQ ID NO: 456722 - RNA, 19 nt, Artificial Sequence
  Description of Artificial Sequence: Synthetic oligonucleotide
  Antisense Strand to SEQ ID NO: 456721
uacuuugaugugcauuugc

SEQ ID NO: 456723 - RNA, 19 nt, Artificial Sequence
  Description of Artificial Sequence: Synthetic oligonucleotide
  Sense strand starting at position 3038 of SEQ ID NO: 317001
augagauuacuguaguuuc

SEQ ID NO: 456724 - RNA, 19 nt, Artificial Sequence
  Description of Artificial Sequence: Synthetic oligonucleotide
  Antisense Strand to SEQ ID NO: 456723
gaaacuacaguaaucucau

SEQ ID NO: 456725 - RNA, 19 nt, Artificial Sequence
  Description of Artificial Sequence: Synthetic oligonucleotide
  Sense strand starting at position 3041 of SEQ ID NO: 317001
agauuacuguaguuuccau

SEQ ID NO: 456726 - RNA, 19 nt, Artificial Sequence
  Description of Artificial Sequence: Synthetic oligonucleotide
  Antisense Strand to SEQ ID NO: 456725
auggaaacuacaguaaucu

SEQ ID NO: 456727 - RNA, 19 nt, Artificial Sequence
  Description of Artificial Sequence: Synthetic oligonucleotide
  Sense strand starting at position 3056 of SEQ ID NO: 317001
ccaugucuuccacauuagu

SEQ ID NO: 456728 - RNA, 19 nt, Artificial Sequence
  Description of Artificial Sequence: Synthetic oligonucleotide
  Antisense Strand to SEQ ID NO: 456727
acuaauguggaagacaugg

SEQ ID NO: 456729 - RNA, 19 nt, Artificial Sequence
  Description of Artificial Sequence: Synthetic oligonucleotide
  Sense strand starting at position 3059 of SEQ ID NO: 317001
ugucuuccacauuaguaaa

SEQ ID NO: 456730 - RNA, 19 nt, Artificial Sequence
  Description of Artificial Sequence: Synthetic oligonucleotide
  Antisense Strand to SEQ ID NO: 456729
uuuacuaauguggaagaca

SEQ ID NO: 456731 - RNA, 19 nt, Artificial Sequence
  Description of Artificial Sequence: Synthetic oligonucleotide
  Sense strand starting at position 3085 of SEQ ID NO: 317001
uuggaagacuucgaauuug

SEQ ID NO: 456732 - RNA, 19 nt, Artificial Sequence
  Description of Artificial Sequence: Synthetic oligonucleotide
  Antisense Strand to SEQ ID NO: 456731
caaauucgaagucuuccaa

SEQ ID NO: 456733 - RNA, 19 nt, Artificial Sequence
  Description of Artificial Sequence: Synthetic oligonucleotide
  Sense strand starting at position 3093 of SEQ ID NO: 317001
cuucgaauuugugauuuac

SEQ ID NO: 456734 - RNA, 19 nt, Artificial Sequence
  Description of Artificial Sequence: Synthetic oligonucleotide
  Antisense Strand to SEQ ID NO: 456733
guaaaucacaaauucgaag

SEQ ID NO: 456735 - RNA, 19 nt, Artificial Sequence
  Description of Artificial Sequence: Synthetic oligonucleotide
  Sense strand starting at position 3175 of SEQ ID NO: 317001
auaggaaauuggcccuuua

SEQ ID NO: 456736 - RNA, 19 nt, Artificial Sequence
  Description of Artificial Sequence: Synthetic oligonucleotide
  Antisense Strand to SEQ ID NO: 456735
uaaagggccaauuuccuau

SEQ ID NO: 456737 - RNA, 19 nt, Artificial Sequence
  Description of Artificial Sequence: Synthetic oligonucleotide
  Sense strand starting at position 3202 of SEQ ID NO: 317001
acagauuacccucggcacu

SEQ ID NO: 456738 - RNA, 19 nt, Artificial Sequence
  Description of Artificial Sequence: Synthetic oligonucleotide
  Antisense Strand to SEQ ID NO: 456737
agugccgaggguaaucugu

SEQ ID NO: 456739 - RNA, 19 nt, Artificial Sequence
  Description of Artificial Sequence: Synthetic oligonucleotide
  Sense strand starting at position 3320 of SEQ ID NO: 317001
uuaggaguugaaugaccuu

SEQ ID NO: 456740 - RNA, 19 nt, Artificial Sequence
  Description of Artificial Sequence: Synthetic oligonucleotide
  Antisense Strand to SEQ ID NO: 456739
aaggucauucaacuccuaa

SEQ ID NO: 456741 - RNA, 19 nt, Artificial Sequence
  Description of Artificial Sequence: Synthetic oligonucleotide
  Sense strand starting at position 3326 of SEQ ID NO: 317001
guugaaugaccuugucuac

SEQ ID NO: 456742 - RNA, 19 nt, Artificial Sequence
  Description of Artificial Sequence: Synthetic oligonucleotide
  Antisense Strand to SEQ ID NO: 456741
guagacaaggucauucaac

SEQ ID NO: 456743 - RNA, 19 nt, Artificial Sequence
  Description of Artificial Sequence: Synthetic oligonucleotide
  Sense strand starting at position 3427 of SEQ ID NO: 317001
cuuugaaagccuuagcauu

SEQ ID NO: 456744 - RNA, 19 nt, Artificial Sequence
  Description of Artificial Sequence: Synthetic oligonucleotide
  Antisense Strand to SEQ ID NO: 456743
aaugcuaaggcuuucaaag

SEQ ID NO: 456745 - RNA, 19 nt, Artificial Sequence
  Description of Artificial Sequence: Synthetic oligonucleotide
  Sense strand starting at position 3486 of SEQ ID NO: 317001
auuauaggaagcuguguaa

SEQ ID NO: 456746 - RNA, 19 nt, Artificial Sequence
  Description of Artificial Sequence: Synthetic oligonucleotide
  Antisense Strand to SEQ ID NO: 456745
uuacacagcuuccuauaau

SEQ ID NO: 456747 - RNA, 19 nt, Artificial Sequence
  Description of Artificial Sequence: Synthetic oligonucleotide
  Sense strand starting at position 3514 of SEQ ID NO: 317001
ugagguugugagggucaaa

SEQ ID NO: 456748 - RNA, 19 nt, Artificial Sequence
  Description of Artificial Sequence: Synthetic oligonucleotide
  Antisense Strand to SEQ ID NO: 456747
uuugacccucacaaccuca

SEQ ID NO: 456749 - RNA, 19 nt, Artificial Sequence
  Description of Artificial Sequence: Synthetic oligonucleotide
  Sense strand starting at position 3532 of SEQ ID NO: 317001
auggaagucuaagauaaag

SEQ ID NO: 456750 - RNA, 19 nt, Artificial Sequence
  Description of Artificial Sequence: Synthetic oligonucleotide
  Antisense Strand to SEQ ID NO: 456749
cuuuaucuuagacuuccau

SEQ ID NO: 456751 - RNA, 19 nt, Artificial Sequence
  Description of Artificial Sequence: Synthetic oligonucleotide
  Sense strand starting at position 3543 of SEQ ID NO: 317001
agauaaaguucugccaauu

SEQ ID NO: 456752 - RNA, 19 nt, Artificial Sequence
  Description of Artificial Sequence: Synthetic oligonucleotide
  Antisense Strand to SEQ ID NO: 456751
aauuggcagaacuuuaucu

SEQ ID NO: 456753 - RNA, 19 nt, Artificial Sequence
  Description of Artificial Sequence: Synthetic oligonucleotide
  Sense strand starting at position 3901 of SEQ ID NO: 317001
acaggaauuugaggacuaa

SEQ ID NO: 456754 - RNA, 19 nt, Artificial Sequence
  Description of Artificial Sequence: Synthetic oligonucleotide
  Antisense Strand to SEQ ID NO: 456753
uuaguccucaaauuccugu

SEQ ID NO: 456755 - RNA, 19 nt, Artificial Sequence
  Description of Artificial Sequence: Synthetic oligonucleotide
  Sense strand starting at position 3943 of SEQ ID NO: 317001
uuuaaaucugagcaauugu

SEQ ID NO: 456756 - RNA, 19 nt, Artificial Sequence
  Description of Artificial Sequence: Synthetic oligonucleotide
  Antisense Strand to SEQ ID NO: 456755
acaauugcucagauuuaaa

SEQ ID NO: 456757 - RNA, 19 nt, Artificial Sequence
  Description of Artificial Sequence: Synthetic oligonucleotide
  Sense strand starting at position 3968 of SEQ ID NO: 317001
aucgauaaucuauguucuu

SEQ ID NO: 456758 - RNA, 19 nt, Artificial Sequence
  Description of Artificial Sequence: Synthetic oligonucleotide
  Antisense Strand to SEQ ID NO: 456757
aagaacauagauuaucgau

SEQ ID NO: 456759 - RNA, 19 nt, Artificial Sequence
  Description of Artificial Sequence: Synthetic oligonucleotide
  Sense strand starting at position 3969 of SEQ ID NO: 317001
ucgauaaucuauguucuua

SEQ ID NO: 456760 - RNA, 19 nt, Artificial Sequence
  Description of Artificial Sequence: Synthetic oligonucleotide
  Antisense Strand to SEQ ID NO: 456759
uaagaacauagauuaucga

SEQ ID NO: 456761 - RNA, 19 nt, Artificial Sequence
  Description of Artificial Sequence: Synthetic oligonucleotide
  Sense strand starting at position 392 of SEQ ID NO: 317002
ugaauuauuguuuacagca

SEQ ID NO: 456762 - RNA, 19 nt, Artificial Sequence
  Description of Artificial Sequence: Synthetic oligonucleotide
  Antisense Strand to SEQ ID NO: 456761
ugcuguaaacaauaauuca

SEQ ID NO: 456763 - RNA, 19 nt, Artificial Sequence
  Description of Artificial Sequence: Synthetic oligonucleotide
  Sense strand starting at position 418 of SEQ ID NO: 317002
ucaacuaguguguaaugga

SEQ ID NO: 456764 - RNA, 19 nt, Artificial Sequence
  Description of Artificial Sequence: Synthetic oligonucleotide
  Antisense Strand to SEQ ID NO: 456763
uccauuacacacuaguuga

SEQ ID NO: 456765 - RNA, 19 nt, Artificial Sequence
  Description of Artificial Sequence: Synthetic oligonucleotide
  Sense strand starting at position 423 of SEQ ID NO: 317002
uaguguguaauggauaaug

SEQ ID NO: 456766 - RNA, 19 nt, Artificial Sequence
  Description of Artificial Sequence: Synthetic oligonucleotide
  Antisense Strand to SEQ ID NO: 456765
cauuauccauuacacacua

SEQ ID NO: 456767 - RNA, 19 nt, Artificial Sequence
  Description of Artificial Sequence: Synthetic oligonucleotide
  Sense strand starting at position 425 of SEQ ID NO: 317002
guguguaauggauaauguu

SEQ ID NO: 456768 - RNA, 19 nt, Artificial Sequence
  Description of Artificial Sequence: Synthetic oligonucleotide
  Antisense Strand to SEQ ID NO: 456767
aacauuauccauuacacac

SEQ ID NO: 456769 - RNA, 19 nt, Artificial Sequence
  Description of Artificial Sequence: Synthetic oligonucleotide
  Sense strand starting at position 635 of SEQ ID NO: 317002
acaggucaaacgugguaaa

SEQ ID NO: 456770 - RNA, 19 nt, Artificial Sequence
  Description of Artificial Sequence: Synthetic oligonucleotide
  Antisense Strand to SEQ ID NO: 456769
uuuaccacguuugaccugu

SEQ ID NO: 456771 - RNA, 19 nt, Artificial Sequence
  Description of Artificial Sequence: Synthetic oligonucleotide
  Sense strand starting at position 808 of SEQ ID NO: 317002
uggcaauaacuauggcaau

SEQ ID NO: 456772 - RNA, 19 nt, Artificial Sequence
  Description of Artificial Sequence: Synthetic oligonucleotide
  Antisense Strand to SEQ ID NO: 456771
auugccauaguuauugcca

SEQ ID NO: 456773 - RNA, 19 nt, Artificial Sequence
  Description of Artificial Sequence: Synthetic oligonucleotide
  Sense strand starting at position 833 of SEQ ID NO: 317002
uugguuucuguugaguaua

SEQ ID NO: 456774 - RNA, 19 nt, Artificial Sequence
  Description of Artificial Sequence: Synthetic oligonucleotide
  Antisense Strand to SEQ ID NO: 456773
uauacucaacagaaaccaa

SEQ ID NO: 456775 - RNA, 19 nt, Artificial Sequence
  Description of Artificial Sequence: Synthetic oligonucleotide
  Sense strand starting at position 836 of SEQ ID NO: 317002
guuucuguugaguauaauc

SEQ ID NO: 456776 - RNA, 19 nt, Artificial Sequence
  Description of Artificial Sequence: Synthetic oligonucleotide
  Antisense Strand to SEQ ID NO: 456775
gauuauacucaacagaaac

SEQ ID NO: 456777 - RNA, 19 nt, Artificial Sequence
  Description of Artificial Sequence: Synthetic oligonucleotide
  Sense strand starting at position 838 of SEQ ID NO: 317002
uucuguugaguauaaucuu

SEQ ID NO: 456778 - RNA, 19 nt, Artificial Sequence
  Description of Artificial Sequence: Synthetic oligonucleotide
  Antisense Strand to SEQ ID NO: 456777
aagauuauacucaacagaa

SEQ ID NO: 456779 - RNA, 19 nt, Artificial Sequence
  Description of Artificial Sequence: Synthetic oligonucleotide
  Sense strand starting at position 1185 of SEQ ID NO: 317002
guaggacuuucucuuaaua

SEQ ID NO: 456780 - RNA, 19 nt, Artificial Sequence
  Description of Artificial Sequence: Synthetic oligonucleotide
  Antisense Strand to SEQ ID NO: 456779
uauuaagagaaaguccuac

SEQ ID NO: 456781 - RNA, 19 nt, Artificial Sequence
  Description of Artificial Sequence: Synthetic oligonucleotide
  Sense strand starting at position 1303 of SEQ ID NO: 317002
augaguuauccuuagggca

SEQ ID NO: 456782 - RNA, 19 nt, Artificial Sequence
  Description of Artificial Sequence: Synthetic oligonucleotide
  Antisense Strand to SEQ ID NO: 456781
ugcccuaaggauaacucau

SEQ ID NO: 456783 - RNA, 19 nt, Artificial Sequence
  Description of Artificial Sequence: Synthetic oligonucleotide
  Sense strand starting at position 1382 of SEQ ID NO: 317002
uuuaucaugugaucauaca

SEQ ID NO: 456784 - RNA, 19 nt, Artificial Sequence
  Description of Artificial Sequence: Synthetic oligonucleotide
  Antisense Strand to SEQ ID NO: 456783
uguaugaucacaugauaaa

SEQ ID NO: 456785 - RNA, 19 nt, Artificial Sequence
  Description of Artificial Sequence: Synthetic oligonucleotide
  Sense strand starting at position 1457 of SEQ ID NO: 317002
cccugcuuugcagagauga

SEQ ID NO: 456786 - RNA, 19 nt, Artificial Sequence
  Description of Artificial Sequence: Synthetic oligonucleotide
  Antisense Strand to SEQ ID NO: 456785
ucaucucugcaaagcaggg

SEQ ID NO: 456787 - RNA, 19 nt, Artificial Sequence
  Description of Artificial Sequence: Synthetic oligonucleotide
  Sense strand starting at position 1639 of SEQ ID NO: 317002
uccuguaaucagcacgauu

SEQ ID NO: 456788 - RNA, 19 nt, Artificial Sequence
  Description of Artificial Sequence: Synthetic oligonucleotide
  Antisense Strand to SEQ ID NO: 456787
aaucgugcugauuacagga

SEQ ID NO: 456789 - RNA, 19 nt, Artificial Sequence
  Description of Artificial Sequence: Synthetic oligonucleotide
  Sense strand starting at position 1653 of SEQ ID NO: 317002
cgauuucgccggugacuga

SEQ ID NO: 456790 - RNA, 19 nt, Artificial Sequence
  Description of Artificial Sequence: Synthetic oligonucleotide
  Antisense Strand to SEQ ID NO: 456789
ucagucaccggcgaaaucg

SEQ ID NO: 456791 - RNA, 19 nt, Artificial Sequence
  Description of Artificial Sequence: Synthetic oligonucleotide
  Sense strand starting at position 1937 of SEQ ID NO: 317002
uuuguuggucuuucgcaau

SEQ ID NO: 456792 - RNA, 19 nt, Artificial Sequence
  Description of Artificial Sequence: Synthetic oligonucleotide
  Antisense Strand to SEQ ID NO: 456791
auugcgaaagaccaacaaa

SEQ ID NO: 456793 - RNA, 19 nt, Artificial Sequence
  Description of Artificial Sequence: Synthetic oligonucleotide
  Sense strand starting at position 2202 of SEQ ID NO: 317002
gaagguugcuuaucacuag

SEQ ID NO: 456794 - RNA, 19 nt, Artificial Sequence
  Description of Artificial Sequence: Synthetic oligonucleotide
  Antisense Strand to SEQ ID NO: 456793
cuagugauaagcaaccuuc

SEQ ID NO: 456795 - RNA, 19 nt, Artificial Sequence
  Description of Artificial Sequence: Synthetic oligonucleotide
  Sense strand starting at position 2205 of SEQ ID NO: 317002
gguugcuuaucacuagaua

SEQ ID NO: 456796 - RNA, 19 nt, Artificial Sequence
  Description of Artificial Sequence: Synthetic oligonucleotide
  Antisense Strand to SEQ ID NO: 456795
uaucuagugauaagcaacc

SEQ ID NO: 456797 - RNA, 19 nt, Artificial Sequence
  Description of Artificial Sequence: Synthetic oligonucleotide
  Sense strand starting at position 2206 of SEQ ID NO: 317002
guugcuuaucacuagauag

SEQ ID NO: 456798 - RNA, 19 nt, Artificial Sequence
  Description of Artificial Sequence: Synthetic oligonucleotide
  Antisense Strand to SEQ ID NO: 456797
cuaucuagugauaagcaac

SEQ ID NO: 456799 - RNA, 19 nt, Artificial Sequence
  Description of Artificial Sequence: Synthetic oligonucleotide
  Sense strand starting at position 2423 of SEQ ID NO: 317002
cgggaauugcuugagucca

SEQ ID NO: 456800 - RNA, 19 nt, Artificial Sequence
  Description of Artificial Sequence: Synthetic oligonucleotide
  Antisense Strand to SEQ ID NO: 456799
uggacucaagcaauucccg

SEQ ID NO: 456801 - RNA, 19 nt, Artificial Sequence
  Description of Artificial Sequence: Synthetic oligonucleotide
  Sense strand starting at position 2534 of SEQ ID NO: 317002
agaggaugcaaauguagau

SEQ ID NO: 456802 - RNA, 19 nt, Artificial Sequence
  Description of Artificial Sequence: Synthetic oligonucleotide
  Antisense Strand to SEQ ID NO: 456801
aucuacauuugcauccucu

SEQ ID NO: 456803 - RNA, 19 nt, Artificial Sequence
  Description of Artificial Sequence: Synthetic oligonucleotide
  Sense strand starting at position 2547 of SEQ ID NO: 317002
guagauuccuaucuuaaag

SEQ ID NO: 456804 - RNA, 19 nt, Artificial Sequence
  Description of Artificial Sequence: Synthetic oligonucleotide
  Antisense Strand to SEQ ID NO: 456803
cuuuaagauaggaaucuac

SEQ ID NO: 456805 - RNA, 19 nt, Artificial Sequence
  Description of Artificial Sequence: Synthetic oligonucleotide
  Sense strand starting at position 2588 of SEQ ID NO: 317002
cugcuuccagcugagaaau

SEQ ID NO: 456806 - RNA, 19 nt, Artificial Sequence
  Description of Artificial Sequence: Synthetic oligonucleotide
  Antisense Strand to SEQ ID NO: 456805
auuucucagcuggaagcag

SEQ ID NO: 456807 - RNA, 19 nt, Artificial Sequence
  Description of Artificial Sequence: Synthetic oligonucleotide
  Sense strand starting at position 2600 of SEQ ID NO: 317002
gagaaauugcgcuacauca

SEQ ID NO: 456808 - RNA, 19 nt, Artificial Sequence
  Description of Artificial Sequence: Synthetic oligonucleotide
  Antisense Strand to SEQ ID NO: 456807
ugauguagcgcaauuucuc

SEQ ID NO: 456809 - RNA, 19 nt, Artificial Sequence
  Description of Artificial Sequence: Synthetic oligonucleotide
  Sense strand starting at position 2626 of SEQ ID NO: 317002
guuugaacuaagcacgauu

SEQ ID NO: 456810 - RNA, 19 nt, Artificial Sequence
  Description of Artificial Sequence: Synthetic oligonucleotide
  Antisense Strand to SEQ ID NO: 456809
aaucgugcuuaguucaaac

SEQ ID NO: 456811 - RNA, 19 nt, Artificial Sequence
  Description of Artificial Sequence: Synthetic oligonucleotide
  Sense strand starting at position 2711 of SEQ ID NO: 317002
aucguauuaaagggauugu

SEQ ID NO: 456812 - RNA, 19 nt, Artificial Sequence
  Description of Artificial Sequence: Synthetic oligonucleotide
  Antisense Strand to SEQ ID NO: 456811
acaaucccuuuaauacgau

SEQ ID NO: 456813 - RNA, 19 nt, Artificial Sequence
  Description of Artificial Sequence: Synthetic oligonucleotide
  Sense strand starting at position 2712 of SEQ ID NO: 317002
ucguauuaaagggauuguu

SEQ ID NO: 456814 - RNA, 19 nt, Artificial Sequence
  Description of Artificial Sequence: Synthetic oligonucleotide
  Antisense Strand to SEQ ID NO: 456813
aacaaucccuuuaauacga

SEQ ID NO: 456815 - RNA, 19 nt, Artificial Sequence
  Description of Artificial Sequence: Synthetic oligonucleotide
  Sense strand starting at position 2720 of SEQ ID NO: 317002
aagggauuguuuccacaag

SEQ ID NO: 456816 - RNA, 19 nt, Artificial Sequence
  Description of Artificial Sequence: Synthetic oligonucleotide
  Antisense Strand to SEQ ID NO: 456815
cuuguggaaacaaucccuu

SEQ ID NO: 456817 - RNA, 19 nt, Artificial Sequence
  Description of Artificial Sequence: Synthetic oligonucleotide
  Sense strand starting at position 2860 of SEQ ID NO: 317002
gccuaaagauuaccuaugu

SEQ ID NO: 456818 - RNA, 19 nt, Artificial Sequence
  Description of Artificial Sequence: Synthetic oligonucleotide
  Antisense Strand to SEQ ID NO: 456817
acauagguaaucuuuaggc

SEQ ID NO: 456819 - RNA, 19 nt, Artificial Sequence
  Description of Artificial Sequence: Synthetic oligonucleotide
  Sense strand starting at position 2915 of SEQ ID NO: 317002
aguauaugcuaacuaguga

SEQ ID NO: 456820 - RNA, 19 nt, Artificial Sequence
  Description of Artificial Sequence: Synthetic oligonucleotide
  Antisense Strand to SEQ ID NO: 456819
ucacuaguuagcauauacu

SEQ ID NO: 456821 - RNA, 19 nt, Artificial Sequence
  Description of Artificial Sequence: Synthetic oligonucleotide
  Sense strand starting at position 2922 of SEQ ID NO: 317002
gcuaacuagugacuugaaa

SEQ ID NO: 456822 - RNA, 19 nt, Artificial Sequence
  Description of Artificial Sequence: Synthetic oligonucleotide
  Antisense Strand to SEQ ID NO: 456821
uuucaagucacuaguuagc

SEQ ID NO: 456823 - RNA, 19 nt, Artificial Sequence
  Description of Artificial Sequence: Synthetic oligonucleotide
  Sense strand starting at position 2991 of SEQ ID NO: 317002
ccaguaagagcuuaauaau

SEQ ID NO: 456824 - RNA, 19 nt, Artificial Sequence
  Description of Artificial Sequence: Synthetic oligonucleotide
  Antisense Strand to SEQ ID NO: 456823
auuauuaagcucuuacugg

SEQ ID NO: 456825 - RNA, 19 nt, Artificial Sequence
  Description of Artificial Sequence: Synthetic oligonucleotide
  Sense strand starting at position 3007 of SEQ ID NO: 317002
aaugguauugcaugcauuu

SEQ ID NO: 456826 - RNA, 19 nt, Artificial Sequence
  Description of Artificial Sequence: Synthetic oligonucleotide
  Antisense Strand to SEQ ID NO: 456825
aaaugcaugcaauaccauu

SEQ ID NO: 456827 - RNA, 19 nt, Artificial Sequence
  Description of Artificial Sequence: Synthetic oligonucleotide
  Sense strand starting at position 3093 of SEQ ID NO: 317002
ggacuuuguugugugacaa

SEQ ID NO: 456828 - RNA, 19 nt, Artificial Sequence
  Description of Artificial Sequence: Synthetic oligonucleotide
  Antisense Strand to SEQ ID NO: 456827
uugucacacaacaaagucc

SEQ ID NO: 456829 - RNA, 19 nt, Artificial Sequence
  Description of Artificial Sequence: Synthetic oligonucleotide
  Sense strand starting at position 3103 of SEQ ID NO: 317002
gugugacaauagucaacuu

SEQ ID NO: 456830 - RNA, 19 nt, Artificial Sequence
  Description of Artificial Sequence: Synthetic oligonucleotide
  Antisense Strand to SEQ ID NO: 456829
aaguugacuauugucacac

SEQ ID NO: 456831 - RNA, 19 nt, Artificial Sequence
  Description of Artificial Sequence: Synthetic oligonucleotide
  Sense strand starting at position 3356 of SEQ ID NO: 317002
aguguucuuccacauauau

SEQ ID NO: 456832 - RNA, 19 nt, Artificial Sequence
  Description of Artificial Sequence: Synthetic oligonucleotide
  Antisense Strand to SEQ ID NO: 456831
auauauguggaagaacacu

SEQ ID NO: 456833 - RNA, 19 nt, Artificial Sequence
  Description of Artificial Sequence: Synthetic oligonucleotide
  Sense strand starting at position 3558 of SEQ ID NO: 317002
aggaauaaauuacaucuga

SEQ ID NO: 456834 - RNA, 19 nt, Artificial Sequence
  Description of Artificial Sequence: Synthetic oligonucleotide
  Antisense Strand to SEQ ID NO: 456833
ucagauguaauuuauuccu

SEQ ID NO: 456835 - RNA, 19 nt, Artificial Sequence
  Description of Artificial Sequence: Synthetic oligonucleotide
  Sense strand starting at position 3573 of SEQ ID NO: 317002
cugacauggugaucuacua

SEQ ID NO: 456836 - RNA, 19 nt, Artificial Sequence
  Description of Artificial Sequence: Synthetic oligonucleotide
  Antisense Strand to SEQ ID NO: 456835
uaguagaucaccaugucag

SEQ ID NO: 456837 - RNA, 19 nt, Artificial Sequence
  Description of Artificial Sequence: Synthetic oligonucleotide
  Sense strand starting at position 3630 of SEQ ID NO: 317002
ggcucuagcuaugcuauuu

SEQ ID NO: 456838 - RNA, 19 nt, Artificial Sequence
  Description of Artificial Sequence: Synthetic oligonucleotide
  Antisense Strand to SEQ ID NO: 456837
aaauagcauagcuagagcc

SEQ ID NO: 456839 - RNA, 19 nt, Artificial Sequence
  Description of Artificial Sequence: Synthetic oligonucleotide
  Sense strand starting at position 3939 of SEQ ID NO: 317002
uggcuaugcuauuucuuau

SEQ ID NO: 456840 - RNA, 19 nt, Artificial Sequence
  Description of Artificial Sequence: Synthetic oligonucleotide
  Antisense Strand to SEQ ID NO: 456839
auaagaaauagcauagcca

SEQ ID NO: 456841 - RNA, 19 nt, Artificial Sequence
  Description of Artificial Sequence: Synthetic oligonucleotide
  Sense strand starting at position 25 of SEQ ID NO: 317003
acagccuuagagugaauca

SEQ ID NO: 456842 - RNA, 19 nt, Artificial Sequence
  Description of Artificial Sequence: Synthetic oligonucleotide
  Antisense Strand to SEQ ID NO: 456841
ugauucacucuaaggcugu

SEQ ID NO: 456843 - RNA, 19 nt, Artificial Sequence
  Description of Artificial Sequence: Synthetic oligonucleotide
  Sense strand starting at position 463 of SEQ ID NO: 317003
uucucuugucucuggaaau

SEQ ID NO: 456844 - RNA, 19 nt, Artificial Sequence
  Description of Artificial Sequence: Synthetic oligonucleotide
  Antisense Strand to SEQ ID NO: 456843
auuuccagagacaagagaa

SEQ ID NO: 456845 - RNA, 19 nt, Artificial Sequence
  Description of Artificial Sequence: Synthetic oligonucleotide
  Sense strand starting at position 603 of SEQ ID NO: 317003
uggacaaaugccugagaac

SEQ ID NO: 456846 - RNA, 19 nt, Artificial Sequence
  Description of Artificial Sequence: Synthetic oligonucleotide
  Antisense Strand to SEQ ID NO: 456845
guucucaggcauuugucca

SEQ ID NO: 456847 - RNA, 19 nt, Artificial Sequence
  Description of Artificial Sequence: Synthetic oligonucleotide
  Sense strand starting at position 655 of SEQ ID NO: 317003
ugcuaucuuccagaaaguu

SEQ ID NO: 456848 - RNA, 19 nt, Artificial Sequence
  Description of Artificial Sequence: Synthetic oligonucleotide
  Antisense Strand to SEQ ID NO: 456847
aacuuucuggaagauagca

SEQ ID NO: 456849 - RNA, 19 nt, Artificial Sequence
  Description of Artificial Sequence: Synthetic oligonucleotide
  Sense strand starting at position 821 of SEQ ID NO: 317003
agaauuaguucucuaagug

SEQ ID NO: 456850 - RNA, 19 nt, Artificial Sequence
  Description of Artificial Sequence: Synthetic oligonucleotide
  Antisense Strand to SEQ ID NO: 456849
cacuuagagaacuaauucu

SEQ ID NO: 456851 - RNA, 19 nt, Artificial Sequence
  Description of Artificial Sequence: Synthetic oligonucleotide
  Sense strand starting at position 822 of SEQ ID NO: 317003
gaauuaguucucuaagugu

SEQ ID NO: 456852 - RNA, 19 nt, Artificial Sequence
  Description of Artificial Sequence: Synthetic oligonucleotide
  Antisense Strand to SEQ ID NO: 456851
acacuuagagaacuaauuc

SEQ ID NO: 456853 - RNA, 19 nt, Artificial Sequence
  Description of Artificial Sequence: Synthetic oligonucleotide
  Sense strand starting at position 828 of SEQ ID NO: 317003
guucucuaaguguaagaga

SEQ ID NO: 456854 - RNA, 19 nt, Artificial Sequence
  Description of Artificial Sequence: Synthetic oligonucleotide
  Antisense Strand to SEQ ID NO: 456853
ucucuuacacuuagagaac

SEQ ID NO: 456855 - RNA, 19 nt, Artificial Sequence
  Description of Artificial Sequence: Synthetic oligonucleotide
  Sense strand starting at position 935 of SEQ ID NO: 317003
ugugauucucaaggaguac

SEQ ID NO: 456856 - RNA, 19 nt, Artificial Sequence
  Description of Artificial Sequence: Synthetic oligonucleotide
  Antisense Strand to SEQ ID NO: 456855
guacuccuugagaaucaca

SEQ ID NO: 456857 - RNA, 19 nt, Artificial Sequence
  Description of Artificial Sequence: Synthetic oligonucleotide
  Sense strand starting at position 936 of SEQ ID NO: 317003
gugauucucaaggaguacu

SEQ ID NO: 456858 - RNA, 19 nt, Artificial Sequence
  Description of Artificial Sequence: Synthetic oligonucleotide
  Antisense Strand to SEQ ID NO: 456857
aguacuccuugagaaucac

SEQ ID NO: 456859 - RNA, 19 nt, Artificial Sequence
  Description of Artificial Sequence: Synthetic oligonucleotide
  Sense strand starting at position 1083 of SEQ ID NO: 317003
uaauguaguguuuacaagu

SEQ ID NO: 456860 - RNA, 19 nt, Artificial Sequence
  Description of Artificial Sequence: Synthetic oligonucleotide
  Antisense Strand to SEQ ID NO: 456859
acuuguaaacacuacauua

SEQ ID NO: 456861 - RNA, 19 nt, Artificial Sequence
  Description of Artificial Sequence: Synthetic oligonucleotide
  Sense strand starting at position 1169 of SEQ ID NO: 317003
acaguuauuguuuaucaug

SEQ ID NO: 456862 - RNA, 19 nt, Artificial Sequence
  Description of Artificial Sequence: Synthetic oligonucleotide
  Antisense Strand to SEQ ID NO: 456861
caugauaaacaauaacugu

SEQ ID NO: 456863 - RNA, 19 nt, Artificial Sequence
  Description of Artificial Sequence: Synthetic oligonucleotide
  Sense strand starting at position 1178 of SEQ ID NO: 317003
guuuaucaugugccacgua

SEQ ID NO: 456864 - RNA, 19 nt, Artificial Sequence
  Description of Artificial Sequence: Synthetic oligonucleotide
  Antisense Strand to SEQ ID NO: 456863
uacguggcacaugauaaac

SEQ ID NO: 456865 - RNA, 19 nt, Artificial Sequence
  Description of Artificial Sequence: Synthetic oligonucleotide
  Sense strand starting at position 1460 of SEQ ID NO: 317003
ugacuugccucauuuagca

SEQ ID NO: 456866 - RNA, 19 nt, Artificial Sequence
  Description of Artificial Sequence: Synthetic oligonucleotide
  Antisense Strand to SEQ ID NO: 456865
ugcuaaaugaggcaaguca

SEQ ID NO: 456867 - RNA, 19 nt, Artificial Sequence
  Description of Artificial Sequence: Synthetic oligonucleotide
  Sense strand starting at position 1539 of SEQ ID NO: 317003
cgcugcuuaguucuuaauu

SEQ ID NO: 456868 - RNA, 19 nt, Artificial Sequence
  Description of Artificial Sequence: Synthetic oligonucleotide
  Antisense Strand to SEQ ID NO: 456867
aauuaagaacuaagcagcg

SEQ ID NO: 456869 - RNA, 19 nt, Artificial Sequence
  Description of Artificial Sequence: Synthetic oligonucleotide
  Sense strand starting at position 1642 of SEQ ID NO: 317003
agauaaguagaugguaagu

SEQ ID NO: 456870 - RNA, 19 nt, Artificial Sequence
  Description of Artificial Sequence: Synthetic oligonucleotide
  Antisense Strand to SEQ ID NO: 456869
acuuaccaucuacuuaucu

SEQ ID NO: 456871 - RNA, 19 nt, Artificial Sequence
  Description of Artificial Sequence: Synthetic oligonucleotide
  Sense strand starting at position 1647 of SEQ ID NO: 317003
aguagaugguaagucaaau

SEQ ID NO: 456872 - RNA, 19 nt, Artificial Sequence
  Description of Artificial Sequence: Synthetic oligonucleotide
  Antisense Strand to SEQ ID NO: 456871
auuugacuuaccaucuacu

SEQ ID NO: 456873 - RNA, 19 nt, Artificial Sequence
  Description of Artificial Sequence: Synthetic oligonucleotide
  Sense strand starting at position 1680 of SEQ ID NO: 317003
auaucuuacucugugacuu

SEQ ID NO: 456874 - RNA, 19 nt, Artificial Sequence
  Description of Artificial Sequence: Synthetic oligonucleotide
  Antisense Strand to SEQ ID NO: 456873
aagucacagaguaagauau

SEQ ID NO: 456875 - RNA, 19 nt, Artificial Sequence
  Description of Artificial Sequence: Synthetic oligonucleotide
  Sense strand starting at position 1777 of SEQ ID NO: 317003
aguagucugccugccuauu

SEQ ID NO: 456876 - RNA, 19 nt, Artificial Sequence
  Description of Artificial Sequence: Synthetic oligonucleotide
  Antisense Strand to SEQ ID NO: 456875
aauaggcaggcagacuacu

SEQ ID NO: 456877 - RNA, 19 nt, Artificial Sequence
  Description of Artificial Sequence: Synthetic oligonucleotide
  Sense strand starting at position 1912 of SEQ ID NO: 317003
aaggauuucuaggaugaug

SEQ ID NO: 456878 - RNA, 19 nt, Artificial Sequence
  Description of Artificial Sequence: Synthetic oligonucleotide
  Antisense Strand to SEQ ID NO: 456877
caucauccuagaaauccuu

SEQ ID NO: 456879 - RNA, 19 nt, Artificial Sequence
  Description of Artificial Sequence: Synthetic oligonucleotide
  Sense strand starting at position 1961 of SEQ ID NO: 317003
gguucaguccuuguguagu

SEQ ID NO: 456880 - RNA, 19 nt, Artificial Sequence
  Description of Artificial Sequence: Synthetic oligonucleotide
  Antisense Strand to SEQ ID NO: 456879
acuacacaaggacugaacc

SEQ ID NO: 456881 - RNA, 19 nt, Artificial Sequence
  Description of Artificial Sequence: Synthetic oligonucleotide
  Sense strand starting at position 1972 of SEQ ID NO: 317003
uguguaguccuagggagga

SEQ ID NO: 456882 - RNA, 19 nt, Artificial Sequence
  Description of Artificial Sequence: Synthetic oligonucleotide
  Antisense Strand to SEQ ID NO: 456881
uccucccuaggacuacaca

SEQ ID NO: 456883 - RNA, 19 nt, Artificial Sequence
  Description of Artificial Sequence: Synthetic oligonucleotide
  Sense strand starting at position 2028 of SEQ ID NO: 317003
ccaguuguuaaugggacua

SEQ ID NO: 456884 - RNA, 19 nt, Artificial Sequence
  Description of Artificial Sequence: Synthetic oligonucleotide
  Antisense Strand to SEQ ID NO: 456883
uagucccauuaacaacugg

SEQ ID NO: 456885 - RNA, 19 nt, Artificial Sequence
  Description of Artificial Sequence: Synthetic oligonucleotide
  Sense strand starting at position 2085 of SEQ ID NO: 317003
guguucuaauggguuugaa

SEQ ID NO: 456886 - RNA, 19 nt, Artificial Sequence
  Description of Artificial Sequence: Synthetic oligonucleotide
  Antisense Strand to SEQ ID NO: 456885
uucaaacccauuagaacac

SEQ ID NO: 456887 - RNA, 19 nt, Artificial Sequence
  Description of Artificial Sequence: Synthetic oligonucleotide
  Sense strand starting at position 2088 of SEQ ID NO: 317003
uucuaauggguuugaaaca

SEQ ID NO: 456888 - RNA, 19 nt, Artificial Sequence
  Description of Artificial Sequence: Synthetic oligonucleotide
  Antisense Strand to SEQ ID NO: 456887
uguuucaaacccauuagaa

SEQ ID NO: 456889 - RNA, 19 nt, Artificial Sequence
  Description of Artificial Sequence: Synthetic oligonucleotide
  Sense strand starting at position 2128 of SEQ ID NO: 317003
aagugaugccaagagcaca

SEQ ID NO: 456890 - RNA, 19 nt, Artificial Sequence
  Description of Artificial Sequence: Synthetic oligonucleotide
  Antisense Strand to SEQ ID NO: 456889
ugugcucuuggcaucacuu

SEQ ID NO: 456891 - RNA, 19 nt, Artificial Sequence
  Description of Artificial Sequence: Synthetic oligonucleotide
  Sense strand starting at position 2160 of SEQ ID NO: 317003
ucuggacuuguuuaucuga

SEQ ID NO: 456892 - RNA, 19 nt, Artificial Sequence
  Description of Artificial Sequence: Synthetic oligonucleotide
  Antisense Strand to SEQ ID NO: 456891
ucagauaaacaaguccaga

SEQ ID NO: 456893 - RNA, 19 nt, Artificial Sequence
  Description of Artificial Sequence: Synthetic oligonucleotide
  Sense strand starting at position 2162 of SEQ ID NO: 317003
uggacuuguuuaucugaaa

SEQ ID NO: 456894 - RNA, 19 nt, Artificial Sequence
  Description of Artificial Sequence: Synthetic oligonucleotide
  Antisense Strand to SEQ ID NO: 456893
uuucagauaaacaagucca

SEQ ID NO: 456895 - RNA, 19 nt, Artificial Sequence
  Description of Artificial Sequence: Synthetic oligonucleotide
  Sense strand starting at position 2511 of SEQ ID NO: 317003
agaacaaggccuggucuaa

SEQ ID NO: 456896 - RNA, 19 nt, Artificial Sequence
  Description of Artificial Sequence: Synthetic oligonucleotide
  Antisense Strand to SEQ ID NO: 456895
uuagaccaggccuuguucu

SEQ ID NO: 456897 - RNA, 19 nt, Artificial Sequence
  Description of Artificial Sequence: Synthetic oligonucleotide
  Sense strand starting at position 2568 of SEQ ID NO: 317003
uaaugaucuguugguaucu

SEQ ID NO: 456898 - RNA, 19 nt, Artificial Sequence
  Description of Artificial Sequence: Synthetic oligonucleotide
  Antisense Strand to SEQ ID NO: 456897
agauaccaacagaucauua

SEQ ID NO: 456899 - RNA, 19 nt, Artificial Sequence
  Description of Artificial Sequence: Synthetic oligonucleotide
  Sense strand starting at position 2577 of SEQ ID NO: 317003
guugguaucuuucuggaaa

SEQ ID NO: 456900 - RNA, 19 nt, Artificial Sequence
  Description of Artificial Sequence: Synthetic oligonucleotide
  Antisense Strand to SEQ ID NO: 456899
uuuccagaaagauaccaac

SEQ ID NO: 456901 - RNA, 19 nt, Artificial Sequence
  Description of Artificial Sequence: Synthetic oligonucleotide
  Sense strand starting at position 2805 of SEQ ID NO: 317003
ucaguucccuuugugauaa

SEQ ID NO: 456902 - RNA, 19 nt, Artificial Sequence
  Description of Artificial Sequence: Synthetic oligonucleotide
  Antisense Strand to SEQ ID NO: 456901
uuaucacaaagggaacuga

SEQ ID NO: 456903 - RNA, 19 nt, Artificial Sequence
  Description of Artificial Sequence: Synthetic oligonucleotide
  Sense strand starting at position 2914 of SEQ ID NO: 317003
uugaccaggugguuuauaa

SEQ ID NO: 456904 - RNA, 19 nt, Artificial Sequence
  Description of Artificial Sequence: Synthetic oligonucleotide
  Antisense Strand to SEQ ID NO: 456903
uuauaaaccaccuggucaa

SEQ ID NO: 456905 - RNA, 19 nt, Artificial Sequence
  Description of Artificial Sequence: Synthetic oligonucleotide
  Sense strand starting at position 2981 of SEQ ID NO: 317003
auauucuuugucugguaag

SEQ ID NO: 456906 - RNA, 19 nt, Artificial Sequence
  Description of Artificial Sequence: Synthetic oligonucleotide
  Antisense Strand to SEQ ID NO: 456905
cuuaccagacaaagaauau

SEQ ID NO: 456907 - RNA, 19 nt, Artificial Sequence
  Description of Artificial Sequence: Synthetic oligonucleotide
  Sense strand starting at position 3004 of SEQ ID NO: 317003
ggcuuccugguugauagau

SEQ ID NO: 456908 - RNA, 19 nt, Artificial Sequence
  Description of Artificial Sequence: Synthetic oligonucleotide
  Antisense Strand to SEQ ID NO: 456907
aucuaucaaccaggaagcc

SEQ ID NO: 456909 - RNA, 19 nt, Artificial Sequence
  Description of Artificial Sequence: Synthetic oligonucleotide
  Sense strand starting at position 3014 of SEQ ID NO: 317003
uugauagauggcugucauu

SEQ ID NO: 456910 - RNA, 19 nt, Artificial Sequence
  Description of Artificial Sequence: Synthetic oligonucleotide
  Antisense Strand to SEQ ID NO: 456909
aaugacagccaucuaucaa

SEQ ID NO: 456911 - RNA, 19 nt, Artificial Sequence
  Description of Artificial Sequence: Synthetic oligonucleotide
  Sense strand starting at position 3071 of SEQ ID NO: 317003
cuccguguucucuuguaua

SEQ ID NO: 456912 - RNA, 19 nt, Artificial Sequence
  Description of Artificial Sequence: Synthetic oligonucleotide
  Antisense Strand to SEQ ID NO: 456911
uauacaagagaacacggag

SEQ ID NO: 456913 - RNA, 19 nt, Artificial Sequence
  Description of Artificial Sequence: Synthetic oligonucleotide
  Sense strand starting at position 3082 of SEQ ID NO: 317003
cuuguauaagggcaauuau

SEQ ID NO: 456914 - RNA, 19 nt, Artificial Sequence
  Description of Artificial Sequence: Synthetic oligonucleotide
  Antisense Strand to SEQ ID NO: 456913
auaauugcccuuauacaag

SEQ ID NO: 456915 - RNA, 19 nt, Artificial Sequence
  Description of Artificial Sequence: Synthetic oligonucleotide
  Sense strand starting at position 3609 of SEQ ID NO: 317003
gcuacugaucuguacauua

SEQ ID NO: 456916 - RNA, 19 nt, Artificial Sequence
  Description of Artificial Sequence: Synthetic oligonucleotide
  Antisense Strand to SEQ ID NO: 456915
uaauguacagaucaguagc

SEQ ID NO: 456917 - RNA, 19 nt, Artificial Sequence
  Description of Artificial Sequence: Synthetic oligonucleotide
  Sense strand starting at position 3862 of SEQ ID NO: 317003
aguagugaaugguuauaua

SEQ ID NO: 456918 - RNA, 19 nt, Artificial Sequence
  Description of Artificial Sequence: Synthetic oligonucleotide
  Antisense Strand to SEQ ID NO: 456917
uauauaaccauucacuacu

SEQ ID NO: 456919 - RNA, 19 nt, Artificial Sequence
  Description of Artificial Sequence: Synthetic oligonucleotide
  Sense strand starting at position 3896 of SEQ ID NO: 317003
auaguaagaaugcgaaugu

SEQ ID NO: 456920 - RNA, 19 nt, Artificial Sequence
  Description of Artificial Sequence: Synthetic oligonucleotide
  Antisense Strand to SEQ ID NO: 456919
acauucgcauucuuacuau

SEQ ID NO: 456921 - RNA, 19 nt, Artificial Sequence
  Description of Artificial Sequence: Synthetic oligonucleotide
  Sense strand starting at position 76 of SEQ ID NO: 317004
uucucuauagguugagagu

SEQ ID NO: 456922 - RNA, 19 nt, Artificial Sequence
  Description of Artificial Sequence: Synthetic oligonucleotide
  Antisense Strand to SEQ ID NO: 456921
acucucaaccuauagagaa

SEQ ID NO: 456923 - RNA, 19 nt, Artificial Sequence
  Description of Artificial Sequence: Synthetic oligonucleotide
  Sense strand starting at position 102 of SEQ ID NO: 317004
gccaaagauugcucccauu

SEQ ID NO: 456924 - RNA, 19 nt, Artificial Sequence
  Description of Artificial Sequence: Synthetic oligonucleotide
  Antisense Strand to SEQ ID NO: 456923
aaugggagcaaucuuuggc

SEQ ID NO: 456925 - RNA, 19 nt, Artificial Sequence
  Description of Artificial Sequence: Synthetic oligonucleotide
  Sense strand starting at position 172 of SEQ ID NO: 317004
ggcgaaagccaguauuugu

SEQ ID NO: 456926 - RNA, 19 nt, Artificial Sequence
  Description of Artificial Sequence: Synthetic oligonucleotide
  Antisense Strand to SEQ ID NO: 456925
acaaauacuggcuuucgcc

SEQ ID NO: 456927 - RNA, 19 nt, Artificial Sequence
  Description of Artificial Sequence: Synthetic oligonucleotide
  Sense strand starting at position 186 of SEQ ID NO: 317004
uuuguuguggcuuaauaua

SEQ ID NO: 456928 - RNA, 19 nt, Artificial Sequence
  Description of Artificial Sequence: Synthetic oligonucleotide
  Antisense Strand to SEQ ID NO: 456927
uauauuaagccacaacaaa

SEQ ID NO: 456929 - RNA, 19 nt, Artificial Sequence
  Description of Artificial Sequence: Synthetic oligonucleotide
  Sense strand starting at position 321 of SEQ ID NO: 317004
cuuaucuaugcccauguau

SEQ ID NO: 456930 - RNA, 19 nt, Artificial Sequence
  Description of Artificial Sequence: Synthetic oligonucleotide
  Antisense Strand to SEQ ID NO: 456929
auacaugggcauagauaag

SEQ ID NO: 456931 - RNA, 19 nt, Artificial Sequence
  Description of Artificial Sequence: Synthetic oligonucleotide
  Sense strand starting at position 375 of SEQ ID NO: 317004
auagaagaaacguguacau

SEQ ID NO: 456932 - RNA, 19 nt, Artificial Sequence
  Description of Artificial Sequence: Synthetic oligonucleotide
  Antisense Strand to SEQ ID NO: 456931
auguacacguuucuucuau

SEQ ID NO: 456933 - RNA, 19 nt, Artificial Sequence
  Description of Artificial Sequence: Synthetic oligonucleotide
  Sense strand starting at position 377 of SEQ ID NO: 317004
agaagaaacguguacaucu

SEQ ID NO: 456934 - RNA, 19 nt, Artificial Sequence
  Description of Artificial Sequence: Synthetic oligonucleotide
  Antisense Strand to SEQ ID NO: 456933
agauguacacguuucuucu

SEQ ID NO: 456935 - RNA, 19 nt, Artificial Sequence
  Description of Artificial Sequence: Synthetic oligonucleotide
  Sense strand starting at position 415 of SEQ ID NO: 317004
cuucuagaaucuucuugga

SEQ ID NO: 456936 - RNA, 19 nt, Artificial Sequence
  Description of Artificial Sequence: Synthetic oligonucleotide
  Antisense Strand to SEQ ID NO: 456935
uccaagaagauucuagaag

SEQ ID NO: 456937 - RNA, 19 nt, Artificial Sequence
  Description of Artificial Sequence: Synthetic oligonucleotide
  Sense strand starting at position 510 of SEQ ID NO: 317004
aauaguaaaugaggcauuu

SEQ ID NO: 456938 - RNA, 19 nt, Artificial Sequence
  Description of Artificial Sequence: Synthetic oligonucleotide
  Antisense Strand to SEQ ID NO: 456937
aaaugccucauuuacuauu

SEQ ID NO: 456939 - RNA, 19 nt, Artificial Sequence
  Description of Artificial Sequence: Synthetic oligonucleotide
  Sense strand starting at position 648 of SEQ ID NO: 317004
acaguugguuuccucauaa

SEQ ID NO: 456940 - RNA, 19 nt, Artificial Sequence
  Description of Artificial Sequence: Synthetic oligonucleotide
  Antisense Strand to SEQ ID NO: 456939
uuaugaggaaaccaacugu

SEQ ID NO: 456941 - RNA, 19 nt, Artificial Sequence
  Description of Artificial Sequence: Synthetic oligonucleotide
  Sense strand starting at position 777 of SEQ ID NO: 317004
guggaaacauguuuccaug

SEQ ID NO: 456942 - RNA, 19 nt, Artificial Sequence
  Description of Artificial Sequence: Synthetic oligonucleotide
  Antisense Strand to SEQ ID NO: 456941
cauggaaacauguuuccac

SEQ ID NO: 456943 - RNA, 19 nt, Artificial Sequence
  Description of Artificial Sequence: Synthetic oligonucleotide
  Sense strand starting at position 989 of SEQ ID NO: 317004
cgaggcucucccuaucaau

SEQ ID NO: 456944 - RNA, 19 nt, Artificial Sequence
  Description of Artificial Sequence: Synthetic oligonucleotide
  Antisense Strand to SEQ ID NO: 456943
auugauagggagagccucg

SEQ ID NO: 456945 - RNA, 19 nt, Artificial Sequence
  Description of Artificial Sequence: Synthetic oligonucleotide
  Sense strand starting at position 1246 of SEQ ID NO: 317004
ccgauaaucccacguaaac

SEQ ID NO: 456946 - RNA, 19 nt, Artificial Sequence
  Description of Artificial Sequence: Synthetic oligonucleotide
  Antisense Strand to SEQ ID NO: 456945
guuuacgugggauuaucgg

SEQ ID NO: 456947 - RNA, 19 nt, Artificial Sequence
  Description of Artificial Sequence: Synthetic oligonucleotide
  Sense strand starting at position 1257 of SEQ ID NO: 317004
acguaaaccucguuagagg

SEQ ID NO: 456948 - RNA, 19 nt, Artificial Sequence
  Description of Artificial Sequence: Synthetic oligonucleotide
  Antisense Strand to SEQ ID NO: 456947
ccucuaacgagguuuacgu

SEQ ID NO: 456949 - RNA, 19 nt, Artificial Sequence
  Description of Artificial Sequence: Synthetic oligonucleotide
  Sense strand starting at position 1272 of SEQ ID NO: 317004
gaggcaaccggagaucuuu

SEQ ID NO: 456950 - RNA, 19 nt, Artificial Sequence
  Description of Artificial Sequence: Synthetic oligonucleotide
  Antisense Strand to SEQ ID NO: 456949
aaagaucuccgguugccuc

SEQ ID NO: 456951 - RNA, 19 nt, Artificial Sequence
  Description of Artificial Sequence: Synthetic oligonucleotide
  Sense strand starting at position 1280 of SEQ ID NO: 317004
cggagaucuuucucaauau

SEQ ID NO: 456952 - RNA, 19 nt, Artificial Sequence
  Description of Artificial Sequence: Synthetic oligonucleotide
  Antisense Strand to SEQ ID NO: 456951
auauugagaaagaucuccg

SEQ ID NO: 456953 - RNA, 19 nt, Artificial Sequence
  Description of Artificial Sequence: Synthetic oligonucleotide
  Sense strand starting at position 1399 of SEQ ID NO: 317004
aagagagcugcgcaaacua

SEQ ID NO: 456954 - RNA, 19 nt, Artificial Sequence
  Description of Artificial Sequence: Synthetic oligonucleotide
  Antisense Strand to SEQ ID NO: 456953
uaguuugcgcagcucucuu

SEQ ID NO: 456955 - RNA, 19 nt, Artificial Sequence
  Description of Artificial Sequence: Synthetic oligonucleotide
  Sense strand starting at position 1614 of SEQ ID NO: 317004
cgaggugaugcucagcaga

SEQ ID NO: 456956 - RNA, 19 nt, Artificial Sequence
  Description of Artificial Sequence: Synthetic oligonucleotide
  Antisense Strand to SEQ ID NO: 456955
ucugcugagcaucaccucg

SEQ ID NO: 456957 - RNA, 19 nt, Artificial Sequence
  Description of Artificial Sequence: Synthetic oligonucleotide
  Sense strand starting at position 2621 of SEQ ID NO: 317004
gcgggaugagcacauguua

SEQ ID NO: 456958 - RNA, 19 nt, Artificial Sequence
  Description of Artificial Sequence: Synthetic oligonucleotide
  Antisense Strand to SEQ ID NO: 456957
uaacaugugcucaucccgc

SEQ ID NO: 456959 - RNA, 19 nt, Artificial Sequence
  Description of Artificial Sequence: Synthetic oligonucleotide
  Sense strand starting at position 2658 of SEQ ID NO: 317004
ucagcaggauuugaaauau

SEQ ID NO: 456960 - RNA, 19 nt, Artificial Sequence
  Description of Artificial Sequence: Synthetic oligonucleotide
  Antisense Strand to SEQ ID NO: 456959
auauuucaaauccugcuga

SEQ ID NO: 456961 - RNA, 19 nt, Artificial Sequence
  Description of Artificial Sequence: Synthetic oligonucleotide
  Sense strand starting at position 2681 of SEQ ID NO: 317004
agucaaacuucugucaaga

SEQ ID NO: 456962 - RNA, 19 nt, Artificial Sequence
  Description of Artificial Sequence: Synthetic oligonucleotide
  Antisense Strand to SEQ ID NO: 456961
ucuugacagaaguuugacu

SEQ ID NO: 456963 - RNA, 19 nt, Artificial Sequence
  Description of Artificial Sequence: Synthetic oligonucleotide
  Sense strand starting at position 2774 of SEQ ID NO: 317004
ugacccuugucucuggaaa

SEQ ID NO: 456964 - RNA, 19 nt, Artificial Sequence
  Description of Artificial Sequence: Synthetic oligonucleotide
  Antisense Strand to SEQ ID NO: 456963
uuuccagagacaaggguca

SEQ ID NO: 456965 - RNA, 19 nt, Artificial Sequence
  Description of Artificial Sequence: Synthetic oligonucleotide
  Sense strand starting at position 2775 of SEQ ID NO: 317004
gacccuugucucuggaaac

SEQ ID NO: 456966 - RNA, 19 nt, Artificial Sequence
  Description of Artificial Sequence: Synthetic oligonucleotide
  Antisense Strand to SEQ ID NO: 456965
guuuccagagacaaggguc

SEQ ID NO: 456967 - RNA, 19 nt, Artificial Sequence
  Description of Artificial Sequence: Synthetic oligonucleotide
  Sense strand starting at position 2933 of SEQ ID NO: 317004
auguguugccugucuguaa

SEQ ID NO: 456968 - RNA, 19 nt, Artificial Sequence
  Description of Artificial Sequence: Synthetic oligonucleotide
  Antisense Strand to SEQ ID NO: 456967
uuacagacaggcaacacau

SEQ ID NO: 456969 - RNA, 19 nt, Artificial Sequence
  Description of Artificial Sequence: Synthetic oligonucleotide
  Sense strand starting at position 2944 of SEQ ID NO: 317004
gucuguaauuaaccaaguu

SEQ ID NO: 456970 - RNA, 19 nt, Artificial Sequence
  Description of Artificial Sequence: Synthetic oligonucleotide
  Antisense Strand to SEQ ID NO: 456969
aacuugguuaauuacagac

SEQ ID NO: 456971 - RNA, 19 nt, Artificial Sequence
  Description of Artificial Sequence: Synthetic oligonucleotide
  Sense strand starting at position 3184 of SEQ ID NO: 317004
cuagauucuuuaguauucu

SEQ ID NO: 456972 - RNA, 19 nt, Artificial Sequence
  Description of Artificial Sequence: Synthetic oligonucleotide
  Antisense Strand to SEQ ID NO: 456971
agaauacuaaagaaucuag

SEQ ID NO: 456973 - RNA, 19 nt, Artificial Sequence
  Description of Artificial Sequence: Synthetic oligonucleotide
  Sense strand starting at position 3199 of SEQ ID NO: 317004
uucugauuaucccuaguug

SEQ ID NO: 456974 - RNA, 19 nt, Artificial Sequence
  Description of Artificial Sequence: Synthetic oligonucleotide
  Antisense Strand to SEQ ID NO: 456973
caacuagggauaaucagaa

SEQ ID NO: 456975 - RNA, 19 nt, Artificial Sequence
  Description of Artificial Sequence: Synthetic oligonucleotide
  Sense strand starting at position 3200 of SEQ ID NO: 317004
ucugauuaucccuaguugu

SEQ ID NO: 456976 - RNA, 19 nt, Artificial Sequence
  Description of Artificial Sequence: Synthetic oligonucleotide
  Antisense Strand to SEQ ID NO: 456975
acaacuagggauaaucaga

SEQ ID NO: 456977 - RNA, 19 nt, Artificial Sequence
  Description of Artificial Sequence: Synthetic oligonucleotide
  Sense strand starting at position 3214 of SEQ ID NO: 317004
guuguccacuucuuuaaau

SEQ ID NO: 456978 - RNA, 19 nt, Artificial Sequence
  Description of Artificial Sequence: Synthetic oligonucleotide
  Antisense Strand to SEQ ID NO: 456977
auuuaaagaaguggacaac

SEQ ID NO: 456979 - RNA, 19 nt, Artificial Sequence
  Description of Artificial Sequence: Synthetic oligonucleotide
  Sense strand starting at position 3308 of SEQ ID NO: 317004
uuagaaugaacgugaaauc

SEQ ID NO: 456980 - RNA, 19 nt, Artificial Sequence
  Description of Artificial Sequence: Synthetic oligonucleotide
  Antisense Strand to SEQ ID NO: 456979
gauuucacguucauucuaa

SEQ ID NO: 456981 - RNA, 19 nt, Artificial Sequence
  Description of Artificial Sequence: Synthetic oligonucleotide
  Sense strand starting at position 3374 of SEQ ID NO: 317004
gggcucuggucucuacauu

SEQ ID NO: 456982 - RNA, 19 nt, Artificial Sequence
  Description of Artificial Sequence: Synthetic oligonucleotide
  Antisense Strand to SEQ ID NO: 456981
aauguagagaccagagccc

SEQ ID NO: 456983 - RNA, 19 nt, Artificial Sequence
  Description of Artificial Sequence: Synthetic oligonucleotide
  Sense strand starting at position 3380 of SEQ ID NO: 317004
uggucucuacauugaagaa

SEQ ID NO: 456984 - RNA, 19 nt, Artificial Sequence
  Description of Artificial Sequence: Synthetic oligonucleotide
  Antisense Strand to SEQ ID NO: 456983
uucuucaauguagagacca

SEQ ID NO: 456985 - RNA, 19 nt, Artificial Sequence
  Description of Artificial Sequence: Synthetic oligonucleotide
  Sense strand starting at position 3613 of SEQ ID NO: 317004
ggccaucacuaucuagauu

SEQ ID NO: 456986 - RNA, 19 nt, Artificial Sequence
  Description of Artificial Sequence: Synthetic oligonucleotide
  Antisense Strand to SEQ ID NO: 456985
aaucuagauagugauggcc

SEQ ID NO: 456987 - RNA, 19 nt, Artificial Sequence
  Description of Artificial Sequence: Synthetic oligonucleotide
  Sense strand starting at position 3682 of SEQ ID NO: 317004
ccauuaguuuauccauguu

SEQ ID NO: 456988 - RNA, 19 nt, Artificial Sequence
  Description of Artificial Sequence: Synthetic oligonucleotide
  Antisense Strand to SEQ ID NO: 456987
aacauggauaaacuaaugg

SEQ ID NO: 456989 - RNA, 19 nt, Artificial Sequence
  Description of Artificial Sequence: Synthetic oligonucleotide
  Sense strand starting at position 3692 of SEQ ID NO: 317004
auccauguugucuauacaa

SEQ ID NO: 456990 - RNA, 19 nt, Artificial Sequence
  Description of Artificial Sequence: Synthetic oligonucleotide
  Antisense Strand to SEQ ID NO: 456989
uuguauagacaacauggau

SEQ ID NO: 456991 - RNA, 19 nt, Artificial Sequence
  Description of Artificial Sequence: Synthetic oligonucleotide
  Sense strand starting at position 3694 of SEQ ID NO: 317004
ccauguugucuauacaacu

SEQ ID NO: 456992 - RNA, 19 nt, Artificial Sequence
  Description of Artificial Sequence: Synthetic oligonucleotide
  Antisense Strand to SEQ ID NO: 456991
aguuguauagacaacaugg

SEQ ID NO: 456993 - RNA, 19 nt, Artificial Sequence
  Description of Artificial Sequence: Synthetic oligonucleotide
  Sense strand starting at position 3707 of SEQ ID NO: 317004
acaacuugaggguguaaga

SEQ ID NO: 456994 - RNA, 19 nt, Artificial Sequence
  Description of Artificial Sequence: Synthetic oligonucleotide
  Antisense Strand to SEQ ID NO: 456993
ucuuacacccucaaguugu

SEQ ID NO: 456995 - RNA, 19 nt, Artificial Sequence
  Description of Artificial Sequence: Synthetic oligonucleotide
  Sense strand starting at position 3842 of SEQ ID NO: 317004
gagaguacccagugguuaa

SEQ ID NO: 456996 - RNA, 19 nt, Artificial Sequence
  Description of Artificial Sequence: Synthetic oligonucleotide
  Antisense Strand to SEQ ID NO: 456995
uuaaccacuggguacucuc

SEQ ID NO: 456997 - RNA, 19 nt, Artificial Sequence
  Description of Artificial Sequence: Synthetic oligonucleotide
  Sense strand starting at position 3843 of SEQ ID NO: 317004
agaguacccagugguuaaa

SEQ ID NO: 456998 - RNA, 19 nt, Artificial Sequence
  Description of Artificial Sequence: Synthetic oligonucleotide
  Antisense Strand to SEQ ID NO: 456997
uuuaaccacuggguacucu

SEQ ID NO: 456999 - RNA, 19 nt, Artificial Sequence
  Description of Artificial Sequence: Synthetic oligonucleotide
  Sense strand starting at position 3906 of SEQ ID NO: 317004
aggcuugccuaacuuacua

SEQ ID NO: 457000 - RNA, 19 nt, Artificial Sequence
  Description of Artificial Sequence: Synthetic oligonucleotide
  Antisense Strand to SEQ ID NO: 456999
uaguaaguuaggcaagccu

SEQ ID NO: 457001 - RNA, 19 nt, Artificial Sequence
  Description of Artificial Sequence: Synthetic oligonucleotide
  Sense strand starting at position 105 of SEQ ID NO: 317005
aauggagacuggcuuuaua

SEQ ID NO: 457002 - RNA, 19 nt, Artificial Sequence
  Description of Artificial Sequence: Synthetic oligonucleotide
  Antisense Strand to SEQ ID NO: 457001
uauaaagccagucuccauu

SEQ ID NO: 457003 - RNA, 19 nt, Artificial Sequence
  Description of Artificial Sequence: Synthetic oligonucleotide
  Sense strand starting at position 121 of SEQ ID NO: 317005
auaauaaagucagugacua

SEQ ID NO: 457004 - RNA, 19 nt, Artificial Sequence
  Description of Artificial Sequence: Synthetic oligonucleotide
  Antisense Strand to SEQ ID NO: 457003
uagucacugacuuuauuau

SEQ ID NO: 457005 - RNA, 19 nt, Artificial Sequence
  Description of Artificial Sequence: Synthetic oligonucleotide
  Sense strand starting at position 133 of SEQ ID NO: 317005
gugacuaugagccagaguu

SEQ ID NO: 457006 - RNA, 19 nt, Artificial Sequence
  Description of Artificial Sequence: Synthetic oligonucleotide
  Antisense Strand to SEQ ID NO: 457005
aacucuggcucauagucac

SEQ ID NO: 457007 - RNA, 19 nt, Artificial Sequence
  Description of Artificial Sequence: Synthetic oligonucleotide
  Sense strand starting at position 135 of SEQ ID NO: 317005
gacuaugagccagaguucu

SEQ ID NO: 457008 - RNA, 19 nt, Artificial Sequence
  Description of Artificial Sequence: Synthetic oligonucleotide
  Antisense Strand to SEQ ID NO: 457007
agaacucuggcucauaguc

SEQ ID NO: 457009 - RNA, 19 nt, Artificial Sequence
  Description of Artificial Sequence: Synthetic oligonucleotide
  Sense strand starting at position 171 of SEQ ID NO: 317005
ugguguaacccugagauua

SEQ ID NO: 457010 - RNA, 19 nt, Artificial Sequence
  Description of Artificial Sequence: Synthetic oligonucleotide
  Antisense Strand to SEQ ID NO: 457009
uaaucucaggguuacacca

SEQ ID NO: 457011 - RNA, 19 nt, Artificial Sequence
  Description of Artificial Sequence: Synthetic oligonucleotide
  Sense strand starting at position 197 of SEQ ID NO: 317005
agugauauuggguagcgaa

SEQ ID NO: 457012 - RNA, 19 nt, Artificial Sequence
  Description of Artificial Sequence: Synthetic oligonucleotide
  Antisense Strand to SEQ ID NO: 457011
uucgcuacccaauaucacu

SEQ ID NO: 457013 - RNA, 19 nt, Artificial Sequence
  Description of Artificial Sequence: Synthetic oligonucleotide
  Sense strand starting at position 315 of SEQ ID NO: 317005
aaguuagccucaucuggga

SEQ ID NO: 457014 - RNA, 19 nt, Artificial Sequence
  Description of Artificial Sequence: Synthetic oligonucleotide
  Antisense Strand to SEQ ID NO: 457013
ucccagaugaggcuaacuu

SEQ ID NO: 457015 - RNA, 19 nt, Artificial Sequence
  Description of Artificial Sequence: Synthetic oligonucleotide
  Sense strand starting at position 375 of SEQ ID NO: 317005
aguuccuuugcagauauaa

SEQ ID NO: 457016 - RNA, 19 nt, Artificial Sequence
  Description of Artificial Sequence: Synthetic oligonucleotide
  Antisense Strand to SEQ ID NO: 457015
uuauaucugcaaaggaacu

SEQ ID NO: 457017 - RNA, 19 nt, Artificial Sequence
  Description of Artificial Sequence: Synthetic oligonucleotide
  Sense strand starting at position 397 of SEQ ID NO: 317005
aguauagcagguuacuuau

SEQ ID NO: 457018 - RNA, 19 nt, Artificial Sequence
  Description of Artificial Sequence: Synthetic oligonucleotide
  Antisense Strand to SEQ ID NO: 457017
auaaguaaccugcuauacu

SEQ ID NO: 457019 - RNA, 19 nt, Artificial Sequence
  Description of Artificial Sequence: Synthetic oligonucleotide
  Sense strand starting at position 560 of SEQ ID NO: 317005
ucuuuccugucauuuguga

SEQ ID NO: 457020 - RNA, 19 nt, Artificial Sequence
  Description of Artificial Sequence: Synthetic oligonucleotide
  Antisense Strand to SEQ ID NO: 457019
ucacaaaugacaggaaaga

SEQ ID NO: 457021 - RNA, 19 nt, Artificial Sequence
  Description of Artificial Sequence: Synthetic oligonucleotide
  Sense strand starting at position 847 of SEQ ID NO: 317005
uguuaaugauugucaauuc

SEQ ID NO: 457022 - RNA, 19 nt, Artificial Sequence
  Description of Artificial Sequence: Synthetic oligonucleotide
  Antisense Strand to SEQ ID NO: 457021
gaauugacaaucauuaaca

SEQ ID NO: 457023 - RNA, 19 nt, Artificial Sequence
  Description of Artificial Sequence: Synthetic oligonucleotide
  Sense strand starting at position 894 of SEQ ID NO: 317005
cuaagaaauuggucuucuu

SEQ ID NO: 457024 - RNA, 19 nt, Artificial Sequence
  Description of Artificial Sequence: Synthetic oligonucleotide
  Antisense Strand to SEQ ID NO: 457023
aagaagaccaauuucuuag

SEQ ID NO: 457025 - RNA, 19 nt, Artificial Sequence
  Description of Artificial Sequence: Synthetic oligonucleotide
  Sense strand starting at position 1117 of SEQ ID NO: 317005
gcauuauaacagcacuguu

SEQ ID NO: 457026 - RNA, 19 nt, Artificial Sequence
  Description of Artificial Sequence: Synthetic oligonucleotide
  Antisense Strand to SEQ ID NO: 457025
aacagugcuguuauaaugc

SEQ ID NO: 457027 - RNA, 19 nt, Artificial Sequence
  Description of Artificial Sequence: Synthetic oligonucleotide
  Sense strand starting at position 1236 of SEQ ID NO: 317005
gagagaauuuaucaguauc

SEQ ID NO: 457028 - RNA, 19 nt, Artificial Sequence
  Description of Artificial Sequence: Synthetic oligonucleotide
  Antisense Strand to SEQ ID NO: 457027
gauacugauaaauucucuc

SEQ ID NO: 457029 - RNA, 19 nt, Artificial Sequence
  Description of Artificial Sequence: Synthetic oligonucleotide
  Sense strand starting at position 1246 of SEQ ID NO: 317005
aucaguaucuucuuguaaa

SEQ ID NO: 457030 - RNA, 19 nt, Artificial Sequence
  Description of Artificial Sequence: Synthetic oligonucleotide
  Antisense Strand to SEQ ID NO: 457029
uuuacaagaagauacugau

SEQ ID NO: 457031 - RNA, 19 nt, Artificial Sequence
  Description of Artificial Sequence: Synthetic oligonucleotide
  Sense strand starting at position 1267 of SEQ ID NO: 317005
uugaacuccugguuuaagu

SEQ ID NO: 457032 - RNA, 19 nt, Artificial Sequence
  Description of Artificial Sequence: Synthetic oligonucleotide
  Antisense Strand to SEQ ID NO: 457031
acuuaaaccaggaguucaa

SEQ ID NO: 457033 - RNA, 19 nt, Artificial Sequence
  Description of Artificial Sequence: Synthetic oligonucleotide
  Sense strand starting at position 1269 of SEQ ID NO: 317005
gaacuccugguuuaaguua

SEQ ID NO: 457034 - RNA, 19 nt, Artificial Sequence
  Description of Artificial Sequence: Synthetic oligonucleotide
  Antisense Strand to SEQ ID NO: 457033
uaacuuaaaccaggaguuc

SEQ ID NO: 457035 - RNA, 19 nt, Artificial Sequence
  Description of Artificial Sequence: Synthetic oligonucleotide
  Sense strand starting at position 1311 of SEQ ID NO: 317005
aguagauauuagguaucua

SEQ ID NO: 457036 - RNA, 19 nt, Artificial Sequence
  Description of Artificial Sequence: Synthetic oligonucleotide
  Antisense Strand to SEQ ID NO: 457035
uagauaccuaauaucuacu

SEQ ID NO: 457037 - RNA, 19 nt, Artificial Sequence
  Description of Artificial Sequence: Synthetic oligonucleotide
  Sense strand starting at position 1315 of SEQ ID NO: 317005
gauauuagguaucuagaca

SEQ ID NO: 457038 - RNA, 19 nt, Artificial Sequence
  Description of Artificial Sequence: Synthetic oligonucleotide
  Antisense Strand to SEQ ID NO: 457037
ugucuagauaccuaauauc

SEQ ID NO: 457039 - RNA, 19 nt, Artificial Sequence
  Description of Artificial Sequence: Synthetic oligonucleotide
  Sense strand starting at position 1399 of SEQ ID NO: 317005
cauaauuuacuuugcguga

SEQ ID NO: 457040 - RNA, 19 nt, Artificial Sequence
  Description of Artificial Sequence: Synthetic oligonucleotide
  Antisense Strand to SEQ ID NO: 457039
ucacgcaaaguaaauuaug

SEQ ID NO: 457041 - RNA, 19 nt, Artificial Sequence
  Description of Artificial Sequence: Synthetic oligonucleotide
  Sense strand starting at position 1400 of SEQ ID NO: 317005
auaauuuacuuugcgugau

SEQ ID NO: 457042 - RNA, 19 nt, Artificial Sequence
  Description of Artificial Sequence: Synthetic oligonucleotide
  Antisense Strand to SEQ ID NO: 457041
aucacgcaaaguaaauuau

SEQ ID NO: 457043 - RNA, 19 nt, Artificial Sequence
  Description of Artificial Sequence: Synthetic oligonucleotide
  Sense strand starting at position 1402 of SEQ ID NO: 317005
aauuuacuuugcgugauga

SEQ ID NO: 457044 - RNA, 19 nt, Artificial Sequence
  Description of Artificial Sequence: Synthetic oligonucleotide
  Antisense Strand to SEQ ID NO: 457043
ucaucacgcaaaguaaauu

SEQ ID NO: 457045 - RNA, 19 nt, Artificial Sequence
  Description of Artificial Sequence: Synthetic oligonucleotide
  Sense strand starting at position 1403 of SEQ ID NO: 317005
auuuacuuugcgugaugau

SEQ ID NO: 457046 - RNA, 19 nt, Artificial Sequence
  Description of Artificial Sequence: Synthetic oligonucleotide
  Antisense Strand to SEQ ID NO: 457045
aucaucacgcaaaguaaau

SEQ ID NO: 457047 - RNA, 19 nt, Artificial Sequence
  Description of Artificial Sequence: Synthetic oligonucleotide
  Sense strand starting at position 1745 of SEQ ID NO: 317005
uaugguauucuauagguaa

SEQ ID NO: 457048 - RNA, 19 nt, Artificial Sequence
  Description of Artificial Sequence: Synthetic oligonucleotide
  Antisense Strand to SEQ ID NO: 457047
uuaccuauagaauaccaua

SEQ ID NO: 457049 - RNA, 19 nt, Artificial Sequence
  Description of Artificial Sequence: Synthetic oligonucleotide
  Sense strand starting at position 1748 of SEQ ID NO: 317005
gguauucuauagguaauau

SEQ ID NO: 457050 - RNA, 19 nt, Artificial Sequence
  Description of Artificial Sequence: Synthetic oligonucleotide
  Antisense Strand to SEQ ID NO: 457049
auauuaccuauagaauacc

SEQ ID NO: 457051 - RNA, 19 nt, Artificial Sequence
  Description of Artificial Sequence: Synthetic oligonucleotide
  Sense strand starting at position 1985 of SEQ ID NO: 317005
uucuauauggcugauguau

SEQ ID NO: 457052 - RNA, 19 nt, Artificial Sequence
  Description of Artificial Sequence: Synthetic oligonucleotide
  Antisense Strand to SEQ ID NO: 457051
auacaucagccauauagaa

SEQ ID NO: 457053 - RNA, 19 nt, Artificial Sequence
  Description of Artificial Sequence: Synthetic oligonucleotide
  Sense strand starting at position 2060 of SEQ ID NO: 317005
uaugauugagacggaaagu

SEQ ID NO: 457054 - RNA, 19 nt, Artificial Sequence
  Description of Artificial Sequence: Synthetic oligonucleotide
  Antisense Strand to SEQ ID NO: 457053
acuuuccgucucaaucaua

SEQ ID NO: 457055 - RNA, 19 nt, Artificial Sequence
  Description of Artificial Sequence: Synthetic oligonucleotide
  Sense strand starting at position 2484 of SEQ ID NO: 317005
uuacauugacuuugagugu

SEQ ID NO: 457056 - RNA, 19 nt, Artificial Sequence
  Description of Artificial Sequence: Synthetic oligonucleotide
  Antisense Strand to SEQ ID NO: 457055
acacucaaagucaauguaa

SEQ ID NO: 457057 - RNA, 19 nt, Artificial Sequence
  Description of Artificial Sequence: Synthetic oligonucleotide
  Sense strand starting at position 2766 of SEQ ID NO: 317005
ggcaaacauguauaagcau

SEQ ID NO: 457058 - RNA, 19 nt, Artificial Sequence
  Description of Artificial Sequence: Synthetic oligonucleotide
  Antisense Strand to SEQ ID NO: 457057
augcuuauacauguuugcc

SEQ ID NO: 457059 - RNA, 19 nt, Artificial Sequence
  Description of Artificial Sequence: Synthetic oligonucleotide
  Sense strand starting at position 2792 of SEQ ID NO: 317005
cucucuaccgguuggagaa

SEQ ID NO: 457060 - RNA, 19 nt, Artificial Sequence
  Description of Artificial Sequence: Synthetic oligonucleotide
  Antisense Strand to SEQ ID NO: 457059
uucuccaaccgguagagag

SEQ ID NO: 457061 - RNA, 19 nt, Artificial Sequence
  Description of Artificial Sequence: Synthetic oligonucleotide
  Sense strand starting at position 2793 of SEQ ID NO: 317005
ucucuaccgguuggagaau

SEQ ID NO: 457062 - RNA, 19 nt, Artificial Sequence
  Description of Artificial Sequence: Synthetic oligonucleotide
  Antisense Strand to SEQ ID NO: 457061
auucuccaaccgguagaga

SEQ ID NO: 457063 - RNA, 19 nt, Artificial Sequence
  Description of Artificial Sequence: Synthetic oligonucleotide
  Sense strand starting at position 2817 of SEQ ID NO: 317005
gugcuaagaacugaguauu

SEQ ID NO: 457064 - RNA, 19 nt, Artificial Sequence
  Description of Artificial Sequence: Synthetic oligonucleotide
  Antisense Strand to SEQ ID NO: 457063
aauacucaguucuuagcac

SEQ ID NO: 457065 - RNA, 19 nt, Artificial Sequence
  Description of Artificial Sequence: Synthetic oligonucleotide
  Sense strand starting at position 3026 of SEQ ID NO: 317005
ccaggaaacucuuugugua

SEQ ID NO: 457066 - RNA, 19 nt, Artificial Sequence
  Description of Artificial Sequence: Synthetic oligonucleotide
  Antisense Strand to SEQ ID NO: 457065
uacacaaagaguuuccugg

SEQ ID NO: 457067 - RNA, 19 nt, Artificial Sequence
  Description of Artificial Sequence: Synthetic oligonucleotide
  Sense strand starting at position 3027 of SEQ ID NO: 317005
caggaaacucuuuguguac

SEQ ID NO: 457068 - RNA, 19 nt, Artificial Sequence
  Description of Artificial Sequence: Synthetic oligonucleotide
  Antisense Strand to SEQ ID NO: 457067
guacacaaagaguuuccug

SEQ ID NO: 457069 - RNA, 19 nt, Artificial Sequence
  Description of Artificial Sequence: Synthetic oligonucleotide
  Sense strand starting at position 3028 of SEQ ID NO: 317005
aggaaacucuuuguguacu

SEQ ID NO: 457070 - RNA, 19 nt, Artificial Sequence
  Description of Artificial Sequence: Synthetic oligonucleotide
  Antisense Strand to SEQ ID NO: 457069
aguacacaaagaguuuccu

SEQ ID NO: 457071 - RNA, 19 nt, Artificial Sequence
  Description of Artificial Sequence: Synthetic oligonucleotide
  Sense strand starting at position 3036 of SEQ ID NO: 317005
cuuuguguacuuuaaagau

SEQ ID NO: 457072 - RNA, 19 nt, Artificial Sequence
  Description of Artificial Sequence: Synthetic oligonucleotide
  Antisense Strand to SEQ ID NO: 457071
aucuuuaaaguacacaaag

SEQ ID NO: 457073 - RNA, 19 nt, Artificial Sequence
  Description of Artificial Sequence: Synthetic oligonucleotide
  Sense strand starting at position 3087 of SEQ ID NO: 317005
ggucuuuagcuugauccca

SEQ ID NO: 457074 - RNA, 19 nt, Artificial Sequence
  Description of Artificial Sequence: Synthetic oligonucleotide
  Antisense Strand to SEQ ID NO: 457073
ugggaucaagcuaaagacc

SEQ ID NO: 457075 - RNA, 19 nt, Artificial Sequence
  Description of Artificial Sequence: Synthetic oligonucleotide
  Sense strand starting at position 3095 of SEQ ID NO: 317005
gcuugaucccacuaauuag

SEQ ID NO: 457076 - RNA, 19 nt, Artificial Sequence
  Description of Artificial Sequence: Synthetic oligonucleotide
  Antisense Strand to SEQ ID NO: 457075
cuaauuagugggaucaagc

SEQ ID NO: 457077 - RNA, 19 nt, Artificial Sequence
  Description of Artificial Sequence: Synthetic oligonucleotide
  Sense strand starting at position 3842 of SEQ ID NO: 317005
ugucaacauuguucuugaa

SEQ ID NO: 457078 - RNA, 19 nt, Artificial Sequence
  Description of Artificial Sequence: Synthetic oligonucleotide
  Antisense Strand to SEQ ID NO: 457077
uucaagaacaauguugaca

SEQ ID NO: 457079 - RNA, 19 nt, Artificial Sequence
  Description of Artificial Sequence: Synthetic oligonucleotide
  Sense strand starting at position 3954 of SEQ ID NO: 317005
ugaacuaugucugauuuaa

SEQ ID NO: 457080 - RNA, 19 nt, Artificial Sequence
  Description of Artificial Sequence: Synthetic oligonucleotide
  Antisense Strand to SEQ ID NO: 457079
uuaaaucagacauaguuca

SEQ ID NO: 457081 - RNA, 19 nt, Artificial Sequence
  Description of Artificial Sequence: Synthetic oligonucleotide
  Sense strand starting at position 77 of SEQ ID NO: 317006
uugauaaauaaaggugagu

SEQ ID NO: 457082 - RNA, 19 nt, Artificial Sequence
  Description of Artificial Sequence: Synthetic oligonucleotide
  Antisense Strand to SEQ ID NO: 457081
acucaccuuuauuuaucaa

SEQ ID NO: 457083 - RNA, 19 nt, Artificial Sequence
  Description of Artificial Sequence: Synthetic oligonucleotide
  Sense strand starting at position 83 of SEQ ID NO: 317006
aauaaaggugagugcucua

SEQ ID NO: 457084 - RNA, 19 nt, Artificial Sequence
  Description of Artificial Sequence: Synthetic oligonucleotide
  Antisense Strand to SEQ ID NO: 457083
uagagcacucaccuuuauu

SEQ ID NO: 457085 - RNA, 19 nt, Artificial Sequence
  Description of Artificial Sequence: Synthetic oligonucleotide
  Sense strand starting at position 86 of SEQ ID NO: 317006
aaaggugagugcucuaauu

SEQ ID NO: 457086 - RNA, 19 nt, Artificial Sequence
  Description of Artificial Sequence: Synthetic oligonucleotide
  Antisense Strand to SEQ ID NO: 457085
aauuagagcacucaccuuu

SEQ ID NO: 457087 - RNA, 19 nt, Artificial Sequence
  Description of Artificial Sequence: Synthetic oligonucleotide
  Sense strand starting at position 353 of SEQ ID NO: 317006
ggauuuagauaaugacauu

SEQ ID NO: 457088 - RNA, 19 nt, Artificial Sequence
  Description of Artificial Sequence: Synthetic oligonucleotide
  Antisense Strand to SEQ ID NO: 457087
aaugucauuaucuaaaucc

SEQ ID NO: 457089 - RNA, 19 nt, Artificial Sequence
  Description of Artificial Sequence: Synthetic oligonucleotide
  Sense strand starting at position 454 of SEQ ID NO: 317006
cagugaauaugagccagau

SEQ ID NO: 457090 - RNA, 19 nt, Artificial Sequence
  Description of Artificial Sequence: Synthetic oligonucleotide
  Antisense Strand to SEQ ID NO: 457089
aucuggcucauauucacug

SEQ ID NO: 457091 - RNA, 19 nt, Artificial Sequence
  Description of Artificial Sequence: Synthetic oligonucleotide
  Sense strand starting at position 495 of SEQ ID NO: 317006
uggugcaaccuugagauua

SEQ ID NO: 457092 - RNA, 19 nt, Artificial Sequence
  Description of Artificial Sequence: Synthetic oligonucleotide
  Antisense Strand to SEQ ID NO: 457091
uaaucucaagguugcacca

SEQ ID NO: 457093 - RNA, 19 nt, Artificial Sequence
  Description of Artificial Sequence: Synthetic oligonucleotide
  Sense strand starting at position 518 of SEQ ID NO: 317006
auuaaugguauugguuaga

SEQ ID NO: 457094 - RNA, 19 nt, Artificial Sequence
  Description of Artificial Sequence: Synthetic oligonucleotide
  Antisense Strand to SEQ ID NO: 457093
ucuaaccaauaccauuaau

SEQ ID NO: 457095 - RNA, 19 nt, Artificial Sequence
  Description of Artificial Sequence: Synthetic oligonucleotide
  Sense strand starting at position 692 of SEQ ID NO: 317006
aguucuucggcugauauaa

SEQ ID NO: 457096 - RNA, 19 nt, Artificial Sequence
  Description of Artificial Sequence: Synthetic oligonucleotide
  Antisense Strand to SEQ ID NO: 457095
uuauaucagccgaagaacu

SEQ ID NO: 457097 - RNA, 19 nt, Artificial Sequence
  Description of Artificial Sequence: Synthetic oligonucleotide
  Sense strand starting at position 714 of SEQ ID NO: 317006
aguaaagcggauuacuuau

SEQ ID NO: 457098 - RNA, 19 nt, Artificial Sequence
  Description of Artificial Sequence: Synthetic oligonucleotide
  Antisense Strand to SEQ ID NO: 457097
auaaguaauccgcuuuacu

SEQ ID NO: 457099 - RNA, 19 nt, Artificial Sequence
  Description of Artificial Sequence: Synthetic oligonucleotide
  Sense strand starting at position 815 of SEQ ID NO: 317006
auuuguuaguugcuagcua

SEQ ID NO: 457100 - RNA, 19 nt, Artificial Sequence
  Description of Artificial Sequence: Synthetic oligonucleotide
  Antisense Strand to SEQ ID NO: 457099
uagcuagcaacuaacaaau

SEQ ID NO: 457101 - RNA, 19 nt, Artificial Sequence
  Description of Artificial Sequence: Synthetic oligonucleotide
  Sense strand starting at position 822 of SEQ ID NO: 317006
aguugcuagcuauaaagua

SEQ ID NO: 457102 - RNA, 19 nt, Artificial Sequence
  Description of Artificial Sequence: Synthetic oligonucleotide
  Antisense Strand to SEQ ID NO: 457101
uacuuuauagcuagcaacu

SEQ ID NO: 457103 - RNA, 19 nt, Artificial Sequence
  Description of Artificial Sequence: Synthetic oligonucleotide
  Sense strand starting at position 902 of SEQ ID NO: 317006
agaacauuacaguaacguu

SEQ ID NO: 457104 - RNA, 19 nt, Artificial Sequence
  Description of Artificial Sequence: Synthetic oligonucleotide
  Antisense Strand to SEQ ID NO: 457103
aacguuacuguaauguucu

SEQ ID NO: 457105 - RNA, 19 nt, Artificial Sequence
  Description of Artificial Sequence: Synthetic oligonucleotide
  Sense strand starting at position 1387 of SEQ ID NO: 317006
ugagaagacuaauuguuau

SEQ ID NO: 457106 - RNA, 19 nt, Artificial Sequence
  Description of Artificial Sequence: Synthetic oligonucleotide
  Antisense Strand to SEQ ID NO: 457105
auaacaauuagucuucuca

SEQ ID NO: 457107 - RNA, 19 nt, Artificial Sequence
  Description of Artificial Sequence: Synthetic oligonucleotide
  Sense strand starting at position 1542 of SEQ ID NO: 317006
aucuaucaguaucuuguaa

SEQ ID NO: 457108 - RNA, 19 nt, Artificial Sequence
  Description of Artificial Sequence: Synthetic oligonucleotide
  Antisense Strand to SEQ ID NO: 457107
uuacaagauacugauagau

SEQ ID NO: 457109 - RNA, 19 nt, Artificial Sequence
  Description of Artificial Sequence: Synthetic oligonucleotide
  Sense strand starting at position 1612 of SEQ ID NO: 317006
ucagguaucuaggcaagga

SEQ ID NO: 457110 - RNA, 19 nt, Artificial Sequence
  Description of Artificial Sequence: Synthetic oligonucleotide
  Antisense Strand to SEQ ID NO: 457109
uccuugccuagauaccuga

SEQ ID NO: 457111 - RNA, 19 nt, Artificial Sequence
  Description of Artificial Sequence: Synthetic oligonucleotide
  Sense strand starting at position 1616 of SEQ ID NO: 317006
guaucuaggcaaggaaaua

SEQ ID NO: 457112 - RNA, 19 nt, Artificial Sequence
  Description of Artificial Sequence: Synthetic oligonucleotide
  Antisense Strand to SEQ ID NO: 457111
uauuuccuugccuagauac

SEQ ID NO: 457113 - RNA, 19 nt, Artificial Sequence
  Description of Artificial Sequence: Synthetic oligonucleotide
  Sense strand starting at position 1680 of SEQ ID NO: 317006
ugccauauuccacauuagu

SEQ ID NO: 457114 - RNA, 19 nt, Artificial Sequence
  Description of Artificial Sequence: Synthetic oligonucleotide
  Antisense Strand to SEQ ID NO: 457113
acuaauguggaauauggca

SEQ ID NO: 457115 - RNA, 19 nt, Artificial Sequence
  Description of Artificial Sequence: Synthetic oligonucleotide
  Sense strand starting at position 1697 of SEQ ID NO: 317006
guuacuuugcaugaugauu

SEQ ID NO: 457116 - RNA, 19 nt, Artificial Sequence
  Description of Artificial Sequence: Synthetic oligonucleotide
  Antisense Strand to SEQ ID NO: 457115
aaucaucaugcaaaguaac

SEQ ID NO: 457117 - RNA, 19 nt, Artificial Sequence
  Description of Artificial Sequence: Synthetic oligonucleotide
  Sense strand starting at position 1878 of SEQ ID NO: 317006
auuguacuugaacauguua

SEQ ID NO: 457118 - RNA, 19 nt, Artificial Sequence
  Description of Artificial Sequence: Synthetic oligonucleotide
  Antisense Strand to SEQ ID NO: 457117
uaacauguucaaguacaau

SEQ ID NO: 457119 - RNA, 19 nt, Artificial Sequence
  Description of Artificial Sequence: Synthetic oligonucleotide
  Sense strand starting at position 2120 of SEQ ID NO: 317006
ccaggugauucugcaauag

SEQ ID NO: 457120 - RNA, 19 nt, Artificial Sequence
  Description of Artificial Sequence: Synthetic oligonucleotide
  Antisense Strand to SEQ ID NO: 457119
cuauugcagaaucaccugg

SEQ ID NO: 457121 - RNA, 19 nt, Artificial Sequence
  Description of Artificial Sequence: Synthetic oligonucleotide
  Sense strand starting at position 2124 of SEQ ID NO: 317006
gugauucugcaauagauca

SEQ ID NO: 457122 - RNA, 19 nt, Artificial Sequence
  Description of Artificial Sequence: Synthetic oligonucleotide
  Antisense Strand to SEQ ID NO: 457121
ugaucuauugcagaaucac

SEQ ID NO: 457123 - RNA, 19 nt, Artificial Sequence
  Description of Artificial Sequence: Synthetic oligonucleotide
  Sense strand starting at position 2131 of SEQ ID NO: 317006
ugcaauagaucauugugaa

SEQ ID NO: 457124 - RNA, 19 nt, Artificial Sequence
  Description of Artificial Sequence: Synthetic oligonucleotide
  Antisense Strand to SEQ ID NO: 457123
uucacaaugaucuauugca

SEQ ID NO: 457125 - RNA, 19 nt, Artificial Sequence
  Description of Artificial Sequence: Synthetic oligonucleotide
  Sense strand starting at position 2132 of SEQ ID NO: 317006
gcaauagaucauugugaag

SEQ ID NO: 457126 - RNA, 19 nt, Artificial Sequence
  Description of Artificial Sequence: Synthetic oligonucleotide
  Antisense Strand to SEQ ID NO: 457125
cuucacaaugaucuauugc

SEQ ID NO: 457127 - RNA, 19 nt, Artificial Sequence
  Description of Artificial Sequence: Synthetic oligonucleotide
  Sense strand starting at position 2378 of SEQ ID NO: 317006
uuacacguucucuaguaaa

SEQ ID NO: 457128 - RNA, 19 nt, Artificial Sequence
  Description of Artificial Sequence: Synthetic oligonucleotide
  Antisense Strand to SEQ ID NO: 457127
uuuacuagagaacguguaa

SEQ ID NO: 457129 - RNA, 19 nt, Artificial Sequence
  Description of Artificial Sequence: Synthetic oligonucleotide
  Sense strand starting at position 2482 of SEQ ID NO: 317006
ugcuuacauugacuuagaa

SEQ ID NO: 457130 - RNA, 19 nt, Artificial Sequence
  Description of Artificial Sequence: Synthetic oligonucleotide
  Antisense Strand to SEQ ID NO: 457129
uucuaagucaauguaagca

SEQ ID NO: 457131 - RNA, 19 nt, Artificial Sequence
  Description of Artificial Sequence: Synthetic oligonucleotide
  Sense strand starting at position 2818 of SEQ ID NO: 317006
gugcuaagaaccgaguauu

SEQ ID NO: 457132 - RNA, 19 nt, Artificial Sequence
  Description of Artificial Sequence: Synthetic oligonucleotide
  Antisense Strand to SEQ ID NO: 457131
aauacucgguucuuagcac

SEQ ID NO: 457133 - RNA, 19 nt, Artificial Sequence
  Description of Artificial Sequence: Synthetic oligonucleotide
  Sense strand starting at position 2875 of SEQ ID NO: 317006
aguccauuguuccucagga

SEQ ID NO: 457134 - RNA, 19 nt, Artificial Sequence
  Description of Artificial Sequence: Synthetic oligonucleotide
  Antisense Strand to SEQ ID NO: 457133
uccugaggaacaauggacu

SEQ ID NO: 457135 - RNA, 19 nt, Artificial Sequence
  Description of Artificial Sequence: Synthetic oligonucleotide
  Sense strand starting at position 2877 of SEQ ID NO: 317006
uccauuguuccucaggaug

SEQ ID NO: 457136 - RNA, 19 nt, Artificial Sequence
  Description of Artificial Sequence: Synthetic oligonucleotide
  Antisense Strand to SEQ ID NO: 457135
cauccugaggaacaaugga

SEQ ID NO: 457137 - RNA, 19 nt, Artificial Sequence
  Description of Artificial Sequence: Synthetic oligonucleotide
  Sense strand starting at position 3125 of SEQ ID NO: 317006
uaauuugagucugauacag

SEQ ID NO: 457138 - RNA, 19 nt, Artificial Sequence
  Description of Artificial Sequence: Synthetic oligonucleotide
  Antisense Strand to SEQ ID NO: 457137
cuguaucagacucaaauua

SEQ ID NO: 457139 - RNA, 19 nt, Artificial Sequence
  Description of Artificial Sequence: Synthetic oligonucleotide
  Sense strand starting at position 3127 of SEQ ID NO: 317006
auuugagucugauacagga

SEQ ID NO: 457140 - RNA, 19 nt, Artificial Sequence
  Description of Artificial Sequence: Synthetic oligonucleotide
  Antisense Strand to SEQ ID NO: 457139
uccuguaucagacucaaau

SEQ ID NO: 457141 - RNA, 19 nt, Artificial Sequence
  Description of Artificial Sequence: Synthetic oligonucleotide
  Sense strand starting at position 3239 of SEQ ID NO: 317006
cggcuuaauagauacagca

SEQ ID NO: 457142 - RNA, 19 nt, Artificial Sequence
  Description of Artificial Sequence: Synthetic oligonucleotide
  Antisense Strand to SEQ ID NO: 457141
ugcuguaucuauuaagccg

SEQ ID NO: 457143 - RNA, 19 nt, Artificial Sequence
  Description of Artificial Sequence: Synthetic oligonucleotide
  Sense strand starting at position 3420 of SEQ ID NO: 317006
uggaaauuaugguuauucu

SEQ ID NO: 457144 - RNA, 19 nt, Artificial Sequence
  Description of Artificial Sequence: Synthetic oligonucleotide
  Antisense Strand to SEQ ID NO: 457143
agaauaaccauaauuucca

SEQ ID NO: 457145 - RNA, 19 nt, Artificial Sequence
  Description of Artificial Sequence: Synthetic oligonucleotide
  Sense strand starting at position 3427 of SEQ ID NO: 317006
uaugguuauucucuaggua

SEQ ID NO: 457146 - RNA, 19 nt, Artificial Sequence
  Description of Artificial Sequence: Synthetic oligonucleotide
  Antisense Strand to SEQ ID NO: 457145
uaccuagagaauaaccaua

SEQ ID NO: 457147 - RNA, 19 nt, Artificial Sequence
  Description of Artificial Sequence: Synthetic oligonucleotide
  Sense strand starting at position 3428 of SEQ ID NO: 317006
augguuauucucuagguaa

SEQ ID NO: 457148 - RNA, 19 nt, Artificial Sequence
  Description of Artificial Sequence: Synthetic oligonucleotide
  Antisense Strand to SEQ ID NO: 457147
uuaccuagagaauaaccau

SEQ ID NO: 457149 - RNA, 19 nt, Artificial Sequence
  Description of Artificial Sequence: Synthetic oligonucleotide
  Sense strand starting at position 3430 of SEQ ID NO: 317006
gguuauucucuagguaaua

SEQ ID NO: 457150 - RNA, 19 nt, Artificial Sequence
  Description of Artificial Sequence: Synthetic oligonucleotide
  Antisense Strand to SEQ ID NO: 457149
uauuaccuagagaauaacc

SEQ ID NO: 457151 - RNA, 19 nt, Artificial Sequence
  Description of Artificial Sequence: Synthetic oligonucleotide
  Sense strand starting at position 3431 of SEQ ID NO: 317006
guuauucucuagguaauau

SEQ ID NO: 457152 - RNA, 19 nt, Artificial Sequence
  Description of Artificial Sequence: Synthetic oligonucleotide
  Antisense Strand to SEQ ID NO: 457151
auauuaccuagagaauaac

SEQ ID NO: 457153 - RNA, 19 nt, Artificial Sequence
  Description of Artificial Sequence: Synthetic oligonucleotide
  Sense strand starting at position 3540 of SEQ ID NO: 317006
gugauaaggcaguagcuau

SEQ ID NO: 457154 - RNA, 19 nt, Artificial Sequence
  Description of Artificial Sequence: Synthetic oligonucleotide
  Antisense Strand to SEQ ID NO: 457153
auagcuacugccuuaucac

SEQ ID NO: 457155 - RNA, 19 nt, Artificial Sequence
  Description of Artificial Sequence: Synthetic oligonucleotide
  Sense strand starting at position 3887 of SEQ ID NO: 317006
auagauacauagucugcau

SEQ ID NO: 457156 - RNA, 19 nt, Artificial Sequence
  Description of Artificial Sequence: Synthetic oligonucleotide
  Antisense Strand to SEQ ID NO: 457155
augcagacuauguaucuau

SEQ ID NO: 457157 - RNA, 19 nt, Artificial Sequence
  Description of Artificial Sequence: Synthetic oligonucleotide
  Sense strand starting at position 3933 of SEQ ID NO: 317006
gcacucauagcuuacugaa

SEQ ID NO: 457158 - RNA, 19 nt, Artificial Sequence
  Description of Artificial Sequence: Synthetic oligonucleotide
  Antisense Strand to SEQ ID NO: 457157
uucaguaagcuaugagugc

SEQ ID NO: 457159 - RNA, 19 nt, Artificial Sequence
  Description of Artificial Sequence: Synthetic oligonucleotide
  Sense strand starting at position 3935 of SEQ ID NO: 317006
acucauagcuuacugaagu

SEQ ID NO: 457160 - RNA, 19 nt, Artificial Sequence
  Description of Artificial Sequence: Synthetic oligonucleotide
  Antisense Strand to SEQ ID NO: 457159
acuucaguaagcuaugagu

SEQ ID NO: 457161 - RNA, 19 nt, Artificial Sequence
  Description of Artificial Sequence: Synthetic oligonucleotide
  Sense strand starting at position 45 of SEQ ID NO: 317007
ugcacuucugccgugugaa

SEQ ID NO: 457162 - RNA, 19 nt, Artificial Sequence
  Description of Artificial Sequence: Synthetic oligonucleotide
  Antisense Strand to SEQ ID NO: 457161
uucacacggcagaagugca

SEQ ID NO: 457163 - RNA, 19 nt, Artificial Sequence
  Description of Artificial Sequence: Synthetic oligonucleotide
  Sense strand starting at position 46 of SEQ ID NO: 317007
gcacuucugccgugugaag

SEQ ID NO: 457164 - RNA, 19 nt, Artificial Sequence
  Description of Artificial Sequence: Synthetic oligonucleotide
  Antisense Strand to SEQ ID NO: 457163
cuucacacggcagaagugc

SEQ ID NO: 457165 - RNA, 19 nt, Artificial Sequence
  Description of Artificial Sequence: Synthetic oligonucleotide
  Sense strand starting at position 163 of SEQ ID NO: 317007
auacaucucuguccuguau

SEQ ID NO: 457166 - RNA, 19 nt, Artificial Sequence
  Description of Artificial Sequence: Synthetic oligonucleotide
  Antisense Strand to SEQ ID NO: 457165
auacaggacagagauguau

SEQ ID NO: 457167 - RNA, 19 nt, Artificial Sequence
  Description of Artificial Sequence: Synthetic oligonucleotide
  Sense strand starting at position 167 of SEQ ID NO: 317007
aucucuguccuguauaaac

SEQ ID NO: 457168 - RNA, 19 nt, Artificial Sequence
  Description of Artificial Sequence: Synthetic oligonucleotide
  Antisense Strand to SEQ ID NO: 457167
guuuauacaggacagagau

SEQ ID NO: 457169 - RNA, 19 nt, Artificial Sequence
  Description of Artificial Sequence: Synthetic oligonucleotide
  Sense strand starting at position 188 of SEQ ID NO: 317007
cccagucucaggcguugua

SEQ ID NO: 457170 - RNA, 19 nt, Artificial Sequence
  Description of Artificial Sequence: Synthetic oligonucleotide
  Antisense Strand to SEQ ID NO: 457169
uacaacgccugagacuggg

SEQ ID NO: 457171 - RNA, 19 nt, Artificial Sequence
  Description of Artificial Sequence: Synthetic oligonucleotide
  Sense strand starting at position 247 of SEQ ID NO: 317007
guggcucuuccacauaauc

SEQ ID NO: 457172 - RNA, 19 nt, Artificial Sequence
  Description of Artificial Sequence: Synthetic oligonucleotide
  Antisense Strand to SEQ ID NO: 457171
gauuauguggaagagccac

SEQ ID NO: 457173 - RNA, 19 nt, Artificial Sequence
  Description of Artificial Sequence: Synthetic oligonucleotide
  Sense strand starting at position 266 of SEQ ID NO: 317007
cuagcuaaucucgaaugau

SEQ ID NO: 457174 - RNA, 19 nt, Artificial Sequence
  Description of Artificial Sequence: Synthetic oligonucleotide
  Antisense Strand to SEQ ID NO: 457173
aucauucgagauuagcuag

SEQ ID NO: 457175 - RNA, 19 nt, Artificial Sequence
  Description of Artificial Sequence: Synthetic oligonucleotide
  Sense strand starting at position 269 of SEQ ID NO: 317007
gcuaaucucgaaugaugcu

SEQ ID NO: 457176 - RNA, 19 nt, Artificial Sequence
  Description of Artificial Sequence: Synthetic oligonucleotide
  Antisense Strand to SEQ ID NO: 457175
agcaucauucgagauuagc

SEQ ID NO: 457177 - RNA, 19 nt, Artificial Sequence
  Description of Artificial Sequence: Synthetic oligonucleotide
  Sense strand starting at position 350 of SEQ ID NO: 317007
agaagagcucucuguugaa

SEQ ID NO: 457178 - RNA, 19 nt, Artificial Sequence
  Description of Artificial Sequence: Synthetic oligonucleotide
  Antisense Strand to SEQ ID NO: 457177
uucaacagagagcucuucu

SEQ ID NO: 457179 - RNA, 19 nt, Artificial Sequence
  Description of Artificial Sequence: Synthetic oligonucleotide
  Sense strand starting at position 419 of SEQ ID NO: 317007
cucagaaccucugauagau

SEQ ID NO: 457180 - RNA, 19 nt, Artificial Sequence
  Description of Artificial Sequence: Synthetic oligonucleotide
  Antisense Strand to SEQ ID NO: 457179
aucuaucagagguucugag

SEQ ID NO: 457181 - RNA, 19 nt, Artificial Sequence
  Description of Artificial Sequence: Synthetic oligonucleotide
  Sense strand starting at position 432 of SEQ ID NO: 317007
auagauugagccugugagu

SEQ ID NO: 457182 - RNA, 19 nt, Artificial Sequence
  Description of Artificial Sequence: Synthetic oligonucleotide
  Antisense Strand to SEQ ID NO: 457181
acucacaggcucaaucuau

SEQ ID NO: 457183 - RNA, 19 nt, Artificial Sequence
  Description of Artificial Sequence: Synthetic oligonucleotide
  Sense strand starting at position 445 of SEQ ID NO: 317007
gugagucuccacuacagga

SEQ ID NO: 457184 - RNA, 19 nt, Artificial Sequence
  Description of Artificial Sequence: Synthetic oligonucleotide
  Antisense Strand to SEQ ID NO: 457183
uccuguaguggagacucac

SEQ ID NO: 457185 - RNA, 19 nt, Artificial Sequence
  Description of Artificial Sequence: Synthetic oligonucleotide
  Sense strand starting at position 508 of SEQ ID NO: 317007
uggaauuguguucagcgga

SEQ ID NO: 457186 - RNA, 19 nt, Artificial Sequence
  Description of Artificial Sequence: Synthetic oligonucleotide
  Antisense Strand to SEQ ID NO: 457185
uccgcugaacacaauucca

SEQ ID NO: 457187 - RNA, 19 nt, Artificial Sequence
  Description of Artificial Sequence: Synthetic oligonucleotide
  Sense strand starting at position 703 of SEQ ID NO: 317007
gucgccugucuucagugaa

SEQ ID NO: 457188 - RNA, 19 nt, Artificial Sequence
  Description of Artificial Sequence: Synthetic oligonucleotide
  Antisense Strand to SEQ ID NO: 457187
uucacugaagacaggcgac

SEQ ID NO: 457189 - RNA, 19 nt, Artificial Sequence
  Description of Artificial Sequence: Synthetic oligonucleotide
  Sense strand starting at position 737 of SEQ ID NO: 317007
agcagagucugcuuuccua

SEQ ID NO: 457190 - RNA, 19 nt, Artificial Sequence
  Description of Artificial Sequence: Synthetic oligonucleotide
  Antisense Strand to SEQ ID NO: 457189
uaggaaagcagacucugcu

SEQ ID NO: 457191 - RNA, 19 nt, Artificial Sequence
  Description of Artificial Sequence: Synthetic oligonucleotide
  Sense strand starting at position 740 of SEQ ID NO: 317007
agagucugcuuuccuaaga

SEQ ID NO: 457192 - RNA, 19 nt, Artificial Sequence
  Description of Artificial Sequence: Synthetic oligonucleotide
  Antisense Strand to SEQ ID NO: 457191
ucuuaggaaagcagacucu

SEQ ID NO: 457193 - RNA, 19 nt, Artificial Sequence
  Description of Artificial Sequence: Synthetic oligonucleotide
  Sense strand starting at position 741 of SEQ ID NO: 317007
gagucugcuuuccuaagag

SEQ ID NO: 457194 - RNA, 19 nt, Artificial Sequence
  Description of Artificial Sequence: Synthetic oligonucleotide
  Antisense Strand to SEQ ID NO: 457193
cucuuaggaaagcagacuc

SEQ ID NO: 457195 - RNA, 19 nt, Artificial Sequence
  Description of Artificial Sequence: Synthetic oligonucleotide
  Sense strand starting at position 964 of SEQ ID NO: 317007
cacaguccuguggagacau

SEQ ID NO: 457196 - RNA, 19 nt, Artificial Sequence
  Description of Artificial Sequence: Synthetic oligonucleotide
  Antisense Strand to SEQ ID NO: 457195
augucuccacaggacugug

SEQ ID NO: 457197 - RNA, 19 nt, Artificial Sequence
  Description of Artificial Sequence: Synthetic oligonucleotide
  Sense strand starting at position 972 of SEQ ID NO: 317007
uguggagacaugcacuuaa

SEQ ID NO: 457198 - RNA, 19 nt, Artificial Sequence
  Description of Artificial Sequence: Synthetic oligonucleotide
  Antisense Strand to SEQ ID NO: 457197
uuaagugcaugucuccaca

SEQ ID NO: 457199 - RNA, 19 nt, Artificial Sequence
  Description of Artificial Sequence: Synthetic oligonucleotide
  Sense strand starting at position 1118 of SEQ ID NO: 317007
agacaucaguucugaagag

SEQ ID NO: 457200 - RNA, 19 nt, Artificial Sequence
  Description of Artificial Sequence: Synthetic oligonucleotide
  Antisense Strand to SEQ ID NO: 457199
cucuucagaacugaugucu

SEQ ID NO: 457201 - RNA, 19 nt, Artificial Sequence
  Description of Artificial Sequence: Synthetic oligonucleotide
  Sense strand starting at position 1119 of SEQ ID NO: 317007
gacaucaguucugaagaga

SEQ ID NO: 457202 - RNA, 19 nt, Artificial Sequence
  Description of Artificial Sequence: Synthetic oligonucleotide
  Antisense Strand to SEQ ID NO: 457201
ucucuucagaacugauguc

SEQ ID NO: 457203 - RNA, 19 nt, Artificial Sequence
  Description of Artificial Sequence: Synthetic oligonucleotide
  Sense strand starting at position 1145 of SEQ ID NO: 317007
uggaaacaguccuagauga

SEQ ID NO: 457204 - RNA, 19 nt, Artificial Sequence
  Description of Artificial Sequence: Synthetic oligonucleotide
  Antisense Strand to SEQ ID NO: 457203
ucaucuaggacuguuucca

SEQ ID NO: 457205 - RNA, 19 nt, Artificial Sequence
  Description of Artificial Sequence: Synthetic oligonucleotide
  Sense strand starting at position 1275 of SEQ ID NO: 317007
gagggcuggugggaugauu

SEQ ID NO: 457206 - RNA, 19 nt, Artificial Sequence
  Description of Artificial Sequence: Synthetic oligonucleotide
  Antisense Strand to SEQ ID NO: 457205
aaucaucccaccagcccuc

SEQ ID NO: 457207 - RNA, 19 nt, Artificial Sequence
  Description of Artificial Sequence: Synthetic oligonucleotide
  Sense strand starting at position 2170 of SEQ ID NO: 317007
ggucggccuggucgagaaa

SEQ ID NO: 457208 - RNA, 19 nt, Artificial Sequence
  Description of Artificial Sequence: Synthetic oligonucleotide
  Antisense Strand to SEQ ID NO: 457207
uuucucgaccaggccgacc

SEQ ID NO: 457209 - RNA, 19 nt, Artificial Sequence
  Description of Artificial Sequence: Synthetic oligonucleotide
  Sense strand starting at position 2240 of SEQ ID NO: 317007
cagccuaucccagaaacgu

SEQ ID NO: 457210 - RNA, 19 nt, Artificial Sequence
  Description of Artificial Sequence: Synthetic oligonucleotide
  Antisense Strand to SEQ ID NO: 457209
acguuucugggauaggcug

SEQ ID NO: 457211 - RNA, 19 nt, Artificial Sequence
  Description of Artificial Sequence: Synthetic oligonucleotide
  Sense strand starting at position 2318 of SEQ ID NO: 317007
ucaguuuccuccuccagga

SEQ ID NO: 457212 - RNA, 19 nt, Artificial Sequence
  Description of Artificial Sequence: Synthetic oligonucleotide
  Antisense Strand to SEQ ID NO: 457211
uccuggaggaggaaacuga

SEQ ID NO: 457213 - RNA, 19 nt, Artificial Sequence
  Description of Artificial Sequence: Synthetic oligonucleotide
  Sense strand starting at position 2320 of SEQ ID NO: 317007
aguuuccuccuccaggaaa

SEQ ID NO: 457214 - RNA, 19 nt, Artificial Sequence
  Description of Artificial Sequence: Synthetic oligonucleotide
  Antisense Strand to SEQ ID NO: 457213
uuuccuggaggaggaaacu

SEQ ID NO: 457215 - RNA, 19 nt, Artificial Sequence
  Description of Artificial Sequence: Synthetic oligonucleotide
  Sense strand starting at position 2434 of SEQ ID NO: 317007
accggaagcuguuuccauu

SEQ ID NO: 457216 - RNA, 19 nt, Artificial Sequence
  Description of Artificial Sequence: Synthetic oligonucleotide
  Antisense Strand to SEQ ID NO: 457215
aauggaaacagcuuccggu

SEQ ID NO: 457217 - RNA, 19 nt, Artificial Sequence
  Description of Artificial Sequence: Synthetic oligonucleotide
  Sense strand starting at position 2510 of SEQ ID NO: 317007
gagucagaaucuggugaca

SEQ ID NO: 457218 - RNA, 19 nt, Artificial Sequence
  Description of Artificial Sequence: Synthetic oligonucleotide
  Antisense Strand to SEQ ID NO: 457217
ugucaccagauucugacuc

SEQ ID NO: 457219 - RNA, 19 nt, Artificial Sequence
  Description of Artificial Sequence: Synthetic oligonucleotide
  Sense strand starting at position 2593 of SEQ ID NO: 317007
gaaugucaagccugaagag

SEQ ID NO: 457220 - RNA, 19 nt, Artificial Sequence
  Description of Artificial Sequence: Synthetic oligonucleotide
  Antisense Strand to SEQ ID NO: 457219
cucuucaggcuugacauuc

SEQ ID NO: 457221 - RNA, 19 nt, Artificial Sequence
  Description of Artificial Sequence: Synthetic oligonucleotide
  Sense strand starting at position 2780 of SEQ ID NO: 317007
gaacgaugucgucaaguag

SEQ ID NO: 457222 - RNA, 19 nt, Artificial Sequence
  Description of Artificial Sequence: Synthetic oligonucleotide
  Antisense Strand to SEQ ID NO: 457221
cuacuugacgacaucguuc

SEQ ID NO: 457223 - RNA, 19 nt, Artificial Sequence
  Description of Artificial Sequence: Synthetic oligonucleotide
  Sense strand starting at position 2948 of SEQ ID NO: 317007
gucugauaccaguggacac

SEQ ID NO: 457224 - RNA, 19 nt, Artificial Sequence
  Description of Artificial Sequence: Synthetic oligonucleotide
  Antisense Strand to SEQ ID NO: 457223
guguccacugguaucagac

SEQ ID NO: 457225 - RNA, 19 nt, Artificial Sequence
  Description of Artificial Sequence: Synthetic oligonucleotide
  Sense strand starting at position 3100 of SEQ ID NO: 317007
aggaaugaaugcuggacuu

SEQ ID NO: 457226 - RNA, 19 nt, Artificial Sequence
  Description of Artificial Sequence: Synthetic oligonucleotide
  Antisense Strand to SEQ ID NO: 457225
aaguccagcauucauuccu

SEQ ID NO: 457227 - RNA, 19 nt, Artificial Sequence
  Description of Artificial Sequence: Synthetic oligonucleotide
  Sense strand starting at position 3496 of SEQ ID NO: 317007
cugcguuucugccucuaca

SEQ ID NO: 457228 - RNA, 19 nt, Artificial Sequence
  Description of Artificial Sequence: Synthetic oligonucleotide
  Antisense Strand to SEQ ID NO: 457227
uguagaggcagaaacgcag

SEQ ID NO: 457229 - RNA, 19 nt, Artificial Sequence
  Description of Artificial Sequence: Synthetic oligonucleotide
  Sense strand starting at position 3497 of SEQ ID NO: 317007
ugcguuucugccucuacaa

SEQ ID NO: 457230 - RNA, 19 nt, Artificial Sequence
  Description of Artificial Sequence: Synthetic oligonucleotide
  Antisense Strand to SEQ ID NO: 457229
uuguagaggcagaaacgca

SEQ ID NO: 457231 - RNA, 19 nt, Artificial Sequence
  Description of Artificial Sequence: Synthetic oligonucleotide
  Sense strand starting at position 3524 of SEQ ID NO: 317007
ugcacuuuacuuugaagau

SEQ ID NO: 457232 - RNA, 19 nt, Artificial Sequence
  Description of Artificial Sequence: Synthetic oligonucleotide
  Antisense Strand to SEQ ID NO: 457231
aucuucaaaguaaagugca

SEQ ID NO: 457233 - RNA, 19 nt, Artificial Sequence
  Description of Artificial Sequence: Synthetic oligonucleotide
  Sense strand starting at position 3525 of SEQ ID NO: 317007
gcacuuuacuuugaagaug

SEQ ID NO: 457234 - RNA, 19 nt, Artificial Sequence
  Description of Artificial Sequence: Synthetic oligonucleotide
  Antisense Strand to SEQ ID NO: 457233
caucuucaaaguaaagugc

SEQ ID NO: 457235 - RNA, 19 nt, Artificial Sequence
  Description of Artificial Sequence: Synthetic oligonucleotide
  Sense strand starting at position 3533 of SEQ ID NO: 317007
cuuugaagauguggagaau

SEQ ID NO: 457236 - RNA, 19 nt, Artificial Sequence
  Description of Artificial Sequence: Synthetic oligonucleotide
  Antisense Strand to SEQ ID NO: 457235
auucuccacaucuucaaag

SEQ ID NO: 457237 - RNA, 19 nt, Artificial Sequence
  Description of Artificial Sequence: Synthetic oligonucleotide
  Sense strand starting at position 3782 of SEQ ID NO: 317007
gacaccuggcccugaagau

SEQ ID NO: 457238 - RNA, 19 nt, Artificial Sequence
  Description of Artificial Sequence: Synthetic oligonucleotide
  Antisense Strand to SEQ ID NO: 457237
aucuucagggccagguguc

SEQ ID NO: 457239 - RNA, 19 nt, Artificial Sequence
  Description of Artificial Sequence: Synthetic oligonucleotide
  Sense strand starting at position 3902 of SEQ ID NO: 317007
aacugagucucugagagag

SEQ ID NO: 457240 - RNA, 19 nt, Artificial Sequence
  Description of Artificial Sequence: Synthetic oligonucleotide
  Antisense Strand to SEQ ID NO: 457239
cucucucagagacucaguu

SEQ ID NO: 457241 - RNA, 19 nt, Artificial Sequence
  Description of Artificial Sequence: Synthetic oligonucleotide
  Sense strand starting at position 86 of SEQ ID NO: 317008
agacaaggaucauaacaga

SEQ ID NO: 457242 - RNA, 19 nt, Artificial Sequence
  Description of Artificial Sequence: Synthetic oligonucleotide
  Antisense Strand to SEQ ID NO: 457241
ucuguuaugauccuugucu

SEQ ID NO: 457243 - RNA, 19 nt, Artificial Sequence
  Description of Artificial Sequence: Synthetic oligonucleotide
  Sense strand starting at position 194 of SEQ ID NO: 317008
auagaauacugagagguaa

SEQ ID NO: 457244 - RNA, 19 nt, Artificial Sequence
  Description of Artificial Sequence: Synthetic oligonucleotide
  Antisense Strand to SEQ ID NO: 457243
uuaccucucaguauucuau

SEQ ID NO: 457245 - RNA, 19 nt, Artificial Sequence
  Description of Artificial Sequence: Synthetic oligonucleotide
  Sense strand starting at position 229 of SEQ ID NO: 317008
gcaccagaguacuuccuaa

SEQ ID NO: 457246 - RNA, 19 nt, Artificial Sequence
  Description of Artificial Sequence: Synthetic oligonucleotide
  Antisense Strand to SEQ ID NO: 457245
uuaggaaguacucuggugc

SEQ ID NO: 457247 - RNA, 19 nt, Artificial Sequence
  Description of Artificial Sequence: Synthetic oligonucleotide
  Sense strand starting at position 382 of SEQ ID NO: 317008
guaacaagcugucagcaau

SEQ ID NO: 457248 - RNA, 19 nt, Artificial Sequence
  Description of Artificial Sequence: Synthetic oligonucleotide
  Antisense Strand to SEQ ID NO: 457247
auugcugacagcuuguuac

SEQ ID NO: 457249 - RNA, 19 nt, Artificial Sequence
  Description of Artificial Sequence: Synthetic oligonucleotide
  Sense strand starting at position 385 of SEQ ID NO: 317008
acaagcugucagcaaugaa

SEQ ID NO: 457250 - RNA, 19 nt, Artificial Sequence
  Description of Artificial Sequence: Synthetic oligonucleotide
  Antisense Strand to SEQ ID NO: 457249
uucauugcugacagcuugu

SEQ ID NO: 457251 - RNA, 19 nt, Artificial Sequence
  Description of Artificial Sequence: Synthetic oligonucleotide
  Sense strand starting at position 703 of SEQ ID NO: 317008
ucucuuagguggugcuuaa

SEQ ID NO: 457252 - RNA, 19 nt, Artificial Sequence
  Description of Artificial Sequence: Synthetic oligonucleotide
  Antisense Strand to SEQ ID NO: 457251
uuaagcaccaccuaagaga

SEQ ID NO: 457253 - RNA, 19 nt, Artificial Sequence
  Description of Artificial Sequence: Synthetic oligonucleotide
  Sense strand starting at position 729 of SEQ ID NO: 317008
uuacuaccaccgugaucau

SEQ ID NO: 457254 - RNA, 19 nt, Artificial Sequence
  Description of Artificial Sequence: Synthetic oligonucleotide
  Antisense Strand to SEQ ID NO: 457253
augaucacggugguaguaa

SEQ ID NO: 457255 - RNA, 19 nt, Artificial Sequence
  Description of Artificial Sequence: Synthetic oligonucleotide
  Sense strand starting at position 732 of SEQ ID NO: 317008
cuaccaccgugaucaugaa

SEQ ID NO: 457256 - RNA, 19 nt, Artificial Sequence
  Description of Artificial Sequence: Synthetic oligonucleotide
  Antisense Strand to SEQ ID NO: 457255
uucaugaucacggugguag

SEQ ID NO: 457257 - RNA, 19 nt, Artificial Sequence
  Description of Artificial Sequence: Synthetic oligonucleotide
  Sense strand starting at position 736 of SEQ ID NO: 317008
caccgugaucaugaacuaa

SEQ ID NO: 457258 - RNA, 19 nt, Artificial Sequence
  Description of Artificial Sequence: Synthetic oligonucleotide
  Antisense Strand to SEQ ID NO: 457257
uuaguucaugaucacggug

SEQ ID NO: 457259 - RNA, 19 nt, Artificial Sequence
  Description of Artificial Sequence: Synthetic oligonucleotide
  Sense strand starting at position 783 of SEQ ID NO: 317008
ccucaaaucucaggcuguu

SEQ ID NO: 457260 - RNA, 19 nt, Artificial Sequence
  Description of Artificial Sequence: Synthetic oligonucleotide
  Antisense Strand to SEQ ID NO: 457259
aacagccugagauuugagg

SEQ ID NO: 457261 - RNA, 19 nt, Artificial Sequence
  Description of Artificial Sequence: Synthetic oligonucleotide
  Sense strand starting at position 894 of SEQ ID NO: 317008
agcauuaugucauccacug

SEQ ID NO: 457262 - RNA, 19 nt, Artificial Sequence
  Description of Artificial Sequence: Synthetic oligonucleotide
  Antisense Strand to SEQ ID NO: 457261
caguggaugacauaaugcu

SEQ ID NO: 457263 - RNA, 19 nt, Artificial Sequence
  Description of Artificial Sequence: Synthetic oligonucleotide
  Sense strand starting at position 997 of SEQ ID NO: 317008
ggaaguggcacugagcaaa

SEQ ID NO: 457264 - RNA, 19 nt, Artificial Sequence
  Description of Artificial Sequence: Synthetic oligonucleotide
  Antisense Strand to SEQ ID NO: 457263
uuugcucagugccacuucc

SEQ ID NO: 457265 - RNA, 19 nt, Artificial Sequence
  Description of Artificial Sequence: Synthetic oligonucleotide
  Sense strand starting at position 1062 of SEQ ID NO: 317008
cgcccugguuucucgcaaa

SEQ ID NO: 457266 - RNA, 19 nt, Artificial Sequence
  Description of Artificial Sequence: Synthetic oligonucleotide
  Antisense Strand to SEQ ID NO: 457265
uuugcgagaaaccagggcg

SEQ ID NO: 457267 - RNA, 19 nt, Artificial Sequence
  Description of Artificial Sequence: Synthetic oligonucleotide
  Sense strand starting at position 1065 of SEQ ID NO: 317008
ccugguuucucgcaaauaa

SEQ ID NO: 457268 - RNA, 19 nt, Artificial Sequence
  Description of Artificial Sequence: Synthetic oligonucleotide
  Antisense Strand to SEQ ID NO: 457267
uuauuugcgagaaaccagg

SEQ ID NO: 457269 - RNA, 19 nt, Artificial Sequence
  Description of Artificial Sequence: Synthetic oligonucleotide
  Sense strand starting at position 2928 of SEQ ID NO: 317008
ugugauuagugcagcgaga

SEQ ID NO: 457270 - RNA, 19 nt, Artificial Sequence
  Description of Artificial Sequence: Synthetic oligonucleotide
  Antisense Strand to SEQ ID NO: 457269
ucucgcugcacuaaucaca

SEQ ID NO: 457271 - RNA, 19 nt, Artificial Sequence
  Description of Artificial Sequence: Synthetic oligonucleotide
  Sense strand starting at position 2930 of SEQ ID NO: 317008
ugauuagugcagcgagaag

SEQ ID NO: 457272 - RNA, 19 nt, Artificial Sequence
  Description of Artificial Sequence: Synthetic oligonucleotide
  Antisense Strand to SEQ ID NO: 457271
cuucucgcugcacuaauca

SEQ ID NO: 457273 - RNA, 19 nt, Artificial Sequence
  Description of Artificial Sequence: Synthetic oligonucleotide
  Sense strand starting at position 2949 of SEQ ID NO: 317008
cagcuauggccacaagaug

SEQ ID NO: 457274 - RNA, 19 nt, Artificial Sequence
  Description of Artificial Sequence: Synthetic oligonucleotide
  Antisense Strand to SEQ ID NO: 457273
caucuuguggccauagcug

SEQ ID NO: 457275 - RNA, 19 nt, Artificial Sequence
  Description of Artificial Sequence: Synthetic oligonucleotide
  Sense strand starting at position 2997 of SEQ ID NO: 317008
ggcguuucuuuaugggagu

SEQ ID NO: 457276 - RNA, 19 nt, Artificial Sequence
  Description of Artificial Sequence: Synthetic oligonucleotide
  Antisense Strand to SEQ ID NO: 457275
acucccauaaagaaacgcc

SEQ ID NO: 457277 - RNA, 19 nt, Artificial Sequence
  Description of Artificial Sequence: Synthetic oligonucleotide
  Sense strand starting at position 3000 of SEQ ID NO: 317008
guuucuuuaugggagugca

SEQ ID NO: 457278 - RNA, 19 nt, Artificial Sequence
  Description of Artificial Sequence: Synthetic oligonucleotide
  Antisense Strand to SEQ ID NO: 457277
ugcacucccauaaagaaac

SEQ ID NO: 457279 - RNA, 19 nt, Artificial Sequence
  Description of Artificial Sequence: Synthetic oligonucleotide
  Sense strand starting at position 3210 of SEQ ID NO: 317008
gaguaagguuggccucaga

SEQ ID NO: 457280 - RNA, 19 nt, Artificial Sequence
  Description of Artificial Sequence: Synthetic oligonucleotide
  Antisense Strand to SEQ ID NO: 457279
ucugaggccaaccuuacuc

SEQ ID NO: 457281 - RNA, 19 nt, Artificial Sequence
  Description of Artificial Sequence: Synthetic oligonucleotide
  Sense strand starting at position 3505 of SEQ ID NO: 317008
cugcaagugagcuaggauu

SEQ ID NO: 457282 - RNA, 19 nt, Artificial Sequence
  Description of Artificial Sequence: Synthetic oligonucleotide
  Antisense Strand to SEQ ID NO: 457281
aauccuagcucacuugcag

SEQ ID NO: 457283 - RNA, 19 nt, Artificial Sequence
  Description of Artificial Sequence: Synthetic oligonucleotide
  Sense strand starting at position 3889 of SEQ ID NO: 317008
ccaguucucugcuguuaau

SEQ ID NO: 457284 - RNA, 19 nt, Artificial Sequence
  Description of Artificial Sequence: Synthetic oligonucleotide
  Antisense Strand to SEQ ID NO: 457283
auuaacagcagagaacugg

SEQ ID NO: 457285 - RNA, 19 nt, Artificial Sequence
  Description of Artificial Sequence: Synthetic oligonucleotide
  Sense strand starting at position 3892 of SEQ ID NO: 317008
guucucugcuguuaauaag

SEQ ID NO: 457286 - RNA, 19 nt, Artificial Sequence
  Description of Artificial Sequence: Synthetic oligonucleotide
  Antisense Strand to SEQ ID NO: 457285
cuuauuaacagcagagaac

SEQ ID NO: 457287 - RNA, 19 nt, Artificial Sequence
  Description of Artificial Sequence: Synthetic oligonucleotide
  Sense strand starting at position 3912 of SEQ ID NO: 317008
gccuuuguccacuguguca

SEQ ID NO: 457288 - RNA, 19 nt, Artificial Sequence
  Description of Artificial Sequence: Synthetic oligonucleotide
  Antisense Strand to SEQ ID NO: 457287
ugacacaguggacaaaggc

SEQ ID NO: 457289 - RNA, 19 nt, Artificial Sequence
  Description of Artificial Sequence: Synthetic oligonucleotide
  Sense strand starting at position 3932 of SEQ ID NO: 317008
gccucaagguuguuaguua

SEQ ID NO: 457290 - RNA, 19 nt, Artificial Sequence
  Description of Artificial Sequence: Synthetic oligonucleotide
  Antisense Strand to SEQ ID NO: 457289
uaacuaacaaccuugaggc

SEQ ID NO: 457291 - RNA, 19 nt, Artificial Sequence
  Description of Artificial Sequence: Synthetic oligonucleotide
  Sense strand starting at position 3939 of SEQ ID NO: 317008
gguuguuaguuaccucagu

SEQ ID NO: 457292 - RNA, 19 nt, Artificial Sequence
  Description of Artificial Sequence: Synthetic oligonucleotide
  Antisense Strand to SEQ ID NO: 457291
acugagguaacuaacaacc

SEQ ID NO: 457293 - RNA, 19 nt, Artificial Sequence
  Description of Artificial Sequence: Synthetic oligonucleotide
  Sense strand starting at position 3957 of SEQ ID NO: 317008
ugggcagacucauaagaug

SEQ ID NO: 457294 - RNA, 19 nt, Artificial Sequence
  Description of Artificial Sequence: Synthetic oligonucleotide
  Antisense Strand to SEQ ID NO: 457293
caucuuaugagucugccca

SEQ ID NO: 457295 - RNA, 19 nt, Artificial Sequence
  Description of Artificial Sequence: Synthetic oligonucleotide
  Sense strand starting at position 157 of SEQ ID NO: 317009
cagcaacuccgcuaaggau

SEQ ID NO: 457296 - RNA, 19 nt, Artificial Sequence
  Description of Artificial Sequence: Synthetic oligonucleotide
  Antisense Strand to SEQ ID NO: 457295
auccuuagcggaguugcug

SEQ ID NO: 457297 - RNA, 19 nt, Artificial Sequence
  Description of Artificial Sequence: Synthetic oligonucleotide
  Sense strand starting at position 183 of SEQ ID NO: 317009
ugaggaguucuucagaguu

SEQ ID NO: 457298 - RNA, 19 nt, Artificial Sequence
  Description of Artificial Sequence: Synthetic oligonucleotide
  Antisense Strand to SEQ ID NO: 457297
aacucugaagaacuccuca

SEQ ID NO: 457299 - RNA, 19 nt, Artificial Sequence
  Description of Artificial Sequence: Synthetic oligonucleotide
  Sense strand starting at position 197 of SEQ ID NO: 317009
gaguuucgccuugagauau

SEQ ID NO: 457300 - RNA, 19 nt, Artificial Sequence
  Description of Artificial Sequence: Synthetic oligonucleotide
  Antisense Strand to SEQ ID NO: 457299
auaucucaaggcgaaacuc

SEQ ID NO: 457301 - RNA, 19 nt, Artificial Sequence
  Description of Artificial Sequence: Synthetic oligonucleotide
  Sense strand starting at position 286 of SEQ ID NO: 317009
acuguacugggauggauua

SEQ ID NO: 457302 - RNA, 19 nt, Artificial Sequence
  Description of Artificial Sequence: Synthetic oligonucleotide
  Antisense Strand to SEQ ID NO: 457301
uaauccaucccaguacagu

SEQ ID NO: 457303 - RNA, 19 nt, Artificial Sequence
  Description of Artificial Sequence: Synthetic oligonucleotide
  Sense strand starting at position 373 of SEQ ID NO: 317009
agcucucaaagugggaaua

SEQ ID NO: 457304 - RNA, 19 nt, Artificial Sequence
  Description of Artificial Sequence: Synthetic oligonucleotide
  Antisense Strand to SEQ ID NO: 457303
uauucccacuuugagagcu

SEQ ID NO: 457305 - RNA, 19 nt, Artificial Sequence
  Description of Artificial Sequence: Synthetic oligonucleotide
  Sense strand starting at position 733 of SEQ ID NO: 317009
uugaaaccugcugguaaau

SEQ ID NO: 457306 - RNA, 19 nt, Artificial Sequence
  Description of Artificial Sequence: Synthetic oligonucleotide
  Antisense Strand to SEQ ID NO: 457305
auuuaccagcagguuucaa

SEQ ID NO: 457307 - RNA, 19 nt, Artificial Sequence
  Description of Artificial Sequence: Synthetic oligonucleotide
  Sense strand starting at position 787 of SEQ ID NO: 317009
auccuuacugaguaucuga

SEQ ID NO: 457308 - RNA, 19 nt, Artificial Sequence
  Description of Artificial Sequence: Synthetic oligonucleotide
  Antisense Strand to SEQ ID NO: 457307
ucagauacucaguaaggau

SEQ ID NO: 457309 - RNA, 19 nt, Artificial Sequence
  Description of Artificial Sequence: Synthetic oligonucleotide
  Sense strand starting at position 805 of SEQ ID NO: 317009
acacuaaguccuggagaua

SEQ ID NO: 457310 - RNA, 19 nt, Artificial Sequence
  Description of Artificial Sequence: Synthetic oligonucleotide
  Antisense Strand to SEQ ID NO: 457309
uaucuccaggacuuagugu

SEQ ID NO: 457311 - RNA, 19 nt, Artificial Sequence
  Description of Artificial Sequence: Synthetic oligonucleotide
  Sense strand starting at position 816 of SEQ ID NO: 317009
uggagauacugucuugggu

SEQ ID NO: 457312 - RNA, 19 nt, Artificial Sequence
  Description of Artificial Sequence: Synthetic oligonucleotide
  Antisense Strand to SEQ ID NO: 457311
acccaagacaguaucucca

SEQ ID NO: 457313 - RNA, 19 nt, Artificial Sequence
  Description of Artificial Sequence: Synthetic oligonucleotide
  Sense strand starting at position 886 of SEQ ID NO: 317009
ccagacaguuucucacagu

SEQ ID NO: 457314 - RNA, 19 nt, Artificial Sequence
  Description of Artificial Sequence: Synthetic oligonucleotide
  Antisense Strand to SEQ ID NO: 457313
acugugagaaacugucugg

SEQ ID NO: 457315 - RNA, 19 nt, Artificial Sequence
  Description of Artificial Sequence: Synthetic oligonucleotide
  Sense strand starting at position 948 of SEQ ID NO: 317009
ggcuuugcuccugaaggag

SEQ ID NO: 457316 - RNA, 19 nt, Artificial Sequence
  Description of Artificial Sequence: Synthetic oligonucleotide
  Antisense Strand to SEQ ID NO: 457315
cuccuucaggagcaaagcc

SEQ ID NO: 457317 - RNA, 19 nt, Artificial Sequence
  Description of Artificial Sequence: Synthetic oligonucleotide
  Sense strand starting at position 1055 of SEQ ID NO: 317009
acagaaagauuauugcuuu

SEQ ID NO: 457318 - RNA, 19 nt, Artificial Sequence
  Description of Artificial Sequence: Synthetic oligonucleotide
  Antisense Strand to SEQ ID NO: 457317
aaagcaauaaucuuucugu

SEQ ID NO: 457319 - RNA, 19 nt, Artificial Sequence
  Description of Artificial Sequence: Synthetic oligonucleotide
  Sense strand starting at position 1082 of SEQ ID NO: 317009
gugagaagggucggaauau

SEQ ID NO: 457320 - RNA, 19 nt, Artificial Sequence
  Description of Artificial Sequence: Synthetic oligonucleotide
  Antisense Strand to SEQ ID NO: 457319
auauuccgacccuucucac

SEQ ID NO: 457321 - RNA, 19 nt, Artificial Sequence
  Description of Artificial Sequence: Synthetic oligonucleotide
  Sense strand starting at position 1242 of SEQ ID NO: 317009
aguucuuguagucaggauu

SEQ ID NO: 457322 - RNA, 19 nt, Artificial Sequence
  Description of Artificial Sequence: Synthetic oligonucleotide
  Antisense Strand to SEQ ID NO: 457321
aauccugacuacaagaacu

SEQ ID NO: 457323 - RNA, 19 nt, Artificial Sequence
  Description of Artificial Sequence: Synthetic oligonucleotide
  Sense strand starting at position 1255 of SEQ ID NO: 317009
aggauuggcugccuauaua

SEQ ID NO: 457324 - RNA, 19 nt, Artificial Sequence
  Description of Artificial Sequence: Synthetic oligonucleotide
  Antisense Strand to SEQ ID NO: 457323
uauauaggcagccaauccu

SEQ ID NO: 457325 - RNA, 19 nt, Artificial Sequence
  Description of Artificial Sequence: Synthetic oligonucleotide
  Sense strand starting at position 1258 of SEQ ID NO: 317009
auuggcugccuauauaaau

SEQ ID NO: 457326 - RNA, 19 nt, Artificial Sequence
  Description of Artificial Sequence: Synthetic oligonucleotide
  Antisense Strand to SEQ ID NO: 457325
auuuauauaggcagccaau

SEQ ID NO: 457327 - RNA, 19 nt, Artificial Sequence
  Description of Artificial Sequence: Synthetic oligonucleotide
  Sense strand starting at position 1286 of SEQ ID NO: 317009
uuuacuuugugagucaaca

SEQ ID NO: 457328 - RNA, 19 nt, Artificial Sequence
  Description of Artificial Sequence: Synthetic oligonucleotide
  Antisense Strand to SEQ ID NO: 457327
uguugacucacaaaguaaa

SEQ ID NO: 457329 - RNA, 19 nt, Artificial Sequence
  Description of Artificial Sequence: Synthetic oligonucleotide
  Sense strand starting at position 1308 of SEQ ID NO: 317009
agccaagaccucuauagug

SEQ ID NO: 457330 - RNA, 19 nt, Artificial Sequence
  Description of Artificial Sequence: Synthetic oligonucleotide
  Antisense Strand to SEQ ID NO: 457329
cacuauagaggucuuggcu

SEQ ID NO: 457331 - RNA, 19 nt, Artificial Sequence
  Description of Artificial Sequence: Synthetic oligonucleotide
  Sense strand starting at position 1534 of SEQ ID NO: 317009
aaguacagacuagguauaa

SEQ ID NO: 457332 - RNA, 19 nt, Artificial Sequence
  Description of Artificial Sequence: Synthetic oligonucleotide
  Antisense Strand to SEQ ID NO: 457331
uuauaccuagucuguacuu

SEQ ID NO: 457333 - RNA, 19 nt, Artificial Sequence
  Description of Artificial Sequence: Synthetic oligonucleotide
  Sense strand starting at position 1535 of SEQ ID NO: 317009
aguacagacuagguauaau

SEQ ID NO: 457334 - RNA, 19 nt, Artificial Sequence
  Description of Artificial Sequence: Synthetic oligonucleotide
  Antisense Strand to SEQ ID NO: 457333
auuauaccuagucuguacu

SEQ ID NO: 457335 - RNA, 19 nt, Artificial Sequence
  Description of Artificial Sequence: Synthetic oligonucleotide
  Sense strand starting at position 1545 of SEQ ID NO: 317009
agguauaauuuguagagaa

SEQ ID NO: 457336 - RNA, 19 nt, Artificial Sequence
  Description of Artificial Sequence: Synthetic oligonucleotide
  Antisense Strand to SEQ ID NO: 457335
uucucuacaaauuauaccu

SEQ ID NO: 457337 - RNA, 19 nt, Artificial Sequence
  Description of Artificial Sequence: Synthetic oligonucleotide
  Sense strand starting at position 1607 of SEQ ID NO: 317009
ucaaucagguuaucuugaa

SEQ ID NO: 457338 - RNA, 19 nt, Artificial Sequence
  Description of Artificial Sequence: Synthetic oligonucleotide
  Antisense Strand to SEQ ID NO: 457337
uucaagauaaccugauuga

SEQ ID NO: 457339 - RNA, 19 nt, Artificial Sequence
  Description of Artificial Sequence: Synthetic oligonucleotide
  Sense strand starting at position 1611 of SEQ ID NO: 317009
ucagguuaucuugaaugca

SEQ ID NO: 457340 - RNA, 19 nt, Artificial Sequence
  Description of Artificial Sequence: Synthetic oligonucleotide
  Antisense Strand to SEQ ID NO: 457339
ugcauucaagauaaccuga

SEQ ID NO: 457341 - RNA, 19 nt, Artificial Sequence
  Description of Artificial Sequence: Synthetic oligonucleotide
  Sense strand starting at position 1723 of SEQ ID NO: 317009
uuacaugcuuagguuaaua

SEQ ID NO: 457342 - RNA, 19 nt, Artificial Sequence
  Description of Artificial Sequence: Synthetic oligonucleotide
  Antisense Strand to SEQ ID NO: 457341
uauuaaccuaagcauguaa

SEQ ID NO: 457343 - RNA, 19 nt, Artificial Sequence
  Description of Artificial Sequence: Synthetic oligonucleotide
  Sense strand starting at position 1734 of SEQ ID NO: 317009
gguuaauaaguuuagccuu

SEQ ID NO: 457344 - RNA, 19 nt, Artificial Sequence
  Description of Artificial Sequence: Synthetic oligonucleotide
  Antisense Strand to SEQ ID NO: 457343
aaggcuaaacuuauuaacc

SEQ ID NO: 457345 - RNA, 19 nt, Artificial Sequence
  Description of Artificial Sequence: Synthetic oligonucleotide
  Sense strand starting at position 1864 of SEQ ID NO: 317009
uaaacuauggagugucuaa

SEQ ID NO: 457346 - RNA, 19 nt, Artificial Sequence
  Description of Artificial Sequence: Synthetic oligonucleotide
  Antisense Strand to SEQ ID NO: 457345
uuagacacuccauaguuua

SEQ ID NO: 457347 - RNA, 19 nt, Artificial Sequence
  Description of Artificial Sequence: Synthetic oligonucleotide
  Sense strand starting at position 2082 of SEQ ID NO: 317009
cguggauucucaccagaaa

SEQ ID NO: 457348 - RNA, 19 nt, Artificial Sequence
  Description of Artificial Sequence: Synthetic oligonucleotide
  Antisense Strand to SEQ ID NO: 457347
uuucuggugagaauccacg

SEQ ID NO: 457349 - RNA, 19 nt, Artificial Sequence
  Description of Artificial Sequence: Synthetic oligonucleotide
  Sense strand starting at position 2149 of SEQ ID NO: 317009
caagaaacgugauucuaga

SEQ ID NO: 457350 - RNA, 19 nt, Artificial Sequence
  Description of Artificial Sequence: Synthetic oligonucleotide
  Antisense Strand to SEQ ID NO: 457349
ucuagaaucacguuucuug

SEQ ID NO: 457351 - RNA, 19 nt, Artificial Sequence
  Description of Artificial Sequence: Synthetic oligonucleotide
  Sense strand starting at position 2172 of SEQ ID NO: 317009
agagguuugcauuguggaa

SEQ ID NO: 457352 - RNA, 19 nt, Artificial Sequence
  Description of Artificial Sequence: Synthetic oligonucleotide
  Antisense Strand to SEQ ID NO: 457351
uuccacaaugcaaaccucu

SEQ ID NO: 457353 - RNA, 19 nt, Artificial Sequence
  Description of Artificial Sequence: Synthetic oligonucleotide
  Sense strand starting at position 2223 of SEQ ID NO: 317009
uugggcuccgaauauguau

SEQ ID NO: 457354 - RNA, 19 nt, Artificial Sequence
  Description of Artificial Sequence: Synthetic oligonucleotide
  Antisense Strand to SEQ ID NO: 457353
auacauauucggagcccaa

SEQ ID NO: 457355 - RNA, 19 nt, Artificial Sequence
  Description of Artificial Sequence: Synthetic oligonucleotide
  Sense strand starting at position 2446 of SEQ ID NO: 317009
uuugauguuuccuccugaa

SEQ ID NO: 457356 - RNA, 19 nt, Artificial Sequence
  Description of Artificial Sequence: Synthetic oligonucleotide
  Antisense Strand to SEQ ID NO: 457355
uucaggaggaaacaucaaa

SEQ ID NO: 457357 - RNA, 19 nt, Artificial Sequence
  Description of Artificial Sequence: Synthetic oligonucleotide
  Sense strand starting at position 2497 of SEQ ID NO: 317009
uaugauuaagucggucaga

SEQ ID NO: 457358 - RNA, 19 nt, Artificial Sequence
  Description of Artificial Sequence: Synthetic oligonucleotide
  Antisense Strand to SEQ ID NO: 457357
ucugaccgacuuaaucaua

SEQ ID NO: 457359 - RNA, 19 nt, Artificial Sequence
  Description of Artificial Sequence: Synthetic oligonucleotide
  Sense strand starting at position 2498 of SEQ ID NO: 317009
augauuaagucggucagac

SEQ ID NO: 457360 - RNA, 19 nt, Artificial Sequence
  Description of Artificial Sequence: Synthetic oligonucleotide
  Antisense Strand to SEQ ID NO: 457359
gucugaccgacuuaaucau

SEQ ID NO: 457361 - RNA, 19 nt, Artificial Sequence
  Description of Artificial Sequence: Synthetic oligonucleotide
  Sense strand starting at position 2500 of SEQ ID NO: 317009
gauuaagucggucagacuu

SEQ ID NO: 457362 - RNA, 19 nt, Artificial Sequence
  Description of Artificial Sequence: Synthetic oligonucleotide
  Antisense Strand to SEQ ID NO: 457361
aagucugaccgacuuaauc

SEQ ID NO: 457363 - RNA, 19 nt, Artificial Sequence
  Description of Artificial Sequence: Synthetic oligonucleotide
  Sense strand starting at position 2539 of SEQ ID NO: 317009
acaugaugcugaguauaaa

SEQ ID NO: 457364 - RNA, 19 nt, Artificial Sequence
  Description of Artificial Sequence: Synthetic oligonucleotide
  Antisense Strand to SEQ ID NO: 457363
uuuauacucagcaucaugu

SEQ ID NO: 457365 - RNA, 19 nt, Artificial Sequence
  Description of Artificial Sequence: Synthetic oligonucleotide
  Sense strand starting at position 2767 of SEQ ID NO: 317009
gcaggagugauccauuguu

SEQ ID NO: 457366 - RNA, 19 nt, Artificial Sequence
  Description of Artificial Sequence: Synthetic oligonucleotide
  Antisense Strand to SEQ ID NO: 457365
aacaauggaucacuccugc

SEQ ID NO: 457367 - RNA, 19 nt, Artificial Sequence
  Description of Artificial Sequence: Synthetic oligonucleotide
  Sense strand starting at position 2862 of SEQ ID NO: 317009
ggaaaucuagcuuaauagu

SEQ ID NO: 457368 - RNA, 19 nt, Artificial Sequence
  Description of Artificial Sequence: Synthetic oligonucleotide
  Antisense Strand to SEQ ID NO: 457367
acuauuaagcuagauuucc

SEQ ID NO: 457369 - RNA, 19 nt, Artificial Sequence
  Description of Artificial Sequence: Synthetic oligonucleotide
  Sense strand starting at position 2925 of SEQ ID NO: 317009
cgaagucugcuugagaaau

SEQ ID NO: 457370 - RNA, 19 nt, Artificial Sequence
  Description of Artificial Sequence: Synthetic oligonucleotide
  Antisense Strand to SEQ ID NO: 457369
auuucucaagcagacuucg

SEQ ID NO: 457371 - RNA, 19 nt, Artificial Sequence
  Description of Artificial Sequence: Synthetic oligonucleotide
  Sense strand starting at position 3786 of SEQ ID NO: 317009
uugagaagggucuguucaa

SEQ ID NO: 457372 - RNA, 19 nt, Artificial Sequence
  Description of Artificial Sequence: Synthetic oligonucleotide
  Antisense Strand to SEQ ID NO: 457371
uugaacagacccuucucaa

SEQ ID NO: 457373 - RNA, 19 nt, Artificial Sequence
  Description of Artificial Sequence: Synthetic oligonucleotide
  Sense strand starting at position 3787 of SEQ ID NO: 317009
ugagaagggucuguucaag

SEQ ID NO: 457374 - RNA, 19 nt, Artificial Sequence
  Description of Artificial Sequence: Synthetic oligonucleotide
  Antisense Strand to SEQ ID NO: 457373
cuugaacagacccuucuca

SEQ ID NO: 457375 - RNA, 19 nt, Artificial Sequence
  Description of Artificial Sequence: Synthetic oligonucleotide
  Sense strand starting at position 18 of SEQ ID NO: 317010
gagagacauucugagcaga

SEQ ID NO: 457376 - RNA, 19 nt, Artificial Sequence
  Description of Artificial Sequence: Synthetic oligonucleotide
  Antisense Strand to SEQ ID NO: 457375
ucugcucagaaugucucuc

SEQ ID NO: 457377 - RNA, 19 nt, Artificial Sequence
  Description of Artificial Sequence: Synthetic oligonucleotide
  Sense strand starting at position 593 of SEQ ID NO: 317010
gcacgagggucucuguguu

SEQ ID NO: 457378 - RNA, 19 nt, Artificial Sequence
  Description of Artificial Sequence: Synthetic oligonucleotide
  Antisense Strand to SEQ ID NO: 457377
aacacagagacccucgugc

SEQ ID NO: 457379 - RNA, 19 nt, Artificial Sequence
  Description of Artificial Sequence: Synthetic oligonucleotide
  Sense strand starting at position 599 of SEQ ID NO: 317010
gggucucuguguuuccaga

SEQ ID NO: 457380 - RNA, 19 nt, Artificial Sequence
  Description of Artificial Sequence: Synthetic oligonucleotide
  Antisense Strand to SEQ ID NO: 457379
ucuggaaacacagagaccc

SEQ ID NO: 457381 - RNA, 19 nt, Artificial Sequence
  Description of Artificial Sequence: Synthetic oligonucleotide
  Sense strand starting at position 601 of SEQ ID NO: 317010
gucucuguguuuccagaag

SEQ ID NO: 457382 - RNA, 19 nt, Artificial Sequence
  Description of Artificial Sequence: Synthetic oligonucleotide
  Antisense Strand to SEQ ID NO: 457381
cuucuggaaacacagagac

SEQ ID NO: 457383 - RNA, 19 nt, Artificial Sequence
  Description of Artificial Sequence: Synthetic oligonucleotide
  Sense strand starting at position 699 of SEQ ID NO: 317010
ggugcugugaccgaugaga

SEQ ID NO: 457384 - RNA, 19 nt, Artificial Sequence
  Description of Artificial Sequence: Synthetic oligonucleotide
  Antisense Strand to SEQ ID NO: 457383
ucucaucggucacagcacc

SEQ ID NO: 457385 - RNA, 19 nt, Artificial Sequence
  Description of Artificial Sequence: Synthetic oligonucleotide
  Sense strand starting at position 1299 of SEQ ID NO: 317010
ccgugcguucagugacuaa

SEQ ID NO: 457386 - RNA, 19 nt, Artificial Sequence
  Description of Artificial Sequence: Synthetic oligonucleotide
  Antisense Strand to SEQ ID NO: 457385
uuagucacugaacgcacgg

SEQ ID NO: 457387 - RNA, 19 nt, Artificial Sequence
  Description of Artificial Sequence: Synthetic oligonucleotide
  Sense strand starting at position 1504 of SEQ ID NO: 317010
ggagacuccugguuuaccu

SEQ ID NO: 457388 - RNA, 19 nt, Artificial Sequence
  Description of Artificial Sequence: Synthetic oligonucleotide
  Antisense Strand to SEQ ID NO: 457387
agguaaaccaggagucucc

SEQ ID NO: 457389 - RNA, 19 nt, Artificial Sequence
  Description of Artificial Sequence: Synthetic oligonucleotide
  Sense strand starting at position 2152 of SEQ ID NO: 317010
ucggaaagcgcucagaaga

SEQ ID NO: 457390 - RNA, 19 nt, Artificial Sequence
  Description of Artificial Sequence: Synthetic oligonucleotide
  Antisense Strand to SEQ ID NO: 457389
ucuucugagcgcuuuccga

SEQ ID NO: 457391 - RNA, 19 nt, Artificial Sequence
  Description of Artificial Sequence: Synthetic oligonucleotide
  Sense strand starting at position 2178 of SEQ ID NO: 317010
gcccguuggugcuauguga

SEQ ID NO: 457392 - RNA, 19 nt, Artificial Sequence
  Description of Artificial Sequence: Synthetic oligonucleotide
  Antisense Strand to SEQ ID NO: 457391
ucacauagcaccaacgggc

SEQ ID NO: 457393 - RNA, 19 nt, Artificial Sequence
  Description of Artificial Sequence: Synthetic oligonucleotide
  Sense strand starting at position 2201 of SEQ ID NO: 317010
agccauuacugucuuguuu

SEQ ID NO: 457394 - RNA, 19 nt, Artificial Sequence
  Description of Artificial Sequence: Synthetic oligonucleotide
  Antisense Strand to SEQ ID NO: 457393
aaacaagacaguaauggcu

SEQ ID NO: 457395 - RNA, 19 nt, Artificial Sequence
  Description of Artificial Sequence: Synthetic oligonucleotide
  Sense strand starting at position 2348 of SEQ ID NO: 317010
ugaguaaagcgugcgcuuu

SEQ ID NO: 457396 - RNA, 19 nt, Artificial Sequence
  Description of Artificial Sequence: Synthetic oligonucleotide
  Antisense Strand to SEQ ID NO: 457395
aaagcgcacgcuuuacuca

SEQ ID NO: 457397 - RNA, 19 nt, Artificial Sequence
  Description of Artificial Sequence: Synthetic oligonucleotide
  Sense strand starting at position 2349 of SEQ ID NO: 317010
gaguaaagcgugcgcuuua

SEQ ID NO: 457398 - RNA, 19 nt, Artificial Sequence
  Description of Artificial Sequence: Synthetic oligonucleotide
  Antisense Strand to SEQ ID NO: 457397
uaaagcgcacgcuuuacuc

SEQ ID NO: 457399 - RNA, 19 nt, Artificial Sequence
  Description of Artificial Sequence: Synthetic oligonucleotide
  Sense strand starting at position 2579 of SEQ ID NO: 317010
guaggaugugcguagguaa

SEQ ID NO: 457400 - RNA, 19 nt, Artificial Sequence
  Description of Artificial Sequence: Synthetic oligonucleotide
  Antisense Strand to SEQ ID NO: 457399
uuaccuacgcacauccuac

SEQ ID NO: 457401 - RNA, 19 nt, Artificial Sequence
  Description of Artificial Sequence: Synthetic oligonucleotide
  Sense strand starting at position 2860 of SEQ ID NO: 317010
uugaaaucggccugggaga

SEQ ID NO: 457402 - RNA, 19 nt, Artificial Sequence
  Description of Artificial Sequence: Synthetic oligonucleotide
  Antisense Strand to SEQ ID NO: 457401
ucucccaggccgauuucaa

SEQ ID NO: 457403 - RNA, 19 nt, Artificial Sequence
  Description of Artificial Sequence: Synthetic oligonucleotide
  Sense strand starting at position 2861 of SEQ ID NO: 317010
ugaaaucggccugggagau

SEQ ID NO: 457404 - RNA, 19 nt, Artificial Sequence
  Description of Artificial Sequence: Synthetic oligonucleotide
  Antisense Strand to SEQ ID NO: 457403
aucucccaggccgauuuca

SEQ ID NO: 457405 - RNA, 19 nt, Artificial Sequence
  Description of Artificial Sequence: Synthetic oligonucleotide
  Sense strand starting at position 2915 of SEQ ID NO: 317010
gccagaugcgaugguauau

SEQ ID NO: 457406 - RNA, 19 nt, Artificial Sequence
  Description of Artificial Sequence: Synthetic oligonucleotide
  Antisense Strand to SEQ ID NO: 457405
auauaccaucgcaucuggc

SEQ ID NO: 457407 - RNA, 19 nt, Artificial Sequence
  Description of Artificial Sequence: Synthetic oligonucleotide
  Sense strand starting at position 2944 of SEQ ID NO: 317010
cccagcuacccacgaaauu

SEQ ID NO: 457408 - RNA, 19 nt, Artificial Sequence
  Description of Artificial Sequence: Synthetic oligonucleotide
  Antisense Strand to SEQ ID NO: 457407
aauuucguggguagcuggg

SEQ ID NO: 457409 - RNA, 19 nt, Artificial Sequence
  Description of Artificial Sequence: Synthetic oligonucleotide
  Sense strand starting at position 2956 of SEQ ID NO: 317010
cgaaauugaggugggagau

SEQ ID NO: 457410 - RNA, 19 nt, Artificial Sequence
  Description of Artificial Sequence: Synthetic oligonucleotide
  Antisense Strand to SEQ ID NO: 457409
aucucccaccucaauuucg

SEQ ID NO: 457411 - RNA, 19 nt, Artificial Sequence
  Description of Artificial Sequence: Synthetic oligonucleotide
  Sense strand starting at position 3137 of SEQ ID NO: 317010
gaaggauaauuagaguuac

SEQ ID NO: 457412 - RNA, 19 nt, Artificial Sequence
  Description of Artificial Sequence: Synthetic oligonucleotide
  Antisense Strand to SEQ ID NO: 457411
guaacucuaauuauccuuc

SEQ ID NO: 457413 - RNA, 19 nt, Artificial Sequence
  Description of Artificial Sequence: Synthetic oligonucleotide
  Sense strand starting at position 3149 of SEQ ID NO: 317010
gaguuacaguguucugggu

SEQ ID NO: 457414 - RNA, 19 nt, Artificial Sequence
  Description of Artificial Sequence: Synthetic oligonucleotide
  Antisense Strand to SEQ ID NO: 457413
acccagaacacuguaacuc

SEQ ID NO: 457415 - RNA, 19 nt, Artificial Sequence
  Description of Artificial Sequence: Synthetic oligonucleotide
  Sense strand starting at position 3153 of SEQ ID NO: 317010
uacaguguucugggucuuu

SEQ ID NO: 457416 - RNA, 19 nt, Artificial Sequence
  Description of Artificial Sequence: Synthetic oligonucleotide
  Antisense Strand to SEQ ID NO: 457415
aaagacccagaacacugua

SEQ ID NO: 457417 - RNA, 19 nt, Artificial Sequence
  Description of Artificial Sequence: Synthetic oligonucleotide
  Sense strand starting at position 3209 of SEQ ID NO: 317010
uaggucuucuuauguugaa

SEQ ID NO: 457418 - RNA, 19 nt, Artificial Sequence
  Description of Artificial Sequence: Synthetic oligonucleotide
  Antisense Strand to SEQ ID NO: 457417
uucaacauaagaagaccua

SEQ ID NO: 457419 - RNA, 19 nt, Artificial Sequence
  Description of Artificial Sequence: Synthetic oligonucleotide
  Sense strand starting at position 3210 of SEQ ID NO: 317010
aggucuucuuauguugaaa

SEQ ID NO: 457420 - RNA, 19 nt, Artificial Sequence
  Description of Artificial Sequence: Synthetic oligonucleotide
  Antisense Strand to SEQ ID NO: 457419
uuucaacauaagaagaccu

SEQ ID NO: 457421 - RNA, 19 nt, Artificial Sequence
  Description of Artificial Sequence: Synthetic oligonucleotide
  Sense strand starting at position 3257 of SEQ ID NO: 317010
agugaaauaguguguauau

SEQ ID NO: 457422 - RNA, 19 nt, Artificial Sequence
  Description of Artificial Sequence: Synthetic oligonucleotide
  Antisense Strand to SEQ ID NO: 457421
auauacacacuauuucacu

SEQ ID NO: 457423 - RNA, 19 nt, Artificial Sequence
  Description of Artificial Sequence: Synthetic oligonucleotide
  Sense strand starting at position 3258 of SEQ ID NO: 317010
gugaaauaguguguauaua

SEQ ID NO: 457424 - RNA, 19 nt, Artificial Sequence
  Description of Artificial Sequence: Synthetic oligonucleotide
  Antisense Strand to SEQ ID NO: 457423
uauauacacacuauuucac

SEQ ID NO: 457425 - RNA, 19 nt, Artificial Sequence
  Description of Artificial Sequence: Synthetic oligonucleotide
  Sense strand starting at position 3266 of SEQ ID NO: 317010
guguguauauauuccaaau

SEQ ID NO: 457426 - RNA, 19 nt, Artificial Sequence
  Description of Artificial Sequence: Synthetic oligonucleotide
  Antisense Strand to SEQ ID NO: 457425
auuuggaauauauacacac

SEQ ID NO: 457427 - RNA, 19 nt, Artificial Sequence
  Description of Artificial Sequence: Synthetic oligonucleotide
  Sense strand starting at position 3374 of SEQ ID NO: 317010
acagaacugucuccaggaa

SEQ ID NO: 457428 - RNA, 19 nt, Artificial Sequence
  Description of Artificial Sequence: Synthetic oligonucleotide
  Antisense Strand to SEQ ID NO: 457427
uuccuggagacaguucugu

SEQ ID NO: 457429 - RNA, 19 nt, Artificial Sequence
  Description of Artificial Sequence: Synthetic oligonucleotide
  Sense strand starting at position 3444 of SEQ ID NO: 317010
auggauaacucgcuuuaaa

SEQ ID NO: 457430 - RNA, 19 nt, Artificial Sequence
  Description of Artificial Sequence: Synthetic oligonucleotide
  Antisense Strand to SEQ ID NO: 457429
uuuaaagcgaguuauccau

SEQ ID NO: 457431 - RNA, 19 nt, Artificial Sequence
  Description of Artificial Sequence: Synthetic oligonucleotide
  Sense strand starting at position 3469 of SEQ ID NO: 317010
uccucaaagcgucagagaa

SEQ ID NO: 457432 - RNA, 19 nt, Artificial Sequence
  Description of Artificial Sequence: Synthetic oligonucleotide
  Antisense Strand to SEQ ID NO: 457431
uucucugacgcuuugagga

SEQ ID NO: 457433 - RNA, 19 nt, Artificial Sequence
  Description of Artificial Sequence: Synthetic oligonucleotide
  Sense strand starting at position 3471 of SEQ ID NO: 317010
cucaaagcgucagagaacu

SEQ ID NO: 457434 - RNA, 19 nt, Artificial Sequence
  Description of Artificial Sequence: Synthetic oligonucleotide
  Antisense Strand to SEQ ID NO: 457433
aguucucugacgcuuugag

SEQ ID NO: 457435 - RNA, 19 nt, Artificial Sequence
  Description of Artificial Sequence: Synthetic oligonucleotide
  Sense strand starting at position 3477 of SEQ ID NO: 317010
gcgucagagaacugagaaa

SEQ ID NO: 457436 - RNA, 19 nt, Artificial Sequence
  Description of Artificial Sequence: Synthetic oligonucleotide
  Antisense Strand to SEQ ID NO: 457435
uuucucaguucucugacgc

SEQ ID NO: 457437 - RNA, 19 nt, Artificial Sequence
  Description of Artificial Sequence: Synthetic oligonucleotide
  Sense strand starting at position 3819 of SEQ ID NO: 317010
ugguaaagacuuuggguuu

SEQ ID NO: 457438 - RNA, 19 nt, Artificial Sequence
  Description of Artificial Sequence: Synthetic oligonucleotide
  Antisense Strand to SEQ ID NO: 457437
aaacccaaagucuuuacca

SEQ ID NO: 457439 - RNA, 19 nt, Artificial Sequence
  Description of Artificial Sequence: Synthetic oligonucleotide
  Sense strand starting at position 40 of SEQ ID NO: 317011
gucugacuuucccuugaaa

SEQ ID NO: 457440 - RNA, 19 nt, Artificial Sequence
  Description of Artificial Sequence: Synthetic oligonucleotide
  Antisense Strand to SEQ ID NO: 457439
uuucaagggaaagucagac

SEQ ID NO: 457441 - RNA, 19 nt, Artificial Sequence
  Description of Artificial Sequence: Synthetic oligonucleotide
  Sense strand starting at position 117 of SEQ ID NO: 317011
guaugugcguguauuugca

SEQ ID NO: 457442 - RNA, 19 nt, Artificial Sequence
  Description of Artificial Sequence: Synthetic oligonucleotide
  Antisense Strand to SEQ ID NO: 457441
ugcaaauacacgcacauac

SEQ ID NO: 457443 - RNA, 19 nt, Artificial Sequence
  Description of Artificial Sequence: Synthetic oligonucleotide
  Sense strand starting at position 130 of SEQ ID NO: 317011
uuugcaaguccagacuuua

SEQ ID NO: 457444 - RNA, 19 nt, Artificial Sequence
  Description of Artificial Sequence: Synthetic oligonucleotide
  Antisense Strand to SEQ ID NO: 457443
uaaagucuggacuugcaaa

SEQ ID NO: 457445 - RNA, 19 nt, Artificial Sequence
  Description of Artificial Sequence: Synthetic oligonucleotide
  Sense strand starting at position 202 of SEQ ID NO: 317011
gcuggagugcugucaugug

SEQ ID NO: 457446 - RNA, 19 nt, Artificial Sequence
  Description of Artificial Sequence: Synthetic oligonucleotide
  Antisense Strand to SEQ ID NO: 457445
cacaugacagcacuccagc

SEQ ID NO: 457447 - RNA, 19 nt, Artificial Sequence
  Description of Artificial Sequence: Synthetic oligonucleotide
  Sense strand starting at position 488 of SEQ ID NO: 317011
cuuggacuuguuuggaaua

SEQ ID NO: 457448 - RNA, 19 nt, Artificial Sequence
  Description of Artificial Sequence: Synthetic oligonucleotide
  Antisense Strand to SEQ ID NO: 457447
uauuccaaacaaguccaag

SEQ ID NO: 457449 - RNA, 19 nt, Artificial Sequence
  Description of Artificial Sequence: Synthetic oligonucleotide
  Sense strand starting at position 533 of SEQ ID NO: 317011
agacauuucugcugaacag

SEQ ID NO: 457450 - RNA, 19 nt, Artificial Sequence
  Description of Artificial Sequence: Synthetic oligonucleotide
  Antisense Strand to SEQ ID NO: 457449
cuguucagcagaaaugucu

SEQ ID NO: 457451 - RNA, 19 nt, Artificial Sequence
  Description of Artificial Sequence: Synthetic oligonucleotide
  Sense strand starting at position 618 of SEQ ID NO: 317011
ucagaagguugacaacaaa

SEQ ID NO: 457452 - RNA, 19 nt, Artificial Sequence
  Description of Artificial Sequence: Synthetic oligonucleotide
  Antisense Strand to SEQ ID NO: 457451
uuuguugucaaccuucuga

SEQ ID NO: 457453 - RNA, 19 nt, Artificial Sequence
  Description of Artificial Sequence: Synthetic oligonucleotide
  Sense strand starting at position 701 of SEQ ID NO: 317011
uuagauuacuguuugagaa

SEQ ID NO: 457454 - RNA, 19 nt, Artificial Sequence
  Description of Artificial Sequence: Synthetic oligonucleotide
  Antisense Strand to SEQ ID NO: 457453
uucucaaacaguaaucuaa

SEQ ID NO: 457455 - RNA, 19 nt, Artificial Sequence
  Description of Artificial Sequence: Synthetic oligonucleotide
  Sense strand starting at position 702 of SEQ ID NO: 317011
uagauuacuguuugagaac

SEQ ID NO: 457456 - RNA, 19 nt, Artificial Sequence
  Description of Artificial Sequence: Synthetic oligonucleotide
  Antisense Strand to SEQ ID NO: 457455
guucucaaacaguaaucua

SEQ ID NO: 457457 - RNA, 19 nt, Artificial Sequence
  Description of Artificial Sequence: Synthetic oligonucleotide
  Sense strand starting at position 807 of SEQ ID NO: 317011
ccgggauuacuugagcuca

SEQ ID NO: 457458 - RNA, 19 nt, Artificial Sequence
  Description of Artificial Sequence: Synthetic oligonucleotide
  Antisense Strand to SEQ ID NO: 457457
ugagcucaaguaaucccgg

SEQ ID NO: 457459 - RNA, 19 nt, Artificial Sequence
  Description of Artificial Sequence: Synthetic oligonucleotide
  Sense strand starting at position 856 of SEQ ID NO: 317011
gaaacuccgucgcuauaaa

SEQ ID NO: 457460 - RNA, 19 nt, Artificial Sequence
  Description of Artificial Sequence: Synthetic oligonucleotide
  Antisense Strand to SEQ ID NO: 457459
uuuauagcgacggaguuuc

SEQ ID NO: 457461 - RNA, 19 nt, Artificial Sequence
  Description of Artificial Sequence: Synthetic oligonucleotide
  Sense strand starting at position 1063 of SEQ ID NO: 317011
ucuggaaguccuuacuuua

SEQ ID NO: 457462 - RNA, 19 nt, Artificial Sequence
  Description of Artificial Sequence: Synthetic oligonucleotide
  Antisense Strand to SEQ ID NO: 457461
uaaaguaaggacuuccaga

SEQ ID NO: 457463 - RNA, 19 nt, Artificial Sequence
  Description of Artificial Sequence: Synthetic oligonucleotide
  Sense strand starting at position 1066 of SEQ ID NO: 317011
ggaaguccuuacuuuauau

SEQ ID NO: 457464 - RNA, 19 nt, Artificial Sequence
  Description of Artificial Sequence: Synthetic oligonucleotide
  Antisense Strand to SEQ ID NO: 457463
auauaaaguaaggacuucc

SEQ ID NO: 457465 - RNA, 19 nt, Artificial Sequence
  Description of Artificial Sequence: Synthetic oligonucleotide
  Sense strand starting at position 2314 of SEQ ID NO: 317011
cccguuuccggucaauaua

SEQ ID NO: 457466 - RNA, 19 nt, Artificial Sequence
  Description of Artificial Sequence: Synthetic oligonucleotide
  Antisense Strand to SEQ ID NO: 457465
uauauugaccggaaacggg

SEQ ID NO: 457467 - RNA, 19 nt, Artificial Sequence
  Description of Artificial Sequence: Synthetic oligonucleotide
  Sense strand starting at position 2402 of SEQ ID NO: 317011
gagacaccugagugcucau

SEQ ID NO: 457468 - RNA, 19 nt, Artificial Sequence
  Description of Artificial Sequence: Synthetic oligonucleotide
  Antisense Strand to SEQ ID NO: 457467
augagcacucaggugucuc

SEQ ID NO: 457469 - RNA, 19 nt, Artificial Sequence
  Description of Artificial Sequence: Synthetic oligonucleotide
  Sense strand starting at position 2432 of SEQ ID NO: 317011
uugggaagcucucuuaaga

SEQ ID NO: 457470 - RNA, 19 nt, Artificial Sequence
  Description of Artificial Sequence: Synthetic oligonucleotide
  Antisense Strand to SEQ ID NO: 457469
ucuuaagagagcuucccaa

SEQ ID NO: 457471 - RNA, 19 nt, Artificial Sequence
  Description of Artificial Sequence: Synthetic oligonucleotide
  Sense strand starting at position 2514 of SEQ ID NO: 317011
uugggugucaagcacuaaa

SEQ ID NO: 457472 - RNA, 19 nt, Artificial Sequence
  Description of Artificial Sequence: Synthetic oligonucleotide
  Antisense Strand to SEQ ID NO: 457471
uuuagugcuugacacccaa

SEQ ID NO: 457473 - RNA, 19 nt, Artificial Sequence
  Description of Artificial Sequence: Synthetic oligonucleotide
  Sense strand starting at position 2617 of SEQ ID NO: 317011
ucaacaagacucugugcuu

SEQ ID NO: 457474 - RNA, 19 nt, Artificial Sequence
  Description of Artificial Sequence: Synthetic oligonucleotide
  Antisense Strand to SEQ ID NO: 457473
aagcacagagucuuguuga

SEQ ID NO: 457475 - RNA, 19 nt, Artificial Sequence
  Description of Artificial Sequence: Synthetic oligonucleotide
  Sense strand starting at position 2828 of SEQ ID NO: 317011
accagcauuccaggagguu

SEQ ID NO: 457476 - RNA, 19 nt, Artificial Sequence
  Description of Artificial Sequence: Synthetic oligonucleotide
  Antisense Strand to SEQ ID NO: 457475
aaccuccuggaaugcuggu

SEQ ID NO: 457477 - RNA, 19 nt, Artificial Sequence
  Description of Artificial Sequence: Synthetic oligonucleotide
  Sense strand starting at position 2829 of SEQ ID NO: 317011
ccagcauuccaggagguuu

SEQ ID NO: 457478 - RNA, 19 nt, Artificial Sequence
  Description of Artificial Sequence: Synthetic oligonucleotide
  Antisense Strand to SEQ ID NO: 457477
aaaccuccuggaaugcugg

SEQ ID NO: 457479 - RNA, 19 nt, Artificial Sequence
  Description of Artificial Sequence: Synthetic oligonucleotide
  Sense strand starting at position 2881 of SEQ ID NO: 317011
cugcgaagugcucugcaaa

SEQ ID NO: 457480 - RNA, 19 nt, Artificial Sequence
  Description of Artificial Sequence: Synthetic oligonucleotide
  Antisense Strand to SEQ ID NO: 457479
uuugcagagcacuucgcag

SEQ ID NO: 457481 - RNA, 19 nt, Artificial Sequence
  Description of Artificial Sequence: Synthetic oligonucleotide
  Sense strand starting at position 2971 of SEQ ID NO: 317011
uuaacugaauguguaacau

SEQ ID NO: 457482 - RNA, 19 nt, Artificial Sequence
  Description of Artificial Sequence: Synthetic oligonucleotide
  Antisense Strand to SEQ ID NO: 457481
auguuacacauucaguuaa

SEQ ID NO: 457483 - RNA, 19 nt, Artificial Sequence
  Description of Artificial Sequence: Synthetic oligonucleotide
  Sense strand starting at position 2997 of SEQ ID NO: 317011
ugcauuauucugcauguca

SEQ ID NO: 457484 - RNA, 19 nt, Artificial Sequence
  Description of Artificial Sequence: Synthetic oligonucleotide
  Antisense Strand to SEQ ID NO: 457483
ugacaugcagaauaaugca

SEQ ID NO: 457485 - RNA, 19 nt, Artificial Sequence
  Description of Artificial Sequence: Synthetic oligonucleotide
  Sense strand starting at position 3066 of SEQ ID NO: 317011
caggguugcugacugaaag

SEQ ID NO: 457486 - RNA, 19 nt, Artificial Sequence
  Description of Artificial Sequence: Synthetic oligonucleotide
  Antisense Strand to SEQ ID NO: 457485
cuuucagucagcaacccug

SEQ ID NO: 457487 - RNA, 19 nt, Artificial Sequence
  Description of Artificial Sequence: Synthetic oligonucleotide
  Sense strand starting at position 3104 of SEQ ID NO: 317011
ucccauuagcaguguaaag

SEQ ID NO: 457488 - RNA, 19 nt, Artificial Sequence
  Description of Artificial Sequence: Synthetic oligonucleotide
  Antisense Strand to SEQ ID NO: 457487
cuuuacacugcuaauggga

SEQ ID NO: 457489 - RNA, 19 nt, Artificial Sequence
  Description of Artificial Sequence: Synthetic oligonucleotide
  Sense strand starting at position 3106 of SEQ ID NO: 317011
ccauuagcaguguaaagaa

SEQ ID NO: 457490 - RNA, 19 nt, Artificial Sequence
  Description of Artificial Sequence: Synthetic oligonucleotide
  Antisense Strand to SEQ ID NO: 457489
uucuuuacacugcuaaugg

SEQ ID NO: 457491 - RNA, 19 nt, Artificial Sequence
  Description of Artificial Sequence: Synthetic oligonucleotide
  Sense strand starting at position 3249 of SEQ ID NO: 317011
uuggccucuccuuagugua

SEQ ID NO: 457492 - RNA, 19 nt, Artificial Sequence
  Description of Artificial Sequence: Synthetic oligonucleotide
  Antisense Strand to SEQ ID NO: 457491
uacacuaaggagaggccaa

SEQ ID NO: 457493 - RNA, 19 nt, Artificial Sequence
  Description of Artificial Sequence: Synthetic oligonucleotide
  Sense strand starting at position 3254 of SEQ ID NO: 317011
cucuccuuaguguauuaua

SEQ ID NO: 457494 - RNA, 19 nt, Artificial Sequence
  Description of Artificial Sequence: Synthetic oligonucleotide
  Antisense Strand to SEQ ID NO: 457493
uauaauacacuaaggagag

SEQ ID NO: 457495 - RNA, 19 nt, Artificial Sequence
  Description of Artificial Sequence: Synthetic oligonucleotide
  Sense strand starting at position 3302 of SEQ ID NO: 317011
aggucauauguugaccuga

SEQ ID NO: 457496 - RNA, 19 nt, Artificial Sequence
  Description of Artificial Sequence: Synthetic oligonucleotide
  Antisense Strand to SEQ ID NO: 457495
ucaggucaacauaugaccu

SEQ ID NO: 457497 - RNA, 19 nt, Artificial Sequence
  Description of Artificial Sequence: Synthetic oligonucleotide
  Sense strand starting at position 3304 of SEQ ID NO: 317011
gucauauguugaccugaca

SEQ ID NO: 457498 - RNA, 19 nt, Artificial Sequence
  Description of Artificial Sequence: Synthetic oligonucleotide
  Antisense Strand to SEQ ID NO: 457497
ugucaggucaacauaugac

SEQ ID NO: 457499 - RNA, 19 nt, Artificial Sequence
  Description of Artificial Sequence: Synthetic oligonucleotide
  Sense strand starting at position 3307 of SEQ ID NO: 317011
auauguugaccugacaguu

SEQ ID NO: 457500 - RNA, 19 nt, Artificial Sequence
  Description of Artificial Sequence: Synthetic oligonucleotide
  Antisense Strand to SEQ ID NO: 457499
aacugucaggucaacauau

SEQ ID NO: 457501 - RNA, 19 nt, Artificial Sequence
  Description of Artificial Sequence: Synthetic oligonucleotide
  Sense strand starting at position 3351 of SEQ ID NO: 317011
acagcagaguuucccuaaa

SEQ ID NO: 457502 - RNA, 19 nt, Artificial Sequence
  Description of Artificial Sequence: Synthetic oligonucleotide
  Antisense Strand to SEQ ID NO: 457501
uuuagggaaacucugcugu

SEQ ID NO: 457503 - RNA, 19 nt, Artificial Sequence
  Description of Artificial Sequence: Synthetic oligonucleotide
  Sense strand starting at position 3353 of SEQ ID NO: 317011
agcagaguuucccuaaaua

SEQ ID NO: 457504 - RNA, 19 nt, Artificial Sequence
  Description of Artificial Sequence: Synthetic oligonucleotide
  Antisense Strand to SEQ ID NO: 457503
uauuuagggaaacucugcu

SEQ ID NO: 457505 - RNA, 19 nt, Artificial Sequence
  Description of Artificial Sequence: Synthetic oligonucleotide
  Sense strand starting at position 3851 of SEQ ID NO: 317011
uugguuccaugaucuagua

SEQ ID NO: 457506 - RNA, 19 nt, Artificial Sequence
  Description of Artificial Sequence: Synthetic oligonucleotide
  Antisense Strand to SEQ ID NO: 457505
uacuagaucauggaaccaa

SEQ ID NO: 457507 - RNA, 19 nt, Artificial Sequence
  Description of Artificial Sequence: Synthetic oligonucleotide
  Sense strand starting at position 3858 of SEQ ID NO: 317011
caugaucuaguaugacgau

SEQ ID NO: 457508 - RNA, 19 nt, Artificial Sequence
  Description of Artificial Sequence: Synthetic oligonucleotide
  Antisense Strand to SEQ ID NO: 457507
aucgucauacuagaucaug

SEQ ID NO: 457509 - RNA, 19 nt, Artificial Sequence
  Description of Artificial Sequence: Synthetic oligonucleotide
  Sense strand starting at position 3867 of SEQ ID NO: 317011
guaugacgaucugucauag

SEQ ID NO: 457510 - RNA, 19 nt, Artificial Sequence
  Description of Artificial Sequence: Synthetic oligonucleotide
  Antisense Strand to SEQ ID NO: 457509
cuaugacagaucgucauac

SEQ ID NO: 457511 - RNA, 19 nt, Artificial Sequence
  Description of Artificial Sequence: Synthetic oligonucleotide
  Sense strand starting at position 3888 of SEQ ID NO: 317011
uuagauucuccagaagcuu

SEQ ID NO: 457512 - RNA, 19 nt, Artificial Sequence
  Description of Artificial Sequence: Synthetic oligonucleotide
  Antisense Strand to SEQ ID NO: 457511
aagcuucuggagaaucuaa

SEQ ID NO: 457513 - RNA, 19 nt, Artificial Sequence
  Description of Artificial Sequence: Synthetic oligonucleotide
  Sense strand starting at position 3897 of SEQ ID NO: 317011
ccagaagcuuucucugaga

SEQ ID NO: 457514 - RNA, 19 nt, Artificial Sequence
  Description of Artificial Sequence: Synthetic oligonucleotide
  Antisense Strand to SEQ ID NO: 457513
ucucagagaaagcuucugg

SEQ ID NO: 457515 - RNA, 19 nt, Artificial Sequence
  Description of Artificial Sequence: Synthetic oligonucleotide
  Sense strand starting at position 3899 of SEQ ID NO: 317011
agaagcuuucucugagaca

SEQ ID NO: 457516 - RNA, 19 nt, Artificial Sequence
  Description of Artificial Sequence: Synthetic oligonucleotide
  Antisense Strand to SEQ ID NO: 457515
ugucucagagaaagcuucu

SEQ ID NO: 457517 - RNA, 19 nt, Artificial Sequence
  Description of Artificial Sequence: Synthetic oligonucleotide
  Sense strand starting at position 3929 of SEQ ID NO: 317011
gcaaguaggucaccugaga

SEQ ID NO: 457518 - RNA, 19 nt, Artificial Sequence
  Description of Artificial Sequence: Synthetic oligonucleotide
  Antisense Strand to SEQ ID NO: 457517
ucucaggugaccuacuugc

SEQ ID NO: 457519 - RNA, 19 nt, Artificial Sequence
  Description of Artificial Sequence: Synthetic oligonucleotide
  Sense strand starting at position 143 of SEQ ID NO: 317012
ugaggagugacuugacuau

SEQ ID NO: 457520 - RNA, 19 nt, Artificial Sequence
  Description of Artificial Sequence: Synthetic oligonucleotide
  Antisense Strand to SEQ ID NO: 457519
auagucaagucacuccuca

SEQ ID NO: 457521 - RNA, 19 nt, Artificial Sequence
  Description of Artificial Sequence: Synthetic oligonucleotide
  Sense strand starting at position 187 of SEQ ID NO: 317012
auucuauuacggcauauga

SEQ ID NO: 457522 - RNA, 19 nt, Artificial Sequence
  Description of Artificial Sequence: Synthetic oligonucleotide
  Antisense Strand to SEQ ID NO: 457521
ucauaugccguaauagaau

SEQ ID NO: 457523 - RNA, 19 nt, Artificial Sequence
  Description of Artificial Sequence: Synthetic oligonucleotide
  Sense strand starting at position 189 of SEQ ID NO: 317012
ucuauuacggcauaugauu

SEQ ID NO: 457524 - RNA, 19 nt, Artificial Sequence
  Description of Artificial Sequence: Synthetic oligonucleotide
  Antisense Strand to SEQ ID NO: 457523
aaucauaugccguaauaga

SEQ ID NO: 457525 - RNA, 19 nt, Artificial Sequence
  Description of Artificial Sequence: Synthetic oligonucleotide
  Sense strand starting at position 502 of SEQ ID NO: 317012
ugaccauaaugaguuuacu

SEQ ID NO: 457526 - RNA, 19 nt, Artificial Sequence
  Description of Artificial Sequence: Synthetic oligonucleotide
  Antisense Strand to SEQ ID NO: 457525
aguaaacucauuaugguca

SEQ ID NO: 457527 - RNA, 19 nt, Artificial Sequence
  Description of Artificial Sequence: Synthetic oligonucleotide
  Sense strand starting at position 692 of SEQ ID NO: 317012
auucucauaugguuacuga

SEQ ID NO: 457528 - RNA, 19 nt, Artificial Sequence
  Description of Artificial Sequence: Synthetic oligonucleotide
  Antisense Strand to SEQ ID NO: 457527
ucaguaaccauaugagaau

SEQ ID NO: 457529 - RNA, 19 nt, Artificial Sequence
  Description of Artificial Sequence: Synthetic oligonucleotide
  Sense strand starting at position 743 of SEQ ID NO: 317012
uuagcaugauaccuagaau

SEQ ID NO: 457530 - RNA, 19 nt, Artificial Sequence
  Description of Artificial Sequence: Synthetic oligonucleotide
  Antisense Strand to SEQ ID NO: 457529
auucuagguaucaugcuaa

SEQ ID NO: 457531 - RNA, 19 nt, Artificial Sequence
  Description of Artificial Sequence: Synthetic oligonucleotide
  Sense strand starting at position 892 of SEQ ID NO: 317012
gggcuaccucccuauaaag

SEQ ID NO: 457532 - RNA, 19 nt, Artificial Sequence
  Description of Artificial Sequence: Synthetic oligonucleotide
  Antisense Strand to SEQ ID NO: 457531
cuuuauagggagguagccc

SEQ ID NO: 457533 - RNA, 19 nt, Artificial Sequence
  Description of Artificial Sequence: Synthetic oligonucleotide
  Sense strand starting at position 902 of SEQ ID NO: 317012
ccuauaaagucacuguaag

SEQ ID NO: 457534 - RNA, 19 nt, Artificial Sequence
  Description of Artificial Sequence: Synthetic oligonucleotide
  Antisense Strand to SEQ ID NO: 457533
cuuacagugacuuuauagg

SEQ ID NO: 457535 - RNA, 19 nt, Artificial Sequence
  Description of Artificial Sequence: Synthetic oligonucleotide
  Sense strand starting at position 916 of SEQ ID NO: 317012
guaagcugaaaguaugaua

SEQ ID NO: 457536 - RNA, 19 nt, Artificial Sequence
  Description of Artificial Sequence: Synthetic oligonucleotide
  Antisense Strand to SEQ ID NO: 457535
uaucauacuuucagcuuac

SEQ ID NO: 457537 - RNA, 19 nt, Artificial Sequence
  Description of Artificial Sequence: Synthetic oligonucleotide
  Sense strand starting at position 1255 of SEQ ID NO: 317012
ucugaaguuguuugaaaga

SEQ ID NO: 457538 - RNA, 19 nt, Artificial Sequence
  Description of Artificial Sequence: Synthetic oligonucleotide
  Antisense Strand to SEQ ID NO: 457537
ucuuucaaacaacuucaga

SEQ ID NO: 457539 - RNA, 19 nt, Artificial Sequence
  Description of Artificial Sequence: Synthetic oligonucleotide
  Sense strand starting at position 1260 of SEQ ID NO: 317012
aguuguuugaaagaucagu

SEQ ID NO: 457540 - RNA, 19 nt, Artificial Sequence
  Description of Artificial Sequence: Synthetic oligonucleotide
  Antisense Strand to SEQ ID NO: 457539
acugaucuuucaaacaacu

SEQ ID NO: 457541 - RNA, 19 nt, Artificial Sequence
  Description of Artificial Sequence: Synthetic oligonucleotide
  Sense strand starting at position 1311 of SEQ ID NO: 317012
auaggcaaccuguauaaca

SEQ ID NO: 457542 - RNA, 19 nt, Artificial Sequence
  Description of Artificial Sequence: Synthetic oligonucleotide
  Antisense Strand to SEQ ID NO: 457541
uguuauacagguugccuau

SEQ ID NO: 457543 - RNA, 19 nt, Artificial Sequence
  Description of Artificial Sequence: Synthetic oligonucleotide
  Sense strand starting at position 1313 of SEQ ID NO: 317012
aggcaaccuguauaacauu

SEQ ID NO: 457544 - RNA, 19 nt, Artificial Sequence
  Description of Artificial Sequence: Synthetic oligonucleotide
  Antisense Strand to SEQ ID NO: 457543
aauguuauacagguugccu

SEQ ID NO: 457545 - RNA, 19 nt, Artificial Sequence
  Description of Artificial Sequence: Synthetic oligonucleotide
  Sense strand starting at position 1349 of SEQ ID NO: 317012
cauaauaaaucugugggau

SEQ ID NO: 457546 - RNA, 19 nt, Artificial Sequence
  Description of Artificial Sequence: Synthetic oligonucleotide
  Antisense Strand to SEQ ID NO: 457545
aucccacagauuuauuaug

SEQ ID NO: 457547 - RNA, 19 nt, Artificial Sequence
  Description of Artificial Sequence: Synthetic oligonucleotide
  Sense strand starting at position 1350 of SEQ ID NO: 317012
auaauaaaucugugggauc

SEQ ID NO: 457548 - RNA, 19 nt, Artificial Sequence
  Description of Artificial Sequence: Synthetic oligonucleotide
  Antisense Strand to SEQ ID NO: 457547
gaucccacagauuuauuau

SEQ ID NO: 457549 - RNA, 19 nt, Artificial Sequence
  Description of Artificial Sequence: Synthetic oligonucleotide
  Sense strand starting at position 1548 of SEQ ID NO: 317012
aucuguaguuagcuaauuu

SEQ ID NO: 457550 - RNA, 19 nt, Artificial Sequence
  Description of Artificial Sequence: Synthetic oligonucleotide
  Antisense Strand to SEQ ID NO: 457549
aaauuagcuaacuacagau

SEQ ID NO: 457551 - RNA, 19 nt, Artificial Sequence
  Description of Artificial Sequence: Synthetic oligonucleotide
  Sense strand starting at position 1552 of SEQ ID NO: 317012
guaguuagcuaauuucuua

SEQ ID NO: 457552 - RNA, 19 nt, Artificial Sequence
  Description of Artificial Sequence: Synthetic oligonucleotide
  Antisense Strand to SEQ ID NO: 457551
uaagaaauuagcuaacuac

SEQ ID NO: 457553 - RNA, 19 nt, Artificial Sequence
  Description of Artificial Sequence: Synthetic oligonucleotide
  Sense strand starting at position 1629 of SEQ ID NO: 317012
agucuuaucuauguaaaga

SEQ ID NO: 457554 - RNA, 19 nt, Artificial Sequence
  Description of Artificial Sequence: Synthetic oligonucleotide
  Antisense Strand to SEQ ID NO: 457553
ucuuuacauagauaagacu

SEQ ID NO: 457555 - RNA, 19 nt, Artificial Sequence
  Description of Artificial Sequence: Synthetic oligonucleotide
  Sense strand starting at position 1707 of SEQ ID NO: 317012
aaagcauaggcauaaaugu

SEQ ID NO: 457556 - RNA, 19 nt, Artificial Sequence
  Description of Artificial Sequence: Synthetic oligonucleotide
  Antisense Strand to SEQ ID NO: 457555
acauuuaugccuaugcuuu

SEQ ID NO: 457557 - RNA, 19 nt, Artificial Sequence
  Description of Artificial Sequence: Synthetic oligonucleotide
  Sense strand starting at position 1759 of SEQ ID NO: 317012
uccuuugaucugggaucau

SEQ ID NO: 457558 - RNA, 19 nt, Artificial Sequence
  Description of Artificial Sequence: Synthetic oligonucleotide
  Antisense Strand to SEQ ID NO: 457557
augaucccagaucaaagga

SEQ ID NO: 457559 - RNA, 19 nt, Artificial Sequence
  Description of Artificial Sequence: Synthetic oligonucleotide
  Sense strand starting at position 1908 of SEQ ID NO: 317012
aggugugugaucuauaagg

SEQ ID NO: 457560 - RNA, 19 nt, Artificial Sequence
  Description of Artificial Sequence: Synthetic oligonucleotide
  Antisense Strand to SEQ ID NO: 457559
ccuuauagaucacacaccu

SEQ ID NO: 457561 - RNA, 19 nt, Artificial Sequence
  Description of Artificial Sequence: Synthetic oligonucleotide
  Sense strand starting at position 1910 of SEQ ID NO: 317012
gugugugaucuauaaggag

SEQ ID NO: 457562 - RNA, 19 nt, Artificial Sequence
  Description of Artificial Sequence: Synthetic oligonucleotide
  Antisense Strand to SEQ ID NO: 457561
cuccuuauagaucacacac

SEQ ID NO: 457563 - RNA, 19 nt, Artificial Sequence
  Description of Artificial Sequence: Synthetic oligonucleotide
  Sense strand starting at position 2176 of SEQ ID NO: 317012
uuccauuaagaauguugaa

SEQ ID NO: 457564 - RNA, 19 nt, Artificial Sequence
  Description of Artificial Sequence: Synthetic oligonucleotide
  Antisense Strand to SEQ ID NO: 457563
uucaacauucuuaauggaa

SEQ ID NO: 457565 - RNA, 19 nt, Artificial Sequence
  Description of Artificial Sequence: Synthetic oligonucleotide
  Sense strand starting at position 2258 of SEQ ID NO: 317012
acuugucaugccuagaaua

SEQ ID NO: 457566 - RNA, 19 nt, Artificial Sequence
  Description of Artificial Sequence: Synthetic oligonucleotide
  Antisense Strand to SEQ ID NO: 457565
uauucuaggcaugacaagu

SEQ ID NO: 457567 - RNA, 19 nt, Artificial Sequence
  Description of Artificial Sequence: Synthetic oligonucleotide
  Sense strand starting at position 2260 of SEQ ID NO: 317012
uugucaugccuagaauaau

SEQ ID NO: 457568 - RNA, 19 nt, Artificial Sequence
  Description of Artificial Sequence: Synthetic oligonucleotide
  Antisense Strand to SEQ ID NO: 457567
auuauucuaggcaugacaa

SEQ ID NO: 457569 - RNA, 19 nt, Artificial Sequence
  Description of Artificial Sequence: Synthetic oligonucleotide
  Sense strand starting at position 2324 of SEQ ID NO: 317012
augaaaguccuuuaagguc

SEQ ID NO: 457570 - RNA, 19 nt, Artificial Sequence
  Description of Artificial Sequence: Synthetic oligonucleotide
  Antisense Strand to SEQ ID NO: 457569
gaccuuaaaggacuuucau

SEQ ID NO: 457571 - RNA, 19 nt, Artificial Sequence
  Description of Artificial Sequence: Synthetic oligonucleotide
  Sense strand starting at position 2696 of SEQ ID NO: 317012
ggaauuagaagcugguaga

SEQ ID NO: 457572 - RNA, 19 nt, Artificial Sequence
  Description of Artificial Sequence: Synthetic oligonucleotide
  Antisense Strand to SEQ ID NO: 457571
ucuaccagcuucuaauucc

SEQ ID NO: 457573 - RNA, 19 nt, Artificial Sequence
  Description of Artificial Sequence: Synthetic oligonucleotide
  Sense strand starting at position 2697 of SEQ ID NO: 317012
gaauuagaagcugguagau

SEQ ID NO: 457574 - RNA, 19 nt, Artificial Sequence
  Description of Artificial Sequence: Synthetic oligonucleotide
  Antisense Strand to SEQ ID NO: 457573
aucuaccagcuucuaauuc

SEQ ID NO: 457575 - RNA, 19 nt, Artificial Sequence
  Description of Artificial Sequence: Synthetic oligonucleotide
  Sense strand starting at position 2916 of SEQ ID NO: 317012
uugaaucuuggaugcaaga

SEQ ID NO: 457576 - RNA, 19 nt, Artificial Sequence
  Description of Artificial Sequence: Synthetic oligonucleotide
  Antisense Strand to SEQ ID NO: 457575
ucuugcauccaagauucaa

SEQ ID NO: 457577 - RNA, 19 nt, Artificial Sequence
  Description of Artificial Sequence: Synthetic oligonucleotide
  Sense strand starting at position 3152 of SEQ ID NO: 317012
acugaaucacugcaguauu

SEQ ID NO: 457578 - RNA, 19 nt, Artificial Sequence
  Description of Artificial Sequence: Synthetic oligonucleotide
  Antisense Strand to SEQ ID NO: 457577
aauacugcagugauucagu

SEQ ID NO: 457579 - RNA, 19 nt, Artificial Sequence
  Description of Artificial Sequence: Synthetic oligonucleotide
  Sense strand starting at position 3295 of SEQ ID NO: 317012
agaauaugcugguuacaca

SEQ ID NO: 457580 - RNA, 19 nt, Artificial Sequence
  Description of Artificial Sequence: Synthetic oligonucleotide
  Antisense Strand to SEQ ID NO: 457579
uguguaaccagcauauucu

SEQ ID NO: 457581 - RNA, 19 nt, Artificial Sequence
  Description of Artificial Sequence: Synthetic oligonucleotide
  Sense strand starting at position 3296 of SEQ ID NO: 317012
gaauaugcugguuacacaa

SEQ ID NO: 457582 - RNA, 19 nt, Artificial Sequence
  Description of Artificial Sequence: Synthetic oligonucleotide
  Antisense Strand to SEQ ID NO: 457581
uuguguaaccagcauauuc

SEQ ID NO: 457583 - RNA, 19 nt, Artificial Sequence
  Description of Artificial Sequence: Synthetic oligonucleotide
  Sense strand starting at position 3496 of SEQ ID NO: 317012
agaguauguauugaaaguc

SEQ ID NO: 457584 - RNA, 19 nt, Artificial Sequence
  Description of Artificial Sequence: Synthetic oligonucleotide
  Antisense Strand to SEQ ID NO: 457583
gacuuucaauacauacucu

SEQ ID NO: 457585 - RNA, 19 nt, Artificial Sequence
  Description of Artificial Sequence: Synthetic oligonucleotide
  Sense strand starting at position 3504 of SEQ ID NO: 317012
uauugaaagucuguaagaa

SEQ ID NO: 457586 - RNA, 19 nt, Artificial Sequence
  Description of Artificial Sequence: Synthetic oligonucleotide
  Antisense Strand to SEQ ID NO: 457585
uucuuacagacuuucaaua

SEQ ID NO: 457587 - RNA, 19 nt, Artificial Sequence
  Description of Artificial Sequence: Synthetic oligonucleotide
  Sense strand starting at position 3586 of SEQ ID NO: 317012
uucuacuaucaguaggacu

SEQ ID NO: 457588 - RNA, 19 nt, Artificial Sequence
  Description of Artificial Sequence: Synthetic oligonucleotide
  Antisense Strand to SEQ ID NO: 457587
aguccuacugauaguagaa

SEQ ID NO: 457589 - RNA, 19 nt, Artificial Sequence
  Description of Artificial Sequence: Synthetic oligonucleotide
  Sense strand starting at position 3588 of SEQ ID NO: 317012
cuacuaucaguaggacuua

SEQ ID NO: 457590 - RNA, 19 nt, Artificial Sequence
  Description of Artificial Sequence: Synthetic oligonucleotide
  Antisense Strand to SEQ ID NO: 457589
uaaguccuacugauaguag

SEQ ID NO: 457591 - RNA, 19 nt, Artificial Sequence
  Description of Artificial Sequence: Synthetic oligonucleotide
  Sense strand starting at position 3638 of SEQ ID NO: 317012
gcaucacauggacaguuua

SEQ ID NO: 457592 - RNA, 19 nt, Artificial Sequence
  Description of Artificial Sequence: Synthetic oligonucleotide
  Antisense Strand to SEQ ID NO: 457591
uaaacuguccaugugaugc

SEQ ID NO: 457593 - RNA, 19 nt, Artificial Sequence
  Description of Artificial Sequence: Synthetic oligonucleotide
  Sense strand starting at position 3801 of SEQ ID NO: 317012
aauuaauagucagcuggau

SEQ ID NO: 457594 - RNA, 19 nt, Artificial Sequence
  Description of Artificial Sequence: Synthetic oligonucleotide
  Antisense Strand to SEQ ID NO: 457593
auccagcugacuauuaauu

SEQ ID NO: 457595 - RNA, 19 nt, Artificial Sequence
  Description of Artificial Sequence: Synthetic oligonucleotide
  Sense strand starting at position 3875 of SEQ ID NO: 317012
uugaguaaauccuugggaa

SEQ ID NO: 457596 - RNA, 19 nt, Artificial Sequence
  Description of Artificial Sequence: Synthetic oligonucleotide
  Antisense Strand to SEQ ID NO: 457595
uucccaaggauuuacucaa

SEQ ID NO: 457597 - RNA, 19 nt, Artificial Sequence
  Description of Artificial Sequence: Synthetic oligonucleotide
  Sense strand starting at position 3876 of SEQ ID NO: 317012
ugaguaaauccuugggaac

SEQ ID NO: 457598 - RNA, 19 nt, Artificial Sequence
  Description of Artificial Sequence: Synthetic oligonucleotide
  Antisense Strand to SEQ ID NO: 457597
guucccaaggauuuacuca

SEQ ID NO: 457599 - RNA, 19 nt, Artificial Sequence
  Description of Artificial Sequence: Synthetic oligonucleotide
  Sense strand starting at position 39 of SEQ ID NO: 317013
accaguagucugcaggaaa

SEQ ID NO: 457600 - RNA, 19 nt, Artificial Sequence
  Description of Artificial Sequence: Synthetic oligonucleotide
  Antisense Strand to SEQ ID NO: 457599
uuuccugcagacuacuggu

SEQ ID NO: 457601 - RNA, 19 nt, Artificial Sequence
  Description of Artificial Sequence: Synthetic oligonucleotide
  Sense strand starting at position 161 of SEQ ID NO: 317013
guuccagaccaauggucaa

SEQ ID NO: 457602 - RNA, 19 nt, Artificial Sequence
  Description of Artificial Sequence: Synthetic oligonucleotide
  Antisense Strand to SEQ ID NO: 457601
uugaccauuggucuggaac

SEQ ID NO: 457603 - RNA, 19 nt, Artificial Sequence
  Description of Artificial Sequence: Synthetic oligonucleotide
  Sense strand starting at position 266 of SEQ ID NO: 317013
cgaauaaggacccgaaacu

SEQ ID NO: 457604 - RNA, 19 nt, Artificial Sequence
  Description of Artificial Sequence: Synthetic oligonucleotide
  Antisense Strand to SEQ ID NO: 457603
aguuucggguccuuauucg

SEQ ID NO: 457605 - RNA, 19 nt, Artificial Sequence
  Description of Artificial Sequence: Synthetic oligonucleotide
  Sense strand starting at position 390 of SEQ ID NO: 317013
aguucuucucuuuauaugu

SEQ ID NO: 457606 - RNA, 19 nt, Artificial Sequence
  Description of Artificial Sequence: Synthetic oligonucleotide
  Antisense Strand to SEQ ID NO: 457605
acauauaaagagaagaacu

SEQ ID NO: 457607 - RNA, 19 nt, Artificial Sequence
  Description of Artificial Sequence: Synthetic oligonucleotide
  Sense strand starting at position 414 of SEQ ID NO: 317013
uguuccuucccauguauuu

SEQ ID NO: 457608 - RNA, 19 nt, Artificial Sequence
  Description of Artificial Sequence: Synthetic oligonucleotide
  Antisense Strand to SEQ ID NO: 457607
aaauacaugggaaggaaca

SEQ ID NO: 457609 - RNA, 19 nt, Artificial Sequence
  Description of Artificial Sequence: Synthetic oligonucleotide
  Sense strand starting at position 423 of SEQ ID NO: 317013
ccauguauuuccuugcucu

SEQ ID NO: 457610 - RNA, 19 nt, Artificial Sequence
  Description of Artificial Sequence: Synthetic oligonucleotide
  Antisense Strand to SEQ ID NO: 457609
agagcaaggaaauacaugg

SEQ ID NO: 457611 - RNA, 19 nt, Artificial Sequence
  Description of Artificial Sequence: Synthetic oligonucleotide
  Sense strand starting at position 617 of SEQ ID NO: 317013
aguguauuguaucuugaug

SEQ ID NO: 457612 - RNA, 19 nt, Artificial Sequence
  Description of Artificial Sequence: Synthetic oligonucleotide
  Antisense Strand to SEQ ID NO: 457611
caucaagauacaauacacu

SEQ ID NO: 457613 - RNA, 19 nt, Artificial Sequence
  Description of Artificial Sequence: Synthetic oligonucleotide
  Sense strand starting at position 689 of SEQ ID NO: 317013
ccaguuuauucuguaauac

SEQ ID NO: 457614 - RNA, 19 nt, Artificial Sequence
  Description of Artificial Sequence: Synthetic oligonucleotide
  Antisense Strand to SEQ ID NO: 457613
guauuacagaauaaacugg

SEQ ID NO: 457615 - RNA, 19 nt, Artificial Sequence
  Description of Artificial Sequence: Synthetic oligonucleotide
  Sense strand starting at position 698 of SEQ ID NO: 317013
ucuguaauaccugagcaaa

SEQ ID NO: 457616 - RNA, 19 nt, Artificial Sequence
  Description of Artificial Sequence: Synthetic oligonucleotide
  Antisense Strand to SEQ ID NO: 457615
uuugcucagguauuacaga

SEQ ID NO: 457617 - RNA, 19 nt, Artificial Sequence
  Description of Artificial Sequence: Synthetic oligonucleotide
  Sense strand starting at position 783 of SEQ ID NO: 317013
ggccaccaccaguaucaua

SEQ ID NO: 457618 - RNA, 19 nt, Artificial Sequence
  Description of Artificial Sequence: Synthetic oligonucleotide
  Antisense Strand to SEQ ID NO: 457617
uaugauacuggugguggcc

SEQ ID NO: 457619 - RNA, 19 nt, Artificial Sequence
  Description of Artificial Sequence: Synthetic oligonucleotide
  Sense strand starting at position 867 of SEQ ID NO: 317013
uuugaaauugcugacucau

SEQ ID NO: 457620 - RNA, 19 nt, Artificial Sequence
  Description of Artificial Sequence: Synthetic oligonucleotide
  Antisense Strand to SEQ ID NO: 457619
augagucagcaauuucaaa

SEQ ID NO: 457621 - RNA, 19 nt, Artificial Sequence
  Description of Artificial Sequence: Synthetic oligonucleotide
  Sense strand starting at position 918 of SEQ ID NO: 317013
agaauuaguuugguuuaga

SEQ ID NO: 457622 - RNA, 19 nt, Artificial Sequence
  Description of Artificial Sequence: Synthetic oligonucleotide
  Antisense Strand to SEQ ID NO: 457621
ucuaaaccaaacuaauucu

SEQ ID NO: 457623 - RNA, 19 nt, Artificial Sequence
  Description of Artificial Sequence: Synthetic oligonucleotide
  Sense strand starting at position 919 of SEQ ID NO: 317013
gaauuaguuugguuuagac

SEQ ID NO: 457624 - RNA, 19 nt, Artificial Sequence
  Description of Artificial Sequence: Synthetic oligonucleotide
  Antisense Strand to SEQ ID NO: 457623
gucuaaaccaaacuaauuc

SEQ ID NO: 457625 - RNA, 19 nt, Artificial Sequence
  Description of Artificial Sequence: Synthetic oligonucleotide
  Sense strand starting at position 921 of SEQ ID NO: 317013
auuaguuugguuuagacau

SEQ ID NO: 457626 - RNA, 19 nt, Artificial Sequence
  Description of Artificial Sequence: Synthetic oligonucleotide
  Antisense Strand to SEQ ID NO: 457625
augucuaaaccaaacuaau

SEQ ID NO: 457627 - RNA, 19 nt, Artificial Sequence
  Description of Artificial Sequence: Synthetic oligonucleotide
  Sense strand starting at position 941 of SEQ ID NO: 317013
cuuugaagucaacauaguu

SEQ ID NO: 457628 - RNA, 19 nt, Artificial Sequence
  Description of Artificial Sequence: Synthetic oligonucleotide
  Antisense Strand to SEQ ID NO: 457627
aacuauguugacuucaaag

SEQ ID NO: 457629 - RNA, 19 nt, Artificial Sequence
  Description of Artificial Sequence: Synthetic oligonucleotide
  Sense strand starting at position 1086 of SEQ ID NO: 317013
gugaaauucgcucguauuu

SEQ ID NO: 457630 - RNA, 19 nt, Artificial Sequence
  Description of Artificial Sequence: Synthetic oligonucleotide
  Antisense Strand to SEQ ID NO: 457629
aaauacgagcgaauuucac

SEQ ID NO: 457631 - RNA, 19 nt, Artificial Sequence
  Description of Artificial Sequence: Synthetic oligonucleotide
  Sense strand starting at position 1105 of SEQ ID NO: 317013
uuuccaaguuccuucgaca

SEQ ID NO: 457632 - RNA, 19 nt, Artificial Sequence
  Description of Artificial Sequence: Synthetic oligonucleotide
  Antisense Strand to SEQ ID NO: 457631
ugucgaaggaacuuggaaa

SEQ ID NO: 457633 - RNA, 19 nt, Artificial Sequence
  Description of Artificial Sequence: Synthetic oligonucleotide
  Sense strand starting at position 2363 of SEQ ID NO: 317013
auccaagucuuccugagga

SEQ ID NO: 457634 - RNA, 19 nt, Artificial Sequence
  Description of Artificial Sequence: Synthetic oligonucleotide
  Antisense Strand to SEQ ID NO: 457633
uccucaggaagacuuggau

SEQ ID NO: 457635 - RNA, 19 nt, Artificial Sequence
  Description of Artificial Sequence: Synthetic oligonucleotide
  Sense strand starting at position 2510 of SEQ ID NO: 317013
ggcagcuuugugcaagaca

SEQ ID NO: 457636 - RNA, 19 nt, Artificial Sequence
  Description of Artificial Sequence: Synthetic oligonucleotide
  Antisense Strand to SEQ ID NO: 457635
ugucuugcacaaagcugcc

SEQ ID NO: 457637 - RNA, 19 nt, Artificial Sequence
  Description of Artificial Sequence: Synthetic oligonucleotide
  Sense strand starting at position 2513 of SEQ ID NO: 317013
agcuuugugcaagacaguu

SEQ ID NO: 457638 - RNA, 19 nt, Artificial Sequence
  Description of Artificial Sequence: Synthetic oligonucleotide
  Antisense Strand to SEQ ID NO: 457637
aacugucuugcacaaagcu

SEQ ID NO: 457639 - RNA, 19 nt, Artificial Sequence
  Description of Artificial Sequence: Synthetic oligonucleotide
  Sense strand starting at position 2636 of SEQ ID NO: 317013
gcgugagauguuguucuug

SEQ ID NO: 457640 - RNA, 19 nt, Artificial Sequence
  Description of Artificial Sequence: Synthetic oligonucleotide
  Antisense Strand to SEQ ID NO: 457639
caagaacaacaucucacgc

SEQ ID NO: 457641 - RNA, 19 nt, Artificial Sequence
  Description of Artificial Sequence: Synthetic oligonucleotide
  Sense strand starting at position 2681 of SEQ ID NO: 317013
cugaguugaggcugaguga

SEQ ID NO: 457642 - RNA, 19 nt, Artificial Sequence
  Description of Artificial Sequence: Synthetic oligonucleotide
  Antisense Strand to SEQ ID NO: 457641
ucacucagccucaacucag

SEQ ID NO: 457643 - RNA, 19 nt, Artificial Sequence
  Description of Artificial Sequence: Synthetic oligonucleotide
  Sense strand starting at position 2682 of SEQ ID NO: 317013
ugaguugaggcugagugau

SEQ ID NO: 457644 - RNA, 19 nt, Artificial Sequence
  Description of Artificial Sequence: Synthetic oligonucleotide
  Antisense Strand to SEQ ID NO: 457643
aucacucagccucaacuca

SEQ ID NO: 457645 - RNA, 19 nt, Artificial Sequence
  Description of Artificial Sequence: Synthetic oligonucleotide
  Sense strand starting at position 2688 of SEQ ID NO: 317013
gaggcugagugauuugcau

SEQ ID NO: 457646 - RNA, 19 nt, Artificial Sequence
  Description of Artificial Sequence: Synthetic oligonucleotide
  Antisense Strand to SEQ ID NO: 457645
augcaaaucacucagccuc

SEQ ID NO: 457647 - RNA, 19 nt, Artificial Sequence
  Description of Artificial Sequence: Synthetic oligonucleotide
  Sense strand starting at position 2694 of SEQ ID NO: 317013
gagugauuugcaugccaua

SEQ ID NO: 457648 - RNA, 19 nt, Artificial Sequence
  Description of Artificial Sequence: Synthetic oligonucleotide
  Antisense Strand to SEQ ID NO: 457647
uauggcaugcaaaucacuc

SEQ ID NO: 457649 - RNA, 19 nt, Artificial Sequence
  Description of Artificial Sequence: Synthetic oligonucleotide
  Sense strand starting at position 2954 of SEQ ID NO: 317013
acauaaaguuccguauaau

SEQ ID NO: 457650 - RNA, 19 nt, Artificial Sequence
  Description of Artificial Sequence: Synthetic oligonucleotide
  Antisense Strand to SEQ ID NO: 457649
auuauacggaacuuuaugu

SEQ ID NO: 457651 - RNA, 19 nt, Artificial Sequence
  Description of Artificial Sequence: Synthetic oligonucleotide
  Sense strand starting at position 3069 of SEQ ID NO: 317013
ugaugagaauuacaucaaa

SEQ ID NO: 457652 - RNA, 19 nt, Artificial Sequence
  Description of Artificial Sequence: Synthetic oligonucleotide
  Antisense Strand to SEQ ID NO: 457651
uuugauguaauucucauca

SEQ ID NO: 457653 - RNA, 19 nt, Artificial Sequence
  Description of Artificial Sequence: Synthetic oligonucleotide
  Sense strand starting at position 3387 of SEQ ID NO: 317013
gacugauaugcauaugugu

SEQ ID NO: 457654 - RNA, 19 nt, Artificial Sequence
  Description of Artificial Sequence: Synthetic oligonucleotide
  Antisense Strand to SEQ ID NO: 457653
acacauaugcauaucaguc

SEQ ID NO: 457655 - RNA, 19 nt, Artificial Sequence
  Description of Artificial Sequence: Synthetic oligonucleotide
  Sense strand starting at position 3389 of SEQ ID NO: 317013
cugauaugcauauguguga

SEQ ID NO: 457656 - RNA, 19 nt, Artificial Sequence
  Description of Artificial Sequence: Synthetic oligonucleotide
  Antisense Strand to SEQ ID NO: 457655
ucacacauaugcauaucag

SEQ ID NO: 457657 - RNA, 19 nt, Artificial Sequence
  Description of Artificial Sequence: Synthetic oligonucleotide
  Sense strand starting at position 3390 of SEQ ID NO: 317013
ugauaugcauaugugugaa

SEQ ID NO: 457658 - RNA, 19 nt, Artificial Sequence
  Description of Artificial Sequence: Synthetic oligonucleotide
  Antisense Strand to SEQ ID NO: 457657
uucacacauaugcauauca

SEQ ID NO: 457659 - RNA, 19 nt, Artificial Sequence
  Description of Artificial Sequence: Synthetic oligonucleotide
  Sense strand starting at position 3392 of SEQ ID NO: 317013
auaugcauaugugugaaga

SEQ ID NO: 457660 - RNA, 19 nt, Artificial Sequence
  Description of Artificial Sequence: Synthetic oligonucleotide
  Antisense Strand to SEQ ID NO: 457659
ucuucacacauaugcauau

SEQ ID NO: 457661 - RNA, 19 nt, Artificial Sequence
  Description of Artificial Sequence: Synthetic oligonucleotide
  Sense strand starting at position 3393 of SEQ ID NO: 317013
uaugcauaugugugaagau

SEQ ID NO: 457662 - RNA, 19 nt, Artificial Sequence
  Description of Artificial Sequence: Synthetic oligonucleotide
  Antisense Strand to SEQ ID NO: 457661
aucuucacacauaugcaua

SEQ ID NO: 457663 - RNA, 19 nt, Artificial Sequence
  Description of Artificial Sequence: Synthetic oligonucleotide
  Sense strand starting at position 3478 of SEQ ID NO: 317013
ggacuccugccauguaaac

SEQ ID NO: 457664 - RNA, 19 nt, Artificial Sequence
  Description of Artificial Sequence: Synthetic oligonucleotide
  Antisense Strand to SEQ ID NO: 457663
guuuacauggcaggagucc

SEQ ID NO: 457665 - RNA, 19 nt, Artificial Sequence
  Description of Artificial Sequence: Synthetic oligonucleotide
  Sense strand starting at position 3585 of SEQ ID NO: 317013
agcagagcucaauaucaga

SEQ ID NO: 457666 - RNA, 19 nt, Artificial Sequence
  Description of Artificial Sequence: Synthetic oligonucleotide
  Antisense Strand to SEQ ID NO: 457665
ucugauauugagcucugcu

SEQ ID NO: 457667 - RNA, 19 nt, Artificial Sequence
  Description of Artificial Sequence: Synthetic oligonucleotide
  Sense strand starting at position 3748 of SEQ ID NO: 317013
aucaguaucugacugcaua

SEQ ID NO: 457668 - RNA, 19 nt, Artificial Sequence
  Description of Artificial Sequence: Synthetic oligonucleotide
  Antisense Strand to SEQ ID NO: 457667
uaugcagucagauacugau

SEQ ID NO: 457669 - RNA, 19 nt, Artificial Sequence
  Description of Artificial Sequence: Synthetic oligonucleotide
  Sense strand starting at position 3826 of SEQ ID NO: 317013
uaugaaauugacggaaagu

SEQ ID NO: 457670 - RNA, 19 nt, Artificial Sequence
  Description of Artificial Sequence: Synthetic oligonucleotide
  Antisense Strand to SEQ ID NO: 457669
acuuuccgucaauuucaua

SEQ ID NO: 457671 - RNA, 19 nt, Artificial Sequence
  Description of Artificial Sequence: Synthetic oligonucleotide
  Sense strand starting at position 3842 of SEQ ID NO: 317013
aguuuacuuguagggugaa

SEQ ID NO: 457672 - RNA, 19 nt, Artificial Sequence
  Description of Artificial Sequence: Synthetic oligonucleotide
  Antisense Strand to SEQ ID NO: 457671
uucacccuacaaguaaacu

SEQ ID NO: 457673 - RNA, 19 nt, Artificial Sequence
  Description of Artificial Sequence: Synthetic oligonucleotide
  Sense strand starting at position 3845 of SEQ ID NO: 317013
uuacuuguagggugaacuu

SEQ ID NO: 457674 - RNA, 19 nt, Artificial Sequence
  Description of Artificial Sequence: Synthetic oligonucleotide
  Antisense Strand to SEQ ID NO: 457673
aaguucacccuacaaguaa

SEQ ID NO: 457675 - RNA, 19 nt, Artificial Sequence
  Description of Artificial Sequence: Synthetic oligonucleotide
  Sense strand starting at position 3866 of SEQ ID NO: 317013
ggcauaaucugaguauaua

SEQ ID NO: 457676 - RNA, 19 nt, Artificial Sequence
  Description of Artificial Sequence: Synthetic oligonucleotide
  Antisense Strand to SEQ ID NO: 457675
uauauacucagauuaugcc

SEQ ID NO: 457677 - RNA, 19 nt, Artificial Sequence
  Description of Artificial Sequence: Synthetic oligonucleotide
  Sense strand starting at position 3867 of SEQ ID NO: 317013
gcauaaucugaguauauaa

SEQ ID NO: 457678 - RNA, 19 nt, Artificial Sequence
  Description of Artificial Sequence: Synthetic oligonucleotide
  Antisense Strand to SEQ ID NO: 457677
uuauauacucagauuaugc

SEQ ID NO: 457679 - RNA, 19 nt, Artificial Sequence
  Description of Artificial Sequence: Synthetic oligonucleotide
  Sense strand starting at position 99 of SEQ ID NO: 317014
gaaguaggcagugaaguau

SEQ ID NO: 457680 - RNA, 19 nt, Artificial Sequence
  Description of Artificial Sequence: Synthetic oligonucleotide
  Antisense Strand to SEQ ID NO: 457679
auacuucacugccuacuuc

SEQ ID NO: 457681 - RNA, 19 nt, Artificial Sequence
  Description of Artificial Sequence: Synthetic oligonucleotide
  Sense strand starting at position 108 of SEQ ID NO: 317014
agugaaguaucaucuccac

SEQ ID NO: 457682 - RNA, 19 nt, Artificial Sequence
  Description of Artificial Sequence: Synthetic oligonucleotide
  Antisense Strand to SEQ ID NO: 457681
guggagaugauacuucacu

SEQ ID NO: 457683 - RNA, 19 nt, Artificial Sequence
  Description of Artificial Sequence: Synthetic oligonucleotide
  Sense strand starting at position 270 of SEQ ID NO: 317014
augugcaaugaggguuaaa

SEQ ID NO: 457684 - RNA, 19 nt, Artificial Sequence
  Description of Artificial Sequence: Synthetic oligonucleotide
  Antisense Strand to SEQ ID NO: 457683
uuuaacccucauugcacau

SEQ ID NO: 457685 - RNA, 19 nt, Artificial Sequence
  Description of Artificial Sequence: Synthetic oligonucleotide
  Sense strand starting at position 429 of SEQ ID NO: 317014
cccugauauguccaucuau

SEQ ID NO: 457686 - RNA, 19 nt, Artificial Sequence
  Description of Artificial Sequence: Synthetic oligonucleotide
  Antisense Strand to SEQ ID NO: 457685
auagauggacauaucaggg

SEQ ID NO: 457687 - RNA, 19 nt, Artificial Sequence
  Description of Artificial Sequence: Synthetic oligonucleotide
  Sense strand starting at position 478 of SEQ ID NO: 317014
caaauucggguuuaaguuu

SEQ ID NO: 457688 - RNA, 19 nt, Artificial Sequence
  Description of Artificial Sequence: Synthetic oligonucleotide
  Antisense Strand to SEQ ID NO: 457687
aaacuuaaacccgaauuug

SEQ ID NO: 457689 - RNA, 19 nt, Artificial Sequence
  Description of Artificial Sequence: Synthetic oligonucleotide
  Sense strand starting at position 500 of SEQ ID NO: 317014
gcaugaacaauguggagaa

SEQ ID NO: 457690 - RNA, 19 nt, Artificial Sequence
  Description of Artificial Sequence: Synthetic oligonucleotide
  Antisense Strand to SEQ ID NO: 457689
uucuccacauuguucaugc

SEQ ID NO: 457691 - RNA, 19 nt, Artificial Sequence
  Description of Artificial Sequence: Synthetic oligonucleotide
  Sense strand starting at position 571 of SEQ ID NO: 317014
uguggcucugauuaaacua

SEQ ID NO: 457692 - RNA, 19 nt, Artificial Sequence
  Description of Artificial Sequence: Synthetic oligonucleotide
  Antisense Strand to SEQ ID NO: 457691
uaguuuaaucagagccaca

SEQ ID NO: 457693 - RNA, 19 nt, Artificial Sequence
  Description of Artificial Sequence: Synthetic oligonucleotide
  Sense strand starting at position 590 of SEQ ID NO: 317014
gaguaacaucuguaagcug

SEQ ID NO: 457694 - RNA, 19 nt, Artificial Sequence
  Description of Artificial Sequence: Synthetic oligonucleotide
  Antisense Strand to SEQ ID NO: 457693
cagcuuacagauguuacuc

SEQ ID NO: 457695 - RNA, 19 nt, Artificial Sequence
  Description of Artificial Sequence: Synthetic oligonucleotide
  Sense strand starting at position 1152 of SEQ ID NO: 317014
gccaaagaucaugaaagcu

SEQ ID NO: 457696 - RNA, 19 nt, Artificial Sequence
  Description of Artificial Sequence: Synthetic oligonucleotide
  Antisense Strand to SEQ ID NO: 457695
agcuuucaugaucuuuggc

SEQ ID NO: 457697 - RNA, 19 nt, Artificial Sequence
  Description of Artificial Sequence: Synthetic oligonucleotide
  Sense strand starting at position 1221 of SEQ ID NO: 317014
gugcuauuaguguuaugcu

SEQ ID NO: 457698 - RNA, 19 nt, Artificial Sequence
  Description of Artificial Sequence: Synthetic oligonucleotide
  Antisense Strand to SEQ ID NO: 457697
agcauaacacuaauagcac

SEQ ID NO: 457699 - RNA, 19 nt, Artificial Sequence
  Description of Artificial Sequence: Synthetic oligonucleotide
  Sense strand starting at position 1229 of SEQ ID NO: 317014
aguguuaugcugccucuca

SEQ ID NO: 457700 - RNA, 19 nt, Artificial Sequence
  Description of Artificial Sequence: Synthetic oligonucleotide
  Antisense Strand to SEQ ID NO: 457699
ugagaggcagcauaacacu

SEQ ID NO: 457701 - RNA, 19 nt, Artificial Sequence
  Description of Artificial Sequence: Synthetic oligonucleotide
  Sense strand starting at position 1395 of SEQ ID NO: 317014
agaauugucuuaucgauaa

SEQ ID NO: 457702 - RNA, 19 nt, Artificial Sequence
  Description of Artificial Sequence: Synthetic oligonucleotide
  Antisense Strand to SEQ ID NO: 457701
uuaucgauaagacaauucu

SEQ ID NO: 457703 - RNA, 19 nt, Artificial Sequence
  Description of Artificial Sequence: Synthetic oligonucleotide
  Sense strand starting at position 1399 of SEQ ID NO: 317014
uugucuuaucgauaaagug

SEQ ID NO: 457704 - RNA, 19 nt, Artificial Sequence
  Description of Artificial Sequence: Synthetic oligonucleotide
  Antisense Strand to SEQ ID NO: 457703
cacuuuaucgauaagacaa

SEQ ID NO: 457705 - RNA, 19 nt, Artificial Sequence
  Description of Artificial Sequence: Synthetic oligonucleotide
  Sense strand starting at position 1542 of SEQ ID NO: 317014
aguuacucuuuaccucaga

SEQ ID NO: 457706 - RNA, 19 nt, Artificial Sequence
  Description of Artificial Sequence: Synthetic oligonucleotide
  Antisense Strand to SEQ ID NO: 457705
ucugagguaaagaguaacu

SEQ ID NO: 457707 - RNA, 19 nt, Artificial Sequence
  Description of Artificial Sequence: Synthetic oligonucleotide
  Sense strand starting at position 1543 of SEQ ID NO: 317014
guuacucuuuaccucagau

SEQ ID NO: 457708 - RNA, 19 nt, Artificial Sequence
  Description of Artificial Sequence: Synthetic oligonucleotide
  Antisense Strand to SEQ ID NO: 457707
aucugagguaaagaguaac

SEQ ID NO: 457709 - RNA, 19 nt, Artificial Sequence
  Description of Artificial Sequence: Synthetic oligonucleotide
  Sense strand starting at position 1646 of SEQ ID NO: 317014
uaccuucuugggcauguaa

SEQ ID NO: 457710 - RNA, 19 nt, Artificial Sequence
  Description of Artificial Sequence: Synthetic oligonucleotide
  Antisense Strand to SEQ ID NO: 457709
uuacaugcccaagaaggua

SEQ ID NO: 457711 - RNA, 19 nt, Artificial Sequence
  Description of Artificial Sequence: Synthetic oligonucleotide
  Sense strand starting at position 1695 of SEQ ID NO: 317014
ggauucuuguaauucuaag

SEQ ID NO: 457712 - RNA, 19 nt, Artificial Sequence
  Description of Artificial Sequence: Synthetic oligonucleotide
  Antisense Strand to SEQ ID NO: 457711
cuuagaauuacaagaaucc

SEQ ID NO: 457713 - RNA, 19 nt, Artificial Sequence
  Description of Artificial Sequence: Synthetic oligonucleotide
  Sense strand starting at position 1747 of SEQ ID NO: 317014
ccagcuagauuacuaaaug

SEQ ID NO: 457714 - RNA, 19 nt, Artificial Sequence
  Description of Artificial Sequence: Synthetic oligonucleotide
  Antisense Strand to SEQ ID NO: 457713
cauuuaguaaucuagcugg

SEQ ID NO: 457715 - RNA, 19 nt, Artificial Sequence
  Description of Artificial Sequence: Synthetic oligonucleotide
  Sense strand starting at position 1820 of SEQ ID NO: 317014
cuguaaauccagcaguaaa

SEQ ID NO: 457716 - RNA, 19 nt, Artificial Sequence
  Description of Artificial Sequence: Synthetic oligonucleotide
  Antisense Strand to SEQ ID NO: 457715
uuuacugcuggauuuacag

SEQ ID NO: 457717 - RNA, 19 nt, Artificial Sequence
  Description of Artificial Sequence: Synthetic oligonucleotide
  Sense strand starting at position 1961 of SEQ ID NO: 317014
gguuacugugaguagugau

SEQ ID NO: 457718 - RNA, 19 nt, Artificial Sequence
  Description of Artificial Sequence: Synthetic oligonucleotide
  Antisense Strand to SEQ ID NO: 457717
aucacuacucacaguaacc

SEQ ID NO: 457719 - RNA, 19 nt, Artificial Sequence
  Description of Artificial Sequence: Synthetic oligonucleotide
  Sense strand starting at position 2132 of SEQ ID NO: 317014
ucugaugacucuuuggaau

SEQ ID NO: 457720 - RNA, 19 nt, Artificial Sequence
  Description of Artificial Sequence: Synthetic oligonucleotide
  Antisense Strand to SEQ ID NO: 457719
auuccaaagagucaucaga

SEQ ID NO: 457721 - RNA, 19 nt, Artificial Sequence
  Description of Artificial Sequence: Synthetic oligonucleotide
  Sense strand starting at position 2203 of SEQ ID NO: 317014
guuacauuagcccacacuu

SEQ ID NO: 457722 - RNA, 19 nt, Artificial Sequence
  Description of Artificial Sequence: Synthetic oligonucleotide
  Antisense Strand to SEQ ID NO: 457721
aagugugggcuaauguaac

SEQ ID NO: 457723 - RNA, 19 nt, Artificial Sequence
  Description of Artificial Sequence: Synthetic oligonucleotide
  Sense strand starting at position 2247 of SEQ ID NO: 317014
uaacgccuucuguaugaaa

SEQ ID NO: 457724 - RNA, 19 nt, Artificial Sequence
  Description of Artificial Sequence: Synthetic oligonucleotide
  Antisense Strand to SEQ ID NO: 457723
uuucauacagaaggcguua

SEQ ID NO: 457725 - RNA, 19 nt, Artificial Sequence
  Description of Artificial Sequence: Synthetic oligonucleotide
  Sense strand starting at position 2502 of SEQ ID NO: 317014
auagauugcuucuuacaug

SEQ ID NO: 457726 - RNA, 19 nt, Artificial Sequence
  Description of Artificial Sequence: Synthetic oligonucleotide
  Antisense Strand to SEQ ID NO: 457725
cauguaagaagcaaucuau

SEQ ID NO: 457727 - RNA, 19 nt, Artificial Sequence
  Description of Artificial Sequence: Synthetic oligonucleotide
  Sense strand starting at position 2623 of SEQ ID NO: 317014
ucucuuaaugucuauugua

SEQ ID NO: 457728 - RNA, 19 nt, Artificial Sequence
  Description of Artificial Sequence: Synthetic oligonucleotide
  Antisense Strand to SEQ ID NO: 457727
uacaauagacauuaagaga

SEQ ID NO: 457729 - RNA, 19 nt, Artificial Sequence
  Description of Artificial Sequence: Synthetic oligonucleotide
  Sense strand starting at position 2727 of SEQ ID NO: 317014
auguguuauguguaaacca

SEQ ID NO: 457730 - RNA, 19 nt, Artificial Sequence
  Description of Artificial Sequence: Synthetic oligonucleotide
  Antisense Strand to SEQ ID NO: 457729
ugguuuacacauaacacau

SEQ ID NO: 457731 - RNA, 19 nt, Artificial Sequence
  Description of Artificial Sequence: Synthetic oligonucleotide
  Sense strand starting at position 2864 of SEQ ID NO: 317014
ucagaagacuaggauauuu

SEQ ID NO: 457732 - RNA, 19 nt, Artificial Sequence
  Description of Artificial Sequence: Synthetic oligonucleotide
  Antisense Strand to SEQ ID NO: 457731
aaauauccuagucuucuga

SEQ ID NO: 457733 - RNA, 19 nt, Artificial Sequence
  Description of Artificial Sequence: Synthetic oligonucleotide
  Sense strand starting at position 2873 of SEQ ID NO: 317014
uaggauauuuaggauaggu

SEQ ID NO: 457734 - RNA, 19 nt, Artificial Sequence
  Description of Artificial Sequence: Synthetic oligonucleotide
  Antisense Strand to SEQ ID NO: 457733
accuauccuaaauauccua

SEQ ID NO: 457735 - RNA, 19 nt, Artificial Sequence
  Description of Artificial Sequence: Synthetic oligonucleotide
  Sense strand starting at position 2926 of SEQ ID NO: 317014
ugaacaauuguacggauau

SEQ ID NO: 457736 - RNA, 19 nt, Artificial Sequence
  Description of Artificial Sequence: Synthetic oligonucleotide
  Antisense Strand to SEQ ID NO: 457735
auauccguacaauuguuca

SEQ ID NO: 457737 - RNA, 19 nt, Artificial Sequence
  Description of Artificial Sequence: Synthetic oligonucleotide
  Sense strand starting at position 2937 of SEQ ID NO: 317014
acggauauauacuucuaau

SEQ ID NO: 457738 - RNA, 19 nt, Artificial Sequence
  Description of Artificial Sequence: Synthetic oligonucleotide
  Antisense Strand to SEQ ID NO: 457737
auuagaaguauauauccgu

SEQ ID NO: 457739 - RNA, 19 nt, Artificial Sequence
  Description of Artificial Sequence: Synthetic oligonucleotide
  Sense strand starting at position 3097 of SEQ ID NO: 317014
agacaauauugucuggucu

SEQ ID NO: 457740 - RNA, 19 nt, Artificial Sequence
  Description of Artificial Sequence: Synthetic oligonucleotide
  Antisense Strand to SEQ ID NO: 457739
agaccagacaauauugucu

SEQ ID NO: 457741 - RNA, 19 nt, Artificial Sequence
  Description of Artificial Sequence: Synthetic oligonucleotide
  Sense strand starting at position 3104 of SEQ ID NO: 317014
auugucuggucuuuaaaca

SEQ ID NO: 457742 - RNA, 19 nt, Artificial Sequence
  Description of Artificial Sequence: Synthetic oligonucleotide
  Antisense Strand to SEQ ID NO: 457741
uguuuaaagaccagacaau

SEQ ID NO: 457743 - RNA, 19 nt, Artificial Sequence
  Description of Artificial Sequence: Synthetic oligonucleotide
  Sense strand starting at position 3187 of SEQ ID NO: 317014
aggcacuuagucuaauaua

SEQ ID NO: 457744 - RNA, 19 nt, Artificial Sequence
  Description of Artificial Sequence: Synthetic oligonucleotide
  Antisense Strand to SEQ ID NO: 457743
uauauuagacuaagugccu

SEQ ID NO: 457745 - RNA, 19 nt, Artificial Sequence
  Description of Artificial Sequence: Synthetic oligonucleotide
  Sense strand starting at position 3207 of SEQ ID NO: 317014
gucuuacagacuugugaag

SEQ ID NO: 457746 - RNA, 19 nt, Artificial Sequence
  Description of Artificial Sequence: Synthetic oligonucleotide
  Antisense Strand to SEQ ID NO: 457745
cuucacaagucuguaagac

SEQ ID NO: 457747 - RNA, 19 nt, Artificial Sequence
  Description of Artificial Sequence: Synthetic oligonucleotide
  Sense strand starting at position 3393 of SEQ ID NO: 317014
ccugauuuguaauagggaa

SEQ ID NO: 457748 - RNA, 19 nt, Artificial Sequence
  Description of Artificial Sequence: Synthetic oligonucleotide
  Antisense Strand to SEQ ID NO: 457747
uucccuauuacaaaucagg

SEQ ID NO: 457749 - RNA, 19 nt, Artificial Sequence
  Description of Artificial Sequence: Synthetic oligonucleotide
  Sense strand starting at position 3526 of SEQ ID NO: 317014
gugcauaggcaggaaugau

SEQ ID NO: 457750 - RNA, 19 nt, Artificial Sequence
  Description of Artificial Sequence: Synthetic oligonucleotide
  Antisense Strand to SEQ ID NO: 457749
aucauuccugccuaugcac

SEQ ID NO: 457751 - RNA, 19 nt, Artificial Sequence
  Description of Artificial Sequence: Synthetic oligonucleotide
  Sense strand starting at position 3621 of SEQ ID NO: 317014
gcguuagguaauguucgga

SEQ ID NO: 457752 - RNA, 19 nt, Artificial Sequence
  Description of Artificial Sequence: Synthetic oligonucleotide
  Antisense Strand to SEQ ID NO: 457751
uccgaacauuaccuaacgc

SEQ ID NO: 457753 - RNA, 19 nt, Artificial Sequence
  Description of Artificial Sequence: Synthetic oligonucleotide
  Sense strand starting at position 3624 of SEQ ID NO: 317014
uuagguaauguucggagaa

SEQ ID NO: 457754 - RNA, 19 nt, Artificial Sequence
  Description of Artificial Sequence: Synthetic oligonucleotide
  Antisense Strand to SEQ ID NO: 457753
uucuccgaacauuaccuaa

SEQ ID NO: 457755 - RNA, 19 nt, Artificial Sequence
  Description of Artificial Sequence: Synthetic oligonucleotide
  Sense strand starting at position 3665 of SEQ ID NO: 317014
agauuauagucccucaagu

SEQ ID NO: 457756 - RNA, 19 nt, Artificial Sequence
  Description of Artificial Sequence: Synthetic oligonucleotide
  Antisense Strand to SEQ ID NO: 457755
acuugagggacuauaaucu

SEQ ID NO: 457757 - RNA, 19 nt, Artificial Sequence
  Description of Artificial Sequence: Synthetic oligonucleotide
  Sense strand starting at position 3667 of SEQ ID NO: 317014
auuauagucccucaaguag

SEQ ID NO: 457758 - RNA, 19 nt, Artificial Sequence
  Description of Artificial Sequence: Synthetic oligonucleotide
  Antisense Strand to SEQ ID NO: 457757
cuacuugagggacuauaau

SEQ ID NO: 457759 - RNA, 19 nt, Artificial Sequence
  Description of Artificial Sequence: Synthetic oligonucleotide
  Sense strand starting at position 435 of SEQ ID NO: 317015
gguggaaucucuuucuuau

SEQ ID NO: 457760 - RNA, 19 nt, Artificial Sequence
  Description of Artificial Sequence: Synthetic oligonucleotide
  Antisense Strand to SEQ ID NO: 457759
auaagaaagagauuccacc

SEQ ID NO: 457761 - RNA, 19 nt, Artificial Sequence
  Description of Artificial Sequence: Synthetic oligonucleotide
  Sense strand starting at position 533 of SEQ ID NO: 317015
agaugcuagaaauguaugu

SEQ ID NO: 457762 - RNA, 19 nt, Artificial Sequence
  Description of Artificial Sequence: Synthetic oligonucleotide
  Antisense Strand to SEQ ID NO: 457761
acauacauuucuagcaucu

SEQ ID NO: 457763 - RNA, 19 nt, Artificial Sequence
  Description of Artificial Sequence: Synthetic oligonucleotide
  Sense strand starting at position 552 of SEQ ID NO: 317015
uuugauaauuaggcacauu

SEQ ID NO: 457764 - RNA, 19 nt, Artificial Sequence
  Description of Artificial Sequence: Synthetic oligonucleotide
  Antisense Strand to SEQ ID NO: 457763
aaugugccuaauuaucaaa

SEQ ID NO: 457765 - RNA, 19 nt, Artificial Sequence
  Description of Artificial Sequence: Synthetic oligonucleotide
  Sense strand starting at position 635 of SEQ ID NO: 317015
uuagaugcugcuuauuaga

SEQ ID NO: 457766 - RNA, 19 nt, Artificial Sequence
  Description of Artificial Sequence: Synthetic oligonucleotide
  Antisense Strand to SEQ ID NO: 457765
ucuaauaagcagcaucuaa

SEQ ID NO: 457767 - RNA, 19 nt, Artificial Sequence
  Description of Artificial Sequence: Synthetic oligonucleotide
  Sense strand starting at position 637 of SEQ ID NO: 317015
agaugcugcuuauuagaaa

SEQ ID NO: 457768 - RNA, 19 nt, Artificial Sequence
  Description of Artificial Sequence: Synthetic oligonucleotide
  Antisense Strand to SEQ ID NO: 457767
uuucuaauaagcagcaucu

SEQ ID NO: 457769 - RNA, 19 nt, Artificial Sequence
  Description of Artificial Sequence: Synthetic oligonucleotide
  Sense strand starting at position 657 of SEQ ID NO: 317015
ggaccuaguaaaugagagu

SEQ ID NO: 457770 - RNA, 19 nt, Artificial Sequence
  Description of Artificial Sequence: Synthetic oligonucleotide
  Antisense Strand to SEQ ID NO: 457769
acucucauuuacuaggucc

SEQ ID NO: 457771 - RNA, 19 nt, Artificial Sequence
  Description of Artificial Sequence: Synthetic oligonucleotide
  Sense strand starting at position 670 of SEQ ID NO: 317015
gagaguguuuggguucaga

SEQ ID NO: 457772 - RNA, 19 nt, Artificial Sequence
  Description of Artificial Sequence: Synthetic oligonucleotide
  Antisense Strand to SEQ ID NO: 457771
ucugaacccaaacacucuc

SEQ ID NO: 457773 - RNA, 19 nt, Artificial Sequence
  Description of Artificial Sequence: Synthetic oligonucleotide
  Sense strand starting at position 856 of SEQ ID NO: 317015
caauuaaaggucugugaca

SEQ ID NO: 457774 - RNA, 19 nt, Artificial Sequence
  Description of Artificial Sequence: Synthetic oligonucleotide
  Antisense Strand to SEQ ID NO: 457773
ugucacagaccuuuaauug

SEQ ID NO: 457775 - RNA, 19 nt, Artificial Sequence
  Description of Artificial Sequence: Synthetic oligonucleotide
  Sense strand starting at position 857 of SEQ ID NO: 317015
aauuaaaggucugugacaa

SEQ ID NO: 457776 - RNA, 19 nt, Artificial Sequence
  Description of Artificial Sequence: Synthetic oligonucleotide
  Antisense Strand to SEQ ID NO: 457775
uugucacagaccuuuaauu

SEQ ID NO: 457777 - RNA, 19 nt, Artificial Sequence
  Description of Artificial Sequence: Synthetic oligonucleotide
  Sense strand starting at position 858 of SEQ ID NO: 317015
auuaaaggucugugacaau

SEQ ID NO: 457778 - RNA, 19 nt, Artificial Sequence
  Description of Artificial Sequence: Synthetic oligonucleotide
  Antisense Strand to SEQ ID NO: 457777
auugucacagaccuuuaau

SEQ ID NO: 457779 - RNA, 19 nt, Artificial Sequence
  Description of Artificial Sequence: Synthetic oligonucleotide
  Sense strand starting at position 1096 of SEQ ID NO: 317015
cacugaggccaagguauau

SEQ ID NO: 457780 - RNA, 19 nt, Artificial Sequence
  Description of Artificial Sequence: Synthetic oligonucleotide
  Antisense Strand to SEQ ID NO: 457779
auauaccuuggccucagug

SEQ ID NO: 457781 - RNA, 19 nt, Artificial Sequence
  Description of Artificial Sequence: Synthetic oligonucleotide
  Sense strand starting at position 1114 of SEQ ID NO: 317015
ugugaauuauauucugaag

SEQ ID NO: 457782 - RNA, 19 nt, Artificial Sequence
  Description of Artificial Sequence: Synthetic oligonucleotide
  Antisense Strand to SEQ ID NO: 457781
cuucagaauauaauucaca

SEQ ID NO: 457783 - RNA, 19 nt, Artificial Sequence
  Description of Artificial Sequence: Synthetic oligonucleotide
  Sense strand starting at position 1252 of SEQ ID NO: 317015
auguuucuucgguaggaua

SEQ ID NO: 457784 - RNA, 19 nt, Artificial Sequence
  Description of Artificial Sequence: Synthetic oligonucleotide
  Antisense Strand to SEQ ID NO: 457783
uauccuaccgaagaaacau

SEQ ID NO: 457785 - RNA, 19 nt, Artificial Sequence
  Description of Artificial Sequence: Synthetic oligonucleotide
  Sense strand starting at position 1349 of SEQ ID NO: 317015
aguauagauuucguuucua

SEQ ID NO: 457786 - RNA, 19 nt, Artificial Sequence
  Description of Artificial Sequence: Synthetic oligonucleotide
  Antisense Strand to SEQ ID NO: 457785
uagaaacgaaaucuauacu

SEQ ID NO: 457787 - RNA, 19 nt, Artificial Sequence
  Description of Artificial Sequence: Synthetic oligonucleotide
  Sense strand starting at position 1353 of SEQ ID NO: 317015
uagauuucguuucuaguuu

SEQ ID NO: 457788 - RNA, 19 nt, Artificial Sequence
  Description of Artificial Sequence: Synthetic oligonucleotide
  Antisense Strand to SEQ ID NO: 457787
aaacuagaaacgaaaucua

SEQ ID NO: 457789 - RNA, 19 nt, Artificial Sequence
  Description of Artificial Sequence: Synthetic oligonucleotide
  Sense strand starting at position 1635 of SEQ ID NO: 317015
uggucuuaccucuacaucu

SEQ ID NO: 457790 - RNA, 19 nt, Artificial Sequence
  Description of Artificial Sequence: Synthetic oligonucleotide
  Antisense Strand to SEQ ID NO: 457789
agauguagagguaagacca

SEQ ID NO: 457791 - RNA, 19 nt, Artificial Sequence
  Description of Artificial Sequence: Synthetic oligonucleotide
  Sense strand starting at position 1764 of SEQ ID NO: 317015
uguugugacaaauauaguc

SEQ ID NO: 457792 - RNA, 19 nt, Artificial Sequence
  Description of Artificial Sequence: Synthetic oligonucleotide
  Antisense Strand to SEQ ID NO: 457791
gacuauauuugucacaaca

SEQ ID NO: 457793 - RNA, 19 nt, Artificial Sequence
  Description of Artificial Sequence: Synthetic oligonucleotide
  Sense strand starting at position 2097 of SEQ ID NO: 317015
ggaugaaugugaguaacuc

SEQ ID NO: 457794 - RNA, 19 nt, Artificial Sequence
  Description of Artificial Sequence: Synthetic oligonucleotide
  Antisense Strand to SEQ ID NO: 457793
gaguuacucacauucaucc

SEQ ID NO: 457795 - RNA, 19 nt, Artificial Sequence
  Description of Artificial Sequence: Synthetic oligonucleotide
  Sense strand starting at position 2384 of SEQ ID NO: 317015
cuuugauaaugaguaagau

SEQ ID NO: 457796 - RNA, 19 nt, Artificial Sequence
  Description of Artificial Sequence: Synthetic oligonucleotide
  Antisense Strand to SEQ ID NO: 457795
aucuuacucauuaucaaag

SEQ ID NO: 457797 - RNA, 19 nt, Artificial Sequence
  Description of Artificial Sequence: Synthetic oligonucleotide
  Sense strand starting at position 2866 of SEQ ID NO: 317015
acccauaaaugauucguuu

SEQ ID NO: 457798 - RNA, 19 nt, Artificial Sequence
  Description of Artificial Sequence: Synthetic oligonucleotide
  Antisense Strand to SEQ ID NO: 457797
aaacgaaucauuuaugggu

SEQ ID NO: 457799 - RNA, 19 nt, Artificial Sequence
  Description of Artificial Sequence: Synthetic oligonucleotide
  Sense strand starting at position 2895 of SEQ ID NO: 317015
uaguguuacuuauuucugu

SEQ ID NO: 457800 - RNA, 19 nt, Artificial Sequence
  Description of Artificial Sequence: Synthetic oligonucleotide
  Antisense Strand to SEQ ID NO: 457799
acagaaauaaguaacacua

SEQ ID NO: 457801 - RNA, 19 nt, Artificial Sequence
  Description of Artificial Sequence: Synthetic oligonucleotide
  Sense strand starting at position 2896 of SEQ ID NO: 317015
aguguuacuuauuucuguu

SEQ ID NO: 457802 - RNA, 19 nt, Artificial Sequence
  Description of Artificial Sequence: Synthetic oligonucleotide
  Antisense Strand to SEQ ID NO: 457801
aacagaaauaaguaacacu

SEQ ID NO: 457803 - RNA, 19 nt, Artificial Sequence
  Description of Artificial Sequence: Synthetic oligonucleotide
  Sense strand starting at position 2918 of SEQ ID NO: 317015
uacuauuuccucugggugu

SEQ ID NO: 457804 - RNA, 19 nt, Artificial Sequence
  Description of Artificial Sequence: Synthetic oligonucleotide
  Antisense Strand to SEQ ID NO: 457803
acacccagaggaaauagua

SEQ ID NO: 457805 - RNA, 19 nt, Artificial Sequence
  Description of Artificial Sequence: Synthetic oligonucleotide
  Sense strand starting at position 2920 of SEQ ID NO: 317015
cuauuuccucuggguguga

SEQ ID NO: 457806 - RNA, 19 nt, Artificial Sequence
  Description of Artificial Sequence: Synthetic oligonucleotide
  Antisense Strand to SEQ ID NO: 457805
ucacacccagaggaaauag

SEQ ID NO: 457807 - RNA, 19 nt, Artificial Sequence
  Description of Artificial Sequence: Synthetic oligonucleotide
  Sense strand starting at position 2966 of SEQ ID NO: 317015
ccggguagagguuaauuaa

SEQ ID NO: 457808 - RNA, 19 nt, Artificial Sequence
  Description of Artificial Sequence: Synthetic oligonucleotide
  Antisense Strand to SEQ ID NO: 457807
uuaauuaaccucuacccgg

SEQ ID NO: 457809 - RNA, 19 nt, Artificial Sequence
  Description of Artificial Sequence: Synthetic oligonucleotide
  Sense strand starting at position 3076 of SEQ ID NO: 317015
auaauauucuagcuagaga

SEQ ID NO: 457810 - RNA, 19 nt, Artificial Sequence
  Description of Artificial Sequence: Synthetic oligonucleotide
  Antisense Strand to SEQ ID NO: 457809
ucucuagcuagaauauuau

SEQ ID NO: 457811 - RNA, 19 nt, Artificial Sequence
  Description of Artificial Sequence: Synthetic oligonucleotide
  Sense strand starting at position 3116 of SEQ ID NO: 317015
uaggucuuauaagugaaac

SEQ ID NO: 457812 - RNA, 19 nt, Artificial Sequence
  Description of Artificial Sequence: Synthetic oligonucleotide
  Antisense Strand to SEQ ID NO: 457811
guuucacuuauaagaccua

SEQ ID NO: 457813 - RNA, 19 nt, Artificial Sequence
  Description of Artificial Sequence: Synthetic oligonucleotide
  Sense strand starting at position 3219 of SEQ ID NO: 317015
uuacguagccaacauaaau

SEQ ID NO: 457814 - RNA, 19 nt, Artificial Sequence
  Description of Artificial Sequence: Synthetic oligonucleotide
  Antisense Strand to SEQ ID NO: 457813
auuuauguuggcuacguaa

SEQ ID NO: 457815 - RNA, 19 nt, Artificial Sequence
  Description of Artificial Sequence: Synthetic oligonucleotide
  Sense strand starting at position 3249 of SEQ ID NO: 317015
cuugauuugcucugaaguu

SEQ ID NO: 457816 - RNA, 19 nt, Artificial Sequence
  Description of Artificial Sequence: Synthetic oligonucleotide
  Antisense Strand to SEQ ID NO: 457815
aacuucagagcaaaucaag

SEQ ID NO: 457817 - RNA, 19 nt, Artificial Sequence
  Description of Artificial Sequence: Synthetic oligonucleotide
  Sense strand starting at position 3258 of SEQ ID NO: 317015
cucugaaguugacuguaau

SEQ ID NO: 457818 - RNA, 19 nt, Artificial Sequence
  Description of Artificial Sequence: Synthetic oligonucleotide
  Antisense Strand to SEQ ID NO: 457817
auuacagucaacuucagag

SEQ ID NO: 457819 - RNA, 19 nt, Artificial Sequence
  Description of Artificial Sequence: Synthetic oligonucleotide
  Sense strand starting at position 3259 of SEQ ID NO: 317015
ucugaaguugacuguaauc

SEQ ID NO: 457820 - RNA, 19 nt, Artificial Sequence
  Description of Artificial Sequence: Synthetic oligonucleotide
  Antisense Strand to SEQ ID NO: 457819
gauuacagucaacuucaga

SEQ ID NO: 457821 - RNA, 19 nt, Artificial Sequence
  Description of Artificial Sequence: Synthetic oligonucleotide
  Sense strand starting at position 3261 of SEQ ID NO: 317015
ugaaguugacuguaaucuu

SEQ ID NO: 457822 - RNA, 19 nt, Artificial Sequence
  Description of Artificial Sequence: Synthetic oligonucleotide
  Antisense Strand to SEQ ID NO: 457821
aagauuacagucaacuuca

SEQ ID NO: 457823 - RNA, 19 nt, Artificial Sequence
  Description of Artificial Sequence: Synthetic oligonucleotide
  Sense strand starting at position 3310 of SEQ ID NO: 317015
cagguuuggccuuauacag

SEQ ID NO: 457824 - RNA, 19 nt, Artificial Sequence
  Description of Artificial Sequence: Synthetic oligonucleotide
  Antisense Strand to SEQ ID NO: 457823
cuguauaaggccaaaccug

SEQ ID NO: 457825 - RNA, 19 nt, Artificial Sequence
  Description of Artificial Sequence: Synthetic oligonucleotide
  Sense strand starting at position 3317 of SEQ ID NO: 317015
ggccuuauacaguagauaa

SEQ ID NO: 457826 - RNA, 19 nt, Artificial Sequence
  Description of Artificial Sequence: Synthetic oligonucleotide
  Antisense Strand to SEQ ID NO: 457825
uuaucuacuguauaaggcc

SEQ ID NO: 457827 - RNA, 19 nt, Artificial Sequence
  Description of Artificial Sequence: Synthetic oligonucleotide
  Sense strand starting at position 3388 of SEQ ID NO: 317015
ugacaagauucugugcaac

SEQ ID NO: 457828 - RNA, 19 nt, Artificial Sequence
  Description of Artificial Sequence: Synthetic oligonucleotide
  Antisense Strand to SEQ ID NO: 457827
guugcacagaaucuuguca

SEQ ID NO: 457829 - RNA, 19 nt, Artificial Sequence
  Description of Artificial Sequence: Synthetic oligonucleotide
  Sense strand starting at position 3500 of SEQ ID NO: 317015
gugcaucuccuugaagaca

SEQ ID NO: 457830 - RNA, 19 nt, Artificial Sequence
  Description of Artificial Sequence: Synthetic oligonucleotide
  Antisense Strand to SEQ ID NO: 457829
ugucuucaaggagaugcac

SEQ ID NO: 457831 - RNA, 19 nt, Artificial Sequence
  Description of Artificial Sequence: Synthetic oligonucleotide
  Sense strand starting at position 3637 of SEQ ID NO: 317015
uacucauaggguugugaua

SEQ ID NO: 457832 - RNA, 19 nt, Artificial Sequence
  Description of Artificial Sequence: Synthetic oligonucleotide
  Antisense Strand to SEQ ID NO: 457831
uaucacaacccuaugagua

SEQ ID NO: 457833 - RNA, 19 nt, Artificial Sequence
  Description of Artificial Sequence: Synthetic oligonucleotide
  Sense strand starting at position 3699 of SEQ ID NO: 317015
cauaacaucccgggagguu

SEQ ID NO: 457834 - RNA, 19 nt, Artificial Sequence
  Description of Artificial Sequence: Synthetic oligonucleotide
  Antisense Strand to SEQ ID NO: 457833
aaccucccgggauguuaug

SEQ ID NO: 457835 - RNA, 19 nt, Artificial Sequence
  Description of Artificial Sequence: Synthetic oligonucleotide
  Sense strand starting at position 3700 of SEQ ID NO: 317015
auaacaucccgggagguuu

SEQ ID NO: 457836 - RNA, 19 nt, Artificial Sequence
  Description of Artificial Sequence: Synthetic oligonucleotide
  Antisense Strand to SEQ ID NO: 457835
aaaccucccgggauguuau

SEQ ID NO: 457837 - RNA, 19 nt, Artificial Sequence
  Description of Artificial Sequence: Synthetic oligonucleotide
  Sense strand starting at position 3800 of SEQ ID NO: 317015
uggacagaucaguguucag

SEQ ID NO: 457838 - RNA, 19 nt, Artificial Sequence
  Description of Artificial Sequence: Synthetic oligonucleotide
  Antisense Strand to SEQ ID NO: 457837
cugaacacugaucugucca

SEQ ID NO: 457839 - RNA, 19 nt, Artificial Sequence
  Description of Artificial Sequence: Synthetic oligonucleotide
  Sense strand starting at position 1 of SEQ ID NO: 317016
ugaacugugccagaucugu

SEQ ID NO: 457840 - RNA, 19 nt, Artificial Sequence
  Description of Artificial Sequence: Synthetic oligonucleotide
  Antisense Strand to SEQ ID NO: 457839
acagaucuggcacaguuca

SEQ ID NO: 457841 - RNA, 19 nt, Artificial Sequence
  Description of Artificial Sequence: Synthetic oligonucleotide
  Sense strand starting at position 7 of SEQ ID NO: 317016
gugccagaucuguaugucu

SEQ ID NO: 457842 - RNA, 19 nt, Artificial Sequence
  Description of Artificial Sequence: Synthetic oligonucleotide
  Antisense Strand to SEQ ID NO: 457841
agacauacagaucuggcac

SEQ ID NO: 457843 - RNA, 19 nt, Artificial Sequence
  Description of Artificial Sequence: Synthetic oligonucleotide
  Sense strand starting at position 9 of SEQ ID NO: 317016
gccagaucuguaugucuga

SEQ ID NO: 457844 - RNA, 19 nt, Artificial Sequence
  Description of Artificial Sequence: Synthetic oligonucleotide
  Antisense Strand to SEQ ID NO: 457843
ucagacauacagaucuggc

SEQ ID NO: 457845 - RNA, 19 nt, Artificial Sequence
  Description of Artificial Sequence: Synthetic oligonucleotide
  Sense strand starting at position 18 of SEQ ID NO: 317016
guaugucugaccucgcagu

SEQ ID NO: 457846 - RNA, 19 nt, Artificial Sequence
  Description of Artificial Sequence: Synthetic oligonucleotide
  Antisense Strand to SEQ ID NO: 457845
acugcgaggucagacauac

SEQ ID NO: 457847 - RNA, 19 nt, Artificial Sequence
  Description of Artificial Sequence: Synthetic oligonucleotide
  Sense strand starting at position 82 of SEQ ID NO: 317016
aucaaaguuuaguuugaag

SEQ ID NO: 457848 - RNA, 19 nt, Artificial Sequence
  Description of Artificial Sequence: Synthetic oligonucleotide
  Antisense Strand to SEQ ID NO: 457847
cuucaaacuaaacuuugau

SEQ ID NO: 457849 - RNA, 19 nt, Artificial Sequence
  Description of Artificial Sequence: Synthetic oligonucleotide
  Sense strand starting at position 84 of SEQ ID NO: 317016
caaaguuuaguuugaaggu

SEQ ID NO: 457850 - RNA, 19 nt, Artificial Sequence
  Description of Artificial Sequence: Synthetic oligonucleotide
  Antisense Strand to SEQ ID NO: 457849
accuucaaacuaaacuuug

SEQ ID NO: 457851 - RNA, 19 nt, Artificial Sequence
  Description of Artificial Sequence: Synthetic oligonucleotide
  Sense strand starting at position 91 of SEQ ID NO: 317016
uaguuugaagguuguuauu

SEQ ID NO: 457852 - RNA, 19 nt, Artificial Sequence
  Description of Artificial Sequence: Synthetic oligonucleotide
  Antisense Strand to SEQ ID NO: 457851
aauaacaaccuucaaacua

SEQ ID NO: 457853 - RNA, 19 nt, Artificial Sequence
  Description of Artificial Sequence: Synthetic oligonucleotide
  Sense strand starting at position 240 of SEQ ID NO: 317016
uucugaaagugucucaagu

SEQ ID NO: 457854 - RNA, 19 nt, Artificial Sequence
  Description of Artificial Sequence: Synthetic oligonucleotide
  Antisense Strand to SEQ ID NO: 457853
acuugagacacuuucagaa

SEQ ID NO: 457855 - RNA, 19 nt, Artificial Sequence
  Description of Artificial Sequence: Synthetic oligonucleotide
  Sense strand starting at position 248 of SEQ ID NO: 317016
gugucucaaguagguuaga

SEQ ID NO: 457856 - RNA, 19 nt, Artificial Sequence
  Description of Artificial Sequence: Synthetic oligonucleotide
  Antisense Strand to SEQ ID NO: 457855
ucuaaccuacuugagacac

SEQ ID NO: 457857 - RNA, 19 nt, Artificial Sequence
  Description of Artificial Sequence: Synthetic oligonucleotide
  Sense strand starting at position 249 of SEQ ID NO: 317016
ugucucaaguagguuagaa

SEQ ID NO: 457858 - RNA, 19 nt, Artificial Sequence
  Description of Artificial Sequence: Synthetic oligonucleotide
  Antisense Strand to SEQ ID NO: 457857
uucuaaccuacuugagaca

SEQ ID NO: 457859 - RNA, 19 nt, Artificial Sequence
  Description of Artificial Sequence: Synthetic oligonucleotide
  Sense strand starting at position 337 of SEQ ID NO: 317016
auacuuaagcacuagugaa

SEQ ID NO: 457860 - RNA, 19 nt, Artificial Sequence
  Description of Artificial Sequence: Synthetic oligonucleotide
  Antisense Strand to SEQ ID NO: 457859
uucacuagugcuuaaguau

SEQ ID NO: 457861 - RNA, 19 nt, Artificial Sequence
  Description of Artificial Sequence: Synthetic oligonucleotide
  Sense strand starting at position 405 of SEQ ID NO: 317016
ugugaaaguugagcucagu

SEQ ID NO: 457862 - RNA, 19 nt, Artificial Sequence
  Description of Artificial Sequence: Synthetic oligonucleotide
  Antisense Strand to SEQ ID NO: 457861
acugagcucaacuuucaca

SEQ ID NO: 457863 - RNA, 19 nt, Artificial Sequence
  Description of Artificial Sequence: Synthetic oligonucleotide
  Sense strand starting at position 408 of SEQ ID NO: 317016
gaaaguugagcucaguaac

SEQ ID NO: 457864 - RNA, 19 nt, Artificial Sequence
  Description of Artificial Sequence: Synthetic oligonucleotide
  Antisense Strand to SEQ ID NO: 457863
guuacugagcucaacuuuc

SEQ ID NO: 457865 - RNA, 19 nt, Artificial Sequence
  Description of Artificial Sequence: Synthetic oligonucleotide
  Sense strand starting at position 508 of SEQ ID NO: 317016
ucuuguaaggccuacuaua

SEQ ID NO: 457866 - RNA, 19 nt, Artificial Sequence
  Description of Artificial Sequence: Synthetic oligonucleotide
  Antisense Strand to SEQ ID NO: 457865
uauaguaggccuuacaaga

SEQ ID NO: 457867 - RNA, 19 nt, Artificial Sequence
  Description of Artificial Sequence: Synthetic oligonucleotide
  Sense strand starting at position 563 of SEQ ID NO: 317016
uauagaugauccgaaagau

SEQ ID NO: 457868 - RNA, 19 nt, Artificial Sequence
  Description of Artificial Sequence: Synthetic oligonucleotide
  Antisense Strand to SEQ ID NO: 457867
aucuuucggaucaucuaua

SEQ ID NO: 457869 - RNA, 19 nt, Artificial Sequence
  Description of Artificial Sequence: Synthetic oligonucleotide
  Sense strand starting at position 989 of SEQ ID NO: 317016
uuacaaacuuugguguuau

SEQ ID NO: 457870 - RNA, 19 nt, Artificial Sequence
  Description of Artificial Sequence: Synthetic oligonucleotide
  Antisense Strand to SEQ ID NO: 457869
auaacaccaaaguuuguaa

SEQ ID NO: 457871 - RNA, 19 nt, Artificial Sequence
  Description of Artificial Sequence: Synthetic oligonucleotide
  Sense strand starting at position 1071 of SEQ ID NO: 317016
auguuugugcuccauaucu

SEQ ID NO: 457872 - RNA, 19 nt, Artificial Sequence
  Description of Artificial Sequence: Synthetic oligonucleotide
  Antisense Strand to SEQ ID NO: 457871
agauauggagcacaaacau

SEQ ID NO: 457873 - RNA, 19 nt, Artificial Sequence
  Description of Artificial Sequence: Synthetic oligonucleotide
  Sense strand starting at position 1078 of SEQ ID NO: 317016
ugcuccauaucuguagaaa

SEQ ID NO: 457874 - RNA, 19 nt, Artificial Sequence
  Description of Artificial Sequence: Synthetic oligonucleotide
  Antisense Strand to SEQ ID NO: 457873
uuucuacagauauggagca

SEQ ID NO: 457875 - RNA, 19 nt, Artificial Sequence
  Description of Artificial Sequence: Synthetic oligonucleotide
  Sense strand starting at position 1079 of SEQ ID NO: 317016
gcuccauaucuguagaaau

SEQ ID NO: 457876 - RNA, 19 nt, Artificial Sequence
  Description of Artificial Sequence: Synthetic oligonucleotide
  Antisense Strand to SEQ ID NO: 457875
auuucuacagauauggagc

SEQ ID NO: 457877 - RNA, 19 nt, Artificial Sequence
  Description of Artificial Sequence: Synthetic oligonucleotide
  Sense strand starting at position 1162 of SEQ ID NO: 317016
aggcucuggagccaaauau

SEQ ID NO: 457878 - RNA, 19 nt, Artificial Sequence
  Description of Artificial Sequence: Synthetic oligonucleotide
  Antisense Strand to SEQ ID NO: 457877
auauuuggcuccagagccu

SEQ ID NO: 457879 - RNA, 19 nt, Artificial Sequence
  Description of Artificial Sequence: Synthetic oligonucleotide
  Sense strand starting at position 1169 of SEQ ID NO: 317016
ggagccaaauauucuacau

SEQ ID NO: 457880 - RNA, 19 nt, Artificial Sequence
  Description of Artificial Sequence: Synthetic oligonucleotide
  Antisense Strand to SEQ ID NO: 457879
auguagaauauuuggcucc

SEQ ID NO: 457881 - RNA, 19 nt, Artificial Sequence
  Description of Artificial Sequence: Synthetic oligonucleotide
  Sense strand starting at position 1187 of SEQ ID NO: 317016
ucgaauuaacuggacgagu

SEQ ID NO: 457882 - RNA, 19 nt, Artificial Sequence
  Description of Artificial Sequence: Synthetic oligonucleotide
  Antisense Strand to SEQ ID NO: 457881
acucguccaguuaauucga

SEQ ID NO: 457883 - RNA, 19 nt, Artificial Sequence
  Description of Artificial Sequence: Synthetic oligonucleotide
  Sense strand starting at position 1189 of SEQ ID NO: 317016
gaauuaacuggacgaguua

SEQ ID NO: 457884 - RNA, 19 nt, Artificial Sequence
  Description of Artificial Sequence: Synthetic oligonucleotide
  Antisense Strand to SEQ ID NO: 457883
uaacucguccaguuaauuc

SEQ ID NO: 457885 - RNA, 19 nt, Artificial Sequence
  Description of Artificial Sequence: Synthetic oligonucleotide
  Sense strand starting at position 1198 of SEQ ID NO: 317016
ggacgaguuacuugaacuc

SEQ ID NO: 457886 - RNA, 19 nt, Artificial Sequence
  Description of Artificial Sequence: Synthetic oligonucleotide
  Antisense Strand to SEQ ID NO: 457885
gaguucaaguaacucgucc

SEQ ID NO: 457887 - RNA, 19 nt, Artificial Sequence
  Description of Artificial Sequence: Synthetic oligonucleotide
  Sense strand starting at position 1303 of SEQ ID NO: 317016
ggaucaguccuaugaaucc

SEQ ID NO: 457888 - RNA, 19 nt, Artificial Sequence
  Description of Artificial Sequence: Synthetic oligonucleotide
  Antisense Strand to SEQ ID NO: 457887
ggauucauaggacugaucc

SEQ ID NO: 457889 - RNA, 19 nt, Artificial Sequence
  Description of Artificial Sequence: Synthetic oligonucleotide
  Sense strand starting at position 1312 of SEQ ID NO: 317016
cuaugaauccuauggauuc

SEQ ID NO: 457890 - RNA, 19 nt, Artificial Sequence
  Description of Artificial Sequence: Synthetic oligonucleotide
  Antisense Strand to SEQ ID NO: 457889
gaauccauaggauucauag

SEQ ID NO: 457891 - RNA, 19 nt, Artificial Sequence
  Description of Artificial Sequence: Synthetic oligonucleotide
  Sense strand starting at position 1473 of SEQ ID NO: 317016
guucguauggcuguuucca

SEQ ID NO: 457892 - RNA, 19 nt, Artificial Sequence
  Description of Artificial Sequence: Synthetic oligonucleotide
  Antisense Strand to SEQ ID NO: 457891
uggaaacagccauacgaac

SEQ ID NO: 457893 - RNA, 19 nt, Artificial Sequence
  Description of Artificial Sequence: Synthetic oligonucleotide
  Sense strand starting at position 1474 of SEQ ID NO: 317016
uucguauggcuguuuccau

SEQ ID NO: 457894 - RNA, 19 nt, Artificial Sequence
  Description of Artificial Sequence: Synthetic oligonucleotide
  Antisense Strand to SEQ ID NO: 457893
auggaaacagccauacgaa

SEQ ID NO: 457895 - RNA, 19 nt, Artificial Sequence
  Description of Artificial Sequence: Synthetic oligonucleotide
  Sense strand starting at position 1501 of SEQ ID NO: 317016
caaggucuguuccucgauu

SEQ ID NO: 457896 - RNA, 19 nt, Artificial Sequence
  Description of Artificial Sequence: Synthetic oligonucleotide
  Antisense Strand to SEQ ID NO: 457895
aaucgaggaacagaccuug

SEQ ID NO: 457897 - RNA, 19 nt, Artificial Sequence
  Description of Artificial Sequence: Synthetic oligonucleotide
  Sense strand starting at position 1523 of SEQ ID NO: 317016
gguuauuaagcgcaacaca

SEQ ID NO: 457898 - RNA, 19 nt, Artificial Sequence
  Description of Artificial Sequence: Synthetic oligonucleotide
  Antisense Strand to SEQ ID NO: 457897
uguguugcgcuuaauaacc

SEQ ID NO: 457899 - RNA, 19 nt, Artificial Sequence
  Description of Artificial Sequence: Synthetic oligonucleotide
  Sense strand starting at position 1586 of SEQ ID NO: 317016
gugguaacacuguaaggaa

SEQ ID NO: 457900 - RNA, 19 nt, Artificial Sequence
  Description of Artificial Sequence: Synthetic oligonucleotide
  Antisense Strand to SEQ ID NO: 457899
uuccuuacaguguuaccac

SEQ ID NO: 457901 - RNA, 19 nt, Artificial Sequence
  Description of Artificial Sequence: Synthetic oligonucleotide
  Sense strand starting at position 1645 of SEQ ID NO: 317016
gugguuucgccuccacacu

SEQ ID NO: 457902 - RNA, 19 nt, Artificial Sequence
  Description of Artificial Sequence: Synthetic oligonucleotide
  Antisense Strand to SEQ ID NO: 457901
aguguggaggcgaaaccac

SEQ ID NO: 457903 - RNA, 19 nt, Artificial Sequence
  Description of Artificial Sequence: Synthetic oligonucleotide
  Sense strand starting at position 1744 of SEQ ID NO: 317016
gacacaugucccggaaccu

SEQ ID NO: 457904 - RNA, 19 nt, Artificial Sequence
  Description of Artificial Sequence: Synthetic oligonucleotide
  Antisense Strand to SEQ ID NO: 457903
agguuccgggacauguguc

SEQ ID NO: 457905 - RNA, 19 nt, Artificial Sequence
  Description of Artificial Sequence: Synthetic oligonucleotide
  Sense strand starting at position 1745 of SEQ ID NO: 317016
acacaugucccggaaccua

SEQ ID NO: 457906 - RNA, 19 nt, Artificial Sequence
  Description of Artificial Sequence: Synthetic oligonucleotide
  Antisense Strand to SEQ ID NO: 457905
uagguuccgggacaugugu

SEQ ID NO: 457907 - RNA, 19 nt, Artificial Sequence
  Description of Artificial Sequence: Synthetic oligonucleotide
  Sense strand starting at position 2625 of SEQ ID NO: 317016
ggagacugucacgggagaa

SEQ ID NO: 457908 - RNA, 19 nt, Artificial Sequence
  Description of Artificial Sequence: Synthetic oligonucleotide
  Antisense Strand to SEQ ID NO: 457907
uucucccgugacagucucc

SEQ ID NO: 457909 - RNA, 19 nt, Artificial Sequence
  Description of Artificial Sequence: Synthetic oligonucleotide
  Sense strand starting at position 2626 of SEQ ID NO: 317016
gagacugucacgggagaaa

SEQ ID NO: 457910 - RNA, 19 nt, Artificial Sequence
  Description of Artificial Sequence: Synthetic oligonucleotide
  Antisense Strand to SEQ ID NO: 457909
uuucucccgugacagucuc

SEQ ID NO: 457911 - RNA, 19 nt, Artificial Sequence
  Description of Artificial Sequence: Synthetic oligonucleotide
  Sense strand starting at position 2706 of SEQ ID NO: 317016
cggcuccuaccuugauauu

SEQ ID NO: 457912 - RNA, 19 nt, Artificial Sequence
  Description of Artificial Sequence: Synthetic oligonucleotide
  Antisense Strand to SEQ ID NO: 457911
aauaucaagguaggagccg

SEQ ID NO: 457913 - RNA, 19 nt, Artificial Sequence
  Description of Artificial Sequence: Synthetic oligonucleotide
  Sense strand starting at position 3892 of SEQ ID NO: 317016
gggcuugaucagggaggua

SEQ ID NO: 457914 - RNA, 19 nt, Artificial Sequence
  Description of Artificial Sequence: Synthetic oligonucleotide
  Antisense Strand to SEQ ID NO: 457913
uaccucccugaucaagccc

SEQ ID NO: 457915 - RNA, 19 nt, Artificial Sequence
  Description of Artificial Sequence: Synthetic oligonucleotide
  Sense strand starting at position 3974 of SEQ ID NO: 317016
cuggaaucuucugugucau

SEQ ID NO: 457916 - RNA, 19 nt, Artificial Sequence
  Description of Artificial Sequence: Synthetic oligonucleotide
  Antisense Strand to SEQ ID NO: 457915
augacacagaagauuccag

SEQ ID NO: 457917 - RNA, 19 nt, Artificial Sequence
  Description of Artificial Sequence: Synthetic oligonucleotide
  Sense strand starting at position 3975 of SEQ ID NO: 317016
uggaaucuucugugucauu

SEQ ID NO: 457918 - RNA, 19 nt, Artificial Sequence
  Description of Artificial Sequence: Synthetic oligonucleotide
  Antisense Strand to SEQ ID NO: 457917
aaugacacagaagauucca

SEQ ID NO: 457919 - RNA, 19 nt, Artificial Sequence
  Description of Artificial Sequence: Synthetic oligonucleotide
  Sense strand starting at position 46 of SEQ ID NO: 317017
ugcuccauaucuguagaaa

SEQ ID NO: 457920 - RNA, 19 nt, Artificial Sequence
  Description of Artificial Sequence: Synthetic oligonucleotide
  Antisense Strand to SEQ ID NO: 457919
uuucuacagauauggagca

SEQ ID NO: 457921 - RNA, 19 nt, Artificial Sequence
  Description of Artificial Sequence: Synthetic oligonucleotide
  Sense strand starting at position 47 of SEQ ID NO: 317017
gcuccauaucuguagaaau

SEQ ID NO: 457922 - RNA, 19 nt, Artificial Sequence
  Description of Artificial Sequence: Synthetic oligonucleotide
  Antisense Strand to SEQ ID NO: 457921
auuucuacagauauggagc

SEQ ID NO: 457923 - RNA, 19 nt, Artificial Sequence
  Description of Artificial Sequence: Synthetic oligonucleotide
  Sense strand starting at position 130 of SEQ ID NO: 317017
aggcucuggagccaaauau

SEQ ID NO: 457924 - RNA, 19 nt, Artificial Sequence
  Description of Artificial Sequence: Synthetic oligonucleotide
  Antisense Strand to SEQ ID NO: 457923
auauuuggcuccagagccu

SEQ ID NO: 457925 - RNA, 19 nt, Artificial Sequence
  Description of Artificial Sequence: Synthetic oligonucleotide
  Sense strand starting at position 137 of SEQ ID NO: 317017
ggagccaaauauucuacau

SEQ ID NO: 457926 - RNA, 19 nt, Artificial Sequence
  Description of Artificial Sequence: Synthetic oligonucleotide
  Antisense Strand to SEQ ID NO: 457925
auguagaauauuuggcucc

SEQ ID NO: 457927 - RNA, 19 nt, Artificial Sequence
  Description of Artificial Sequence: Synthetic oligonucleotide
  Sense strand starting at position 155 of SEQ ID NO: 317017
ucgaauuaacuggacgagu

SEQ ID NO: 457928 - RNA, 19 nt, Artificial Sequence
  Description of Artificial Sequence: Synthetic oligonucleotide
  Antisense Strand to SEQ ID NO: 457927
acucguccaguuaauucga

SEQ ID NO: 457929 - RNA, 19 nt, Artificial Sequence
  Description of Artificial Sequence: Synthetic oligonucleotide
  Sense strand starting at position 157 of SEQ ID NO: 317017
gaauuaacuggacgaguua

SEQ ID NO: 457930 - RNA, 19 nt, Artificial Sequence
  Description of Artificial Sequence: Synthetic oligonucleotide
  Antisense Strand to SEQ ID NO: 457929
uaacucguccaguuaauuc

SEQ ID NO: 457931 - RNA, 19 nt, Artificial Sequence
  Description of Artificial Sequence: Synthetic oligonucleotide
  Sense strand starting at position 166 of SEQ ID NO: 317017
ggacgaguuacuugaacuc

SEQ ID NO: 457932 - RNA, 19 nt, Artificial Sequence
  Description of Artificial Sequence: Synthetic oligonucleotide
  Antisense Strand to SEQ ID NO: 457931
gaguucaaguaacucgucc

SEQ ID NO: 457933 - RNA, 19 nt, Artificial Sequence
  Description of Artificial Sequence: Synthetic oligonucleotide
  Sense strand starting at position 271 of SEQ ID NO: 317017
ggaucaguccuaugaaucc

SEQ ID NO: 457934 - RNA, 19 nt, Artificial Sequence
  Description of Artificial Sequence: Synthetic oligonucleotide
  Antisense Strand to SEQ ID NO: 457933
ggauucauaggacugaucc

SEQ ID NO: 457935 - RNA, 19 nt, Artificial Sequence
  Description of Artificial Sequence: Synthetic oligonucleotide
  Sense strand starting at position 280 of SEQ ID NO: 317017
cuaugaauccuauggauuc

SEQ ID NO: 457936 - RNA, 19 nt, Artificial Sequence
  Description of Artificial Sequence: Synthetic oligonucleotide
  Antisense Strand to SEQ ID NO: 457935
gaauccauaggauucauag

SEQ ID NO: 457937 - RNA, 19 nt, Artificial Sequence
  Description of Artificial Sequence: Synthetic oligonucleotide
  Sense strand starting at position 441 of SEQ ID NO: 317017
guucguauggcuguuucca

SEQ ID NO: 457938 - RNA, 19 nt, Artificial Sequence
  Description of Artificial Sequence: Synthetic oligonucleotide
  Antisense Strand to SEQ ID NO: 457937
uggaaacagccauacgaac

SEQ ID NO: 457939 - RNA, 19 nt, Artificial Sequence
  Description of Artificial Sequence: Synthetic oligonucleotide
  Sense strand starting at position 442 of SEQ ID NO: 317017
uucguauggcuguuuccau

SEQ ID NO: 457940 - RNA, 19 nt, Artificial Sequence
  Description of Artificial Sequence: Synthetic oligonucleotide
  Antisense Strand to SEQ ID NO: 457939
auggaaacagccauacgaa

SEQ ID NO: 457941 - RNA, 19 nt, Artificial Sequence
  Description of Artificial Sequence: Synthetic oligonucleotide
  Sense strand starting at position 554 of SEQ ID NO: 317017
gugguaacacuguaaggaa

SEQ ID NO: 457942 - RNA, 19 nt, Artificial Sequence
  Description of Artificial Sequence: Synthetic oligonucleotide
  Antisense Strand to SEQ ID NO: 457941
uuccuuacaguguuaccac

SEQ ID NO: 457943 - RNA, 19 nt, Artificial Sequence
  Description of Artificial Sequence: Synthetic oligonucleotide
  Sense strand starting at position 613 of SEQ ID NO: 317017
gugguuucgccuccacacu

SEQ ID NO: 457944 - RNA, 19 nt, Artificial Sequence
  Description of Artificial Sequence: Synthetic oligonucleotide
  Antisense Strand to SEQ ID NO: 457943
aguguggaggcgaaaccac

SEQ ID NO: 457945 - RNA, 19 nt, Artificial Sequence
  Description of Artificial Sequence: Synthetic oligonucleotide
  Sense strand starting at position 712 of SEQ ID NO: 317017
gacacaugucccggaaccu

SEQ ID NO: 457946 - RNA, 19 nt, Artificial Sequence
  Description of Artificial Sequence: Synthetic oligonucleotide
  Antisense Strand to SEQ ID NO: 457945
agguuccgggacauguguc

SEQ ID NO: 457947 - RNA, 19 nt, Artificial Sequence
  Description of Artificial Sequence: Synthetic oligonucleotide
  Sense strand starting at position 713 of SEQ ID NO: 317017
acacaugucccggaaccua

SEQ ID NO: 457948 - RNA, 19 nt, Artificial Sequence
  Description of Artificial Sequence: Synthetic oligonucleotide
  Antisense Strand to SEQ ID NO: 457947
uagguuccgggacaugugu

SEQ ID NO: 457949 - RNA, 19 nt, Artificial Sequence
  Description of Artificial Sequence: Synthetic oligonucleotide
  Sense strand starting at position 1593 of SEQ ID NO: 317017
ggagacugucacgggagaa

SEQ ID NO: 457950 - RNA, 19 nt, Artificial Sequence
  Description of Artificial Sequence: Synthetic oligonucleotide
  Antisense Strand to SEQ ID NO: 457949
uucucccgugacagucucc

SEQ ID NO: 457951 - RNA, 19 nt, Artificial Sequence
  Description of Artificial Sequence: Synthetic oligonucleotide
  Sense strand starting at position 1594 of SEQ ID NO: 317017
gagacugucacgggagaaa

SEQ ID NO: 457952 - RNA, 19 nt, Artificial Sequence
  Description of Artificial Sequence: Synthetic oligonucleotide
  Antisense Strand to SEQ ID NO: 457951
uuucucccgugacagucuc

SEQ ID NO: 457953 - RNA, 19 nt, Artificial Sequence
  Description of Artificial Sequence: Synthetic oligonucleotide
  Sense strand starting at position 2860 of SEQ ID NO: 317017
gggcuugaucagggaggua

SEQ ID NO: 457954 - RNA, 19 nt, Artificial Sequence
  Description of Artificial Sequence: Synthetic oligonucleotide
  Antisense Strand to SEQ ID NO: 457953
uaccucccugaucaagccc

SEQ ID NO: 457955 - RNA, 19 nt, Artificial Sequence
  Description of Artificial Sequence: Synthetic oligonucleotide
  Sense strand starting at position 3241 of SEQ ID NO: 317017
gguuuaauuucgguguagu

SEQ ID NO: 457956 - RNA, 19 nt, Artificial Sequence
  Description of Artificial Sequence: Synthetic oligonucleotide
  Antisense Strand to SEQ ID NO: 457955
acuacaccgaaauuaaacc

SEQ ID NO: 457957 - RNA, 19 nt, Artificial Sequence
  Description of Artificial Sequence: Synthetic oligonucleotide
  Sense strand starting at position 3242 of SEQ ID NO: 317017
guuuaauuucgguguagug

SEQ ID NO: 457958 - RNA, 19 nt, Artificial Sequence
  Description of Artificial Sequence: Synthetic oligonucleotide
  Antisense Strand to SEQ ID NO: 457957
cacuacaccgaaauuaaac

SEQ ID NO: 457959 - RNA, 19 nt, Artificial Sequence
  Description of Artificial Sequence: Synthetic oligonucleotide
  Sense strand starting at position 3244 of SEQ ID NO: 317017
uuaauuucgguguagugua

SEQ ID NO: 457960 - RNA, 19 nt, Artificial Sequence
  Description of Artificial Sequence: Synthetic oligonucleotide
  Antisense Strand to SEQ ID NO: 457959
uacacuacaccgaaauuaa

SEQ ID NO: 457961 - RNA, 19 nt, Artificial Sequence
  Description of Artificial Sequence: Synthetic oligonucleotide
  Sense strand starting at position 3258 of SEQ ID NO: 317017
guguaaaugagaugucagg

SEQ ID NO: 457962 - RNA, 19 nt, Artificial Sequence
  Description of Artificial Sequence: Synthetic oligonucleotide
  Antisense Strand to SEQ ID NO: 457961
ccugacaucucauuuacac

SEQ ID NO: 457963 - RNA, 19 nt, Artificial Sequence
  Description of Artificial Sequence: Synthetic oligonucleotide
  Sense strand starting at position 3356 of SEQ ID NO: 317017
auggaaugccuauguaaac

SEQ ID NO: 457964 - RNA, 19 nt, Artificial Sequence
  Description of Artificial Sequence: Synthetic oligonucleotide
  Antisense Strand to SEQ ID NO: 457963
guuuacauaggcauuccau

SEQ ID NO: 457965 - RNA, 19 nt, Artificial Sequence
  Description of Artificial Sequence: Synthetic oligonucleotide
  Sense strand starting at position 3357 of SEQ ID NO: 317017
uggaaugccuauguaaaca

SEQ ID NO: 457966 - RNA, 19 nt, Artificial Sequence
  Description of Artificial Sequence: Synthetic oligonucleotide
  Antisense Strand to SEQ ID NO: 457965
uguuuacauaggcauucca

SEQ ID NO: 457967 - RNA, 19 nt, Artificial Sequence
  Description of Artificial Sequence: Synthetic oligonucleotide
  Sense strand starting at position 3387 of SEQ ID NO: 317017
gaguacuaccuuugaguua

SEQ ID NO: 457968 - RNA, 19 nt, Artificial Sequence
  Description of Artificial Sequence: Synthetic oligonucleotide
  Antisense Strand to SEQ ID NO: 457967
uaacucaaagguaguacuc

SEQ ID NO: 457969 - RNA, 19 nt, Artificial Sequence
  Description of Artificial Sequence: Synthetic oligonucleotide
  Sense strand starting at position 3542 of SEQ ID NO: 317017
ucuagaucuuuaucuagag

SEQ ID NO: 457970 - RNA, 19 nt, Artificial Sequence
  Description of Artificial Sequence: Synthetic oligonucleotide
  Antisense Strand to SEQ ID NO: 457969
cucuagauaaagaucuaga

SEQ ID NO: 457971 - RNA, 19 nt, Artificial Sequence
  Description of Artificial Sequence: Synthetic oligonucleotide
  Sense strand starting at position 3636 of SEQ ID NO: 317017
cugggaaauugucuugggu

SEQ ID NO: 457972 - RNA, 19 nt, Artificial Sequence
  Description of Artificial Sequence: Synthetic oligonucleotide
  Antisense Strand to SEQ ID NO: 457971
acccaagacaauuucccag

SEQ ID NO: 457973 - RNA, 19 nt, Artificial Sequence
  Description of Artificial Sequence: Synthetic oligonucleotide
  Sense strand starting at position 3639 of SEQ ID NO: 317017
ggaaauugucuuggguuau

SEQ ID NO: 457974 - RNA, 19 nt, Artificial Sequence
  Description of Artificial Sequence: Synthetic oligonucleotide
  Antisense Strand to SEQ ID NO: 457973
auaacccaagacaauuucc

SEQ ID NO: 457975 - RNA, 19 nt, Artificial Sequence
  Description of Artificial Sequence: Synthetic oligonucleotide
  Sense strand starting at position 3649 of SEQ ID NO: 317017
uuggguuauuauccuagga

SEQ ID NO: 457976 - RNA, 19 nt, Artificial Sequence
  Description of Artificial Sequence: Synthetic oligonucleotide
  Antisense Strand to SEQ ID NO: 457975
uccuaggauaauaacccaa

SEQ ID NO: 457977 - RNA, 19 nt, Artificial Sequence
  Description of Artificial Sequence: Synthetic oligonucleotide
  Sense strand starting at position 3653 of SEQ ID NO: 317017
guuauuauccuaggacacu

SEQ ID NO: 457978 - RNA, 19 nt, Artificial Sequence
  Description of Artificial Sequence: Synthetic oligonucleotide
  Antisense Strand to SEQ ID NO: 457977
aguguccuaggauaauaac

SEQ ID NO: 457979 - RNA, 19 nt, Artificial Sequence
  Description of Artificial Sequence: Synthetic oligonucleotide
  Sense strand starting at position 3671 of SEQ ID NO: 317017
ugagguuugggccaguauu

SEQ ID NO: 457980 - RNA, 19 nt, Artificial Sequence
  Description of Artificial Sequence: Synthetic oligonucleotide
  Antisense Strand to SEQ ID NO: 457979
aauacuggcccaaaccuca

SEQ ID NO: 457981 - RNA, 19 nt, Artificial Sequence
  Description of Artificial Sequence: Synthetic oligonucleotide
  Sense strand starting at position 3712 of SEQ ID NO: 317017
gauaguauuucugagaaca

SEQ ID NO: 457982 - RNA, 19 nt, Artificial Sequence
  Description of Artificial Sequence: Synthetic oligonucleotide
  Antisense Strand to SEQ ID NO: 457981
uguucucagaaauacuauc

SEQ ID NO: 457983 - RNA, 19 nt, Artificial Sequence
  Description of Artificial Sequence: Synthetic oligonucleotide
  Sense strand starting at position 3855 of SEQ ID NO: 317017
auaagcuggucuuuaucaa

SEQ ID NO: 457984 - RNA, 19 nt, Artificial Sequence
  Description of Artificial Sequence: Synthetic oligonucleotide
  Antisense Strand to SEQ ID NO: 457983
uugauaaagaccagcuuau

SEQ ID NO: 457985 - RNA, 19 nt, Artificial Sequence
  Description of Artificial Sequence: Synthetic oligonucleotide
  Sense strand starting at position 3905 of SEQ ID NO: 317017
aggucagacaccgaaugua

SEQ ID NO: 457986 - RNA, 19 nt, Artificial Sequence
  Description of Artificial Sequence: Synthetic oligonucleotide
  Antisense Strand to SEQ ID NO: 457985
uacauucggugucugaccu

SEQ ID NO: 457987 - RNA, 19 nt, Artificial Sequence
  Description of Artificial Sequence: Synthetic oligonucleotide
  Sense strand starting at position 3914 of SEQ ID NO: 317017
accgaauguaccuauggau

SEQ ID NO: 457988 - RNA, 19 nt, Artificial Sequence
  Description of Artificial Sequence: Synthetic oligonucleotide
  Antisense Strand to SEQ ID NO: 457987
auccauagguacauucggu

SEQ ID NO: 457989 - RNA, 19 nt, Artificial Sequence
  Description of Artificial Sequence: Synthetic oligonucleotide
  Sense strand starting at position 3942 of SEQ ID NO: 317017
ucugauaagugaucugcaa

SEQ ID NO: 457990 - RNA, 19 nt, Artificial Sequence
  Description of Artificial Sequence: Synthetic oligonucleotide
  Antisense Strand to SEQ ID NO: 457989
uugcagaucacuuaucaga

SEQ ID NO: 457991 - RNA, 19 nt, Artificial Sequence
  Description of Artificial Sequence: Synthetic oligonucleotide
  Sense strand starting at position 3946 of SEQ ID NO: 317017
auaagugaucugcaaguag

SEQ ID NO: 457992 - RNA, 19 nt, Artificial Sequence
  Description of Artificial Sequence: Synthetic oligonucleotide
  Antisense Strand to SEQ ID NO: 457991
cuacuugcagaucacuuau

SEQ ID NO: 457993 - RNA, 19 nt, Artificial Sequence
  Description of Artificial Sequence: Synthetic oligonucleotide
  Sense strand starting at position 3950 of SEQ ID NO: 317017
gugaucugcaaguagauaa

SEQ ID NO: 457994 - RNA, 19 nt, Artificial Sequence
  Description of Artificial Sequence: Synthetic oligonucleotide
  Antisense Strand to SEQ ID NO: 457993
uuaucuacuugcagaucac

SEQ ID NO: 457995 - RNA, 19 nt, Artificial Sequence
  Description of Artificial Sequence: Synthetic oligonucleotide
  Sense strand starting at position 3961 of SEQ ID NO: 317017
guagauaagaaauguguuu

SEQ ID NO: 457996 - RNA, 19 nt, Artificial Sequence
  Description of Artificial Sequence: Synthetic oligonucleotide
  Antisense Strand to SEQ ID NO: 457995
aaacacauuucuuaucuac

SEQ ID NO: 457997 - RNA, 19 nt, Artificial Sequence
  Description of Artificial Sequence: Synthetic oligonucleotide
  Sense strand starting at position 3963 of SEQ ID NO: 317017
agauaagaaauguguuuag

SEQ ID NO: 457998 - RNA, 19 nt, Artificial Sequence
  Description of Artificial Sequence: Synthetic oligonucleotide
  Antisense Strand to SEQ ID NO: 457997
cuaaacacauuucuuaucu

SEQ ID NO: 457999 - RNA, 19 nt, Artificial Sequence
  Description of Artificial Sequence: Synthetic oligonucleotide
  Sense strand starting at position 106 of SEQ ID NO: 317018
cuaucaaugcuuuacagga

SEQ ID NO: 458000 - RNA, 19 nt, Artificial Sequence
  Description of Artificial Sequence: Synthetic oligonucleotide
  Antisense Strand to SEQ ID NO: 457999
uccuguaaagcauugauag

SEQ ID NO: 458001 - RNA, 19 nt, Artificial Sequence
  Description of Artificial Sequence: Synthetic oligonucleotide
  Sense strand starting at position 114 of SEQ ID NO: 317018
gcuuuacaggauuauauca

SEQ ID NO: 458002 - RNA, 19 nt, Artificial Sequence
  Description of Artificial Sequence: Synthetic oligonucleotide
  Antisense Strand to SEQ ID NO: 458001
ugauauaauccuguaaagc

SEQ ID NO: 458003 - RNA, 19 nt, Artificial Sequence
  Description of Artificial Sequence: Synthetic oligonucleotide
  Sense strand starting at position 119 of SEQ ID NO: 317018
acaggauuauaucacaaag

SEQ ID NO: 458004 - RNA, 19 nt, Artificial Sequence
  Description of Artificial Sequence: Synthetic oligonucleotide
  Antisense Strand to SEQ ID NO: 458003
cuuugugauauaauccugu

SEQ ID NO: 458005 - RNA, 19 nt, Artificial Sequence
  Description of Artificial Sequence: Synthetic oligonucleotide
  Sense strand starting at position 121 of SEQ ID NO: 317018
aggauuauaucacaaagga

SEQ ID NO: 458006 - RNA, 19 nt, Artificial Sequence
  Description of Artificial Sequence: Synthetic oligonucleotide
  Antisense Strand to SEQ ID NO: 458005
uccuuugugauauaauccu

SEQ ID NO: 458007 - RNA, 19 nt, Artificial Sequence
  Description of Artificial Sequence: Synthetic oligonucleotide
  Sense strand starting at position 158 of SEQ ID NO: 317018
ugcaucaaugcguaaagga

SEQ ID NO: 458008 - RNA, 19 nt, Artificial Sequence
  Description of Artificial Sequence: Synthetic oligonucleotide
  Antisense Strand to SEQ ID NO: 458007
uccuuuacgcauugaugca

SEQ ID NO: 458009 - RNA, 19 nt, Artificial Sequence
  Description of Artificial Sequence: Synthetic oligonucleotide
  Sense strand starting at position 179 of SEQ ID NO: 317018
ggaugcauuucugugcaua

SEQ ID NO: 458010 - RNA, 19 nt, Artificial Sequence
  Description of Artificial Sequence: Synthetic oligonucleotide
  Antisense Strand to SEQ ID NO: 458009
uaugcacagaaaugcaucc

SEQ ID NO: 458011 - RNA, 19 nt, Artificial Sequence
  Description of Artificial Sequence: Synthetic oligonucleotide
  Sense strand starting at position 180 of SEQ ID NO: 317018
gaugcauuucugugcauag

SEQ ID NO: 458012 - RNA, 19 nt, Artificial Sequence
  Description of Artificial Sequence: Synthetic oligonucleotide
  Antisense Strand to SEQ ID NO: 458011
cuaugcacagaaaugcauc

SEQ ID NO: 458013 - RNA, 19 nt, Artificial Sequence
  Description of Artificial Sequence: Synthetic oligonucleotide
  Sense strand starting at position 181 of SEQ ID NO: 317018
augcauuucugugcauagu

SEQ ID NO: 458014 - RNA, 19 nt, Artificial Sequence
  Description of Artificial Sequence: Synthetic oligonucleotide
  Antisense Strand to SEQ ID NO: 458013
acuaugcacagaaaugcau

SEQ ID NO: 458015 - RNA, 19 nt, Artificial Sequence
  Description of Artificial Sequence: Synthetic oligonucleotide
  Sense strand starting at position 182 of SEQ ID NO: 317018
ugcauuucugugcauagua

SEQ ID NO: 458016 - RNA, 19 nt, Artificial Sequence
  Description of Artificial Sequence: Synthetic oligonucleotide
  Antisense Strand to SEQ ID NO: 458015
uacuaugcacagaaaugca

SEQ ID NO: 458017 - RNA, 19 nt, Artificial Sequence
  Description of Artificial Sequence: Synthetic oligonucleotide
  Sense strand starting at position 303 of SEQ ID NO: 317018
cuuuaucauugagucagau

SEQ ID NO: 458018 - RNA, 19 nt, Artificial Sequence
  Description of Artificial Sequence: Synthetic oligonucleotide
  Antisense Strand to SEQ ID NO: 458017
aucugacucaaugauaaag

SEQ ID NO: 458019 - RNA, 19 nt, Artificial Sequence
  Description of Artificial Sequence: Synthetic oligonucleotide
  Sense strand starting at position 312 of SEQ ID NO: 317018
ugagucagauuacuaccau

SEQ ID NO: 458020 - RNA, 19 nt, Artificial Sequence
  Description of Artificial Sequence: Synthetic oligonucleotide
  Antisense Strand to SEQ ID NO: 458019
augguaguaaucugacuca

SEQ ID NO: 458021 - RNA, 19 nt, Artificial Sequence
  Description of Artificial Sequence: Synthetic oligonucleotide
  Sense strand starting at position 367 of SEQ ID NO: 317018
aagcaaggucuuugaaaug

SEQ ID NO: 458022 - RNA, 19 nt, Artificial Sequence
  Description of Artificial Sequence: Synthetic oligonucleotide
  Antisense Strand to SEQ ID NO: 458021
cauuucaaagaccuugcuu

SEQ ID NO: 458023 - RNA, 19 nt, Artificial Sequence
  Description of Artificial Sequence: Synthetic oligonucleotide
  Sense strand starting at position 372 of SEQ ID NO: 317018
aggucuuugaaauguaguu

SEQ ID NO: 458024 - RNA, 19 nt, Artificial Sequence
  Description of Artificial Sequence: Synthetic oligonucleotide
  Antisense Strand to SEQ ID NO: 458023
aacuacauuucaaagaccu

SEQ ID NO: 458025 - RNA, 19 nt, Artificial Sequence
  Description of Artificial Sequence: Synthetic oligonucleotide
  Sense strand starting at position 377 of SEQ ID NO: 317018
uuugaaauguaguuguaca

SEQ ID NO: 458026 - RNA, 19 nt, Artificial Sequence
  Description of Artificial Sequence: Synthetic oligonucleotide
  Antisense Strand to SEQ ID NO: 458025
uguacaacuacauuucaaa

SEQ ID NO: 458027 - RNA, 19 nt, Artificial Sequence
  Description of Artificial Sequence: Synthetic oligonucleotide
  Sense strand starting at position 378 of SEQ ID NO: 317018
uugaaauguaguuguacac

SEQ ID NO: 458028 - RNA, 19 nt, Artificial Sequence
  Description of Artificial Sequence: Synthetic oligonucleotide
  Antisense Strand to SEQ ID NO: 458027
guguacaacuacauuucaa

SEQ ID NO: 458029 - RNA, 19 nt, Artificial Sequence
  Description of Artificial Sequence: Synthetic oligonucleotide
  Sense strand starting at position 500 of SEQ ID NO: 317018
gucugucauacugacagga

SEQ ID NO: 458030 - RNA, 19 nt, Artificial Sequence
  Description of Artificial Sequence: Synthetic oligonucleotide
  Antisense Strand to SEQ ID NO: 458029
uccugucaguaugacagac

SEQ ID NO: 458031 - RNA, 19 nt, Artificial Sequence
  Description of Artificial Sequence: Synthetic oligonucleotide
  Sense strand starting at position 533 of SEQ ID NO: 317018
auguaacaucuggagucau

SEQ ID NO: 458032 - RNA, 19 nt, Artificial Sequence
  Description of Artificial Sequence: Synthetic oligonucleotide
  Antisense Strand to SEQ ID NO: 458031
augacuccagauguuacau

SEQ ID NO: 458033 - RNA, 19 nt, Artificial Sequence
  Description of Artificial Sequence: Synthetic oligonucleotide
  Sense strand starting at position 632 of SEQ ID NO: 317018
ggaguaaauuuacauccuu

SEQ ID NO: 458034 - RNA, 19 nt, Artificial Sequence
  Description of Artificial Sequence: Synthetic oligonucleotide
  Antisense Strand to SEQ ID NO: 458033
aaggauguaaauuuacucc

SEQ ID NO: 458035 - RNA, 19 nt, Artificial Sequence
  Description of Artificial Sequence: Synthetic oligonucleotide
  Sense strand starting at position 1120 of SEQ ID NO: 317018
gcuucucugccagaaugag

SEQ ID NO: 458036 - RNA, 19 nt, Artificial Sequence
  Description of Artificial Sequence: Synthetic oligonucleotide
  Antisense Strand to SEQ ID NO: 458035
cucauucuggcagagaagc

SEQ ID NO: 458037 - RNA, 19 nt, Artificial Sequence
  Description of Artificial Sequence: Synthetic oligonucleotide
  Sense strand starting at position 1128 of SEQ ID NO: 317018
gccagaaugaguuguugag

SEQ ID NO: 458038 - RNA, 19 nt, Artificial Sequence
  Description of Artificial Sequence: Synthetic oligonucleotide
  Antisense Strand to SEQ ID NO: 458037
cucaacaacucauucuggc

SEQ ID NO: 458039 - RNA, 19 nt, Artificial Sequence
  Description of Artificial Sequence: Synthetic oligonucleotide
  Sense strand starting at position 1246 of SEQ ID NO: 317018
ugccucuauuccuuaagga

SEQ ID NO: 458040 - RNA, 19 nt, Artificial Sequence
  Description of Artificial Sequence: Synthetic oligonucleotide
  Antisense Strand to SEQ ID NO: 458039
uccuuaaggaauagaggca

SEQ ID NO: 458041 - RNA, 19 nt, Artificial Sequence
  Description of Artificial Sequence: Synthetic oligonucleotide
  Sense strand starting at position 1247 of SEQ ID NO: 317018
gccucuauuccuuaaggac

SEQ ID NO: 458042 - RNA, 19 nt, Artificial Sequence
  Description of Artificial Sequence: Synthetic oligonucleotide
  Antisense Strand to SEQ ID NO: 458041
guccuuaaggaauagaggc

SEQ ID NO: 458043 - RNA, 19 nt, Artificial Sequence
  Description of Artificial Sequence: Synthetic oligonucleotide
  Sense strand starting at position 1307 of SEQ ID NO: 317018
gcuugcgaucaucaggauu

SEQ ID NO: 458044 - RNA, 19 nt, Artificial Sequence
  Description of Artificial Sequence: Synthetic oligonucleotide
  Antisense Strand to SEQ ID NO: 458043
aauccugaugaucgcaagc

SEQ ID NO: 458045 - RNA, 19 nt, Artificial Sequence
  Description of Artificial Sequence: Synthetic oligonucleotide
  Sense strand starting at position 1310 of SEQ ID NO: 317018
ugcgaucaucaggauugga

SEQ ID NO: 458046 - RNA, 19 nt, Artificial Sequence
  Description of Artificial Sequence: Synthetic oligonucleotide
  Antisense Strand to SEQ ID NO: 458045
uccaauccugaugaucgca

SEQ ID NO: 458047 - RNA, 19 nt, Artificial Sequence
  Description of Artificial Sequence: Synthetic oligonucleotide
  Sense strand starting at position 2768 of SEQ ID NO: 317018
augacaugccuuugauauc

SEQ ID NO: 458048 - RNA, 19 nt, Artificial Sequence
  Description of Artificial Sequence: Synthetic oligonucleotide
  Antisense Strand to SEQ ID NO: 458047
gauaucaaaggcaugucau

SEQ ID NO: 458049 - RNA, 19 nt, Artificial Sequence
  Description of Artificial Sequence: Synthetic oligonucleotide
  Sense strand starting at position 2926 of SEQ ID NO: 317018
ugguuauuccgggcugugu

SEQ ID NO: 458050 - RNA, 19 nt, Artificial Sequence
  Description of Artificial Sequence: Synthetic oligonucleotide
  Antisense Strand to SEQ ID NO: 458049
acacagcccggaauaacca

SEQ ID NO: 458051 - RNA, 19 nt, Artificial Sequence
  Description of Artificial Sequence: Synthetic oligonucleotide
  Sense strand starting at position 2927 of SEQ ID NO: 317018
gguuauuccgggcugugua

SEQ ID NO: 458052 - RNA, 19 nt, Artificial Sequence
  Description of Artificial Sequence: Synthetic oligonucleotide
  Antisense Strand to SEQ ID NO: 458051
uacacagcccggaauaacc

SEQ ID NO: 458053 - RNA, 19 nt, Artificial Sequence
  Description of Artificial Sequence: Synthetic oligonucleotide
  Sense strand starting at position 3109 of SEQ ID NO: 317018
aguaaagcaguguacgaau

SEQ ID NO: 458054 - RNA, 19 nt, Artificial Sequence
  Description of Artificial Sequence: Synthetic oligonucleotide
  Antisense Strand to SEQ ID NO: 458053
auucguacacugcuuuacu

SEQ ID NO: 458055 - RNA, 19 nt, Artificial Sequence
  Description of Artificial Sequence: Synthetic oligonucleotide
  Sense strand starting at position 3140 of SEQ ID NO: 317018
guguuacauuugccaugca

SEQ ID NO: 458056 - RNA, 19 nt, Artificial Sequence
  Description of Artificial Sequence: Synthetic oligonucleotide
  Antisense Strand to SEQ ID NO: 458055
ugcauggcaaauguaacac

SEQ ID NO: 458057 - RNA, 19 nt, Artificial Sequence
  Description of Artificial Sequence: Synthetic oligonucleotide
  Sense strand starting at position 3188 of SEQ ID NO: 317018
ugaaaucaauuuggguuaa

SEQ ID NO: 458058 - RNA, 19 nt, Artificial Sequence
  Description of Artificial Sequence: Synthetic oligonucleotide
  Antisense Strand to SEQ ID NO: 458057
uuaacccaaauugauuuca

SEQ ID NO: 458059 - RNA, 19 nt, Artificial Sequence
  Description of Artificial Sequence: Synthetic oligonucleotide
  Sense strand starting at position 3189 of SEQ ID NO: 317018
gaaaucaauuuggguuaag

SEQ ID NO: 458060 - RNA, 19 nt, Artificial Sequence
  Description of Artificial Sequence: Synthetic oligonucleotide
  Antisense Strand to SEQ ID NO: 458059
cuuaacccaaauugauuuc

SEQ ID NO: 458061 - RNA, 19 nt, Artificial Sequence
  Description of Artificial Sequence: Synthetic oligonucleotide
  Sense strand starting at position 3322 of SEQ ID NO: 317018
uuauaagccuugccaauga

SEQ ID NO: 458062 - RNA, 19 nt, Artificial Sequence
  Description of Artificial Sequence: Synthetic oligonucleotide
  Antisense Strand to SEQ ID NO: 458061
ucauuggcaaggcuuauaa

SEQ ID NO: 458063 - RNA, 19 nt, Artificial Sequence
  Description of Artificial Sequence: Synthetic oligonucleotide
  Sense strand starting at position 3457 of SEQ ID NO: 317018
accuaauauucuguaguuu

SEQ ID NO: 458064 - RNA, 19 nt, Artificial Sequence
  Description of Artificial Sequence: Synthetic oligonucleotide
  Antisense Strand to SEQ ID NO: 458063
aaacuacagaauauuaggu

SEQ ID NO: 458065 - RNA, 19 nt, Artificial Sequence
  Description of Artificial Sequence: Synthetic oligonucleotide
  Sense strand starting at position 3651 of SEQ ID NO: 317018
guggaucagcuuugagaag

SEQ ID NO: 458066 - RNA, 19 nt, Artificial Sequence
  Description of Artificial Sequence: Synthetic oligonucleotide
  Antisense Strand to SEQ ID NO: 458065
cuucucaaagcugauccac

SEQ ID NO: 458067 - RNA, 19 nt, Artificial Sequence
  Description of Artificial Sequence: Synthetic oligonucleotide
  Sense strand starting at position 3866 of SEQ ID NO: 317018
uuggaaauaugguuaacau

SEQ ID NO: 458068 - RNA, 19 nt, Artificial Sequence
  Description of Artificial Sequence: Synthetic oligonucleotide
  Antisense Strand to SEQ ID NO: 458067
auguuaaccauauuuccaa

SEQ ID NO: 458069 - RNA, 19 nt, Artificial Sequence
  Description of Artificial Sequence: Synthetic oligonucleotide
  Sense strand starting at position 3881 of SEQ ID NO: 317018
acauaucuguccucuaagu

SEQ ID NO: 458070 - RNA, 19 nt, Artificial Sequence
  Description of Artificial Sequence: Synthetic oligonucleotide
  Antisense Strand to SEQ ID NO: 458069
acuuagaggacagauaugu

SEQ ID NO: 458071 - RNA, 19 nt, Artificial Sequence
  Description of Artificial Sequence: Synthetic oligonucleotide
  Sense strand starting at position 3887 of SEQ ID NO: 317018
cuguccucuaaguggaaga

SEQ ID NO: 458072 - RNA, 19 nt, Artificial Sequence
  Description of Artificial Sequence: Synthetic oligonucleotide
  Antisense Strand to SEQ ID NO: 458071
ucuuccacuuagaggacag

SEQ ID NO: 458073 - RNA, 19 nt, Artificial Sequence
  Description of Artificial Sequence: Synthetic oligonucleotide
  Sense strand starting at position 3889 of SEQ ID NO: 317018
guccucuaaguggaagagu

SEQ ID NO: 458074 - RNA, 19 nt, Artificial Sequence
  Description of Artificial Sequence: Synthetic oligonucleotide
  Antisense Strand to SEQ ID NO: 458073
acucuuccacuuagaggac

SEQ ID NO: 458075 - RNA, 19 nt, Artificial Sequence
  Description of Artificial Sequence: Synthetic oligonucleotide
  Sense strand starting at position 3935 of SEQ ID NO: 317018
uguguuuaugaagacuaca

SEQ ID NO: 458076 - RNA, 19 nt, Artificial Sequence
  Description of Artificial Sequence: Synthetic oligonucleotide
  Antisense Strand to SEQ ID NO: 458075
uguagucuucauaaacaca

SEQ ID NO: 458077 - RNA, 19 nt, Artificial Sequence
  Description of Artificial Sequence: Synthetic oligonucleotide
  Sense strand starting at position 3954 of SEQ ID NO: 317018
gcagcaaugccagaaauac

SEQ ID NO: 458078 - RNA, 19 nt, Artificial Sequence
  Description of Artificial Sequence: Synthetic oligonucleotide
  Antisense Strand to SEQ ID NO: 458077
guauuucuggcauugcugc

SEQ ID NO: 458079 - RNA, 19 nt, Artificial Sequence
  Description of Artificial Sequence: Synthetic oligonucleotide
  Sense strand starting at position 45 of SEQ ID NO: 317019
ucagaauuccuguggauuc

SEQ ID NO: 458080 - RNA, 19 nt, Artificial Sequence
  Description of Artificial Sequence: Synthetic oligonucleotide
  Antisense Strand to SEQ ID NO: 458079
gaauccacaggaauucuga

SEQ ID NO: 458081 - RNA, 19 nt, Artificial Sequence
  Description of Artificial Sequence: Synthetic oligonucleotide
  Sense strand starting at position 58 of SEQ ID NO: 317019
ggauucugacggcaauauu

SEQ ID NO: 458082 - RNA, 19 nt, Artificial Sequence
  Description of Artificial Sequence: Synthetic oligonucleotide
  Antisense Strand to SEQ ID NO: 458081
aauauugccgucagaaucc

SEQ ID NO: 458083 - RNA, 19 nt, Artificial Sequence
  Description of Artificial Sequence: Synthetic oligonucleotide
  Sense strand starting at position 137 of SEQ ID NO: 317019
uuacuugaacuauggcaau

SEQ ID NO: 458084 - RNA, 19 nt, Artificial Sequence
  Description of Artificial Sequence: Synthetic oligonucleotide
  Antisense Strand to SEQ ID NO: 458083
auugccauaguucaaguaa

SEQ ID NO: 458085 - RNA, 19 nt, Artificial Sequence
  Description of Artificial Sequence: Synthetic oligonucleotide
  Sense strand starting at position 178 of SEQ ID NO: 317019
ucaacauuguugccauaug

SEQ ID NO: 458086 - RNA, 19 nt, Artificial Sequence
  Description of Artificial Sequence: Synthetic oligonucleotide
  Antisense Strand to SEQ ID NO: 458085
cauauggcaacaauguuga

SEQ ID NO: 458087 - RNA, 19 nt, Artificial Sequence
  Description of Artificial Sequence: Synthetic oligonucleotide
  Sense strand starting at position 306 of SEQ ID NO: 317019
ccuagcauuuaagaagauu

SEQ ID NO: 458088 - RNA, 19 nt, Artificial Sequence
  Description of Artificial Sequence: Synthetic oligonucleotide
  Antisense Strand to SEQ ID NO: 458087
aaucuucuuaaaugcuagg

SEQ ID NO: 458089 - RNA, 19 nt, Artificial Sequence
  Description of Artificial Sequence: Synthetic oligonucleotide
  Sense strand starting at position 359 of SEQ ID NO: 317019
ccagaucugccuuauagcu

SEQ ID NO: 458090 - RNA, 19 nt, Artificial Sequence
  Description of Artificial Sequence: Synthetic oligonucleotide
  Antisense Strand to SEQ ID NO: 458089
agcuauaaggcagaucugg

SEQ ID NO: 458091 - RNA, 19 nt, Artificial Sequence
  Description of Artificial Sequence: Synthetic oligonucleotide
  Sense strand starting at position 408 of SEQ ID NO: 317019
ccaggaagcucuuuaccua

SEQ ID NO: 458092 - RNA, 19 nt, Artificial Sequence
  Description of Artificial Sequence: Synthetic oligonucleotide
  Antisense Strand to SEQ ID NO: 458091
uagguaaagagcuuccugg

SEQ ID NO: 458093 - RNA, 19 nt, Artificial Sequence
  Description of Artificial Sequence: Synthetic oligonucleotide
  Sense strand starting at position 572 of SEQ ID NO: 317019
gcaacuuucucccuugaag

SEQ ID NO: 458094 - RNA, 19 nt, Artificial Sequence
  Description of Artificial Sequence: Synthetic oligonucleotide
  Antisense Strand to SEQ ID NO: 458093
cuucaagggagaaaguugc

SEQ ID NO: 458095 - RNA, 19 nt, Artificial Sequence
  Description of Artificial Sequence: Synthetic oligonucleotide
  Sense strand starting at position 716 of SEQ ID NO: 317019
gcuauagaauuacuggaau

SEQ ID NO: 458096 - RNA, 19 nt, Artificial Sequence
  Description of Artificial Sequence: Synthetic oligonucleotide
  Antisense Strand to SEQ ID NO: 458095
auuccaguaauucuauagc

SEQ ID NO: 458097 - RNA, 19 nt, Artificial Sequence
  Description of Artificial Sequence: Synthetic oligonucleotide
  Sense strand starting at position 730 of SEQ ID NO: 317019
ggaauuaagugaucaaagu

SEQ ID NO: 458098 - RNA, 19 nt, Artificial Sequence
  Description of Artificial Sequence: Synthetic oligonucleotide
  Antisense Strand to SEQ ID NO: 458097
acuuugaucacuuaauucc

SEQ ID NO: 458099 - RNA, 19 nt, Artificial Sequence
  Description of Artificial Sequence: Synthetic oligonucleotide
  Sense strand starting at position 744 of SEQ ID NO: 317019
aaaguauaguggucuuauc

SEQ ID NO: 458100 - RNA, 19 nt, Artificial Sequence
  Description of Artificial Sequence: Synthetic oligonucleotide
  Antisense Strand to SEQ ID NO: 458099
gauaagaccacuauacuuu

SEQ ID NO: 458101 - RNA, 19 nt, Artificial Sequence
  Description of Artificial Sequence: Synthetic oligonucleotide
  Sense strand starting at position 943 of SEQ ID NO: 317019
uucgccugucuugcuuaau

SEQ ID NO: 458102 - RNA, 19 nt, Artificial Sequence
  Description of Artificial Sequence: Synthetic oligonucleotide
  Antisense Strand to SEQ ID NO: 458101
auuaagcaagacaggcgaa

SEQ ID NO: 458103 - RNA, 19 nt, Artificial Sequence
  Description of Artificial Sequence: Synthetic oligonucleotide
  Sense strand starting at position 968 of SEQ ID NO: 317019
aucccacuggucuguaaac

SEQ ID NO: 458104 - RNA, 19 nt, Artificial Sequence
  Description of Artificial Sequence: Synthetic oligonucleotide
  Antisense Strand to SEQ ID NO: 458103
guuuacagaccagugggau

SEQ ID NO: 458105 - RNA, 19 nt, Artificial Sequence
  Description of Artificial Sequence: Synthetic oligonucleotide
  Sense strand starting at position 970 of SEQ ID NO: 317019
cccacuggucuguaaacuu

SEQ ID NO: 458106 - RNA, 19 nt, Artificial Sequence
  Description of Artificial Sequence: Synthetic oligonucleotide
  Antisense Strand to SEQ ID NO: 458105
aaguuuacagaccaguggg

SEQ ID NO: 458107 - RNA, 19 nt, Artificial Sequence
  Description of Artificial Sequence: Synthetic oligonucleotide
  Sense strand starting at position 977 of SEQ ID NO: 317019
gucuguaaacuugaugaca

SEQ ID NO: 458108 - RNA, 19 nt, Artificial Sequence
  Description of Artificial Sequence: Synthetic oligonucleotide
  Antisense Strand to SEQ ID NO: 458107
ugucaucaaguuuacagac

SEQ ID NO: 458109 - RNA, 19 nt, Artificial Sequence
  Description of Artificial Sequence: Synthetic oligonucleotide
  Sense strand starting at position 1016 of SEQ ID NO: 317019
cuguuauuucccuagugcu

SEQ ID NO: 458110 - RNA, 19 nt, Artificial Sequence
  Description of Artificial Sequence: Synthetic oligonucleotide
  Antisense Strand to SEQ ID NO: 458109
agcacuagggaaauaacag

SEQ ID NO: 458111 - RNA, 19 nt, Artificial Sequence
  Description of Artificial Sequence: Synthetic oligonucleotide
  Sense strand starting at position 1024 of SEQ ID NO: 317019
ucccuagugcuugaaacuu

SEQ ID NO: 458112 - RNA, 19 nt, Artificial Sequence
  Description of Artificial Sequence: Synthetic oligonucleotide
  Antisense Strand to SEQ ID NO: 458111
aaguuucaagcacuaggga

SEQ ID NO: 458113 - RNA, 19 nt, Artificial Sequence
  Description of Artificial Sequence: Synthetic oligonucleotide
  Sense strand starting at position 1114 of SEQ ID NO: 317019
cugugaucucuccagucua

SEQ ID NO: 458114 - RNA, 19 nt, Artificial Sequence
  Description of Artificial Sequence: Synthetic oligonucleotide
  Antisense Strand to SEQ ID NO: 458113
uagacuggagagaucacag

SEQ ID NO: 458115 - RNA, 19 nt, Artificial Sequence
  Description of Artificial Sequence: Synthetic oligonucleotide
  Sense strand starting at position 1213 of SEQ ID NO: 317019
guccaaaguugaucauaug

SEQ ID NO: 458116 - RNA, 19 nt, Artificial Sequence
  Description of Artificial Sequence: Synthetic oligonucleotide
  Antisense Strand to SEQ ID NO: 458115
cauaugaucaacuuuggac

SEQ ID NO: 458117 - RNA, 19 nt, Artificial Sequence
  Description of Artificial Sequence: Synthetic oligonucleotide
  Sense strand starting at position 1264 of SEQ ID NO: 317019
ucacauagagugcaguauu

SEQ ID NO: 458118 - RNA, 19 nt, Artificial Sequence
  Description of Artificial Sequence: Synthetic oligonucleotide
  Antisense Strand to SEQ ID NO: 458117
aauacugcacucuauguga

SEQ ID NO: 458119 - RNA, 19 nt, Artificial Sequence
  Description of Artificial Sequence: Synthetic oligonucleotide
  Sense strand starting at position 1267 of SEQ ID NO: 317019
cauagagugcaguauuauc

SEQ ID NO: 458120 - RNA, 19 nt, Artificial Sequence
  Description of Artificial Sequence: Synthetic oligonucleotide
  Antisense Strand to SEQ ID NO: 458119
gauaauacugcacucuaug

SEQ ID NO: 458121 - RNA, 19 nt, Artificial Sequence
  Description of Artificial Sequence: Synthetic oligonucleotide
  Sense strand starting at position 1274 of SEQ ID NO: 317019
ugcaguauuaucguugcca

SEQ ID NO: 458122 - RNA, 19 nt, Artificial Sequence
  Description of Artificial Sequence: Synthetic oligonucleotide
  Antisense Strand to SEQ ID NO: 458121
uggcaacgauaauacugca

SEQ ID NO: 458123 - RNA, 19 nt, Artificial Sequence
  Description of Artificial Sequence: Synthetic oligonucleotide
  Sense strand starting at position 1278 of SEQ ID NO: 317019
guauuaucguugccauuuc

SEQ ID NO: 458124 - RNA, 19 nt, Artificial Sequence
  Description of Artificial Sequence: Synthetic oligonucleotide
  Antisense Strand to SEQ ID NO: 458123
gaaauggcaacgauaauac

SEQ ID NO: 458125 - RNA, 19 nt, Artificial Sequence
  Description of Artificial Sequence: Synthetic oligonucleotide
  Sense strand starting at position 1404 of SEQ ID NO: 317019
cuugguucuggauaacacu

SEQ ID NO: 458126 - RNA, 19 nt, Artificial Sequence
  Description of Artificial Sequence: Synthetic oligonucleotide
  Antisense Strand to SEQ ID NO: 458125
aguguuauccagaaccaag

SEQ ID NO: 458127 - RNA, 19 nt, Artificial Sequence
  Description of Artificial Sequence: Synthetic oligonucleotide
  Sense strand starting at position 1438 of SEQ ID NO: 317019
ccuggaaucgcaggagaaa

SEQ ID NO: 458128 - RNA, 19 nt, Artificial Sequence
  Description of Artificial Sequence: Synthetic oligonucleotide
  Antisense Strand to SEQ ID NO: 458127
uuucuccugcgauuccagg

SEQ ID NO: 458129 - RNA, 19 nt, Artificial Sequence
  Description of Artificial Sequence: Synthetic oligonucleotide
  Sense strand starting at position 1686 of SEQ ID NO: 317019
aaauaugcucgguccgcau

SEQ ID NO: 458130 - RNA, 19 nt, Artificial Sequence
  Description of Artificial Sequence: Synthetic oligonucleotide
  Antisense Strand to SEQ ID NO: 458129
augcggaccgagcauauuu

SEQ ID NO: 458131 - RNA, 19 nt, Artificial Sequence
  Description of Artificial Sequence: Synthetic oligonucleotide
  Sense strand starting at position 2556 of SEQ ID NO: 317019
uccucugcugauggagaaa

SEQ ID NO: 458132 - RNA, 19 nt, Artificial Sequence
  Description of Artificial Sequence: Synthetic oligonucleotide
  Antisense Strand to SEQ ID NO: 458131
uuucuccaucagcagagga

SEQ ID NO: 458133 - RNA, 19 nt, Artificial Sequence
  Description of Artificial Sequence: Synthetic oligonucleotide
  Sense strand starting at position 2609 of SEQ ID NO: 317019
ugguuugauauuugcuguu

SEQ ID NO: 458134 - RNA, 19 nt, Artificial Sequence
  Description of Artificial Sequence: Synthetic oligonucleotide
  Antisense Strand to SEQ ID NO: 458133
aacagcaaauaucaaacca

SEQ ID NO: 458135 - RNA, 19 nt, Artificial Sequence
  Description of Artificial Sequence: Synthetic oligonucleotide
  Sense strand starting at position 2611 of SEQ ID NO: 317019
guuugauauuugcuguuaa

SEQ ID NO: 458136 - RNA, 19 nt, Artificial Sequence
  Description of Artificial Sequence: Synthetic oligonucleotide
  Antisense Strand to SEQ ID NO: 458135
uuaacagcaaauaucaaac

SEQ ID NO: 458137 - RNA, 19 nt, Artificial Sequence
  Description of Artificial Sequence: Synthetic oligonucleotide
  Sense strand starting at position 2716 of SEQ ID NO: 317019
aaagcaguucuaugugaau

SEQ ID NO: 458138 - RNA, 19 nt, Artificial Sequence
  Description of Artificial Sequence: Synthetic oligonucleotide
  Antisense Strand to SEQ ID NO: 458137
auucacauagaacugcuuu

SEQ ID NO: 458139 - RNA, 19 nt, Artificial Sequence
  Description of Artificial Sequence: Synthetic oligonucleotide
  Sense strand starting at position 2773 of SEQ ID NO: 317019
gggccauuugcuuauguuu

SEQ ID NO: 458140 - RNA, 19 nt, Artificial Sequence
  Description of Artificial Sequence: Synthetic oligonucleotide
  Antisense Strand to SEQ ID NO: 458139
aaacauaagcaaauggccc

SEQ ID NO: 458141 - RNA, 19 nt, Artificial Sequence
  Description of Artificial Sequence: Synthetic oligonucleotide
  Sense strand starting at position 3025 of SEQ ID NO: 317019
ugugcuacauuauugauaa

SEQ ID NO: 458142 - RNA, 19 nt, Artificial Sequence
  Description of Artificial Sequence: Synthetic oligonucleotide
  Antisense Strand to SEQ ID NO: 458141
uuaucaauaauguagcaca

SEQ ID NO: 458143 - RNA, 19 nt, Artificial Sequence
  Description of Artificial Sequence: Synthetic oligonucleotide
  Sense strand starting at position 3114 of SEQ ID NO: 317019
gcuagcaagaacuagugau

SEQ ID NO: 458144 - RNA, 19 nt, Artificial Sequence
  Description of Artificial Sequence: Synthetic oligonucleotide
  Antisense Strand to SEQ ID NO: 458143
aucacuaguucuugcuagc

SEQ ID NO: 458145 - RNA, 19 nt, Artificial Sequence
  Description of Artificial Sequence: Synthetic oligonucleotide
  Sense strand starting at position 3118 of SEQ ID NO: 317019
gcaagaacuagugauguga

SEQ ID NO: 458146 - RNA, 19 nt, Artificial Sequence
  Description of Artificial Sequence: Synthetic oligonucleotide
  Antisense Strand to SEQ ID NO: 458145
ucacaucacuaguucuugc

SEQ ID NO: 458147 - RNA, 19 nt, Artificial Sequence
  Description of Artificial Sequence: Synthetic oligonucleotide
  Sense strand starting at position 3285 of SEQ ID NO: 317019
cacugagaggauugcuuua

SEQ ID NO: 458148 - RNA, 19 nt, Artificial Sequence
  Description of Artificial Sequence: Synthetic oligonucleotide
  Antisense Strand to SEQ ID NO: 458147
uaaagcaauccucucagug

SEQ ID NO: 458149 - RNA, 19 nt, Artificial Sequence
  Description of Artificial Sequence: Synthetic oligonucleotide
  Sense strand starting at position 3287 of SEQ ID NO: 317019
cugagaggauugcuuuaag

SEQ ID NO: 458150 - RNA, 19 nt, Artificial Sequence
  Description of Artificial Sequence: Synthetic oligonucleotide
  Antisense Strand to SEQ ID NO: 458149
cuuaaagcaauccucucag

SEQ ID NO: 458151 - RNA, 19 nt, Artificial Sequence
  Description of Artificial Sequence: Synthetic oligonucleotide
  Sense strand starting at position 3290 of SEQ ID NO: 317019
agaggauugcuuuaagcac

SEQ ID NO: 458152 - RNA, 19 nt, Artificial Sequence
  Description of Artificial Sequence: Synthetic oligonucleotide
  Antisense Strand to SEQ ID NO: 458151
gugcuuaaagcaauccucu

SEQ ID NO: 458153 - RNA, 19 nt, Artificial Sequence
  Description of Artificial Sequence: Synthetic oligonucleotide
  Sense strand starting at position 3331 of SEQ ID NO: 317019
uguauuacaccugaaagua

SEQ ID NO: 458154 - RNA, 19 nt, Artificial Sequence
  Description of Artificial Sequence: Synthetic oligonucleotide
  Antisense Strand to SEQ ID NO: 458153
uacuuucagguguaauaca

SEQ ID NO: 458155 - RNA, 19 nt, Artificial Sequence
  Description of Artificial Sequence: Synthetic oligonucleotide
  Sense strand starting at position 3386 of SEQ ID NO: 317019
aaaggucaaugagauuuga

SEQ ID NO: 458156 - RNA, 19 nt, Artificial Sequence
  Description of Artificial Sequence: Synthetic oligonucleotide
  Antisense Strand to SEQ ID NO: 458155
ucaaaucucauugaccuuu

SEQ ID NO: 458157 - RNA, 19 nt, Artificial Sequence
  Description of Artificial Sequence: Synthetic oligonucleotide
  Sense strand starting at position 3560 of SEQ ID NO: 317019
gauggauugcaauggcaac

SEQ ID NO: 458158 - RNA, 19 nt, Artificial Sequence
  Description of Artificial Sequence: Synthetic oligonucleotide
  Antisense Strand to SEQ ID NO: 458157
guugccauugcaauccauc

SEQ ID NO: 458159 - RNA, 19 nt, Artificial Sequence
  Description of Artificial Sequence: Synthetic oligonucleotide
  Sense strand starting at position 2 of SEQ ID NO: 317020
aagagugguucuguacaag

SEQ ID NO: 458160 - RNA, 19 nt, Artificial Sequence
  Description of Artificial Sequence: Synthetic oligonucleotide
  Antisense Strand to SEQ ID NO: 458159
cuuguacagaaccacucuu

SEQ ID NO: 458161 - RNA, 19 nt, Artificial Sequence
  Description of Artificial Sequence: Synthetic oligonucleotide
  Sense strand starting at position 35 of SEQ ID NO: 317020
guuuguaaugaugacugca

SEQ ID NO: 458162 - RNA, 19 nt, Artificial Sequence
  Description of Artificial Sequence: Synthetic oligonucleotide
  Antisense Strand to SEQ ID NO: 458161
ugcagucaucauuacaaac

SEQ ID NO: 458163 - RNA, 19 nt, Artificial Sequence
  Description of Artificial Sequence: Synthetic oligonucleotide
  Sense strand starting at position 172 of SEQ ID NO: 317020
cuugguaggacuugaaaua

SEQ ID NO: 458164 - RNA, 19 nt, Artificial Sequence
  Description of Artificial Sequence: Synthetic oligonucleotide
  Antisense Strand to SEQ ID NO: 458163
uauuucaaguccuaccaag

SEQ ID NO: 458165 - RNA, 19 nt, Artificial Sequence
  Description of Artificial Sequence: Synthetic oligonucleotide
  Sense strand starting at position 270 of SEQ ID NO: 317020
ugauuagugacaugugaaa

SEQ ID NO: 458166 - RNA, 19 nt, Artificial Sequence
  Description of Artificial Sequence: Synthetic oligonucleotide
  Antisense Strand to SEQ ID NO: 458165
uuucacaugucacuaauca

SEQ ID NO: 458167 - RNA, 19 nt, Artificial Sequence
  Description of Artificial Sequence: Synthetic oligonucleotide
  Sense strand starting at position 385 of SEQ ID NO: 317020
aucacaagguccucagauu

SEQ ID NO: 458168 - RNA, 19 nt, Artificial Sequence
  Description of Artificial Sequence: Synthetic oligonucleotide
  Antisense Strand to SEQ ID NO: 458167
aaucugaggaccuugugau

SEQ ID NO: 458169 - RNA, 19 nt, Artificial Sequence
  Description of Artificial Sequence: Synthetic oligonucleotide
  Sense strand starting at position 405 of SEQ ID NO: 317020
gucauuuccuaggaaacaa

SEQ ID NO: 458170 - RNA, 19 nt, Artificial Sequence
  Description of Artificial Sequence: Synthetic oligonucleotide
  Antisense Strand to SEQ ID NO: 458169
uuguuuccuaggaaaugac

SEQ ID NO: 458171 - RNA, 19 nt, Artificial Sequence
  Description of Artificial Sequence: Synthetic oligonucleotide
  Sense strand starting at position 529 of SEQ ID NO: 317020
agauucuuucugggcuaaa

SEQ ID NO: 458172 - RNA, 19 nt, Artificial Sequence
  Description of Artificial Sequence: Synthetic oligonucleotide
  Antisense Strand to SEQ ID NO: 458171
uuuagcccagaaagaaucu

SEQ ID NO: 458173 - RNA, 19 nt, Artificial Sequence
  Description of Artificial Sequence: Synthetic oligonucleotide
  Sense strand starting at position 575 of SEQ ID NO: 317020
ccaagaguuugagucuuac

SEQ ID NO: 458174 - RNA, 19 nt, Artificial Sequence
  Description of Artificial Sequence: Synthetic oligonucleotide
  Antisense Strand to SEQ ID NO: 458173
guaagacucaaacucuugg

SEQ ID NO: 458175 - RNA, 19 nt, Artificial Sequence
  Description of Artificial Sequence: Synthetic oligonucleotide
  Sense strand starting at position 869 of SEQ ID NO: 317020
augauuuguaacuguuguu

SEQ ID NO: 458176 - RNA, 19 nt, Artificial Sequence
  Description of Artificial Sequence: Synthetic oligonucleotide
  Antisense Strand to SEQ ID NO: 458175
aacaacaguuacaaaucau

SEQ ID NO: 458177 - RNA, 19 nt, Artificial Sequence
  Description of Artificial Sequence: Synthetic oligonucleotide
  Sense strand starting at position 936 of SEQ ID NO: 317020
ccauuacuggguuaguuga

SEQ ID NO: 458178 - RNA, 19 nt, Artificial Sequence
  Description of Artificial Sequence: Synthetic oligonucleotide
  Antisense Strand to SEQ ID NO: 458177
ucaacuaacccaguaaugg

SEQ ID NO: 458179 - RNA, 19 nt, Artificial Sequence
  Description of Artificial Sequence: Synthetic oligonucleotide
  Sense strand starting at position 1242 of SEQ ID NO: 317020
guccuugauggugagacua

SEQ ID NO: 458180 - RNA, 19 nt, Artificial Sequence
  Description of Artificial Sequence: Synthetic oligonucleotide
  Antisense Strand to SEQ ID NO: 458179
uagucucaccaucaaggac

SEQ ID NO: 458181 - RNA, 19 nt, Artificial Sequence
  Description of Artificial Sequence: Synthetic oligonucleotide
  Sense strand starting at position 1264 of SEQ ID NO: 317020
gugggcguuccuucuguua

SEQ ID NO: 458182 - RNA, 19 nt, Artificial Sequence
  Description of Artificial Sequence: Synthetic oligonucleotide
  Antisense Strand to SEQ ID NO: 458181
uaacagaaggaacgcccac

SEQ ID NO: 458183 - RNA, 19 nt, Artificial Sequence
  Description of Artificial Sequence: Synthetic oligonucleotide
  Sense strand starting at position 1411 of SEQ ID NO: 317020
agacacugcgaucgaaaca

SEQ ID NO: 458184 - RNA, 19 nt, Artificial Sequence
  Description of Artificial Sequence: Synthetic oligonucleotide
  Antisense Strand to SEQ ID NO: 458183
uguuucgaucgcagugucu

SEQ ID NO: 458185 - RNA, 19 nt, Artificial Sequence
  Description of Artificial Sequence: Synthetic oligonucleotide
  Sense strand starting at position 1495 of SEQ ID NO: 317020
aggagauucuccucaucua

SEQ ID NO: 458186 - RNA, 19 nt, Artificial Sequence
  Description of Artificial Sequence: Synthetic oligonucleotide
  Antisense Strand to SEQ ID NO: 458185
uagaugaggagaaucuccu

SEQ ID NO: 458187 - RNA, 19 nt, Artificial Sequence
  Description of Artificial Sequence: Synthetic oligonucleotide
  Sense strand starting at position 1575 of SEQ ID NO: 317020
aucgucauuucugcucaca

SEQ ID NO: 458188 - RNA, 19 nt, Artificial Sequence
  Description of Artificial Sequence: Synthetic oligonucleotide
  Antisense Strand to SEQ ID NO: 458187
ugugagcagaaaugacgau

SEQ ID NO: 458189 - RNA, 19 nt, Artificial Sequence
  Description of Artificial Sequence: Synthetic oligonucleotide
  Sense strand starting at position 1698 of SEQ ID NO: 317020
guauauucucuggauugau

SEQ ID NO: 458190 - RNA, 19 nt, Artificial Sequence
  Description of Artificial Sequence: Synthetic oligonucleotide
  Antisense Strand to SEQ ID NO: 458189
aucaauccagagaauauac

SEQ ID NO: 458191 - RNA, 19 nt, Artificial Sequence
  Description of Artificial Sequence: Synthetic oligonucleotide
  Sense strand starting at position 1722 of SEQ ID NO: 317020
gggauuaauugucccucuu

SEQ ID NO: 458192 - RNA, 19 nt, Artificial Sequence
  Description of Artificial Sequence: Synthetic oligonucleotide
  Antisense Strand to SEQ ID NO: 458191
aagagggacaauuaauccc

SEQ ID NO: 458193 - RNA, 19 nt, Artificial Sequence
  Description of Artificial Sequence: Synthetic oligonucleotide
  Sense strand starting at position 1993 of SEQ ID NO: 317020
aggccaugugaccaccaau

SEQ ID NO: 458194 - RNA, 19 nt, Artificial Sequence
  Description of Artificial Sequence: Synthetic oligonucleotide
  Antisense Strand to SEQ ID NO: 458193
auugguggucacauggccu

SEQ ID NO: 458195 - RNA, 19 nt, Artificial Sequence
  Description of Artificial Sequence: Synthetic oligonucleotide
  Sense strand starting at position 2052 of SEQ ID NO: 317020
cggagaagcuucccagaag

SEQ ID NO: 458196 - RNA, 19 nt, Artificial Sequence
  Description of Artificial Sequence: Synthetic oligonucleotide
  Antisense Strand to SEQ ID NO: 458195
cuucugggaagcuucuccg

SEQ ID NO: 458197 - RNA, 19 nt, Artificial Sequence
  Description of Artificial Sequence: Synthetic oligonucleotide
  Sense strand starting at position 2091 of SEQ ID NO: 317020
agccaaugggcugaaacuu

SEQ ID NO: 458198 - RNA, 19 nt, Artificial Sequence
  Description of Artificial Sequence: Synthetic oligonucleotide
  Antisense Strand to SEQ ID NO: 458197
aaguuucagcccauuggcu

SEQ ID NO: 458199 - RNA, 19 nt, Artificial Sequence
  Description of Artificial Sequence: Synthetic oligonucleotide
  Sense strand starting at position 2114 of SEQ ID NO: 317020
gagggcuucucaguuggaa

SEQ ID NO: 458200 - RNA, 19 nt, Artificial Sequence
  Description of Artificial Sequence: Synthetic oligonucleotide
  Antisense Strand to SEQ ID NO: 458199
uuccaacugagaagcccuc

SEQ ID NO: 458201 - RNA, 19 nt, Artificial Sequence
  Description of Artificial Sequence: Synthetic oligonucleotide
  Sense strand starting at position 2314 of SEQ ID NO: 317020
uuuccuucgaggugaagga

SEQ ID NO: 458202 - RNA, 19 nt, Artificial Sequence
  Description of Artificial Sequence: Synthetic oligonucleotide
  Antisense Strand to SEQ ID NO: 458201
uccuucaccucgaaggaaa

SEQ ID NO: 458203 - RNA, 19 nt, Artificial Sequence
  Description of Artificial Sequence: Synthetic oligonucleotide
  Sense strand starting at position 2490 of SEQ ID NO: 317020
uguagagugccacaaauga

SEQ ID NO: 458204 - RNA, 19 nt, Artificial Sequence
  Description of Artificial Sequence: Synthetic oligonucleotide
  Antisense Strand to SEQ ID NO: 458203
ucauuuguggcacucuaca

SEQ ID NO: 458205 - RNA, 19 nt, Artificial Sequence
  Description of Artificial Sequence: Synthetic oligonucleotide
  Sense strand starting at position 2511 of SEQ ID NO: 317020
ggcaauccuguggaaucaa

SEQ ID NO: 458206 - RNA, 19 nt, Artificial Sequence
  Description of Artificial Sequence: Synthetic oligonucleotide
  Antisense Strand to SEQ ID NO: 458205
uugauuccacaggauugcc

SEQ ID NO: 458207 - RNA, 19 nt, Artificial Sequence
  Description of Artificial Sequence: Synthetic oligonucleotide
  Sense strand starting at position 2785 of SEQ ID NO: 317020
uagagaaguuaugcaucuu

SEQ ID NO: 458208 - RNA, 19 nt, Artificial Sequence
  Description of Artificial Sequence: Synthetic oligonucleotide
  Antisense Strand to SEQ ID NO: 458207
aagaugcauaacuucucua

SEQ ID NO: 458209 - RNA, 19 nt, Artificial Sequence
  Description of Artificial Sequence: Synthetic oligonucleotide
  Sense strand starting at position 3078 of SEQ ID NO: 317020
ucauguugcagcguguaaa

SEQ ID NO: 458210 - RNA, 19 nt, Artificial Sequence
  Description of Artificial Sequence: Synthetic oligonucleotide
  Antisense Strand to SEQ ID NO: 458209
uuuacacgcugcaacauga

SEQ ID NO: 458211 - RNA, 19 nt, Artificial Sequence
  Description of Artificial Sequence: Synthetic oligonucleotide
  Sense strand starting at position 3144 of SEQ ID NO: 317020
auucucuaaugggcaauua

SEQ ID NO: 458212 - RNA, 19 nt, Artificial Sequence
  Description of Artificial Sequence: Synthetic oligonucleotide
  Antisense Strand to SEQ ID NO: 458211
uaauugcccauuagagaau

SEQ ID NO: 458213 - RNA, 19 nt, Artificial Sequence
  Description of Artificial Sequence: Synthetic oligonucleotide
  Sense strand starting at position 3145 of SEQ ID NO: 317020
uucucuaaugggcaauuau

SEQ ID NO: 458214 - RNA, 19 nt, Artificial Sequence
  Description of Artificial Sequence: Synthetic oligonucleotide
  Antisense Strand to SEQ ID NO: 458213
auaauugcccauuagagaa

SEQ ID NO: 458215 - RNA, 19 nt, Artificial Sequence
  Description of Artificial Sequence: Synthetic oligonucleotide
  Sense strand starting at position 3244 of SEQ ID NO: 317020
ugacaaauuucuuagagga

SEQ ID NO: 458216 - RNA, 19 nt, Artificial Sequence
  Description of Artificial Sequence: Synthetic oligonucleotide
  Antisense Strand to SEQ ID NO: 458215
uccucuaagaaauuuguca

SEQ ID NO: 458217 - RNA, 19 nt, Artificial Sequence
  Description of Artificial Sequence: Synthetic oligonucleotide
  Sense strand starting at position 3342 of SEQ ID NO: 317020
uggguauaugcauggagaa

SEQ ID NO: 458218 - RNA, 19 nt, Artificial Sequence
  Description of Artificial Sequence: Synthetic oligonucleotide
  Antisense Strand to SEQ ID NO: 458217
uucuccaugcauauaccca

SEQ ID NO: 458219 - RNA, 19 nt, Artificial Sequence
  Description of Artificial Sequence: Synthetic oligonucleotide
  Sense strand starting at position 3343 of SEQ ID NO: 317020
ggguauaugcauggagaac

SEQ ID NO: 458220 - RNA, 19 nt, Artificial Sequence
  Description of Artificial Sequence: Synthetic oligonucleotide
  Antisense Strand to SEQ ID NO: 458219
guucuccaugcauauaccc

SEQ ID NO: 458221 - RNA, 19 nt, Artificial Sequence
  Description of Artificial Sequence: Synthetic oligonucleotide
  Sense strand starting at position 3489 of SEQ ID NO: 317020
uuguuauacagauguugag

SEQ ID NO: 458222 - RNA, 19 nt, Artificial Sequence
  Description of Artificial Sequence: Synthetic oligonucleotide
  Antisense Strand to SEQ ID NO: 458221
cucaacaucuguauaacaa

SEQ ID NO: 458223 - RNA, 19 nt, Artificial Sequence
  Description of Artificial Sequence: Synthetic oligonucleotide
  Sense strand starting at position 3652 of SEQ ID NO: 317020
acuggccauucccugaaua

SEQ ID NO: 458224 - RNA, 19 nt, Artificial Sequence
  Description of Artificial Sequence: Synthetic oligonucleotide
  Antisense Strand to SEQ ID NO: 458223
uauucagggaauggccagu

SEQ ID NO: 458225 - RNA, 19 nt, Artificial Sequence
  Description of Artificial Sequence: Synthetic oligonucleotide
  Sense strand starting at position 3789 of SEQ ID NO: 317020
agcaguuagagucaguuaa

SEQ ID NO: 458226 - RNA, 19 nt, Artificial Sequence
  Description of Artificial Sequence: Synthetic oligonucleotide
  Antisense Strand to SEQ ID NO: 458225
uuaacugacucuaacugcu

SEQ ID NO: 458227 - RNA, 19 nt, Artificial Sequence
  Description of Artificial Sequence: Synthetic oligonucleotide
  Sense strand starting at position 3793 of SEQ ID NO: 317020
guuagagucaguuaacuua

SEQ ID NO: 458228 - RNA, 19 nt, Artificial Sequence
  Description of Artificial Sequence: Synthetic oligonucleotide
  Antisense Strand to SEQ ID NO: 458227
uaaguuaacugacucuaac

SEQ ID NO: 458229 - RNA, 19 nt, Artificial Sequence
  Description of Artificial Sequence: Synthetic oligonucleotide
  Sense strand starting at position 3796 of SEQ ID NO: 317020
agagucaguuaacuuauau

SEQ ID NO: 458230 - RNA, 19 nt, Artificial Sequence
  Description of Artificial Sequence: Synthetic oligonucleotide
  Antisense Strand to SEQ ID NO: 458229
auauaaguuaacugacucu

SEQ ID NO: 458231 - RNA, 19 nt, Artificial Sequence
  Description of Artificial Sequence: Synthetic oligonucleotide
  Sense strand starting at position 3827 of SEQ ID NO: 317020
aaagaauaguuaguuguga

SEQ ID NO: 458232 - RNA, 19 nt, Artificial Sequence
  Description of Artificial Sequence: Synthetic oligonucleotide
  Antisense Strand to SEQ ID NO: 458231
ucacaacuaacuauucuuu

SEQ ID NO: 458233 - RNA, 19 nt, Artificial Sequence
  Description of Artificial Sequence: Synthetic oligonucleotide
  Sense strand starting at position 3828 of SEQ ID NO: 317020
aagaauaguuaguugugaa

SEQ ID NO: 458234 - RNA, 19 nt, Artificial Sequence
  Description of Artificial Sequence: Synthetic oligonucleotide
  Antisense Strand to SEQ ID NO: 458233
uucacaacuaacuauucuu

SEQ ID NO: 458235 - RNA, 19 nt, Artificial Sequence
  Description of Artificial Sequence: Synthetic oligonucleotide
  Sense strand starting at position 3829 of SEQ ID NO: 317020
agaauaguuaguugugaag

SEQ ID NO: 458236 - RNA, 19 nt, Artificial Sequence
  Description of Artificial Sequence: Synthetic oligonucleotide
  Antisense Strand to SEQ ID NO: 458235
cuucacaacuaacuauucu

SEQ ID NO: 458237 - RNA, 19 nt, Artificial Sequence
  Description of Artificial Sequence: Synthetic oligonucleotide
  Sense strand starting at position 3925 of SEQ ID NO: 317020
uucuaugcccuugagaaua

SEQ ID NO: 458238 - RNA, 19 nt, Artificial Sequence
  Description of Artificial Sequence: Synthetic oligonucleotide
  Antisense Strand to SEQ ID NO: 458237
uauucucaagggcauagaa

SEQ ID NO: 458239 - RNA, 19 nt, Artificial Sequence
  Description of Artificial Sequence: Synthetic oligonucleotide
  Sense strand starting at position 325 of SEQ ID NO: 317021
cccgcuucuuagggaacaa

SEQ ID NO: 458240 - RNA, 19 nt, Artificial Sequence
  Description of Artificial Sequence: Synthetic oligonucleotide
  Antisense Strand to SEQ ID NO: 458239
uuguucccuaagaagcggg

SEQ ID NO: 458241 - RNA, 19 nt, Artificial Sequence
  Description of Artificial Sequence: Synthetic oligonucleotide
  Sense strand starting at position 922 of SEQ ID NO: 317021
ggacaagugcaaugacaaa

SEQ ID NO: 458242 - RNA, 19 nt, Artificial Sequence
  Description of Artificial Sequence: Synthetic oligonucleotide
  Antisense Strand to SEQ ID NO: 458241
uuugucauugcacuugucc

SEQ ID NO: 458243 - RNA, 19 nt, Artificial Sequence
  Description of Artificial Sequence: Synthetic oligonucleotide
  Sense strand starting at position 1169 of SEQ ID NO: 317021
gcaaguuuccucuggccgu

SEQ ID NO: 458244 - RNA, 19 nt, Artificial Sequence
  Description of Artificial Sequence: Synthetic oligonucleotide
  Antisense Strand to SEQ ID NO: 458243
acggccagaggaaacuugc

SEQ ID NO: 458245 - RNA, 19 nt, Artificial Sequence
  Description of Artificial Sequence: Synthetic oligonucleotide
  Sense strand starting at position 1215 of SEQ ID NO: 317021
agcggugccugcuuauuua

SEQ ID NO: 458246 - RNA, 19 nt, Artificial Sequence
  Description of Artificial Sequence: Synthetic oligonucleotide
  Antisense Strand to SEQ ID NO: 458245
uaaauaagcaggcaccgcu

SEQ ID NO: 458247 - RNA, 19 nt, Artificial Sequence
  Description of Artificial Sequence: Synthetic oligonucleotide
  Sense strand starting at position 1622 of SEQ ID NO: 317021
ccauaauugcgccgacugu

SEQ ID NO: 458248 - RNA, 19 nt, Artificial Sequence
  Description of Artificial Sequence: Synthetic oligonucleotide
  Antisense Strand to SEQ ID NO: 458247
acagucggcgcaauuaugg

SEQ ID NO: 458249 - RNA, 19 nt, Artificial Sequence
  Description of Artificial Sequence: Synthetic oligonucleotide
  Sense strand starting at position 1631 of SEQ ID NO: 317021
cgccgacuguuccuccaaa

SEQ ID NO: 458250 - RNA, 19 nt, Artificial Sequence
  Description of Artificial Sequence: Synthetic oligonucleotide
  Antisense Strand to SEQ ID NO: 458249
uuuggaggaacagucggcg

SEQ ID NO: 458251 - RNA, 19 nt, Artificial Sequence
  Description of Artificial Sequence: Synthetic oligonucleotide
  Sense strand starting at position 1750 of SEQ ID NO: 317021
gaaacaugcccucgagaga

SEQ ID NO: 458252 - RNA, 19 nt, Artificial Sequence
  Description of Artificial Sequence: Synthetic oligonucleotide
  Antisense Strand to SEQ ID NO: 458251
ucucucgagggcauguuuc

SEQ ID NO: 458253 - RNA, 19 nt, Artificial Sequence
  Description of Artificial Sequence: Synthetic oligonucleotide
  Sense strand starting at position 1837 of SEQ ID NO: 317021
acaauuccgcaagguauaa

SEQ ID NO: 458254 - RNA, 19 nt, Artificial Sequence
  Description of Artificial Sequence: Synthetic oligonucleotide
  Antisense Strand to SEQ ID NO: 458253
uuauaccuugcggaauugu

SEQ ID NO: 458255 - RNA, 19 nt, Artificial Sequence
  Description of Artificial Sequence: Synthetic oligonucleotide
  Sense strand starting at position 1850 of SEQ ID NO: 317021
guauaaguguugcuagggu

SEQ ID NO: 458256 - RNA, 19 nt, Artificial Sequence
  Description of Artificial Sequence: Synthetic oligonucleotide
  Antisense Strand to SEQ ID NO: 458255
acccuagcaacacuuauac

SEQ ID NO: 458257 - RNA, 19 nt, Artificial Sequence
  Description of Artificial Sequence: Synthetic oligonucleotide
  Sense strand starting at position 1858 of SEQ ID NO: 317021
guugcuaggguaugugaaa

SEQ ID NO: 458258 - RNA, 19 nt, Artificial Sequence
  Description of Artificial Sequence: Synthetic oligonucleotide
  Antisense Strand to SEQ ID NO: 458257
uuucacauacccuagcaac

SEQ ID NO: 458259 - RNA, 19 nt, Artificial Sequence
  Description of Artificial Sequence: Synthetic oligonucleotide
  Sense strand starting at position 1859 of SEQ ID NO: 317021
uugcuaggguaugugaaau

SEQ ID NO: 458260 - RNA, 19 nt, Artificial Sequence
  Description of Artificial Sequence: Synthetic oligonucleotide
  Antisense Strand to SEQ ID NO: 458259
auuucacauacccuagcaa

SEQ ID NO: 458261 - RNA, 19 nt, Artificial Sequence
  Description of Artificial Sequence: Synthetic oligonucleotide
  Sense strand starting at position 1865 of SEQ ID NO: 317021
ggguaugugaaauggaaau

SEQ ID NO: 458262 - RNA, 19 nt, Artificial Sequence
  Description of Artificial Sequence: Synthetic oligonucleotide
  Antisense Strand to SEQ ID NO: 458261
auuuccauuucacauaccc

SEQ ID NO: 458263 - RNA, 19 nt, Artificial Sequence
  Description of Artificial Sequence: Synthetic oligonucleotide
  Sense strand starting at position 1884 of SEQ ID NO: 317021
gaaagcccgucaguugaau

SEQ ID NO: 458264 - RNA, 19 nt, Artificial Sequence
  Description of Artificial Sequence: Synthetic oligonucleotide
  Antisense Strand to SEQ ID NO: 458263
auucaacugacgggcuuuc

SEQ ID NO: 458265 - RNA, 19 nt, Artificial Sequence
  Description of Artificial Sequence: Synthetic oligonucleotide
  Sense strand starting at position 1898 of SEQ ID NO: 317021
ugaauaaucgcaggagcaa

SEQ ID NO: 458266 - RNA, 19 nt, Artificial Sequence
  Description of Artificial Sequence: Synthetic oligonucleotide
  Antisense Strand to SEQ ID NO: 458265
uugcuccugcgauuauuca

SEQ ID NO: 458267 - RNA, 19 nt, Artificial Sequence
  Description of Artificial Sequence: Synthetic oligonucleotide
  Sense strand starting at position 1899 of SEQ ID NO: 317021
gaauaaucgcaggagcaaa

SEQ ID NO: 458268 - RNA, 19 nt, Artificial Sequence
  Description of Artificial Sequence: Synthetic oligonucleotide
  Antisense Strand to SEQ ID NO: 458267
uuugcuccugcgauuauuc

SEQ ID NO: 458269 - RNA, 19 nt, Artificial Sequence
  Description of Artificial Sequence: Synthetic oligonucleotide
  Sense strand starting at position 1932 of SEQ ID NO: 317021
cccggcuugccugagaaca

SEQ ID NO: 458270 - RNA, 19 nt, Artificial Sequence
  Description of Artificial Sequence: Synthetic oligonucleotide
  Antisense Strand to SEQ ID NO: 458269
uguucucaggcaagccggg

SEQ ID NO: 458271 - RNA, 19 nt, Artificial Sequence
  Description of Artificial Sequence: Synthetic oligonucleotide
  Sense strand starting at position 2477 of SEQ ID NO: 317021
gugugacuguugagaguaa

SEQ ID NO: 458272 - RNA, 19 nt, Artificial Sequence
  Description of Artificial Sequence: Synthetic oligonucleotide
  Antisense Strand to SEQ ID NO: 458271
uuacucucaacagucacac

SEQ ID NO: 458273 - RNA, 19 nt, Artificial Sequence
  Description of Artificial Sequence: Synthetic oligonucleotide
  Sense strand starting at position 2561 of SEQ ID NO: 317021
agcauuacuugcguccuua

SEQ ID NO: 458274 - RNA, 19 nt, Artificial Sequence
  Description of Artificial Sequence: Synthetic oligonucleotide
  Antisense Strand to SEQ ID NO: 458273
uaaggacgcaaguaaugcu

SEQ ID NO: 458275 - RNA, 19 nt, Artificial Sequence
  Description of Artificial Sequence: Synthetic oligonucleotide
  Sense strand starting at position 2562 of SEQ ID NO: 317021
gcauuacuugcguccuuac

SEQ ID NO: 458276 - RNA, 19 nt, Artificial Sequence
  Description of Artificial Sequence: Synthetic oligonucleotide
  Antisense Strand to SEQ ID NO: 458275
guaaggacgcaaguaaugc

SEQ ID NO: 458277 - RNA, 19 nt, Artificial Sequence
  Description of Artificial Sequence: Synthetic oligonucleotide
  Sense strand starting at position 2588 of SEQ ID NO: 317021
gaaccuuauccguggcuga

SEQ ID NO: 458278 - RNA, 19 nt, Artificial Sequence
  Description of Artificial Sequence: Synthetic oligonucleotide
  Antisense Strand to SEQ ID NO: 458277
ucagccacggauaagguuc

SEQ ID NO: 458279 - RNA, 19 nt, Artificial Sequence
  Description of Artificial Sequence: Synthetic oligonucleotide
  Sense strand starting at position 2735 of SEQ ID NO: 317021
gccugugcgaccgaaguuu

SEQ ID NO: 458280 - RNA, 19 nt, Artificial Sequence
  Description of Artificial Sequence: Synthetic oligonucleotide
  Antisense Strand to SEQ ID NO: 458279
aaacuucggucgcacaggc

SEQ ID NO: 458281 - RNA, 19 nt, Artificial Sequence
  Description of Artificial Sequence: Synthetic oligonucleotide
  Sense strand starting at position 2772 of SEQ ID NO: 317021
uggacaagggugugaguua

SEQ ID NO: 458282 - RNA, 19 nt, Artificial Sequence
  Description of Artificial Sequence: Synthetic oligonucleotide
  Antisense Strand to SEQ ID NO: 458281
uaacucacacccuugucca

SEQ ID NO: 458283 - RNA, 19 nt, Artificial Sequence
  Description of Artificial Sequence: Synthetic oligonucleotide
  Sense strand starting at position 2834 of SEQ ID NO: 317021
ggcuuuaugcuggagcacu

SEQ ID NO: 458284 - RNA, 19 nt, Artificial Sequence
  Description of Artificial Sequence: Synthetic oligonucleotide
  Antisense Strand to SEQ ID NO: 458283
agugcuccagcauaaagcc

SEQ ID NO: 458285 - RNA, 19 nt, Artificial Sequence
  Description of Artificial Sequence: Synthetic oligonucleotide
  Sense strand starting at position 2846 of SEQ ID NO: 317021
gagcacuuccagcaaaguu

SEQ ID NO: 458286 - RNA, 19 nt, Artificial Sequence
  Description of Artificial Sequence: Synthetic oligonucleotide
  Antisense Strand to SEQ ID NO: 458285
aacuuugcuggaagugcuc

SEQ ID NO: 458287 - RNA, 19 nt, Artificial Sequence
  Description of Artificial Sequence: Synthetic oligonucleotide
  Sense strand starting at position 3007 of SEQ ID NO: 317021
gcaacuuccuugggaccua

SEQ ID NO: 458288 - RNA, 19 nt, Artificial Sequence
  Description of Artificial Sequence: Synthetic oligonucleotide
  Antisense Strand to SEQ ID NO: 458287
uaggucccaaggaaguugc

SEQ ID NO: 458289 - RNA, 19 nt, Artificial Sequence
  Description of Artificial Sequence: Synthetic oligonucleotide
  Sense strand starting at position 3031 of SEQ ID NO: 317021
uguggucccuugcuuuaaa

SEQ ID NO: 458290 - RNA, 19 nt, Artificial Sequence
  Description of Artificial Sequence: Synthetic oligonucleotide
  Antisense Strand to SEQ ID NO: 458289
uuuaaagcaagggaccaca

SEQ ID NO: 458291 - RNA, 19 nt, Artificial Sequence
  Description of Artificial Sequence: Synthetic oligonucleotide
  Sense strand starting at position 3122 of SEQ ID NO: 317021
guacucaacagaggaaguu

SEQ ID NO: 458292 - RNA, 19 nt, Artificial Sequence
  Description of Artificial Sequence: Synthetic oligonucleotide
  Antisense Strand to SEQ ID NO: 458291
aacuuccucuguugaguac

SEQ ID NO: 458293 - RNA, 19 nt, Artificial Sequence
  Description of Artificial Sequence: Synthetic oligonucleotide
  Sense strand starting at position 3135 of SEQ ID NO: 317021
gaaguuccuuccugggaga

SEQ ID NO: 458294 - RNA, 19 nt, Artificial Sequence
  Description of Artificial Sequence: Synthetic oligonucleotide
  Antisense Strand to SEQ ID NO: 458293
ucucccaggaaggaacuuc

SEQ ID NO: 458295 - RNA, 19 nt, Artificial Sequence
  Description of Artificial Sequence: Synthetic oligonucleotide
  Sense strand starting at position 3152 of SEQ ID NO: 317021
gaccauagcuguuuguaug

SEQ ID NO: 458296 - RNA, 19 nt, Artificial Sequence
  Description of Artificial Sequence: Synthetic oligonucleotide
  Antisense Strand to SEQ ID NO: 458295
cauacaaacagcuaugguc

SEQ ID NO: 458297 - RNA, 19 nt, Artificial Sequence
  Description of Artificial Sequence: Synthetic oligonucleotide
  Sense strand starting at position 3158 of SEQ ID NO: 317021
agcuguuuguauguaaaga

SEQ ID NO: 458298 - RNA, 19 nt, Artificial Sequence
  Description of Artificial Sequence: Synthetic oligonucleotide
  Antisense Strand to SEQ ID NO: 458297
ucuuuacauacaaacagcu

SEQ ID NO: 458299 - RNA, 19 nt, Artificial Sequence
  Description of Artificial Sequence: Synthetic oligonucleotide
  Sense strand starting at position 3159 of SEQ ID NO: 317021
gcuguuuguauguaaagag

SEQ ID NO: 458300 - RNA, 19 nt, Artificial Sequence
  Description of Artificial Sequence: Synthetic oligonucleotide
  Antisense Strand to SEQ ID NO: 458299
cucuuuacauacaaacagc

SEQ ID NO: 458301 - RNA, 19 nt, Artificial Sequence
  Description of Artificial Sequence: Synthetic oligonucleotide
  Sense strand starting at position 3214 of SEQ ID NO: 317021
accucucugucacagaagu

SEQ ID NO: 458302 - RNA, 19 nt, Artificial Sequence
  Description of Artificial Sequence: Synthetic oligonucleotide
  Antisense Strand to SEQ ID NO: 458301
acuucugugacagagaggu

SEQ ID NO: 458303 - RNA, 19 nt, Artificial Sequence
  Description of Artificial Sequence: Synthetic oligonucleotide
  Sense strand starting at position 3318 of SEQ ID NO: 317021
uggcucuggucucagaaau

SEQ ID NO: 458304 - RNA, 19 nt, Artificial Sequence
  Description of Artificial Sequence: Synthetic oligonucleotide
  Antisense Strand to SEQ ID NO: 458303
auuucugagaccagagcca

SEQ ID NO: 458305 - RNA, 19 nt, Artificial Sequence
  Description of Artificial Sequence: Synthetic oligonucleotide
  Sense strand starting at position 3854 of SEQ ID NO: 317021
cugacuuucuuaugucaua

SEQ ID NO: 458306 - RNA, 19 nt, Artificial Sequence
  Description of Artificial Sequence: Synthetic oligonucleotide
  Antisense Strand to SEQ ID NO: 458305
uaugacauaagaaagucag

SEQ ID NO: 458307 - RNA, 19 nt, Artificial Sequence
  Description of Artificial Sequence: Synthetic oligonucleotide
  Sense strand starting at position 3855 of SEQ ID NO: 317021
ugacuuucuuaugucauau

SEQ ID NO: 458308 - RNA, 19 nt, Artificial Sequence
  Description of Artificial Sequence: Synthetic oligonucleotide
  Antisense Strand to SEQ ID NO: 458307
auaugacauaagaaaguca

SEQ ID NO: 458309 - RNA, 19 nt, Artificial Sequence
  Description of Artificial Sequence: Synthetic oligonucleotide
  Sense strand starting at position 3859 of SEQ ID NO: 317021
uuucuuaugucauauagca

SEQ ID NO: 458310 - RNA, 19 nt, Artificial Sequence
  Description of Artificial Sequence: Synthetic oligonucleotide
  Antisense Strand to SEQ ID NO: 458309
ugcuauaugacauaagaaa

SEQ ID NO: 458311 - RNA, 19 nt, Artificial Sequence
  Description of Artificial Sequence: Synthetic oligonucleotide
  Sense strand starting at position 3905 of SEQ ID NO: 317021
acuauagaauaguugucau

SEQ ID NO: 458312 - RNA, 19 nt, Artificial Sequence
  Description of Artificial Sequence: Synthetic oligonucleotide
  Antisense Strand to SEQ ID NO: 458311
augacaacuauucuauagu

SEQ ID NO: 458313 - RNA, 19 nt, Artificial Sequence
  Description of Artificial Sequence: Synthetic oligonucleotide
  Sense strand starting at position 3908 of SEQ ID NO: 317021
auagaauaguugucauucu

SEQ ID NO: 458314 - RNA, 19 nt, Artificial Sequence
  Description of Artificial Sequence: Synthetic oligonucleotide
  Antisense Strand to SEQ ID NO: 458313
agaaugacaacuauucuau

SEQ ID NO: 458315 - RNA, 19 nt, Artificial Sequence
  Description of Artificial Sequence: Synthetic oligonucleotide
  Sense strand starting at position 3915 of SEQ ID NO: 317021
aguugucauucuuuaccca

SEQ ID NO: 458316 - RNA, 19 nt, Artificial Sequence
  Description of Artificial Sequence: Synthetic oligonucleotide
  Antisense Strand to SEQ ID NO: 458315
uggguaaagaaugacaacu

SEQ ID NO: 458317 - RNA, 19 nt, Artificial Sequence
  Description of Artificial Sequence: Synthetic oligonucleotide
  Sense strand starting at position 3916 of SEQ ID NO: 317021
guugucauucuuuacccaa

SEQ ID NO: 458318 - RNA, 19 nt, Artificial Sequence
  Description of Artificial Sequence: Synthetic oligonucleotide
  Antisense Strand to SEQ ID NO: 458317
uuggguaaagaaugacaac

SEQ ID NO: 458319 - RNA, 19 nt, Artificial Sequence
  Description of Artificial Sequence: Synthetic oligonucleotide
  Sense strand starting at position 217 of SEQ ID NO: 317022
ucaccuauuaccgguggga

SEQ ID NO: 458320 - RNA, 19 nt, Artificial Sequence
  Description of Artificial Sequence: Synthetic oligonucleotide
  Antisense Strand to SEQ ID NO: 458319
ucccaccgguaauagguga

SEQ ID NO: 458321 - RNA, 19 nt, Artificial Sequence
  Description of Artificial Sequence: Synthetic oligonucleotide
  Sense strand starting at position 720 of SEQ ID NO: 317022
cacgauuaaucgguacuuu

SEQ ID NO: 458322 - RNA, 19 nt, Artificial Sequence
  Description of Artificial Sequence: Synthetic oligonucleotide
  Antisense Strand to SEQ ID NO: 458321
aaaguaccgauuaaucgug

SEQ ID NO: 458323 - RNA, 19 nt, Artificial Sequence
  Description of Artificial Sequence: Synthetic oligonucleotide
  Sense strand starting at position 721 of SEQ ID NO: 317022
acgauuaaucgguacuuug

SEQ ID NO: 458324 - RNA, 19 nt, Artificial Sequence
  Description of Artificial Sequence: Synthetic oligonucleotide
  Antisense Strand to SEQ ID NO: 458323
caaaguaccgauuaaucgu

SEQ ID NO: 458325 - RNA, 19 nt, Artificial Sequence
  Description of Artificial Sequence: Synthetic oligonucleotide
  Sense strand starting at position 731 of SEQ ID NO: 317022
gguacuuugcucuaccaac

SEQ ID NO: 458326 - RNA, 19 nt, Artificial Sequence
  Description of Artificial Sequence: Synthetic oligonucleotide
  Antisense Strand to SEQ ID NO: 458325
guugguagagcaaaguacc

SEQ ID NO: 458327 - RNA, 19 nt, Artificial Sequence
  Description of Artificial Sequence: Synthetic oligonucleotide
  Sense strand starting at position 797 of SEQ ID NO: 317022
agcagucgcgcuguaagua

SEQ ID NO: 458328 - RNA, 19 nt, Artificial Sequence
  Description of Artificial Sequence: Synthetic oligonucleotide
  Antisense Strand to SEQ ID NO: 458327
uacuuacagcgcgacugcu

SEQ ID NO: 458329 - RNA, 19 nt, Artificial Sequence
  Description of Artificial Sequence: Synthetic oligonucleotide
  Sense strand starting at position 836 of SEQ ID NO: 317022
cccaguucggaagaaucua

SEQ ID NO: 458330 - RNA, 19 nt, Artificial Sequence
  Description of Artificial Sequence: Synthetic oligonucleotide
  Antisense Strand to SEQ ID NO: 458329
uagauucuuccgaacuggg

SEQ ID NO: 458331 - RNA, 19 nt, Artificial Sequence
  Description of Artificial Sequence: Synthetic oligonucleotide
  Sense strand starting at position 1208 of SEQ ID NO: 317022
gcuccuaaacgcguuuaau

SEQ ID NO: 458332 - RNA, 19 nt, Artificial Sequence
  Description of Artificial Sequence: Synthetic oligonucleotide
  Antisense Strand to SEQ ID NO: 458331
auuaaacgcguuuaggagc

SEQ ID NO: 458333 - RNA, 19 nt, Artificial Sequence
  Description of Artificial Sequence: Synthetic oligonucleotide
  Sense strand starting at position 1211 of SEQ ID NO: 317022
ccuaaacgcguuuaauuga

SEQ ID NO: 458334 - RNA, 19 nt, Artificial Sequence
  Description of Artificial Sequence: Synthetic oligonucleotide
  Antisense Strand to SEQ ID NO: 458333
ucaauuaaacgcguuuagg

SEQ ID NO: 458335 - RNA, 19 nt, Artificial Sequence
  Description of Artificial Sequence: Synthetic oligonucleotide
  Sense strand starting at position 1216 of SEQ ID NO: 317022
acgcguuuaauugaugauu

SEQ ID NO: 458336 - RNA, 19 nt, Artificial Sequence
  Description of Artificial Sequence: Synthetic oligonucleotide
  Antisense Strand to SEQ ID NO: 458335
aaucaucaauuaaacgcgu

SEQ ID NO: 458337 - RNA, 19 nt, Artificial Sequence
  Description of Artificial Sequence: Synthetic oligonucleotide
  Sense strand starting at position 2054 of SEQ ID NO: 317022
gggcucggucccucguuaa

SEQ ID NO: 458338 - RNA, 19 nt, Artificial Sequence
  Description of Artificial Sequence: Synthetic oligonucleotide
  Antisense Strand to SEQ ID NO: 458337
uuaacgagggaccgagccc

SEQ ID NO: 458339 - RNA, 19 nt, Artificial Sequence
  Description of Artificial Sequence: Synthetic oligonucleotide
  Sense strand starting at position 2182 of SEQ ID NO: 317022
cuagaaauucuugaggugu

SEQ ID NO: 458340 - RNA, 19 nt, Artificial Sequence
  Description of Artificial Sequence: Synthetic oligonucleotide
  Antisense Strand to SEQ ID NO: 458339
acaccucaagaauuucuag

SEQ ID NO: 458341 - RNA, 19 nt, Artificial Sequence
  Description of Artificial Sequence: Synthetic oligonucleotide
  Sense strand starting at position 2319 of SEQ ID NO: 317022
uggcuauuaagauguguca

SEQ ID NO: 458342 - RNA, 19 nt, Artificial Sequence
  Description of Artificial Sequence: Synthetic oligonucleotide
  Antisense Strand to SEQ ID NO: 458341
ugacacaucuuaauagcca

SEQ ID NO: 458343 - RNA, 19 nt, Artificial Sequence
  Description of Artificial Sequence: Synthetic oligonucleotide
  Sense strand starting at position 2407 of SEQ ID NO: 317022
ugcacauuaggaugacauu

SEQ ID NO: 458344 - RNA, 19 nt, Artificial Sequence
  Description of Artificial Sequence: Synthetic oligonucleotide
  Antisense Strand to SEQ ID NO: 458343
aaugucauccuaaugugca

SEQ ID NO: 458345 - RNA, 19 nt, Artificial Sequence
  Description of Artificial Sequence: Synthetic oligonucleotide
  Sense strand starting at position 2470 of SEQ ID NO: 317022
uuuguauggaagugaucau

SEQ ID NO: 458346 - RNA, 19 nt, Artificial Sequence
  Description of Artificial Sequence: Synthetic oligonucleotide
  Antisense Strand to SEQ ID NO: 458345
augaucacuuccauacaaa

SEQ ID NO: 458347 - RNA, 19 nt, Artificial Sequence
  Description of Artificial Sequence: Synthetic oligonucleotide
  Sense strand starting at position 2471 of SEQ ID NO: 317022
uuguauggaagugaucauu

SEQ ID NO: 458348 - RNA, 19 nt, Artificial Sequence
  Description of Artificial Sequence: Synthetic oligonucleotide
  Antisense Strand to SEQ ID NO: 458347
aaugaucacuuccauacaa

SEQ ID NO: 458349 - RNA, 19 nt, Artificial Sequence
  Description of Artificial Sequence: Synthetic oligonucleotide
  Sense strand starting at position 2474 of SEQ ID NO: 317022
uauggaagugaucauugca

SEQ ID NO: 458350 - RNA, 19 nt, Artificial Sequence
  Description of Artificial Sequence: Synthetic oligonucleotide
  Antisense Strand to SEQ ID NO: 458349
ugcaaugaucacuuccaua

SEQ ID NO: 458351 - RNA, 19 nt, Artificial Sequence
  Description of Artificial Sequence: Synthetic oligonucleotide
  Sense strand starting at position 2477 of SEQ ID NO: 317022
ggaagugaucauugcaaau

SEQ ID NO: 458352 - RNA, 19 nt, Artificial Sequence
  Description of Artificial Sequence: Synthetic oligonucleotide
  Antisense Strand to SEQ ID NO: 458351
auuugcaaugaucacuucc

SEQ ID NO: 458353 - RNA, 19 nt, Artificial Sequence
  Description of Artificial Sequence: Synthetic oligonucleotide
  Sense strand starting at position 2487 of SEQ ID NO: 317022
auugcaaaugagcauuaau

SEQ ID NO: 458354 - RNA, 19 nt, Artificial Sequence
  Description of Artificial Sequence: Synthetic oligonucleotide
  Antisense Strand to SEQ ID NO: 458353
auuaaugcucauuugcaau

SEQ ID NO: 458355 - RNA, 19 nt, Artificial Sequence
  Description of Artificial Sequence: Synthetic oligonucleotide
  Sense strand starting at position 2530 of SEQ ID NO: 317022
uugacaccacuuuauguua

SEQ ID NO: 458356 - RNA, 19 nt, Artificial Sequence
  Description of Artificial Sequence: Synthetic oligonucleotide
  Antisense Strand to SEQ ID NO: 458355
uaacauaaaguggugucaa

SEQ ID NO: 458357 - RNA, 19 nt, Artificial Sequence
  Description of Artificial Sequence: Synthetic oligonucleotide
  Sense strand starting at position 2608 of SEQ ID NO: 317022
acuagaauugcagacuagu

SEQ ID NO: 458358 - RNA, 19 nt, Artificial Sequence
  Description of Artificial Sequence: Synthetic oligonucleotide
  Antisense Strand to SEQ ID NO: 458357
acuagucugcaauucuagu

SEQ ID NO: 458359 - RNA, 19 nt, Artificial Sequence
  Description of Artificial Sequence: Synthetic oligonucleotide
  Sense strand starting at position 2622 of SEQ ID NO: 317022
cuaguaucagaucagucau

SEQ ID NO: 458360 - RNA, 19 nt, Artificial Sequence
  Description of Artificial Sequence: Synthetic oligonucleotide
  Antisense Strand to SEQ ID NO: 458359
augacugaucugauacuag

SEQ ID NO: 458361 - RNA, 19 nt, Artificial Sequence
  Description of Artificial Sequence: Synthetic oligonucleotide
  Sense strand starting at position 2628 of SEQ ID NO: 317022
ucagaucagucaucggaga

SEQ ID NO: 458362 - RNA, 19 nt, Artificial Sequence
  Description of Artificial Sequence: Synthetic oligonucleotide
  Antisense Strand to SEQ ID NO: 458361
ucuccgaugacugaucuga

SEQ ID NO: 458363 - RNA, 19 nt, Artificial Sequence
  Description of Artificial Sequence: Synthetic oligonucleotide
  Sense strand starting at position 2629 of SEQ ID NO: 317022
cagaucagucaucggagau

SEQ ID NO: 458364 - RNA, 19 nt, Artificial Sequence
  Description of Artificial Sequence: Synthetic oligonucleotide
  Antisense Strand to SEQ ID NO: 458363
aucuccgaugacugaucug

SEQ ID NO: 458365 - RNA, 19 nt, Artificial Sequence
  Description of Artificial Sequence: Synthetic oligonucleotide
  Sense strand starting at position 2630 of SEQ ID NO: 317022
agaucagucaucggagauu

SEQ ID NO: 458366 - RNA, 19 nt, Artificial Sequence
  Description of Artificial Sequence: Synthetic oligonucleotide
  Antisense Strand to SEQ ID NO: 458365
aaucuccgaugacugaucu

SEQ ID NO: 458367 - RNA, 19 nt, Artificial Sequence
  Description of Artificial Sequence: Synthetic oligonucleotide
  Sense strand starting at position 3043 of SEQ ID NO: 317022
uugugaugagccgauaaug

SEQ ID NO: 458368 - RNA, 19 nt, Artificial Sequence
  Description of Artificial Sequence: Synthetic oligonucleotide
  Antisense Strand to SEQ ID NO: 458367
cauuaucggcucaucacaa

SEQ ID NO: 458369 - RNA, 19 nt, Artificial Sequence
  Description of Artificial Sequence: Synthetic oligonucleotide
  Sense strand starting at position 3172 of SEQ ID NO: 317022
ggcauauguguccaccgga

SEQ ID NO: 458370 - RNA, 19 nt, Artificial Sequence
  Description of Artificial Sequence: Synthetic oligonucleotide
  Antisense Strand to SEQ ID NO: 458369
uccgguggacacauaugcc

SEQ ID NO: 458371 - RNA, 19 nt, Artificial Sequence
  Description of Artificial Sequence: Synthetic oligonucleotide
  Sense strand starting at position 3175 of SEQ ID NO: 317022
auauguguccaccggaaga

SEQ ID NO: 458372 - RNA, 19 nt, Artificial Sequence
  Description of Artificial Sequence: Synthetic oligonucleotide
  Antisense Strand to SEQ ID NO: 458371
ucuuccgguggacacauau

SEQ ID NO: 458373 - RNA, 19 nt, Artificial Sequence
  Description of Artificial Sequence: Synthetic oligonucleotide
  Sense strand starting at position 3177 of SEQ ID NO: 317022
auguguccaccggaagaau

SEQ ID NO: 458374 - RNA, 19 nt, Artificial Sequence
  Description of Artificial Sequence: Synthetic oligonucleotide
  Antisense Strand to SEQ ID NO: 458373
auucuuccgguggacacau

SEQ ID NO: 458375 - RNA, 19 nt, Artificial Sequence
  Description of Artificial Sequence: Synthetic oligonucleotide
  Sense strand starting at position 3186 of SEQ ID NO: 317022
ccggaagaaucuuucugaa

SEQ ID NO: 458376 - RNA, 19 nt, Artificial Sequence
  Description of Artificial Sequence: Synthetic oligonucleotide
  Antisense Strand to SEQ ID NO: 458375
uucagaaagauucuuccgg

SEQ ID NO: 458377 - RNA, 19 nt, Artificial Sequence
  Description of Artificial Sequence: Synthetic oligonucleotide
  Sense strand starting at position 3261 of SEQ ID NO: 317022
ccacauccagaacguuaua

SEQ ID NO: 458378 - RNA, 19 nt, Artificial Sequence
  Description of Artificial Sequence: Synthetic oligonucleotide
  Antisense Strand to SEQ ID NO: 458377
uauaacguucuggaugugg

SEQ ID NO: 458379 - RNA, 19 nt, Artificial Sequence
  Description of Artificial Sequence: Synthetic oligonucleotide
  Sense strand starting at position 3338 of SEQ ID NO: 317022
aaaguaagccaguggaaau

SEQ ID NO: 458380 - RNA, 19 nt, Artificial Sequence
  Description of Artificial Sequence: Synthetic oligonucleotide
  Antisense Strand to SEQ ID NO: 458379
auuuccacuggcuuacuuu

SEQ ID NO: 458381 - RNA, 19 nt, Artificial Sequence
  Description of Artificial Sequence: Synthetic oligonucleotide
  Sense strand starting at position 3350 of SEQ ID NO: 317022
uggaaauccuaaguacugu

SEQ ID NO: 458382 - RNA, 19 nt, Artificial Sequence
  Description of Artificial Sequence: Synthetic oligonucleotide
  Antisense Strand to SEQ ID NO: 458381
acaguacuuaggauuucca

SEQ ID NO: 458383 - RNA, 19 nt, Artificial Sequence
  Description of Artificial Sequence: Synthetic oligonucleotide
  Sense strand starting at position 3356 of SEQ ID NO: 317022
uccuaaguacuguauaugu

SEQ ID NO: 458384 - RNA, 19 nt, Artificial Sequence
  Description of Artificial Sequence: Synthetic oligonucleotide
  Antisense Strand to SEQ ID NO: 458383
acauauacaguacuuagga

SEQ ID NO: 458385 - RNA, 19 nt, Artificial Sequence
  Description of Artificial Sequence: Synthetic oligonucleotide
  Sense strand starting at position 3451 of SEQ ID NO: 317022
agcgaucacacauguaaag

SEQ ID NO: 458386 - RNA, 19 nt, Artificial Sequence
  Description of Artificial Sequence: Synthetic oligonucleotide
  Antisense Strand to SEQ ID NO: 458385
cuuuacaugugugaucgcu

SEQ ID NO: 458387 - RNA, 19 nt, Artificial Sequence
  Description of Artificial Sequence: Synthetic oligonucleotide
  Sense strand starting at position 3543 of SEQ ID NO: 317022
acauacucucuguagaagu

SEQ ID NO: 458388 - RNA, 19 nt, Artificial Sequence
  Description of Artificial Sequence: Synthetic oligonucleotide
  Antisense Strand to SEQ ID NO: 458387
acuucuacagagaguaugu

SEQ ID NO: 458389 - RNA, 19 nt, Artificial Sequence
  Description of Artificial Sequence: Synthetic oligonucleotide
  Sense strand starting at position 3545 of SEQ ID NO: 317022
auacucucuguagaaguua

SEQ ID NO: 458390 - RNA, 19 nt, Artificial Sequence
  Description of Artificial Sequence: Synthetic oligonucleotide
  Antisense Strand to SEQ ID NO: 458389
uaacuucuacagagaguau

SEQ ID NO: 458391 - RNA, 19 nt, Artificial Sequence
  Description of Artificial Sequence: Synthetic oligonucleotide
  Sense strand starting at position 3571 of SEQ ID NO: 317022
caggcuuuguagccagaca

SEQ ID NO: 458392 - RNA, 19 nt, Artificial Sequence
  Description of Artificial Sequence: Synthetic oligonucleotide
  Antisense Strand to SEQ ID NO: 458391
ugucuggcuacaaagccug

SEQ ID NO: 458393 - RNA, 19 nt, Artificial Sequence
  Description of Artificial Sequence: Synthetic oligonucleotide
  Sense strand starting at position 3594 of SEQ ID NO: 317022
uggaucuggcucuaucagu

SEQ ID NO: 458394 - RNA, 19 nt, Artificial Sequence
  Description of Artificial Sequence: Synthetic oligonucleotide
  Antisense Strand to SEQ ID NO: 458393
acugauagagccagaucca

SEQ ID NO: 458395 - RNA, 19 nt, Artificial Sequence
  Description of Artificial Sequence: Synthetic oligonucleotide
  Sense strand starting at position 3618 of SEQ ID NO: 317022
guuugugugccugugggau

SEQ ID NO: 458396 - RNA, 19 nt, Artificial Sequence
  Description of Artificial Sequence: Synthetic oligonucleotide
  Antisense Strand to SEQ ID NO: 458395
aucccacaggcacacaaac

SEQ ID NO: 458397 - RNA, 19 nt, Artificial Sequence
  Description of Artificial Sequence: Synthetic oligonucleotide
  Sense strand starting at position 3657 of SEQ ID NO: 317022
ucaguuucuucccugguaa

SEQ ID NO: 458398 - RNA, 19 nt, Artificial Sequence
  Description of Artificial Sequence: Synthetic oligonucleotide
  Antisense Strand to SEQ ID NO: 458397
uuaccagggaagaaacuga

SEQ ID NO: 458399 - RNA, 19 nt, Artificial Sequence
  Description of Artificial Sequence: Synthetic oligonucleotide
  Sense strand starting at position 513 of SEQ ID NO: 317023
ucaccuauuaccgguggga

SEQ ID NO: 458400 - RNA, 19 nt, Artificial Sequence
  Description of Artificial Sequence: Synthetic oligonucleotide
  Antisense Strand to SEQ ID NO: 458399
ucccaccgguaauagguga

SEQ ID NO: 458401 - RNA, 19 nt, Artificial Sequence
  Description of Artificial Sequence: Synthetic oligonucleotide
  Sense strand starting at position 1016 of SEQ ID NO: 317023
cacgauuaaucgguacuuu

SEQ ID NO: 458402 - RNA, 19 nt, Artificial Sequence
  Description of Artificial Sequence: Synthetic oligonucleotide
  Antisense Strand to SEQ ID NO: 458401
aaaguaccgauuaaucgug

SEQ ID NO: 458403 - RNA, 19 nt, Artificial Sequence
  Description of Artificial Sequence: Synthetic oligonucleotide
  Sense strand starting at position 1017 of SEQ ID NO: 317023
acgauuaaucgguacuuug

SEQ ID NO: 458404 - RNA, 19 nt, Artificial Sequence
  Description of Artificial Sequence: Synthetic oligonucleotide
  Antisense Strand to SEQ ID NO: 458403
caaaguaccgauuaaucgu

SEQ ID NO: 458405 - RNA, 19 nt, Artificial Sequence
  Description of Artificial Sequence: Synthetic oligonucleotide
  Sense strand starting at position 1027 of SEQ ID NO: 317023
gguacuuugcucuaccaac

SEQ ID NO: 458406 - RNA, 19 nt, Artificial Sequence
  Description of Artificial Sequence: Synthetic oligonucleotide
  Antisense Strand to SEQ ID NO: 458405
guugguagagcaaaguacc

SEQ ID NO: 458407 - RNA, 19 nt, Artificial Sequence
  Description of Artificial Sequence: Synthetic oligonucleotide
  Sense strand starting at position 1093 of SEQ ID NO: 317023
agcagucgcgcuguaagua

SEQ ID NO: 458408 - RNA, 19 nt, Artificial Sequence
  Description of Artificial Sequence: Synthetic oligonucleotide
  Antisense Strand to SEQ ID NO: 458407
uacuuacagcgcgacugcu

SEQ ID NO: 458409 - RNA, 19 nt, Artificial Sequence
  Description of Artificial Sequence: Synthetic oligonucleotide
  Sense strand starting at position 1132 of SEQ ID NO: 317023
cccaguucggaagaaucua

SEQ ID NO: 458410 - RNA, 19 nt, Artificial Sequence
  Description of Artificial Sequence: Synthetic oligonucleotide
  Antisense Strand to SEQ ID NO: 458409
uagauucuuccgaacuggg

SEQ ID NO: 458411 - RNA, 19 nt, Artificial Sequence
  Description of Artificial Sequence: Synthetic oligonucleotide
  Sense strand starting at position 1504 of SEQ ID NO: 317023
gcuccuaaacgcguuuaau

SEQ ID NO: 458412 - RNA, 19 nt, Artificial Sequence
  Description of Artificial Sequence: Synthetic oligonucleotide
  Antisense Strand to SEQ ID NO: 458411
auuaaacgcguuuaggagc

SEQ ID NO: 458413 - RNA, 19 nt, Artificial Sequence
  Description of Artificial Sequence: Synthetic oligonucleotide
  Sense strand starting at position 1507 of SEQ ID NO: 317023
ccuaaacgcguuuaauuga

SEQ ID NO: 458414 - RNA, 19 nt, Artificial Sequence
  Description of Artificial Sequence: Synthetic oligonucleotide
  Antisense Strand to SEQ ID NO: 458413
ucaauuaaacgcguuuagg

SEQ ID NO: 458415 - RNA, 19 nt, Artificial Sequence
  Description of Artificial Sequence: Synthetic oligonucleotide
  Sense strand starting at position 1512 of SEQ ID NO: 317023
acgcguuuaauugaugauu

SEQ ID NO: 458416 - RNA, 19 nt, Artificial Sequence
  Description of Artificial Sequence: Synthetic oligonucleotide
  Antisense Strand to SEQ ID NO: 458415
aaucaucaauuaaacgcgu

SEQ ID NO: 458417 - RNA, 19 nt, Artificial Sequence
  Description of Artificial Sequence: Synthetic oligonucleotide
  Sense strand starting at position 2350 of SEQ ID NO: 317023
gggcucggucccucguuaa

SEQ ID NO: 458418 - RNA, 19 nt, Artificial Sequence
  Description of Artificial Sequence: Synthetic oligonucleotide
  Antisense Strand to SEQ ID NO: 458417
uuaacgagggaccgagccc

SEQ ID NO: 458419 - RNA, 19 nt, Artificial Sequence
  Description of Artificial Sequence: Synthetic oligonucleotide
  Sense strand starting at position 2478 of SEQ ID NO: 317023
cuagaaauucuugaggugu

SEQ ID NO: 458420 - RNA, 19 nt, Artificial Sequence
  Description of Artificial Sequence: Synthetic oligonucleotide
  Antisense Strand to SEQ ID NO: 458419
acaccucaagaauuucuag

SEQ ID NO: 458421 - RNA, 19 nt, Artificial Sequence
  Description of Artificial Sequence: Synthetic oligonucleotide
  Sense strand starting at position 2615 of SEQ ID NO: 317023
uggcuauuaagauguguca

SEQ ID NO: 458422 - RNA, 19 nt, Artificial Sequence
  Description of Artificial Sequence: Synthetic oligonucleotide
  Antisense Strand to SEQ ID NO: 458421
ugacacaucuuaauagcca

SEQ ID NO: 458423 - RNA, 19 nt, Artificial Sequence
  Description of Artificial Sequence: Synthetic oligonucleotide
  Sense strand starting at position 2703 of SEQ ID NO: 317023
ugcacauuaggaugacauu

SEQ ID NO: 458424 - RNA, 19 nt, Artificial Sequence
  Description of Artificial Sequence: Synthetic oligonucleotide
  Antisense Strand to SEQ ID NO: 458423
aaugucauccuaaugugca

SEQ ID NO: 458425 - RNA, 19 nt, Artificial Sequence
  Description of Artificial Sequence: Synthetic oligonucleotide
  Sense strand starting at position 2766 of SEQ ID NO: 317023
uuuguauggaagugaucau

SEQ ID NO: 458426 - RNA, 19 nt, Artificial Sequence
  Description of Artificial Sequence: Synthetic oligonucleotide
  Antisense Strand to SEQ ID NO: 458425
augaucacuuccauacaaa

SEQ ID NO: 458427 - RNA, 19 nt, Artificial Sequence
  Description of Artificial Sequence: Synthetic oligonucleotide
  Sense strand starting at position 2767 of SEQ ID NO: 317023
uuguauggaagugaucauu

SEQ ID NO: 458428 - RNA, 19 nt, Artificial Sequence
  Description of Artificial Sequence: Synthetic oligonucleotide
  Antisense Strand to SEQ ID NO: 458427
aaugaucacuuccauacaa

SEQ ID NO: 458429 - RNA, 19 nt, Artificial Sequence
  Description of Artificial Sequence: Synthetic oligonucleotide
  Sense strand starting at position 2770 of SEQ ID NO: 317023
uauggaagugaucauugca

SEQ ID NO: 458430 - RNA, 19 nt, Artificial Sequence
  Description of Artificial Sequence: Synthetic oligonucleotide
  Antisense Strand to SEQ ID NO: 458429
ugcaaugaucacuuccaua

SEQ ID NO: 458431 - RNA, 19 nt, Artificial Sequence
  Description of Artificial Sequence: Synthetic oligonucleotide
  Sense strand starting at position 2773 of SEQ ID NO: 317023
ggaagugaucauugcaaau

SEQ ID NO: 458432 - RNA, 19 nt, Artificial Sequence
  Description of Artificial Sequence: Synthetic oligonucleotide
  Antisense Strand to SEQ ID NO: 458431
auuugcaaugaucacuucc

SEQ ID NO: 458433 - RNA, 19 nt, Artificial Sequence
  Description of Artificial Sequence: Synthetic oligonucleotide
  Sense strand starting at position 2783 of SEQ ID NO: 317023
auugcaaaugagcauuaau

SEQ ID NO: 458434 - RNA, 19 nt, Artificial Sequence
  Description of Artificial Sequence: Synthetic oligonucleotide
  Antisense Strand to SEQ ID NO: 458433
auuaaugcucauuugcaau

SEQ ID NO: 458435 - RNA, 19 nt, Artificial Sequence
  Description of Artificial Sequence: Synthetic oligonucleotide
  Sense strand starting at position 2826 of SEQ ID NO: 317023
uugacaccacuuuauguua

SEQ ID NO: 458436 - RNA, 19 nt, Artificial Sequence
  Description of Artificial Sequence: Synthetic oligonucleotide
  Antisense Strand to SEQ ID NO: 458435
uaacauaaaguggugucaa

SEQ ID NO: 458437 - RNA, 19 nt, Artificial Sequence
  Description of Artificial Sequence: Synthetic oligonucleotide
  Sense strand starting at position 2904 of SEQ ID NO: 317023
acuagaauugcagacuagu

SEQ ID NO: 458438 - RNA, 19 nt, Artificial Sequence
  Description of Artificial Sequence: Synthetic oligonucleotide
  Antisense Strand to SEQ ID NO: 458437
acuagucugcaauucuagu

SEQ ID NO: 458439 - RNA, 19 nt, Artificial Sequence
  Description of Artificial Sequence: Synthetic oligonucleotide
  Sense strand starting at position 2918 of SEQ ID NO: 317023
cuaguaucagaucagucau

SEQ ID NO: 458440 - RNA, 19 nt, Artificial Sequence
  Description of Artificial Sequence: Synthetic oligonucleotide
  Antisense Strand to SEQ ID NO: 458439
augacugaucugauacuag

SEQ ID NO: 458441 - RNA, 19 nt, Artificial Sequence
  Description of Artificial Sequence: Synthetic oligonucleotide
  Sense strand starting at position 2924 of SEQ ID NO: 317023
ucagaucagucaucggaga

SEQ ID NO: 458442 - RNA, 19 nt, Artificial Sequence
  Description of Artificial Sequence: Synthetic oligonucleotide
  Antisense Strand to SEQ ID NO: 458441
ucuccgaugacugaucuga

SEQ ID NO: 458443 - RNA, 19 nt, Artificial Sequence
  Description of Artificial Sequence: Synthetic oligonucleotide
  Sense strand starting at position 2925 of SEQ ID NO: 317023
cagaucagucaucggagau

SEQ ID NO: 458444 - RNA, 19 nt, Artificial Sequence
  Description of Artificial Sequence: Synthetic oligonucleotide
  Antisense Strand to SEQ ID NO: 458443
aucuccgaugacugaucug

SEQ ID NO: 458445 - RNA, 19 nt, Artificial Sequence
  Description of Artificial Sequence: Synthetic oligonucleotide
  Sense strand starting at position 2926 of SEQ ID NO: 317023
agaucagucaucggagauu

SEQ ID NO: 458446 - RNA, 19 nt, Artificial Sequence
  Description of Artificial Sequence: Synthetic oligonucleotide
  Antisense Strand to SEQ ID NO: 458445
aaucuccgaugacugaucu

SEQ ID NO: 458447 - RNA, 19 nt, Artificial Sequence
  Description of Artificial Sequence: Synthetic oligonucleotide
  Sense strand starting at position 3339 of SEQ ID NO: 317023
uugugaugagccgauaaug

SEQ ID NO: 458448 - RNA, 19 nt, Artificial Sequence
  Description of Artificial Sequence: Synthetic oligonucleotide
  Antisense Strand to SEQ ID NO: 458447
cauuaucggcucaucacaa

SEQ ID NO: 458449 - RNA, 19 nt, Artificial Sequence
  Description of Artificial Sequence: Synthetic oligonucleotide
  Sense strand starting at position 3468 of SEQ ID NO: 317023
ggcauauguguccaccgga

SEQ ID NO: 458450 - RNA, 19 nt, Artificial Sequence
  Description of Artificial Sequence: Synthetic oligonucleotide
  Antisense Strand to SEQ ID NO: 458449
uccgguggacacauaugcc

SEQ ID NO: 458451 - RNA, 19 nt, Artificial Sequence
  Description of Artificial Sequence: Synthetic oligonucleotide
  Sense strand starting at position 3471 of SEQ ID NO: 317023
auauguguccaccggaaga

SEQ ID NO: 458452 - RNA, 19 nt, Artificial Sequence
  Description of Artificial Sequence: Synthetic oligonucleotide
  Antisense Strand to SEQ ID NO: 458451
ucuuccgguggacacauau

SEQ ID NO: 458453 - RNA, 19 nt, Artificial Sequence
  Description of Artificial Sequence: Synthetic oligonucleotide
  Sense strand starting at position 3473 of SEQ ID NO: 317023
auguguccaccggaagaau

SEQ ID NO: 458454 - RNA, 19 nt, Artificial Sequence
  Description of Artificial Sequence: Synthetic oligonucleotide
  Antisense Strand to SEQ ID NO: 458453
auucuuccgguggacacau

SEQ ID NO: 458455 - RNA, 19 nt, Artificial Sequence
  Description of Artificial Sequence: Synthetic oligonucleotide
  Sense strand starting at position 3482 of SEQ ID NO: 317023
ccggaagaaucuuucugaa

SEQ ID NO: 458456 - RNA, 19 nt, Artificial Sequence
  Description of Artificial Sequence: Synthetic oligonucleotide
  Antisense Strand to SEQ ID NO: 458455
uucagaaagauucuuccgg

SEQ ID NO: 458457 - RNA, 19 nt, Artificial Sequence
  Description of Artificial Sequence: Synthetic oligonucleotide
  Sense strand starting at position 3557 of SEQ ID NO: 317023
ccacauccagaacguuaua

SEQ ID NO: 458458 - RNA, 19 nt, Artificial Sequence
  Description of Artificial Sequence: Synthetic oligonucleotide
  Antisense Strand to SEQ ID NO: 458457
uauaacguucuggaugugg

SEQ ID NO: 458459 - RNA, 19 nt, Artificial Sequence
  Description of Artificial Sequence: Synthetic oligonucleotide
  Sense strand starting at position 3634 of SEQ ID NO: 317023
aaaguaagccaguggaaau

SEQ ID NO: 458460 - RNA, 19 nt, Artificial Sequence
  Description of Artificial Sequence: Synthetic oligonucleotide
  Antisense Strand to SEQ ID NO: 458459
auuuccacuggcuuacuuu

SEQ ID NO: 458461 - RNA, 19 nt, Artificial Sequence
  Description of Artificial Sequence: Synthetic oligonucleotide
  Sense strand starting at position 3646 of SEQ ID NO: 317023
uggaaauccuaaguacugu

SEQ ID NO: 458462 - RNA, 19 nt, Artificial Sequence
  Description of Artificial Sequence: Synthetic oligonucleotide
  Antisense Strand to SEQ ID NO: 458461
acaguacuuaggauuucca

SEQ ID NO: 458463 - RNA, 19 nt, Artificial Sequence
  Description of Artificial Sequence: Synthetic oligonucleotide
  Sense strand starting at position 3652 of SEQ ID NO: 317023
uccuaaguacuguauaugu

SEQ ID NO: 458464 - RNA, 19 nt, Artificial Sequence
  Description of Artificial Sequence: Synthetic oligonucleotide
  Antisense Strand to SEQ ID NO: 458463
acauauacaguacuuagga

SEQ ID NO: 458465 - RNA, 19 nt, Artificial Sequence
  Description of Artificial Sequence: Synthetic oligonucleotide
  Sense strand starting at position 3747 of SEQ ID NO: 317023
agcgaucacacauguaaag

SEQ ID NO: 458466 - RNA, 19 nt, Artificial Sequence
  Description of Artificial Sequence: Synthetic oligonucleotide
  Antisense Strand to SEQ ID NO: 458465
cuuuacaugugugaucgcu

SEQ ID NO: 458467 - RNA, 19 nt, Artificial Sequence
  Description of Artificial Sequence: Synthetic oligonucleotide
  Sense strand starting at position 3839 of SEQ ID NO: 317023
acauacucucuguagaagu

SEQ ID NO: 458468 - RNA, 19 nt, Artificial Sequence
  Description of Artificial Sequence: Synthetic oligonucleotide
  Antisense Strand to SEQ ID NO: 458467
acuucuacagagaguaugu

SEQ ID NO: 458469 - RNA, 19 nt, Artificial Sequence
  Description of Artificial Sequence: Synthetic oligonucleotide
  Sense strand starting at position 3841 of SEQ ID NO: 317023
auacucucuguagaaguua

SEQ ID NO: 458470 - RNA, 19 nt, Artificial Sequence
  Description of Artificial Sequence: Synthetic oligonucleotide
  Antisense Strand to SEQ ID NO: 458469
uaacuucuacagagaguau

SEQ ID NO: 458471 - RNA, 19 nt, Artificial Sequence
  Description of Artificial Sequence: Synthetic oligonucleotide
  Sense strand starting at position 3867 of SEQ ID NO: 317023
caggcuuuguagccagaca

SEQ ID NO: 458472 - RNA, 19 nt, Artificial Sequence
  Description of Artificial Sequence: Synthetic oligonucleotide
  Antisense Strand to SEQ ID NO: 458471
ugucuggcuacaaagccug

SEQ ID NO: 458473 - RNA, 19 nt, Artificial Sequence
  Description of Artificial Sequence: Synthetic oligonucleotide
  Sense strand starting at position 3890 of SEQ ID NO: 317023
uggaucuggcucuaucagu

SEQ ID NO: 458474 - RNA, 19 nt, Artificial Sequence
  Description of Artificial Sequence: Synthetic oligonucleotide
  Antisense Strand to SEQ ID NO: 458473
acugauagagccagaucca

SEQ ID NO: 458475 - RNA, 19 nt, Artificial Sequence
  Description of Artificial Sequence: Synthetic oligonucleotide
  Sense strand starting at position 3914 of SEQ ID NO: 317023
guuugugugccugugggau

SEQ ID NO: 458476 - RNA, 19 nt, Artificial Sequence
  Description of Artificial Sequence: Synthetic oligonucleotide
  Antisense Strand to SEQ ID NO: 458475
aucccacaggcacacaaac

SEQ ID NO: 458477 - RNA, 19 nt, Artificial Sequence
  Description of Artificial Sequence: Synthetic oligonucleotide
  Sense strand starting at position 3953 of SEQ ID NO: 317023
ucaguuucuucccugguaa

SEQ ID NO: 458478 - RNA, 19 nt, Artificial Sequence
  Description of Artificial Sequence: Synthetic oligonucleotide
  Antisense Strand to SEQ ID NO: 458477
uuaccagggaagaaacuga

SEQ ID NO: 458479 - RNA, 19 nt, Artificial Sequence
  Description of Artificial Sequence: Synthetic oligonucleotide
  Sense strand starting at position 25 of SEQ ID NO: 317024
caaugcaaguauggacaua

SEQ ID NO: 458480 - RNA, 19 nt, Artificial Sequence
  Description of Artificial Sequence: Synthetic oligonucleotide
  Antisense Strand to SEQ ID NO: 458479
uauguccauacuugcauug

SEQ ID NO: 458481 - RNA, 19 nt, Artificial Sequence
  Description of Artificial Sequence: Synthetic oligonucleotide
  Sense strand starting at position 77 of SEQ ID NO: 317024
gugauuaaaucuugaucag

SEQ ID NO: 458482 - RNA, 19 nt, Artificial Sequence
  Description of Artificial Sequence: Synthetic oligonucleotide
  Antisense Strand to SEQ ID NO: 458481
cugaucaagauuuaaucac

SEQ ID NO: 458483 - RNA, 19 nt, Artificial Sequence
  Description of Artificial Sequence: Synthetic oligonucleotide
  Sense strand starting at position 80 of SEQ ID NO: 317024
auuaaaucuugaucaguug

SEQ ID NO: 458484 - RNA, 19 nt, Artificial Sequence
  Description of Artificial Sequence: Synthetic oligonucleotide
  Antisense Strand to SEQ ID NO: 458483
caacugaucaagauuuaau

SEQ ID NO: 458485 - RNA, 19 nt, Artificial Sequence
  Description of Artificial Sequence: Synthetic oligonucleotide
  Sense strand starting at position 83 of SEQ ID NO: 317024
aaaucuugaucaguuguga

SEQ ID NO: 458486 - RNA, 19 nt, Artificial Sequence
  Description of Artificial Sequence: Synthetic oligonucleotide
  Antisense Strand to SEQ ID NO: 458485
ucacaacugaucaagauuu

SEQ ID NO: 458487 - RNA, 19 nt, Artificial Sequence
  Description of Artificial Sequence: Synthetic oligonucleotide
  Sense strand starting at position 87 of SEQ ID NO: 317024
cuugaucaguugugauaug

SEQ ID NO: 458488 - RNA, 19 nt, Artificial Sequence
  Description of Artificial Sequence: Synthetic oligonucleotide
  Antisense Strand to SEQ ID NO: 458487
cauaucacaacugaucaag

SEQ ID NO: 458489 - RNA, 19 nt, Artificial Sequence
  Description of Artificial Sequence: Synthetic oligonucleotide
  Sense strand starting at position 88 of SEQ ID NO: 317024
uugaucaguugugauauga

SEQ ID NO: 458490 - RNA, 19 nt, Artificial Sequence
  Description of Artificial Sequence: Synthetic oligonucleotide
  Antisense Strand to SEQ ID NO: 458489
ucauaucacaacugaucaa

SEQ ID NO: 458491 - RNA, 19 nt, Artificial Sequence
  Description of Artificial Sequence: Synthetic oligonucleotide
  Sense strand starting at position 143 of SEQ ID NO: 317024
gggagucacuaccuaaauc

SEQ ID NO: 458492 - RNA, 19 nt, Artificial Sequence
  Description of Artificial Sequence: Synthetic oligonucleotide
  Antisense Strand to SEQ ID NO: 458491
gauuuagguagugacuccc

SEQ ID NO: 458493 - RNA, 19 nt, Artificial Sequence
  Description of Artificial Sequence: Synthetic oligonucleotide
  Sense strand starting at position 210 of SEQ ID NO: 317024
uuugaaagguauuagccuu

SEQ ID NO: 458494 - RNA, 19 nt, Artificial Sequence
  Description of Artificial Sequence: Synthetic oligonucleotide
  Antisense Strand to SEQ ID NO: 458493
aaggcuaauaccuuucaaa

SEQ ID NO: 458495 - RNA, 19 nt, Artificial Sequence
  Description of Artificial Sequence: Synthetic oligonucleotide
  Sense strand starting at position 216 of SEQ ID NO: 317024
agguauuagccuugagcua

SEQ ID NO: 458496 - RNA, 19 nt, Artificial Sequence
  Description of Artificial Sequence: Synthetic oligonucleotide
  Antisense Strand to SEQ ID NO: 458495
uagcucaaggcuaauaccu

SEQ ID NO: 458497 - RNA, 19 nt, Artificial Sequence
  Description of Artificial Sequence: Synthetic oligonucleotide
  Sense strand starting at position 217 of SEQ ID NO: 317024
gguauuagccuugagcuac

SEQ ID NO: 458498 - RNA, 19 nt, Artificial Sequence
  Description of Artificial Sequence: Synthetic oligonucleotide
  Antisense Strand to SEQ ID NO: 458497
guagcucaaggcuaauacc

SEQ ID NO: 458499 - RNA, 19 nt, Artificial Sequence
  Description of Artificial Sequence: Synthetic oligonucleotide
  Sense strand starting at position 253 of SEQ ID NO: 317024
gccuucauggcggguauua

SEQ ID NO: 458500 - RNA, 19 nt, Artificial Sequence
  Description of Artificial Sequence: Synthetic oligonucleotide
  Antisense Strand to SEQ ID NO: 458499
uaauacccgccaugaaggc

SEQ ID NO: 458501 - RNA, 19 nt, Artificial Sequence
  Description of Artificial Sequence: Synthetic oligonucleotide
  Sense strand starting at position 255 of SEQ ID NO: 317024
cuucauggcggguauuaua

SEQ ID NO: 458502 - RNA, 19 nt, Artificial Sequence
  Description of Artificial Sequence: Synthetic oligonucleotide
  Antisense Strand to SEQ ID NO: 458501
uauaauacccgccaugaag

SEQ ID NO: 458503 - RNA, 19 nt, Artificial Sequence
  Description of Artificial Sequence: Synthetic oligonucleotide
  Sense strand starting at position 375 of SEQ ID NO: 317024
guagcugucucaggucauu

SEQ ID NO: 458504 - RNA, 19 nt, Artificial Sequence
  Description of Artificial Sequence: Synthetic oligonucleotide
  Antisense Strand to SEQ ID NO: 458503
aaugaccugagacagcuac

SEQ ID NO: 458505 - RNA, 19 nt, Artificial Sequence
  Description of Artificial Sequence: Synthetic oligonucleotide
  Sense strand starting at position 495 of SEQ ID NO: 317024
cagcccucucguuacuaga

SEQ ID NO: 458506 - RNA, 19 nt, Artificial Sequence
  Description of Artificial Sequence: Synthetic oligonucleotide
  Antisense Strand to SEQ ID NO: 458505
ucuaguaacgagagggcug

SEQ ID NO: 458507 - RNA, 19 nt, Artificial Sequence
  Description of Artificial Sequence: Synthetic oligonucleotide
  Sense strand starting at position 581 of SEQ ID NO: 317024
uguuuaaaucgcccgcuuu

SEQ ID NO: 458508 - RNA, 19 nt, Artificial Sequence
  Description of Artificial Sequence: Synthetic oligonucleotide
  Antisense Strand to SEQ ID NO: 458507
aaagcgggcgauuuaaaca

SEQ ID NO: 458509 - RNA, 19 nt, Artificial Sequence
  Description of Artificial Sequence: Synthetic oligonucleotide
  Sense strand starting at position 600 of SEQ ID NO: 317024
uuuguuugcucucagcauu

SEQ ID NO: 458510 - RNA, 19 nt, Artificial Sequence
  Description of Artificial Sequence: Synthetic oligonucleotide
  Antisense Strand to SEQ ID NO: 458509
aaugcugagagcaaacaaa

SEQ ID NO: 458511 - RNA, 19 nt, Artificial Sequence
  Description of Artificial Sequence: Synthetic oligonucleotide
  Sense strand starting at position 791 of SEQ ID NO: 317024
acgugagaaggcuaaggau

SEQ ID NO: 458512 - RNA, 19 nt, Artificial Sequence
  Description of Artificial Sequence: Synthetic oligonucleotide
  Antisense Strand to SEQ ID NO: 458511
auccuuagccuucucacgu

SEQ ID NO: 458513 - RNA, 19 nt, Artificial Sequence
  Description of Artificial Sequence: Synthetic oligonucleotide
  Sense strand starting at position 1421 of SEQ ID NO: 317024
guguaucaccucugucaca

SEQ ID NO: 458514 - RNA, 19 nt, Artificial Sequence
  Description of Artificial Sequence: Synthetic oligonucleotide
  Antisense Strand to SEQ ID NO: 458513
ugugacagaggugauacac

SEQ ID NO: 458515 - RNA, 19 nt, Artificial Sequence
  Description of Artificial Sequence: Synthetic oligonucleotide
  Sense strand starting at position 1864 of SEQ ID NO: 317024
ucaccuauuaccgguggga

SEQ ID NO: 458516 - RNA, 19 nt, Artificial Sequence
  Description of Artificial Sequence: Synthetic oligonucleotide
  Antisense Strand to SEQ ID NO: 458515
ucccaccgguaauagguga

SEQ ID NO: 458517 - RNA, 19 nt, Artificial Sequence
  Description of Artificial Sequence: Synthetic oligonucleotide
  Sense strand starting at position 2366 of SEQ ID NO: 317024
ucacgauuaaucgguacuu

SEQ ID NO: 458518 - RNA, 19 nt, Artificial Sequence
  Description of Artificial Sequence: Synthetic oligonucleotide
  Antisense Strand to SEQ ID NO: 458517
aaguaccgauuaaucguga

SEQ ID NO: 458519 - RNA, 19 nt, Artificial Sequence
  Description of Artificial Sequence: Synthetic oligonucleotide
  Sense strand starting at position 2367 of SEQ ID NO: 317024
cacgauuaaucgguacuuu

SEQ ID NO: 458520 - RNA, 19 nt, Artificial Sequence
  Description of Artificial Sequence: Synthetic oligonucleotide
  Antisense Strand to SEQ ID NO: 458519
aaaguaccgauuaaucgug

SEQ ID NO: 458521 - RNA, 19 nt, Artificial Sequence
  Description of Artificial Sequence: Synthetic oligonucleotide
  Sense strand starting at position 2368 of SEQ ID NO: 317024
acgauuaaucgguacuuug

SEQ ID NO: 458522 - RNA, 19 nt, Artificial Sequence
  Description of Artificial Sequence: Synthetic oligonucleotide
  Antisense Strand to SEQ ID NO: 458521
caaaguaccgauuaaucgu

SEQ ID NO: 458523 - RNA, 19 nt, Artificial Sequence
  Description of Artificial Sequence: Synthetic oligonucleotide
  Sense strand starting at position 2378 of SEQ ID NO: 317024
gguacuuugcucuaccaac

SEQ ID NO: 458524 - RNA, 19 nt, Artificial Sequence
  Description of Artificial Sequence: Synthetic oligonucleotide
  Antisense Strand to SEQ ID NO: 458523
guugguagagcaaaguacc

SEQ ID NO: 458525 - RNA, 19 nt, Artificial Sequence
  Description of Artificial Sequence: Synthetic oligonucleotide
  Sense strand starting at position 2444 of SEQ ID NO: 317024
agcagucgcgcuguaagua

SEQ ID NO: 458526 - RNA, 19 nt, Artificial Sequence
  Description of Artificial Sequence: Synthetic oligonucleotide
  Antisense Strand to SEQ ID NO: 458525
uacuuacagcgcgacugcu

SEQ ID NO: 458527 - RNA, 19 nt, Artificial Sequence
  Description of Artificial Sequence: Synthetic oligonucleotide
  Sense strand starting at position 2445 of SEQ ID NO: 317024
gcagucgcgcuguaaguaa

SEQ ID NO: 458528 - RNA, 19 nt, Artificial Sequence
  Description of Artificial Sequence: Synthetic oligonucleotide
  Antisense Strand to SEQ ID NO: 458527
uuacuuacagcgcgacugc

SEQ ID NO: 458529 - RNA, 19 nt, Artificial Sequence
  Description of Artificial Sequence: Synthetic oligonucleotide
  Sense strand starting at position 2480 of SEQ ID NO: 317024
aagcccaguucggaagaau

SEQ ID NO: 458530 - RNA, 19 nt, Artificial Sequence
  Description of Artificial Sequence: Synthetic oligonucleotide
  Antisense Strand to SEQ ID NO: 458529
auucuuccgaacugggcuu

SEQ ID NO: 458531 - RNA, 19 nt, Artificial Sequence
  Description of Artificial Sequence: Synthetic oligonucleotide
  Sense strand starting at position 2483 of SEQ ID NO: 317024
cccaguucggaagaaucua

SEQ ID NO: 458532 - RNA, 19 nt, Artificial Sequence
  Description of Artificial Sequence: Synthetic oligonucleotide
  Antisense Strand to SEQ ID NO: 458531
uagauucuuccgaacuggg

SEQ ID NO: 458533 - RNA, 19 nt, Artificial Sequence
  Description of Artificial Sequence: Synthetic oligonucleotide
  Sense strand starting at position 2639 of SEQ ID NO: 317024
acaccuauguuuggacaaa

SEQ ID NO: 458534 - RNA, 19 nt, Artificial Sequence
  Description of Artificial Sequence: Synthetic oligonucleotide
  Antisense Strand to SEQ ID NO: 458533
uuuguccaaacauaggugu

SEQ ID NO: 458535 - RNA, 19 nt, Artificial Sequence
  Description of Artificial Sequence: Synthetic oligonucleotide
  Sense strand starting at position 2845 of SEQ ID NO: 317024
cugggcuucugcuccuaaa

SEQ ID NO: 458536 - RNA, 19 nt, Artificial Sequence
  Description of Artificial Sequence: Synthetic oligonucleotide
  Antisense Strand to SEQ ID NO: 458535
uuuaggagcagaagcccag

SEQ ID NO: 458537 - RNA, 19 nt, Artificial Sequence
  Description of Artificial Sequence: Synthetic oligonucleotide
  Sense strand starting at position 2855 of SEQ ID NO: 317024
gcuccuaaacgcguuuaau

SEQ ID NO: 458538 - RNA, 19 nt, Artificial Sequence
  Description of Artificial Sequence: Synthetic oligonucleotide
  Antisense Strand to SEQ ID NO: 458537
auuaaacgcguuuaggagc

SEQ ID NO: 458539 - RNA, 19 nt, Artificial Sequence
  Description of Artificial Sequence: Synthetic oligonucleotide
  Sense strand starting at position 2858 of SEQ ID NO: 317024
ccuaaacgcguuuaauuga

SEQ ID NO: 458540 - RNA, 19 nt, Artificial Sequence
  Description of Artificial Sequence: Synthetic oligonucleotide
  Antisense Strand to SEQ ID NO: 458539
ucaauuaaacgcguuuagg

SEQ ID NO: 458541 - RNA, 19 nt, Artificial Sequence
  Description of Artificial Sequence: Synthetic oligonucleotide
  Sense strand starting at position 2863 of SEQ ID NO: 317024
acgcguuuaauugaugauu

SEQ ID NO: 458542 - RNA, 19 nt, Artificial Sequence
  Description of Artificial Sequence: Synthetic oligonucleotide
  Antisense Strand to SEQ ID NO: 458541
aaucaucaauuaaacgcgu

SEQ ID NO: 458543 - RNA, 19 nt, Artificial Sequence
  Description of Artificial Sequence: Synthetic oligonucleotide
  Sense strand starting at position 2891 of SEQ ID NO: 317024
accgcauguucuucgcaaa

SEQ ID NO: 458544 - RNA, 19 nt, Artificial Sequence
  Description of Artificial Sequence: Synthetic oligonucleotide
  Antisense Strand to SEQ ID NO: 458543
uuugcgaagaacaugcggu

SEQ ID NO: 458545 - RNA, 19 nt, Artificial Sequence
  Description of Artificial Sequence: Synthetic oligonucleotide
  Sense strand starting at position 2892 of SEQ ID NO: 317024
ccgcauguucuucgcaaau

SEQ ID NO: 458546 - RNA, 19 nt, Artificial Sequence
  Description of Artificial Sequence: Synthetic oligonucleotide
  Antisense Strand to SEQ ID NO: 458545
auuugcgaagaacaugcgg

SEQ ID NO: 458547 - RNA, 19 nt, Artificial Sequence
  Description of Artificial Sequence: Synthetic oligonucleotide
  Sense strand starting at position 3701 of SEQ ID NO: 317024
gggcucggucccucguuaa

SEQ ID NO: 458548 - RNA, 19 nt, Artificial Sequence
  Description of Artificial Sequence: Synthetic oligonucleotide
  Antisense Strand to SEQ ID NO: 458547
uuaacgagggaccgagccc

SEQ ID NO: 458549 - RNA, 19 nt, Artificial Sequence
  Description of Artificial Sequence: Synthetic oligonucleotide
  Sense strand starting at position 3828 of SEQ ID NO: 317024
ccuagaaauucuugaggug

SEQ ID NO: 458550 - RNA, 19 nt, Artificial Sequence
  Description of Artificial Sequence: Synthetic oligonucleotide
  Antisense Strand to SEQ ID NO: 458549
caccucaagaauuucuagg

SEQ ID NO: 458551 - RNA, 19 nt, Artificial Sequence
  Description of Artificial Sequence: Synthetic oligonucleotide
  Sense strand starting at position 3829 of SEQ ID NO: 317024
cuagaaauucuugaggugu

SEQ ID NO: 458552 - RNA, 19 nt, Artificial Sequence
  Description of Artificial Sequence: Synthetic oligonucleotide
  Antisense Strand to SEQ ID NO: 458551
acaccucaagaauuucuag

SEQ ID NO: 458553 - RNA, 19 nt, Artificial Sequence
  Description of Artificial Sequence: Synthetic oligonucleotide
  Sense strand starting at position 3831 of SEQ ID NO: 317024
agaaauucuugaggugucu

SEQ ID NO: 458554 - RNA, 19 nt, Artificial Sequence
  Description of Artificial Sequence: Synthetic oligonucleotide
  Antisense Strand to SEQ ID NO: 458553
agacaccucaagaauuucu

SEQ ID NO: 458555 - RNA, 19 nt, Artificial Sequence
  Description of Artificial Sequence: Synthetic oligonucleotide
  Sense strand starting at position 3966 of SEQ ID NO: 317024
uggcuauuaagauguguca

SEQ ID NO: 458556 - RNA, 19 nt, Artificial Sequence
  Description of Artificial Sequence: Synthetic oligonucleotide
  Antisense Strand to SEQ ID NO: 458555
ugacacaucuuaauagcca

SEQ ID NO: 458557 - RNA, 19 nt, Artificial Sequence
  Description of Artificial Sequence: Synthetic oligonucleotide
  Sense strand starting at position 3977 of SEQ ID NO: 317024
augugucauuugggugaaa

SEQ ID NO: 458558 - RNA, 19 nt, Artificial Sequence
  Description of Artificial Sequence: Synthetic oligonucleotide
  Antisense Strand to SEQ ID NO: 458557
uuucacccaaaugacacau

SEQ ID NO: 458559 - RNA, 19 nt, Artificial Sequence
  Description of Artificial Sequence: Synthetic oligonucleotide
  Sense strand starting at position 88 of SEQ ID NO: 317025
agcagaaagucaucugauu

SEQ ID NO: 458560 - RNA, 19 nt, Artificial Sequence
  Description of Artificial Sequence: Synthetic oligonucleotide
  Antisense Strand to SEQ ID NO: 458559
aaucagaugacuuucugcu

SEQ ID NO: 458561 - RNA, 19 nt, Artificial Sequence
  Description of Artificial Sequence: Synthetic oligonucleotide
  Sense strand starting at position 97 of SEQ ID NO: 317025
ucaucugauuuacaaguga

SEQ ID NO: 458562 - RNA, 19 nt, Artificial Sequence
  Description of Artificial Sequence: Synthetic oligonucleotide
  Antisense Strand to SEQ ID NO: 458561
ucacuuguaaaucagauga

SEQ ID NO: 458563 - RNA, 19 nt, Artificial Sequence
  Description of Artificial Sequence: Synthetic oligonucleotide
  Sense strand starting at position 441 of SEQ ID NO: 317025
accguaaguaaaugagacu

SEQ ID NO: 458564 - RNA, 19 nt, Artificial Sequence
  Description of Artificial Sequence: Synthetic oligonucleotide
  Antisense Strand to SEQ ID NO: 458563
agucucauuuacuuacggu

SEQ ID NO: 458565 - RNA, 19 nt, Artificial Sequence
  Description of Artificial Sequence: Synthetic oligonucleotide
  Sense strand starting at position 458 of SEQ ID NO: 317025
cuaagaucuuugggauaaa

SEQ ID NO: 458566 - RNA, 19 nt, Artificial Sequence
  Description of Artificial Sequence: Synthetic oligonucleotide
  Antisense Strand to SEQ ID NO: 458565
uuuaucccaaagaucuuag

SEQ ID NO: 458567 - RNA, 19 nt, Artificial Sequence
  Description of Artificial Sequence: Synthetic oligonucleotide
  Sense strand starting at position 495 of SEQ ID NO: 317025
gguugcauguacuugcuaa

SEQ ID NO: 458568 - RNA, 19 nt, Artificial Sequence
  Description of Artificial Sequence: Synthetic oligonucleotide
  Antisense Strand to SEQ ID NO: 458567
uuagcaaguacaugcaacc

SEQ ID NO: 458569 - RNA, 19 nt, Artificial Sequence
  Description of Artificial Sequence: Synthetic oligonucleotide
  Sense strand starting at position 496 of SEQ ID NO: 317025
guugcauguacuugcuaag

SEQ ID NO: 458570 - RNA, 19 nt, Artificial Sequence
  Description of Artificial Sequence: Synthetic oligonucleotide
  Antisense Strand to SEQ ID NO: 458569
cuuagcaaguacaugcaac

SEQ ID NO: 458571 - RNA, 19 nt, Artificial Sequence
  Description of Artificial Sequence: Synthetic oligonucleotide
  Sense strand starting at position 505 of SEQ ID NO: 317025
acuugcuaagaguguuacu

SEQ ID NO: 458572 - RNA, 19 nt, Artificial Sequence
  Description of Artificial Sequence: Synthetic oligonucleotide
  Antisense Strand to SEQ ID NO: 458571
aguaacacucuuagcaagu

SEQ ID NO: 458573 - RNA, 19 nt, Artificial Sequence
  Description of Artificial Sequence: Synthetic oligonucleotide
  Sense strand starting at position 510 of SEQ ID NO: 317025
cuaagaguguuacucacaa

SEQ ID NO: 458574 - RNA, 19 nt, Artificial Sequence
  Description of Artificial Sequence: Synthetic oligonucleotide
  Antisense Strand to SEQ ID NO: 458573
uugugaguaacacucuuag

SEQ ID NO: 458575 - RNA, 19 nt, Artificial Sequence
  Description of Artificial Sequence: Synthetic oligonucleotide
  Sense strand starting at position 599 of SEQ ID NO: 317025
caaugcaaguauggacaua

SEQ ID NO: 458576 - RNA, 19 nt, Artificial Sequence
  Description of Artificial Sequence: Synthetic oligonucleotide
  Antisense Strand to SEQ ID NO: 458575
uauguccauacuugcauug

SEQ ID NO: 458577 - RNA, 19 nt, Artificial Sequence
  Description of Artificial Sequence: Synthetic oligonucleotide
  Sense strand starting at position 651 of SEQ ID NO: 317025
gugauuaaaucuugaucag

SEQ ID NO: 458578 - RNA, 19 nt, Artificial Sequence
  Description of Artificial Sequence: Synthetic oligonucleotide
  Antisense Strand to SEQ ID NO: 458577
cugaucaagauuuaaucac

SEQ ID NO: 458579 - RNA, 19 nt, Artificial Sequence
  Description of Artificial Sequence: Synthetic oligonucleotide
  Sense strand starting at position 654 of SEQ ID NO: 317025
auuaaaucuugaucaguug

SEQ ID NO: 458580 - RNA, 19 nt, Artificial Sequence
  Description of Artificial Sequence: Synthetic oligonucleotide
  Antisense Strand to SEQ ID NO: 458579
caacugaucaagauuuaau

SEQ ID NO: 458581 - RNA, 19 nt, Artificial Sequence
  Description of Artificial Sequence: Synthetic oligonucleotide
  Sense strand starting at position 657 of SEQ ID NO: 317025
aaaucuugaucaguuguga

SEQ ID NO: 458582 - RNA, 19 nt, Artificial Sequence
  Description of Artificial Sequence: Synthetic oligonucleotide
  Antisense Strand to SEQ ID NO: 458581
ucacaacugaucaagauuu

SEQ ID NO: 458583 - RNA, 19 nt, Artificial Sequence
  Description of Artificial Sequence: Synthetic oligonucleotide
  Sense strand starting at position 661 of SEQ ID NO: 317025
cuugaucaguugugauaug

SEQ ID NO: 458584 - RNA, 19 nt, Artificial Sequence
  Description of Artificial Sequence: Synthetic oligonucleotide
  Antisense Strand to SEQ ID NO: 458583
cauaucacaacugaucaag

SEQ ID NO: 458585 - RNA, 19 nt, Artificial Sequence
  Description of Artificial Sequence: Synthetic oligonucleotide
  Sense strand starting at position 662 of SEQ ID NO: 317025
uugaucaguugugauauga

SEQ ID NO: 458586 - RNA, 19 nt, Artificial Sequence
  Description of Artificial Sequence: Synthetic oligonucleotide
  Antisense Strand to SEQ ID NO: 458585
ucauaucacaacugaucaa

SEQ ID NO: 458587 - RNA, 19 nt, Artificial Sequence
  Description of Artificial Sequence: Synthetic oligonucleotide
  Sense strand starting at position 717 of SEQ ID NO: 317025
gggagucacuaccuaaauc

SEQ ID NO: 458588 - RNA, 19 nt, Artificial Sequence
  Description of Artificial Sequence: Synthetic oligonucleotide
  Antisense Strand to SEQ ID NO: 458587
gauuuagguagugacuccc

SEQ ID NO: 458589 - RNA, 19 nt, Artificial Sequence
  Description of Artificial Sequence: Synthetic oligonucleotide
  Sense strand starting at position 784 of SEQ ID NO: 317025
uuugaaagguauuagccuu

SEQ ID NO: 458590 - RNA, 19 nt, Artificial Sequence
  Description of Artificial Sequence: Synthetic oligonucleotide
  Antisense Strand to SEQ ID NO: 458589
aaggcuaauaccuuucaaa

SEQ ID NO: 458591 - RNA, 19 nt, Artificial Sequence
  Description of Artificial Sequence: Synthetic oligonucleotide
  Sense strand starting at position 790 of SEQ ID NO: 317025
agguauuagccuugagcua

SEQ ID NO: 458592 - RNA, 19 nt, Artificial Sequence
  Description of Artificial Sequence: Synthetic oligonucleotide
  Antisense Strand to SEQ ID NO: 458591
uagcucaaggcuaauaccu

SEQ ID NO: 458593 - RNA, 19 nt, Artificial Sequence
  Description of Artificial Sequence: Synthetic oligonucleotide
  Sense strand starting at position 791 of SEQ ID NO: 317025
gguauuagccuugagcuac

SEQ ID NO: 458594 - RNA, 19 nt, Artificial Sequence
  Description of Artificial Sequence: Synthetic oligonucleotide
  Antisense Strand to SEQ ID NO: 458593
guagcucaaggcuaauacc

SEQ ID NO: 458595 - RNA, 19 nt, Artificial Sequence
  Description of Artificial Sequence: Synthetic oligonucleotide
  Sense strand starting at position 827 of SEQ ID NO: 317025
gccuucauggcggguauua

SEQ ID NO: 458596 - RNA, 19 nt, Artificial Sequence
  Description of Artificial Sequence: Synthetic oligonucleotide
  Antisense Strand to SEQ ID NO: 458595
uaauacccgccaugaaggc

SEQ ID NO: 458597 - RNA, 19 nt, Artificial Sequence
  Description of Artificial Sequence: Synthetic oligonucleotide
  Sense strand starting at position 829 of SEQ ID NO: 317025
cuucauggcggguauuaua

SEQ ID NO: 458598 - RNA, 19 nt, Artificial Sequence
  Description of Artificial Sequence: Synthetic oligonucleotide
  Antisense Strand to SEQ ID NO: 458597
uauaauacccgccaugaag

SEQ ID NO: 458599 - RNA, 19 nt, Artificial Sequence
  Description of Artificial Sequence: Synthetic oligonucleotide
  Sense strand starting at position 1069 of SEQ ID NO: 317025
cagcccucucguuacuaga

SEQ ID NO: 458600 - RNA, 19 nt, Artificial Sequence
  Description of Artificial Sequence: Synthetic oligonucleotide
  Antisense Strand to SEQ ID NO: 458599
ucuaguaacgagagggcug

SEQ ID NO: 458601 - RNA, 19 nt, Artificial Sequence
  Description of Artificial Sequence: Synthetic oligonucleotide
  Sense strand starting at position 1155 of SEQ ID NO: 317025
uguuuaaaucgcccgcuuu

SEQ ID NO: 458602 - RNA, 19 nt, Artificial Sequence
  Description of Artificial Sequence: Synthetic oligonucleotide
  Antisense Strand to SEQ ID NO: 458601
aaagcgggcgauuuaaaca

SEQ ID NO: 458603 - RNA, 19 nt, Artificial Sequence
  Description of Artificial Sequence: Synthetic oligonucleotide
  Sense strand starting at position 1365 of SEQ ID NO: 317025
acgugagaaggcuaaggau

SEQ ID NO: 458604 - RNA, 19 nt, Artificial Sequence
  Description of Artificial Sequence: Synthetic oligonucleotide
  Antisense Strand to SEQ ID NO: 458603
auccuuagccuucucacgu

SEQ ID NO: 458605 - RNA, 19 nt, Artificial Sequence
  Description of Artificial Sequence: Synthetic oligonucleotide
  Sense strand starting at position 1995 of SEQ ID NO: 317025
guguaucaccucugucaca

SEQ ID NO: 458606 - RNA, 19 nt, Artificial Sequence
  Description of Artificial Sequence: Synthetic oligonucleotide
  Antisense Strand to SEQ ID NO: 458605
ugugacagaggugauacac

SEQ ID NO: 458607 - RNA, 19 nt, Artificial Sequence
  Description of Artificial Sequence: Synthetic oligonucleotide
  Sense strand starting at position 2438 of SEQ ID NO: 317025
ucaccuauuaccgguggga

SEQ ID NO: 458608 - RNA, 19 nt, Artificial Sequence
  Description of Artificial Sequence: Synthetic oligonucleotide
  Antisense Strand to SEQ ID NO: 458607
ucccaccgguaauagguga

SEQ ID NO: 458609 - RNA, 19 nt, Artificial Sequence
  Description of Artificial Sequence: Synthetic oligonucleotide
  Sense strand starting at position 2940 of SEQ ID NO: 317025
ucacgauuaaucgguacuu

SEQ ID NO: 458610 - RNA, 19 nt, Artificial Sequence
  Description of Artificial Sequence: Synthetic oligonucleotide
  Antisense Strand to SEQ ID NO: 458609
aaguaccgauuaaucguga

SEQ ID NO: 458611 - RNA, 19 nt, Artificial Sequence
  Description of Artificial Sequence: Synthetic oligonucleotide
  Sense strand starting at position 2941 of SEQ ID NO: 317025
cacgauuaaucgguacuuu

SEQ ID NO: 458612 - RNA, 19 nt, Artificial Sequence
  Description of Artificial Sequence: Synthetic oligonucleotide
  Antisense Strand to SEQ ID NO: 458611
aaaguaccgauuaaucgug

SEQ ID NO: 458613 - RNA, 19 nt, Artificial Sequence
  Description of Artificial Sequence: Synthetic oligonucleotide
  Sense strand starting at position 2942 of SEQ ID NO: 317025
acgauuaaucgguacuuug

SEQ ID NO: 458614 - RNA, 19 nt, Artificial Sequence
  Description of Artificial Sequence: Synthetic oligonucleotide
  Antisense Strand to SEQ ID NO: 458613
caaaguaccgauuaaucgu

SEQ ID NO: 458615 - RNA, 19 nt, Artificial Sequence
  Description of Artificial Sequence: Synthetic oligonucleotide
  Sense strand starting at position 2952 of SEQ ID NO: 317025
gguacuuugcucuaccaac

SEQ ID NO: 458616 - RNA, 19 nt, Artificial Sequence
  Description of Artificial Sequence: Synthetic oligonucleotide
  Antisense Strand to SEQ ID NO: 458615
guugguagagcaaaguacc

SEQ ID NO: 458617 - RNA, 19 nt, Artificial Sequence
  Description of Artificial Sequence: Synthetic oligonucleotide
  Sense strand starting at position 3018 of SEQ ID NO: 317025
agcagucgcgcuguaagua

SEQ ID NO: 458618 - RNA, 19 nt, Artificial Sequence
  Description of Artificial Sequence: Synthetic oligonucleotide
  Antisense Strand to SEQ ID NO: 458617
uacuuacagcgcgacugcu

SEQ ID NO: 458619 - RNA, 19 nt, Artificial Sequence
  Description of Artificial Sequence: Synthetic oligonucleotide
  Sense strand starting at position 3019 of SEQ ID NO: 317025
gcagucgcgcuguaaguaa

SEQ ID NO: 458620 - RNA, 19 nt, Artificial Sequence
  Description of Artificial Sequence: Synthetic oligonucleotide
  Antisense Strand to SEQ ID NO: 458619
uuacuuacagcgcgacugc

SEQ ID NO: 458621 - RNA, 19 nt, Artificial Sequence
  Description of Artificial Sequence: Synthetic oligonucleotide
  Sense strand starting at position 3054 of SEQ ID NO: 317025
aagcccaguucggaagaau

SEQ ID NO: 458622 - RNA, 19 nt, Artificial Sequence
  Description of Artificial Sequence: Synthetic oligonucleotide
  Antisense Strand to SEQ ID NO: 458621
auucuuccgaacugggcuu

SEQ ID NO: 458623 - RNA, 19 nt, Artificial Sequence
  Description of Artificial Sequence: Synthetic oligonucleotide
  Sense strand starting at position 3057 of SEQ ID NO: 317025
cccaguucggaagaaucua

SEQ ID NO: 458624 - RNA, 19 nt, Artificial Sequence
  Description of Artificial Sequence: Synthetic oligonucleotide
  Antisense Strand to SEQ ID NO: 458623
uagauucuuccgaacuggg

SEQ ID NO: 458625 - RNA, 19 nt, Artificial Sequence
  Description of Artificial Sequence: Synthetic oligonucleotide
  Sense strand starting at position 3213 of SEQ ID NO: 317025
acaccuauguuuggacaaa

SEQ ID NO: 458626 - RNA, 19 nt, Artificial Sequence
  Description of Artificial Sequence: Synthetic oligonucleotide
  Antisense Strand to SEQ ID NO: 458625
uuuguccaaacauaggugu

SEQ ID NO: 458627 - RNA, 19 nt, Artificial Sequence
  Description of Artificial Sequence: Synthetic oligonucleotide
  Sense strand starting at position 3419 of SEQ ID NO: 317025
cugggcuucugcuccuaaa

SEQ ID NO: 458628 - RNA, 19 nt, Artificial Sequence
  Description of Artificial Sequence: Synthetic oligonucleotide
  Antisense Strand to SEQ ID NO: 458627
uuuaggagcagaagcccag

SEQ ID NO: 458629 - RNA, 19 nt, Artificial Sequence
  Description of Artificial Sequence: Synthetic oligonucleotide
  Sense strand starting at position 3429 of SEQ ID NO: 317025
gcuccuaaacgcguuuaau

SEQ ID NO: 458630 - RNA, 19 nt, Artificial Sequence
  Description of Artificial Sequence: Synthetic oligonucleotide
  Antisense Strand to SEQ ID NO: 458629
auuaaacgcguuuaggagc

SEQ ID NO: 458631 - RNA, 19 nt, Artificial Sequence
  Description of Artificial Sequence: Synthetic oligonucleotide
  Sense strand starting at position 3432 of SEQ ID NO: 317025
ccuaaacgcguuuaauuga

SEQ ID NO: 458632 - RNA, 19 nt, Artificial Sequence
  Description of Artificial Sequence: Synthetic oligonucleotide
  Antisense Strand to SEQ ID NO: 458631
ucaauuaaacgcguuuagg

SEQ ID NO: 458633 - RNA, 19 nt, Artificial Sequence
  Description of Artificial Sequence: Synthetic oligonucleotide
  Sense strand starting at position 3437 of SEQ ID NO: 317025
acgcguuuaauugaugauu

SEQ ID NO: 458634 - RNA, 19 nt, Artificial Sequence
  Description of Artificial Sequence: Synthetic oligonucleotide
  Antisense Strand to SEQ ID NO: 458633
aaucaucaauuaaacgcgu

SEQ ID NO: 458635 - RNA, 19 nt, Artificial Sequence
  Description of Artificial Sequence: Synthetic oligonucleotide
  Sense strand starting at position 3465 of SEQ ID NO: 317025
accgcauguucuucgcaaa

SEQ ID NO: 458636 - RNA, 19 nt, Artificial Sequence
  Description of Artificial Sequence: Synthetic oligonucleotide
  Antisense Strand to SEQ ID NO: 458635
uuugcgaagaacaugcggu

SEQ ID NO: 458637 - RNA, 19 nt, Artificial Sequence
  Description of Artificial Sequence: Synthetic oligonucleotide
  Sense strand starting at position 3466 of SEQ ID NO: 317025
ccgcauguucuucgcaaau

SEQ ID NO: 458638 - RNA, 19 nt, Artificial Sequence
  Description of Artificial Sequence: Synthetic oligonucleotide
  Antisense Strand to SEQ ID NO: 458637
auuugcgaagaacaugcgg

SEQ ID NO: 458639 - RNA, 19 nt, Artificial Sequence
  Description of Artificial Sequence: Synthetic oligonucleotide
  Sense strand starting at position 1308 of SEQ ID NO: 317026
gcggaauccggagaagagu

SEQ ID NO: 458640 - RNA, 19 nt, Artificial Sequence
  Description of Artificial Sequence: Synthetic oligonucleotide
  Antisense Strand to SEQ ID NO: 458639
acucuucuccggauuccgc

SEQ ID NO: 458641 - RNA, 19 nt, Artificial Sequence
  Description of Artificial Sequence: Synthetic oligonucleotide
  Sense strand starting at position 1314 of SEQ ID NO: 317026
uccggagaagaguggaaau

SEQ ID NO: 458642 - RNA, 19 nt, Artificial Sequence
  Description of Artificial Sequence: Synthetic oligonucleotide
  Antisense Strand to SEQ ID NO: 458641
auuuccacucuucuccgga

SEQ ID NO: 458643 - RNA, 19 nt, Artificial Sequence
  Description of Artificial Sequence: Synthetic oligonucleotide
  Sense strand starting at position 2373 of SEQ ID NO: 317026
ggccgucaguggucaggaa

SEQ ID NO: 458644 - RNA, 19 nt, Artificial Sequence
  Description of Artificial Sequence: Synthetic oligonucleotide
  Antisense Strand to SEQ ID NO: 458643
uuccugaccacugacggcc

SEQ ID NO: 458645 - RNA, 19 nt, Artificial Sequence
  Description of Artificial Sequence: Synthetic oligonucleotide
  Sense strand starting at position 2430 of SEQ ID NO: 317026
gcaugagaggucugaaggu

SEQ ID NO: 458646 - RNA, 19 nt, Artificial Sequence
  Description of Artificial Sequence: Synthetic oligonucleotide
  Antisense Strand to SEQ ID NO: 458645
accuucagaccucucaugc

SEQ ID NO: 458647 - RNA, 19 nt, Artificial Sequence
  Description of Artificial Sequence: Synthetic oligonucleotide
  Sense strand starting at position 2439 of SEQ ID NO: 317026
gucugaaggucagagguua

SEQ ID NO: 458648 - RNA, 19 nt, Artificial Sequence
  Description of Artificial Sequence: Synthetic oligonucleotide
  Antisense Strand to SEQ ID NO: 458647
uaaccucugaccuucagac

SEQ ID NO: 458649 - RNA, 19 nt, Artificial Sequence
  Description of Artificial Sequence: Synthetic oligonucleotide
  Sense strand starting at position 2556 of SEQ ID NO: 317026
gccacaucagcaggucaua

SEQ ID NO: 458650 - RNA, 19 nt, Artificial Sequence
  Description of Artificial Sequence: Synthetic oligonucleotide
  Antisense Strand to SEQ ID NO: 458649
uaugaccugcugauguggc

SEQ ID NO: 458651 - RNA, 19 nt, Artificial Sequence
  Description of Artificial Sequence: Synthetic oligonucleotide
  Sense strand starting at position 2565 of SEQ ID NO: 317026
gcaggucauagccaaauga

SEQ ID NO: 458652 - RNA, 19 nt, Artificial Sequence
  Description of Artificial Sequence: Synthetic oligonucleotide
  Antisense Strand to SEQ ID NO: 458651
ucauuuggcuaugaccugc

SEQ ID NO: 458653 - RNA, 19 nt, Artificial Sequence
  Description of Artificial Sequence: Synthetic oligonucleotide
  Sense strand starting at position 2748 of SEQ ID NO: 317026
agagcuuacuuucuagcaa

SEQ ID NO: 458654 - RNA, 19 nt, Artificial Sequence
  Description of Artificial Sequence: Synthetic oligonucleotide
  Antisense Strand to SEQ ID NO: 458653
uugcuagaaaguaagcucu

SEQ ID NO: 458655 - RNA, 19 nt, Artificial Sequence
  Description of Artificial Sequence: Synthetic oligonucleotide
  Sense strand starting at position 2823 of SEQ ID NO: 317026
ugcugugaacgggacauau

SEQ ID NO: 458656 - RNA, 19 nt, Artificial Sequence
  Description of Artificial Sequence: Synthetic oligonucleotide
  Antisense Strand to SEQ ID NO: 458655
auaugucccguucacagca

SEQ ID NO: 458657 - RNA, 19 nt, Artificial Sequence
  Description of Artificial Sequence: Synthetic oligonucleotide
  Sense strand starting at position 2834 of SEQ ID NO: 317026
ggacauauuugagaaucug

SEQ ID NO: 458658 - RNA, 19 nt, Artificial Sequence
  Description of Artificial Sequence: Synthetic oligonucleotide
  Antisense Strand to SEQ ID NO: 458657
cagauucucaaauaugucc

SEQ ID NO: 458659 - RNA, 19 nt, Artificial Sequence
  Description of Artificial Sequence: Synthetic oligonucleotide
  Sense strand starting at position 2949 of SEQ ID NO: 317026
gcgagaguuuggagacugu

SEQ ID NO: 458660 - RNA, 19 nt, Artificial Sequence
  Description of Artificial Sequence: Synthetic oligonucleotide
  Antisense Strand to SEQ ID NO: 458659
acagucuccaaacucucgc

SEQ ID NO: 458661 - RNA, 19 nt, Artificial Sequence
  Description of Artificial Sequence: Synthetic oligonucleotide
  Sense strand starting at position 2960 of SEQ ID NO: 317026
gagacugucucaccuggaa

SEQ ID NO: 458662 - RNA, 19 nt, Artificial Sequence
  Description of Artificial Sequence: Synthetic oligonucleotide
  Antisense Strand to SEQ ID NO: 458661
uuccaggugagacagucuc

SEQ ID NO: 458663 - RNA, 19 nt, Artificial Sequence
  Description of Artificial Sequence: Synthetic oligonucleotide
  Sense strand starting at position 2987 of SEQ ID NO: 317026
cauggaccauugucagauu

SEQ ID NO: 458664 - RNA, 19 nt, Artificial Sequence
  Description of Artificial Sequence: Synthetic oligonucleotide
  Antisense Strand to SEQ ID NO: 458663
aaucugacaaugguccaug

SEQ ID NO: 458665 - RNA, 19 nt, Artificial Sequence
  Description of Artificial Sequence: Synthetic oligonucleotide
  Sense strand starting at position 2990 of SEQ ID NO: 317026
ggaccauugucagauugau

SEQ ID NO: 458666 - RNA, 19 nt, Artificial Sequence
  Description of Artificial Sequence: Synthetic oligonucleotide
  Antisense Strand to SEQ ID NO: 458665
aucaaucugacaauggucc

SEQ ID NO: 458667 - RNA, 19 nt, Artificial Sequence
  Description of Artificial Sequence: Synthetic oligonucleotide
  Sense strand starting at position 3038 of SEQ ID NO: 317026
cuauguuagccacaguaac

SEQ ID NO: 458668 - RNA, 19 nt, Artificial Sequence
  Description of Artificial Sequence: Synthetic oligonucleotide
  Antisense Strand to SEQ ID NO: 458667
guuacuguggcuaacauag

SEQ ID NO: 458669 - RNA, 19 nt, Artificial Sequence
  Description of Artificial Sequence: Synthetic oligonucleotide
  Sense strand starting at position 3076 of SEQ ID NO: 317026
uggugugucuugcccacau

SEQ ID NO: 458670 - RNA, 19 nt, Artificial Sequence
  Description of Artificial Sequence: Synthetic oligonucleotide
  Antisense Strand to SEQ ID NO: 458669
augugggcaagacacacca

SEQ ID NO: 458671 - RNA, 19 nt, Artificial Sequence
  Description of Artificial Sequence: Synthetic oligonucleotide
  Sense strand starting at position 3078 of SEQ ID NO: 317026
gugugucuugcccacauca

SEQ ID NO: 458672 - RNA, 19 nt, Artificial Sequence
  Description of Artificial Sequence: Synthetic oligonucleotide
  Antisense Strand to SEQ ID NO: 458671
ugaugugggcaagacacac

SEQ ID NO: 458673 - RNA, 19 nt, Artificial Sequence
  Description of Artificial Sequence: Synthetic oligonucleotide
  Sense strand starting at position 3080 of SEQ ID NO: 317026
gugucuugcccacaucaua

SEQ ID NO: 458674 - RNA, 19 nt, Artificial Sequence
  Description of Artificial Sequence: Synthetic oligonucleotide
  Antisense Strand to SEQ ID NO: 458673
uaugaugugggcaagacac

SEQ ID NO: 458675 - RNA, 19 nt, Artificial Sequence
  Description of Artificial Sequence: Synthetic oligonucleotide
  Sense strand starting at position 3118 of SEQ ID NO: 317026
gggcucuguucaucagagu

SEQ ID NO: 458676 - RNA, 19 nt, Artificial Sequence
  Description of Artificial Sequence: Synthetic oligonucleotide
  Antisense Strand to SEQ ID NO: 458675
acucugaugaacagagccc

SEQ ID NO: 458677 - RNA, 19 nt, Artificial Sequence
  Description of Artificial Sequence: Synthetic oligonucleotide
  Sense strand starting at position 3269 of SEQ ID NO: 317026
cguuucauuggccagagca

SEQ ID NO: 458678 - RNA, 19 nt, Artificial Sequence
  Description of Artificial Sequence: Synthetic oligonucleotide
  Antisense Strand to SEQ ID NO: 458677
ugcucuggccaaugaaacg

SEQ ID NO: 458679 - RNA, 19 nt, Artificial Sequence
  Description of Artificial Sequence: Synthetic oligonucleotide
  Sense strand starting at position 3361 of SEQ ID NO: 317026
uaggauaucugugagcaga

SEQ ID NO: 458680 - RNA, 19 nt, Artificial Sequence
  Description of Artificial Sequence: Synthetic oligonucleotide
  Antisense Strand to SEQ ID NO: 458679
ucugcucacagauauccua

SEQ ID NO: 458681 - RNA, 19 nt, Artificial Sequence
  Description of Artificial Sequence: Synthetic oligonucleotide
  Sense strand starting at position 3363 of SEQ ID NO: 317026
ggauaucugugagcagaug

SEQ ID NO: 458682 - RNA, 19 nt, Artificial Sequence
  Description of Artificial Sequence: Synthetic oligonucleotide
  Antisense Strand to SEQ ID NO: 458681
caucugcucacagauaucc

SEQ ID NO: 458683 - RNA, 19 nt, Artificial Sequence
  Description of Artificial Sequence: Synthetic oligonucleotide
  Sense strand starting at position 3364 of SEQ ID NO: 317026
gauaucugugagcagaugu

SEQ ID NO: 458684 - RNA, 19 nt, Artificial Sequence
  Description of Artificial Sequence: Synthetic oligonucleotide
  Antisense Strand to SEQ ID NO: 458683
acaucugcucacagauauc

SEQ ID NO: 458685 - RNA, 19 nt, Artificial Sequence
  Description of Artificial Sequence: Synthetic oligonucleotide
  Sense strand starting at position 3381 of SEQ ID NO: 317026
gugagacuaucuuuagcag

SEQ ID NO: 458686 - RNA, 19 nt, Artificial Sequence
  Description of Artificial Sequence: Synthetic oligonucleotide
  Antisense Strand to SEQ ID NO: 458685
cugcuaaagauagucucac

SEQ ID NO: 458687 - RNA, 19 nt, Artificial Sequence
  Description of Artificial Sequence: Synthetic oligonucleotide
  Sense strand starting at position 3384 of SEQ ID NO: 317026
agacuaucuuuagcagaug

SEQ ID NO: 458688 - RNA, 19 nt, Artificial Sequence
  Description of Artificial Sequence: Synthetic oligonucleotide
  Antisense Strand to SEQ ID NO: 458687
caucugcuaaagauagucu

SEQ ID NO: 458689 - RNA, 19 nt, Artificial Sequence
  Description of Artificial Sequence: Synthetic oligonucleotide
  Sense strand starting at position 3425 of SEQ ID NO: 317026
ggcugaaguagucaagagu

SEQ ID NO: 458690 - RNA, 19 nt, Artificial Sequence
  Description of Artificial Sequence: Synthetic oligonucleotide
  Antisense Strand to SEQ ID NO: 458689
acucuugacuacuucagcc

SEQ ID NO: 458691 - RNA, 19 nt, Artificial Sequence
  Description of Artificial Sequence: Synthetic oligonucleotide
  Sense strand starting at position 3477 of SEQ ID NO: 317026
cgcugauacagugaaguau

SEQ ID NO: 458692 - RNA, 19 nt, Artificial Sequence
  Description of Artificial Sequence: Synthetic oligonucleotide
  Antisense Strand to SEQ ID NO: 458691
auacuucacuguaucagcg

SEQ ID NO: 458693 - RNA, 19 nt, Artificial Sequence
  Description of Artificial Sequence: Synthetic oligonucleotide
  Sense strand starting at position 3489 of SEQ ID NO: 317026
gaaguaucagcgcaucaga

SEQ ID NO: 458694 - RNA, 19 nt, Artificial Sequence
  Description of Artificial Sequence: Synthetic oligonucleotide
  Antisense Strand to SEQ ID NO: 458693
ucugaugcgcugauacuuc

SEQ ID NO: 458695 - RNA, 19 nt, Artificial Sequence
  Description of Artificial Sequence: Synthetic oligonucleotide
  Sense strand starting at position 3505 of SEQ ID NO: 317026
agagcaaucugggugcaga

SEQ ID NO: 458696 - RNA, 19 nt, Artificial Sequence
  Description of Artificial Sequence: Synthetic oligonucleotide
  Antisense Strand to SEQ ID NO: 458695
ucugcacccagauugcucu

SEQ ID NO: 458697 - RNA, 19 nt, Artificial Sequence
  Description of Artificial Sequence: Synthetic oligonucleotide
  Sense strand starting at position 3506 of SEQ ID NO: 317026
gagcaaucugggugcagaa

SEQ ID NO: 458698 - RNA, 19 nt, Artificial Sequence
  Description of Artificial Sequence: Synthetic oligonucleotide
  Antisense Strand to SEQ ID NO: 458697
uucugcacccagauugcuc

SEQ ID NO: 458699 - RNA, 19 nt, Artificial Sequence
  Description of Artificial Sequence: Synthetic oligonucleotide
  Sense strand starting at position 3508 of SEQ ID NO: 317026
gcaaucugggugcagaauu

SEQ ID NO: 458700 - RNA, 19 nt, Artificial Sequence
  Description of Artificial Sequence: Synthetic oligonucleotide
  Antisense Strand to SEQ ID NO: 458699
aauucugcacccagauugc

SEQ ID NO: 458701 - RNA, 19 nt, Artificial Sequence
  Description of Artificial Sequence: Synthetic oligonucleotide
  Sense strand starting at position 3519 of SEQ ID NO: 317026
gcagaauuggcaggacaug

SEQ ID NO: 458702 - RNA, 19 nt, Artificial Sequence
  Description of Artificial Sequence: Synthetic oligonucleotide
  Antisense Strand to SEQ ID NO: 458701
cauguccugccaauucugc

SEQ ID NO: 458703 - RNA, 19 nt, Artificial Sequence
  Description of Artificial Sequence: Synthetic oligonucleotide
  Sense strand starting at position 3590 of SEQ ID NO: 317026
ccagguauccugggaugaa

SEQ ID NO: 458704 - RNA, 19 nt, Artificial Sequence
  Description of Artificial Sequence: Synthetic oligonucleotide
  Antisense Strand to SEQ ID NO: 458703
uucaucccaggauaccugg

SEQ ID NO: 458705 - RNA, 19 nt, Artificial Sequence
  Description of Artificial Sequence: Synthetic oligonucleotide
  Sense strand starting at position 3591 of SEQ ID NO: 317026
cagguauccugggaugaau

SEQ ID NO: 458706 - RNA, 19 nt, Artificial Sequence
  Description of Artificial Sequence: Synthetic oligonucleotide
  Antisense Strand to SEQ ID NO: 458705
auucaucccaggauaccug

SEQ ID NO: 458707 - RNA, 19 nt, Artificial Sequence
  Description of Artificial Sequence: Synthetic oligonucleotide
  Sense strand starting at position 3593 of SEQ ID NO: 317026
gguauccugggaugaauug

SEQ ID NO: 458708 - RNA, 19 nt, Artificial Sequence
  Description of Artificial Sequence: Synthetic oligonucleotide
  Antisense Strand to SEQ ID NO: 458707
caauucaucccaggauacc

SEQ ID NO: 458709 - RNA, 19 nt, Artificial Sequence
  Description of Artificial Sequence: Synthetic oligonucleotide
  Sense strand starting at position 3694 of SEQ ID NO: 317026
uggaaauagggucguugua

SEQ ID NO: 458710 - RNA, 19 nt, Artificial Sequence
  Description of Artificial Sequence: Synthetic oligonucleotide
  Antisense Strand to SEQ ID NO: 458709
uacaacgacccuauuucca

SEQ ID NO: 458711 - RNA, 19 nt, Artificial Sequence
  Description of Artificial Sequence: Synthetic oligonucleotide
  Sense strand starting at position 3696 of SEQ ID NO: 317026
gaaauagggucguuguaga

SEQ ID NO: 458712 - RNA, 19 nt, Artificial Sequence
  Description of Artificial Sequence: Synthetic oligonucleotide
  Antisense Strand to SEQ ID NO: 458711
ucuacaacgacccuauuuc

SEQ ID NO: 458713 - RNA, 19 nt, Artificial Sequence
  Description of Artificial Sequence: Synthetic oligonucleotide
  Sense strand starting at position 3701 of SEQ ID NO: 317026
agggucguuguagauguaa

SEQ ID NO: 458714 - RNA, 19 nt, Artificial Sequence
  Description of Artificial Sequence: Synthetic oligonucleotide
  Antisense Strand to SEQ ID NO: 458713
uuacaucuacaacgacccu

SEQ ID NO: 458715 - RNA, 19 nt, Artificial Sequence
  Description of Artificial Sequence: Synthetic oligonucleotide
  Sense strand starting at position 3703 of SEQ ID NO: 317026
ggucguuguagauguaauu

SEQ ID NO: 458716 - RNA, 19 nt, Artificial Sequence
  Description of Artificial Sequence: Synthetic oligonucleotide
  Antisense Strand to SEQ ID NO: 458715
aauuacaucuacaacgacc

SEQ ID NO: 458717 - RNA, 19 nt, Artificial Sequence
  Description of Artificial Sequence: Synthetic oligonucleotide
  Sense strand starting at position 3829 of SEQ ID NO: 317026
ccgugugaacaugaaggua

SEQ ID NO: 458718 - RNA, 19 nt, Artificial Sequence
  Description of Artificial Sequence: Synthetic oligonucleotide
  Antisense Strand to SEQ ID NO: 458717
uaccuucauguucacacgg

SEQ ID NO: 458719 - RNA, 19 nt, Artificial Sequence
  Description of Artificial Sequence: Synthetic oligonucleotide
  Sense strand starting at position 52 of SEQ ID NO: 317027
uuaggauugcccuaucaga

SEQ ID NO: 458720 - RNA, 19 nt, Artificial Sequence
  Description of Artificial Sequence: Synthetic oligonucleotide
  Antisense Strand to SEQ ID NO: 458719
ucugauagggcaauccuaa

SEQ ID NO: 458721 - RNA, 19 nt, Artificial Sequence
  Description of Artificial Sequence: Synthetic oligonucleotide
  Sense strand starting at position 248 of SEQ ID NO: 317027
agucauagugaugggacua

SEQ ID NO: 458722 - RNA, 19 nt, Artificial Sequence
  Description of Artificial Sequence: Synthetic oligonucleotide
  Antisense Strand to SEQ ID NO: 458721
uagucccaucacuaugacu

SEQ ID NO: 458723 - RNA, 19 nt, Artificial Sequence
  Description of Artificial Sequence: Synthetic oligonucleotide
  Sense strand starting at position 249 of SEQ ID NO: 317027
gucauagugaugggacuaa

SEQ ID NO: 458724 - RNA, 19 nt, Artificial Sequence
  Description of Artificial Sequence: Synthetic oligonucleotide
  Antisense Strand to SEQ ID NO: 458723
uuagucccaucacuaugac

SEQ ID NO: 458725 - RNA, 19 nt, Artificial Sequence
  Description of Artificial Sequence: Synthetic oligonucleotide
  Sense strand starting at position 272 of SEQ ID NO: 317027
uuguaaucuaaaggugaag

SEQ ID NO: 458726 - RNA, 19 nt, Artificial Sequence
  Description of Artificial Sequence: Synthetic oligonucleotide
  Antisense Strand to SEQ ID NO: 458725
cuucaccuuuagauuacaa

SEQ ID NO: 458727 - RNA, 19 nt, Artificial Sequence
  Description of Artificial Sequence: Synthetic oligonucleotide
  Sense strand starting at position 427 of SEQ ID NO: 317027
uuaacauuaggauguuaac

SEQ ID NO: 458728 - RNA, 19 nt, Artificial Sequence
  Description of Artificial Sequence: Synthetic oligonucleotide
  Antisense Strand to SEQ ID NO: 458727
guuaacauccuaauguuaa

SEQ ID NO: 458729 - RNA, 19 nt, Artificial Sequence
  Description of Artificial Sequence: Synthetic oligonucleotide
  Sense strand starting at position 561 of SEQ ID NO: 317027
guuaauuaucgccaagacu

SEQ ID NO: 458730 - RNA, 19 nt, Artificial Sequence
  Description of Artificial Sequence: Synthetic oligonucleotide
  Antisense Strand to SEQ ID NO: 458729
agucuuggcgauaauuaac

SEQ ID NO: 458731 - RNA, 19 nt, Artificial Sequence
  Description of Artificial Sequence: Synthetic oligonucleotide
  Sense strand starting at position 575 of SEQ ID NO: 317027
agacuuuacuuucuuaggu

SEQ ID NO: 458732 - RNA, 19 nt, Artificial Sequence
  Description of Artificial Sequence: Synthetic oligonucleotide
  Antisense Strand to SEQ ID NO: 458731
accuaagaaaguaaagucu

SEQ ID NO: 458733 - RNA, 19 nt, Artificial Sequence
  Description of Artificial Sequence: Synthetic oligonucleotide
  Sense strand starting at position 619 of SEQ ID NO: 317027
agcuuuauaucagcacaag

SEQ ID NO: 458734 - RNA, 19 nt, Artificial Sequence
  Description of Artificial Sequence: Synthetic oligonucleotide
  Antisense Strand to SEQ ID NO: 458733
cuugugcugauauaaagcu

SEQ ID NO: 458735 - RNA, 19 nt, Artificial Sequence
  Description of Artificial Sequence: Synthetic oligonucleotide
  Sense strand starting at position 620 of SEQ ID NO: 317027
gcuuuauaucagcacaaga

SEQ ID NO: 458736 - RNA, 19 nt, Artificial Sequence
  Description of Artificial Sequence: Synthetic oligonucleotide
  Antisense Strand to SEQ ID NO: 458735
ucuugugcugauauaaagc

SEQ ID NO: 458737 - RNA, 19 nt, Artificial Sequence
  Description of Artificial Sequence: Synthetic oligonucleotide
  Sense strand starting at position 801 of SEQ ID NO: 317027
aguucuuuaugaccagaau

SEQ ID NO: 458738 - RNA, 19 nt, Artificial Sequence
  Description of Artificial Sequence: Synthetic oligonucleotide
  Antisense Strand to SEQ ID NO: 458737
auucuggucauaaagaacu

SEQ ID NO: 458739 - RNA, 19 nt, Artificial Sequence
  Description of Artificial Sequence: Synthetic oligonucleotide
  Sense strand starting at position 802 of SEQ ID NO: 317027
guucuuuaugaccagaauc

SEQ ID NO: 458740 - RNA, 19 nt, Artificial Sequence
  Description of Artificial Sequence: Synthetic oligonucleotide
  Antisense Strand to SEQ ID NO: 458739
gauucuggucauaaagaac

SEQ ID NO: 458741 - RNA, 19 nt, Artificial Sequence
  Description of Artificial Sequence: Synthetic oligonucleotide
  Sense strand starting at position 851 of SEQ ID NO: 317027
cucucagaaguuugaugau

SEQ ID NO: 458742 - RNA, 19 nt, Artificial Sequence
  Description of Artificial Sequence: Synthetic oligonucleotide
  Antisense Strand to SEQ ID NO: 458741
aucaucaaacuucugagag

SEQ ID NO: 458743 - RNA, 19 nt, Artificial Sequence
  Description of Artificial Sequence: Synthetic oligonucleotide
  Sense strand starting at position 857 of SEQ ID NO: 317027
gaaguuugaugaucuguua

SEQ ID NO: 458744 - RNA, 19 nt, Artificial Sequence
  Description of Artificial Sequence: Synthetic oligonucleotide
  Antisense Strand to SEQ ID NO: 458743
uaacagaucaucaaacuuc

SEQ ID NO: 458745 - RNA, 19 nt, Artificial Sequence
  Description of Artificial Sequence: Synthetic oligonucleotide
  Sense strand starting at position 884 of SEQ ID NO: 317027
auauauuaucagugucaag

SEQ ID NO: 458746 - RNA, 19 nt, Artificial Sequence
  Description of Artificial Sequence: Synthetic oligonucleotide
  Antisense Strand to SEQ ID NO: 458745
cuugacacugauaauauau

SEQ ID NO: 458747 - RNA, 19 nt, Artificial Sequence
  Description of Artificial Sequence: Synthetic oligonucleotide
  Sense strand starting at position 933 of SEQ ID NO: 317027
gacggcauugccuaggaau

SEQ ID NO: 458748 - RNA, 19 nt, Artificial Sequence
  Description of Artificial Sequence: Synthetic oligonucleotide
  Antisense Strand to SEQ ID NO: 458747
auuccuaggcaaugccguc

SEQ ID NO: 458749 - RNA, 19 nt, Artificial Sequence
  Description of Artificial Sequence: Synthetic oligonucleotide
  Sense strand starting at position 935 of SEQ ID NO: 317027
cggcauugccuaggaauuu

SEQ ID NO: 458750 - RNA, 19 nt, Artificial Sequence
  Description of Artificial Sequence: Synthetic oligonucleotide
  Antisense Strand to SEQ ID NO: 458749
aaauuccuaggcaaugccg

SEQ ID NO: 458751 - RNA, 19 nt, Artificial Sequence
  Description of Artificial Sequence: Synthetic oligonucleotide
  Sense strand starting at position 1073 of SEQ ID NO: 317027
auugaaauccacugcaaug

SEQ ID NO: 458752 - RNA, 19 nt, Artificial Sequence
  Description of Artificial Sequence: Synthetic oligonucleotide
  Antisense Strand to SEQ ID NO: 458751
cauugcaguggauuucaau

SEQ ID NO: 458753 - RNA, 19 nt, Artificial Sequence
  Description of Artificial Sequence: Synthetic oligonucleotide
  Sense strand starting at position 1309 of SEQ ID NO: 317027
ucaaguaaacugcagcaau

SEQ ID NO: 458754 - RNA, 19 nt, Artificial Sequence
  Description of Artificial Sequence: Synthetic oligonucleotide
  Antisense Strand to SEQ ID NO: 458753
auugcugcaguuuacuuga

SEQ ID NO: 458755 - RNA, 19 nt, Artificial Sequence
  Description of Artificial Sequence: Synthetic oligonucleotide
  Sense strand starting at position 1417 of SEQ ID NO: 317027
agaacacugccuugaagag

SEQ ID NO: 458756 - RNA, 19 nt, Artificial Sequence
  Description of Artificial Sequence: Synthetic oligonucleotide
  Antisense Strand to SEQ ID NO: 458755
cucuucaaggcaguguucu

SEQ ID NO: 458757 - RNA, 19 nt, Artificial Sequence
  Description of Artificial Sequence: Synthetic oligonucleotide
  Sense strand starting at position 1646 of SEQ ID NO: 317027
agucauuaccuguaugaag

SEQ ID NO: 458758 - RNA, 19 nt, Artificial Sequence
  Description of Artificial Sequence: Synthetic oligonucleotide
  Antisense Strand to SEQ ID NO: 458757
cuucauacagguaaugacu

SEQ ID NO: 458759 - RNA, 19 nt, Artificial Sequence
  Description of Artificial Sequence: Synthetic oligonucleotide
  Sense strand starting at position 1648 of SEQ ID NO: 317027
ucauuaccuguaugaagag

SEQ ID NO: 458760 - RNA, 19 nt, Artificial Sequence
  Description of Artificial Sequence: Synthetic oligonucleotide
  Antisense Strand to SEQ ID NO: 458759
cucuucauacagguaauga

SEQ ID NO: 458761 - RNA, 19 nt, Artificial Sequence
  Description of Artificial Sequence: Synthetic oligonucleotide
  Sense strand starting at position 1668 of SEQ ID NO: 317027
accuguuaauagucugaga

SEQ ID NO: 458762 - RNA, 19 nt, Artificial Sequence
  Description of Artificial Sequence: Synthetic oligonucleotide
  Antisense Strand to SEQ ID NO: 458761
ucucagacuauuaacaggu

SEQ ID NO: 458763 - RNA, 19 nt, Artificial Sequence
  Description of Artificial Sequence: Synthetic oligonucleotide
  Sense strand starting at position 1753 of SEQ ID NO: 317027
aagguauuccucugaggag

SEQ ID NO: 458764 - RNA, 19 nt, Artificial Sequence
  Description of Artificial Sequence: Synthetic oligonucleotide
  Antisense Strand to SEQ ID NO: 458763
cuccucagaggaauaccuu

SEQ ID NO: 458765 - RNA, 19 nt, Artificial Sequence
  Description of Artificial Sequence: Synthetic oligonucleotide
  Sense strand starting at position 1827 of SEQ ID NO: 317027
ggagaaacuucugucucag

SEQ ID NO: 458766 - RNA, 19 nt, Artificial Sequence
  Description of Artificial Sequence: Synthetic oligonucleotide
  Antisense Strand to SEQ ID NO: 458765
cugagacagaaguuucucc

SEQ ID NO: 458767 - RNA, 19 nt, Artificial Sequence
  Description of Artificial Sequence: Synthetic oligonucleotide
  Sense strand starting at position 1863 of SEQ ID NO: 317027
uuacaacuccuguggaauu

SEQ ID NO: 458768 - RNA, 19 nt, Artificial Sequence
  Description of Artificial Sequence: Synthetic oligonucleotide
  Antisense Strand to SEQ ID NO: 458767
aauuccacaggaguuguaa

SEQ ID NO: 458769 - RNA, 19 nt, Artificial Sequence
  Description of Artificial Sequence: Synthetic oligonucleotide
  Sense strand starting at position 1883 of SEQ ID NO: 317027
gcuguuagcgccucaauca

SEQ ID NO: 458770 - RNA, 19 nt, Artificial Sequence
  Description of Artificial Sequence: Synthetic oligonucleotide
  Antisense Strand to SEQ ID NO: 458769
ugauugaggcgcuaacagc

SEQ ID NO: 458771 - RNA, 19 nt, Artificial Sequence
  Description of Artificial Sequence: Synthetic oligonucleotide
  Sense strand starting at position 2016 of SEQ ID NO: 317027
gccgguucacacuuguagu

SEQ ID NO: 458772 - RNA, 19 nt, Artificial Sequence
  Description of Artificial Sequence: Synthetic oligonucleotide
  Antisense Strand to SEQ ID NO: 458771
acuacaagugugaaccggc

SEQ ID NO: 458773 - RNA, 19 nt, Artificial Sequence
  Description of Artificial Sequence: Synthetic oligonucleotide
  Sense strand starting at position 2119 of SEQ ID NO: 317027
augccagcucaucagugaa

SEQ ID NO: 458774 - RNA, 19 nt, Artificial Sequence
  Description of Artificial Sequence: Synthetic oligonucleotide
  Antisense Strand to SEQ ID NO: 458773
uucacugaugagcuggcau

SEQ ID NO: 458775 - RNA, 19 nt, Artificial Sequence
  Description of Artificial Sequence: Synthetic oligonucleotide
  Sense strand starting at position 2399 of SEQ ID NO: 317027
agcugacccugauucuaaa

SEQ ID NO: 458776 - RNA, 19 nt, Artificial Sequence
  Description of Artificial Sequence: Synthetic oligonucleotide
  Antisense Strand to SEQ ID NO: 458775
uuuagaaucagggucagcu

SEQ ID NO: 458777 - RNA, 19 nt, Artificial Sequence
  Description of Artificial Sequence: Synthetic oligonucleotide
  Sense strand starting at position 2465 of SEQ ID NO: 317027
ggauaaauguauucuucuu

SEQ ID NO: 458778 - RNA, 19 nt, Artificial Sequence
  Description of Artificial Sequence: Synthetic oligonucleotide
  Antisense Strand to SEQ ID NO: 458777
aagaagaauacauuuaucc

SEQ ID NO: 458779 - RNA, 19 nt, Artificial Sequence
  Description of Artificial Sequence: Synthetic oligonucleotide
  Sense strand starting at position 2661 of SEQ ID NO: 317027
aauuuacugcguuguccua

SEQ ID NO: 458780 - RNA, 19 nt, Artificial Sequence
  Description of Artificial Sequence: Synthetic oligonucleotide
  Antisense Strand to SEQ ID NO: 458779
uaggacaacgcaguaaauu

SEQ ID NO: 458781 - RNA, 19 nt, Artificial Sequence
  Description of Artificial Sequence: Synthetic oligonucleotide
  Sense strand starting at position 2940 of SEQ ID NO: 317027
uuuauacuccuagaguuug

SEQ ID NO: 458782 - RNA, 19 nt, Artificial Sequence
  Description of Artificial Sequence: Synthetic oligonucleotide
  Antisense Strand to SEQ ID NO: 458781
caaacucuaggaguauaaa

SEQ ID NO: 458783 - RNA, 19 nt, Artificial Sequence
  Description of Artificial Sequence: Synthetic oligonucleotide
  Sense strand starting at position 3444 of SEQ ID NO: 317027
ugguuuaauuaguugaaca

SEQ ID NO: 458784 - RNA, 19 nt, Artificial Sequence
  Description of Artificial Sequence: Synthetic oligonucleotide
  Antisense Strand to SEQ ID NO: 458783
uguucaacuaauuaaacca

SEQ ID NO: 458785 - RNA, 19 nt, Artificial Sequence
  Description of Artificial Sequence: Synthetic oligonucleotide
  Sense strand starting at position 3485 of SEQ ID NO: 317027
gugggaauagaaugcauau

SEQ ID NO: 458786 - RNA, 19 nt, Artificial Sequence
  Description of Artificial Sequence: Synthetic oligonucleotide
  Antisense Strand to SEQ ID NO: 458785
auaugcauucuauucccac

SEQ ID NO: 458787 - RNA, 19 nt, Artificial Sequence
  Description of Artificial Sequence: Synthetic oligonucleotide
  Sense strand starting at position 3577 of SEQ ID NO: 317027
guagcaauucuauacugaa

SEQ ID NO: 458788 - RNA, 19 nt, Artificial Sequence
  Description of Artificial Sequence: Synthetic oligonucleotide
  Antisense Strand to SEQ ID NO: 458787
uucaguauagaauugcuac

SEQ ID NO: 458789 - RNA, 19 nt, Artificial Sequence
  Description of Artificial Sequence: Synthetic oligonucleotide
  Sense strand starting at position 3747 of SEQ ID NO: 317027
gcuguugaaccaggagaga

SEQ ID NO: 458790 - RNA, 19 nt, Artificial Sequence
  Description of Artificial Sequence: Synthetic oligonucleotide
  Antisense Strand to SEQ ID NO: 458789
ucucuccugguucaacagc

SEQ ID NO: 458791 - RNA, 19 nt, Artificial Sequence
  Description of Artificial Sequence: Synthetic oligonucleotide
  Sense strand starting at position 3790 of SEQ ID NO: 317027
gaaagugaguagguugaga

SEQ ID NO: 458792 - RNA, 19 nt, Artificial Sequence
  Description of Artificial Sequence: Synthetic oligonucleotide
  Antisense Strand to SEQ ID NO: 458791
ucucaaccuacucacuuuc

SEQ ID NO: 458793 - RNA, 19 nt, Artificial Sequence
  Description of Artificial Sequence: Synthetic oligonucleotide
  Sense strand starting at position 3834 of SEQ ID NO: 317027
agaaguuaaguaggaguuu

SEQ ID NO: 458794 - RNA, 19 nt, Artificial Sequence
  Description of Artificial Sequence: Synthetic oligonucleotide
  Antisense Strand to SEQ ID NO: 458793
aaacuccuacuuaacuucu

SEQ ID NO: 458795 - RNA, 19 nt, Artificial Sequence
  Description of Artificial Sequence: Synthetic oligonucleotide
  Sense strand starting at position 3862 of SEQ ID NO: 317027
gaaggaacugaccgugaga

SEQ ID NO: 458796 - RNA, 19 nt, Artificial Sequence
  Description of Artificial Sequence: Synthetic oligonucleotide
  Antisense Strand to SEQ ID NO: 458795
ucucacggucaguuccuuc

SEQ ID NO: 458797 - RNA, 19 nt, Artificial Sequence
  Description of Artificial Sequence: Synthetic oligonucleotide
  Sense strand starting at position 3865 of SEQ ID NO: 317027
ggaacugaccgugagaugu

SEQ ID NO: 458798 - RNA, 19 nt, Artificial Sequence
  Description of Artificial Sequence: Synthetic oligonucleotide
  Antisense Strand to SEQ ID NO: 458797
acaucucacggucaguucc

SEQ ID NO: 458799 - RNA, 19 nt, Artificial Sequence
  Description of Artificial Sequence: Synthetic oligonucleotide
  Sense strand starting at position 271 of SEQ ID NO: 317028
aaaugagacuaucagaagu

SEQ ID NO: 458800 - RNA, 19 nt, Artificial Sequence
  Description of Artificial Sequence: Synthetic oligonucleotide
  Antisense Strand to SEQ ID NO: 458799
acuucugauagucucauuu

SEQ ID NO: 458801 - RNA, 19 nt, Artificial Sequence
  Description of Artificial Sequence: Synthetic oligonucleotide
  Sense strand starting at position 273 of SEQ ID NO: 317028
augagacuaucagaaguaa

SEQ ID NO: 458802 - RNA, 19 nt, Artificial Sequence
  Description of Artificial Sequence: Synthetic oligonucleotide
  Antisense Strand to SEQ ID NO: 458801
uuacuucugauagucucau

SEQ ID NO: 458803 - RNA, 19 nt, Artificial Sequence
  Description of Artificial Sequence: Synthetic oligonucleotide
  Sense strand starting at position 371 of SEQ ID NO: 317028
aacuuacguuacuaaagga

SEQ ID NO: 458804 - RNA, 19 nt, Artificial Sequence
  Description of Artificial Sequence: Synthetic oligonucleotide
  Antisense Strand to SEQ ID NO: 458803
uccuuuaguaacguaaguu

SEQ ID NO: 458805 - RNA, 19 nt, Artificial Sequence
  Description of Artificial Sequence: Synthetic oligonucleotide
  Sense strand starting at position 500 of SEQ ID NO: 317028
guuuaucaacucugugaua

SEQ ID NO: 458806 - RNA, 19 nt, Artificial Sequence
  Description of Artificial Sequence: Synthetic oligonucleotide
  Antisense Strand to SEQ ID NO: 458805
uaucacagaguugauaaac

SEQ ID NO: 458807 - RNA, 19 nt, Artificial Sequence
  Description of Artificial Sequence: Synthetic oligonucleotide
  Sense strand starting at position 502 of SEQ ID NO: 317028
uuaucaacucugugauaag

SEQ ID NO: 458808 - RNA, 19 nt, Artificial Sequence
  Description of Artificial Sequence: Synthetic oligonucleotide
  Antisense Strand to SEQ ID NO: 458807
cuuaucacagaguugauaa

SEQ ID NO: 458809 - RNA, 19 nt, Artificial Sequence
  Description of Artificial Sequence: Synthetic oligonucleotide
  Sense strand starting at position 511 of SEQ ID NO: 317028
cugugauaagccugaauua

SEQ ID NO: 458810 - RNA, 19 nt, Artificial Sequence
  Description of Artificial Sequence: Synthetic oligonucleotide
  Antisense Strand to SEQ ID NO: 458809
uaauucaggcuuaucacag

SEQ ID NO: 458811 - RNA, 19 nt, Artificial Sequence
  Description of Artificial Sequence: Synthetic oligonucleotide
  Sense strand starting at position 512 of SEQ ID NO: 317028
ugugauaagccugaauuau

SEQ ID NO: 458812 - RNA, 19 nt, Artificial Sequence
  Description of Artificial Sequence: Synthetic oligonucleotide
  Antisense Strand to SEQ ID NO: 458811
auaauucaggcuuaucaca

SEQ ID NO: 458813 - RNA, 19 nt, Artificial Sequence
  Description of Artificial Sequence: Synthetic oligonucleotide
  Sense strand starting at position 662 of SEQ ID NO: 317028
uguauaucauuugucaguu

SEQ ID NO: 458814 - RNA, 19 nt, Artificial Sequence
  Description of Artificial Sequence: Synthetic oligonucleotide
  Antisense Strand to SEQ ID NO: 458813
aacugacaaaugauauaca

SEQ ID NO: 458815 - RNA, 19 nt, Artificial Sequence
  Description of Artificial Sequence: Synthetic oligonucleotide
  Sense strand starting at position 836 of SEQ ID NO: 317028
agagguauuagaugaugua

SEQ ID NO: 458816 - RNA, 19 nt, Artificial Sequence
  Description of Artificial Sequence: Synthetic oligonucleotide
  Antisense Strand to SEQ ID NO: 458815
uacaucaucuaauaccucu

SEQ ID NO: 458817 - RNA, 19 nt, Artificial Sequence
  Description of Artificial Sequence: Synthetic oligonucleotide
  Sense strand starting at position 886 of SEQ ID NO: 317028
accuaauacuguuuauguu

SEQ ID NO: 458818 - RNA, 19 nt, Artificial Sequence
  Description of Artificial Sequence: Synthetic oligonucleotide
  Antisense Strand to SEQ ID NO: 458817
aacauaaacaguauuaggu

SEQ ID NO: 458819 - RNA, 19 nt, Artificial Sequence
  Description of Artificial Sequence: Synthetic oligonucleotide
  Sense strand starting at position 905 of SEQ ID NO: 317028
guuugcuuuguuguagcua

SEQ ID NO: 458820 - RNA, 19 nt, Artificial Sequence
  Description of Artificial Sequence: Synthetic oligonucleotide
  Antisense Strand to SEQ ID NO: 458819
uagcuacaacaaagcaaac

SEQ ID NO: 458821 - RNA, 19 nt, Artificial Sequence
  Description of Artificial Sequence: Synthetic oligonucleotide
  Sense strand starting at position 920 of SEQ ID NO: 317028
gcuaauaugucagcuguga

SEQ ID NO: 458822 - RNA, 19 nt, Artificial Sequence
  Description of Artificial Sequence: Synthetic oligonucleotide
  Antisense Strand to SEQ ID NO: 458821
ucacagcugacauauuagc

SEQ ID NO: 458823 - RNA, 19 nt, Artificial Sequence
  Description of Artificial Sequence: Synthetic oligonucleotide
  Sense strand starting at position 1039 of SEQ ID NO: 317028
agguguaaccuuuguuucu

SEQ ID NO: 458824 - RNA, 19 nt, Artificial Sequence
  Description of Artificial Sequence: Synthetic oligonucleotide
  Antisense Strand to SEQ ID NO: 458823
agaaacaaagguuacaccu

SEQ ID NO: 458825 - RNA, 19 nt, Artificial Sequence
  Description of Artificial Sequence: Synthetic oligonucleotide
  Sense strand starting at position 1046 of SEQ ID NO: 317028
accuuuguuucuccgauua

SEQ ID NO: 458826 - RNA, 19 nt, Artificial Sequence
  Description of Artificial Sequence: Synthetic oligonucleotide
  Antisense Strand to SEQ ID NO: 458825
uaaucggagaaacaaaggu

SEQ ID NO: 458827 - RNA, 19 nt, Artificial Sequence
  Description of Artificial Sequence: Synthetic oligonucleotide
  Sense strand starting at position 1051 of SEQ ID NO: 317028
uguuucuccgauuacagau

SEQ ID NO: 458828 - RNA, 19 nt, Artificial Sequence
  Description of Artificial Sequence: Synthetic oligonucleotide
  Antisense Strand to SEQ ID NO: 458827
aucuguaaucggagaaaca

SEQ ID NO: 458829 - RNA, 19 nt, Artificial Sequence
  Description of Artificial Sequence: Synthetic oligonucleotide
  Sense strand starting at position 1214 of SEQ ID NO: 317028
ccgcauugucuacgaugga

SEQ ID NO: 458830 - RNA, 19 nt, Artificial Sequence
  Description of Artificial Sequence: Synthetic oligonucleotide
  Antisense Strand to SEQ ID NO: 458829
uccaucguagacaaugcgg

SEQ ID NO: 458831 - RNA, 19 nt, Artificial Sequence
  Description of Artificial Sequence: Synthetic oligonucleotide
  Sense strand starting at position 1217 of SEQ ID NO: 317028
cauugucuacgauggaaug

SEQ ID NO: 458832 - RNA, 19 nt, Artificial Sequence
  Description of Artificial Sequence: Synthetic oligonucleotide
  Antisense Strand to SEQ ID NO: 458831
cauuccaucguagacaaug

SEQ ID NO: 458833 - RNA, 19 nt, Artificial Sequence
  Description of Artificial Sequence: Synthetic oligonucleotide
  Sense strand starting at position 1402 of SEQ ID NO: 317028
uuuaacaucugaguacuga

SEQ ID NO: 458834 - RNA, 19 nt, Artificial Sequence
  Description of Artificial Sequence: Synthetic oligonucleotide
  Antisense Strand to SEQ ID NO: 458833
ucaguacucagauguuaaa

SEQ ID NO: 458835 - RNA, 19 nt, Artificial Sequence
  Description of Artificial Sequence: Synthetic oligonucleotide
  Sense strand starting at position 1558 of SEQ ID NO: 317028
agagucagccuaugagaaa

SEQ ID NO: 458836 - RNA, 19 nt, Artificial Sequence
  Description of Artificial Sequence: Synthetic oligonucleotide
  Antisense Strand to SEQ ID NO: 458835
uuucucauaggcugacucu

SEQ ID NO: 458837 - RNA, 19 nt, Artificial Sequence
  Description of Artificial Sequence: Synthetic oligonucleotide
  Sense strand starting at position 1881 of SEQ ID NO: 317028
agccaauuccuugacauug

SEQ ID NO: 458838 - RNA, 19 nt, Artificial Sequence
  Description of Artificial Sequence: Synthetic oligonucleotide
  Antisense Strand to SEQ ID NO: 458837
caaugucaaggaauuggcu

SEQ ID NO: 458839 - RNA, 19 nt, Artificial Sequence
  Description of Artificial Sequence: Synthetic oligonucleotide
  Sense strand starting at position 1900 of SEQ ID NO: 317028
uaggucugaggucacaauu

SEQ ID NO: 458840 - RNA, 19 nt, Artificial Sequence
  Description of Artificial Sequence: Synthetic oligonucleotide
  Antisense Strand to SEQ ID NO: 458839
aauugugaccucagaccua

SEQ ID NO: 458841 - RNA, 19 nt, Artificial Sequence
  Description of Artificial Sequence: Synthetic oligonucleotide
  Sense strand starting at position 2013 of SEQ ID NO: 317028
ugcaucaaguccuuugcaa

SEQ ID NO: 458842 - RNA, 19 nt, Artificial Sequence
  Description of Artificial Sequence: Synthetic oligonucleotide
  Antisense Strand to SEQ ID NO: 458841
uugcaaaggacuugaugca

SEQ ID NO: 458843 - RNA, 19 nt, Artificial Sequence
  Description of Artificial Sequence: Synthetic oligonucleotide
  Sense strand starting at position 2091 of SEQ ID NO: 317028
cuuguuuaauguguaauca

SEQ ID NO: 458844 - RNA, 19 nt, Artificial Sequence
  Description of Artificial Sequence: Synthetic oligonucleotide
  Antisense Strand to SEQ ID NO: 458843
ugauuacacauuaaacaag

SEQ ID NO: 458845 - RNA, 19 nt, Artificial Sequence
  Description of Artificial Sequence: Synthetic oligonucleotide
  Sense strand starting at position 2227 of SEQ ID NO: 317028
cugccacugguuggagaaa

SEQ ID NO: 458846 - RNA, 19 nt, Artificial Sequence
  Description of Artificial Sequence: Synthetic oligonucleotide
  Antisense Strand to SEQ ID NO: 458845
uuucuccaaccaguggcag

SEQ ID NO: 458847 - RNA, 19 nt, Artificial Sequence
  Description of Artificial Sequence: Synthetic oligonucleotide
  Sense strand starting at position 2258 of SEQ ID NO: 317028
uaaguugucggaggcauuu

SEQ ID NO: 458848 - RNA, 19 nt, Artificial Sequence
  Description of Artificial Sequence: Synthetic oligonucleotide
  Antisense Strand to SEQ ID NO: 458847
aaaugccuccgacaacuua

SEQ ID NO: 458849 - RNA, 19 nt, Artificial Sequence
  Description of Artificial Sequence: Synthetic oligonucleotide
  Sense strand starting at position 2420 of SEQ ID NO: 317028
gcaagauagcaaggagagu

SEQ ID NO: 458850 - RNA, 19 nt, Artificial Sequence
  Description of Artificial Sequence: Synthetic oligonucleotide
  Antisense Strand to SEQ ID NO: 458849
acucuccuugcuaucuugc

SEQ ID NO: 458851 - RNA, 19 nt, Artificial Sequence
  Description of Artificial Sequence: Synthetic oligonucleotide
  Sense strand starting at position 2574 of SEQ ID NO: 317028
cacucaguucugggaauua

SEQ ID NO: 458852 - RNA, 19 nt, Artificial Sequence
  Description of Artificial Sequence: Synthetic oligonucleotide
  Antisense Strand to SEQ ID NO: 458851
uaauucccagaacugagug

SEQ ID NO: 458853 - RNA, 19 nt, Artificial Sequence
  Description of Artificial Sequence: Synthetic oligonucleotide
  Sense strand starting at position 3385 of SEQ ID NO: 317028
uuucuuaugcgagaccuaa

SEQ ID NO: 458854 - RNA, 19 nt, Artificial Sequence
  Description of Artificial Sequence: Synthetic oligonucleotide
  Antisense Strand to SEQ ID NO: 458853
uuaggucucgcauaagaaa

SEQ ID NO: 458855 - RNA, 19 nt, Artificial Sequence
  Description of Artificial Sequence: Synthetic oligonucleotide
  Sense strand starting at position 3427 of SEQ ID NO: 317028
caggaucucuucuuggaua

SEQ ID NO: 458856 - RNA, 19 nt, Artificial Sequence
  Description of Artificial Sequence: Synthetic oligonucleotide
  Antisense Strand to SEQ ID NO: 458855
uauccaagaagagauccug

SEQ ID NO: 458857 - RNA, 19 nt, Artificial Sequence
  Description of Artificial Sequence: Synthetic oligonucleotide
  Sense strand starting at position 3429 of SEQ ID NO: 317028
ggaucucuucuuggauaau

SEQ ID NO: 458858 - RNA, 19 nt, Artificial Sequence
  Description of Artificial Sequence: Synthetic oligonucleotide
  Antisense Strand to SEQ ID NO: 458857
auuauccaagaagagaucc

SEQ ID NO: 458859 - RNA, 19 nt, Artificial Sequence
  Description of Artificial Sequence: Synthetic oligonucleotide
  Sense strand starting at position 3449 of SEQ ID NO: 317028
aaggaauuauaggacuaga

SEQ ID NO: 458860 - RNA, 19 nt, Artificial Sequence
  Description of Artificial Sequence: Synthetic oligonucleotide
  Antisense Strand to SEQ ID NO: 458859
ucuaguccuauaauuccuu

SEQ ID NO: 458861 - RNA, 19 nt, Artificial Sequence
  Description of Artificial Sequence: Synthetic oligonucleotide
  Sense strand starting at position 3651 of SEQ ID NO: 317028
cuaucaggauuacaagauu

SEQ ID NO: 458862 - RNA, 19 nt, Artificial Sequence
  Description of Artificial Sequence: Synthetic oligonucleotide
  Antisense Strand to SEQ ID NO: 458861
aaucuuguaauccugauag

SEQ ID NO: 458863 - RNA, 19 nt, Artificial Sequence
  Description of Artificial Sequence: Synthetic oligonucleotide
  Sense strand starting at position 3668 of SEQ ID NO: 317028
uuuauauugaauggguagu

SEQ ID NO: 458864 - RNA, 19 nt, Artificial Sequence
  Description of Artificial Sequence: Synthetic oligonucleotide
  Antisense Strand to SEQ ID NO: 458863
acuacccauucaauauaaa

SEQ ID NO: 458865 - RNA, 19 nt, Artificial Sequence
  Description of Artificial Sequence: Synthetic oligonucleotide
  Sense strand starting at position 3674 of SEQ ID NO: 317028
uugaauggguagucuaaac

SEQ ID NO: 458866 - RNA, 19 nt, Artificial Sequence
  Description of Artificial Sequence: Synthetic oligonucleotide
  Antisense Strand to SEQ ID NO: 458865
guuuagacuacccauucaa

SEQ ID NO: 458867 - RNA, 19 nt, Artificial Sequence
  Description of Artificial Sequence: Synthetic oligonucleotide
  Sense strand starting at position 3790 of SEQ ID NO: 317028
auagauguaauucgaagag

SEQ ID NO: 458868 - RNA, 19 nt, Artificial Sequence
  Description of Artificial Sequence: Synthetic oligonucleotide
  Antisense Strand to SEQ ID NO: 458867
cucuucgaauuacaucuau

SEQ ID NO: 458869 - RNA, 19 nt, Artificial Sequence
  Description of Artificial Sequence: Synthetic oligonucleotide
  Sense strand starting at position 3875 of SEQ ID NO: 317028
aauguaugcuuucuaggag

SEQ ID NO: 458870 - RNA, 19 nt, Artificial Sequence
  Description of Artificial Sequence: Synthetic oligonucleotide
  Antisense Strand to SEQ ID NO: 458869
cuccuagaaagcauacauu

SEQ ID NO: 458871 - RNA, 19 nt, Artificial Sequence
  Description of Artificial Sequence: Synthetic oligonucleotide
  Sense strand starting at position 3878 of SEQ ID NO: 317028
guaugcuuucuaggagaag

SEQ ID NO: 458872 - RNA, 19 nt, Artificial Sequence
  Description of Artificial Sequence: Synthetic oligonucleotide
  Antisense Strand to SEQ ID NO: 458871
cuucuccuagaaagcauac

SEQ ID NO: 458873 - RNA, 19 nt, Artificial Sequence
  Description of Artificial Sequence: Synthetic oligonucleotide
  Sense strand starting at position 3879 of SEQ ID NO: 317028
uaugcuuucuaggagaaga

SEQ ID NO: 458874 - RNA, 19 nt, Artificial Sequence
  Description of Artificial Sequence: Synthetic oligonucleotide
  Antisense Strand to SEQ ID NO: 458873
ucuucuccuagaaagcaua

SEQ ID NO: 458875 - RNA, 19 nt, Artificial Sequence
  Description of Artificial Sequence: Synthetic oligonucleotide
  Sense strand starting at position 3939 of SEQ ID NO: 317028
ugcauuuccuaauuggcau

SEQ ID NO: 458876 - RNA, 19 nt, Artificial Sequence
  Description of Artificial Sequence: Synthetic oligonucleotide
  Antisense Strand to SEQ ID NO: 458875
augccaauuaggaaaugca

SEQ ID NO: 458877 - RNA, 19 nt, Artificial Sequence
  Description of Artificial Sequence: Synthetic oligonucleotide
  Sense strand starting at position 3980 of SEQ ID NO: 317028
acuaaaucugaauguuuga

SEQ ID NO: 458878 - RNA, 19 nt, Artificial Sequence
  Description of Artificial Sequence: Synthetic oligonucleotide
  Antisense Strand to SEQ ID NO: 458877
ucaaacauucagauuuagu

SEQ ID NO: 458879 - RNA, 19 nt, Artificial Sequence
  Description of Artificial Sequence: Synthetic oligonucleotide
  Sense strand starting at position 130 of SEQ ID NO: 317029
ucuagauuauggucuucca

SEQ ID NO: 458880 - RNA, 19 nt, Artificial Sequence
  Description of Artificial Sequence: Synthetic oligonucleotide
  Antisense Strand to SEQ ID NO: 458879
uggaagaccauaaucuaga

SEQ ID NO: 458881 - RNA, 19 nt, Artificial Sequence
  Description of Artificial Sequence: Synthetic oligonucleotide
  Sense strand starting at position 133 of SEQ ID NO: 317029
agauuauggucuuccaggu

SEQ ID NO: 458882 - RNA, 19 nt, Artificial Sequence
  Description of Artificial Sequence: Synthetic oligonucleotide
  Antisense Strand to SEQ ID NO: 458881
accuggaagaccauaaucu

SEQ ID NO: 458883 - RNA, 19 nt, Artificial Sequence
  Description of Artificial Sequence: Synthetic oligonucleotide
  Sense strand starting at position 318 of SEQ ID NO: 317029
gcucuaauagaagagcuuu

SEQ ID NO: 458884 - RNA, 19 nt, Artificial Sequence
  Description of Artificial Sequence: Synthetic oligonucleotide
  Antisense Strand to SEQ ID NO: 458883
aaagcucuucuauuagagc

SEQ ID NO: 458885 - RNA, 19 nt, Artificial Sequence
  Description of Artificial Sequence: Synthetic oligonucleotide
  Sense strand starting at position 584 of SEQ ID NO: 317029
uguggagacccaugacauu

SEQ ID NO: 458886 - RNA, 19 nt, Artificial Sequence
  Description of Artificial Sequence: Synthetic oligonucleotide
  Antisense Strand to SEQ ID NO: 458885
aaugucaugggucuccaca

SEQ ID NO: 458887 - RNA, 19 nt, Artificial Sequence
  Description of Artificial Sequence: Synthetic oligonucleotide
  Sense strand starting at position 632 of SEQ ID NO: 317029
uugaauccaugaguuccua

SEQ ID NO: 458888 - RNA, 19 nt, Artificial Sequence
  Description of Artificial Sequence: Synthetic oligonucleotide
  Antisense Strand to SEQ ID NO: 458887
uaggaacucauggauucaa

SEQ ID NO: 458889 - RNA, 19 nt, Artificial Sequence
  Description of Artificial Sequence: Synthetic oligonucleotide
  Sense strand starting at position 703 of SEQ ID NO: 317029
cccaauacucagggaauuc

SEQ ID NO: 458890 - RNA, 19 nt, Artificial Sequence
  Description of Artificial Sequence: Synthetic oligonucleotide
  Antisense Strand to SEQ ID NO: 458889
gaauucccugaguauuggg

SEQ ID NO: 458891 - RNA, 19 nt, Artificial Sequence
  Description of Artificial Sequence: Synthetic oligonucleotide
  Sense strand starting at position 782 of SEQ ID NO: 317029
uucuaagaguuguuugaug

SEQ ID NO: 458892 - RNA, 19 nt, Artificial Sequence
  Description of Artificial Sequence: Synthetic oligonucleotide
  Antisense Strand to SEQ ID NO: 458891
caucaaacaacucuuagaa

SEQ ID NO: 458893 - RNA, 19 nt, Artificial Sequence
  Description of Artificial Sequence: Synthetic oligonucleotide
  Sense strand starting at position 839 of SEQ ID NO: 317029
gagaauauuugucaaugua

SEQ ID NO: 458894 - RNA, 19 nt, Artificial Sequence
  Description of Artificial Sequence: Synthetic oligonucleotide
  Antisense Strand to SEQ ID NO: 458893
uacauugacaaauauucuc

SEQ ID NO: 458895 - RNA, 19 nt, Artificial Sequence
  Description of Artificial Sequence: Synthetic oligonucleotide
  Sense strand starting at position 896 of SEQ ID NO: 317029
ggauuuccuuuagauauuc

SEQ ID NO: 458896 - RNA, 19 nt, Artificial Sequence
  Description of Artificial Sequence: Synthetic oligonucleotide
  Antisense Strand to SEQ ID NO: 458895
gaauaucuaaaggaaaucc

SEQ ID NO: 458897 - RNA, 19 nt, Artificial Sequence
  Description of Artificial Sequence: Synthetic oligonucleotide
  Sense strand starting at position 964 of SEQ ID NO: 317029
ggagaaugugaugguuaac

SEQ ID NO: 458898 - RNA, 19 nt, Artificial Sequence
  Description of Artificial Sequence: Synthetic oligonucleotide
  Antisense Strand to SEQ ID NO: 458897
guuaaccaucacauucucc

SEQ ID NO: 458899 - RNA, 19 nt, Artificial Sequence
  Description of Artificial Sequence: Synthetic oligonucleotide
  Sense strand starting at position 967 of SEQ ID NO: 317029
gaaugugaugguuaaccuc

SEQ ID NO: 458900 - RNA, 19 nt, Artificial Sequence
  Description of Artificial Sequence: Synthetic oligonucleotide
  Antisense Strand to SEQ ID NO: 458899
gagguuaaccaucacauuc

SEQ ID NO: 458901 - RNA, 19 nt, Artificial Sequence
  Description of Artificial Sequence: Synthetic oligonucleotide
  Sense strand starting at position 973 of SEQ ID NO: 317029
gaugguuaaccucacuugu

SEQ ID NO: 458902 - RNA, 19 nt, Artificial Sequence
  Description of Artificial Sequence: Synthetic oligonucleotide
  Antisense Strand to SEQ ID NO: 458901
acaagugagguuaaccauc

SEQ ID NO: 458903 - RNA, 19 nt, Artificial Sequence
  Description of Artificial Sequence: Synthetic oligonucleotide
  Sense strand starting at position 1003 of SEQ ID NO: 317029
ggcuauaguacacagugau

SEQ ID NO: 458904 - RNA, 19 nt, Artificial Sequence
  Description of Artificial Sequence: Synthetic oligonucleotide
  Antisense Strand to SEQ ID NO: 458903
aucacuguguacuauagcc

SEQ ID NO: 458905 - RNA, 19 nt, Artificial Sequence
  Description of Artificial Sequence: Synthetic oligonucleotide
  Sense strand starting at position 1093 of SEQ ID NO: 317029
acauuaaguuaagcauaga

SEQ ID NO: 458906 - RNA, 19 nt, Artificial Sequence
  Description of Artificial Sequence: Synthetic oligonucleotide
  Antisense Strand to SEQ ID NO: 458905
ucuaugcuuaacuuaaugu

SEQ ID NO: 458907 - RNA, 19 nt, Artificial Sequence
  Description of Artificial Sequence: Synthetic oligonucleotide
  Sense strand starting at position 1104 of SEQ ID NO: 317029
agcauagauuacccugaau

SEQ ID NO: 458908 - RNA, 19 nt, Artificial Sequence
  Description of Artificial Sequence: Synthetic oligonucleotide
  Antisense Strand to SEQ ID NO: 458907
auucaggguaaucuaugcu

SEQ ID NO: 458909 - RNA, 19 nt, Artificial Sequence
  Description of Artificial Sequence: Synthetic oligonucleotide
  Sense strand starting at position 1507 of SEQ ID NO: 317029
caguguccacugggauuau

SEQ ID NO: 458910 - RNA, 19 nt, Artificial Sequence
  Description of Artificial Sequence: Synthetic oligonucleotide
  Antisense Strand to SEQ ID NO: 458909
auaaucccaguggacacug

SEQ ID NO: 458911 - RNA, 19 nt, Artificial Sequence
  Description of Artificial Sequence: Synthetic oligonucleotide
  Sense strand starting at position 1682 of SEQ ID NO: 317029
ggcuccugucacuaagacu

SEQ ID NO: 458912 - RNA, 19 nt, Artificial Sequence
  Description of Artificial Sequence: Synthetic oligonucleotide
  Antisense Strand to SEQ ID NO: 458911
agucuuagugacaggagcc

SEQ ID NO: 458913 - RNA, 19 nt, Artificial Sequence
  Description of Artificial Sequence: Synthetic oligonucleotide
  Sense strand starting at position 1699 of SEQ ID NO: 317029
cugugcugucagucugcaa

SEQ ID NO: 458914 - RNA, 19 nt, Artificial Sequence
  Description of Artificial Sequence: Synthetic oligonucleotide
  Antisense Strand to SEQ ID NO: 458913
uugcagacugacagcacag

SEQ ID NO: 458915 - RNA, 19 nt, Artificial Sequence
  Description of Artificial Sequence: Synthetic oligonucleotide
  Sense strand starting at position 1700 of SEQ ID NO: 317029
ugugcugucagucugcaaa

SEQ ID NO: 458916 - RNA, 19 nt, Artificial Sequence
  Description of Artificial Sequence: Synthetic oligonucleotide
  Antisense Strand to SEQ ID NO: 458915
uuugcagacugacagcaca

SEQ ID NO: 458917 - RNA, 19 nt, Artificial Sequence
  Description of Artificial Sequence: Synthetic oligonucleotide
  Sense strand starting at position 1804 of SEQ ID NO: 317029
uacugauucuuuguagaga

SEQ ID NO: 458918 - RNA, 19 nt, Artificial Sequence
  Description of Artificial Sequence: Synthetic oligonucleotide
  Antisense Strand to SEQ ID NO: 458917
ucucuacaaagaaucagua

SEQ ID NO: 458919 - RNA, 19 nt, Artificial Sequence
  Description of Artificial Sequence: Synthetic oligonucleotide
  Sense strand starting at position 1888 of SEQ ID NO: 317029
acaaacuugcuuugaauag

SEQ ID NO: 458920 - RNA, 19 nt, Artificial Sequence
  Description of Artificial Sequence: Synthetic oligonucleotide
  Antisense Strand to SEQ ID NO: 458919
cuauucaaagcaaguuugu

SEQ ID NO: 458921 - RNA, 19 nt, Artificial Sequence
  Description of Artificial Sequence: Synthetic oligonucleotide
  Sense strand starting at position 2011 of SEQ ID NO: 317029
aggaucaguucuguuaaug

SEQ ID NO: 458922 - RNA, 19 nt, Artificial Sequence
  Description of Artificial Sequence: Synthetic oligonucleotide
  Antisense Strand to SEQ ID NO: 458921
cauuaacagaacugauccu

SEQ ID NO: 458923 - RNA, 19 nt, Artificial Sequence
  Description of Artificial Sequence: Synthetic oligonucleotide
  Sense strand starting at position 2020 of SEQ ID NO: 317029
ucuguuaaugcugucugca

SEQ ID NO: 458924 - RNA, 19 nt, Artificial Sequence
  Description of Artificial Sequence: Synthetic oligonucleotide
  Antisense Strand to SEQ ID NO: 458923
ugcagacagcauuaacaga

SEQ ID NO: 458925 - RNA, 19 nt, Artificial Sequence
  Description of Artificial Sequence: Synthetic oligonucleotide
  Sense strand starting at position 2247 of SEQ ID NO: 317029
auaucuauugaacggcaaa

SEQ ID NO: 458926 - RNA, 19 nt, Artificial Sequence
  Description of Artificial Sequence: Synthetic oligonucleotide
  Antisense Strand to SEQ ID NO: 458925
uuugccguucaauagauau

SEQ ID NO: 458927 - RNA, 19 nt, Artificial Sequence
  Description of Artificial Sequence: Synthetic oligonucleotide
  Sense strand starting at position 2356 of SEQ ID NO: 317029
aguuaacuggauugaaauu

SEQ ID NO: 458928 - RNA, 19 nt, Artificial Sequence
  Description of Artificial Sequence: Synthetic oligonucleotide
  Antisense Strand to SEQ ID NO: 458927
aauuucaauccaguuaacu

SEQ ID NO: 458929 - RNA, 19 nt, Artificial Sequence
  Description of Artificial Sequence: Synthetic oligonucleotide
  Sense strand starting at position 2557 of SEQ ID NO: 317029
cugacaugcccagagaugu

SEQ ID NO: 458930 - RNA, 19 nt, Artificial Sequence
  Description of Artificial Sequence: Synthetic oligonucleotide
  Antisense Strand to SEQ ID NO: 458929
acaucucugggcaugucag

SEQ ID NO: 458931 - RNA, 19 nt, Artificial Sequence
  Description of Artificial Sequence: Synthetic oligonucleotide
  Sense strand starting at position 2563 of SEQ ID NO: 317029
ugcccagagaugugacaau

SEQ ID NO: 458932 - RNA, 19 nt, Artificial Sequence
  Description of Artificial Sequence: Synthetic oligonucleotide
  Antisense Strand to SEQ ID NO: 458931
auugucacaucucugggca

SEQ ID NO: 458933 - RNA, 19 nt, Artificial Sequence
  Description of Artificial Sequence: Synthetic oligonucleotide
  Sense strand starting at position 2596 of SEQ ID NO: 317029
acauguggacgcuaaugaa

SEQ ID NO: 458934 - RNA, 19 nt, Artificial Sequence
  Description of Artificial Sequence: Synthetic oligonucleotide
  Antisense Strand to SEQ ID NO: 458933
uucauuagcguccacaugu

SEQ ID NO: 458935 - RNA, 19 nt, Artificial Sequence
  Description of Artificial Sequence: Synthetic oligonucleotide
  Sense strand starting at position 2702 of SEQ ID NO: 317029
acagcagauaccuggagau

SEQ ID NO: 458936 - RNA, 19 nt, Artificial Sequence
  Description of Artificial Sequence: Synthetic oligonucleotide
  Antisense Strand to SEQ ID NO: 458935
aucuccagguaucugcugu

SEQ ID NO: 458937 - RNA, 19 nt, Artificial Sequence
  Description of Artificial Sequence: Synthetic oligonucleotide
  Sense strand starting at position 2758 of SEQ ID NO: 317029
uugcaaacugcugaaacaa

SEQ ID NO: 458938 - RNA, 19 nt, Artificial Sequence
  Description of Artificial Sequence: Synthetic oligonucleotide
  Antisense Strand to SEQ ID NO: 458937
uuguuucagcaguuugcaa

SEQ ID NO: 458939 - RNA, 19 nt, Artificial Sequence
  Description of Artificial Sequence: Synthetic oligonucleotide
  Sense strand starting at position 2849 of SEQ ID NO: 317029
ucauguuaauagguaacua

SEQ ID NO: 458940 - RNA, 19 nt, Artificial Sequence
  Description of Artificial Sequence: Synthetic oligonucleotide
  Antisense Strand to SEQ ID NO: 458939
uaguuaccuauuaacauga

SEQ ID NO: 458941 - RNA, 19 nt, Artificial Sequence
  Description of Artificial Sequence: Synthetic oligonucleotide
  Sense strand starting at position 2987 of SEQ ID NO: 317029
ucuaguucuuaucuuggaa

SEQ ID NO: 458942 - RNA, 19 nt, Artificial Sequence
  Description of Artificial Sequence: Synthetic oligonucleotide
  Antisense Strand to SEQ ID NO: 458941
uuccaagauaagaacuaga

SEQ ID NO: 458943 - RNA, 19 nt, Artificial Sequence
  Description of Artificial Sequence: Synthetic oligonucleotide
  Sense strand starting at position 2990 of SEQ ID NO: 317029
aguucuuaucuuggaauua

SEQ ID NO: 458944 - RNA, 19 nt, Artificial Sequence
  Description of Artificial Sequence: Synthetic oligonucleotide
  Antisense Strand to SEQ ID NO: 458943
uaauuccaagauaagaacu

SEQ ID NO: 458945 - RNA, 19 nt, Artificial Sequence
  Description of Artificial Sequence: Synthetic oligonucleotide
  Sense strand starting at position 3305 of SEQ ID NO: 317029
uugccuuugguagaacuca

SEQ ID NO: 458946 - RNA, 19 nt, Artificial Sequence
  Description of Artificial Sequence: Synthetic oligonucleotide
  Antisense Strand to SEQ ID NO: 458945
ugaguucuaccaaaggcaa

SEQ ID NO: 458947 - RNA, 19 nt, Artificial Sequence
  Description of Artificial Sequence: Synthetic oligonucleotide
  Sense strand starting at position 3351 of SEQ ID NO: 317029
acuuaugugguaugaaaug

SEQ ID NO: 458948 - RNA, 19 nt, Artificial Sequence
  Description of Artificial Sequence: Synthetic oligonucleotide
  Antisense Strand to SEQ ID NO: 458947
cauuucauaccacauaagu

SEQ ID NO: 458949 - RNA, 19 nt, Artificial Sequence
  Description of Artificial Sequence: Synthetic oligonucleotide
  Sense strand starting at position 3391 of SEQ ID NO: 317029
gggucuggcauguaacaga

SEQ ID NO: 458950 - RNA, 19 nt, Artificial Sequence
  Description of Artificial Sequence: Synthetic oligonucleotide
  Antisense Strand to SEQ ID NO: 458949
ucuguuacaugccagaccc

SEQ ID NO: 458951 - RNA, 19 nt, Artificial Sequence
  Description of Artificial Sequence: Synthetic oligonucleotide
  Sense strand starting at position 3423 of SEQ ID NO: 317029
ccuggcaaaugaguaaaua

SEQ ID NO: 458952 - RNA, 19 nt, Artificial Sequence
  Description of Artificial Sequence: Synthetic oligonucleotide
  Antisense Strand to SEQ ID NO: 458951
uauuuacucauuugccagg

SEQ ID NO: 458953 - RNA, 19 nt, Artificial Sequence
  Description of Artificial Sequence: Synthetic oligonucleotide
  Sense strand starting at position 3477 of SEQ ID NO: 317029
uuuccuagauuaguaucua

SEQ ID NO: 458954 - RNA, 19 nt, Artificial Sequence
  Description of Artificial Sequence: Synthetic oligonucleotide
  Antisense Strand to SEQ ID NO: 458953
uagauacuaaucuaggaaa

SEQ ID NO: 458955 - RNA, 19 nt, Artificial Sequence
  Description of Artificial Sequence: Synthetic oligonucleotide
  Sense strand starting at position 3481 of SEQ ID NO: 317029
cuagauuaguaucuaagua

SEQ ID NO: 458956 - RNA, 19 nt, Artificial Sequence
  Description of Artificial Sequence: Synthetic oligonucleotide
  Antisense Strand to SEQ ID NO: 458955
uacuuagauacuaaucuag

SEQ ID NO: 458957 - RNA, 19 nt, Artificial Sequence
  Description of Artificial Sequence: Synthetic oligonucleotide
  Sense strand starting at position 3933 of SEQ ID NO: 317029
ugugcuguucccucaguuu

SEQ ID NO: 458958 - RNA, 19 nt, Artificial Sequence
  Description of Artificial Sequence: Synthetic oligonucleotide
  Antisense Strand to SEQ ID NO: 458957
aaacugagggaacagcaca

SEQ ID NO: 458959 - RNA, 19 nt, Artificial Sequence
  Description of Artificial Sequence: Synthetic oligonucleotide
  Sense strand starting at position 42 of SEQ ID NO: 317030
gcagcagucgaggaauaca

SEQ ID NO: 458960 - RNA, 19 nt, Artificial Sequence
  Description of Artificial Sequence: Synthetic oligonucleotide
  Antisense Strand to SEQ ID NO: 458959
uguauuccucgacugcugc

SEQ ID NO: 458961 - RNA, 19 nt, Artificial Sequence
  Description of Artificial Sequence: Synthetic oligonucleotide
  Sense strand starting at position 319 of SEQ ID NO: 317030
gccaguggucaauaccacu

SEQ ID NO: 458962 - RNA, 19 nt, Artificial Sequence
  Description of Artificial Sequence: Synthetic oligonucleotide
  Antisense Strand to SEQ ID NO: 458961
agugguauugaccacuggc

SEQ ID NO: 458963 - RNA, 19 nt, Artificial Sequence
  Description of Artificial Sequence: Synthetic oligonucleotide
  Sense strand starting at position 381 of SEQ ID NO: 317030
gcagaauaggcauaacuac

SEQ ID NO: 458964 - RNA, 19 nt, Artificial Sequence
  Description of Artificial Sequence: Synthetic oligonucleotide
  Antisense Strand to SEQ ID NO: 458963
guaguuaugccuauucugc

SEQ ID NO: 458965 - RNA, 19 nt, Artificial Sequence
  Description of Artificial Sequence: Synthetic oligonucleotide
  Sense strand starting at position 716 of SEQ ID NO: 317030
uggaaacuugugugcaaug

SEQ ID NO: 458966 - RNA, 19 nt, Artificial Sequence
  Description of Artificial Sequence: Synthetic oligonucleotide
  Antisense Strand to SEQ ID NO: 458965
cauugcacacaaguuucca

SEQ ID NO: 458967 - RNA, 19 nt, Artificial Sequence
  Description of Artificial Sequence: Synthetic oligonucleotide
  Sense strand starting at position 769 of SEQ ID NO: 317030
gucaacuaccgguaugaau

SEQ ID NO: 458968 - RNA, 19 nt, Artificial Sequence
  Description of Artificial Sequence: Synthetic oligonucleotide
  Antisense Strand to SEQ ID NO: 458967
auucauaccgguaguugac

SEQ ID NO: 458969 - RNA, 19 nt, Artificial Sequence
  Description of Artificial Sequence: Synthetic oligonucleotide
  Sense strand starting at position 771 of SEQ ID NO: 317030
caacuaccgguaugaauuc

SEQ ID NO: 458970 - RNA, 19 nt, Artificial Sequence
  Description of Artificial Sequence: Synthetic oligonucleotide
  Antisense Strand to SEQ ID NO: 458969
gaauucauaccgguaguug

SEQ ID NO: 458971 - RNA, 19 nt, Artificial Sequence
  Description of Artificial Sequence: Synthetic oligonucleotide
  Sense strand starting at position 780 of SEQ ID NO: 317030
guaugaauucucugaguaa

SEQ ID NO: 458972 - RNA, 19 nt, Artificial Sequence
  Description of Artificial Sequence: Synthetic oligonucleotide
  Antisense Strand to SEQ ID NO: 458971
uuacucagagaauucauac

SEQ ID NO: 458973 - RNA, 19 nt, Artificial Sequence
  Description of Artificial Sequence: Synthetic oligonucleotide
  Sense strand starting at position 845 of SEQ ID NO: 317030
cugcauaagguuggacaaa

SEQ ID NO: 458974 - RNA, 19 nt, Artificial Sequence
  Description of Artificial Sequence: Synthetic oligonucleotide
  Antisense Strand to SEQ ID NO: 458973
uuuguccaaccuuaugcag

SEQ ID NO: 458975 - RNA, 19 nt, Artificial Sequence
  Description of Artificial Sequence: Synthetic oligonucleotide
  Sense strand starting at position 876 of SEQ ID NO: 317030
gguggucagaugugaagag

SEQ ID NO: 458976 - RNA, 19 nt, Artificial Sequence
  Description of Artificial Sequence: Synthetic oligonucleotide
  Antisense Strand to SEQ ID NO: 458975
cucuucacaucugaccacc

SEQ ID NO: 458977 - RNA, 19 nt, Artificial Sequence
  Description of Artificial Sequence: Synthetic oligonucleotide
  Sense strand starting at position 1046 of SEQ ID NO: 317030
aaacuauauguugggaugu

SEQ ID NO: 458978 - RNA, 19 nt, Artificial Sequence
  Description of Artificial Sequence: Synthetic oligonucleotide
  Antisense Strand to SEQ ID NO: 458977
acaucccaacauauaguuu

SEQ ID NO: 458979 - RNA, 19 nt, Artificial Sequence
  Description of Artificial Sequence: Synthetic oligonucleotide
  Sense strand starting at position 1057 of SEQ ID NO: 317030
ugggauguguaugcuauuu

SEQ ID NO: 458980 - RNA, 19 nt, Artificial Sequence
  Description of Artificial Sequence: Synthetic oligonucleotide
  Antisense Strand to SEQ ID NO: 458979
aaauagcauacacauccca

SEQ ID NO: 458981 - RNA, 19 nt, Artificial Sequence
  Description of Artificial Sequence: Synthetic oligonucleotide
  Sense strand starting at position 1062 of SEQ ID NO: 317030
uguguaugcuauuugauac

SEQ ID NO: 458982 - RNA, 19 nt, Artificial Sequence
  Description of Artificial Sequence: Synthetic oligonucleotide
  Antisense Strand to SEQ ID NO: 458981
guaucaaauagcauacaca

SEQ ID NO: 458983 - RNA, 19 nt, Artificial Sequence
  Description of Artificial Sequence: Synthetic oligonucleotide
  Sense strand starting at position 1156 of SEQ ID NO: 317030
accauaagcuccuuaagga

SEQ ID NO: 458984 - RNA, 19 nt, Artificial Sequence
  Description of Artificial Sequence: Synthetic oligonucleotide
  Antisense Strand to SEQ ID NO: 458983
uccuuaaggagcuuauggu

SEQ ID NO: 458985 - RNA, 19 nt, Artificial Sequence
  Description of Artificial Sequence: Synthetic oligonucleotide
  Sense strand starting at position 1157 of SEQ ID NO: 317030
ccauaagcuccuuaaggau

SEQ ID NO: 458986 - RNA, 19 nt, Artificial Sequence
  Description of Artificial Sequence: Synthetic oligonucleotide
  Antisense Strand to SEQ ID NO: 458985
auccuuaaggagcuuaugg

SEQ ID NO: 458987 - RNA, 19 nt, Artificial Sequence
  Description of Artificial Sequence: Synthetic oligonucleotide
  Sense strand starting at position 1163 of SEQ ID NO: 317030
gcuccuuaaggauagaagu

SEQ ID NO: 458988 - RNA, 19 nt, Artificial Sequence
  Description of Artificial Sequence: Synthetic oligonucleotide
  Antisense Strand to SEQ ID NO: 458987
acuucuauccuuaaggagc

SEQ ID NO: 458989 - RNA, 19 nt, Artificial Sequence
  Description of Artificial Sequence: Synthetic oligonucleotide
  Sense strand starting at position 1236 of SEQ ID NO: 317030
uacaaaguauuugguaaga

SEQ ID NO: 458990 - RNA, 19 nt, Artificial Sequence
  Description of Artificial Sequence: Synthetic oligonucleotide
  Antisense Strand to SEQ ID NO: 458989
ucuuaccaaauacuuugua

SEQ ID NO: 458991 - RNA, 19 nt, Artificial Sequence
  Description of Artificial Sequence: Synthetic oligonucleotide
  Sense strand starting at position 1238 of SEQ ID NO: 317030
caaaguauuugguaagaga

SEQ ID NO: 458992 - RNA, 19 nt, Artificial Sequence
  Description of Artificial Sequence: Synthetic oligonucleotide
  Antisense Strand to SEQ ID NO: 458991
ucucuuaccaaauacuuug

SEQ ID NO: 458993 - RNA, 19 nt, Artificial Sequence
  Description of Artificial Sequence: Synthetic oligonucleotide
  Sense strand starting at position 1249 of SEQ ID NO: 317030
guaagagacugugucucau

SEQ ID NO: 458994 - RNA, 19 nt, Artificial Sequence
  Description of Artificial Sequence: Synthetic oligonucleotide
  Antisense Strand to SEQ ID NO: 458993
augagacacagucucuuac

SEQ ID NO: 458995 - RNA, 19 nt, Artificial Sequence
  Description of Artificial Sequence: Synthetic oligonucleotide
  Sense strand starting at position 1408 of SEQ ID NO: 317030
uacagacaccugugguuua

SEQ ID NO: 458996 - RNA, 19 nt, Artificial Sequence
  Description of Artificial Sequence: Synthetic oligonucleotide
  Antisense Strand to SEQ ID NO: 458995
uaaaccacaggugucugua

SEQ ID NO: 458997 - RNA, 19 nt, Artificial Sequence
  Description of Artificial Sequence: Synthetic oligonucleotide
  Sense strand starting at position 1500 of SEQ ID NO: 317030
cuugauaggccucaaucua

SEQ ID NO: 458998 - RNA, 19 nt, Artificial Sequence
  Description of Artificial Sequence: Synthetic oligonucleotide
  Antisense Strand to SEQ ID NO: 458997
uagauugaggccuaucaag

SEQ ID NO: 458999 - RNA, 19 nt, Artificial Sequence
  Description of Artificial Sequence: Synthetic oligonucleotide
  Sense strand starting at position 1653 of SEQ ID NO: 317030
agaaacucuuuguuuaaug

SEQ ID NO: 459000 - RNA, 19 nt, Artificial Sequence
  Description of Artificial Sequence: Synthetic oligonucleotide
  Antisense Strand to SEQ ID NO: 458999
cauuaaacaaagaguuucu

SEQ ID NO: 459001 - RNA, 19 nt, Artificial Sequence
  Description of Artificial Sequence: Synthetic oligonucleotide
  Sense strand starting at position 1661 of SEQ ID NO: 317030
uuuguuuaaugggcaauca

SEQ ID NO: 459002 - RNA, 19 nt, Artificial Sequence
  Description of Artificial Sequence: Synthetic oligonucleotide
  Antisense Strand to SEQ ID NO: 459001
ugauugcccauuaaacaaa

SEQ ID NO: 459003 - RNA, 19 nt, Artificial Sequence
  Description of Artificial Sequence: Synthetic oligonucleotide
  Sense strand starting at position 1671 of SEQ ID NO: 317030
gggcaaucacaguaugcca

SEQ ID NO: 459004 - RNA, 19 nt, Artificial Sequence
  Description of Artificial Sequence: Synthetic oligonucleotide
  Antisense Strand to SEQ ID NO: 459003
uggcauacugugauugccc

SEQ ID NO: 459005 - RNA, 19 nt, Artificial Sequence
  Description of Artificial Sequence: Synthetic oligonucleotide
  Sense strand starting at position 1692 of SEQ ID NO: 317030
augggugugccacagagaa

SEQ ID NO: 459006 - RNA, 19 nt, Artificial Sequence
  Description of Artificial Sequence: Synthetic oligonucleotide
  Antisense Strand to SEQ ID NO: 459005
uucucuguggcacacccau

SEQ ID NO: 459007 - RNA, 19 nt, Artificial Sequence
  Description of Artificial Sequence: Synthetic oligonucleotide
  Sense strand starting at position 1731 of SEQ ID NO: 317030
uuauauuccuaucugggaa

SEQ ID NO: 459008 - RNA, 19 nt, Artificial Sequence
  Description of Artificial Sequence: Synthetic oligonucleotide
  Antisense Strand to SEQ ID NO: 459007
uucccagauaggaauauaa

SEQ ID NO: 459009 - RNA, 19 nt, Artificial Sequence
  Description of Artificial Sequence: Synthetic oligonucleotide
  Sense strand starting at position 1779 of SEQ ID NO: 317030
gcucucauagaaugggaua

SEQ ID NO: 459010 - RNA, 19 nt, Artificial Sequence
  Description of Artificial Sequence: Synthetic oligonucleotide
  Antisense Strand to SEQ ID NO: 459009
uaucccauucuaugagagc

SEQ ID NO: 459011 - RNA, 19 nt, Artificial Sequence
  Description of Artificial Sequence: Synthetic oligonucleotide
  Sense strand starting at position 1782 of SEQ ID NO: 317030
cucauagaaugggauauuu

SEQ ID NO: 459012 - RNA, 19 nt, Artificial Sequence
  Description of Artificial Sequence: Synthetic oligonucleotide
  Antisense Strand to SEQ ID NO: 459011
aaauaucccauucuaugag

SEQ ID NO: 459013 - RNA, 19 nt, Artificial Sequence
  Description of Artificial Sequence: Synthetic oligonucleotide
  Sense strand starting at position 1820 of SEQ ID NO: 317030
ucucaaugcuccucuggga

SEQ ID NO: 459014 - RNA, 19 nt, Artificial Sequence
  Description of Artificial Sequence: Synthetic oligonucleotide
  Antisense Strand to SEQ ID NO: 459013
ucccagaggagcauugaga

SEQ ID NO: 459015 - RNA, 19 nt, Artificial Sequence
  Description of Artificial Sequence: Synthetic oligonucleotide
  Sense strand starting at position 1833 of SEQ ID NO: 317030
cugggaauugugugaaggu

SEQ ID NO: 459016 - RNA, 19 nt, Artificial Sequence
  Description of Artificial Sequence: Synthetic oligonucleotide
  Antisense Strand to SEQ ID NO: 459015
accuucacacaauucccag

SEQ ID NO: 459017 - RNA, 19 nt, Artificial Sequence
  Description of Artificial Sequence: Synthetic oligonucleotide
  Sense strand starting at position 1878 of SEQ ID NO: 317030
cuuaaauccucuguaaagg

SEQ ID NO: 459018 - RNA, 19 nt, Artificial Sequence
  Description of Artificial Sequence: Synthetic oligonucleotide
  Antisense Strand to SEQ ID NO: 459017
ccuuuacagaggauuuaag

SEQ ID NO: 459019 - RNA, 19 nt, Artificial Sequence
  Description of Artificial Sequence: Synthetic oligonucleotide
  Sense strand starting at position 1888 of SEQ ID NO: 317030
cuguaaaggaucugaagcu

SEQ ID NO: 459020 - RNA, 19 nt, Artificial Sequence
  Description of Artificial Sequence: Synthetic oligonucleotide
  Antisense Strand to SEQ ID NO: 459019
agcuucagauccuuuacag

SEQ ID NO: 459021 - RNA, 19 nt, Artificial Sequence
  Description of Artificial Sequence: Synthetic oligonucleotide
  Sense strand starting at position 1900 of SEQ ID NO: 317030
ugaagcucuuucuugguaa

SEQ ID NO: 459022 - RNA, 19 nt, Artificial Sequence
  Description of Artificial Sequence: Synthetic oligonucleotide
  Antisense Strand to SEQ ID NO: 459021
uuaccaagaaagagcuuca

SEQ ID NO: 459023 - RNA, 19 nt, Artificial Sequence
  Description of Artificial Sequence: Synthetic oligonucleotide
  Sense strand starting at position 1915 of SEQ ID NO: 317030
guaaauuugcucugggcuu

SEQ ID NO: 459024 - RNA, 19 nt, Artificial Sequence
  Description of Artificial Sequence: Synthetic oligonucleotide
  Antisense Strand to SEQ ID NO: 459023
aagcccagagcaaauuuac

SEQ ID NO: 459025 - RNA, 19 nt, Artificial Sequence
  Description of Artificial Sequence: Synthetic oligonucleotide
  Sense strand starting at position 2154 of SEQ ID NO: 317030
ccaguuuaagcguauuaag

SEQ ID NO: 459026 - RNA, 19 nt, Artificial Sequence
  Description of Artificial Sequence: Synthetic oligonucleotide
  Antisense Strand to SEQ ID NO: 459025
cuuaauacgcuuaaacugg

SEQ ID NO: 459027 - RNA, 19 nt, Artificial Sequence
  Description of Artificial Sequence: Synthetic oligonucleotide
  Sense strand starting at position 2277 of SEQ ID NO: 317030
ucagauaaucaguggauua

SEQ ID NO: 459028 - RNA, 19 nt, Artificial Sequence
  Description of Artificial Sequence: Synthetic oligonucleotide
  Antisense Strand to SEQ ID NO: 459027
uaauccacugauuaucuga

SEQ ID NO: 459029 - RNA, 19 nt, Artificial Sequence
  Description of Artificial Sequence: Synthetic oligonucleotide
  Sense strand starting at position 2290 of SEQ ID NO: 317030
ggauuauaugauuacguca

SEQ ID NO: 459030 - RNA, 19 nt, Artificial Sequence
  Description of Artificial Sequence: Synthetic oligonucleotide
  Antisense Strand to SEQ ID NO: 459029
ugacguaaucauauaaucc

SEQ ID NO: 459031 - RNA, 19 nt, Artificial Sequence
  Description of Artificial Sequence: Synthetic oligonucleotide
  Sense strand starting at position 2293 of SEQ ID NO: 317030
uuauaugauuacgucaaac

SEQ ID NO: 459032 - RNA, 19 nt, Artificial Sequence
  Description of Artificial Sequence: Synthetic oligonucleotide
  Antisense Strand to SEQ ID NO: 459031
guuugacguaaucauauaa

SEQ ID NO: 459033 - RNA, 19 nt, Artificial Sequence
  Description of Artificial Sequence: Synthetic oligonucleotide
  Sense strand starting at position 2637 of SEQ ID NO: 317030
uaguuugcuguagagaaug

SEQ ID NO: 459034 - RNA, 19 nt, Artificial Sequence
  Description of Artificial Sequence: Synthetic oligonucleotide
  Antisense Strand to SEQ ID NO: 459033
cauucucuacagcaaacua

SEQ ID NO: 459035 - RNA, 19 nt, Artificial Sequence
  Description of Artificial Sequence: Synthetic oligonucleotide
  Sense strand starting at position 2645 of SEQ ID NO: 317030
uguagagaauggcuuccaa

SEQ ID NO: 459036 - RNA, 19 nt, Artificial Sequence
  Description of Artificial Sequence: Synthetic oligonucleotide
  Antisense Strand to SEQ ID NO: 459035
uuggaagccauucucuaca

SEQ ID NO: 459037 - RNA, 19 nt, Artificial Sequence
  Description of Artificial Sequence: Synthetic oligonucleotide
  Sense strand starting at position 2772 of SEQ ID NO: 317030
gcgguuagguugauucugu

SEQ ID NO: 459038 - RNA, 19 nt, Artificial Sequence
  Description of Artificial Sequence: Synthetic oligonucleotide
  Antisense Strand to SEQ ID NO: 459037
acagaaucaaccuaaccgc

SEQ ID NO: 459039 - RNA, 19 nt, Artificial Sequence
  Description of Artificial Sequence: Synthetic oligonucleotide
  Sense strand starting at position 81 of SEQ ID NO: 317031
gcugauucuggagauagca

SEQ ID NO: 459040 - RNA, 19 nt, Artificial Sequence
  Description of Artificial Sequence: Synthetic oligonucleotide
  Antisense Strand to SEQ ID NO: 459039
ugcuaucuccagaaucagc

SEQ ID NO: 459041 - RNA, 19 nt, Artificial Sequence
  Description of Artificial Sequence: Synthetic oligonucleotide
  Sense strand starting at position 83 of SEQ ID NO: 317031
ugauucuggagauagcagu

SEQ ID NO: 459042 - RNA, 19 nt, Artificial Sequence
  Description of Artificial Sequence: Synthetic oligonucleotide
  Antisense Strand to SEQ ID NO: 459041
acugcuaucuccagaauca

SEQ ID NO: 459043 - RNA, 19 nt, Artificial Sequence
  Description of Artificial Sequence: Synthetic oligonucleotide
  Sense strand starting at position 167 of SEQ ID NO: 317031
uagugauuauggccaccca

SEQ ID NO: 459044 - RNA, 19 nt, Artificial Sequence
  Description of Artificial Sequence: Synthetic oligonucleotide
  Antisense Strand to SEQ ID NO: 459043
uggguggccauaaucacua

SEQ ID NO: 459045 - RNA, 19 nt, Artificial Sequence
  Description of Artificial Sequence: Synthetic oligonucleotide
  Sense strand starting at position 191 of SEQ ID NO: 317031
cugugcauagucuagacau

SEQ ID NO: 459046 - RNA, 19 nt, Artificial Sequence
  Description of Artificial Sequence: Synthetic oligonucleotide
  Antisense Strand to SEQ ID NO: 459045
augucuagacuaugcacag

SEQ ID NO: 459047 - RNA, 19 nt, Artificial Sequence
  Description of Artificial Sequence: Synthetic oligonucleotide
  Sense strand starting at position 357 of SEQ ID NO: 317031
gugaaugugucucuaauag

SEQ ID NO: 459048 - RNA, 19 nt, Artificial Sequence
  Description of Artificial Sequence: Synthetic oligonucleotide
  Antisense Strand to SEQ ID NO: 459047
cuauuagagacacauucac

SEQ ID NO: 459049 - RNA, 19 nt, Artificial Sequence
  Description of Artificial Sequence: Synthetic oligonucleotide
  Sense strand starting at position 565 of SEQ ID NO: 317031
ugggcaucuccaggcauaa

SEQ ID NO: 459050 - RNA, 19 nt, Artificial Sequence
  Description of Artificial Sequence: Synthetic oligonucleotide
  Antisense Strand to SEQ ID NO: 459049
uuaugccuggagaugccca

SEQ ID NO: 459051 - RNA, 19 nt, Artificial Sequence
  Description of Artificial Sequence: Synthetic oligonucleotide
  Sense strand starting at position 567 of SEQ ID NO: 317031
ggcaucuccaggcauaagu

SEQ ID NO: 459052 - RNA, 19 nt, Artificial Sequence
  Description of Artificial Sequence: Synthetic oligonucleotide
  Antisense Strand to SEQ ID NO: 459051
acuuaugccuggagaugcc

SEQ ID NO: 459053 - RNA, 19 nt, Artificial Sequence
  Description of Artificial Sequence: Synthetic oligonucleotide
  Sense strand starting at position 710 of SEQ ID NO: 317031
guguccucccgguuacgau

SEQ ID NO: 459054 - RNA, 19 nt, Artificial Sequence
  Description of Artificial Sequence: Synthetic oligonucleotide
  Antisense Strand to SEQ ID NO: 459053
aucguaaccgggaggacac

SEQ ID NO: 459055 - RNA, 19 nt, Artificial Sequence
  Description of Artificial Sequence: Synthetic oligonucleotide
  Sense strand starting at position 796 of SEQ ID NO: 317031
ucgaaugauugacucaagu

SEQ ID NO: 459056 - RNA, 19 nt, Artificial Sequence
  Description of Artificial Sequence: Synthetic oligonucleotide
  Antisense Strand to SEQ ID NO: 459055
acuugagucaaucauucga

SEQ ID NO: 459057 - RNA, 19 nt, Artificial Sequence
  Description of Artificial Sequence: Synthetic oligonucleotide
  Sense strand starting at position 953 of SEQ ID NO: 317031
uagcuuauguaaucaggga

SEQ ID NO: 459058 - RNA, 19 nt, Artificial Sequence
  Description of Artificial Sequence: Synthetic oligonucleotide
  Antisense Strand to SEQ ID NO: 459057
ucccugauuacauaagcua

SEQ ID NO: 459059 - RNA, 19 nt, Artificial Sequence
  Description of Artificial Sequence: Synthetic oligonucleotide
  Sense strand starting at position 974 of SEQ ID NO: 317031
gguccagcccuuuaucacu

SEQ ID NO: 459060 - RNA, 19 nt, Artificial Sequence
  Description of Artificial Sequence: Synthetic oligonucleotide
  Antisense Strand to SEQ ID NO: 459059
agugauaaagggcuggacc

SEQ ID NO: 459061 - RNA, 19 nt, Artificial Sequence
  Description of Artificial Sequence: Synthetic oligonucleotide
  Sense strand starting at position 1102 of SEQ ID NO: 317031
agggcaucgucuccuauuu

SEQ ID NO: 459062 - RNA, 19 nt, Artificial Sequence
  Description of Artificial Sequence: Synthetic oligonucleotide
  Antisense Strand to SEQ ID NO: 459061
aaauaggagacgaugcccu

SEQ ID NO: 459063 - RNA, 19 nt, Artificial Sequence
  Description of Artificial Sequence: Synthetic oligonucleotide
  Sense strand starting at position 1201 of SEQ ID NO: 317031
cacagugcccgauaccuua

SEQ ID NO: 459064 - RNA, 19 nt, Artificial Sequence
  Description of Artificial Sequence: Synthetic oligonucleotide
  Antisense Strand to SEQ ID NO: 459063
uaagguaucgggcacugug

SEQ ID NO: 459065 - RNA, 19 nt, Artificial Sequence
  Description of Artificial Sequence: Synthetic oligonucleotide
  Sense strand starting at position 1222 of SEQ ID NO: 317031
aaggcuguacuguauauaa

SEQ ID NO: 459066 - RNA, 19 nt, Artificial Sequence
  Description of Artificial Sequence: Synthetic oligonucleotide
  Antisense Strand to SEQ ID NO: 459065
uuauauacaguacagccuu

SEQ ID NO: 459067 - RNA, 19 nt, Artificial Sequence
  Description of Artificial Sequence: Synthetic oligonucleotide
  Sense strand starting at position 1224 of SEQ ID NO: 317031
ggcuguacuguauauaaau

SEQ ID NO: 459068 - RNA, 19 nt, Artificial Sequence
  Description of Artificial Sequence: Synthetic oligonucleotide
  Antisense Strand to SEQ ID NO: 459067
auuuauauacaguacagcc

SEQ ID NO: 459069 - RNA, 19 nt, Artificial Sequence
  Description of Artificial Sequence: Synthetic oligonucleotide
  Sense strand starting at position 1246 of SEQ ID NO: 317031
uugcaagugucacugagga

SEQ ID NO: 459070 - RNA, 19 nt, Artificial Sequence
  Description of Artificial Sequence: Synthetic oligonucleotide
  Antisense Strand to SEQ ID NO: 459069
uccucagugacacuugcaa

SEQ ID NO: 459071 - RNA, 19 nt, Artificial Sequence
  Description of Artificial Sequence: Synthetic oligonucleotide
  Sense strand starting at position 1380 of SEQ ID NO: 317031
aguuguaaugaagaaacgu

SEQ ID NO: 459072 - RNA, 19 nt, Artificial Sequence
  Description of Artificial Sequence: Synthetic oligonucleotide
  Antisense Strand to SEQ ID NO: 459071
acguuucuucauuacaacu

SEQ ID NO: 459073 - RNA, 19 nt, Artificial Sequence
  Description of Artificial Sequence: Synthetic oligonucleotide
  Sense strand starting at position 1418 of SEQ ID NO: 317031
guggaaggcgaggaucaau

SEQ ID NO: 459074 - RNA, 19 nt, Artificial Sequence
  Description of Artificial Sequence: Synthetic oligonucleotide
  Antisense Strand to SEQ ID NO: 459073
auugauccucgccuuccac

SEQ ID NO: 459075 - RNA, 19 nt, Artificial Sequence
  Description of Artificial Sequence: Synthetic oligonucleotide
  Sense strand starting at position 1486 of SEQ ID NO: 317031
ucuggagucaucuggcaga

SEQ ID NO: 459076 - RNA, 19 nt, Artificial Sequence
  Description of Artificial Sequence: Synthetic oligonucleotide
  Antisense Strand to SEQ ID NO: 459075
ucugccagaugacuccaga

SEQ ID NO: 459077 - RNA, 19 nt, Artificial Sequence
  Description of Artificial Sequence: Synthetic oligonucleotide
  Sense strand starting at position 1491 of SEQ ID NO: 317031
agucaucuggcagaugcau

SEQ ID NO: 459078 - RNA, 19 nt, Artificial Sequence
  Description of Artificial Sequence: Synthetic oligonucleotide
  Antisense Strand to SEQ ID NO: 459077
augcaucugccagaugacu

SEQ ID NO: 459079 - RNA, 19 nt, Artificial Sequence
  Description of Artificial Sequence: Synthetic oligonucleotide
  Sense strand starting at position 1497 of SEQ ID NO: 317031
cuggcagaugcauaaacaa

SEQ ID NO: 459080 - RNA, 19 nt, Artificial Sequence
  Description of Artificial Sequence: Synthetic oligonucleotide
  Antisense Strand to SEQ ID NO: 459079
uuguuuaugcaucugccag

SEQ ID NO: 459081 - RNA, 19 nt, Artificial Sequence
  Description of Artificial Sequence: Synthetic oligonucleotide
  Sense strand starting at position 2878 of SEQ ID NO: 317031
cacaguaaggccgggaaua

SEQ ID NO: 459082 - RNA, 19 nt, Artificial Sequence
  Description of Artificial Sequence: Synthetic oligonucleotide
  Antisense Strand to SEQ ID NO: 459081
uauucccggccuuacugug

SEQ ID NO: 459083 - RNA, 19 nt, Artificial Sequence
  Description of Artificial Sequence: Synthetic oligonucleotide
  Sense strand starting at position 2880 of SEQ ID NO: 317031
caguaaggccgggaauagu

SEQ ID NO: 459084 - RNA, 19 nt, Artificial Sequence
  Description of Artificial Sequence: Synthetic oligonucleotide
  Antisense Strand to SEQ ID NO: 459083
acuauucccggccuuacug

SEQ ID NO: 459085 - RNA, 19 nt, Artificial Sequence
  Description of Artificial Sequence: Synthetic oligonucleotide
  Sense strand starting at position 2936 of SEQ ID NO: 317031
caugguuacuguuugagaa

SEQ ID NO: 459086 - RNA, 19 nt, Artificial Sequence
  Description of Artificial Sequence: Synthetic oligonucleotide
  Antisense Strand to SEQ ID NO: 459085
uucucaaacaguaaccaug

SEQ ID NO: 459087 - RNA, 19 nt, Artificial Sequence
  Description of Artificial Sequence: Synthetic oligonucleotide
  Sense strand starting at position 2937 of SEQ ID NO: 317031
augguuacuguuugagaag

SEQ ID NO: 459088 - RNA, 19 nt, Artificial Sequence
  Description of Artificial Sequence: Synthetic oligonucleotide
  Antisense Strand to SEQ ID NO: 459087
cuucucaaacaguaaccau

SEQ ID NO: 459089 - RNA, 19 nt, Artificial Sequence
  Description of Artificial Sequence: Synthetic oligonucleotide
  Sense strand starting at position 2985 of SEQ ID NO: 317031
ccaagagucaagugcauga

SEQ ID NO: 459090 - RNA, 19 nt, Artificial Sequence
  Description of Artificial Sequence: Synthetic oligonucleotide
  Antisense Strand to SEQ ID NO: 459089
ucaugcacuugacucuugg

SEQ ID NO: 459091 - RNA, 19 nt, Artificial Sequence
  Description of Artificial Sequence: Synthetic oligonucleotide
  Sense strand starting at position 3114 of SEQ ID NO: 317031
gccauuucuaaguguuugu

SEQ ID NO: 459092 - RNA, 19 nt, Artificial Sequence
  Description of Artificial Sequence: Synthetic oligonucleotide
  Antisense Strand to SEQ ID NO: 459091
acaaacacuuagaaauggc

SEQ ID NO: 459093 - RNA, 19 nt, Artificial Sequence
  Description of Artificial Sequence: Synthetic oligonucleotide
  Sense strand starting at position 3129 of SEQ ID NO: 317031
uugugaaacuauuugccuu

SEQ ID NO: 459094 - RNA, 19 nt, Artificial Sequence
  Description of Artificial Sequence: Synthetic oligonucleotide
  Antisense Strand to SEQ ID NO: 459093
aaggcaaauaguuucacaa

SEQ ID NO: 459095 - RNA, 19 nt, Artificial Sequence
  Description of Artificial Sequence: Synthetic oligonucleotide
  Sense strand starting at position 3263 of SEQ ID NO: 317031
gcgauuuacuuaguccuuu

SEQ ID NO: 459096 - RNA, 19 nt, Artificial Sequence
  Description of Artificial Sequence: Synthetic oligonucleotide
  Antisense Strand to SEQ ID NO: 459095
aaaggacuaaguaaaucgc

SEQ ID NO: 459097 - RNA, 19 nt, Artificial Sequence
  Description of Artificial Sequence: Synthetic oligonucleotide
  Sense strand starting at position 3284 of SEQ ID NO: 317031
gcccuuguagcauguauuu

SEQ ID NO: 459098 - RNA, 19 nt, Artificial Sequence
  Description of Artificial Sequence: Synthetic oligonucleotide
  Antisense Strand to SEQ ID NO: 459097
aaauacaugcuacaagggc

SEQ ID NO: 459099 - RNA, 19 nt, Artificial Sequence
  Description of Artificial Sequence: Synthetic oligonucleotide
  Sense strand starting at position 3289 of SEQ ID NO: 317031
uguagcauguauuuguaua

SEQ ID NO: 459100 - RNA, 19 nt, Artificial Sequence
  Description of Artificial Sequence: Synthetic oligonucleotide
  Antisense Strand to SEQ ID NO: 459099
uauacaaauacaugcuaca

SEQ ID NO: 459101 - RNA, 19 nt, Artificial Sequence
  Description of Artificial Sequence: Synthetic oligonucleotide
  Sense strand starting at position 3290 of SEQ ID NO: 317031
guagcauguauuuguauau

SEQ ID NO: 459102 - RNA, 19 nt, Artificial Sequence
  Description of Artificial Sequence: Synthetic oligonucleotide
  Antisense Strand to SEQ ID NO: 459101
auauacaaauacaugcuac

SEQ ID NO: 459103 - RNA, 19 nt, Artificial Sequence
  Description of Artificial Sequence: Synthetic oligonucleotide
  Sense strand starting at position 3504 of SEQ ID NO: 317031
gugacuggcauguagcaau

SEQ ID NO: 459104 - RNA, 19 nt, Artificial Sequence
  Description of Artificial Sequence: Synthetic oligonucleotide
  Antisense Strand to SEQ ID NO: 459103
auugcuacaugccagucac

SEQ ID NO: 459105 - RNA, 19 nt, Artificial Sequence
  Description of Artificial Sequence: Synthetic oligonucleotide
  Sense strand starting at position 3556 of SEQ ID NO: 317031
aguugagaacaauguuaua

SEQ ID NO: 459106 - RNA, 19 nt, Artificial Sequence
  Description of Artificial Sequence: Synthetic oligonucleotide
  Antisense Strand to SEQ ID NO: 459105
uauaacauuguucucaacu

SEQ ID NO: 459107 - RNA, 19 nt, Artificial Sequence
  Description of Artificial Sequence: Synthetic oligonucleotide
  Sense strand starting at position 3657 of SEQ ID NO: 317031
guaacuacuguguacaaga

SEQ ID NO: 459108 - RNA, 19 nt, Artificial Sequence
  Description of Artificial Sequence: Synthetic oligonucleotide
  Antisense Strand to SEQ ID NO: 459107
ucuuguacacaguaguuac

SEQ ID NO: 459109 - RNA, 19 nt, Artificial Sequence
  Description of Artificial Sequence: Synthetic oligonucleotide
  Sense strand starting at position 3679 of SEQ ID NO: 317031
aauuauaggcacugggaua

SEQ ID NO: 459110 - RNA, 19 nt, Artificial Sequence
  Description of Artificial Sequence: Synthetic oligonucleotide
  Antisense Strand to SEQ ID NO: 459109
uaucccagugccuauaauu

SEQ ID NO: 459111 - RNA, 19 nt, Artificial Sequence
  Description of Artificial Sequence: Synthetic oligonucleotide
  Sense strand starting at position 3721 of SEQ ID NO: 317031
cucaguuauuggcugacua

SEQ ID NO: 459112 - RNA, 19 nt, Artificial Sequence
  Description of Artificial Sequence: Synthetic oligonucleotide
  Antisense Strand to SEQ ID NO: 459111
uagucagccaauaacugag

SEQ ID NO: 459113 - RNA, 19 nt, Artificial Sequence
  Description of Artificial Sequence: Synthetic oligonucleotide
  Sense strand starting at position 3723 of SEQ ID NO: 317031
caguuauuggcugacuauc

SEQ ID NO: 459114 - RNA, 19 nt, Artificial Sequence
  Description of Artificial Sequence: Synthetic oligonucleotide
  Antisense Strand to SEQ ID NO: 459113
gauagucagccaauaacug

SEQ ID NO: 459115 - RNA, 19 nt, Artificial Sequence
  Description of Artificial Sequence: Synthetic oligonucleotide
  Sense strand starting at position 3781 of SEQ ID NO: 317031
agugaucugcuagggagau

SEQ ID NO: 459116 - RNA, 19 nt, Artificial Sequence
  Description of Artificial Sequence: Synthetic oligonucleotide
  Antisense Strand to SEQ ID NO: 459115
aucucccuagcagaucacu

SEQ ID NO: 459117 - RNA, 19 nt, Artificial Sequence
  Description of Artificial Sequence: Synthetic oligonucleotide
  Sense strand starting at position 3979 of SEQ ID NO: 317031
gcugaaguacauugagaga

SEQ ID NO: 459118 - RNA, 19 nt, Artificial Sequence
  Description of Artificial Sequence: Synthetic oligonucleotide
  Antisense Strand to SEQ ID NO: 459117
ucucucaauguacuucagc

SEQ ID NO: 459119 - RNA, 19 nt, Artificial Sequence
  Description of Artificial Sequence: Synthetic oligonucleotide
  Sense strand starting at position 50 of SEQ ID NO: 317032
ccuuaaugugguuaucaac

SEQ ID NO: 459120 - RNA, 19 nt, Artificial Sequence
  Description of Artificial Sequence: Synthetic oligonucleotide
  Antisense Strand to SEQ ID NO: 459119
guugauaaccacauuaagg

SEQ ID NO: 459121 - RNA, 19 nt, Artificial Sequence
  Description of Artificial Sequence: Synthetic oligonucleotide
  Sense strand starting at position 157 of SEQ ID NO: 317032
auaguauuaguccaagauu

SEQ ID NO: 459122 - RNA, 19 nt, Artificial Sequence
  Description of Artificial Sequence: Synthetic oligonucleotide
  Antisense Strand to SEQ ID NO: 459121
aaucuuggacuaauacuau

SEQ ID NO: 459123 - RNA, 19 nt, Artificial Sequence
  Description of Artificial Sequence: Synthetic oligonucleotide
  Sense strand starting at position 160 of SEQ ID NO: 317032
guauuaguccaagauuguc

SEQ ID NO: 459124 - RNA, 19 nt, Artificial Sequence
  Description of Artificial Sequence: Synthetic oligonucleotide
  Antisense Strand to SEQ ID NO: 459123
gacaaucuuggacuaauac

SEQ ID NO: 459125 - RNA, 19 nt, Artificial Sequence
  Description of Artificial Sequence: Synthetic oligonucleotide
  Sense strand starting at position 169 of SEQ ID NO: 317032
caagauuguccuggagaau

SEQ ID NO: 459126 - RNA, 19 nt, Artificial Sequence
  Description of Artificial Sequence: Synthetic oligonucleotide
  Antisense Strand to SEQ ID NO: 459125
auucuccaggacaaucuug

SEQ ID NO: 459127 - RNA, 19 nt, Artificial Sequence
  Description of Artificial Sequence: Synthetic oligonucleotide
  Sense strand starting at position 172 of SEQ ID NO: 317032
gauuguccuggagaaugcu

SEQ ID NO: 459128 - RNA, 19 nt, Artificial Sequence
  Description of Artificial Sequence: Synthetic oligonucleotide
  Antisense Strand to SEQ ID NO: 459127
agcauucuccaggacaauc

SEQ ID NO: 459129 - RNA, 19 nt, Artificial Sequence
  Description of Artificial Sequence: Synthetic oligonucleotide
  Sense strand starting at position 367 of SEQ ID NO: 317032
auacuagaguaggugucau

SEQ ID NO: 459130 - RNA, 19 nt, Artificial Sequence
  Description of Artificial Sequence: Synthetic oligonucleotide
  Antisense Strand to SEQ ID NO: 459129
augacaccuacucuaguau

SEQ ID NO: 459131 - RNA, 19 nt, Artificial Sequence
  Description of Artificial Sequence: Synthetic oligonucleotide
  Sense strand starting at position 483 of SEQ ID NO: 317032
gaauucugagauuguucca

SEQ ID NO: 459132 - RNA, 19 nt, Artificial Sequence
  Description of Artificial Sequence: Synthetic oligonucleotide
  Antisense Strand to SEQ ID NO: 459131
uggaacaaucucagaauuc

SEQ ID NO: 459133 - RNA, 19 nt, Artificial Sequence
  Description of Artificial Sequence: Synthetic oligonucleotide
  Sense strand starting at position 486 of SEQ ID NO: 317032
uucugagauuguuccauga

SEQ ID NO: 459134 - RNA, 19 nt, Artificial Sequence
  Description of Artificial Sequence: Synthetic oligonucleotide
  Antisense Strand to SEQ ID NO: 459133
ucauggaacaaucucagaa

SEQ ID NO: 459135 - RNA, 19 nt, Artificial Sequence
  Description of Artificial Sequence: Synthetic oligonucleotide
  Sense strand starting at position 490 of SEQ ID NO: 317032
gagauuguuccaugaauug

SEQ ID NO: 459136 - RNA, 19 nt, Artificial Sequence
  Description of Artificial Sequence: Synthetic oligonucleotide
  Antisense Strand to SEQ ID NO: 459135
caauucauggaacaaucuc

SEQ ID NO: 459137 - RNA, 19 nt, Artificial Sequence
  Description of Artificial Sequence: Synthetic oligonucleotide
  Sense strand starting at position 820 of SEQ ID NO: 317032
augaguuauaaauguaggu

SEQ ID NO: 459138 - RNA, 19 nt, Artificial Sequence
  Description of Artificial Sequence: Synthetic oligonucleotide
  Antisense Strand to SEQ ID NO: 459137
accuacauuuauaacucau

SEQ ID NO: 459139 - RNA, 19 nt, Artificial Sequence
  Description of Artificial Sequence: Synthetic oligonucleotide
  Sense strand starting at position 829 of SEQ ID NO: 317032
aaauguagguuucugguaa

SEQ ID NO: 459140 - RNA, 19 nt, Artificial Sequence
  Description of Artificial Sequence: Synthetic oligonucleotide
  Antisense Strand to SEQ ID NO: 459139
uuaccagaaaccuacauuu

SEQ ID NO: 459141 - RNA, 19 nt, Artificial Sequence
  Description of Artificial Sequence: Synthetic oligonucleotide
  Sense strand starting at position 848 of SEQ ID NO: 317032
ccuacaucagagugacaca

SEQ ID NO: 459142 - RNA, 19 nt, Artificial Sequence
  Description of Artificial Sequence: Synthetic oligonucleotide
  Antisense Strand to SEQ ID NO: 459141
ugugucacucugauguagg

SEQ ID NO: 459143 - RNA, 19 nt, Artificial Sequence
  Description of Artificial Sequence: Synthetic oligonucleotide
  Sense strand starting at position 880 of SEQ ID NO: 317032
gauguuugcuauuuguaaa

SEQ ID NO: 459144 - RNA, 19 nt, Artificial Sequence
  Description of Artificial Sequence: Synthetic oligonucleotide
  Antisense Strand to SEQ ID NO: 459143
uuuacaaauagcaaacauc

SEQ ID NO: 459145 - RNA, 19 nt, Artificial Sequence
  Description of Artificial Sequence: Synthetic oligonucleotide
  Sense strand starting at position 946 of SEQ ID NO: 317032
ggauuaguuguggauguaa

SEQ ID NO: 459146 - RNA, 19 nt, Artificial Sequence
  Description of Artificial Sequence: Synthetic oligonucleotide
  Antisense Strand to SEQ ID NO: 459145
uuacauccacaacuaaucc

SEQ ID NO: 459147 - RNA, 19 nt, Artificial Sequence
  Description of Artificial Sequence: Synthetic oligonucleotide
  Sense strand starting at position 948 of SEQ ID NO: 317032
auuaguuguggauguaaau

SEQ ID NO: 459148 - RNA, 19 nt, Artificial Sequence
  Description of Artificial Sequence: Synthetic oligonucleotide
  Antisense Strand to SEQ ID NO: 459147
auuuacauccacaacuaau

SEQ ID NO: 459149 - RNA, 19 nt, Artificial Sequence
  Description of Artificial Sequence: Synthetic oligonucleotide
  Sense strand starting at position 1038 of SEQ ID NO: 317032
cgucaaacaucaucuagag

SEQ ID NO: 459150 - RNA, 19 nt, Artificial Sequence
  Description of Artificial Sequence: Synthetic oligonucleotide
  Antisense Strand to SEQ ID NO: 459149
cucuagaugauguuugacg

SEQ ID NO: 459151 - RNA, 19 nt, Artificial Sequence
  Description of Artificial Sequence: Synthetic oligonucleotide
  Sense strand starting at position 1301 of SEQ ID NO: 317032
acaauuggcuaccuggaau

SEQ ID NO: 459152 - RNA, 19 nt, Artificial Sequence
  Description of Artificial Sequence: Synthetic oligonucleotide
  Antisense Strand to SEQ ID NO: 459151
auuccagguagccaauugu

SEQ ID NO: 459153 - RNA, 19 nt, Artificial Sequence
  Description of Artificial Sequence: Synthetic oligonucleotide
  Sense strand starting at position 1312 of SEQ ID NO: 317032
ccuggaaucuauguuaaag

SEQ ID NO: 459154 - RNA, 19 nt, Artificial Sequence
  Description of Artificial Sequence: Synthetic oligonucleotide
  Antisense Strand to SEQ ID NO: 459153
cuuuaacauagauuccagg

SEQ ID NO: 459155 - RNA, 19 nt, Artificial Sequence
  Description of Artificial Sequence: Synthetic oligonucleotide
  Sense strand starting at position 1331 of SEQ ID NO: 317032
ucuguuauaugaguuagag

SEQ ID NO: 459156 - RNA, 19 nt, Artificial Sequence
  Description of Artificial Sequence: Synthetic oligonucleotide
  Antisense Strand to SEQ ID NO: 459155
cucuaacucauauaacaga

SEQ ID NO: 459157 - RNA, 19 nt, Artificial Sequence
  Description of Artificial Sequence: Synthetic oligonucleotide
  Sense strand starting at position 1333 of SEQ ID NO: 317032
uguuauaugaguuagaguc

SEQ ID NO: 459158 - RNA, 19 nt, Artificial Sequence
  Description of Artificial Sequence: Synthetic oligonucleotide
  Antisense Strand to SEQ ID NO: 459157
gacucuaacucauauaaca

SEQ ID NO: 459159 - RNA, 19 nt, Artificial Sequence
  Description of Artificial Sequence: Synthetic oligonucleotide
  Sense strand starting at position 1357 of SEQ ID NO: 317032
cccuuagaaucucuguuag

SEQ ID NO: 459160 - RNA, 19 nt, Artificial Sequence
  Description of Artificial Sequence: Synthetic oligonucleotide
  Antisense Strand to SEQ ID NO: 459159
cuaacagagauucuaaggg

SEQ ID NO: 459161 - RNA, 19 nt, Artificial Sequence
  Description of Artificial Sequence: Synthetic oligonucleotide
  Sense strand starting at position 1506 of SEQ ID NO: 317032
gcaagaaaugagugaucuc

SEQ ID NO: 459162 - RNA, 19 nt, Artificial Sequence
  Description of Artificial Sequence: Synthetic oligonucleotide
  Antisense Strand to SEQ ID NO: 459161
gagaucacucauuucuugc

SEQ ID NO: 459163 - RNA, 19 nt, Artificial Sequence
  Description of Artificial Sequence: Synthetic oligonucleotide
  Sense strand starting at position 2087 of SEQ ID NO: 317032
aaggcuacugcuggagaaa

SEQ ID NO: 459164 - RNA, 19 nt, Artificial Sequence
  Description of Artificial Sequence: Synthetic oligonucleotide
  Antisense Strand to SEQ ID NO: 459163
uuucuccagcaguagccuu

SEQ ID NO: 459165 - RNA, 19 nt, Artificial Sequence
  Description of Artificial Sequence: Synthetic oligonucleotide
  Sense strand starting at position 2447 of SEQ ID NO: 317032
caggaacgucccgaggaaa

SEQ ID NO: 459166 - RNA, 19 nt, Artificial Sequence
  Description of Artificial Sequence: Synthetic oligonucleotide
  Antisense Strand to SEQ ID NO: 459165
uuuccucgggacguuccug

SEQ ID NO: 459167 - RNA, 19 nt, Artificial Sequence
  Description of Artificial Sequence: Synthetic oligonucleotide
  Sense strand starting at position 2450 of SEQ ID NO: 317032
gaacgucccgaggaaacau

SEQ ID NO: 459168 - RNA, 19 nt, Artificial Sequence
  Description of Artificial Sequence: Synthetic oligonucleotide
  Antisense Strand to SEQ ID NO: 459167
auguuuccucgggacguuc

SEQ ID NO: 459169 - RNA, 19 nt, Artificial Sequence
  Description of Artificial Sequence: Synthetic oligonucleotide
  Sense strand starting at position 2798 of SEQ ID NO: 317032
ucccaugagucaccuuauc

SEQ ID NO: 459170 - RNA, 19 nt, Artificial Sequence
  Description of Artificial Sequence: Synthetic oligonucleotide
  Antisense Strand to SEQ ID NO: 459169
gauaaggugacucauggga

SEQ ID NO: 459171 - RNA, 19 nt, Artificial Sequence
  Description of Artificial Sequence: Synthetic oligonucleotide
  Sense strand starting at position 2803 of SEQ ID NO: 317032
ugagucaccuuauccgaaa

SEQ ID NO: 459172 - RNA, 19 nt, Artificial Sequence
  Description of Artificial Sequence: Synthetic oligonucleotide
  Antisense Strand to SEQ ID NO: 459171
uuucggauaaggugacuca

SEQ ID NO: 459173 - RNA, 19 nt, Artificial Sequence
  Description of Artificial Sequence: Synthetic oligonucleotide
  Sense strand starting at position 2824 of SEQ ID NO: 317032
ucagucacugagcacuaau

SEQ ID NO: 459174 - RNA, 19 nt, Artificial Sequence
  Description of Artificial Sequence: Synthetic oligonucleotide
  Antisense Strand to SEQ ID NO: 459173
auuagugcucagugacuga

SEQ ID NO: 459175 - RNA, 19 nt, Artificial Sequence
  Description of Artificial Sequence: Synthetic oligonucleotide
  Sense strand starting at position 2827 of SEQ ID NO: 317032
gucacugagcacuaauauu

SEQ ID NO: 459176 - RNA, 19 nt, Artificial Sequence
  Description of Artificial Sequence: Synthetic oligonucleotide
  Antisense Strand to SEQ ID NO: 459175
aauauuagugcucagugac

SEQ ID NO: 459177 - RNA, 19 nt, Artificial Sequence
  Description of Artificial Sequence: Synthetic oligonucleotide
  Sense strand starting at position 2840 of SEQ ID NO: 317032
aauauucugguuugaguag

SEQ ID NO: 459178 - RNA, 19 nt, Artificial Sequence
  Description of Artificial Sequence: Synthetic oligonucleotide
  Antisense Strand to SEQ ID NO: 459177
cuacucaaaccagaauauu

SEQ ID NO: 459179 - RNA, 19 nt, Artificial Sequence
  Description of Artificial Sequence: Synthetic oligonucleotide
  Sense strand starting at position 3342 of SEQ ID NO: 317032
gaggcaguggaguauaagu

SEQ ID NO: 459180 - RNA, 19 nt, Artificial Sequence
  Description of Artificial Sequence: Synthetic oligonucleotide
  Antisense Strand to SEQ ID NO: 459179
acuuauacuccacugccuc

SEQ ID NO: 459181 - RNA, 19 nt, Artificial Sequence
  Description of Artificial Sequence: Synthetic oligonucleotide
  Sense strand starting at position 3344 of SEQ ID NO: 317032
ggcaguggaguauaaguuu

SEQ ID NO: 459182 - RNA, 19 nt, Artificial Sequence
  Description of Artificial Sequence: Synthetic oligonucleotide
  Antisense Strand to SEQ ID NO: 459181
aaacuuauacuccacugcc

SEQ ID NO: 459183 - RNA, 19 nt, Artificial Sequence
  Description of Artificial Sequence: Synthetic oligonucleotide
  Sense strand starting at position 3347 of SEQ ID NO: 317032
aguggaguauaaguuuaga

SEQ ID NO: 459184 - RNA, 19 nt, Artificial Sequence
  Description of Artificial Sequence: Synthetic oligonucleotide
  Antisense Strand to SEQ ID NO: 459183
ucuaaacuuauacuccacu

SEQ ID NO: 459185 - RNA, 19 nt, Artificial Sequence
  Description of Artificial Sequence: Synthetic oligonucleotide
  Sense strand starting at position 3449 of SEQ ID NO: 317032
uguccucaucuaugaagag

SEQ ID NO: 459186 - RNA, 19 nt, Artificial Sequence
  Description of Artificial Sequence: Synthetic oligonucleotide
  Antisense Strand to SEQ ID NO: 459185
cucuucauagaugaggaca

SEQ ID NO: 459187 - RNA, 19 nt, Artificial Sequence
  Description of Artificial Sequence: Synthetic oligonucleotide
  Sense strand starting at position 3491 of SEQ ID NO: 317032
cacucuguugagggaauua

SEQ ID NO: 459188 - RNA, 19 nt, Artificial Sequence
  Description of Artificial Sequence: Synthetic oligonucleotide
  Antisense Strand to SEQ ID NO: 459187
uaauucccucaacagagug

SEQ ID NO: 459189 - RNA, 19 nt, Artificial Sequence
  Description of Artificial Sequence: Synthetic oligonucleotide
  Sense strand starting at position 3529 of SEQ ID NO: 317032
aagagugagugcucaauca

SEQ ID NO: 459190 - RNA, 19 nt, Artificial Sequence
  Description of Artificial Sequence: Synthetic oligonucleotide
  Antisense Strand to SEQ ID NO: 459189
ugauugagcacucacucuu

SEQ ID NO: 459191 - RNA, 19 nt, Artificial Sequence
  Description of Artificial Sequence: Synthetic oligonucleotide
  Sense strand starting at position 3601 of SEQ ID NO: 317032
uggguugccagaggaauca

SEQ ID NO: 459192 - RNA, 19 nt, Artificial Sequence
  Description of Artificial Sequence: Synthetic oligonucleotide
  Antisense Strand to SEQ ID NO: 459191
ugauuccucuggcaaccca

SEQ ID NO: 459193 - RNA, 19 nt, Artificial Sequence
  Description of Artificial Sequence: Synthetic oligonucleotide
  Sense strand starting at position 3700 of SEQ ID NO: 317032
aguugaagcuccuuugaag

SEQ ID NO: 459194 - RNA, 19 nt, Artificial Sequence
  Description of Artificial Sequence: Synthetic oligonucleotide
  Antisense Strand to SEQ ID NO: 459193
cuucaaaggagcuucaacu

SEQ ID NO: 459195 - RNA, 19 nt, Artificial Sequence
  Description of Artificial Sequence: Synthetic oligonucleotide
  Sense strand starting at position 3742 of SEQ ID NO: 317032
cgguaccuccuugaggauu

SEQ ID NO: 459196 - RNA, 19 nt, Artificial Sequence
  Description of Artificial Sequence: Synthetic oligonucleotide
  Antisense Strand to SEQ ID NO: 459195
aauccucaaggagguaccg

SEQ ID NO: 459197 - RNA, 19 nt, Artificial Sequence
  Description of Artificial Sequence: Synthetic oligonucleotide
  Sense strand starting at position 3844 of SEQ ID NO: 317032
uuucuaggacuuugcuaaa

SEQ ID NO: 459198 - RNA, 19 nt, Artificial Sequence
  Description of Artificial Sequence: Synthetic oligonucleotide
  Antisense Strand to SEQ ID NO: 459197
uuuagcaaaguccuagaaa

SEQ ID NO: 459199 - RNA, 19 nt, Artificial Sequence
  Description of Artificial Sequence: Synthetic oligonucleotide
  Sense strand starting at position 82 of SEQ ID NO: 317033
gggcaauuagacuggagau

SEQ ID NO: 459200 - RNA, 19 nt, Artificial Sequence
  Description of Artificial Sequence: Synthetic oligonucleotide
  Antisense Strand to SEQ ID NO: 459199
aucuccagucuaauugccc

SEQ ID NO: 459201 - RNA, 19 nt, Artificial Sequence
  Description of Artificial Sequence: Synthetic oligonucleotide
  Sense strand starting at position 110 of SEQ ID NO: 317033
agggaaaucuggguuucca

SEQ ID NO: 459202 - RNA, 19 nt, Artificial Sequence
  Description of Artificial Sequence: Synthetic oligonucleotide
  Antisense Strand to SEQ ID NO: 459201
uggaaacccagauuucccu

SEQ ID NO: 459203 - RNA, 19 nt, Artificial Sequence
  Description of Artificial Sequence: Synthetic oligonucleotide
  Sense strand starting at position 119 of SEQ ID NO: 317033
uggguuuccaucugucaag

SEQ ID NO: 459204 - RNA, 19 nt, Artificial Sequence
  Description of Artificial Sequence: Synthetic oligonucleotide
  Antisense Strand to SEQ ID NO: 459203
cuugacagauggaaaccca

SEQ ID NO: 459205 - RNA, 19 nt, Artificial Sequence
  Description of Artificial Sequence: Synthetic oligonucleotide
  Sense strand starting at position 291 of SEQ ID NO: 317033
cgaggcgaugccuuguuau

SEQ ID NO: 459206 - RNA, 19 nt, Artificial Sequence
  Description of Artificial Sequence: Synthetic oligonucleotide
  Antisense Strand to SEQ ID NO: 459205
auaacaaggcaucgccucg

SEQ ID NO: 459207 - RNA, 19 nt, Artificial Sequence
  Description of Artificial Sequence: Synthetic oligonucleotide
  Sense strand starting at position 568 of SEQ ID NO: 317033
auauccgaaucggugaaau

SEQ ID NO: 459208 - RNA, 19 nt, Artificial Sequence
  Description of Artificial Sequence: Synthetic oligonucleotide
  Antisense Strand to SEQ ID NO: 459207
auuucaccgauucggauau

SEQ ID NO: 459209 - RNA, 19 nt, Artificial Sequence
  Description of Artificial Sequence: Synthetic oligonucleotide
  Sense strand starting at position 570 of SEQ ID NO: 317033
auccgaaucggugaaaugu

SEQ ID NO: 459210 - RNA, 19 nt, Artificial Sequence
  Description of Artificial Sequence: Synthetic oligonucleotide
  Antisense Strand to SEQ ID NO: 459209
acauuucaccgauucggau

SEQ ID NO: 459211 - RNA, 19 nt, Artificial Sequence
  Description of Artificial Sequence: Synthetic oligonucleotide
  Sense strand starting at position 587 of SEQ ID NO: 317033
guaaaucgugucuacugca

SEQ ID NO: 459212 - RNA, 19 nt, Artificial Sequence
  Description of Artificial Sequence: Synthetic oligonucleotide
  Antisense Strand to SEQ ID NO: 459211
ugcaguagacacgauuuac

SEQ ID NO: 459213 - RNA, 19 nt, Artificial Sequence
  Description of Artificial Sequence: Synthetic oligonucleotide
  Sense strand starting at position 594 of SEQ ID NO: 317033
gugucuacugcauaaggga

SEQ ID NO: 459214 - RNA, 19 nt, Artificial Sequence
  Description of Artificial Sequence: Synthetic oligonucleotide
  Antisense Strand to SEQ ID NO: 459213
ucccuuaugcaguagacac

SEQ ID NO: 459215 - RNA, 19 nt, Artificial Sequence
  Description of Artificial Sequence: Synthetic oligonucleotide
  Sense strand starting at position 608 of SEQ ID NO: 317033
agggaaucgugcagggaga

SEQ ID NO: 459216 - RNA, 19 nt, Artificial Sequence
  Description of Artificial Sequence: Synthetic oligonucleotide
  Antisense Strand to SEQ ID NO: 459215
ucucccugcacgauucccu

SEQ ID NO: 459217 - RNA, 19 nt, Artificial Sequence
  Description of Artificial Sequence: Synthetic oligonucleotide
  Sense strand starting at position 745 of SEQ ID NO: 317033
ugcgaacuuacggaagaaa

SEQ ID NO: 459218 - RNA, 19 nt, Artificial Sequence
  Description of Artificial Sequence: Synthetic oligonucleotide
  Antisense Strand to SEQ ID NO: 459217
uuucuuccguaaguucgca

SEQ ID NO: 459219 - RNA, 19 nt, Artificial Sequence
  Description of Artificial Sequence: Synthetic oligonucleotide
  Sense strand starting at position 1251 of SEQ ID NO: 317033
gagaguucugcuuggugac

SEQ ID NO: 459220 - RNA, 19 nt, Artificial Sequence
  Description of Artificial Sequence: Synthetic oligonucleotide
  Antisense Strand to SEQ ID NO: 459219
gucaccaagcagaacucuc

SEQ ID NO: 459221 - RNA, 19 nt, Artificial Sequence
  Description of Artificial Sequence: Synthetic oligonucleotide
  Sense strand starting at position 1365 of SEQ ID NO: 317033
guugcuugucccgcagaua

SEQ ID NO: 459222 - RNA, 19 nt, Artificial Sequence
  Description of Artificial Sequence: Synthetic oligonucleotide
  Antisense Strand to SEQ ID NO: 459221
uaucugcgggacaagcaac

SEQ ID NO: 459223 - RNA, 19 nt, Artificial Sequence
  Description of Artificial Sequence: Synthetic oligonucleotide
  Sense strand starting at position 1366 of SEQ ID NO: 317033
uugcuugucccgcagauaa

SEQ ID NO: 459224 - RNA, 19 nt, Artificial Sequence
  Description of Artificial Sequence: Synthetic oligonucleotide
  Antisense Strand to SEQ ID NO: 459223
uuaucugcgggacaagcaa

SEQ ID NO: 459225 - RNA, 19 nt, Artificial Sequence
  Description of Artificial Sequence: Synthetic oligonucleotide
  Sense strand starting at position 1368 of SEQ ID NO: 317033
gcuugucccgcagauaauc

SEQ ID NO: 459226 - RNA, 19 nt, Artificial Sequence
  Description of Artificial Sequence: Synthetic oligonucleotide
  Antisense Strand to SEQ ID NO: 459225
gauuaucugcgggacaagc

SEQ ID NO: 459227 - RNA, 19 nt, Artificial Sequence
  Description of Artificial Sequence: Synthetic oligonucleotide
  Sense strand starting at position 1495 of SEQ ID NO: 317033
gaacaugcuggccaaagua

SEQ ID NO: 459228 - RNA, 19 nt, Artificial Sequence
  Description of Artificial Sequence: Synthetic oligonucleotide
  Antisense Strand to SEQ ID NO: 459227
uacuuuggccagcauguuc

SEQ ID NO: 459229 - RNA, 19 nt, Artificial Sequence
  Description of Artificial Sequence: Synthetic oligonucleotide
  Sense strand starting at position 1536 of SEQ ID NO: 317033
ucgagugcuuggucacaua

SEQ ID NO: 459230 - RNA, 19 nt, Artificial Sequence
  Description of Artificial Sequence: Synthetic oligonucleotide
  Antisense Strand to SEQ ID NO: 459229
uaugugaccaagcacucga

SEQ ID NO: 459231 - RNA, 19 nt, Artificial Sequence
  Description of Artificial Sequence: Synthetic oligonucleotide
  Sense strand starting at position 2545 of SEQ ID NO: 317033
ccaggcuccuaaucugaaa

SEQ ID NO: 459232 - RNA, 19 nt, Artificial Sequence
  Description of Artificial Sequence: Synthetic oligonucleotide
  Antisense Strand to SEQ ID NO: 459231
uuucagauuaggagccugg

SEQ ID NO: 459233 - RNA, 19 nt, Artificial Sequence
  Description of Artificial Sequence: Synthetic oligonucleotide
  Sense strand starting at position 2652 of SEQ ID NO: 317033
aguuuaagugaagggcuaa

SEQ ID NO: 459234 - RNA, 19 nt, Artificial Sequence
  Description of Artificial Sequence: Synthetic oligonucleotide
  Antisense Strand to SEQ ID NO: 459233
uuagcccuucacuuaaacu

SEQ ID NO: 459235 - RNA, 19 nt, Artificial Sequence
  Description of Artificial Sequence: Synthetic oligonucleotide
  Sense strand starting at position 2653 of SEQ ID NO: 317033
guuuaagugaagggcuaaa

SEQ ID NO: 459236 - RNA, 19 nt, Artificial Sequence
  Description of Artificial Sequence: Synthetic oligonucleotide
  Antisense Strand to SEQ ID NO: 459235
uuuagcccuucacuuaaac

SEQ ID NO: 459237 - RNA, 19 nt, Artificial Sequence
  Description of Artificial Sequence: Synthetic oligonucleotide
  Sense strand starting at position 2676 of SEQ ID NO: 317033
cguaccucucuuggaauca

SEQ ID NO: 459238 - RNA, 19 nt, Artificial Sequence
  Description of Artificial Sequence: Synthetic oligonucleotide
  Antisense Strand to SEQ ID NO: 459237
ugauuccaagagagguacg

SEQ ID NO: 459239 - RNA, 19 nt, Artificial Sequence
  Description of Artificial Sequence: Synthetic oligonucleotide
  Sense strand starting at position 2703 of SEQ ID NO: 317033
gacugcgugcacugaauau

SEQ ID NO: 459240 - RNA, 19 nt, Artificial Sequence
  Description of Artificial Sequence: Synthetic oligonucleotide
  Antisense Strand to SEQ ID NO: 459239
auauucagugcacgcaguc

SEQ ID NO: 459241 - RNA, 19 nt, Artificial Sequence
  Description of Artificial Sequence: Synthetic oligonucleotide
  Sense strand starting at position 2766 of SEQ ID NO: 317033
auaauaaaggaguguaugu

SEQ ID NO: 459242 - RNA, 19 nt, Artificial Sequence
  Description of Artificial Sequence: Synthetic oligonucleotide
  Antisense Strand to SEQ ID NO: 459241
acauacacuccuuuauuau

SEQ ID NO: 459243 - RNA, 19 nt, Artificial Sequence
  Description of Artificial Sequence: Synthetic oligonucleotide
  Sense strand starting at position 2771 of SEQ ID NO: 317033
aaaggaguguauguaacaa

SEQ ID NO: 459244 - RNA, 19 nt, Artificial Sequence
  Description of Artificial Sequence: Synthetic oligonucleotide
  Antisense Strand to SEQ ID NO: 459243
uuguuacauacacuccuuu

SEQ ID NO: 459245 - RNA, 19 nt, Artificial Sequence
  Description of Artificial Sequence: Synthetic oligonucleotide
  Sense strand starting at position 2997 of SEQ ID NO: 317033
agaguaaggucacaaauaa

SEQ ID NO: 459246 - RNA, 19 nt, Artificial Sequence
  Description of Artificial Sequence: Synthetic oligonucleotide
  Antisense Strand to SEQ ID NO: 459245
uuauuugugaccuuacucu

SEQ ID NO: 459247 - RNA, 19 nt, Artificial Sequence
  Description of Artificial Sequence: Synthetic oligonucleotide
  Sense strand starting at position 3038 of SEQ ID NO: 317033
ccuuaauuuccauguguac

SEQ ID NO: 459248 - RNA, 19 nt, Artificial Sequence
  Description of Artificial Sequence: Synthetic oligonucleotide
  Antisense Strand to SEQ ID NO: 459247
guacacauggaaauuaagg

SEQ ID NO: 459249 - RNA, 19 nt, Artificial Sequence
  Description of Artificial Sequence: Synthetic oligonucleotide
  Sense strand starting at position 3044 of SEQ ID NO: 317033
uuuccauguguacauagua

SEQ ID NO: 459250 - RNA, 19 nt, Artificial Sequence
  Description of Artificial Sequence: Synthetic oligonucleotide
  Antisense Strand to SEQ ID NO: 459249
uacuauguacacauggaaa

SEQ ID NO: 459251 - RNA, 19 nt, Artificial Sequence
  Description of Artificial Sequence: Synthetic oligonucleotide
  Sense strand starting at position 3210 of SEQ ID NO: 317033
uguauuguggcacaaagua

SEQ ID NO: 459252 - RNA, 19 nt, Artificial Sequence
  Description of Artificial Sequence: Synthetic oligonucleotide
  Antisense Strand to SEQ ID NO: 459251
uacuuugugccacaauaca

SEQ ID NO: 459253 - RNA, 19 nt, Artificial Sequence
  Description of Artificial Sequence: Synthetic oligonucleotide
  Sense strand starting at position 3271 of SEQ ID NO: 317033
ccauuagcagucgauauac

SEQ ID NO: 459254 - RNA, 19 nt, Artificial Sequence
  Description of Artificial Sequence: Synthetic oligonucleotide
  Antisense Strand to SEQ ID NO: 459253
guauaucgacugcuaaugg

SEQ ID NO: 459255 - RNA, 19 nt, Artificial Sequence
  Description of Artificial Sequence: Synthetic oligonucleotide
  Sense strand starting at position 3728 of SEQ ID NO: 317033
gaagaauauucgggauuua

SEQ ID NO: 459256 - RNA, 19 nt, Artificial Sequence
  Description of Artificial Sequence: Synthetic oligonucleotide
  Antisense Strand to SEQ ID NO: 459255
uaaaucccgaauauucuuc

SEQ ID NO: 459257 - RNA, 19 nt, Artificial Sequence
  Description of Artificial Sequence: Synthetic oligonucleotide
  Sense strand starting at position 3747 of SEQ ID NO: 317033
aaguaaucguuccuggaua

SEQ ID NO: 459258 - RNA, 19 nt, Artificial Sequence
  Description of Artificial Sequence: Synthetic oligonucleotide
  Antisense Strand to SEQ ID NO: 459257
uauccaggaacgauuacuu

SEQ ID NO: 459259 - RNA, 19 nt, Artificial Sequence
  Description of Artificial Sequence: Synthetic oligonucleotide
  Sense strand starting at position 3749 of SEQ ID NO: 317033
guaaucguuccuggauaaa

SEQ ID NO: 459260 - RNA, 19 nt, Artificial Sequence
  Description of Artificial Sequence: Synthetic oligonucleotide
  Antisense Strand to SEQ ID NO: 459259
uuuauccaggaacgauuac

SEQ ID NO: 459261 - RNA, 19 nt, Artificial Sequence
  Description of Artificial Sequence: Synthetic oligonucleotide
  Sense strand starting at position 3752 of SEQ ID NO: 317033
aucguuccuggauaaauga

SEQ ID NO: 459262 - RNA, 19 nt, Artificial Sequence
  Description of Artificial Sequence: Synthetic oligonucleotide
  Antisense Strand to SEQ ID NO: 459261
ucauuuauccaggaacgau

SEQ ID NO: 459263 - RNA, 19 nt, Artificial Sequence
  Description of Artificial Sequence: Synthetic oligonucleotide
  Sense strand starting at position 3837 of SEQ ID NO: 317033
gcccauuuaucauaaggua

SEQ ID NO: 459264 - RNA, 19 nt, Artificial Sequence
  Description of Artificial Sequence: Synthetic oligonucleotide
  Antisense Strand to SEQ ID NO: 459263
uaccuuaugauaaaugggc

SEQ ID NO: 459265 - RNA, 19 nt, Artificial Sequence
  Description of Artificial Sequence: Synthetic oligonucleotide
  Sense strand starting at position 3849 of SEQ ID NO: 317033
uaagguaagugucccuaau

SEQ ID NO: 459266 - RNA, 19 nt, Artificial Sequence
  Description of Artificial Sequence: Synthetic oligonucleotide
  Antisense Strand to SEQ ID NO: 459265
auuagggacacuuaccuua

SEQ ID NO: 459267 - RNA, 19 nt, Artificial Sequence
  Description of Artificial Sequence: Synthetic oligonucleotide
  Sense strand starting at position 3851 of SEQ ID NO: 317033
agguaagugucccuaauga

SEQ ID NO: 459268 - RNA, 19 nt, Artificial Sequence
  Description of Artificial Sequence: Synthetic oligonucleotide
  Antisense Strand to SEQ ID NO: 459267
ucauuagggacacuuaccu

SEQ ID NO: 459269 - RNA, 19 nt, Artificial Sequence
  Description of Artificial Sequence: Synthetic oligonucleotide
  Sense strand starting at position 3892 of SEQ ID NO: 317033
acuguaaugaaguggauau

SEQ ID NO: 459270 - RNA, 19 nt, Artificial Sequence
  Description of Artificial Sequence: Synthetic oligonucleotide
  Antisense Strand to SEQ ID NO: 459269
auauccacuucauuacagu

SEQ ID NO: 459271 - RNA, 19 nt, Artificial Sequence
  Description of Artificial Sequence: Synthetic oligonucleotide
  Sense strand starting at position 3893 of SEQ ID NO: 317033
cuguaaugaaguggauaua

SEQ ID NO: 459272 - RNA, 19 nt, Artificial Sequence
  Description of Artificial Sequence: Synthetic oligonucleotide
  Antisense Strand to SEQ ID NO: 459271
uauauccacuucauuacag

SEQ ID NO: 459273 - RNA, 19 nt, Artificial Sequence
  Description of Artificial Sequence: Synthetic oligonucleotide
  Sense strand starting at position 3927 of SEQ ID NO: 317033
ugaauaugaagucgcuaau

SEQ ID NO: 459274 - RNA, 19 nt, Artificial Sequence
  Description of Artificial Sequence: Synthetic oligonucleotide
  Antisense Strand to SEQ ID NO: 459273
auuagcgacuucauauuca

SEQ ID NO: 459275 - RNA, 19 nt, Artificial Sequence
  Description of Artificial Sequence: Synthetic oligonucleotide
  Sense strand starting at position 3930 of SEQ ID NO: 317033
auaugaagucgcuaauauc

SEQ ID NO: 459276 - RNA, 19 nt, Artificial Sequence
  Description of Artificial Sequence: Synthetic oligonucleotide
  Antisense Strand to SEQ ID NO: 459275
gauauuagcgacuucauau

SEQ ID NO: 459277 - RNA, 19 nt, Artificial Sequence
  Description of Artificial Sequence: Synthetic oligonucleotide
  Sense strand starting at position 3941 of SEQ ID NO: 317033
cuaauaucagguugaaauc

SEQ ID NO: 459278 - RNA, 19 nt, Artificial Sequence
  Description of Artificial Sequence: Synthetic oligonucleotide
  Antisense Strand to SEQ ID NO: 459277
gauuucaaccugauauuag

SEQ ID NO: 459279 - RNA, 19 nt, Artificial Sequence
  Description of Artificial Sequence: Synthetic oligonucleotide
  Sense strand starting at position 97 of SEQ ID NO: 317034
guaagagguacacaugcua

SEQ ID NO: 459280 - RNA, 19 nt, Artificial Sequence
  Description of Artificial Sequence: Synthetic oligonucleotide
  Antisense Strand to SEQ ID NO: 459279
uagcauguguaccucuuac

SEQ ID NO: 459281 - RNA, 19 nt, Artificial Sequence
  Description of Artificial Sequence: Synthetic oligonucleotide
  Sense strand starting at position 219 of SEQ ID NO: 317034
ugccucugucucuagaauu

SEQ ID NO: 459282 - RNA, 19 nt, Artificial Sequence
  Description of Artificial Sequence: Synthetic oligonucleotide
  Antisense Strand to SEQ ID NO: 459281
aauucuagagacagaggca

SEQ ID NO: 459283 - RNA, 19 nt, Artificial Sequence
  Description of Artificial Sequence: Synthetic oligonucleotide
  Sense strand starting at position 232 of SEQ ID NO: 317034
agaauuugauggcaccaau

SEQ ID NO: 459284 - RNA, 19 nt, Artificial Sequence
  Description of Artificial Sequence: Synthetic oligonucleotide
  Antisense Strand to SEQ ID NO: 459283
auuggugccaucaaauucu

SEQ ID NO: 459285 - RNA, 19 nt, Artificial Sequence
  Description of Artificial Sequence: Synthetic oligonucleotide
  Sense strand starting at position 330 of SEQ ID NO: 317034
uuacuacuacgcuaggaaa

SEQ ID NO: 459286 - RNA, 19 nt, Artificial Sequence
  Description of Artificial Sequence: Synthetic oligonucleotide
  Antisense Strand to SEQ ID NO: 459285
uuuccuagcguaguaguaa

SEQ ID NO: 459287 - RNA, 19 nt, Artificial Sequence
  Description of Artificial Sequence: Synthetic oligonucleotide
  Sense strand starting at position 368 of SEQ ID NO: 317034
acucacuucuuuguggaau

SEQ ID NO: 459288 - RNA, 19 nt, Artificial Sequence
  Description of Artificial Sequence: Synthetic oligonucleotide
  Antisense Strand to SEQ ID NO: 459287
auuccacaaagaagugagu

SEQ ID NO: 459289 - RNA, 19 nt, Artificial Sequence
  Description of Artificial Sequence: Synthetic oligonucleotide
  Sense strand starting at position 442 of SEQ ID NO: 317034
agggcuugucugggacaaa

SEQ ID NO: 459290 - RNA, 19 nt, Artificial Sequence
  Description of Artificial Sequence: Synthetic oligonucleotide
  Antisense Strand to SEQ ID NO: 459289
uuugucccagacaagcccu

SEQ ID NO: 459291 - RNA, 19 nt, Artificial Sequence
  Description of Artificial Sequence: Synthetic oligonucleotide
  Sense strand starting at position 445 of SEQ ID NO: 317034
gcuugucugggacaaauga

SEQ ID NO: 459292 - RNA, 19 nt, Artificial Sequence
  Description of Artificial Sequence: Synthetic oligonucleotide
  Antisense Strand to SEQ ID NO: 459291
ucauuugucccagacaagc

SEQ ID NO: 459293 - RNA, 19 nt, Artificial Sequence
  Description of Artificial Sequence: Synthetic oligonucleotide
  Sense strand starting at position 453 of SEQ ID NO: 317034
gggacaaaugaguguccau

SEQ ID NO: 459294 - RNA, 19 nt, Artificial Sequence
  Description of Artificial Sequence: Synthetic oligonucleotide
  Antisense Strand to SEQ ID NO: 459293
auggacacucauuuguccc

SEQ ID NO: 459295 - RNA, 19 nt, Artificial Sequence
  Description of Artificial Sequence: Synthetic oligonucleotide
  Sense strand starting at position 572 of SEQ ID NO: 317034
augugauucuugucuuagg

SEQ ID NO: 459296 - RNA, 19 nt, Artificial Sequence
  Description of Artificial Sequence: Synthetic oligonucleotide
  Antisense Strand to SEQ ID NO: 459295
ccuaagacaagaaucacau

SEQ ID NO: 459297 - RNA, 19 nt, Artificial Sequence
  Description of Artificial Sequence: Synthetic oligonucleotide
  Sense strand starting at position 579 of SEQ ID NO: 317034
ucuugucuuagggaguaag

SEQ ID NO: 459298 - RNA, 19 nt, Artificial Sequence
  Description of Artificial Sequence: Synthetic oligonucleotide
  Antisense Strand to SEQ ID NO: 459297
cuuacucccuaagacaaga

SEQ ID NO: 459299 - RNA, 19 nt, Artificial Sequence
  Description of Artificial Sequence: Synthetic oligonucleotide
  Sense strand starting at position 763 of SEQ ID NO: 317034
acagcuauugcaugaagaa

SEQ ID NO: 459300 - RNA, 19 nt, Artificial Sequence
  Description of Artificial Sequence: Synthetic oligonucleotide
  Antisense Strand to SEQ ID NO: 459299
uucuucaugcaauagcugu

SEQ ID NO: 459301 - RNA, 19 nt, Artificial Sequence
  Description of Artificial Sequence: Synthetic oligonucleotide
  Sense strand starting at position 785 of SEQ ID NO: 317034
guguguuccuaauugaagg

SEQ ID NO: 459302 - RNA, 19 nt, Artificial Sequence
  Description of Artificial Sequence: Synthetic oligonucleotide
  Antisense Strand to SEQ ID NO: 459301
ccuucaauuaggaacacac

SEQ ID NO: 459303 - RNA, 19 nt, Artificial Sequence
  Description of Artificial Sequence: Synthetic oligonucleotide
  Sense strand starting at position 786 of SEQ ID NO: 317034
uguguuccuaauugaagga

SEQ ID NO: 459304 - RNA, 19 nt, Artificial Sequence
  Description of Artificial Sequence: Synthetic oligonucleotide
  Antisense Strand to SEQ ID NO: 459303
uccuucaauuaggaacaca

SEQ ID NO: 459305 - RNA, 19 nt, Artificial Sequence
  Description of Artificial Sequence: Synthetic oligonucleotide
  Sense strand starting at position 895 of SEQ ID NO: 317034
ugacuaugcgcuuacacca

SEQ ID NO: 459306 - RNA, 19 nt, Artificial Sequence
  Description of Artificial Sequence: Synthetic oligonucleotide
  Antisense Strand to SEQ ID NO: 459305
ugguguaagcgcauaguca

SEQ ID NO: 459307 - RNA, 19 nt, Artificial Sequence
  Description of Artificial Sequence: Synthetic oligonucleotide
  Sense strand starting at position 917 of SEQ ID NO: 317034
accacagcgcuuugaaaga

SEQ ID NO: 459308 - RNA, 19 nt, Artificial Sequence
  Description of Artificial Sequence: Synthetic oligonucleotide
  Antisense Strand to SEQ ID NO: 459307
ucuuucaaagcgcuguggu

SEQ ID NO: 459309 - RNA, 19 nt, Artificial Sequence
  Description of Artificial Sequence: Synthetic oligonucleotide
  Sense strand starting at position 926 of SEQ ID NO: 317034
cuuugaaagaugugcaaug

SEQ ID NO: 459310 - RNA, 19 nt, Artificial Sequence
  Description of Artificial Sequence: Synthetic oligonucleotide
  Antisense Strand to SEQ ID NO: 459309
cauugcacaucuuucaaag

SEQ ID NO: 459311 - RNA, 19 nt, Artificial Sequence
  Description of Artificial Sequence: Synthetic oligonucleotide
  Sense strand starting at position 931 of SEQ ID NO: 317034
aaagaugugcaaugcuuua

SEQ ID NO: 459312 - RNA, 19 nt, Artificial Sequence
  Description of Artificial Sequence: Synthetic oligonucleotide
  Antisense Strand to SEQ ID NO: 459311
uaaagcauugcacaucuuu

SEQ ID NO: 459313 - RNA, 19 nt, Artificial Sequence
  Description of Artificial Sequence: Synthetic oligonucleotide
  Sense strand starting at position 1193 of SEQ ID NO: 317034
ggagacccggccugagauu

SEQ ID NO: 459314 - RNA, 19 nt, Artificial Sequence
  Description of Artificial Sequence: Synthetic oligonucleotide
  Antisense Strand to SEQ ID NO: 459313
aaucucaggccgggucucc

SEQ ID NO: 459315 - RNA, 19 nt, Artificial Sequence
  Description of Artificial Sequence: Synthetic oligonucleotide
  Sense strand starting at position 1204 of SEQ ID NO: 317034
cugagauuccggcaagguu

SEQ ID NO: 459316 - RNA, 19 nt, Artificial Sequence
  Description of Artificial Sequence: Synthetic oligonucleotide
  Antisense Strand to SEQ ID NO: 459315
aaccuugccggaaucucag

SEQ ID NO: 459317 - RNA, 19 nt, Artificial Sequence
  Description of Artificial Sequence: Synthetic oligonucleotide
  Sense strand starting at position 1547 of SEQ ID NO: 317034
acgauuccgaguuagaucu

SEQ ID NO: 459318 - RNA, 19 nt, Artificial Sequence
  Description of Artificial Sequence: Synthetic oligonucleotide
  Antisense Strand to SEQ ID NO: 459317
agaucuaacucggaaucgu

SEQ ID NO: 459319 - RNA, 19 nt, Artificial Sequence
  Description of Artificial Sequence: Synthetic oligonucleotide
  Sense strand starting at position 1714 of SEQ ID NO: 317034
gggcgaaaugcccagaacu

SEQ ID NO: 459320 - RNA, 19 nt, Artificial Sequence
  Description of Artificial Sequence: Synthetic oligonucleotide
  Antisense Strand to SEQ ID NO: 459319
aguucugggcauuucgccc

SEQ ID NO: 459321 - RNA, 19 nt, Artificial Sequence
  Description of Artificial Sequence: Synthetic oligonucleotide
  Sense strand starting at position 2445 of SEQ ID NO: 317034
cggauacucagccaaguau

SEQ ID NO: 459322 - RNA, 19 nt, Artificial Sequence
  Description of Artificial Sequence: Synthetic oligonucleotide
  Antisense Strand to SEQ ID NO: 459321
auacuuggcugaguauccg

SEQ ID NO: 459323 - RNA, 19 nt, Artificial Sequence
  Description of Artificial Sequence: Synthetic oligonucleotide
  Sense strand starting at position 2457 of SEQ ID NO: 317034
caaguaugccgggucgcaa

SEQ ID NO: 459324 - RNA, 19 nt, Artificial Sequence
  Description of Artificial Sequence: Synthetic oligonucleotide
  Antisense Strand to SEQ ID NO: 459323
uugcgacccggcauacuug

SEQ ID NO: 459325 - RNA, 19 nt, Artificial Sequence
  Description of Artificial Sequence: Synthetic oligonucleotide
  Sense strand starting at position 2524 of SEQ ID NO: 317034
uuguuuggccaguauaauu

SEQ ID NO: 459326 - RNA, 19 nt, Artificial Sequence
  Description of Artificial Sequence: Synthetic oligonucleotide
  Antisense Strand to SEQ ID NO: 459325
aauuauacuggccaaacaa

SEQ ID NO: 459327 - RNA, 19 nt, Artificial Sequence
  Description of Artificial Sequence: Synthetic oligonucleotide
  Sense strand starting at position 2557 of SEQ ID NO: 317034
ugaaucugguugcucuuaa

SEQ ID NO: 459328 - RNA, 19 nt, Artificial Sequence
  Description of Artificial Sequence: Synthetic oligonucleotide
  Antisense Strand to SEQ ID NO: 459327
uuaagagcaaccagauuca

SEQ ID NO: 459329 - RNA, 19 nt, Artificial Sequence
  Description of Artificial Sequence: Synthetic oligonucleotide
  Sense strand starting at position 2558 of SEQ ID NO: 317034
gaaucugguugcucuuaau

SEQ ID NO: 459330 - RNA, 19 nt, Artificial Sequence
  Description of Artificial Sequence: Synthetic oligonucleotide
  Antisense Strand to SEQ ID NO: 459329
auuaagagcaaccagauuc

SEQ ID NO: 459331 - RNA, 19 nt, Artificial Sequence
  Description of Artificial Sequence: Synthetic oligonucleotide
  Sense strand starting at position 2564 of SEQ ID NO: 317034
gguugcucuuaaucagaaa

SEQ ID NO: 459332 - RNA, 19 nt, Artificial Sequence
  Description of Artificial Sequence: Synthetic oligonucleotide
  Antisense Strand to SEQ ID NO: 459331
uuucugauuaagagcaacc

SEQ ID NO: 459333 - RNA, 19 nt, Artificial Sequence
  Description of Artificial Sequence: Synthetic oligonucleotide
  Sense strand starting at position 2694 of SEQ ID NO: 317034
aacgaagagcccuagugaa

SEQ ID NO: 459334 - RNA, 19 nt, Artificial Sequence
  Description of Artificial Sequence: Synthetic oligonucleotide
  Antisense Strand to SEQ ID NO: 459333
uucacuagggcucuucguu

SEQ ID NO: 459335 - RNA, 19 nt, Artificial Sequence
  Description of Artificial Sequence: Synthetic oligonucleotide
  Sense strand starting at position 3002 of SEQ ID NO: 317034
augaaucuuccagaugccu

SEQ ID NO: 459336 - RNA, 19 nt, Artificial Sequence
  Description of Artificial Sequence: Synthetic oligonucleotide
  Antisense Strand to SEQ ID NO: 459335
aggcaucuggaagauucau

SEQ ID NO: 459337 - RNA, 19 nt, Artificial Sequence
  Description of Artificial Sequence: Synthetic oligonucleotide
  Sense strand starting at position 3393 of SEQ ID NO: 317034
cccacaauugcuugguaua

SEQ ID NO: 459338 - RNA, 19 nt, Artificial Sequence
  Description of Artificial Sequence: Synthetic oligonucleotide
  Antisense Strand to SEQ ID NO: 459337
uauaccaagcaauuguggg

SEQ ID NO: 459339 - RNA, 19 nt, Artificial Sequence
  Description of Artificial Sequence: Synthetic oligonucleotide
  Sense strand starting at position 3394 of SEQ ID NO: 317034
ccacaauugcuugguauaa

SEQ ID NO: 459340 - RNA, 19 nt, Artificial Sequence
  Description of Artificial Sequence: Synthetic oligonucleotide
  Antisense Strand to SEQ ID NO: 459339
uuauaccaagcaauugugg

SEQ ID NO: 459341 - RNA, 19 nt, Artificial Sequence
  Description of Artificial Sequence: Synthetic oligonucleotide
  Sense strand starting at position 3405 of SEQ ID NO: 317034
ugguauaaaugcuauuuga

SEQ ID NO: 459342 - RNA, 19 nt, Artificial Sequence
  Description of Artificial Sequence: Synthetic oligonucleotide
  Antisense Strand to SEQ ID NO: 459341
ucaaauagcauuuauacca

SEQ ID NO: 459343 - RNA, 19 nt, Artificial Sequence
  Description of Artificial Sequence: Synthetic oligonucleotide
  Sense strand starting at position 3416 of SEQ ID NO: 317034
cuauuugagccuuggcuuu

SEQ ID NO: 459344 - RNA, 19 nt, Artificial Sequence
  Description of Artificial Sequence: Synthetic oligonucleotide
  Antisense Strand to SEQ ID NO: 459343
aaagccaaggcucaaauag

SEQ ID NO: 459345 - RNA, 19 nt, Artificial Sequence
  Description of Artificial Sequence: Synthetic oligonucleotide
  Sense strand starting at position 3596 of SEQ ID NO: 317034
acuggagauucguucuaca

SEQ ID NO: 459346 - RNA, 19 nt, Artificial Sequence
  Description of Artificial Sequence: Synthetic oligonucleotide
  Antisense Strand to SEQ ID NO: 459345
uguagaacgaaucuccagu

SEQ ID NO: 459347 - RNA, 19 nt, Artificial Sequence
  Description of Artificial Sequence: Synthetic oligonucleotide
  Sense strand starting at position 3601 of SEQ ID NO: 317034
agauucguucuacaucaac

SEQ ID NO: 459348 - RNA, 19 nt, Artificial Sequence
  Description of Artificial Sequence: Synthetic oligonucleotide
  Antisense Strand to SEQ ID NO: 459347
guugauguagaacgaaucu

SEQ ID NO: 459349 - RNA, 19 nt, Artificial Sequence
  Description of Artificial Sequence: Synthetic oligonucleotide
  Sense strand starting at position 3752 of SEQ ID NO: 317034
ggcauagugcucuacuaua

SEQ ID NO: 459350 - RNA, 19 nt, Artificial Sequence
  Description of Artificial Sequence: Synthetic oligonucleotide
  Antisense Strand to SEQ ID NO: 459349
uauaguagagcacuaugcc

SEQ ID NO: 459351 - RNA, 19 nt, Artificial Sequence
  Description of Artificial Sequence: Synthetic oligonucleotide
  Sense strand starting at position 3757 of SEQ ID NO: 317034
agugcucuacuauauagau

SEQ ID NO: 459352 - RNA, 19 nt, Artificial Sequence
  Description of Artificial Sequence: Synthetic oligonucleotide
  Antisense Strand to SEQ ID NO: 459351
aucuauauaguagagcacu

SEQ ID NO: 459353 - RNA, 19 nt, Artificial Sequence
  Description of Artificial Sequence: Synthetic oligonucleotide
  Sense strand starting at position 3782 of SEQ ID NO: 317034
auauuuaucugggagguau

SEQ ID NO: 459354 - RNA, 19 nt, Artificial Sequence
  Description of Artificial Sequence: Synthetic oligonucleotide
  Antisense Strand to SEQ ID NO: 459353
auaccucccagauaaauau

SEQ ID NO: 459355 - RNA, 19 nt, Artificial Sequence
  Description of Artificial Sequence: Synthetic oligonucleotide
  Sense strand starting at position 3870 of SEQ ID NO: 317034
uaggauggacucuggcaaa

SEQ ID NO: 459356 - RNA, 19 nt, Artificial Sequence
  Description of Artificial Sequence: Synthetic oligonucleotide
  Antisense Strand to SEQ ID NO: 459355
uuugccagaguccauccua

SEQ ID NO: 459357 - RNA, 19 nt, Artificial Sequence
  Description of Artificial Sequence: Synthetic oligonucleotide
  Sense strand starting at position 3880 of SEQ ID NO: 317034
ucuggcaaaguuggauaaa

SEQ ID NO: 459358 - RNA, 19 nt, Artificial Sequence
  Description of Artificial Sequence: Synthetic oligonucleotide
  Antisense Strand to SEQ ID NO: 459357
uuuauccaacuuugccaga

SEQ ID NO: 459359 - RNA, 19 nt, Artificial Sequence
  Description of Artificial Sequence: Synthetic oligonucleotide
  Sense strand starting at position 2 of SEQ ID NO: 317035
auguaacgggcuuacauaa

SEQ ID NO: 459360 - RNA, 19 nt, Artificial Sequence
  Description of Artificial Sequence: Synthetic oligonucleotide
  Antisense Strand to SEQ ID NO: 459359
uuauguaagcccguuacau

SEQ ID NO: 459361 - RNA, 19 nt, Artificial Sequence
  Description of Artificial Sequence: Synthetic oligonucleotide
  Sense strand starting at position 97 of SEQ ID NO: 317035
gaaucugaguuauaagaua

SEQ ID NO: 459362 - RNA, 19 nt, Artificial Sequence
  Description of Artificial Sequence: Synthetic oligonucleotide
  Antisense Strand to SEQ ID NO: 459361
uaucuuauaacucagauuc

SEQ ID NO: 459363 - RNA, 19 nt, Artificial Sequence
  Description of Artificial Sequence: Synthetic oligonucleotide
  Sense strand starting at position 149 of SEQ ID NO: 317035
aggcacacucucggaaaua

SEQ ID NO: 459364 - RNA, 19 nt, Artificial Sequence
  Description of Artificial Sequence: Synthetic oligonucleotide
  Antisense Strand to SEQ ID NO: 459363
uauuuccgagagugugccu

SEQ ID NO: 459365 - RNA, 19 nt, Artificial Sequence
  Description of Artificial Sequence: Synthetic oligonucleotide
  Sense strand starting at position 162 of SEQ ID NO: 317035
gaaauagguucugucauaa

SEQ ID NO: 459366 - RNA, 19 nt, Artificial Sequence
  Description of Artificial Sequence: Synthetic oligonucleotide
  Antisense Strand to SEQ ID NO: 459365
uuaugacagaaccuauuuc

SEQ ID NO: 459367 - RNA, 19 nt, Artificial Sequence
  Description of Artificial Sequence: Synthetic oligonucleotide
  Sense strand starting at position 174 of SEQ ID NO: 317035
gucauaaggaagcgacaua

SEQ ID NO: 459368 - RNA, 19 nt, Artificial Sequence
  Description of Artificial Sequence: Synthetic oligonucleotide
  Antisense Strand to SEQ ID NO: 459367
uaugucgcuuccuuaugac

SEQ ID NO: 459369 - RNA, 19 nt, Artificial Sequence
  Description of Artificial Sequence: Synthetic oligonucleotide
  Sense strand starting at position 191 of SEQ ID NO: 317035
uagagauccugagaccuau

SEQ ID NO: 459370 - RNA, 19 nt, Artificial Sequence
  Description of Artificial Sequence: Synthetic oligonucleotide
  Antisense Strand to SEQ ID NO: 459369
auaggucucaggaucucua

SEQ ID NO: 459371 - RNA, 19 nt, Artificial Sequence
  Description of Artificial Sequence: Synthetic oligonucleotide
  Sense strand starting at position 202 of SEQ ID NO: 317035
agaccuauuuaagaauggu

SEQ ID NO: 459372 - RNA, 19 nt, Artificial Sequence
  Description of Artificial Sequence: Synthetic oligonucleotide
  Antisense Strand to SEQ ID NO: 459371
accauucuuaaauaggucu

SEQ ID NO: 459373 - RNA, 19 nt, Artificial Sequence
  Description of Artificial Sequence: Synthetic oligonucleotide
  Sense strand starting at position 240 of SEQ ID NO: 317035
ggaagaauauuugaccuug

SEQ ID NO: 459374 - RNA, 19 nt, Artificial Sequence
  Description of Artificial Sequence: Synthetic oligonucleotide
  Antisense Strand to SEQ ID NO: 459373
caaggucaaauauucuucc

SEQ ID NO: 459375 - RNA, 19 nt, Artificial Sequence
  Description of Artificial Sequence: Synthetic oligonucleotide
  Sense strand starting at position 258 of SEQ ID NO: 317035
gaggaugcagagugauaga

SEQ ID NO: 459376 - RNA, 19 nt, Artificial Sequence
  Description of Artificial Sequence: Synthetic oligonucleotide
  Antisense Strand to SEQ ID NO: 459375
ucuaucacucugcauccuc

SEQ ID NO: 459377 - RNA, 19 nt, Artificial Sequence
  Description of Artificial Sequence: Synthetic oligonucleotide
  Sense strand starting at position 316 of SEQ ID NO: 317035
auucuaaguccacgaaaug

SEQ ID NO: 459378 - RNA, 19 nt, Artificial Sequence
  Description of Artificial Sequence: Synthetic oligonucleotide
  Antisense Strand to SEQ ID NO: 459377
cauuucguggacuuagaau

SEQ ID NO: 459379 - RNA, 19 nt, Artificial Sequence
  Description of Artificial Sequence: Synthetic oligonucleotide
  Sense strand starting at position 333 of SEQ ID NO: 317035
uggucaaaguguucuggaa

SEQ ID NO: 459380 - RNA, 19 nt, Artificial Sequence
  Description of Artificial Sequence: Synthetic oligonucleotide
  Antisense Strand to SEQ ID NO: 459379
uuccagaacacuuugacca

SEQ ID NO: 459381 - RNA, 19 nt, Artificial Sequence
  Description of Artificial Sequence: Synthetic oligonucleotide
  Sense strand starting at position 530 of SEQ ID NO: 317035
guauccaacccagguaauu

SEQ ID NO: 459382 - RNA, 19 nt, Artificial Sequence
  Description of Artificial Sequence: Synthetic oligonucleotide
  Antisense Strand to SEQ ID NO: 459381
aauuaccuggguuggauac

SEQ ID NO: 459383 - RNA, 19 nt, Artificial Sequence
  Description of Artificial Sequence: Synthetic oligonucleotide
  Sense strand starting at position 541 of SEQ ID NO: 317035
agguaauuauuagcaagaa

SEQ ID NO: 459384 - RNA, 19 nt, Artificial Sequence
  Description of Artificial Sequence: Synthetic oligonucleotide
  Antisense Strand to SEQ ID NO: 459383
uucuugcuaauaauuaccu

SEQ ID NO: 459385 - RNA, 19 nt, Artificial Sequence
  Description of Artificial Sequence: Synthetic oligonucleotide
  Sense strand starting at position 632 of SEQ ID NO: 317035
uggguuaaaucuuuauagc

SEQ ID NO: 459386 - RNA, 19 nt, Artificial Sequence
  Description of Artificial Sequence: Synthetic oligonucleotide
  Antisense Strand to SEQ ID NO: 459385
gcuauaaagauuuaaccca

SEQ ID NO: 459387 - RNA, 19 nt, Artificial Sequence
  Description of Artificial Sequence: Synthetic oligonucleotide
  Sense strand starting at position 633 of SEQ ID NO: 317035
ggguuaaaucuuuauagcu

SEQ ID NO: 459388 - RNA, 19 nt, Artificial Sequence
  Description of Artificial Sequence: Synthetic oligonucleotide
  Antisense Strand to SEQ ID NO: 459387
agcuauaaagauuuaaccc

SEQ ID NO: 459389 - RNA, 19 nt, Artificial Sequence
  Description of Artificial Sequence: Synthetic oligonucleotide
  Sense strand starting at position 643 of SEQ ID NO: 317035
uuuauagcuugccuauaga

SEQ ID NO: 459390 - RNA, 19 nt, Artificial Sequence
  Description of Artificial Sequence: Synthetic oligonucleotide
  Antisense Strand to SEQ ID NO: 459389
ucuauaggcaagcuauaaa

SEQ ID NO: 459391 - RNA, 19 nt, Artificial Sequence
  Description of Artificial Sequence: Synthetic oligonucleotide
  Sense strand starting at position 646 of SEQ ID NO: 317035
auagcuugccuauagagga

SEQ ID NO: 459392 - RNA, 19 nt, Artificial Sequence
  Description of Artificial Sequence: Synthetic oligonucleotide
  Antisense Strand to SEQ ID NO: 459391
uccucuauaggcaagcuau

SEQ ID NO: 459393 - RNA, 19 nt, Artificial Sequence
  Description of Artificial Sequence: Synthetic oligonucleotide
  Sense strand starting at position 771 of SEQ ID NO: 317035
agcugaauucuagggcaag

SEQ ID NO: 459394 - RNA, 19 nt, Artificial Sequence
  Description of Artificial Sequence: Synthetic oligonucleotide
  Antisense Strand to SEQ ID NO: 459393
cuugcccuagaauucagcu

SEQ ID NO: 459395 - RNA, 19 nt, Artificial Sequence
  Description of Artificial Sequence: Synthetic oligonucleotide
  Sense strand starting at position 816 of SEQ ID NO: 317035
ugguuucuccagcgggaag

SEQ ID NO: 459396 - RNA, 19 nt, Artificial Sequence
  Description of Artificial Sequence: Synthetic oligonucleotide
  Antisense Strand to SEQ ID NO: 459395
cuucccgcuggagaaacca

SEQ ID NO: 459397 - RNA, 19 nt, Artificial Sequence
  Description of Artificial Sequence: Synthetic oligonucleotide
  Sense strand starting at position 817 of SEQ ID NO: 317035
gguuucuccagcgggaaga

SEQ ID NO: 459398 - RNA, 19 nt, Artificial Sequence
  Description of Artificial Sequence: Synthetic oligonucleotide
  Antisense Strand to SEQ ID NO: 459397
ucuucccgcuggagaaacc

SEQ ID NO: 459399 - RNA, 19 nt, Artificial Sequence
  Description of Artificial Sequence: Synthetic oligonucleotide
  Sense strand starting at position 818 of SEQ ID NO: 317035
guuucuccagcgggaagaa

SEQ ID NO: 459400 - RNA, 19 nt, Artificial Sequence
  Description of Artificial Sequence: Synthetic oligonucleotide
  Antisense Strand to SEQ ID NO: 459399
uucuucccgcuggagaaac

SEQ ID NO: 459401 - RNA, 19 nt, Artificial Sequence
  Description of Artificial Sequence: Synthetic oligonucleotide
  Sense strand starting at position 868 of SEQ ID NO: 317035
gcguauuguuggaaaggag

SEQ ID NO: 459402 - RNA, 19 nt, Artificial Sequence
  Description of Artificial Sequence: Synthetic oligonucleotide
  Antisense Strand to SEQ ID NO: 459401
cuccuuuccaacaauacgc

SEQ ID NO: 459403 - RNA, 19 nt, Artificial Sequence
  Description of Artificial Sequence: Synthetic oligonucleotide
  Sense strand starting at position 2667 of SEQ ID NO: 317035
gcuaaagaaaugugacaug

SEQ ID NO: 459404 - RNA, 19 nt, Artificial Sequence
  Description of Artificial Sequence: Synthetic oligonucleotide
  Antisense Strand to SEQ ID NO: 459403
caugucacauuucuuuagc

SEQ ID NO: 459405 - RNA, 19 nt, Artificial Sequence
  Description of Artificial Sequence: Synthetic oligonucleotide
  Sense strand starting at position 2804 of SEQ ID NO: 317035
gacuccuaggccuguucua

SEQ ID NO: 459406 - RNA, 19 nt, Artificial Sequence
  Description of Artificial Sequence: Synthetic oligonucleotide
  Antisense Strand to SEQ ID NO: 459405
uagaacaggccuaggaguc

SEQ ID NO: 459407 - RNA, 19 nt, Artificial Sequence
  Description of Artificial Sequence: Synthetic oligonucleotide
  Sense strand starting at position 2860 of SEQ ID NO: 317035
ggagauuacuuagaagaaa

SEQ ID NO: 459408 - RNA, 19 nt, Artificial Sequence
  Description of Artificial Sequence: Synthetic oligonucleotide
  Antisense Strand to SEQ ID NO: 459407
uuucuucuaaguaaucucc

SEQ ID NO: 459409 - RNA, 19 nt, Artificial Sequence
  Description of Artificial Sequence: Synthetic oligonucleotide
  Sense strand starting at position 2965 of SEQ ID NO: 317035
ucagaaccuguuggagaau

SEQ ID NO: 459410 - RNA, 19 nt, Artificial Sequence
  Description of Artificial Sequence: Synthetic oligonucleotide
  Antisense Strand to SEQ ID NO: 459409
auucuccaacagguucuga

SEQ ID NO: 459411 - RNA, 19 nt, Artificial Sequence
  Description of Artificial Sequence: Synthetic oligonucleotide
  Sense strand starting at position 3100 of SEQ ID NO: 317035
gucgcuuacguacuaucua

SEQ ID NO: 459412 - RNA, 19 nt, Artificial Sequence
  Description of Artificial Sequence: Synthetic oligonucleotide
  Antisense Strand to SEQ ID NO: 459411
uagauaguacguaagcgac

SEQ ID NO: 459413 - RNA, 19 nt, Artificial Sequence
  Description of Artificial Sequence: Synthetic oligonucleotide
  Sense strand starting at position 3109 of SEQ ID NO: 317035
guacuaucuacagaguguu

SEQ ID NO: 459414 - RNA, 19 nt, Artificial Sequence
  Description of Artificial Sequence: Synthetic oligonucleotide
  Antisense Strand to SEQ ID NO: 459413
aacacucuguagauaguac

SEQ ID NO: 459415 - RNA, 19 nt, Artificial Sequence
  Description of Artificial Sequence: Synthetic oligonucleotide
  Sense strand starting at position 3167 of SEQ ID NO: 317035
ugggacaaaucuuugucau

SEQ ID NO: 459416 - RNA, 19 nt, Artificial Sequence
  Description of Artificial Sequence: Synthetic oligonucleotide
  Antisense Strand to SEQ ID NO: 459415
augacaaagauuuguccca

SEQ ID NO: 459417 - RNA, 19 nt, Artificial Sequence
  Description of Artificial Sequence: Synthetic oligonucleotide
  Sense strand starting at position 3168 of SEQ ID NO: 317035
gggacaaaucuuugucauc

SEQ ID NO: 459418 - RNA, 19 nt, Artificial Sequence
  Description of Artificial Sequence: Synthetic oligonucleotide
  Antisense Strand to SEQ ID NO: 459417
gaugacaaagauuuguccc

SEQ ID NO: 459419 - RNA, 19 nt, Artificial Sequence
  Description of Artificial Sequence: Synthetic oligonucleotide
  Sense strand starting at position 3177 of SEQ ID NO: 317035
cuuugucauccgcauuuaa

SEQ ID NO: 459420 - RNA, 19 nt, Artificial Sequence
  Description of Artificial Sequence: Synthetic oligonucleotide
  Antisense Strand to SEQ ID NO: 459419
uuaaaugcggaugacaaag

SEQ ID NO: 459421 - RNA, 19 nt, Artificial Sequence
  Description of Artificial Sequence: Synthetic oligonucleotide
  Sense strand starting at position 3188 of SEQ ID NO: 317035
gcauuuaacuggugaggaa

SEQ ID NO: 459422 - RNA, 19 nt, Artificial Sequence
  Description of Artificial Sequence: Synthetic oligonucleotide
  Antisense Strand to SEQ ID NO: 459421
uuccucaccaguuaaaugc

SEQ ID NO: 459423 - RNA, 19 nt, Artificial Sequence
  Description of Artificial Sequence: Synthetic oligonucleotide
  Sense strand starting at position 3263 of SEQ ID NO: 317035
gccuucugaccuugcuaaa

SEQ ID NO: 459424 - RNA, 19 nt, Artificial Sequence
  Description of Artificial Sequence: Synthetic oligonucleotide
  Antisense Strand to SEQ ID NO: 459423
uuuagcaaggucagaaggc

SEQ ID NO: 459425 - RNA, 19 nt, Artificial Sequence
  Description of Artificial Sequence: Synthetic oligonucleotide
  Sense strand starting at position 3314 of SEQ ID NO: 317035
ggcuccuggcucugaaaua

SEQ ID NO: 459426 - RNA, 19 nt, Artificial Sequence
  Description of Artificial Sequence: Synthetic oligonucleotide
  Antisense Strand to SEQ ID NO: 459425
uauuucagagccaggagcc

SEQ ID NO: 459427 - RNA, 19 nt, Artificial Sequence
  Description of Artificial Sequence: Synthetic oligonucleotide
  Sense strand starting at position 3338 of SEQ ID NO: 317035
uuucguuuccuuuacacua

SEQ ID NO: 459428 - RNA, 19 nt, Artificial Sequence
  Description of Artificial Sequence: Synthetic oligonucleotide
  Antisense Strand to SEQ ID NO: 459427
uaguguaaaggaaacgaaa

SEQ ID NO: 459429 - RNA, 19 nt, Artificial Sequence
  Description of Artificial Sequence: Synthetic oligonucleotide
  Sense strand starting at position 3395 of SEQ ID NO: 317035
ugagcauucgcucagguga

SEQ ID NO: 459430 - RNA, 19 nt, Artificial Sequence
  Description of Artificial Sequence: Synthetic oligonucleotide
  Antisense Strand to SEQ ID NO: 459429
ucaccugagcgaaugcuca

SEQ ID NO: 459431 - RNA, 19 nt, Artificial Sequence
  Description of Artificial Sequence: Synthetic oligonucleotide
  Sense strand starting at position 3412 of SEQ ID NO: 317035
gaauguauaucgucauaaa

SEQ ID NO: 459432 - RNA, 19 nt, Artificial Sequence
  Description of Artificial Sequence: Synthetic oligonucleotide
  Antisense Strand to SEQ ID NO: 459431
uuuaugacgauauacauuc

SEQ ID NO: 459433 - RNA, 19 nt, Artificial Sequence
  Description of Artificial Sequence: Synthetic oligonucleotide
  Sense strand starting at position 3444 of SEQ ID NO: 317035
cagucaguuucuucugagu

SEQ ID NO: 459434 - RNA, 19 nt, Artificial Sequence
  Description of Artificial Sequence: Synthetic oligonucleotide
  Antisense Strand to SEQ ID NO: 459433
acucagaagaaacugacug

SEQ ID NO: 459435 - RNA, 19 nt, Artificial Sequence
  Description of Artificial Sequence: Synthetic oligonucleotide
  Sense strand starting at position 3696 of SEQ ID NO: 317035
ugcuacauuggugacauau

SEQ ID NO: 459436 - RNA, 19 nt, Artificial Sequence
  Description of Artificial Sequence: Synthetic oligonucleotide
  Antisense Strand to SEQ ID NO: 459435
auaugucaccaauguagca

SEQ ID NO: 459437 - RNA, 19 nt, Artificial Sequence
  Description of Artificial Sequence: Synthetic oligonucleotide
  Sense strand starting at position 3705 of SEQ ID NO: 317035
ggugacauaucugucaucu

SEQ ID NO: 459438 - RNA, 19 nt, Artificial Sequence
  Description of Artificial Sequence: Synthetic oligonucleotide
  Antisense Strand to SEQ ID NO: 459437
agaugacagauaugucacc

SEQ ID NO: 459439 - RNA, 19 nt, Artificial Sequence
  Description of Artificial Sequence: Synthetic oligonucleotide
  Sense strand starting at position 164 of SEQ ID NO: 317036
cagccucuccgguaaaguu

SEQ ID NO: 459440 - RNA, 19 nt, Artificial Sequence
  Description of Artificial Sequence: Synthetic oligonucleotide
  Antisense Strand to SEQ ID NO: 459439
aacuuuaccggagaggcug

SEQ ID NO: 459441 - RNA, 19 nt, Artificial Sequence
  Description of Artificial Sequence: Synthetic oligonucleotide
  Sense strand starting at position 246 of SEQ ID NO: 317036
caccgugggaaguaaugaa

SEQ ID NO: 459442 - RNA, 19 nt, Artificial Sequence
  Description of Artificial Sequence: Synthetic oligonucleotide
  Antisense Strand to SEQ ID NO: 459441
uucauuacuucccacggug

SEQ ID NO: 459443 - RNA, 19 nt, Artificial Sequence
  Description of Artificial Sequence: Synthetic oligonucleotide
  Sense strand starting at position 345 of SEQ ID NO: 317036
acuaccguuacuggugaaa

SEQ ID NO: 459444 - RNA, 19 nt, Artificial Sequence
  Description of Artificial Sequence: Synthetic oligonucleotide
  Antisense Strand to SEQ ID NO: 459443
uuucaccaguaacgguagu

SEQ ID NO: 459445 - RNA, 19 nt, Artificial Sequence
  Description of Artificial Sequence: Synthetic oligonucleotide
  Sense strand starting at position 364 of SEQ ID NO: 317036
ggcagucaacaacauuaua

SEQ ID NO: 459446 - RNA, 19 nt, Artificial Sequence
  Description of Artificial Sequence: Synthetic oligonucleotide
  Antisense Strand to SEQ ID NO: 459445
uauaauguuguugacugcc

SEQ ID NO: 459447 - RNA, 19 nt, Artificial Sequence
  Description of Artificial Sequence: Synthetic oligonucleotide
  Sense strand starting at position 431 of SEQ ID NO: 317036
aaagcuuugcaguacugua

SEQ ID NO: 459448 - RNA, 19 nt, Artificial Sequence
  Description of Artificial Sequence: Synthetic oligonucleotide
  Antisense Strand to SEQ ID NO: 459447
uacaguacugcaaagcuuu

SEQ ID NO: 459449 - RNA, 19 nt, Artificial Sequence
  Description of Artificial Sequence: Synthetic oligonucleotide
  Sense strand starting at position 619 of SEQ ID NO: 317036
gaugacaauccuugagagu

SEQ ID NO: 459450 - RNA, 19 nt, Artificial Sequence
  Description of Artificial Sequence: Synthetic oligonucleotide
  Antisense Strand to SEQ ID NO: 459449
acucucaaggauugucauc

SEQ ID NO: 459451 - RNA, 19 nt, Artificial Sequence
  Description of Artificial Sequence: Synthetic oligonucleotide
  Sense strand starting at position 937 of SEQ ID NO: 317036
acguuuauuugccuugcaa

SEQ ID NO: 459452 - RNA, 19 nt, Artificial Sequence
  Description of Artificial Sequence: Synthetic oligonucleotide
  Antisense Strand to SEQ ID NO: 459451
uugcaaggcaaauaaacgu

SEQ ID NO: 459453 - RNA, 19 nt, Artificial Sequence
  Description of Artificial Sequence: Synthetic oligonucleotide
  Sense strand starting at position 939 of SEQ ID NO: 317036
guuuauuugccuugcaaag

SEQ ID NO: 459454 - RNA, 19 nt, Artificial Sequence
  Description of Artificial Sequence: Synthetic oligonucleotide
  Antisense Strand to SEQ ID NO: 459453
cuuugcaaggcaaauaaac

SEQ ID NO: 459455 - RNA, 19 nt, Artificial Sequence
  Description of Artificial Sequence: Synthetic oligonucleotide
  Sense strand starting at position 1167 of SEQ ID NO: 317036
uuuaaugcacgcuaaagaa

SEQ ID NO: 459456 - RNA, 19 nt, Artificial Sequence
  Description of Artificial Sequence: Synthetic oligonucleotide
  Antisense Strand to SEQ ID NO: 459455
uucuuuagcgugcauuaaa

SEQ ID NO: 459457 - RNA, 19 nt, Artificial Sequence
  Description of Artificial Sequence: Synthetic oligonucleotide
  Sense strand starting at position 1654 of SEQ ID NO: 317036
gggacgcuguggucagaaa

SEQ ID NO: 459458 - RNA, 19 nt, Artificial Sequence
  Description of Artificial Sequence: Synthetic oligonucleotide
  Antisense Strand to SEQ ID NO: 459457
uuucugaccacagcguccc

SEQ ID NO: 459459 - RNA, 19 nt, Artificial Sequence
  Description of Artificial Sequence: Synthetic oligonucleotide
  Sense strand starting at position 1671 of SEQ ID NO: 317036
aaauguuaucagcggagaa

SEQ ID NO: 459460 - RNA, 19 nt, Artificial Sequence
  Description of Artificial Sequence: Synthetic oligonucleotide
  Antisense Strand to SEQ ID NO: 459459
uucuccgcugauaacauuu

SEQ ID NO: 459461 - RNA, 19 nt, Artificial Sequence
  Description of Artificial Sequence: Synthetic oligonucleotide
  Sense strand starting at position 1673 of SEQ ID NO: 317036
auguuaucagcggagaauc

SEQ ID NO: 459462 - RNA, 19 nt, Artificial Sequence
  Description of Artificial Sequence: Synthetic oligonucleotide
  Antisense Strand to SEQ ID NO: 459461
gauucuccgcugauaacau

SEQ ID NO: 459463 - RNA, 19 nt, Artificial Sequence
  Description of Artificial Sequence: Synthetic oligonucleotide
  Sense strand starting at position 1684 of SEQ ID NO: 317036
ggagaaucgcaacagcuuu

SEQ ID NO: 459464 - RNA, 19 nt, Artificial Sequence
  Description of Artificial Sequence: Synthetic oligonucleotide
  Antisense Strand to SEQ ID NO: 459463
aaagcuguugcgauucucc

SEQ ID NO: 459465 - RNA, 19 nt, Artificial Sequence
  Description of Artificial Sequence: Synthetic oligonucleotide
  Sense strand starting at position 2404 of SEQ ID NO: 317036
ggccacggucgagagauua

SEQ ID NO: 459466 - RNA, 19 nt, Artificial Sequence
  Description of Artificial Sequence: Synthetic oligonucleotide
  Antisense Strand to SEQ ID NO: 459465
uaaucucucgaccguggcc

SEQ ID NO: 459467 - RNA, 19 nt, Artificial Sequence
  Description of Artificial Sequence: Synthetic oligonucleotide
  Sense strand starting at position 2471 of SEQ ID NO: 317036
gcgagaggccuuggacaca

SEQ ID NO: 459468 - RNA, 19 nt, Artificial Sequence
  Description of Artificial Sequence: Synthetic oligonucleotide
  Antisense Strand to SEQ ID NO: 459467
uguguccaaggccucucgc

SEQ ID NO: 459469 - RNA, 19 nt, Artificial Sequence
  Description of Artificial Sequence: Synthetic oligonucleotide
  Sense strand starting at position 2501 of SEQ ID NO: 317036
gaaauaaugcagugguugu

SEQ ID NO: 459470 - RNA, 19 nt, Artificial Sequence
  Description of Artificial Sequence: Synthetic oligonucleotide
  Antisense Strand to SEQ ID NO: 459469
acaaccacugcauuauuuc

SEQ ID NO: 459471 - RNA, 19 nt, Artificial Sequence
  Description of Artificial Sequence: Synthetic oligonucleotide
  Sense strand starting at position 2552 of SEQ ID NO: 317036
ccaguuaugcagcgaggau

SEQ ID NO: 459472 - RNA, 19 nt, Artificial Sequence
  Description of Artificial Sequence: Synthetic oligonucleotide
  Antisense Strand to SEQ ID NO: 459471
auccucgcugcauaacugg

SEQ ID NO: 459473 - RNA, 19 nt, Artificial Sequence
  Description of Artificial Sequence: Synthetic oligonucleotide
  Sense strand starting at position 2553 of SEQ ID NO: 317036
caguuaugcagcgaggaua

SEQ ID NO: 459474 - RNA, 19 nt, Artificial Sequence
  Description of Artificial Sequence: Synthetic oligonucleotide
  Antisense Strand to SEQ ID NO: 459473
uauccucgcugcauaacug

SEQ ID NO: 459475 - RNA, 19 nt, Artificial Sequence
  Description of Artificial Sequence: Synthetic oligonucleotide
  Sense strand starting at position 2831 of SEQ ID NO: 317036
uuucuaacauuaguaggau

SEQ ID NO: 459476 - RNA, 19 nt, Artificial Sequence
  Description of Artificial Sequence: Synthetic oligonucleotide
  Antisense Strand to SEQ ID NO: 459475
auccuacuaauguuagaaa

SEQ ID NO: 459477 - RNA, 19 nt, Artificial Sequence
  Description of Artificial Sequence: Synthetic oligonucleotide
  Sense strand starting at position 2835 of SEQ ID NO: 317036
uaacauuaguaggauaaug

SEQ ID NO: 459478 - RNA, 19 nt, Artificial Sequence
  Description of Artificial Sequence: Synthetic oligonucleotide
  Antisense Strand to SEQ ID NO: 459477
cauuauccuacuaauguua

SEQ ID NO: 459479 - RNA, 19 nt, Artificial Sequence
  Description of Artificial Sequence: Synthetic oligonucleotide
  Sense strand starting at position 2851 of SEQ ID NO: 317036
auggaaguaauacguggaa

SEQ ID NO: 459480 - RNA, 19 nt, Artificial Sequence
  Description of Artificial Sequence: Synthetic oligonucleotide
  Antisense Strand to SEQ ID NO: 459479
uuccacguauuacuuccau

SEQ ID NO: 459481 - RNA, 19 nt, Artificial Sequence
  Description of Artificial Sequence: Synthetic oligonucleotide
  Sense strand starting at position 2853 of SEQ ID NO: 317036
ggaaguaauacguggaaau

SEQ ID NO: 459482 - RNA, 19 nt, Artificial Sequence
  Description of Artificial Sequence: Synthetic oligonucleotide
  Antisense Strand to SEQ ID NO: 459481
auuuccacguauuacuucc

SEQ ID NO: 459483 - RNA, 19 nt, Artificial Sequence
  Description of Artificial Sequence: Synthetic oligonucleotide
  Sense strand starting at position 2854 of SEQ ID NO: 317036
gaaguaauacguggaaaua

SEQ ID NO: 459484 - RNA, 19 nt, Artificial Sequence
  Description of Artificial Sequence: Synthetic oligonucleotide
  Antisense Strand to SEQ ID NO: 459483
uauuuccacguauuacuuc

SEQ ID NO: 459485 - RNA, 19 nt, Artificial Sequence
  Description of Artificial Sequence: Synthetic oligonucleotide
  Sense strand starting at position 2920 of SEQ ID NO: 317036
ucuggcaucucuuuaaguu

SEQ ID NO: 459486 - RNA, 19 nt, Artificial Sequence
  Description of Artificial Sequence: Synthetic oligonucleotide
  Antisense Strand to SEQ ID NO: 459485
aacuuaaagagaugccaga

SEQ ID NO: 459487 - RNA, 19 nt, Artificial Sequence
  Description of Artificial Sequence: Synthetic oligonucleotide
  Sense strand starting at position 2921 of SEQ ID NO: 317036
cuggcaucucuuuaaguua

SEQ ID NO: 459488 - RNA, 19 nt, Artificial Sequence
  Description of Artificial Sequence: Synthetic oligonucleotide
  Antisense Strand to SEQ ID NO: 459487
uaacuuaaagagaugccag

SEQ ID NO: 459489 - RNA, 19 nt, Artificial Sequence
  Description of Artificial Sequence: Synthetic oligonucleotide
  Sense strand starting at position 2993 of SEQ ID NO: 317036
uugcauaaccuagaaguau

SEQ ID NO: 459490 - RNA, 19 nt, Artificial Sequence
  Description of Artificial Sequence: Synthetic oligonucleotide
  Antisense Strand to SEQ ID NO: 459489
auacuucuagguuaugcaa

SEQ ID NO: 459491 - RNA, 19 nt, Artificial Sequence
  Description of Artificial Sequence: Synthetic oligonucleotide
  Sense strand starting at position 3081 of SEQ ID NO: 317036
ugaacaauauaguaugaag

SEQ ID NO: 459492 - RNA, 19 nt, Artificial Sequence
  Description of Artificial Sequence: Synthetic oligonucleotide
  Antisense Strand to SEQ ID NO: 459491
cuucauacuauauuguuca

SEQ ID NO: 459493 - RNA, 19 nt, Artificial Sequence
  Description of Artificial Sequence: Synthetic oligonucleotide
  Sense strand starting at position 3316 of SEQ ID NO: 317036
gucuaauugcuuggccaga

SEQ ID NO: 459494 - RNA, 19 nt, Artificial Sequence
  Description of Artificial Sequence: Synthetic oligonucleotide
  Antisense Strand to SEQ ID NO: 459493
ucuggccaagcaauuagac

SEQ ID NO: 459495 - RNA, 19 nt, Artificial Sequence
  Description of Artificial Sequence: Synthetic oligonucleotide
  Sense strand starting at position 3318 of SEQ ID NO: 317036
cuaauugcuuggccagacu

SEQ ID NO: 459496 - RNA, 19 nt, Artificial Sequence
  Description of Artificial Sequence: Synthetic oligonucleotide
  Antisense Strand to SEQ ID NO: 459495
agucuggccaagcaauuag

SEQ ID NO: 459497 - RNA, 19 nt, Artificial Sequence
  Description of Artificial Sequence: Synthetic oligonucleotide
  Sense strand starting at position 3321 of SEQ ID NO: 317036
auugcuuggccagacuuaa

SEQ ID NO: 459498 - RNA, 19 nt, Artificial Sequence
  Description of Artificial Sequence: Synthetic oligonucleotide
  Antisense Strand to SEQ ID NO: 459497
uuaagucuggccaagcaau

SEQ ID NO: 459499 - RNA, 19 nt, Artificial Sequence
  Description of Artificial Sequence: Synthetic oligonucleotide
  Sense strand starting at position 3346 of SEQ ID NO: 317036
aguagauuagcauaaacgu

SEQ ID NO: 459500 - RNA, 19 nt, Artificial Sequence
  Description of Artificial Sequence: Synthetic oligonucleotide
  Antisense Strand to SEQ ID NO: 459499
acguuuaugcuaaucuacu

SEQ ID NO: 459501 - RNA, 19 nt, Artificial Sequence
  Description of Artificial Sequence: Synthetic oligonucleotide
  Sense strand starting at position 3359 of SEQ ID NO: 317036
aaacguaaguuguugaugu

SEQ ID NO: 459502 - RNA, 19 nt, Artificial Sequence
  Description of Artificial Sequence: Synthetic oligonucleotide
  Antisense Strand to SEQ ID NO: 459501
acaucaacaacuuacguuu

SEQ ID NO: 459503 - RNA, 19 nt, Artificial Sequence
  Description of Artificial Sequence: Synthetic oligonucleotide
  Sense strand starting at position 3361 of SEQ ID NO: 317036
acguaaguuguugauguga

SEQ ID NO: 459504 - RNA, 19 nt, Artificial Sequence
  Description of Artificial Sequence: Synthetic oligonucleotide
  Antisense Strand to SEQ ID NO: 459503
ucacaucaacaacuuacgu

SEQ ID NO: 459505 - RNA, 19 nt, Artificial Sequence
  Description of Artificial Sequence: Synthetic oligonucleotide
  Sense strand starting at position 3411 of SEQ ID NO: 317036
cuugaauaccuccaguagu

SEQ ID NO: 459506 - RNA, 19 nt, Artificial Sequence
  Description of Artificial Sequence: Synthetic oligonucleotide
  Antisense Strand to SEQ ID NO: 459505
acuacuggagguauucaag

SEQ ID NO: 459507 - RNA, 19 nt, Artificial Sequence
  Description of Artificial Sequence: Synthetic oligonucleotide
  Sense strand starting at position 3701 of SEQ ID NO: 317036
guccucauaugaguauaau

SEQ ID NO: 459508 - RNA, 19 nt, Artificial Sequence
  Description of Artificial Sequence: Synthetic oligonucleotide
  Antisense Strand to SEQ ID NO: 459507
auuauacucauaugaggac

SEQ ID NO: 459509 - RNA, 19 nt, Artificial Sequence
  Description of Artificial Sequence: Synthetic oligonucleotide
  Sense strand starting at position 3855 of SEQ ID NO: 317036
cgaguaucacagcaucaau

SEQ ID NO: 459510 - RNA, 19 nt, Artificial Sequence
  Description of Artificial Sequence: Synthetic oligonucleotide
  Antisense Strand to SEQ ID NO: 459509
auugaugcugugauacucg

SEQ ID NO: 459511 - RNA, 19 nt, Artificial Sequence
  Description of Artificial Sequence: Synthetic oligonucleotide
  Sense strand starting at position 3892 of SEQ ID NO: 317036
agacuaacauugcuaugga

SEQ ID NO: 459512 - RNA, 19 nt, Artificial Sequence
  Description of Artificial Sequence: Synthetic oligonucleotide
  Antisense Strand to SEQ ID NO: 459511
uccauagcaauguuagucu

SEQ ID NO: 459513 - RNA, 19 nt, Artificial Sequence
  Description of Artificial Sequence: Synthetic oligonucleotide
  Sense strand starting at position 3895 of SEQ ID NO: 317036
cuaacauugcuauggacca

SEQ ID NO: 459514 - RNA, 19 nt, Artificial Sequence
  Description of Artificial Sequence: Synthetic oligonucleotide
  Antisense Strand to SEQ ID NO: 459513
ugguccauagcaauguuag

SEQ ID NO: 459515 - RNA, 19 nt, Artificial Sequence
  Description of Artificial Sequence: Synthetic oligonucleotide
  Sense strand starting at position 3902 of SEQ ID NO: 317036
ugcuauggaccauauguaa

SEQ ID NO: 459516 - RNA, 19 nt, Artificial Sequence
  Description of Artificial Sequence: Synthetic oligonucleotide
  Antisense Strand to SEQ ID NO: 459515
uuacauaugguccauagca

SEQ ID NO: 459517 - RNA, 19 nt, Artificial Sequence
  Description of Artificial Sequence: Synthetic oligonucleotide
  Sense strand starting at position 3973 of SEQ ID NO: 317036
uguggucuuguggacuuua

SEQ ID NO: 459518 - RNA, 19 nt, Artificial Sequence
  Description of Artificial Sequence: Synthetic oligonucleotide
  Antisense Strand to SEQ ID NO: 459517
uaaaguccacaagaccaca

SEQ ID NO: 459519 - RNA, 19 nt, Artificial Sequence
  Description of Artificial Sequence: Synthetic oligonucleotide
  Sense strand starting at position 19 of SEQ ID NO: 317037
aaagcugugcuuuaaguaa

SEQ ID NO: 459520 - RNA, 19 nt, Artificial Sequence
  Description of Artificial Sequence: Synthetic oligonucleotide
  Antisense Strand to SEQ ID NO: 459519
uuacuuaaagcacagcuuu

SEQ ID NO: 459521 - RNA, 19 nt, Artificial Sequence
  Description of Artificial Sequence: Synthetic oligonucleotide
  Sense strand starting at position 43 of SEQ ID NO: 317037
gucggaauuuaguauaaag

SEQ ID NO: 459522 - RNA, 19 nt, Artificial Sequence
  Description of Artificial Sequence: Synthetic oligonucleotide
  Antisense Strand to SEQ ID NO: 459521
cuuuauacuaaauuccgac

SEQ ID NO: 459523 - RNA, 19 nt, Artificial Sequence
  Description of Artificial Sequence: Synthetic oligonucleotide
  Sense strand starting at position 74 of SEQ ID NO: 317037
ggccaccuguaacuagaua

SEQ ID NO: 459524 - RNA, 19 nt, Artificial Sequence
  Description of Artificial Sequence: Synthetic oligonucleotide
  Antisense Strand to SEQ ID NO: 459523
uaucuaguuacagguggcc

SEQ ID NO: 459525 - RNA, 19 nt, Artificial Sequence
  Description of Artificial Sequence: Synthetic oligonucleotide
  Sense strand starting at position 94 of SEQ ID NO: 317037
uuugcugugauggguaaga

SEQ ID NO: 459526 - RNA, 19 nt, Artificial Sequence
  Description of Artificial Sequence: Synthetic oligonucleotide
  Antisense Strand to SEQ ID NO: 459525
ucuuacccaucacagcaaa

SEQ ID NO: 459527 - RNA, 19 nt, Artificial Sequence
  Description of Artificial Sequence: Synthetic oligonucleotide
  Sense strand starting at position 96 of SEQ ID NO: 317037
ugcugugauggguaagaca

SEQ ID NO: 459528 - RNA, 19 nt, Artificial Sequence
  Description of Artificial Sequence: Synthetic oligonucleotide
  Antisense Strand to SEQ ID NO: 459527
ugucuuacccaucacagca

SEQ ID NO: 459529 - RNA, 19 nt, Artificial Sequence
  Description of Artificial Sequence: Synthetic oligonucleotide
  Sense strand starting at position 124 of SEQ ID NO: 317037
gaugucauugaauaugcua

SEQ ID NO: 459530 - RNA, 19 nt, Artificial Sequence
  Description of Artificial Sequence: Synthetic oligonucleotide
  Antisense Strand to SEQ ID NO: 459529
uagcauauucaaugacauc

SEQ ID NO: 459531 - RNA, 19 nt, Artificial Sequence
  Description of Artificial Sequence: Synthetic oligonucleotide
  Sense strand starting at position 131 of SEQ ID NO: 317037
uugaauaugcuacaguaaa

SEQ ID NO: 459532 - RNA, 19 nt, Artificial Sequence
  Description of Artificial Sequence: Synthetic oligonucleotide
  Antisense Strand to SEQ ID NO: 459531
uuuacuguagcauauucaa

SEQ ID NO: 459533 - RNA, 19 nt, Artificial Sequence
  Description of Artificial Sequence: Synthetic oligonucleotide
  Sense strand starting at position 176 of SEQ ID NO: 317037
gaaaguauaugguuacuua

SEQ ID NO: 459534 - RNA, 19 nt, Artificial Sequence
  Description of Artificial Sequence: Synthetic oligonucleotide
  Antisense Strand to SEQ ID NO: 459533
uaaguaaccauauacuuuc

SEQ ID NO: 459535 - RNA, 19 nt, Artificial Sequence
  Description of Artificial Sequence: Synthetic oligonucleotide
  Sense strand starting at position 304 of SEQ ID NO: 317037
cuucuaaauuaugagaaag

SEQ ID NO: 459536 - RNA, 19 nt, Artificial Sequence
  Description of Artificial Sequence: Synthetic oligonucleotide
  Antisense Strand to SEQ ID NO: 459535
cuuucucauaauuuagaag

SEQ ID NO: 459537 - RNA, 19 nt, Artificial Sequence
  Description of Artificial Sequence: Synthetic oligonucleotide
  Sense strand starting at position 344 of SEQ ID NO: 317037
uguauaacccuuuaguaac

SEQ ID NO: 459538 - RNA, 19 nt, Artificial Sequence
  Description of Artificial Sequence: Synthetic oligonucleotide
  Antisense Strand to SEQ ID NO: 459537
guuacuaaaggguuauaca

SEQ ID NO: 459539 - RNA, 19 nt, Artificial Sequence
  Description of Artificial Sequence: Synthetic oligonucleotide
  Sense strand starting at position 453 of SEQ ID NO: 317037
gcagcuuagauugauggua

SEQ ID NO: 459540 - RNA, 19 nt, Artificial Sequence
  Description of Artificial Sequence: Synthetic oligonucleotide
  Antisense Strand to SEQ ID NO: 459539
uaccaucaaucuaagcugc

SEQ ID NO: 459541 - RNA, 19 nt, Artificial Sequence
  Description of Artificial Sequence: Synthetic oligonucleotide
  Sense strand starting at position 467 of SEQ ID NO: 317037
ugguaauagcuuugacaua

SEQ ID NO: 459542 - RNA, 19 nt, Artificial Sequence
  Description of Artificial Sequence: Synthetic oligonucleotide
  Antisense Strand to SEQ ID NO: 459541
uaugucaaagcuauuacca

SEQ ID NO: 459543 - RNA, 19 nt, Artificial Sequence
  Description of Artificial Sequence: Synthetic oligonucleotide
  Sense strand starting at position 484 of SEQ ID NO: 317037
uagcaagugcuaugauuug

SEQ ID NO: 459544 - RNA, 19 nt, Artificial Sequence
  Description of Artificial Sequence: Synthetic oligonucleotide
  Antisense Strand to SEQ ID NO: 459543
caaaucauagcacuugcua

SEQ ID NO: 459545 - RNA, 19 nt, Artificial Sequence
  Description of Artificial Sequence: Synthetic oligonucleotide
  Sense strand starting at position 602 of SEQ ID NO: 317037
acuauaaaucacuguguca

SEQ ID NO: 459546 - RNA, 19 nt, Artificial Sequence
  Description of Artificial Sequence: Synthetic oligonucleotide
  Antisense Strand to SEQ ID NO: 459545
ugacacagugauuuauagu

SEQ ID NO: 459547 - RNA, 19 nt, Artificial Sequence
  Description of Artificial Sequence: Synthetic oligonucleotide
  Sense strand starting at position 605 of SEQ ID NO: 317037
auaaaucacugugucaaca

SEQ ID NO: 459548 - RNA, 19 nt, Artificial Sequence
  Description of Artificial Sequence: Synthetic oligonucleotide
  Antisense Strand to SEQ ID NO: 459547
uguugacacagugauuuau

SEQ ID NO: 459549 - RNA, 19 nt, Artificial Sequence
  Description of Artificial Sequence: Synthetic oligonucleotide
  Sense strand starting at position 656 of SEQ ID NO: 317037
acaggcauuugcugagaaa

SEQ ID NO: 459550 - RNA, 19 nt, Artificial Sequence
  Description of Artificial Sequence: Synthetic oligonucleotide
  Antisense Strand to SEQ ID NO: 459549
uuucucagcaaaugccugu

SEQ ID NO: 459551 - RNA, 19 nt, Artificial Sequence
  Description of Artificial Sequence: Synthetic oligonucleotide
  Sense strand starting at position 817 of SEQ ID NO: 317037
agguguuuauaacaggaaa

SEQ ID NO: 459552 - RNA, 19 nt, Artificial Sequence
  Description of Artificial Sequence: Synthetic oligonucleotide
  Antisense Strand to SEQ ID NO: 459551
uuuccuguuauaaacaccu

SEQ ID NO: 459553 - RNA, 19 nt, Artificial Sequence
  Description of Artificial Sequence: Synthetic oligonucleotide
  Sense strand starting at position 846 of SEQ ID NO: 317037
aauucuaggugauaggaaa

SEQ ID NO: 459554 - RNA, 19 nt, Artificial Sequence
  Description of Artificial Sequence: Synthetic oligonucleotide
  Antisense Strand to SEQ ID NO: 459553
uuuccuaucaccuagaauu

SEQ ID NO: 459555 - RNA, 19 nt, Artificial Sequence
  Description of Artificial Sequence: Synthetic oligonucleotide
  Sense strand starting at position 911 of SEQ ID NO: 317037
ggugucaugaaagaagcau

SEQ ID NO: 459556 - RNA, 19 nt, Artificial Sequence
  Description of Artificial Sequence: Synthetic oligonucleotide
  Antisense Strand to SEQ ID NO: 459555
augcuucuuucaugacacc

SEQ ID NO: 459557 - RNA, 19 nt, Artificial Sequence
  Description of Artificial Sequence: Synthetic oligonucleotide
  Sense strand starting at position 964 of SEQ ID NO: 317037
cuguguaacccauauaaau

SEQ ID NO: 459558 - RNA, 19 nt, Artificial Sequence
  Description of Artificial Sequence: Synthetic oligonucleotide
  Antisense Strand to SEQ ID NO: 459557
auuuauauggguuacacag

SEQ ID NO: 459559 - RNA, 19 nt, Artificial Sequence
  Description of Artificial Sequence: Synthetic oligonucleotide
  Sense strand starting at position 1058 of SEQ ID NO: 317037
uacucugagcauuaaguga

SEQ ID NO: 459560 - RNA, 19 nt, Artificial Sequence
  Description of Artificial Sequence: Synthetic oligonucleotide
  Antisense Strand to SEQ ID NO: 459559
ucacuuaaugcucagagua

SEQ ID NO: 459561 - RNA, 19 nt, Artificial Sequence
  Description of Artificial Sequence: Synthetic oligonucleotide
  Sense strand starting at position 1062 of SEQ ID NO: 317037
cugagcauuaagugagaca

SEQ ID NO: 459562 - RNA, 19 nt, Artificial Sequence
  Description of Artificial Sequence: Synthetic oligonucleotide
  Antisense Strand to SEQ ID NO: 459561
ugucucacuuaaugcucag

SEQ ID NO: 459563 - RNA, 19 nt, Artificial Sequence
  Description of Artificial Sequence: Synthetic oligonucleotide
  Sense strand starting at position 1560 of SEQ ID NO: 317037
guguguugagucgagaagu

SEQ ID NO: 459564 - RNA, 19 nt, Artificial Sequence
  Description of Artificial Sequence: Synthetic oligonucleotide
  Antisense Strand to SEQ ID NO: 459563
acuucucgacucaacacac

SEQ ID NO: 459565 - RNA, 19 nt, Artificial Sequence
  Description of Artificial Sequence: Synthetic oligonucleotide
  Sense strand starting at position 1562 of SEQ ID NO: 317037
guguugagucgagaaguug

SEQ ID NO: 459566 - RNA, 19 nt, Artificial Sequence
  Description of Artificial Sequence: Synthetic oligonucleotide
  Antisense Strand to SEQ ID NO: 459565
caacuucucgacucaacac

SEQ ID NO: 459567 - RNA, 19 nt, Artificial Sequence
  Description of Artificial Sequence: Synthetic oligonucleotide
  Sense strand starting at position 1597 of SEQ ID NO: 317037
ccagaaagauaagcuaagu

SEQ ID NO: 459568 - RNA, 19 nt, Artificial Sequence
  Description of Artificial Sequence: Synthetic oligonucleotide
  Antisense Strand to SEQ ID NO: 459567
acuuagcuuaucuuucugg

SEQ ID NO: 459569 - RNA, 19 nt, Artificial Sequence
  Description of Artificial Sequence: Synthetic oligonucleotide
  Sense strand starting at position 1759 of SEQ ID NO: 317037
uaguguuaguguuccaacu

SEQ ID NO: 459570 - RNA, 19 nt, Artificial Sequence
  Description of Artificial Sequence: Synthetic oligonucleotide
  Antisense Strand to SEQ ID NO: 459569
aguuggaacacuaacacua

SEQ ID NO: 459571 - RNA, 19 nt, Artificial Sequence
  Description of Artificial Sequence: Synthetic oligonucleotide
  Sense strand starting at position 1778 of SEQ ID NO: 317037
ucagucaaccacuguuuaa

SEQ ID NO: 459572 - RNA, 19 nt, Artificial Sequence
  Description of Artificial Sequence: Synthetic oligonucleotide
  Antisense Strand to SEQ ID NO: 459571
uuaaacagugguugacuga

SEQ ID NO: 459573 - RNA, 19 nt, Artificial Sequence
  Description of Artificial Sequence: Synthetic oligonucleotide
  Sense strand starting at position 2168 of SEQ ID NO: 317037
gagaauggaucauacuugu

SEQ ID NO: 459574 - RNA, 19 nt, Artificial Sequence
  Description of Artificial Sequence: Synthetic oligonucleotide
  Antisense Strand to SEQ ID NO: 459573
acaaguaugauccauucuc

SEQ ID NO: 459575 - RNA, 19 nt, Artificial Sequence
  Description of Artificial Sequence: Synthetic oligonucleotide
  Sense strand starting at position 2258 of SEQ ID NO: 317037
acaggaaugugauuauucu

SEQ ID NO: 459576 - RNA, 19 nt, Artificial Sequence
  Description of Artificial Sequence: Synthetic oligonucleotide
  Antisense Strand to SEQ ID NO: 459575
agaauaaucacauuccugu

SEQ ID NO: 459577 - RNA, 19 nt, Artificial Sequence
  Description of Artificial Sequence: Synthetic oligonucleotide
  Sense strand starting at position 2575 of SEQ ID NO: 317037
cagcgugauuauucuuuaa

SEQ ID NO: 459578 - RNA, 19 nt, Artificial Sequence
  Description of Artificial Sequence: Synthetic oligonucleotide
  Antisense Strand to SEQ ID NO: 459577
uuaaagaauaaucacgcug

SEQ ID NO: 459579 - RNA, 19 nt, Artificial Sequence
  Description of Artificial Sequence: Synthetic oligonucleotide
  Sense strand starting at position 2577 of SEQ ID NO: 317037
gcgugauuauucuuuaauc

SEQ ID NO: 459580 - RNA, 19 nt, Artificial Sequence
  Description of Artificial Sequence: Synthetic oligonucleotide
  Antisense Strand to SEQ ID NO: 459579
gauuaaagaauaaucacgc

SEQ ID NO: 459581 - RNA, 19 nt, Artificial Sequence
  Description of Artificial Sequence: Synthetic oligonucleotide
  Sense strand starting at position 2578 of SEQ ID NO: 317037
cgugauuauucuuuaauca

SEQ ID NO: 459582 - RNA, 19 nt, Artificial Sequence
  Description of Artificial Sequence: Synthetic oligonucleotide
  Antisense Strand to SEQ ID NO: 459581
ugauuaaagaauaaucacg

SEQ ID NO: 459583 - RNA, 19 nt, Artificial Sequence
  Description of Artificial Sequence: Synthetic oligonucleotide
  Sense strand starting at position 2807 of SEQ ID NO: 317037
gcuaucagauacuuaggau

SEQ ID NO: 459584 - RNA, 19 nt, Artificial Sequence
  Description of Artificial Sequence: Synthetic oligonucleotide
  Antisense Strand to SEQ ID NO: 459583
auccuaaguaucugauagc

SEQ ID NO: 459585 - RNA, 19 nt, Artificial Sequence
  Description of Artificial Sequence: Synthetic oligonucleotide
  Sense strand starting at position 2810 of SEQ ID NO: 317037
aucagauacuuaggauaaa

SEQ ID NO: 459586 - RNA, 19 nt, Artificial Sequence
  Description of Artificial Sequence: Synthetic oligonucleotide
  Antisense Strand to SEQ ID NO: 459585
uuuauccuaaguaucugau

SEQ ID NO: 459587 - RNA, 19 nt, Artificial Sequence
  Description of Artificial Sequence: Synthetic oligonucleotide
  Sense strand starting at position 2956 of SEQ ID NO: 317037
gaauaugaauauugagaug

SEQ ID NO: 459588 - RNA, 19 nt, Artificial Sequence
  Description of Artificial Sequence: Synthetic oligonucleotide
  Antisense Strand to SEQ ID NO: 459587
caucucaauauucauauuc

SEQ ID NO: 459589 - RNA, 19 nt, Artificial Sequence
  Description of Artificial Sequence: Synthetic oligonucleotide
  Sense strand starting at position 2959 of SEQ ID NO: 317037
uaugaauauugagauguac

SEQ ID NO: 459590 - RNA, 19 nt, Artificial Sequence
  Description of Artificial Sequence: Synthetic oligonucleotide
  Antisense Strand to SEQ ID NO: 459589
guacaucucaauauucaua

SEQ ID NO: 459591 - RNA, 19 nt, Artificial Sequence
  Description of Artificial Sequence: Synthetic oligonucleotide
  Sense strand starting at position 3258 of SEQ ID NO: 317037
auugaaauuugguacaucu

SEQ ID NO: 459592 - RNA, 19 nt, Artificial Sequence
  Description of Artificial Sequence: Synthetic oligonucleotide
  Antisense Strand to SEQ ID NO: 459591
agauguaccaaauuucaau

SEQ ID NO: 459593 - RNA, 19 nt, Artificial Sequence
  Description of Artificial Sequence: Synthetic oligonucleotide
  Sense strand starting at position 3267 of SEQ ID NO: 317037
ugguacaucugacuuaacu

SEQ ID NO: 459594 - RNA, 19 nt, Artificial Sequence
  Description of Artificial Sequence: Synthetic oligonucleotide
  Antisense Strand to SEQ ID NO: 459593
aguuaagucagauguacca

SEQ ID NO: 459595 - RNA, 19 nt, Artificial Sequence
  Description of Artificial Sequence: Synthetic oligonucleotide
  Sense strand starting at position 3664 of SEQ ID NO: 317037
augagauaacauugccaga

SEQ ID NO: 459596 - RNA, 19 nt, Artificial Sequence
  Description of Artificial Sequence: Synthetic oligonucleotide
  Antisense Strand to SEQ ID NO: 459595
ucuggcaauguuaucucau

SEQ ID NO: 459597 - RNA, 19 nt, Artificial Sequence
  Description of Artificial Sequence: Synthetic oligonucleotide
  Sense strand starting at position 3790 of SEQ ID NO: 317037
gaagguuuauuauuaacag

SEQ ID NO: 459598 - RNA, 19 nt, Artificial Sequence
  Description of Artificial Sequence: Synthetic oligonucleotide
  Antisense Strand to SEQ ID NO: 459597
cuguuaauaauaaaccuuc

SEQ ID NO: 459599 - RNA, 19 nt, Artificial Sequence
  Description of Artificial Sequence: Synthetic oligonucleotide
  Sense strand starting at position 311 of SEQ ID NO: 317038
uguguuuggagcuauaaag

SEQ ID NO: 459600 - RNA, 19 nt, Artificial Sequence
  Description of Artificial Sequence: Synthetic oligonucleotide
  Antisense Strand to SEQ ID NO: 459599
cuuuauagcuccaaacaca

SEQ ID NO: 459601 - RNA, 19 nt, Artificial Sequence
  Description of Artificial Sequence: Synthetic oligonucleotide
  Sense strand starting at position 396 of SEQ ID NO: 317038
caggcauaugguugaaauu

SEQ ID NO: 459602 - RNA, 19 nt, Artificial Sequence
  Description of Artificial Sequence: Synthetic oligonucleotide
  Antisense Strand to SEQ ID NO: 459601
aauuucaaccauaugccug

SEQ ID NO: 459603 - RNA, 19 nt, Artificial Sequence
  Description of Artificial Sequence: Synthetic oligonucleotide
  Sense strand starting at position 397 of SEQ ID NO: 317038
aggcauaugguugaaauuc

SEQ ID NO: 459604 - RNA, 19 nt, Artificial Sequence
  Description of Artificial Sequence: Synthetic oligonucleotide
  Antisense Strand to SEQ ID NO: 459603
gaauuucaaccauaugccu

SEQ ID NO: 459605 - RNA, 19 nt, Artificial Sequence
  Description of Artificial Sequence: Synthetic oligonucleotide
  Sense strand starting at position 445 of SEQ ID NO: 317038
ucuacuauuugucugcaca

SEQ ID NO: 459606 - RNA, 19 nt, Artificial Sequence
  Description of Artificial Sequence: Synthetic oligonucleotide
  Antisense Strand to SEQ ID NO: 459605
ugugcagacaaauaguaga

SEQ ID NO: 459607 - RNA, 19 nt, Artificial Sequence
  Description of Artificial Sequence: Synthetic oligonucleotide
  Sense strand starting at position 446 of SEQ ID NO: 317038
cuacuauuugucugcacag

SEQ ID NO: 459608 - RNA, 19 nt, Artificial Sequence
  Description of Artificial Sequence: Synthetic oligonucleotide
  Antisense Strand to SEQ ID NO: 459607
cugugcagacaaauaguag

SEQ ID NO: 459609 - RNA, 19 nt, Artificial Sequence
  Description of Artificial Sequence: Synthetic oligonucleotide
  Sense strand starting at position 464 of SEQ ID NO: 317038
gggaacauuucuuagcuaa

SEQ ID NO: 459610 - RNA, 19 nt, Artificial Sequence
  Description of Artificial Sequence: Synthetic oligonucleotide
  Antisense Strand to SEQ ID NO: 459609
uuagcuaagaaauguuccc

SEQ ID NO: 459611 - RNA, 19 nt, Artificial Sequence
  Description of Artificial Sequence: Synthetic oligonucleotide
  Sense strand starting at position 559 of SEQ ID NO: 317038
uggcaaauuguccauacuu

SEQ ID NO: 459612 - RNA, 19 nt, Artificial Sequence
  Description of Artificial Sequence: Synthetic oligonucleotide
  Antisense Strand to SEQ ID NO: 459611
aaguauggacaauuugcca

SEQ ID NO: 459613 - RNA, 19 nt, Artificial Sequence
  Description of Artificial Sequence: Synthetic oligonucleotide
  Sense strand starting at position 818 of SEQ ID NO: 317038
ugugucuuccugguuguuu

SEQ ID NO: 459614 - RNA, 19 nt, Artificial Sequence
  Description of Artificial Sequence: Synthetic oligonucleotide
  Antisense Strand to SEQ ID NO: 459613
aaacaaccaggaagacaca

SEQ ID NO: 459615 - RNA, 19 nt, Artificial Sequence
  Description of Artificial Sequence: Synthetic oligonucleotide
  Sense strand starting at position 1026 of SEQ ID NO: 317038
gucauauaaugaucauggu

SEQ ID NO: 459616 - RNA, 19 nt, Artificial Sequence
  Description of Artificial Sequence: Synthetic oligonucleotide
  Antisense Strand to SEQ ID NO: 459615
accaugaucauuauaugac

SEQ ID NO: 459617 - RNA, 19 nt, Artificial Sequence
  Description of Artificial Sequence: Synthetic oligonucleotide
  Sense strand starting at position 1035 of SEQ ID NO: 317038
ugaucauggucuuucuaag

SEQ ID NO: 459618 - RNA, 19 nt, Artificial Sequence
  Description of Artificial Sequence: Synthetic oligonucleotide
  Antisense Strand to SEQ ID NO: 459617
cuuagaaagaccaugauca

SEQ ID NO: 459619 - RNA, 19 nt, Artificial Sequence
  Description of Artificial Sequence: Synthetic oligonucleotide
  Sense strand starting at position 1154 of SEQ ID NO: 317038
ucuguuauuucugucacca

SEQ ID NO: 459620 - RNA, 19 nt, Artificial Sequence
  Description of Artificial Sequence: Synthetic oligonucleotide
  Antisense Strand to SEQ ID NO: 459619
uggugacagaaauaacaga

SEQ ID NO: 459621 - RNA, 19 nt, Artificial Sequence
  Description of Artificial Sequence: Synthetic oligonucleotide
  Sense strand starting at position 1200 of SEQ ID NO: 317038
gcaugacuugcugcagcau

SEQ ID NO: 459622 - RNA, 19 nt, Artificial Sequence
  Description of Artificial Sequence: Synthetic oligonucleotide
  Antisense Strand to SEQ ID NO: 459621
augcugcagcaagucaugc

SEQ ID NO: 459623 - RNA, 19 nt, Artificial Sequence
  Description of Artificial Sequence: Synthetic oligonucleotide
  Sense strand starting at position 1215 of SEQ ID NO: 317038
gcauccuauuauuuaguuu

SEQ ID NO: 459624 - RNA, 19 nt, Artificial Sequence
  Description of Artificial Sequence: Synthetic oligonucleotide
  Antisense Strand to SEQ ID NO: 459623
aaacuaaauaauaggaugc

SEQ ID NO: 459625 - RNA, 19 nt, Artificial Sequence
  Description of Artificial Sequence: Synthetic oligonucleotide
  Sense strand starting at position 1645 of SEQ ID NO: 317038
agaauaaaugucugagucu

SEQ ID NO: 459626 - RNA, 19 nt, Artificial Sequence
  Description of Artificial Sequence: Synthetic oligonucleotide
  Antisense Strand to SEQ ID NO: 459625
agacucagacauuuauucu

SEQ ID NO: 459627 - RNA, 19 nt, Artificial Sequence
  Description of Artificial Sequence: Synthetic oligonucleotide
  Sense strand starting at position 2043 of SEQ ID NO: 317038
guguuugugaugucggcau

SEQ ID NO: 459628 - RNA, 19 nt, Artificial Sequence
  Description of Artificial Sequence: Synthetic oligonucleotide
  Antisense Strand to SEQ ID NO: 459627
augccgacaucacaaacac

SEQ ID NO: 459629 - RNA, 19 nt, Artificial Sequence
  Description of Artificial Sequence: Synthetic oligonucleotide
  Sense strand starting at position 2226 of SEQ ID NO: 317038
aguagcucaccagauaaau

SEQ ID NO: 459630 - RNA, 19 nt, Artificial Sequence
  Description of Artificial Sequence: Synthetic oligonucleotide
  Antisense Strand to SEQ ID NO: 459629
auuuaucuggugagcuacu

SEQ ID NO: 459631 - RNA, 19 nt, Artificial Sequence
  Description of Artificial Sequence: Synthetic oligonucleotide
  Sense strand starting at position 2357 of SEQ ID NO: 317038
gauacuuggcugcagaaca

SEQ ID NO: 459632 - RNA, 19 nt, Artificial Sequence
  Description of Artificial Sequence: Synthetic oligonucleotide
  Antisense Strand to SEQ ID NO: 459631
uguucugcagccaaguauc

SEQ ID NO: 459633 - RNA, 19 nt, Artificial Sequence
  Description of Artificial Sequence: Synthetic oligonucleotide
  Sense strand starting at position 2812 of SEQ ID NO: 317038
guacuauucccugagcuaa

SEQ ID NO: 459634 - RNA, 19 nt, Artificial Sequence
  Description of Artificial Sequence: Synthetic oligonucleotide
  Antisense Strand to SEQ ID NO: 459633
uuagcucagggaauaguac

SEQ ID NO: 459635 - RNA, 19 nt, Artificial Sequence
  Description of Artificial Sequence: Synthetic oligonucleotide
  Sense strand starting at position 2814 of SEQ ID NO: 317038
acuauucccugagcuaaug

SEQ ID NO: 459636 - RNA, 19 nt, Artificial Sequence
  Description of Artificial Sequence: Synthetic oligonucleotide
  Antisense Strand to SEQ ID NO: 459635
cauuagcucagggaauagu

SEQ ID NO: 459637 - RNA, 19 nt, Artificial Sequence
  Description of Artificial Sequence: Synthetic oligonucleotide
  Sense strand starting at position 2840 of SEQ ID NO: 317038
cucaaagcuccugauuaga

SEQ ID NO: 459638 - RNA, 19 nt, Artificial Sequence
  Description of Artificial Sequence: Synthetic oligonucleotide
  Antisense Strand to SEQ ID NO: 459637
ucuaaucaggagcuuugag

SEQ ID NO: 459639 - RNA, 19 nt, Artificial Sequence
  Description of Artificial Sequence: Synthetic oligonucleotide
  Sense strand starting at position 3014 of SEQ ID NO: 317038
aguagagauucuuccugau

SEQ ID NO: 459640 - RNA, 19 nt, Artificial Sequence
  Description of Artificial Sequence: Synthetic oligonucleotide
  Antisense Strand to SEQ ID NO: 459639
aucaggaagaaucucuacu

SEQ ID NO: 459641 - RNA, 19 nt, Artificial Sequence
  Description of Artificial Sequence: Synthetic oligonucleotide
  Sense strand starting at position 3029 of SEQ ID NO: 317038
ugauuuagcuacgaagaaa

SEQ ID NO: 459642 - RNA, 19 nt, Artificial Sequence
  Description of Artificial Sequence: Synthetic oligonucleotide
  Antisense Strand to SEQ ID NO: 459641
uuucuucguagcuaaauca

SEQ ID NO: 459643 - RNA, 19 nt, Artificial Sequence
  Description of Artificial Sequence: Synthetic oligonucleotide
  Sense strand starting at position 3061 of SEQ ID NO: 317038
auuuguuuguucucuggca

SEQ ID NO: 459644 - RNA, 19 nt, Artificial Sequence
  Description of Artificial Sequence: Synthetic oligonucleotide
  Antisense Strand to SEQ ID NO: 459643
ugccagagaacaaacaaau

SEQ ID NO: 459645 - RNA, 19 nt, Artificial Sequence
  Description of Artificial Sequence: Synthetic oligonucleotide
  Sense strand starting at position 3083 of SEQ ID NO: 317038
ggaacagauuuccacugau

SEQ ID NO: 459646 - RNA, 19 nt, Artificial Sequence
  Description of Artificial Sequence: Synthetic oligonucleotide
  Antisense Strand to SEQ ID NO: 459645
aucaguggaaaucuguucc

SEQ ID NO: 459647 - RNA, 19 nt, Artificial Sequence
  Description of Artificial Sequence: Synthetic oligonucleotide
  Sense strand starting at position 3167 of SEQ ID NO: 317038
caacaaagguagucuguaa

SEQ ID NO: 459648 - RNA, 19 nt, Artificial Sequence
  Description of Artificial Sequence: Synthetic oligonucleotide
  Antisense Strand to SEQ ID NO: 459647
uuacagacuaccuuuguug

SEQ ID NO: 459649 - RNA, 19 nt, Artificial Sequence
  Description of Artificial Sequence: Synthetic oligonucleotide
  Sense strand starting at position 3171 of SEQ ID NO: 317038
aaagguagucuguaaccuu

SEQ ID NO: 459650 - RNA, 19 nt, Artificial Sequence
  Description of Artificial Sequence: Synthetic oligonucleotide
  Antisense Strand to SEQ ID NO: 459649
aagguuacagacuaccuuu

SEQ ID NO: 459651 - RNA, 19 nt, Artificial Sequence
  Description of Artificial Sequence: Synthetic oligonucleotide
  Sense strand starting at position 3208 of SEQ ID NO: 317038
aauauauuggcuugugaag

SEQ ID NO: 459652 - RNA, 19 nt, Artificial Sequence
  Description of Artificial Sequence: Synthetic oligonucleotide
  Antisense Strand to SEQ ID NO: 459651
cuucacaagccaauauauu

SEQ ID NO: 459653 - RNA, 19 nt, Artificial Sequence
  Description of Artificial Sequence: Synthetic oligonucleotide
  Sense strand starting at position 3269 of SEQ ID NO: 317038
gugauaaacggucauuagg

SEQ ID NO: 459654 - RNA, 19 nt, Artificial Sequence
  Description of Artificial Sequence: Synthetic oligonucleotide
  Antisense Strand to SEQ ID NO: 459653
ccuaaugaccguuuaucac

SEQ ID NO: 459655 - RNA, 19 nt, Artificial Sequence
  Description of Artificial Sequence: Synthetic oligonucleotide
  Sense strand starting at position 3271 of SEQ ID NO: 317038
gauaaacggucauuagguu

SEQ ID NO: 459656 - RNA, 19 nt, Artificial Sequence
  Description of Artificial Sequence: Synthetic oligonucleotide
  Antisense Strand to SEQ ID NO: 459655
aaccuaaugaccguuuauc

SEQ ID NO: 459657 - RNA, 19 nt, Artificial Sequence
  Description of Artificial Sequence: Synthetic oligonucleotide
  Sense strand starting at position 3327 of SEQ ID NO: 317038
auaguaucacagcaguagu

SEQ ID NO: 459658 - RNA, 19 nt, Artificial Sequence
  Description of Artificial Sequence: Synthetic oligonucleotide
  Antisense Strand to SEQ ID NO: 459657
acuacugcugugauacuau

SEQ ID NO: 459659 - RNA, 19 nt, Artificial Sequence
  Description of Artificial Sequence: Synthetic oligonucleotide
  Sense strand starting at position 3413 of SEQ ID NO: 317038
uuccaauuucuuugugucu

SEQ ID NO: 459660 - RNA, 19 nt, Artificial Sequence
  Description of Artificial Sequence: Synthetic oligonucleotide
  Antisense Strand to SEQ ID NO: 459659
agacacaaagaaauuggaa

SEQ ID NO: 459661 - RNA, 19 nt, Artificial Sequence
  Description of Artificial Sequence: Synthetic oligonucleotide
  Sense strand starting at position 3443 of SEQ ID NO: 317038
uagggauccuuugcauaua

SEQ ID NO: 459662 - RNA, 19 nt, Artificial Sequence
  Description of Artificial Sequence: Synthetic oligonucleotide
  Antisense Strand to SEQ ID NO: 459661
uauaugcaaaggaucccua

SEQ ID NO: 459663 - RNA, 19 nt, Artificial Sequence
  Description of Artificial Sequence: Synthetic oligonucleotide
  Sense strand starting at position 3446 of SEQ ID NO: 317038
ggauccuuugcauauacaa

SEQ ID NO: 459664 - RNA, 19 nt, Artificial Sequence
  Description of Artificial Sequence: Synthetic oligonucleotide
  Antisense Strand to SEQ ID NO: 459663
uuguauaugcaaaggaucc

SEQ ID NO: 459665 - RNA, 19 nt, Artificial Sequence
  Description of Artificial Sequence: Synthetic oligonucleotide
  Sense strand starting at position 3530 of SEQ ID NO: 317038
auaguugaauaugcagaua

SEQ ID NO: 459666 - RNA, 19 nt, Artificial Sequence
  Description of Artificial Sequence: Synthetic oligonucleotide
  Antisense Strand to SEQ ID NO: 459665
uaucugcauauucaacuau

SEQ ID NO: 459667 - RNA, 19 nt, Artificial Sequence
  Description of Artificial Sequence: Synthetic oligonucleotide
  Sense strand starting at position 3556 of SEQ ID NO: 317038
auauauccaucaguggaca

SEQ ID NO: 459668 - RNA, 19 nt, Artificial Sequence
  Description of Artificial Sequence: Synthetic oligonucleotide
  Antisense Strand to SEQ ID NO: 459667
uguccacugauggauauau

SEQ ID NO: 459669 - RNA, 19 nt, Artificial Sequence
  Description of Artificial Sequence: Synthetic oligonucleotide
  Sense strand starting at position 3700 of SEQ ID NO: 317038
gcuagagagcaauauuccu

SEQ ID NO: 459670 - RNA, 19 nt, Artificial Sequence
  Description of Artificial Sequence: Synthetic oligonucleotide
  Antisense Strand to SEQ ID NO: 459669
aggaauauugcucucuagc

SEQ ID NO: 459671 - RNA, 19 nt, Artificial Sequence
  Description of Artificial Sequence: Synthetic oligonucleotide
  Sense strand starting at position 3760 of SEQ ID NO: 317038
ugaauucugcaauauggua

SEQ ID NO: 459672 - RNA, 19 nt, Artificial Sequence
  Description of Artificial Sequence: Synthetic oligonucleotide
  Antisense Strand to SEQ ID NO: 459671
uaccauauugcagaauuca

SEQ ID NO: 459673 - RNA, 19 nt, Artificial Sequence
  Description of Artificial Sequence: Synthetic oligonucleotide
  Sense strand starting at position 3787 of SEQ ID NO: 317038
auauauuauguccaaguga

SEQ ID NO: 459674 - RNA, 19 nt, Artificial Sequence
  Description of Artificial Sequence: Synthetic oligonucleotide
  Antisense Strand to SEQ ID NO: 459673
ucacuuggacauaauauau

SEQ ID NO: 459675 - RNA, 19 nt, Artificial Sequence
  Description of Artificial Sequence: Synthetic oligonucleotide
  Sense strand starting at position 3798 of SEQ ID NO: 317038
ccaagugaugcuuauccca

SEQ ID NO: 459676 - RNA, 19 nt, Artificial Sequence
  Description of Artificial Sequence: Synthetic oligonucleotide
  Antisense Strand to SEQ ID NO: 459675
ugggauaagcaucacuugg

SEQ ID NO: 459677 - RNA, 19 nt, Artificial Sequence
  Description of Artificial Sequence: Synthetic oligonucleotide
  Sense strand starting at position 3806 of SEQ ID NO: 317038
ugcuuaucccaggaaugca

SEQ ID NO: 459678 - RNA, 19 nt, Artificial Sequence
  Description of Artificial Sequence: Synthetic oligonucleotide
  Antisense Strand to SEQ ID NO: 459677
ugcauuccugggauaagca

SEQ ID NO: 459679 - RNA, 19 nt, Artificial Sequence
  Description of Artificial Sequence: Synthetic oligonucleotide
  Sense strand starting at position 17 of SEQ ID NO: 317039
aggcuuugucguuacacca

SEQ ID NO: 459680 - RNA, 19 nt, Artificial Sequence
  Description of Artificial Sequence: Synthetic oligonucleotide
  Antisense Strand to SEQ ID NO: 459679
ugguguaacgacaaagccu

SEQ ID NO: 459681 - RNA, 19 nt, Artificial Sequence
  Description of Artificial Sequence: Synthetic oligonucleotide
  Sense strand starting at position 128 of SEQ ID NO: 317039
ggagauauucgaugugguc

SEQ ID NO: 459682 - RNA, 19 nt, Artificial Sequence
  Description of Artificial Sequence: Synthetic oligonucleotide
  Antisense Strand to SEQ ID NO: 459681
gaccacaucgaauaucucc

SEQ ID NO: 459683 - RNA, 19 nt, Artificial Sequence
  Description of Artificial Sequence: Synthetic oligonucleotide
  Sense strand starting at position 130 of SEQ ID NO: 317039
agauauucgauguggucuu

SEQ ID NO: 459684 - RNA, 19 nt, Artificial Sequence
  Description of Artificial Sequence: Synthetic oligonucleotide
  Antisense Strand to SEQ ID NO: 459683
aagaccacaucgaauaucu

SEQ ID NO: 459685 - RNA, 19 nt, Artificial Sequence
  Description of Artificial Sequence: Synthetic oligonucleotide
  Sense strand starting at position 142 of SEQ ID NO: 317039
uggucuuucuagucuccua

SEQ ID NO: 459686 - RNA, 19 nt, Artificial Sequence
  Description of Artificial Sequence: Synthetic oligonucleotide
  Antisense Strand to SEQ ID NO: 459685
uaggagacuagaaagacca

SEQ ID NO: 459687 - RNA, 19 nt, Artificial Sequence
  Description of Artificial Sequence: Synthetic oligonucleotide
  Sense strand starting at position 238 of SEQ ID NO: 317039
uaagcuaggugaucaaauc

SEQ ID NO: 459688 - RNA, 19 nt, Artificial Sequence
  Description of Artificial Sequence: Synthetic oligonucleotide
  Antisense Strand to SEQ ID NO: 459687
gauuugaucaccuagcuua

SEQ ID NO: 459689 - RNA, 19 nt, Artificial Sequence
  Description of Artificial Sequence: Synthetic oligonucleotide
  Sense strand starting at position 258 of SEQ ID NO: 317039
uccagagaauccgaacacu

SEQ ID NO: 459690 - RNA, 19 nt, Artificial Sequence
  Description of Artificial Sequence: Synthetic oligonucleotide
  Antisense Strand to SEQ ID NO: 459689
aguguucggauucucugga

SEQ ID NO: 459691 - RNA, 19 nt, Artificial Sequence
  Description of Artificial Sequence: Synthetic oligonucleotide
  Sense strand starting at position 689 of SEQ ID NO: 317039
cgcggauauaccuggauuu

SEQ ID NO: 459692 - RNA, 19 nt, Artificial Sequence
  Description of Artificial Sequence: Synthetic oligonucleotide
  Antisense Strand to SEQ ID NO: 459691
aaauccagguauauccgcg

SEQ ID NO: 459693 - RNA, 19 nt, Artificial Sequence
  Description of Artificial Sequence: Synthetic oligonucleotide
  Sense strand starting at position 700 of SEQ ID NO: 317039
cuggauuucuguuauagcu

SEQ ID NO: 459694 - RNA, 19 nt, Artificial Sequence
  Description of Artificial Sequence: Synthetic oligonucleotide
  Antisense Strand to SEQ ID NO: 459693
agcuauaacagaaauccag

SEQ ID NO: 459695 - RNA, 19 nt, Artificial Sequence
  Description of Artificial Sequence: Synthetic oligonucleotide
  Sense strand starting at position 702 of SEQ ID NO: 317039
ggauuucuguuauagcuuu

SEQ ID NO: 459696 - RNA, 19 nt, Artificial Sequence
  Description of Artificial Sequence: Synthetic oligonucleotide
  Antisense Strand to SEQ ID NO: 459695
aaagcuauaacagaaaucc

SEQ ID NO: 459697 - RNA, 19 nt, Artificial Sequence
  Description of Artificial Sequence: Synthetic oligonucleotide
  Sense strand starting at position 708 of SEQ ID NO: 317039
cuguuauagcuuuaagaac

SEQ ID NO: 459698 - RNA, 19 nt, Artificial Sequence
  Description of Artificial Sequence: Synthetic oligonucleotide
  Antisense Strand to SEQ ID NO: 459697
guucuuaaagcuauaacag

SEQ ID NO: 459699 - RNA, 19 nt, Artificial Sequence
  Description of Artificial Sequence: Synthetic oligonucleotide
  Sense strand starting at position 740 of SEQ ID NO: 317039
cagaaaguuccacgccauc

SEQ ID NO: 459700 - RNA, 19 nt, Artificial Sequence
  Description of Artificial Sequence: Synthetic oligonucleotide
  Antisense Strand to SEQ ID NO: 459699
gauggcguggaacuuucug

SEQ ID NO: 459701 - RNA, 19 nt, Artificial Sequence
  Description of Artificial Sequence: Synthetic oligonucleotide
  Sense strand starting at position 776 of SEQ ID NO: 317039
gcagcccugaaguauagaa

SEQ ID NO: 459702 - RNA, 19 nt, Artificial Sequence
  Description of Artificial Sequence: Synthetic oligonucleotide
  Antisense Strand to SEQ ID NO: 459701
uucuauacuucagggcugc

SEQ ID NO: 459703 - RNA, 19 nt, Artificial Sequence
  Description of Artificial Sequence: Synthetic oligonucleotide
  Sense strand starting at position 1796 of SEQ ID NO: 317039
acaggcuucgccgaguagu

SEQ ID NO: 459704 - RNA, 19 nt, Artificial Sequence
  Description of Artificial Sequence: Synthetic oligonucleotide
  Antisense Strand to SEQ ID NO: 459703
acuacucggcgaagccugu

SEQ ID NO: 459705 - RNA, 19 nt, Artificial Sequence
  Description of Artificial Sequence: Synthetic oligonucleotide
  Sense strand starting at position 2128 of SEQ ID NO: 317039
ugcucuuucgacguguuaa

SEQ ID NO: 459706 - RNA, 19 nt, Artificial Sequence
  Description of Artificial Sequence: Synthetic oligonucleotide
  Antisense Strand to SEQ ID NO: 459705
uuaacacgucgaaagagca

SEQ ID NO: 459707 - RNA, 19 nt, Artificial Sequence
  Description of Artificial Sequence: Synthetic oligonucleotide
  Sense strand starting at position 2683 of SEQ ID NO: 317039
ggcgaaguuugcucuggga

SEQ ID NO: 459708 - RNA, 19 nt, Artificial Sequence
  Description of Artificial Sequence: Synthetic oligonucleotide
  Antisense Strand to SEQ ID NO: 459707
ucccagagcaaacuucgcc

SEQ ID NO: 459709 - RNA, 19 nt, Artificial Sequence
  Description of Artificial Sequence: Synthetic oligonucleotide
  Sense strand starting at position 2758 of SEQ ID NO: 317039
ugauuucucugccucugua

SEQ ID NO: 459710 - RNA, 19 nt, Artificial Sequence
  Description of Artificial Sequence: Synthetic oligonucleotide
  Antisense Strand to SEQ ID NO: 459709
uacagaggcagagaaauca

SEQ ID NO: 459711 - RNA, 19 nt, Artificial Sequence
  Description of Artificial Sequence: Synthetic oligonucleotide
  Sense strand starting at position 2841 of SEQ ID NO: 317039
guacaaugauucucuuaag

SEQ ID NO: 459712 - RNA, 19 nt, Artificial Sequence
  Description of Artificial Sequence: Synthetic oligonucleotide
  Antisense Strand to SEQ ID NO: 459711
cuuaagagaaucauuguac

SEQ ID NO: 459713 - RNA, 19 nt, Artificial Sequence
  Description of Artificial Sequence: Synthetic oligonucleotide
  Sense strand starting at position 2993 of SEQ ID NO: 317039
cagcuuugugaggagggua

SEQ ID NO: 459714 - RNA, 19 nt, Artificial Sequence
  Description of Artificial Sequence: Synthetic oligonucleotide
  Antisense Strand to SEQ ID NO: 459713
uacccuccucacaaagcug

SEQ ID NO: 459715 - RNA, 19 nt, Artificial Sequence
  Description of Artificial Sequence: Synthetic oligonucleotide
  Sense strand starting at position 3015 of SEQ ID NO: 317039
cagguauguuuauuauugu

SEQ ID NO: 459716 - RNA, 19 nt, Artificial Sequence
  Description of Artificial Sequence: Synthetic oligonucleotide
  Antisense Strand to SEQ ID NO: 459715
acaauaauaaacauaccug

SEQ ID NO: 459717 - RNA, 19 nt, Artificial Sequence
  Description of Artificial Sequence: Synthetic oligonucleotide
  Sense strand starting at position 3054 of SEQ ID NO: 317039
uugaacacuuauuggaaga

SEQ ID NO: 459718 - RNA, 19 nt, Artificial Sequence
  Description of Artificial Sequence: Synthetic oligonucleotide
  Antisense Strand to SEQ ID NO: 459717
ucuuccaauaaguguucaa

SEQ ID NO: 459719 - RNA, 19 nt, Artificial Sequence
  Description of Artificial Sequence: Synthetic oligonucleotide
  Sense strand starting at position 3088 of SEQ ID NO: 317039
augagcuuucccuaugcau

SEQ ID NO: 459720 - RNA, 19 nt, Artificial Sequence
  Description of Artificial Sequence: Synthetic oligonucleotide
  Antisense Strand to SEQ ID NO: 459719
augcauagggaaagcucau

SEQ ID NO: 459721 - RNA, 19 nt, Artificial Sequence
  Description of Artificial Sequence: Synthetic oligonucleotide
  Sense strand starting at position 3133 of SEQ ID NO: 317039
cugagagcuuaagaaugga

SEQ ID NO: 459722 - RNA, 19 nt, Artificial Sequence
  Description of Artificial Sequence: Synthetic oligonucleotide
  Antisense Strand to SEQ ID NO: 459721
uccauucuuaagcucucag

SEQ ID NO: 459723 - RNA, 19 nt, Artificial Sequence
  Description of Artificial Sequence: Synthetic oligonucleotide
  Sense strand starting at position 3199 of SEQ ID NO: 317039
ccuagacucuucucugaag

SEQ ID NO: 459724 - RNA, 19 nt, Artificial Sequence
  Description of Artificial Sequence: Synthetic oligonucleotide
  Antisense Strand to SEQ ID NO: 459723
cuucagagaagagucuagg

SEQ ID NO: 459725 - RNA, 19 nt, Artificial Sequence
  Description of Artificial Sequence: Synthetic oligonucleotide
  Sense strand starting at position 3271 of SEQ ID NO: 317039
gcucuccuguuguuuaaua

SEQ ID NO: 459726 - RNA, 19 nt, Artificial Sequence
  Description of Artificial Sequence: Synthetic oligonucleotide
  Antisense Strand to SEQ ID NO: 459725
uauuaaacaacaggagagc

SEQ ID NO: 459727 - RNA, 19 nt, Artificial Sequence
  Description of Artificial Sequence: Synthetic oligonucleotide
  Sense strand starting at position 3273 of SEQ ID NO: 317039
ucuccuguuguuuaauagu

SEQ ID NO: 459728 - RNA, 19 nt, Artificial Sequence
  Description of Artificial Sequence: Synthetic oligonucleotide
  Antisense Strand to SEQ ID NO: 459727
acuauuaaacaacaggaga

SEQ ID NO: 459729 - RNA, 19 nt, Artificial Sequence
  Description of Artificial Sequence: Synthetic oligonucleotide
  Sense strand starting at position 3281 of SEQ ID NO: 317039
uguuuaauagugugaggac

SEQ ID NO: 459730 - RNA, 19 nt, Artificial Sequence
  Description of Artificial Sequence: Synthetic oligonucleotide
  Antisense Strand to SEQ ID NO: 459729
guccucacacuauuaaaca

SEQ ID NO: 459731 - RNA, 19 nt, Artificial Sequence
  Description of Artificial Sequence: Synthetic oligonucleotide
  Sense strand starting at position 3352 of SEQ ID NO: 317039
agugcuagagggugaucaa

SEQ ID NO: 459732 - RNA, 19 nt, Artificial Sequence
  Description of Artificial Sequence: Synthetic oligonucleotide
  Antisense Strand to SEQ ID NO: 459731
uugaucacccucuagcacu

SEQ ID NO: 459733 - RNA, 19 nt, Artificial Sequence
  Description of Artificial Sequence: Synthetic oligonucleotide
  Sense strand starting at position 3353 of SEQ ID NO: 317039
gugcuagagggugaucaaa

SEQ ID NO: 459734 - RNA, 19 nt, Artificial Sequence
  Description of Artificial Sequence: Synthetic oligonucleotide
  Antisense Strand to SEQ ID NO: 459733
uuugaucacccucuagcac

SEQ ID NO: 459735 - RNA, 19 nt, Artificial Sequence
  Description of Artificial Sequence: Synthetic oligonucleotide
  Sense strand starting at position 3355 of SEQ ID NO: 317039
gcuagagggugaucaaaug

SEQ ID NO: 459736 - RNA, 19 nt, Artificial Sequence
  Description of Artificial Sequence: Synthetic oligonucleotide
  Antisense Strand to SEQ ID NO: 459735
cauuugaucacccucuagc

SEQ ID NO: 459737 - RNA, 19 nt, Artificial Sequence
  Description of Artificial Sequence: Synthetic oligonucleotide
  Sense strand starting at position 3363 of SEQ ID NO: 317039
gugaucaaaugaucaaugu

SEQ ID NO: 459738 - RNA, 19 nt, Artificial Sequence
  Description of Artificial Sequence: Synthetic oligonucleotide
  Antisense Strand to SEQ ID NO: 459737
acauugaucauuugaucac

SEQ ID NO: 459739 - RNA, 19 nt, Artificial Sequence
  Description of Artificial Sequence: Synthetic oligonucleotide
  Sense strand starting at position 3367 of SEQ ID NO: 317039
ucaaaugaucaauguguau

SEQ ID NO: 459740 - RNA, 19 nt, Artificial Sequence
  Description of Artificial Sequence: Synthetic oligonucleotide
  Antisense Strand to SEQ ID NO: 459739
auacacauugaucauuuga

SEQ ID NO: 459741 - RNA, 19 nt, Artificial Sequence
  Description of Artificial Sequence: Synthetic oligonucleotide
  Sense strand starting at position 3380 of SEQ ID NO: 317039
guguauaauugccucucuu

SEQ ID NO: 459742 - RNA, 19 nt, Artificial Sequence
  Description of Artificial Sequence: Synthetic oligonucleotide
  Antisense Strand to SEQ ID NO: 459741
aagagaggcaauuauacac

SEQ ID NO: 459743 - RNA, 19 nt, Artificial Sequence
  Description of Artificial Sequence: Synthetic oligonucleotide
  Sense strand starting at position 3423 of SEQ ID NO: 317039
gcaagcauuuguuuagugu

SEQ ID NO: 459744 - RNA, 19 nt, Artificial Sequence
  Description of Artificial Sequence: Synthetic oligonucleotide
  Antisense Strand to SEQ ID NO: 459743
acacuaaacaaaugcuugc

SEQ ID NO: 459745 - RNA, 19 nt, Artificial Sequence
  Description of Artificial Sequence: Synthetic oligonucleotide
  Sense strand starting at position 3473 of SEQ ID NO: 317039
ggaguacuauuauuaauag

SEQ ID NO: 459746 - RNA, 19 nt, Artificial Sequence
  Description of Artificial Sequence: Synthetic oligonucleotide
  Antisense Strand to SEQ ID NO: 459745
cuauuaauaauaguacucc

SEQ ID NO: 459747 - RNA, 19 nt, Artificial Sequence
  Description of Artificial Sequence: Synthetic oligonucleotide
  Sense strand starting at position 3577 of SEQ ID NO: 317039
gagucaugcggcuguagga

SEQ ID NO: 459748 - RNA, 19 nt, Artificial Sequence
  Description of Artificial Sequence: Synthetic oligonucleotide
  Antisense Strand to SEQ ID NO: 459747
uccuacagccgcaugacuc

SEQ ID NO: 459749 - RNA, 19 nt, Artificial Sequence
  Description of Artificial Sequence: Synthetic oligonucleotide
  Sense strand starting at position 3647 of SEQ ID NO: 317039
uucuuaggaugacagauaa

SEQ ID NO: 459750 - RNA, 19 nt, Artificial Sequence
  Description of Artificial Sequence: Synthetic oligonucleotide
  Antisense Strand to SEQ ID NO: 459749
uuaucugucauccuaagaa

SEQ ID NO: 459751 - RNA, 19 nt, Artificial Sequence
  Description of Artificial Sequence: Synthetic oligonucleotide
  Sense strand starting at position 3683 of SEQ ID NO: 317039
aaucauaaguuucugggau

SEQ ID NO: 459752 - RNA, 19 nt, Artificial Sequence
  Description of Artificial Sequence: Synthetic oligonucleotide
  Antisense Strand to SEQ ID NO: 459751
aucccagaaacuuaugauu

SEQ ID NO: 459753 - RNA, 19 nt, Artificial Sequence
  Description of Artificial Sequence: Synthetic oligonucleotide
  Sense strand starting at position 3801 of SEQ ID NO: 317039
ucaaucagcugauauugga

SEQ ID NO: 459754 - RNA, 19 nt, Artificial Sequence
  Description of Artificial Sequence: Synthetic oligonucleotide
  Antisense Strand to SEQ ID NO: 459753
uccaauaucagcugauuga

SEQ ID NO: 459755 - RNA, 19 nt, Artificial Sequence
  Description of Artificial Sequence: Synthetic oligonucleotide
  Sense strand starting at position 3881 of SEQ ID NO: 317039
cggaacuucuaucaggaaa

SEQ ID NO: 459756 - RNA, 19 nt, Artificial Sequence
  Description of Artificial Sequence: Synthetic oligonucleotide
  Antisense Strand to SEQ ID NO: 459755
uuuccugauagaaguuccg

SEQ ID NO: 459757 - RNA, 19 nt, Artificial Sequence
  Description of Artificial Sequence: Synthetic oligonucleotide
  Sense strand starting at position 3916 of SEQ ID NO: 317039
ggaguuauaccauguugga

SEQ ID NO: 459758 - RNA, 19 nt, Artificial Sequence
  Description of Artificial Sequence: Synthetic oligonucleotide
  Antisense Strand to SEQ ID NO: 459757
uccaacaugguauaacucc

SEQ ID NO: 459759 - RNA, 19 nt, Artificial Sequence
  Description of Artificial Sequence: Synthetic oligonucleotide
  Sense strand starting at position 3 of SEQ ID NO: 317040
guaacaggugugcagaaua

SEQ ID NO: 459760 - RNA, 19 nt, Artificial Sequence
  Description of Artificial Sequence: Synthetic oligonucleotide
  Antisense Strand to SEQ ID NO: 459759
uauucugcacaccuguuac

SEQ ID NO: 459761 - RNA, 19 nt, Artificial Sequence
  Description of Artificial Sequence: Synthetic oligonucleotide
  Sense strand starting at position 73 of SEQ ID NO: 317040
agauauuagccucaaugug

SEQ ID NO: 459762 - RNA, 19 nt, Artificial Sequence
  Description of Artificial Sequence: Synthetic oligonucleotide
  Antisense Strand to SEQ ID NO: 459761
cacauugaggcuaauaucu

SEQ ID NO: 459763 - RNA, 19 nt, Artificial Sequence
  Description of Artificial Sequence: Synthetic oligonucleotide
  Sense strand starting at position 104 of SEQ ID NO: 317040
uugcaaauuccugagucuu

SEQ ID NO: 459764 - RNA, 19 nt, Artificial Sequence
  Description of Artificial Sequence: Synthetic oligonucleotide
  Antisense Strand to SEQ ID NO: 459763
aagacucaggaauuugcaa

SEQ ID NO: 459765 - RNA, 19 nt, Artificial Sequence
  Description of Artificial Sequence: Synthetic oligonucleotide
  Sense strand starting at position 142 of SEQ ID NO: 317040
ugaagacaguuaguguuaa

SEQ ID NO: 459766 - RNA, 19 nt, Artificial Sequence
  Description of Artificial Sequence: Synthetic oligonucleotide
  Antisense Strand to SEQ ID NO: 459765
uuaacacuaacugucuuca

SEQ ID NO: 459767 - RNA, 19 nt, Artificial Sequence
  Description of Artificial Sequence: Synthetic oligonucleotide
  Sense strand starting at position 153 of SEQ ID NO: 317040
aguguuaauuauguuguca

SEQ ID NO: 459768 - RNA, 19 nt, Artificial Sequence
  Description of Artificial Sequence: Synthetic oligonucleotide
  Antisense Strand to SEQ ID NO: 459767
ugacaacauaauuaacacu

SEQ ID NO: 459769 - RNA, 19 nt, Artificial Sequence
  Description of Artificial Sequence: Synthetic oligonucleotide
  Sense strand starting at position 206 of SEQ ID NO: 317040
acuccuuaaccuugggaaa

SEQ ID NO: 459770 - RNA, 19 nt, Artificial Sequence
  Description of Artificial Sequence: Synthetic oligonucleotide
  Antisense Strand to SEQ ID NO: 459769
uuucccaagguuaaggagu

SEQ ID NO: 459771 - RNA, 19 nt, Artificial Sequence
  Description of Artificial Sequence: Synthetic oligonucleotide
  Sense strand starting at position 312 of SEQ ID NO: 317040
acuguaacgaugcauguaa

SEQ ID NO: 459772 - RNA, 19 nt, Artificial Sequence
  Description of Artificial Sequence: Synthetic oligonucleotide
  Antisense Strand to SEQ ID NO: 459771
uuacaugcaucguuacagu

SEQ ID NO: 459773 - RNA, 19 nt, Artificial Sequence
  Description of Artificial Sequence: Synthetic oligonucleotide
  Sense strand starting at position 335 of SEQ ID NO: 317040
cuuaauguagucuguggua

SEQ ID NO: 459774 - RNA, 19 nt, Artificial Sequence
  Description of Artificial Sequence: Synthetic oligonucleotide
  Antisense Strand to SEQ ID NO: 459773
uaccacagacuacauuaag

SEQ ID NO: 459775 - RNA, 19 nt, Artificial Sequence
  Description of Artificial Sequence: Synthetic oligonucleotide
  Sense strand starting at position 337 of SEQ ID NO: 317040
uaauguagucugugguaca

SEQ ID NO: 459776 - RNA, 19 nt, Artificial Sequence
  Description of Artificial Sequence: Synthetic oligonucleotide
  Antisense Strand to SEQ ID NO: 459775
uguaccacagacuacauua

SEQ ID NO: 459777 - RNA, 19 nt, Artificial Sequence
  Description of Artificial Sequence: Synthetic oligonucleotide
  Sense strand starting at position 342 of SEQ ID NO: 317040
uagucugugguacauaaua

SEQ ID NO: 459778 - RNA, 19 nt, Artificial Sequence
  Description of Artificial Sequence: Synthetic oligonucleotide
  Antisense Strand to SEQ ID NO: 459777
uauuauguaccacagacua

SEQ ID NO: 459779 - RNA, 19 nt, Artificial Sequence
  Description of Artificial Sequence: Synthetic oligonucleotide
  Sense strand starting at position 344 of SEQ ID NO: 317040
gucugugguacauaauaag

SEQ ID NO: 459780 - RNA, 19 nt, Artificial Sequence
  Description of Artificial Sequence: Synthetic oligonucleotide
  Antisense Strand to SEQ ID NO: 459779
cuuauuauguaccacagac

SEQ ID NO: 459781 - RNA, 19 nt, Artificial Sequence
  Description of Artificial Sequence: Synthetic oligonucleotide
  Sense strand starting at position 495 of SEQ ID NO: 317040
caguucuuaugggaagaaa

SEQ ID NO: 459782 - RNA, 19 nt, Artificial Sequence
  Description of Artificial Sequence: Synthetic oligonucleotide
  Antisense Strand to SEQ ID NO: 459781
uuucuucccauaagaacug

SEQ ID NO: 459783 - RNA, 19 nt, Artificial Sequence
  Description of Artificial Sequence: Synthetic oligonucleotide
  Sense strand starting at position 504 of SEQ ID NO: 317040
ugggaagaaauguguuuag

SEQ ID NO: 459784 - RNA, 19 nt, Artificial Sequence
  Description of Artificial Sequence: Synthetic oligonucleotide
  Antisense Strand to SEQ ID NO: 459783
cuaaacacauuucuuccca

SEQ ID NO: 459785 - RNA, 19 nt, Artificial Sequence
  Description of Artificial Sequence: Synthetic oligonucleotide
  Sense strand starting at position 507 of SEQ ID NO: 317040
gaagaaauguguuuagcuc

SEQ ID NO: 459786 - RNA, 19 nt, Artificial Sequence
  Description of Artificial Sequence: Synthetic oligonucleotide
  Antisense Strand to SEQ ID NO: 459785
gagcuaaacacauuucuuc

SEQ ID NO: 459787 - RNA, 19 nt, Artificial Sequence
  Description of Artificial Sequence: Synthetic oligonucleotide
  Sense strand starting at position 608 of SEQ ID NO: 317040
augcaugaguuagcuaaca

SEQ ID NO: 459788 - RNA, 19 nt, Artificial Sequence
  Description of Artificial Sequence: Synthetic oligonucleotide
  Antisense Strand to SEQ ID NO: 459787
uguuagcuaacucaugcau

SEQ ID NO: 459789 - RNA, 19 nt, Artificial Sequence
  Description of Artificial Sequence: Synthetic oligonucleotide
  Sense strand starting at position 613 of SEQ ID NO: 317040
ugaguuagcuaacauuuau

SEQ ID NO: 459790 - RNA, 19 nt, Artificial Sequence
  Description of Artificial Sequence: Synthetic oligonucleotide
  Antisense Strand to SEQ ID NO: 459789
auaaauguuagcuaacuca

SEQ ID NO: 459791 - RNA, 19 nt, Artificial Sequence
  Description of Artificial Sequence: Synthetic oligonucleotide
  Sense strand starting at position 700 of SEQ ID NO: 317040
auuugaaaugguugugccu

SEQ ID NO: 459792 - RNA, 19 nt, Artificial Sequence
  Description of Artificial Sequence: Synthetic oligonucleotide
  Antisense Strand to SEQ ID NO: 459791
aggcacaaccauuucaaau

SEQ ID NO: 459793 - RNA, 19 nt, Artificial Sequence
  Description of Artificial Sequence: Synthetic oligonucleotide
  Sense strand starting at position 703 of SEQ ID NO: 317040
ugaaaugguugugccuuaa

SEQ ID NO: 459794 - RNA, 19 nt, Artificial Sequence
  Description of Artificial Sequence: Synthetic oligonucleotide
  Antisense Strand to SEQ ID NO: 459793
uuaaggcacaaccauuuca

SEQ ID NO: 459795 - RNA, 19 nt, Artificial Sequence
  Description of Artificial Sequence: Synthetic oligonucleotide
  Sense strand starting at position 707 of SEQ ID NO: 317040
augguugugccuuaagaua

SEQ ID NO: 459796 - RNA, 19 nt, Artificial Sequence
  Description of Artificial Sequence: Synthetic oligonucleotide
  Antisense Strand to SEQ ID NO: 459795
uaucuuaaggcacaaccau

SEQ ID NO: 459797 - RNA, 19 nt, Artificial Sequence
  Description of Artificial Sequence: Synthetic oligonucleotide
  Sense strand starting at position 715 of SEQ ID NO: 317040
gccuuaagauaauucugaa

SEQ ID NO: 459798 - RNA, 19 nt, Artificial Sequence
  Description of Artificial Sequence: Synthetic oligonucleotide
  Antisense Strand to SEQ ID NO: 459797
uucagaauuaucuuaaggc

SEQ ID NO: 459799 - RNA, 19 nt, Artificial Sequence
  Description of Artificial Sequence: Synthetic oligonucleotide
  Sense strand starting at position 736 of SEQ ID NO: 317040
gauugcauguugucagaaa

SEQ ID NO: 459800 - RNA, 19 nt, Artificial Sequence
  Description of Artificial Sequence: Synthetic oligonucleotide
  Antisense Strand to SEQ ID NO: 459799
uuucugacaacaugcaauc

SEQ ID NO: 459801 - RNA, 19 nt, Artificial Sequence
  Description of Artificial Sequence: Synthetic oligonucleotide
  Sense strand starting at position 828 of SEQ ID NO: 317040
aguguauaaugguagauuu

SEQ ID NO: 459802 - RNA, 19 nt, Artificial Sequence
  Description of Artificial Sequence: Synthetic oligonucleotide
  Antisense Strand to SEQ ID NO: 459801
aaaucuaccauuauacacu

SEQ ID NO: 459803 - RNA, 19 nt, Artificial Sequence
  Description of Artificial Sequence: Synthetic oligonucleotide
  Sense strand starting at position 1070 of SEQ ID NO: 317040
uguacaguaccuugaucaa

SEQ ID NO: 459804 - RNA, 19 nt, Artificial Sequence
  Description of Artificial Sequence: Synthetic oligonucleotide
  Antisense Strand to SEQ ID NO: 459803
uugaucaagguacuguaca

SEQ ID NO: 459805 - RNA, 19 nt, Artificial Sequence
  Description of Artificial Sequence: Synthetic oligonucleotide
  Sense strand starting at position 1073 of SEQ ID NO: 317040
acaguaccuugaucaaguu

SEQ ID NO: 459806 - RNA, 19 nt, Artificial Sequence
  Description of Artificial Sequence: Synthetic oligonucleotide
  Antisense Strand to SEQ ID NO: 459805
aacuugaucaagguacugu

SEQ ID NO: 459807 - RNA, 19 nt, Artificial Sequence
  Description of Artificial Sequence: Synthetic oligonucleotide
  Sense strand starting at position 1996 of SEQ ID NO: 317040
gaggaugggucauagagag

SEQ ID NO: 459808 - RNA, 19 nt, Artificial Sequence
  Description of Artificial Sequence: Synthetic oligonucleotide
  Antisense Strand to SEQ ID NO: 459807
cucucuaugacccauccuc

SEQ ID NO: 459809 - RNA, 19 nt, Artificial Sequence
  Description of Artificial Sequence: Synthetic oligonucleotide
  Sense strand starting at position 2006 of SEQ ID NO: 317040
cauagagagcaacguaauu

SEQ ID NO: 459810 - RNA, 19 nt, Artificial Sequence
  Description of Artificial Sequence: Synthetic oligonucleotide
  Antisense Strand to SEQ ID NO: 459809
aauuacguugcucucuaug

SEQ ID NO: 459811 - RNA, 19 nt, Artificial Sequence
  Description of Artificial Sequence: Synthetic oligonucleotide
  Sense strand starting at position 2094 of SEQ ID NO: 317040
aaaugcaucggugacaaga

SEQ ID NO: 459812 - RNA, 19 nt, Artificial Sequence
  Description of Artificial Sequence: Synthetic oligonucleotide
  Antisense Strand to SEQ ID NO: 459811
ucuugucaccgaugcauuu

SEQ ID NO: 459813 - RNA, 19 nt, Artificial Sequence
  Description of Artificial Sequence: Synthetic oligonucleotide
  Sense strand starting at position 2104 of SEQ ID NO: 317040
gugacaagaguuugaaugu

SEQ ID NO: 459814 - RNA, 19 nt, Artificial Sequence
  Description of Artificial Sequence: Synthetic oligonucleotide
  Antisense Strand to SEQ ID NO: 459813
acauucaaacucuugucac

SEQ ID NO: 459815 - RNA, 19 nt, Artificial Sequence
  Description of Artificial Sequence: Synthetic oligonucleotide
  Sense strand starting at position 2110 of SEQ ID NO: 317040
agaguuugaauguguaacu

SEQ ID NO: 459816 - RNA, 19 nt, Artificial Sequence
  Description of Artificial Sequence: Synthetic oligonucleotide
  Antisense Strand to SEQ ID NO: 459815
aguuacacauucaaacucu

SEQ ID NO: 459817 - RNA, 19 nt, Artificial Sequence
  Description of Artificial Sequence: Synthetic oligonucleotide
  Sense strand starting at position 2111 of SEQ ID NO: 317040
gaguuugaauguguaacua

SEQ ID NO: 459818 - RNA, 19 nt, Artificial Sequence
  Description of Artificial Sequence: Synthetic oligonucleotide
  Antisense Strand to SEQ ID NO: 459817
uaguuacacauucaaacuc

SEQ ID NO: 459819 - RNA, 19 nt, Artificial Sequence
  Description of Artificial Sequence: Synthetic oligonucleotide
  Sense strand starting at position 2442 of SEQ ID NO: 317040
auugguagauuugagagaa

SEQ ID NO: 459820 - RNA, 19 nt, Artificial Sequence
  Description of Artificial Sequence: Synthetic oligonucleotide
  Antisense Strand to SEQ ID NO: 459819
uucucucaaaucuaccaau

SEQ ID NO: 459821 - RNA, 19 nt, Artificial Sequence
  Description of Artificial Sequence: Synthetic oligonucleotide
  Sense strand starting at position 2475 of SEQ ID NO: 317040
aauauagcacuuuguggau

SEQ ID NO: 459822 - RNA, 19 nt, Artificial Sequence
  Description of Artificial Sequence: Synthetic oligonucleotide
  Antisense Strand to SEQ ID NO: 459821
auccacaaagugcuauauu

SEQ ID NO: 459823 - RNA, 19 nt, Artificial Sequence
  Description of Artificial Sequence: Synthetic oligonucleotide
  Sense strand starting at position 2634 of SEQ ID NO: 317040
auaagagucuugcuuugua

SEQ ID NO: 459824 - RNA, 19 nt, Artificial Sequence
  Description of Artificial Sequence: Synthetic oligonucleotide
  Antisense Strand to SEQ ID NO: 459823
uacaaagcaagacucuuau

SEQ ID NO: 459825 - RNA, 19 nt, Artificial Sequence
  Description of Artificial Sequence: Synthetic oligonucleotide
  Sense strand starting at position 3262 of SEQ ID NO: 317040
uuaugaaaguucccuugaa

SEQ ID NO: 459826 - RNA, 19 nt, Artificial Sequence
  Description of Artificial Sequence: Synthetic oligonucleotide
  Antisense Strand to SEQ ID NO: 459825
uucaagggaacuuucauaa

SEQ ID NO: 459827 - RNA, 19 nt, Artificial Sequence
  Description of Artificial Sequence: Synthetic oligonucleotide
  Sense strand starting at position 3263 of SEQ ID NO: 317040
uaugaaaguucccuugaag

SEQ ID NO: 459828 - RNA, 19 nt, Artificial Sequence
  Description of Artificial Sequence: Synthetic oligonucleotide
  Antisense Strand to SEQ ID NO: 459827
cuucaagggaacuuucaua

SEQ ID NO: 459829 - RNA, 19 nt, Artificial Sequence
  Description of Artificial Sequence: Synthetic oligonucleotide
  Sense strand starting at position 3427 of SEQ ID NO: 317040
aucgauagccuccaaauaa

SEQ ID NO: 459830 - RNA, 19 nt, Artificial Sequence
  Description of Artificial Sequence: Synthetic oligonucleotide
  Antisense Strand to SEQ ID NO: 459829
uuauuuggaggcuaucgau

SEQ ID NO: 459831 - RNA, 19 nt, Artificial Sequence
  Description of Artificial Sequence: Synthetic oligonucleotide
  Sense strand starting at position 3708 of SEQ ID NO: 317040
uuugaaguaucacauauga

SEQ ID NO: 459832 - RNA, 19 nt, Artificial Sequence
  Description of Artificial Sequence: Synthetic oligonucleotide
  Antisense Strand to SEQ ID NO: 459831
ucauaugugauacuucaaa

SEQ ID NO: 459833 - RNA, 19 nt, Artificial Sequence
  Description of Artificial Sequence: Synthetic oligonucleotide
  Sense strand starting at position 3731 of SEQ ID NO: 317040
gaagcagagugguuaauag

SEQ ID NO: 459834 - RNA, 19 nt, Artificial Sequence
  Description of Artificial Sequence: Synthetic oligonucleotide
  Antisense Strand to SEQ ID NO: 459833
cuauuaaccacucugcuuc

SEQ ID NO: 459835 - RNA, 19 nt, Artificial Sequence
  Description of Artificial Sequence: Synthetic oligonucleotide
  Sense strand starting at position 3743 of SEQ ID NO: 317040
uuaauaguuuggucucugu

SEQ ID NO: 459836 - RNA, 19 nt, Artificial Sequence
  Description of Artificial Sequence: Synthetic oligonucleotide
  Antisense Strand to SEQ ID NO: 459835
acagagaccaaacuauuaa

SEQ ID NO: 459837 - RNA, 19 nt, Artificial Sequence
  Description of Artificial Sequence: Synthetic oligonucleotide
  Sense strand starting at position 3750 of SEQ ID NO: 317040
uuuggucucugugccagau

SEQ ID NO: 459838 - RNA, 19 nt, Artificial Sequence
  Description of Artificial Sequence: Synthetic oligonucleotide
  Antisense Strand to SEQ ID NO: 459837
aucuggcacagagaccaaa

SEQ ID NO: 459839 - RNA, 19 nt, Artificial Sequence
  Description of Artificial Sequence: Synthetic oligonucleotide
  Sense strand starting at position 19 of SEQ ID NO: 317041
ugaacuuaccgauaguaca

SEQ ID NO: 459840 - RNA, 19 nt, Artificial Sequence
  Description of Artificial Sequence: Synthetic oligonucleotide
  Antisense Strand to SEQ ID NO: 459839
uguacuaucgguaaguuca

SEQ ID NO: 459841 - RNA, 19 nt, Artificial Sequence
  Description of Artificial Sequence: Synthetic oligonucleotide
  Sense strand starting at position 27 of SEQ ID NO: 317041
ccgauaguacauuagguuu

SEQ ID NO: 459842 - RNA, 19 nt, Artificial Sequence
  Description of Artificial Sequence: Synthetic oligonucleotide
  Antisense Strand to SEQ ID NO: 459841
aaaccuaauguacuaucgg

SEQ ID NO: 459843 - RNA, 19 nt, Artificial Sequence
  Description of Artificial Sequence: Synthetic oligonucleotide
  Sense strand starting at position 56 of SEQ ID NO: 317041
auaaauaguucugcagcaa

SEQ ID NO: 459844 - RNA, 19 nt, Artificial Sequence
  Description of Artificial Sequence: Synthetic oligonucleotide
  Antisense Strand to SEQ ID NO: 459843
uugcugcagaacuauuuau

SEQ ID NO: 459845 - RNA, 19 nt, Artificial Sequence
  Description of Artificial Sequence: Synthetic oligonucleotide
  Sense strand starting at position 76 of SEQ ID NO: 317041
gcccacugacugcagaaau

SEQ ID NO: 459846 - RNA, 19 nt, Artificial Sequence
  Description of Artificial Sequence: Synthetic oligonucleotide
  Antisense Strand to SEQ ID NO: 459845
auuucugcagucagugggc

SEQ ID NO: 459847 - RNA, 19 nt, Artificial Sequence
  Description of Artificial Sequence: Synthetic oligonucleotide
  Sense strand starting at position 99 of SEQ ID NO: 317041
auaccaguuucucuaggga

SEQ ID NO: 459848 - RNA, 19 nt, Artificial Sequence
  Description of Artificial Sequence: Synthetic oligonucleotide
  Antisense Strand to SEQ ID NO: 459847
ucccuagagaaacugguau

SEQ ID NO: 459849 - RNA, 19 nt, Artificial Sequence
  Description of Artificial Sequence: Synthetic oligonucleotide
  Sense strand starting at position 102 of SEQ ID NO: 317041
ccaguuucucuagggaguu

SEQ ID NO: 459850 - RNA, 19 nt, Artificial Sequence
  Description of Artificial Sequence: Synthetic oligonucleotide
  Antisense Strand to SEQ ID NO: 459849
aacucccuagagaaacugg

SEQ ID NO: 459851 - RNA, 19 nt, Artificial Sequence
  Description of Artificial Sequence: Synthetic oligonucleotide
  Sense strand starting at position 104 of SEQ ID NO: 317041
aguuucucuagggaguuua

SEQ ID NO: 459852 - RNA, 19 nt, Artificial Sequence
  Description of Artificial Sequence: Synthetic oligonucleotide
  Antisense Strand to SEQ ID NO: 459851
uaaacucccuagagaaacu

SEQ ID NO: 459853 - RNA, 19 nt, Artificial Sequence
  Description of Artificial Sequence: Synthetic oligonucleotide
  Sense strand starting at position 198 of SEQ ID NO: 317041
gaaaucacucguggacacu

SEQ ID NO: 459854 - RNA, 19 nt, Artificial Sequence
  Description of Artificial Sequence: Synthetic oligonucleotide
  Antisense Strand to SEQ ID NO: 459853
aguguccacgagugauuuc

SEQ ID NO: 459855 - RNA, 19 nt, Artificial Sequence
  Description of Artificial Sequence: Synthetic oligonucleotide
  Sense strand starting at position 207 of SEQ ID NO: 317041
cguggacacuuuccuuaaa

SEQ ID NO: 459856 - RNA, 19 nt, Artificial Sequence
  Description of Artificial Sequence: Synthetic oligonucleotide
  Antisense Strand to SEQ ID NO: 459855
uuuaaggaaaguguccacg

SEQ ID NO: 459857 - RNA, 19 nt, Artificial Sequence
  Description of Artificial Sequence: Synthetic oligonucleotide
  Sense strand starting at position 526 of SEQ ID NO: 317041
aaaugucuugggugauauu

SEQ ID NO: 459858 - RNA, 19 nt, Artificial Sequence
  Description of Artificial Sequence: Synthetic oligonucleotide
  Antisense Strand to SEQ ID NO: 459857
aauaucacccaagacauuu

SEQ ID NO: 459859 - RNA, 19 nt, Artificial Sequence
  Description of Artificial Sequence: Synthetic oligonucleotide
  Sense strand starting at position 527 of SEQ ID NO: 317041
aaugucuugggugauauua

SEQ ID NO: 459860 - RNA, 19 nt, Artificial Sequence
  Description of Artificial Sequence: Synthetic oligonucleotide
  Antisense Strand to SEQ ID NO: 459859
uaauaucacccaagacauu

SEQ ID NO: 459861 - RNA, 19 nt, Artificial Sequence
  Description of Artificial Sequence: Synthetic oligonucleotide
  Sense strand starting at position 573 of SEQ ID NO: 317041
uucagugguuaaguguaaa

SEQ ID NO: 459862 - RNA, 19 nt, Artificial Sequence
  Description of Artificial Sequence: Synthetic oligonucleotide
  Antisense Strand to SEQ ID NO: 459861
uuuacacuuaaccacugaa

SEQ ID NO: 459863 - RNA, 19 nt, Artificial Sequence
  Description of Artificial Sequence: Synthetic oligonucleotide
  Sense strand starting at position 636 of SEQ ID NO: 317041
uccguuuaacuugacuuau

SEQ ID NO: 459864 - RNA, 19 nt, Artificial Sequence
  Description of Artificial Sequence: Synthetic oligonucleotide
  Antisense Strand to SEQ ID NO: 459863
auaagucaaguuaaacgga

SEQ ID NO: 459865 - RNA, 19 nt, Artificial Sequence
  Description of Artificial Sequence: Synthetic oligonucleotide
  Sense strand starting at position 638 of SEQ ID NO: 317041
cguuuaacuugacuuauua

SEQ ID NO: 459866 - RNA, 19 nt, Artificial Sequence
  Description of Artificial Sequence: Synthetic oligonucleotide
  Antisense Strand to SEQ ID NO: 459865
uaauaagucaaguuaaacg

SEQ ID NO: 459867 - RNA, 19 nt, Artificial Sequence
  Description of Artificial Sequence: Synthetic oligonucleotide
  Sense strand starting at position 722 of SEQ ID NO: 317041
gugcuucuccuugucagua

SEQ ID NO: 459868 - RNA, 19 nt, Artificial Sequence
  Description of Artificial Sequence: Synthetic oligonucleotide
  Antisense Strand to SEQ ID NO: 459867
uacugacaaggagaagcac

SEQ ID NO: 459869 - RNA, 19 nt, Artificial Sequence
  Description of Artificial Sequence: Synthetic oligonucleotide
  Sense strand starting at position 727 of SEQ ID NO: 317041
ucuccuugucaguagcuau

SEQ ID NO: 459870 - RNA, 19 nt, Artificial Sequence
  Description of Artificial Sequence: Synthetic oligonucleotide
  Antisense Strand to SEQ ID NO: 459869
auagcuacugacaaggaga

SEQ ID NO: 459871 - RNA, 19 nt, Artificial Sequence
  Description of Artificial Sequence: Synthetic oligonucleotide
  Sense strand starting at position 831 of SEQ ID NO: 317041
gguccugauccagggaucu

SEQ ID NO: 459872 - RNA, 19 nt, Artificial Sequence
  Description of Artificial Sequence: Synthetic oligonucleotide
  Antisense Strand to SEQ ID NO: 459871
agaucccuggaucaggacc

SEQ ID NO: 459873 - RNA, 19 nt, Artificial Sequence
  Description of Artificial Sequence: Synthetic oligonucleotide
  Sense strand starting at position 833 of SEQ ID NO: 317041
uccugauccagggaucugu

SEQ ID NO: 459874 - RNA, 19 nt, Artificial Sequence
  Description of Artificial Sequence: Synthetic oligonucleotide
  Antisense Strand to SEQ ID NO: 459873
acagaucccuggaucagga

SEQ ID NO: 459875 - RNA, 19 nt, Artificial Sequence
  Description of Artificial Sequence: Synthetic oligonucleotide
  Sense strand starting at position 1050 of SEQ ID NO: 317041
augggaugcugccuccaau

SEQ ID NO: 459876 - RNA, 19 nt, Artificial Sequence
  Description of Artificial Sequence: Synthetic oligonucleotide
  Antisense Strand to SEQ ID NO: 459875
auuggaggcagcaucccau

SEQ ID NO: 459877 - RNA, 19 nt, Artificial Sequence
  Description of Artificial Sequence: Synthetic oligonucleotide
  Sense strand starting at position 1099 of SEQ ID NO: 317041
ccgggagacugcuccaagu

SEQ ID NO: 459878 - RNA, 19 nt, Artificial Sequence
  Description of Artificial Sequence: Synthetic oligonucleotide
  Antisense Strand to SEQ ID NO: 459877
acuuggagcagucucccgg

SEQ ID NO: 459879 - RNA, 19 nt, Artificial Sequence
  Description of Artificial Sequence: Synthetic oligonucleotide
  Sense strand starting at position 1101 of SEQ ID NO: 317041
gggagacugcuccaaguuu

SEQ ID NO: 459880 - RNA, 19 nt, Artificial Sequence
  Description of Artificial Sequence: Synthetic oligonucleotide
  Antisense Strand to SEQ ID NO: 459879
aaacuuggagcagucuccc

SEQ ID NO: 459881 - RNA, 19 nt, Artificial Sequence
  Description of Artificial Sequence: Synthetic oligonucleotide
  Sense strand starting at position 2976 of SEQ ID NO: 317041
ugggcuugccuggaaacuu

SEQ ID NO: 459882 - RNA, 19 nt, Artificial Sequence
  Description of Artificial Sequence: Synthetic oligonucleotide
  Antisense Strand to SEQ ID NO: 459881
aaguuuccaggcaagccca

SEQ ID NO: 459883 - RNA, 19 nt, Artificial Sequence
  Description of Artificial Sequence: Synthetic oligonucleotide
  Sense strand starting at position 2984 of SEQ ID NO: 317041
ccuggaaacuuggcaaacu

SEQ ID NO: 459884 - RNA, 19 nt, Artificial Sequence
  Description of Artificial Sequence: Synthetic oligonucleotide
  Antisense Strand to SEQ ID NO: 459883
aguuugccaaguuuccagg

SEQ ID NO: 459885 - RNA, 19 nt, Artificial Sequence
  Description of Artificial Sequence: Synthetic oligonucleotide
  Sense strand starting at position 2995 of SEQ ID NO: 317041
ggcaaacuuuggucggauc

SEQ ID NO: 459886 - RNA, 19 nt, Artificial Sequence
  Description of Artificial Sequence: Synthetic oligonucleotide
  Antisense Strand to SEQ ID NO: 459885
gauccgaccaaaguuugcc

SEQ ID NO: 459887 - RNA, 19 nt, Artificial Sequence
  Description of Artificial Sequence: Synthetic oligonucleotide
  Sense strand starting at position 3160 of SEQ ID NO: 317041
cgaggacuuuguguagauu

SEQ ID NO: 459888 - RNA, 19 nt, Artificial Sequence
  Description of Artificial Sequence: Synthetic oligonucleotide
  Antisense Strand to SEQ ID NO: 459887
aaucuacacaaaguccucg

SEQ ID NO: 459889 - RNA, 19 nt, Artificial Sequence
  Description of Artificial Sequence: Synthetic oligonucleotide
  Sense strand starting at position 3163 of SEQ ID NO: 317041
ggacuuuguguagauuggu

SEQ ID NO: 459890 - RNA, 19 nt, Artificial Sequence
  Description of Artificial Sequence: Synthetic oligonucleotide
  Antisense Strand to SEQ ID NO: 459889
accaaucuacacaaagucc

SEQ ID NO: 459891 - RNA, 19 nt, Artificial Sequence
  Description of Artificial Sequence: Synthetic oligonucleotide
  Sense strand starting at position 3168 of SEQ ID NO: 317041
uuguguagauugguaccua

SEQ ID NO: 459892 - RNA, 19 nt, Artificial Sequence
  Description of Artificial Sequence: Synthetic oligonucleotide
  Antisense Strand to SEQ ID NO: 459891
uagguaccaaucuacacaa

SEQ ID NO: 459893 - RNA, 19 nt, Artificial Sequence
  Description of Artificial Sequence: Synthetic oligonucleotide
  Sense strand starting at position 3172 of SEQ ID NO: 317041
guagauugguaccuaaguu

SEQ ID NO: 459894 - RNA, 19 nt, Artificial Sequence
  Description of Artificial Sequence: Synthetic oligonucleotide
  Antisense Strand to SEQ ID NO: 459893
aacuuagguaccaaucuac

SEQ ID NO: 459895 - RNA, 19 nt, Artificial Sequence
  Description of Artificial Sequence: Synthetic oligonucleotide
  Sense strand starting at position 3277 of SEQ ID NO: 317041
uuaaguucuguguaauguu

SEQ ID NO: 459896 - RNA, 19 nt, Artificial Sequence
  Description of Artificial Sequence: Synthetic oligonucleotide
  Antisense Strand to SEQ ID NO: 459895
aacauuacacagaacuuaa

SEQ ID NO: 459897 - RNA, 19 nt, Artificial Sequence
  Description of Artificial Sequence: Synthetic oligonucleotide
  Sense strand starting at position 3313 of SEQ ID NO: 317041
caguguauggcuuauuauu

SEQ ID NO: 459898 - RNA, 19 nt, Artificial Sequence
  Description of Artificial Sequence: Synthetic oligonucleotide
  Antisense Strand to SEQ ID NO: 459897
aauaauaagccauacacug

SEQ ID NO: 459899 - RNA, 19 nt, Artificial Sequence
  Description of Artificial Sequence: Synthetic oligonucleotide
  Sense strand starting at position 3428 of SEQ ID NO: 317041
uuucgagccgcuucaugua

SEQ ID NO: 459900 - RNA, 19 nt, Artificial Sequence
  Description of Artificial Sequence: Synthetic oligonucleotide
  Antisense Strand to SEQ ID NO: 459899
uacaugaagcggcucgaaa

SEQ ID NO: 459901 - RNA, 19 nt, Artificial Sequence
  Description of Artificial Sequence: Synthetic oligonucleotide
  Sense strand starting at position 3444 of SEQ ID NO: 317041
guagcuacacaguauugua

SEQ ID NO: 459902 - RNA, 19 nt, Artificial Sequence
  Description of Artificial Sequence: Synthetic oligonucleotide
  Antisense Strand to SEQ ID NO: 459901
uacaauacuguguagcuac

SEQ ID NO: 459903 - RNA, 19 nt, Artificial Sequence
  Description of Artificial Sequence: Synthetic oligonucleotide
  Sense strand starting at position 3475 of SEQ ID NO: 317041
gguaaccucaaguagugaa

SEQ ID NO: 459904 - RNA, 19 nt, Artificial Sequence
  Description of Artificial Sequence: Synthetic oligonucleotide
  Antisense Strand to SEQ ID NO: 459903
uucacuacuugagguuacc

SEQ ID NO: 459905 - RNA, 19 nt, Artificial Sequence
  Description of Artificial Sequence: Synthetic oligonucleotide
  Sense strand starting at position 3567 of SEQ ID NO: 317041
gacgucgugcugucccaua

SEQ ID NO: 459906 - RNA, 19 nt, Artificial Sequence
  Description of Artificial Sequence: Synthetic oligonucleotide
  Antisense Strand to SEQ ID NO: 459905
uaugggacagcacgacguc

SEQ ID NO: 459907 - RNA, 19 nt, Artificial Sequence
  Description of Artificial Sequence: Synthetic oligonucleotide
  Sense strand starting at position 3599 of SEQ ID NO: 317041
aaauguaaagggugugagu

SEQ ID NO: 459908 - RNA, 19 nt, Artificial Sequence
  Description of Artificial Sequence: Synthetic oligonucleotide
  Antisense Strand to SEQ ID NO: 459907
acucacacccuuuacauuu

SEQ ID NO: 459909 - RNA, 19 nt, Artificial Sequence
  Description of Artificial Sequence: Synthetic oligonucleotide
  Sense strand starting at position 3601 of SEQ ID NO: 317041
auguaaagggugugaguuu

SEQ ID NO: 459910 - RNA, 19 nt, Artificial Sequence
  Description of Artificial Sequence: Synthetic oligonucleotide
  Antisense Strand to SEQ ID NO: 459909
aaacucacacccuuuacau

SEQ ID NO: 459911 - RNA, 19 nt, Artificial Sequence
  Description of Artificial Sequence: Synthetic oligonucleotide
  Sense strand starting at position 3661 of SEQ ID NO: 317041
aagaguuggauucguguca

SEQ ID NO: 459912 - RNA, 19 nt, Artificial Sequence
  Description of Artificial Sequence: Synthetic oligonucleotide
  Antisense Strand to SEQ ID NO: 459911
ugacacgaauccaacucuu

SEQ ID NO: 459913 - RNA, 19 nt, Artificial Sequence
  Description of Artificial Sequence: Synthetic oligonucleotide
  Sense strand starting at position 3662 of SEQ ID NO: 317041
agaguuggauucgugucaa

SEQ ID NO: 459914 - RNA, 19 nt, Artificial Sequence
  Description of Artificial Sequence: Synthetic oligonucleotide
  Antisense Strand to SEQ ID NO: 459913
uugacacgaauccaacucu

SEQ ID NO: 459915 - RNA, 19 nt, Artificial Sequence
  Description of Artificial Sequence: Synthetic oligonucleotide
  Sense strand starting at position 3763 of SEQ ID NO: 317041
cuaggaauggcuggugaaa

SEQ ID NO: 459916 - RNA, 19 nt, Artificial Sequence
  Description of Artificial Sequence: Synthetic oligonucleotide
  Antisense Strand to SEQ ID NO: 459915
uuucaccagccauuccuag

SEQ ID NO: 459917 - RNA, 19 nt, Artificial Sequence
  Description of Artificial Sequence: Synthetic oligonucleotide
  Sense strand starting at position 3776 of SEQ ID NO: 317041
gugaaacuggcucauagua

SEQ ID NO: 459918 - RNA, 19 nt, Artificial Sequence
  Description of Artificial Sequence: Synthetic oligonucleotide
  Antisense Strand to SEQ ID NO: 459917
uacuaugagccaguuucac

SEQ ID NO: 459919 - RNA, 19 nt, Artificial Sequence
  Description of Artificial Sequence: Synthetic oligonucleotide
  Sense strand starting at position 749 of SEQ ID NO: 317042
gauggugauaguugaucau

SEQ ID NO: 459920 - RNA, 19 nt, Artificial Sequence
  Description of Artificial Sequence: Synthetic oligonucleotide
  Antisense Strand to SEQ ID NO: 459919
augaucaacuaucaccauc

SEQ ID NO: 459921 - RNA, 19 nt, Artificial Sequence
  Description of Artificial Sequence: Synthetic oligonucleotide
  Sense strand starting at position 753 of SEQ ID NO: 317042
gugauaguugaucauuguu

SEQ ID NO: 459922 - RNA, 19 nt, Artificial Sequence
  Description of Artificial Sequence: Synthetic oligonucleotide
  Antisense Strand to SEQ ID NO: 459921
aacaaugaucaacuaucac

SEQ ID NO: 459923 - RNA, 19 nt, Artificial Sequence
  Description of Artificial Sequence: Synthetic oligonucleotide
  Sense strand starting at position 916 of SEQ ID NO: 317042
gccuaaaugccuuagaaca

SEQ ID NO: 459924 - RNA, 19 nt, Artificial Sequence
  Description of Artificial Sequence: Synthetic oligonucleotide
  Antisense Strand to SEQ ID NO: 459923
uguucuaaggcauuuaggc

SEQ ID NO: 459925 - RNA, 19 nt, Artificial Sequence
  Description of Artificial Sequence: Synthetic oligonucleotide
  Sense strand starting at position 976 of SEQ ID NO: 317042
gacgacaagucucuaguaa

SEQ ID NO: 459926 - RNA, 19 nt, Artificial Sequence
  Description of Artificial Sequence: Synthetic oligonucleotide
  Antisense Strand to SEQ ID NO: 459925
uuacuagagacuugucguc

SEQ ID NO: 459927 - RNA, 19 nt, Artificial Sequence
  Description of Artificial Sequence: Synthetic oligonucleotide
  Sense strand starting at position 977 of SEQ ID NO: 317042
acgacaagucucuaguaau

SEQ ID NO: 459928 - RNA, 19 nt, Artificial Sequence
  Description of Artificial Sequence: Synthetic oligonucleotide
  Antisense Strand to SEQ ID NO: 459927
auuacuagagacuugucgu

SEQ ID NO: 459929 - RNA, 19 nt, Artificial Sequence
  Description of Artificial Sequence: Synthetic oligonucleotide
  Sense strand starting at position 987 of SEQ ID NO: 317042
ucuaguaauguggaaccau

SEQ ID NO: 459930 - RNA, 19 nt, Artificial Sequence
  Description of Artificial Sequence: Synthetic oligonucleotide
  Antisense Strand to SEQ ID NO: 459929
augguuccacauuacuaga

SEQ ID NO: 459931 - RNA, 19 nt, Artificial Sequence
  Description of Artificial Sequence: Synthetic oligonucleotide
  Sense strand starting at position 1025 of SEQ ID NO: 317042
uucuaucugagggauguuu

SEQ ID NO: 459932 - RNA, 19 nt, Artificial Sequence
  Description of Artificial Sequence: Synthetic oligonucleotide
  Antisense Strand to SEQ ID NO: 459931
aaacaucccucagauagaa

SEQ ID NO: 459933 - RNA, 19 nt, Artificial Sequence
  Description of Artificial Sequence: Synthetic oligonucleotide
  Sense strand starting at position 1150 of SEQ ID NO: 317042
aagagaagaucagagggau

SEQ ID NO: 459934 - RNA, 19 nt, Artificial Sequence
  Description of Artificial Sequence: Synthetic oligonucleotide
  Antisense Strand to SEQ ID NO: 459933
aucccucugaucuucucuu

SEQ ID NO: 459935 - RNA, 19 nt, Artificial Sequence
  Description of Artificial Sequence: Synthetic oligonucleotide
  Sense strand starting at position 1642 of SEQ ID NO: 317042
caggaaugguggguacaga

SEQ ID NO: 459936 - RNA, 19 nt, Artificial Sequence
  Description of Artificial Sequence: Synthetic oligonucleotide
  Antisense Strand to SEQ ID NO: 459935
ucuguacccaccauuccug

SEQ ID NO: 459937 - RNA, 19 nt, Artificial Sequence
  Description of Artificial Sequence: Synthetic oligonucleotide
  Sense strand starting at position 1805 of SEQ ID NO: 317042
uugcacauugaaugaauua

SEQ ID NO: 459938 - RNA, 19 nt, Artificial Sequence
  Description of Artificial Sequence: Synthetic oligonucleotide
  Antisense Strand to SEQ ID NO: 459937
uaauucauucaaugugcaa

SEQ ID NO: 459939 - RNA, 19 nt, Artificial Sequence
  Description of Artificial Sequence: Synthetic oligonucleotide
  Sense strand starting at position 2160 of SEQ ID NO: 317042
cauaacgaguucuugaauu

SEQ ID NO: 459940 - RNA, 19 nt, Artificial Sequence
  Description of Artificial Sequence: Synthetic oligonucleotide
  Antisense Strand to SEQ ID NO: 459939
aauucaagaacucguuaug

SEQ ID NO: 459941 - RNA, 19 nt, Artificial Sequence
  Description of Artificial Sequence: Synthetic oligonucleotide
  Sense strand starting at position 2162 of SEQ ID NO: 317042
uaacgaguucuugaauuag

SEQ ID NO: 459942 - RNA, 19 nt, Artificial Sequence
  Description of Artificial Sequence: Synthetic oligonucleotide
  Antisense Strand to SEQ ID NO: 459941
cuaauucaagaacucguua

SEQ ID NO: 459943 - RNA, 19 nt, Artificial Sequence
  Description of Artificial Sequence: Synthetic oligonucleotide
  Sense strand starting at position 2179 of SEQ ID NO: 317042
agguuuaauccuggacaga

SEQ ID NO: 459944 - RNA, 19 nt, Artificial Sequence
  Description of Artificial Sequence: Synthetic oligonucleotide
  Antisense Strand to SEQ ID NO: 459943
ucuguccaggauuaaaccu

SEQ ID NO: 459945 - RNA, 19 nt, Artificial Sequence
  Description of Artificial Sequence: Synthetic oligonucleotide
  Sense strand starting at position 2278 of SEQ ID NO: 317042
cccugauugaaaggaguuu

SEQ ID NO: 459946 - RNA, 19 nt, Artificial Sequence
  Description of Artificial Sequence: Synthetic oligonucleotide
  Antisense Strand to SEQ ID NO: 459945
aaacuccuuucaaucaggg

SEQ ID NO: 459947 - RNA, 19 nt, Artificial Sequence
  Description of Artificial Sequence: Synthetic oligonucleotide
  Sense strand starting at position 2362 of SEQ ID NO: 317042
agcacuauugauggaaucu

SEQ ID NO: 459948 - RNA, 19 nt, Artificial Sequence
  Description of Artificial Sequence: Synthetic oligonucleotide
  Antisense Strand to SEQ ID NO: 459947
agauuccaucaauagugcu

SEQ ID NO: 459949 - RNA, 19 nt, Artificial Sequence
  Description of Artificial Sequence: Synthetic oligonucleotide
  Sense strand starting at position 2372 of SEQ ID NO: 317042
auggaaucucaaugccaaa

SEQ ID NO: 459950 - RNA, 19 nt, Artificial Sequence
  Description of Artificial Sequence: Synthetic oligonucleotide
  Antisense Strand to SEQ ID NO: 459949
uuuggcauugagauuccau

SEQ ID NO: 459951 - RNA, 19 nt, Artificial Sequence
  Description of Artificial Sequence: Synthetic oligonucleotide
  Sense strand starting at position 2411 of SEQ ID NO: 317042
uuaugauuagcugaucuac

SEQ ID NO: 459952 - RNA, 19 nt, Artificial Sequence
  Description of Artificial Sequence: Synthetic oligonucleotide
  Antisense Strand to SEQ ID NO: 459951
guagaucagcuaaucauaa

SEQ ID NO: 459953 - RNA, 19 nt, Artificial Sequence
  Description of Artificial Sequence: Synthetic oligonucleotide
  Sense strand starting at position 2428 of SEQ ID NO: 317042
acccuagagucaguuuauc

SEQ ID NO: 459954 - RNA, 19 nt, Artificial Sequence
  Description of Artificial Sequence: Synthetic oligonucleotide
  Antisense Strand to SEQ ID NO: 459953
gauaaacugacucuagggu

SEQ ID NO: 459955 - RNA, 19 nt, Artificial Sequence
  Description of Artificial Sequence: Synthetic oligonucleotide
  Sense strand starting at position 2623 of SEQ ID NO: 317042
gcaggaacuuauguagaag

SEQ ID NO: 459956 - RNA, 19 nt, Artificial Sequence
  Description of Artificial Sequence: Synthetic oligonucleotide
  Antisense Strand to SEQ ID NO: 459955
cuucuacauaaguuccugc

SEQ ID NO: 459957 - RNA, 19 nt, Artificial Sequence
  Description of Artificial Sequence: Synthetic oligonucleotide
  Sense strand starting at position 2642 of SEQ ID NO: 317042
gcagguuuacuacagauag

SEQ ID NO: 459958 - RNA, 19 nt, Artificial Sequence
  Description of Artificial Sequence: Synthetic oligonucleotide
  Antisense Strand to SEQ ID NO: 459957
cuaucuguaguaaaccugc

SEQ ID NO: 459959 - RNA, 19 nt, Artificial Sequence
  Description of Artificial Sequence: Synthetic oligonucleotide
  Sense strand starting at position 2657 of SEQ ID NO: 317042
auagcauaccuacauguua

SEQ ID NO: 459960 - RNA, 19 nt, Artificial Sequence
  Description of Artificial Sequence: Synthetic oligonucleotide
  Antisense Strand to SEQ ID NO: 459959
uaacauguagguaugcuau

SEQ ID NO: 459961 - RNA, 19 nt, Artificial Sequence
  Description of Artificial Sequence: Synthetic oligonucleotide
  Sense strand starting at position 2684 of SEQ ID NO: 317042
auaccauauguuggcuaaa

SEQ ID NO: 459962 - RNA, 19 nt, Artificial Sequence
  Description of Artificial Sequence: Synthetic oligonucleotide
  Antisense Strand to SEQ ID NO: 459961
uuuagccaacauaugguau

SEQ ID NO: 459963 - RNA, 19 nt, Artificial Sequence
  Description of Artificial Sequence: Synthetic oligonucleotide
  Sense strand starting at position 2686 of SEQ ID NO: 317042
accauauguuggcuaaaua

SEQ ID NO: 459964 - RNA, 19 nt, Artificial Sequence
  Description of Artificial Sequence: Synthetic oligonucleotide
  Antisense Strand to SEQ ID NO: 459963
uauuuagccaacauauggu

SEQ ID NO: 459965 - RNA, 19 nt, Artificial Sequence
  Description of Artificial Sequence: Synthetic oligonucleotide
  Sense strand starting at position 2687 of SEQ ID NO: 317042
ccauauguuggcuaaauac

SEQ ID NO: 459966 - RNA, 19 nt, Artificial Sequence
  Description of Artificial Sequence: Synthetic oligonucleotide
  Antisense Strand to SEQ ID NO: 459965
guauuuagccaacauaugg

SEQ ID NO: 459967 - RNA, 19 nt, Artificial Sequence
  Description of Artificial Sequence: Synthetic oligonucleotide
  Sense strand starting at position 2862 of SEQ ID NO: 317042
cacagcuaucgagagguga

SEQ ID NO: 459968 - RNA, 19 nt, Artificial Sequence
  Description of Artificial Sequence: Synthetic oligonucleotide
  Antisense Strand to SEQ ID NO: 459967
ucaccucucgauagcugug

SEQ ID NO: 459969 - RNA, 19 nt, Artificial Sequence
  Description of Artificial Sequence: Synthetic oligonucleotide
  Sense strand starting at position 2866 of SEQ ID NO: 317042
gcuaucgagaggugacuaa

SEQ ID NO: 459970 - RNA, 19 nt, Artificial Sequence
  Description of Artificial Sequence: Synthetic oligonucleotide
  Antisense Strand to SEQ ID NO: 459969
uuagucaccucucgauagc

SEQ ID NO: 459971 - RNA, 19 nt, Artificial Sequence
  Description of Artificial Sequence: Synthetic oligonucleotide
  Sense strand starting at position 3160 of SEQ ID NO: 317042
acgacaagccuccaugaau

SEQ ID NO: 459972 - RNA, 19 nt, Artificial Sequence
  Description of Artificial Sequence: Synthetic oligonucleotide
  Antisense Strand to SEQ ID NO: 459971
auucauggaggcuugucgu

SEQ ID NO: 459973 - RNA, 19 nt, Artificial Sequence
  Description of Artificial Sequence: Synthetic oligonucleotide
  Sense strand starting at position 3213 of SEQ ID NO: 317042
ugagguuugucugcgauuu

SEQ ID NO: 459974 - RNA, 19 nt, Artificial Sequence
  Description of Artificial Sequence: Synthetic oligonucleotide
  Antisense Strand to SEQ ID NO: 459973
aaaucgcagacaaaccuca

SEQ ID NO: 459975 - RNA, 19 nt, Artificial Sequence
  Description of Artificial Sequence: Synthetic oligonucleotide
  Sense strand starting at position 3214 of SEQ ID NO: 317042
gagguuugucugcgauuug

SEQ ID NO: 459976 - RNA, 19 nt, Artificial Sequence
  Description of Artificial Sequence: Synthetic oligonucleotide
  Antisense Strand to SEQ ID NO: 459975
caaaucgcagacaaaccuc

SEQ ID NO: 459977 - RNA, 19 nt, Artificial Sequence
  Description of Artificial Sequence: Synthetic oligonucleotide
  Sense strand starting at position 3373 of SEQ ID NO: 317042
ccuuguucugaauaaugca

SEQ ID NO: 459978 - RNA, 19 nt, Artificial Sequence
  Description of Artificial Sequence: Synthetic oligonucleotide
  Antisense Strand to SEQ ID NO: 459977
ugcauuauucagaacaagg

SEQ ID NO: 459979 - RNA, 19 nt, Artificial Sequence
  Description of Artificial Sequence: Synthetic oligonucleotide
  Sense strand starting at position 3381 of SEQ ID NO: 317042
ugaauaaugcaauaauguc

SEQ ID NO: 459980 - RNA, 19 nt, Artificial Sequence
  Description of Artificial Sequence: Synthetic oligonucleotide
  Antisense Strand to SEQ ID NO: 459979
gacauuauugcauuauuca

SEQ ID NO: 459981 - RNA, 19 nt, Artificial Sequence
  Description of Artificial Sequence: Synthetic oligonucleotide
  Sense strand starting at position 3426 of SEQ ID NO: 317042
ucuagaaaguaauucuguu

SEQ ID NO: 459982 - RNA, 19 nt, Artificial Sequence
  Description of Artificial Sequence: Synthetic oligonucleotide
  Antisense Strand to SEQ ID NO: 459981
aacagaauuacuuucuaga

SEQ ID NO: 459983 - RNA, 19 nt, Artificial Sequence
  Description of Artificial Sequence: Synthetic oligonucleotide
  Sense strand starting at position 3445 of SEQ ID NO: 317042
gccagugaucuugaaugua

SEQ ID NO: 459984 - RNA, 19 nt, Artificial Sequence
  Description of Artificial Sequence: Synthetic oligonucleotide
  Antisense Strand to SEQ ID NO: 459983
uacauucaagaucacuggc

SEQ ID NO: 459985 - RNA, 19 nt, Artificial Sequence
  Description of Artificial Sequence: Synthetic oligonucleotide
  Sense strand starting at position 3448 of SEQ ID NO: 317042
agugaucuugaauguacuu

SEQ ID NO: 459986 - RNA, 19 nt, Artificial Sequence
  Description of Artificial Sequence: Synthetic oligonucleotide
  Antisense Strand to SEQ ID NO: 459985
aaguacauucaagaucacu

SEQ ID NO: 459987 - RNA, 19 nt, Artificial Sequence
  Description of Artificial Sequence: Synthetic oligonucleotide
  Sense strand starting at position 3453 of SEQ ID NO: 317042
ucuugaauguacuugggua

SEQ ID NO: 459988 - RNA, 19 nt, Artificial Sequence
  Description of Artificial Sequence: Synthetic oligonucleotide
  Antisense Strand to SEQ ID NO: 459987
uacccaaguacauucaaga

SEQ ID NO: 459989 - RNA, 19 nt, Artificial Sequence
  Description of Artificial Sequence: Synthetic oligonucleotide
  Sense strand starting at position 3457 of SEQ ID NO: 317042
gaauguacuuggguaccaa

SEQ ID NO: 459990 - RNA, 19 nt, Artificial Sequence
  Description of Artificial Sequence: Synthetic oligonucleotide
  Antisense Strand to SEQ ID NO: 459989
uugguacccaaguacauuc

SEQ ID NO: 459991 - RNA, 19 nt, Artificial Sequence
  Description of Artificial Sequence: Synthetic oligonucleotide
  Sense strand starting at position 3511 of SEQ ID NO: 317042
cuacuaauuugcccgaggu

SEQ ID NO: 459992 - RNA, 19 nt, Artificial Sequence
  Description of Artificial Sequence: Synthetic oligonucleotide
  Antisense Strand to SEQ ID NO: 459991
accucgggcaaauuaguag

SEQ ID NO: 459993 - RNA, 19 nt, Artificial Sequence
  Description of Artificial Sequence: Synthetic oligonucleotide
  Sense strand starting at position 3512 of SEQ ID NO: 317042
uacuaauuugcccgaggua

SEQ ID NO: 459994 - RNA, 19 nt, Artificial Sequence
  Description of Artificial Sequence: Synthetic oligonucleotide
  Antisense Strand to SEQ ID NO: 459993
uaccucgggcaaauuagua

SEQ ID NO: 459995 - RNA, 19 nt, Artificial Sequence
  Description of Artificial Sequence: Synthetic oligonucleotide
  Sense strand starting at position 3515 of SEQ ID NO: 317042
uaauuugcccgagguacga

SEQ ID NO: 459996 - RNA, 19 nt, Artificial Sequence
  Description of Artificial Sequence: Synthetic oligonucleotide
  Antisense Strand to SEQ ID NO: 459995
ucguaccucgggcaaauua

SEQ ID NO: 459997 - RNA, 19 nt, Artificial Sequence
  Description of Artificial Sequence: Synthetic oligonucleotide
  Sense strand starting at position 3614 of SEQ ID NO: 317042
gcucauuuagagugaugca

SEQ ID NO: 459998 - RNA, 19 nt, Artificial Sequence
  Description of Artificial Sequence: Synthetic oligonucleotide
  Antisense Strand to SEQ ID NO: 459997
ugcaucacucuaaaugagc

SEQ ID NO: 459999 - RNA, 19 nt, Artificial Sequence
  Description of Artificial Sequence: Synthetic oligonucleotide
  Sense strand starting at position 10 of SEQ ID NO: 317043
uuaugauuagcugaucuac

SEQ ID NO: 460000 - RNA, 19 nt, Artificial Sequence
  Description of Artificial Sequence: Synthetic oligonucleotide
  Antisense Strand to SEQ ID NO: 459999
guagaucagcuaaucauaa

SEQ ID NO: 460001 - RNA, 19 nt, Artificial Sequence
  Description of Artificial Sequence: Synthetic oligonucleotide
  Sense strand starting at position 27 of SEQ ID NO: 317043
acccuagagucaguuuauc

SEQ ID NO: 460002 - RNA, 19 nt, Artificial Sequence
  Description of Artificial Sequence: Synthetic oligonucleotide
  Antisense Strand to SEQ ID NO: 460001
gauaaacugacucuagggu

SEQ ID NO: 460003 - RNA, 19 nt, Artificial Sequence
  Description of Artificial Sequence: Synthetic oligonucleotide
  Sense strand starting at position 222 of SEQ ID NO: 317043
gcaggaacuuauguagaag

SEQ ID NO: 460004 - RNA, 19 nt, Artificial Sequence
  Description of Artificial Sequence: Synthetic oligonucleotide
  Antisense Strand to SEQ ID NO: 460003
cuucuacauaaguuccugc

SEQ ID NO: 460005 - RNA, 19 nt, Artificial Sequence
  Description of Artificial Sequence: Synthetic oligonucleotide
  Sense strand starting at position 241 of SEQ ID NO: 317043
gcagguuuacuacagauag

SEQ ID NO: 460006 - RNA, 19 nt, Artificial Sequence
  Description of Artificial Sequence: Synthetic oligonucleotide
  Antisense Strand to SEQ ID NO: 460005
cuaucuguaguaaaccugc

SEQ ID NO: 460007 - RNA, 19 nt, Artificial Sequence
  Description of Artificial Sequence: Synthetic oligonucleotide
  Sense strand starting at position 256 of SEQ ID NO: 317043
auagcauaccuacauguua

SEQ ID NO: 460008 - RNA, 19 nt, Artificial Sequence
  Description of Artificial Sequence: Synthetic oligonucleotide
  Antisense Strand to SEQ ID NO: 460007
uaacauguagguaugcuau

SEQ ID NO: 460009 - RNA, 19 nt, Artificial Sequence
  Description of Artificial Sequence: Synthetic oligonucleotide
  Sense strand starting at position 283 of SEQ ID NO: 317043
auaccauauguuggcuaaa

SEQ ID NO: 460010 - RNA, 19 nt, Artificial Sequence
  Description of Artificial Sequence: Synthetic oligonucleotide
  Antisense Strand to SEQ ID NO: 460009
uuuagccaacauaugguau

SEQ ID NO: 460011 - RNA, 19 nt, Artificial Sequence
  Description of Artificial Sequence: Synthetic oligonucleotide
  Sense strand starting at position 285 of SEQ ID NO: 317043
accauauguuggcuaaaua

SEQ ID NO: 460012 - RNA, 19 nt, Artificial Sequence
  Description of Artificial Sequence: Synthetic oligonucleotide
  Antisense Strand to SEQ ID NO: 460011
uauuuagccaacauauggu

SEQ ID NO: 460013 - RNA, 19 nt, Artificial Sequence
  Description of Artificial Sequence: Synthetic oligonucleotide
  Sense strand starting at position 286 of SEQ ID NO: 317043
ccauauguuggcuaaauac

SEQ ID NO: 460014 - RNA, 19 nt, Artificial Sequence
  Description of Artificial Sequence: Synthetic oligonucleotide
  Antisense Strand to SEQ ID NO: 460013
guauuuagccaacauaugg

SEQ ID NO: 460015 - RNA, 19 nt, Artificial Sequence
  Description of Artificial Sequence: Synthetic oligonucleotide
  Sense strand starting at position 461 of SEQ ID NO: 317043
cacagcuaucgagagguga

SEQ ID NO: 460016 - RNA, 19 nt, Artificial Sequence
  Description of Artificial Sequence: Synthetic oligonucleotide
  Antisense Strand to SEQ ID NO: 460015
ucaccucucgauagcugug

SEQ ID NO: 460017 - RNA, 19 nt, Artificial Sequence
  Description of Artificial Sequence: Synthetic oligonucleotide
  Sense strand starting at position 465 of SEQ ID NO: 317043
gcuaucgagaggugacuaa

SEQ ID NO: 460018 - RNA, 19 nt, Artificial Sequence
  Description of Artificial Sequence: Synthetic oligonucleotide
  Antisense Strand to SEQ ID NO: 460017
uuagucaccucucgauagc

SEQ ID NO: 460019 - RNA, 19 nt, Artificial Sequence
  Description of Artificial Sequence: Synthetic oligonucleotide
  Sense strand starting at position 759 of SEQ ID NO: 317043
acgacaagccuccaugaau

SEQ ID NO: 460020 - RNA, 19 nt, Artificial Sequence
  Description of Artificial Sequence: Synthetic oligonucleotide
  Antisense Strand to SEQ ID NO: 460019
auucauggaggcuugucgu

SEQ ID NO: 460021 - RNA, 19 nt, Artificial Sequence
  Description of Artificial Sequence: Synthetic oligonucleotide
  Sense strand starting at position 812 of SEQ ID NO: 317043
ugagguuugucugcgauuu

SEQ ID NO: 460022 - RNA, 19 nt, Artificial Sequence
  Description of Artificial Sequence: Synthetic oligonucleotide
  Antisense Strand to SEQ ID NO: 460021
aaaucgcagacaaaccuca

SEQ ID NO: 460023 - RNA, 19 nt, Artificial Sequence
  Description of Artificial Sequence: Synthetic oligonucleotide
  Sense strand starting at position 813 of SEQ ID NO: 317043
gagguuugucugcgauuug

SEQ ID NO: 460024 - RNA, 19 nt, Artificial Sequence
  Description of Artificial Sequence: Synthetic oligonucleotide
  Antisense Strand to SEQ ID NO: 460023
caaaucgcagacaaaccuc

SEQ ID NO: 460025 - RNA, 19 nt, Artificial Sequence
  Description of Artificial Sequence: Synthetic oligonucleotide
  Sense strand starting at position 972 of SEQ ID NO: 317043
ccuuguucugaauaaugca

SEQ ID NO: 460026 - RNA, 19 nt, Artificial Sequence
  Description of Artificial Sequence: Synthetic oligonucleotide
  Antisense Strand to SEQ ID NO: 460025
ugcauuauucagaacaagg

SEQ ID NO: 460027 - RNA, 19 nt, Artificial Sequence
  Description of Artificial Sequence: Synthetic oligonucleotide
  Sense strand starting at position 980 of SEQ ID NO: 317043
ugaauaaugcaauaauguc

SEQ ID NO: 460028 - RNA, 19 nt, Artificial Sequence
  Description of Artificial Sequence: Synthetic oligonucleotide
  Antisense Strand to SEQ ID NO: 460027
gacauuauugcauuauuca

SEQ ID NO: 460029 - RNA, 19 nt, Artificial Sequence
  Description of Artificial Sequence: Synthetic oligonucleotide
  Sense strand starting at position 1025 of SEQ ID NO: 317043
ucuagaaaguaauucuguu

SEQ ID NO: 460030 - RNA, 19 nt, Artificial Sequence
  Description of Artificial Sequence: Synthetic oligonucleotide
  Antisense Strand to SEQ ID NO: 460029
aacagaauuacuuucuaga

SEQ ID NO: 460031 - RNA, 19 nt, Artificial Sequence
  Description of Artificial Sequence: Synthetic oligonucleotide
  Sense strand starting at position 1044 of SEQ ID NO: 317043
gccagugaucuugaaugua

SEQ ID NO: 460032 - RNA, 19 nt, Artificial Sequence
  Description of Artificial Sequence: Synthetic oligonucleotide
  Antisense Strand to SEQ ID NO: 460031
uacauucaagaucacuggc

SEQ ID NO: 460033 - RNA, 19 nt, Artificial Sequence
  Description of Artificial Sequence: Synthetic oligonucleotide
  Sense strand starting at position 1047 of SEQ ID NO: 317043
agugaucuugaauguacuu

SEQ ID NO: 460034 - RNA, 19 nt, Artificial Sequence
  Description of Artificial Sequence: Synthetic oligonucleotide
  Antisense Strand to SEQ ID NO: 460033
aaguacauucaagaucacu

SEQ ID NO: 460035 - RNA, 19 nt, Artificial Sequence
  Description of Artificial Sequence: Synthetic oligonucleotide
  Sense strand starting at position 1052 of SEQ ID NO: 317043
ucuugaauguacuugggua

SEQ ID NO: 460036 - RNA, 19 nt, Artificial Sequence
  Description of Artificial Sequence: Synthetic oligonucleotide
  Antisense Strand to SEQ ID NO: 460035
uacccaaguacauucaaga

SEQ ID NO: 460037 - RNA, 19 nt, Artificial Sequence
  Description of Artificial Sequence: Synthetic oligonucleotide
  Sense strand starting at position 1056 of SEQ ID NO: 317043
gaauguacuuggguaccaa

SEQ ID NO: 460038 - RNA, 19 nt, Artificial Sequence
  Description of Artificial Sequence: Synthetic oligonucleotide
  Antisense Strand to SEQ ID NO: 460037
uugguacccaaguacauuc

SEQ ID NO: 460039 - RNA, 19 nt, Artificial Sequence
  Description of Artificial Sequence: Synthetic oligonucleotide
  Sense strand starting at position 1110 of SEQ ID NO: 317043
cuacuaauuugcccgaggu

SEQ ID NO: 460040 - RNA, 19 nt, Artificial Sequence
  Description of Artificial Sequence: Synthetic oligonucleotide
  Antisense Strand to SEQ ID NO: 460039
accucgggcaaauuaguag

SEQ ID NO: 460041 - RNA, 19 nt, Artificial Sequence
  Description of Artificial Sequence: Synthetic oligonucleotide
  Sense strand starting at position 1111 of SEQ ID NO: 317043
uacuaauuugcccgaggua

SEQ ID NO: 460042 - RNA, 19 nt, Artificial Sequence
  Description of Artificial Sequence: Synthetic oligonucleotide
  Antisense Strand to SEQ ID NO: 460041
uaccucgggcaaauuagua

SEQ ID NO: 460043 - RNA, 19 nt, Artificial Sequence
  Description of Artificial Sequence: Synthetic oligonucleotide
  Sense strand starting at position 1114 of SEQ ID NO: 317043
uaauuugcccgagguacga

SEQ ID NO: 460044 - RNA, 19 nt, Artificial Sequence
  Description of Artificial Sequence: Synthetic oligonucleotide
  Antisense Strand to SEQ ID NO: 460043
ucguaccucgggcaaauua

SEQ ID NO: 460045 - RNA, 19 nt, Artificial Sequence
  Description of Artificial Sequence: Synthetic oligonucleotide
  Sense strand starting at position 1213 of SEQ ID NO: 317043
gcucauuuagagugaugca

SEQ ID NO: 460046 - RNA, 19 nt, Artificial Sequence
  Description of Artificial Sequence: Synthetic oligonucleotide
  Antisense Strand to SEQ ID NO: 460045
ugcaucacucuaaaugagc

SEQ ID NO: 460047 - RNA, 19 nt, Artificial Sequence
  Description of Artificial Sequence: Synthetic oligonucleotide
  Sense strand starting at position 2332 of SEQ ID NO: 317043
ggcguaauaaugcucggua

SEQ ID NO: 460048 - RNA, 19 nt, Artificial Sequence
  Description of Artificial Sequence: Synthetic oligonucleotide
  Antisense Strand to SEQ ID NO: 460047
uaccgagcauuauuacgcc

SEQ ID NO: 460049 - RNA, 19 nt, Artificial Sequence
  Description of Artificial Sequence: Synthetic oligonucleotide
  Sense strand starting at position 2536 of SEQ ID NO: 317043
cuagccauuccuuggacaa

SEQ ID NO: 460050 - RNA, 19 nt, Artificial Sequence
  Description of Artificial Sequence: Synthetic oligonucleotide
  Antisense Strand to SEQ ID NO: 460049
uuguccaaggaauggcuag

SEQ ID NO: 460051 - RNA, 19 nt, Artificial Sequence
  Description of Artificial Sequence: Synthetic oligonucleotide
  Sense strand starting at position 2660 of SEQ ID NO: 317043
guaagugaugcuuaccaug

SEQ ID NO: 460052 - RNA, 19 nt, Artificial Sequence
  Description of Artificial Sequence: Synthetic oligonucleotide
  Antisense Strand to SEQ ID NO: 460051
caugguaagcaucacuuac

SEQ ID NO: 460053 - RNA, 19 nt, Artificial Sequence
  Description of Artificial Sequence: Synthetic oligonucleotide
  Sense strand starting at position 2662 of SEQ ID NO: 317043
aagugaugcuuaccaugaa

SEQ ID NO: 460054 - RNA, 19 nt, Artificial Sequence
  Description of Artificial Sequence: Synthetic oligonucleotide
  Antisense Strand to SEQ ID NO: 460053
uucaugguaagcaucacuu

SEQ ID NO: 460055 - RNA, 19 nt, Artificial Sequence
  Description of Artificial Sequence: Synthetic oligonucleotide
  Sense strand starting at position 2665 of SEQ ID NO: 317043
ugaugcuuaccaugaagaa

SEQ ID NO: 460056 - RNA, 19 nt, Artificial Sequence
  Description of Artificial Sequence: Synthetic oligonucleotide
  Antisense Strand to SEQ ID NO: 460055
uucuucaugguaagcauca

SEQ ID NO: 460057 - RNA, 19 nt, Artificial Sequence
  Description of Artificial Sequence: Synthetic oligonucleotide
  Sense strand starting at position 2716 of SEQ ID NO: 317043
uuuagaaagaguggucaga

SEQ ID NO: 460058 - RNA, 19 nt, Artificial Sequence
  Description of Artificial Sequence: Synthetic oligonucleotide
  Antisense Strand to SEQ ID NO: 460057
ucugaccacucuuucuaaa

SEQ ID NO: 460059 - RNA, 19 nt, Artificial Sequence
  Description of Artificial Sequence: Synthetic oligonucleotide
  Sense strand starting at position 2794 of SEQ ID NO: 317043
aaagaaugccuagggcaga

SEQ ID NO: 460060 - RNA, 19 nt, Artificial Sequence
  Description of Artificial Sequence: Synthetic oligonucleotide
  Antisense Strand to SEQ ID NO: 460059
ucugcccuaggcauucuuu

SEQ ID NO: 460061 - RNA, 19 nt, Artificial Sequence
  Description of Artificial Sequence: Synthetic oligonucleotide
  Sense strand starting at position 2827 of SEQ ID NO: 317043
ggagacugcuaagcaagau

SEQ ID NO: 460062 - RNA, 19 nt, Artificial Sequence
  Description of Artificial Sequence: Synthetic oligonucleotide
  Antisense Strand to SEQ ID NO: 460061
aucuugcuuagcagucucc

SEQ ID NO: 460063 - RNA, 19 nt, Artificial Sequence
  Description of Artificial Sequence: Synthetic oligonucleotide
  Sense strand starting at position 2931 of SEQ ID NO: 317043
gaacuuguuagagaugcga

SEQ ID NO: 460064 - RNA, 19 nt, Artificial Sequence
  Description of Artificial Sequence: Synthetic oligonucleotide
  Antisense Strand to SEQ ID NO: 460063
ucgcaucucuaacaaguuc

SEQ ID NO: 460065 - RNA, 19 nt, Artificial Sequence
  Description of Artificial Sequence: Synthetic oligonucleotide
  Sense strand starting at position 3156 of SEQ ID NO: 317043
ugauaaaggacuuggcuuu

SEQ ID NO: 460066 - RNA, 19 nt, Artificial Sequence
  Description of Artificial Sequence: Synthetic oligonucleotide
  Antisense Strand to SEQ ID NO: 460065
aaagccaaguccuuuauca

SEQ ID NO: 460067 - RNA, 19 nt, Artificial Sequence
  Description of Artificial Sequence: Synthetic oligonucleotide
  Sense strand starting at position 3190 of SEQ ID NO: 317043
caauuagaaaguggugagu

SEQ ID NO: 460068 - RNA, 19 nt, Artificial Sequence
  Description of Artificial Sequence: Synthetic oligonucleotide
  Antisense Strand to SEQ ID NO: 460067
acucaccacuuucuaauug

SEQ ID NO: 460069 - RNA, 19 nt, Artificial Sequence
  Description of Artificial Sequence: Synthetic oligonucleotide
  Sense strand starting at position 3210 of SEQ ID NO: 317043
gcuugaucugaucauuaaa

SEQ ID NO: 460070 - RNA, 19 nt, Artificial Sequence
  Description of Artificial Sequence: Synthetic oligonucleotide
  Antisense Strand to SEQ ID NO: 460069
uuuaaugaucagaucaagc

SEQ ID NO: 460071 - RNA, 19 nt, Artificial Sequence
  Description of Artificial Sequence: Synthetic oligonucleotide
  Sense strand starting at position 3657 of SEQ ID NO: 317043
guggucaucauuuaugugu

SEQ ID NO: 460072 - RNA, 19 nt, Artificial Sequence
  Description of Artificial Sequence: Synthetic oligonucleotide
  Antisense Strand to SEQ ID NO: 460071
acacauaaaugaugaccac

SEQ ID NO: 460073 - RNA, 19 nt, Artificial Sequence
  Description of Artificial Sequence: Synthetic oligonucleotide
  Sense strand starting at position 3660 of SEQ ID NO: 317043
gucaucauuuauguguguu

SEQ ID NO: 460074 - RNA, 19 nt, Artificial Sequence
  Description of Artificial Sequence: Synthetic oligonucleotide
  Antisense Strand to SEQ ID NO: 460073
aacacacauaaaugaugac

SEQ ID NO: 460075 - RNA, 19 nt, Artificial Sequence
  Description of Artificial Sequence: Synthetic oligonucleotide
  Sense strand starting at position 3662 of SEQ ID NO: 317043
caucauuuauguguguuua

SEQ ID NO: 460076 - RNA, 19 nt, Artificial Sequence
  Description of Artificial Sequence: Synthetic oligonucleotide
  Antisense Strand to SEQ ID NO: 460075
uaaacacacauaaaugaug

SEQ ID NO: 460077 - RNA, 19 nt, Artificial Sequence
  Description of Artificial Sequence: Synthetic oligonucleotide
  Sense strand starting at position 3664 of SEQ ID NO: 317043
ucauuuauguguguuuaug

SEQ ID NO: 460078 - RNA, 19 nt, Artificial Sequence
  Description of Artificial Sequence: Synthetic oligonucleotide
  Antisense Strand to SEQ ID NO: 460077
cauaaacacacauaaauga

SEQ ID NO: 460079 - RNA, 19 nt, Artificial Sequence
  Description of Artificial Sequence: Synthetic oligonucleotide
  Sense strand starting at position 181 of SEQ ID NO: 317044
agaacugguuuguuucuaa

SEQ ID NO: 460080 - RNA, 19 nt, Artificial Sequence
  Description of Artificial Sequence: Synthetic oligonucleotide
  Antisense Strand to SEQ ID NO: 460079
uuagaaacaaaccaguucu

SEQ ID NO: 460081 - RNA, 19 nt, Artificial Sequence
  Description of Artificial Sequence: Synthetic oligonucleotide
  Sense strand starting at position 184 of SEQ ID NO: 317044
acugguuuguuucuaaucu

SEQ ID NO: 460082 - RNA, 19 nt, Artificial Sequence
  Description of Artificial Sequence: Synthetic oligonucleotide
  Antisense Strand to SEQ ID NO: 460081
agauuagaaacaaaccagu

SEQ ID NO: 460083 - RNA, 19 nt, Artificial Sequence
  Description of Artificial Sequence: Synthetic oligonucleotide
  Sense strand starting at position 188 of SEQ ID NO: 317044
guuuguuucuaaucuugga

SEQ ID NO: 460084 - RNA, 19 nt, Artificial Sequence
  Description of Artificial Sequence: Synthetic oligonucleotide
  Antisense Strand to SEQ ID NO: 460083
uccaagauuagaaacaaac

SEQ ID NO: 460085 - RNA, 19 nt, Artificial Sequence
  Description of Artificial Sequence: Synthetic oligonucleotide
  Sense strand starting at position 192 of SEQ ID NO: 317044
guuucuaaucuuggaauua

SEQ ID NO: 460086 - RNA, 19 nt, Artificial Sequence
  Description of Artificial Sequence: Synthetic oligonucleotide
  Antisense Strand to SEQ ID NO: 460085
uaauuccaagauuagaaac

SEQ ID NO: 460087 - RNA, 19 nt, Artificial Sequence
  Description of Artificial Sequence: Synthetic oligonucleotide
  Sense strand starting at position 333 of SEQ ID NO: 317044
uggaaucacaagcguuagu

SEQ ID NO: 460088 - RNA, 19 nt, Artificial Sequence
  Description of Artificial Sequence: Synthetic oligonucleotide
  Antisense Strand to SEQ ID NO: 460087
acuaacgcuugugauucca

SEQ ID NO: 460089 - RNA, 19 nt, Artificial Sequence
  Description of Artificial Sequence: Synthetic oligonucleotide
  Sense strand starting at position 438 of SEQ ID NO: 317044
gugacucaucucuaguaca

SEQ ID NO: 460090 - RNA, 19 nt, Artificial Sequence
  Description of Artificial Sequence: Synthetic oligonucleotide
  Antisense Strand to SEQ ID NO: 460089
uguacuagagaugagucac

SEQ ID NO: 460091 - RNA, 19 nt, Artificial Sequence
  Description of Artificial Sequence: Synthetic oligonucleotide
  Sense strand starting at position 561 of SEQ ID NO: 317044
acuacauggucgcuagauu

SEQ ID NO: 460092 - RNA, 19 nt, Artificial Sequence
  Description of Artificial Sequence: Synthetic oligonucleotide
  Antisense Strand to SEQ ID NO: 460091
aaucuagcgaccauguagu

SEQ ID NO: 460093 - RNA, 19 nt, Artificial Sequence
  Description of Artificial Sequence: Synthetic oligonucleotide
  Sense strand starting at position 562 of SEQ ID NO: 317044
cuacauggucgcuagauug

SEQ ID NO: 460094 - RNA, 19 nt, Artificial Sequence
  Description of Artificial Sequence: Synthetic oligonucleotide
  Antisense Strand to SEQ ID NO: 460093
caaucuagcgaccauguag

SEQ ID NO: 460095 - RNA, 19 nt, Artificial Sequence
  Description of Artificial Sequence: Synthetic oligonucleotide
  Sense strand starting at position 670 of SEQ ID NO: 317044
ccaacaacgucaguguauu

SEQ ID NO: 460096 - RNA, 19 nt, Artificial Sequence
  Description of Artificial Sequence: Synthetic oligonucleotide
  Antisense Strand to SEQ ID NO: 460095
aauacacugacguuguugg

SEQ ID NO: 460097 - RNA, 19 nt, Artificial Sequence
  Description of Artificial Sequence: Synthetic oligonucleotide
  Sense strand starting at position 752 of SEQ ID NO: 317044
gcagucaaaucuguaaaug

SEQ ID NO: 460098 - RNA, 19 nt, Artificial Sequence
  Description of Artificial Sequence: Synthetic oligonucleotide
  Antisense Strand to SEQ ID NO: 460097
cauuuacagauuugacugc

SEQ ID NO: 460099 - RNA, 19 nt, Artificial Sequence
  Description of Artificial Sequence: Synthetic oligonucleotide
  Sense strand starting at position 814 of SEQ ID NO: 317044
ccgccagaggucuaauaac

SEQ ID NO: 460100 - RNA, 19 nt, Artificial Sequence
  Description of Artificial Sequence: Synthetic oligonucleotide
  Antisense Strand to SEQ ID NO: 460099
guuauuagaccucuggcgg

SEQ ID NO: 460101 - RNA, 19 nt, Artificial Sequence
  Description of Artificial Sequence: Synthetic oligonucleotide
  Sense strand starting at position 1051 of SEQ ID NO: 317044
ugugaacuugucgacuacu

SEQ ID NO: 460102 - RNA, 19 nt, Artificial Sequence
  Description of Artificial Sequence: Synthetic oligonucleotide
  Antisense Strand to SEQ ID NO: 460101
aguagucgacaaguucaca

SEQ ID NO: 460103 - RNA, 19 nt, Artificial Sequence
  Description of Artificial Sequence: Synthetic oligonucleotide
  Sense strand starting at position 1054 of SEQ ID NO: 317044
gaacuugucgacuacugaa

SEQ ID NO: 460104 - RNA, 19 nt, Artificial Sequence
  Description of Artificial Sequence: Synthetic oligonucleotide
  Antisense Strand to SEQ ID NO: 460103
uucaguagucgacaaguuc

SEQ ID NO: 460105 - RNA, 19 nt, Artificial Sequence
  Description of Artificial Sequence: Synthetic oligonucleotide
  Sense strand starting at position 1116 of SEQ ID NO: 317044
acgcuuuacucucugacau

SEQ ID NO: 460106 - RNA, 19 nt, Artificial Sequence
  Description of Artificial Sequence: Synthetic oligonucleotide
  Antisense Strand to SEQ ID NO: 460105
augucagagaguaaagcgu

SEQ ID NO: 460107 - RNA, 19 nt, Artificial Sequence
  Description of Artificial Sequence: Synthetic oligonucleotide
  Sense strand starting at position 1117 of SEQ ID NO: 317044
cgcuuuacucucugacaua

SEQ ID NO: 460108 - RNA, 19 nt, Artificial Sequence
  Description of Artificial Sequence: Synthetic oligonucleotide
  Antisense Strand to SEQ ID NO: 460107
uaugucagagaguaaagcg

SEQ ID NO: 460109 - RNA, 19 nt, Artificial Sequence
  Description of Artificial Sequence: Synthetic oligonucleotide
  Sense strand starting at position 1149 of SEQ ID NO: 317044
gccagcuucugaucccaga

SEQ ID NO: 460110 - RNA, 19 nt, Artificial Sequence
  Description of Artificial Sequence: Synthetic oligonucleotide
  Antisense Strand to SEQ ID NO: 460109
ucugggaucagaagcuggc

SEQ ID NO: 460111 - RNA, 19 nt, Artificial Sequence
  Description of Artificial Sequence: Synthetic oligonucleotide
  Sense strand starting at position 1262 of SEQ ID NO: 317044
gggcgaggguauuauuuaa

SEQ ID NO: 460112 - RNA, 19 nt, Artificial Sequence
  Description of Artificial Sequence: Synthetic oligonucleotide
  Antisense Strand to SEQ ID NO: 460111
uuaaauaauacccucgccc

SEQ ID NO: 460113 - RNA, 19 nt, Artificial Sequence
  Description of Artificial Sequence: Synthetic oligonucleotide
  Sense strand starting at position 1344 of SEQ ID NO: 317044
ccgaaaugguuuccaguuu

SEQ ID NO: 460114 - RNA, 19 nt, Artificial Sequence
  Description of Artificial Sequence: Synthetic oligonucleotide
  Antisense Strand to SEQ ID NO: 460113
aaacuggaaaccauuucgg

SEQ ID NO: 460115 - RNA, 19 nt, Artificial Sequence
  Description of Artificial Sequence: Synthetic oligonucleotide
  Sense strand starting at position 2473 of SEQ ID NO: 317044
ugauaauuagugugcucua

SEQ ID NO: 460116 - RNA, 19 nt, Artificial Sequence
  Description of Artificial Sequence: Synthetic oligonucleotide
  Antisense Strand to SEQ ID NO: 460115
uagagcacacuaauuauca

SEQ ID NO: 460117 - RNA, 19 nt, Artificial Sequence
  Description of Artificial Sequence: Synthetic oligonucleotide
  Sense strand starting at position 2474 of SEQ ID NO: 317044
gauaauuagugugcucuag

SEQ ID NO: 460118 - RNA, 19 nt, Artificial Sequence
  Description of Artificial Sequence: Synthetic oligonucleotide
  Antisense Strand to SEQ ID NO: 460117
cuagagcacacuaauuauc

SEQ ID NO: 460119 - RNA, 19 nt, Artificial Sequence
  Description of Artificial Sequence: Synthetic oligonucleotide
  Sense strand starting at position 2500 of SEQ ID NO: 317044
guuuguggcaucgaaauua

SEQ ID NO: 460120 - RNA, 19 nt, Artificial Sequence
  Description of Artificial Sequence: Synthetic oligonucleotide
  Antisense Strand to SEQ ID NO: 460119
uaauuucgaugccacaaac

SEQ ID NO: 460121 - RNA, 19 nt, Artificial Sequence
  Description of Artificial Sequence: Synthetic oligonucleotide
  Sense strand starting at position 2516 of SEQ ID NO: 317044
uuaugauccucagcacugu

SEQ ID NO: 460122 - RNA, 19 nt, Artificial Sequence
  Description of Artificial Sequence: Synthetic oligonucleotide
  Antisense Strand to SEQ ID NO: 460121
acagugcugaggaucauaa

SEQ ID NO: 460123 - RNA, 19 nt, Artificial Sequence
  Description of Artificial Sequence: Synthetic oligonucleotide
  Sense strand starting at position 2525 of SEQ ID NO: 317044
ucagcacugugaccauaau

SEQ ID NO: 460124 - RNA, 19 nt, Artificial Sequence
  Description of Artificial Sequence: Synthetic oligonucleotide
  Antisense Strand to SEQ ID NO: 460123
auuauggucacagugcuga

SEQ ID NO: 460125 - RNA, 19 nt, Artificial Sequence
  Description of Artificial Sequence: Synthetic oligonucleotide
  Sense strand starting at position 2550 of SEQ ID NO: 317044
uuuccagugguggaauaau

SEQ ID NO: 460126 - RNA, 19 nt, Artificial Sequence
  Description of Artificial Sequence: Synthetic oligonucleotide
  Antisense Strand to SEQ ID NO: 460125
auuauuccaccacuggaaa

SEQ ID NO: 460127 - RNA, 19 nt, Artificial Sequence
  Description of Artificial Sequence: Synthetic oligonucleotide
  Sense strand starting at position 2626 of SEQ ID NO: 317044
augcuaggucgugagaaua

SEQ ID NO: 460128 - RNA, 19 nt, Artificial Sequence
  Description of Artificial Sequence: Synthetic oligonucleotide
  Antisense Strand to SEQ ID NO: 460127
uauucucacgaccuagcau

SEQ ID NO: 460129 - RNA, 19 nt, Artificial Sequence
  Description of Artificial Sequence: Synthetic oligonucleotide
  Sense strand starting at position 2700 of SEQ ID NO: 317044
caucaucagguuugagcaa

SEQ ID NO: 460130 - RNA, 19 nt, Artificial Sequence
  Description of Artificial Sequence: Synthetic oligonucleotide
  Antisense Strand to SEQ ID NO: 460129
uugcucaaaccugaugaug

SEQ ID NO: 460131 - RNA, 19 nt, Artificial Sequence
  Description of Artificial Sequence: Synthetic oligonucleotide
  Sense strand starting at position 2777 of SEQ ID NO: 317044
uuacuuugucucugaguga

SEQ ID NO: 460132 - RNA, 19 nt, Artificial Sequence
  Description of Artificial Sequence: Synthetic oligonucleotide
  Antisense Strand to SEQ ID NO: 460131
ucacucagagacaaaguaa

SEQ ID NO: 460133 - RNA, 19 nt, Artificial Sequence
  Description of Artificial Sequence: Synthetic oligonucleotide
  Sense strand starting at position 2786 of SEQ ID NO: 317044
cucugagugauguguaaac

SEQ ID NO: 460134 - RNA, 19 nt, Artificial Sequence
  Description of Artificial Sequence: Synthetic oligonucleotide
  Antisense Strand to SEQ ID NO: 460133
guuuacacaucacucagag

SEQ ID NO: 460135 - RNA, 19 nt, Artificial Sequence
  Description of Artificial Sequence: Synthetic oligonucleotide
  Sense strand starting at position 2851 of SEQ ID NO: 317044
ucauuauucguagauuagu

SEQ ID NO: 460136 - RNA, 19 nt, Artificial Sequence
  Description of Artificial Sequence: Synthetic oligonucleotide
  Antisense Strand to SEQ ID NO: 460135
acuaaucuacgaauaauga

SEQ ID NO: 460137 - RNA, 19 nt, Artificial Sequence
  Description of Artificial Sequence: Synthetic oligonucleotide
  Sense strand starting at position 2891 of SEQ ID NO: 317044
guaugcucuccguccguga

SEQ ID NO: 460138 - RNA, 19 nt, Artificial Sequence
  Description of Artificial Sequence: Synthetic oligonucleotide
  Antisense Strand to SEQ ID NO: 460137
ucacggacggagagcauac

SEQ ID NO: 460139 - RNA, 19 nt, Artificial Sequence
  Description of Artificial Sequence: Synthetic oligonucleotide
  Sense strand starting at position 2908 of SEQ ID NO: 317044
gaugguugaauguggucau

SEQ ID NO: 460140 - RNA, 19 nt, Artificial Sequence
  Description of Artificial Sequence: Synthetic oligonucleotide
  Antisense Strand to SEQ ID NO: 460139
augaccacauucaaccauc

SEQ ID NO: 460141 - RNA, 19 nt, Artificial Sequence
  Description of Artificial Sequence: Synthetic oligonucleotide
  Sense strand starting at position 2997 of SEQ ID NO: 317044
gcaagugguccagaagacu

SEQ ID NO: 460142 - RNA, 19 nt, Artificial Sequence
  Description of Artificial Sequence: Synthetic oligonucleotide
  Antisense Strand to SEQ ID NO: 460141
agucuucuggaccacuugc

SEQ ID NO: 460143 - RNA, 19 nt, Artificial Sequence
  Description of Artificial Sequence: Synthetic oligonucleotide
  Sense strand starting at position 3006 of SEQ ID NO: 317044
ccagaagacugauaaucaa

SEQ ID NO: 460144 - RNA, 19 nt, Artificial Sequence
  Description of Artificial Sequence: Synthetic oligonucleotide
  Antisense Strand to SEQ ID NO: 460143
uugauuaucagucuucugg

SEQ ID NO: 460145 - RNA, 19 nt, Artificial Sequence
  Description of Artificial Sequence: Synthetic oligonucleotide
  Sense strand starting at position 3062 of SEQ ID NO: 317044
gagaucuauuuagggaugu

SEQ ID NO: 460146 - RNA, 19 nt, Artificial Sequence
  Description of Artificial Sequence: Synthetic oligonucleotide
  Antisense Strand to SEQ ID NO: 460145
acaucccuaaauagaucuc

SEQ ID NO: 460147 - RNA, 19 nt, Artificial Sequence
  Description of Artificial Sequence: Synthetic oligonucleotide
  Sense strand starting at position 3063 of SEQ ID NO: 317044
agaucuauuuagggauguu

SEQ ID NO: 460148 - RNA, 19 nt, Artificial Sequence
  Description of Artificial Sequence: Synthetic oligonucleotide
  Antisense Strand to SEQ ID NO: 460147
aacaucccuaaauagaucu

SEQ ID NO: 460149 - RNA, 19 nt, Artificial Sequence
  Description of Artificial Sequence: Synthetic oligonucleotide
  Sense strand starting at position 3178 of SEQ ID NO: 317044
gggacaauuuaagauuguu

SEQ ID NO: 460150 - RNA, 19 nt, Artificial Sequence
  Description of Artificial Sequence: Synthetic oligonucleotide
  Antisense Strand to SEQ ID NO: 460149
aacaaucuuaaauuguccc

SEQ ID NO: 460151 - RNA, 19 nt, Artificial Sequence
  Description of Artificial Sequence: Synthetic oligonucleotide
  Sense strand starting at position 3270 of SEQ ID NO: 317044
aucggagcuauguggaaga

SEQ ID NO: 460152 - RNA, 19 nt, Artificial Sequence
  Description of Artificial Sequence: Synthetic oligonucleotide
  Antisense Strand to SEQ ID NO: 460151
ucuuccacauagcuccgau

SEQ ID NO: 460153 - RNA, 19 nt, Artificial Sequence
  Description of Artificial Sequence: Synthetic oligonucleotide
  Sense strand starting at position 3272 of SEQ ID NO: 317044
cggagcuauguggaagaga

SEQ ID NO: 460154 - RNA, 19 nt, Artificial Sequence
  Description of Artificial Sequence: Synthetic oligonucleotide
  Antisense Strand to SEQ ID NO: 460153
ucucuuccacauagcuccg

SEQ ID NO: 460155 - RNA, 19 nt, Artificial Sequence
  Description of Artificial Sequence: Synthetic oligonucleotide
  Sense strand starting at position 3448 of SEQ ID NO: 317044
uuuaccuuuguguacauua

SEQ ID NO: 460156 - RNA, 19 nt, Artificial Sequence
  Description of Artificial Sequence: Synthetic oligonucleotide
  Antisense Strand to SEQ ID NO: 460155
uaauguacacaaagguaaa

SEQ ID NO: 460157 - RNA, 19 nt, Artificial Sequence
  Description of Artificial Sequence: Synthetic oligonucleotide
  Sense strand starting at position 3563 of SEQ ID NO: 317044
gguuuauaaugagaaagac

SEQ ID NO: 460158 - RNA, 19 nt, Artificial Sequence
  Description of Artificial Sequence: Synthetic oligonucleotide
  Antisense Strand to SEQ ID NO: 460157
gucuuucucauuauaaacc

SEQ ID NO: 460159 - RNA, 19 nt, Artificial Sequence
  Description of Artificial Sequence: Synthetic oligonucleotide
  Sense strand starting at position 90 of SEQ ID NO: 317045
ugguaaauauccucaagua

SEQ ID NO: 460160 - RNA, 19 nt, Artificial Sequence
  Description of Artificial Sequence: Synthetic oligonucleotide
  Antisense Strand to SEQ ID NO: 460159
uacuugaggauauuuacca

SEQ ID NO: 460161 - RNA, 19 nt, Artificial Sequence
  Description of Artificial Sequence: Synthetic oligonucleotide
  Sense strand starting at position 255 of SEQ ID NO: 317045
agcuauuugugccuuuaaa

SEQ ID NO: 460162 - RNA, 19 nt, Artificial Sequence
  Description of Artificial Sequence: Synthetic oligonucleotide
  Antisense Strand to SEQ ID NO: 460161
uuuaaaggcacaaauagcu

SEQ ID NO: 460163 - RNA, 19 nt, Artificial Sequence
  Description of Artificial Sequence: Synthetic oligonucleotide
  Sense strand starting at position 621 of SEQ ID NO: 317045
agagacauguuacuuagua

SEQ ID NO: 460164 - RNA, 19 nt, Artificial Sequence
  Description of Artificial Sequence: Synthetic oligonucleotide
  Antisense Strand to SEQ ID NO: 460163
uacuaaguaacaugucucu

SEQ ID NO: 460165 - RNA, 19 nt, Artificial Sequence
  Description of Artificial Sequence: Synthetic oligonucleotide
  Sense strand starting at position 622 of SEQ ID NO: 317045
gagacauguuacuuaguau

SEQ ID NO: 460166 - RNA, 19 nt, Artificial Sequence
  Description of Artificial Sequence: Synthetic oligonucleotide
  Antisense Strand to SEQ ID NO: 460165
auacuaaguaacaugucuc

SEQ ID NO: 460167 - RNA, 19 nt, Artificial Sequence
  Description of Artificial Sequence: Synthetic oligonucleotide
  Sense strand starting at position 643 of SEQ ID NO: 317045
ucuauauuagucuggagag

SEQ ID NO: 460168 - RNA, 19 nt, Artificial Sequence
  Description of Artificial Sequence: Synthetic oligonucleotide
  Antisense Strand to SEQ ID NO: 460167
cucuccagacuaauauaga

SEQ ID NO: 460169 - RNA, 19 nt, Artificial Sequence
  Description of Artificial Sequence: Synthetic oligonucleotide
  Sense strand starting at position 645 of SEQ ID NO: 317045
uauauuagucuggagagcu

SEQ ID NO: 460170 - RNA, 19 nt, Artificial Sequence
  Description of Artificial Sequence: Synthetic oligonucleotide
  Antisense Strand to SEQ ID NO: 460169
agcucuccagacuaauaua

SEQ ID NO: 460171 - RNA, 19 nt, Artificial Sequence
  Description of Artificial Sequence: Synthetic oligonucleotide
  Sense strand starting at position 653 of SEQ ID NO: 317045
ucuggagagcuguaacaca

SEQ ID NO: 460172 - RNA, 19 nt, Artificial Sequence
  Description of Artificial Sequence: Synthetic oligonucleotide
  Antisense Strand to SEQ ID NO: 460171
uguguuacagcucuccaga

SEQ ID NO: 460173 - RNA, 19 nt, Artificial Sequence
  Description of Artificial Sequence: Synthetic oligonucleotide
  Sense strand starting at position 792 of SEQ ID NO: 317045
augacucuaucaucuguua

SEQ ID NO: 460174 - RNA, 19 nt, Artificial Sequence
  Description of Artificial Sequence: Synthetic oligonucleotide
  Antisense Strand to SEQ ID NO: 460173
uaacagaugauagagucau

SEQ ID NO: 460175 - RNA, 19 nt, Artificial Sequence
  Description of Artificial Sequence: Synthetic oligonucleotide
  Sense strand starting at position 878 of SEQ ID NO: 317045
aagguuaaugaaugaagca

SEQ ID NO: 460176 - RNA, 19 nt, Artificial Sequence
  Description of Artificial Sequence: Synthetic oligonucleotide
  Antisense Strand to SEQ ID NO: 460175
ugcuucauucauuaaccuu

SEQ ID NO: 460177 - RNA, 19 nt, Artificial Sequence
  Description of Artificial Sequence: Synthetic oligonucleotide
  Sense strand starting at position 984 of SEQ ID NO: 317045
aaugaaugcuauuuguugu

SEQ ID NO: 460178 - RNA, 19 nt, Artificial Sequence
  Description of Artificial Sequence: Synthetic oligonucleotide
  Antisense Strand to SEQ ID NO: 460177
acaacaaauagcauucauu

SEQ ID NO: 460179 - RNA, 19 nt, Artificial Sequence
  Description of Artificial Sequence: Synthetic oligonucleotide
  Sense strand starting at position 987 of SEQ ID NO: 317045
gaaugcuauuuguugucuu

SEQ ID NO: 460180 - RNA, 19 nt, Artificial Sequence
  Description of Artificial Sequence: Synthetic oligonucleotide
  Antisense Strand to SEQ ID NO: 460179
aagacaacaaauagcauuc

SEQ ID NO: 460181 - RNA, 19 nt, Artificial Sequence
  Description of Artificial Sequence: Synthetic oligonucleotide
  Sense strand starting at position 2006 of SEQ ID NO: 317045
cagucucugcugcuuagua

SEQ ID NO: 460182 - RNA, 19 nt, Artificial Sequence
  Description of Artificial Sequence: Synthetic oligonucleotide
  Antisense Strand to SEQ ID NO: 460181
uacuaagcagcagagacug

SEQ ID NO: 460183 - RNA, 19 nt, Artificial Sequence
  Description of Artificial Sequence: Synthetic oligonucleotide
  Sense strand starting at position 2065 of SEQ ID NO: 317045
agcauuucccuuuguacuu

SEQ ID NO: 460184 - RNA, 19 nt, Artificial Sequence
  Description of Artificial Sequence: Synthetic oligonucleotide
  Antisense Strand to SEQ ID NO: 460183
aaguacaaagggaaaugcu

SEQ ID NO: 460185 - RNA, 19 nt, Artificial Sequence
  Description of Artificial Sequence: Synthetic oligonucleotide
  Sense strand starting at position 2066 of SEQ ID NO: 317045
gcauuucccuuuguacuua

SEQ ID NO: 460186 - RNA, 19 nt, Artificial Sequence
  Description of Artificial Sequence: Synthetic oligonucleotide
  Antisense Strand to SEQ ID NO: 460185
uaaguacaaagggaaaugc

SEQ ID NO: 460187 - RNA, 19 nt, Artificial Sequence
  Description of Artificial Sequence: Synthetic oligonucleotide
  Sense strand starting at position 2125 of SEQ ID NO: 317045
cuaagucccuaagugaaau

SEQ ID NO: 460188 - RNA, 19 nt, Artificial Sequence
  Description of Artificial Sequence: Synthetic oligonucleotide
  Antisense Strand to SEQ ID NO: 460187
auuucacuuagggacuuag

SEQ ID NO: 460189 - RNA, 19 nt, Artificial Sequence
  Description of Artificial Sequence: Synthetic oligonucleotide
  Sense strand starting at position 2319 of SEQ ID NO: 317045
caguaagauccuggguaag

SEQ ID NO: 460190 - RNA, 19 nt, Artificial Sequence
  Description of Artificial Sequence: Synthetic oligonucleotide
  Antisense Strand to SEQ ID NO: 460189
cuuacccaggaucuuacug

SEQ ID NO: 460191 - RNA, 19 nt, Artificial Sequence
  Description of Artificial Sequence: Synthetic oligonucleotide
  Sense strand starting at position 2321 of SEQ ID NO: 317045
guaagauccuggguaagau

SEQ ID NO: 460192 - RNA, 19 nt, Artificial Sequence
  Description of Artificial Sequence: Synthetic oligonucleotide
  Antisense Strand to SEQ ID NO: 460191
aucuuacccaggaucuuac

SEQ ID NO: 460193 - RNA, 19 nt, Artificial Sequence
  Description of Artificial Sequence: Synthetic oligonucleotide
  Sense strand starting at position 2551 of SEQ ID NO: 317045
aggacuauuggguguacaa

SEQ ID NO: 460194 - RNA, 19 nt, Artificial Sequence
  Description of Artificial Sequence: Synthetic oligonucleotide
  Antisense Strand to SEQ ID NO: 460193
uuguacacccaauaguccu

SEQ ID NO: 460195 - RNA, 19 nt, Artificial Sequence
  Description of Artificial Sequence: Synthetic oligonucleotide
  Sense strand starting at position 2553 of SEQ ID NO: 317045
gacuauuggguguacaagu

SEQ ID NO: 460196 - RNA, 19 nt, Artificial Sequence
  Description of Artificial Sequence: Synthetic oligonucleotide
  Antisense Strand to SEQ ID NO: 460195
acuuguacacccaauaguc

SEQ ID NO: 460197 - RNA, 19 nt, Artificial Sequence
  Description of Artificial Sequence: Synthetic oligonucleotide
  Sense strand starting at position 2610 of SEQ ID NO: 317045
ugguuugaacaugguuaca

SEQ ID NO: 460198 - RNA, 19 nt, Artificial Sequence
  Description of Artificial Sequence: Synthetic oligonucleotide
  Antisense Strand to SEQ ID NO: 460197
uguaaccauguucaaacca

SEQ ID NO: 460199 - RNA, 19 nt, Artificial Sequence
  Description of Artificial Sequence: Synthetic oligonucleotide
  Sense strand starting at position 2679 of SEQ ID NO: 317045
aguuauugugaacaaugca

SEQ ID NO: 460200 - RNA, 19 nt, Artificial Sequence
  Description of Artificial Sequence: Synthetic oligonucleotide
  Antisense Strand to SEQ ID NO: 460199
ugcauuguucacaauaacu

SEQ ID NO: 460201 - RNA, 19 nt, Artificial Sequence
  Description of Artificial Sequence: Synthetic oligonucleotide
  Sense strand starting at position 2705 of SEQ ID NO: 317045
aggcauugucagggacaca

SEQ ID NO: 460202 - RNA, 19 nt, Artificial Sequence
  Description of Artificial Sequence: Synthetic oligonucleotide
  Antisense Strand to SEQ ID NO: 460201
ugugucccugacaaugccu

SEQ ID NO: 460203 - RNA, 19 nt, Artificial Sequence
  Description of Artificial Sequence: Synthetic oligonucleotide
  Sense strand starting at position 2832 of SEQ ID NO: 317045
auuaaagugugaucuauca

SEQ ID NO: 460204 - RNA, 19 nt, Artificial Sequence
  Description of Artificial Sequence: Synthetic oligonucleotide
  Antisense Strand to SEQ ID NO: 460203
ugauagaucacacuuuaau

SEQ ID NO: 460205 - RNA, 19 nt, Artificial Sequence
  Description of Artificial Sequence: Synthetic oligonucleotide
  Sense strand starting at position 2840 of SEQ ID NO: 317045
gugaucuaucaaugcagaa

SEQ ID NO: 460206 - RNA, 19 nt, Artificial Sequence
  Description of Artificial Sequence: Synthetic oligonucleotide
  Antisense Strand to SEQ ID NO: 460205
uucugcauugauagaucac

SEQ ID NO: 460207 - RNA, 19 nt, Artificial Sequence
  Description of Artificial Sequence: Synthetic oligonucleotide
  Sense strand starting at position 2983 of SEQ ID NO: 317045
ugaggugucuaucuuaaua

SEQ ID NO: 460208 - RNA, 19 nt, Artificial Sequence
  Description of Artificial Sequence: Synthetic oligonucleotide
  Antisense Strand to SEQ ID NO: 460207
uauuaagauagacaccuca

SEQ ID NO: 460209 - RNA, 19 nt, Artificial Sequence
  Description of Artificial Sequence: Synthetic oligonucleotide
  Sense strand starting at position 3130 of SEQ ID NO: 317045
gggccaguuucauuaggga

SEQ ID NO: 460210 - RNA, 19 nt, Artificial Sequence
  Description of Artificial Sequence: Synthetic oligonucleotide
  Antisense Strand to SEQ ID NO: 460209
ucccuaaugaaacuggccc

SEQ ID NO: 460211 - RNA, 19 nt, Artificial Sequence
  Description of Artificial Sequence: Synthetic oligonucleotide
  Sense strand starting at position 3152 of SEQ ID NO: 317045
ggcugcuaagaauaguaaa

SEQ ID NO: 460212 - RNA, 19 nt, Artificial Sequence
  Description of Artificial Sequence: Synthetic oligonucleotide
  Antisense Strand to SEQ ID NO: 460211
uuuacuauucuuagcagcc

SEQ ID NO: 460213 - RNA, 19 nt, Artificial Sequence
  Description of Artificial Sequence: Synthetic oligonucleotide
  Sense strand starting at position 3170 of SEQ ID NO: 317045
aacauuguuuagguagaau

SEQ ID NO: 460214 - RNA, 19 nt, Artificial Sequence
  Description of Artificial Sequence: Synthetic oligonucleotide
  Antisense Strand to SEQ ID NO: 460213
auucuaccuaaacaauguu

SEQ ID NO: 460215 - RNA, 19 nt, Artificial Sequence
  Description of Artificial Sequence: Synthetic oligonucleotide
  Sense strand starting at position 3179 of SEQ ID NO: 317045
uagguagaaugauagauuu

SEQ ID NO: 460216 - RNA, 19 nt, Artificial Sequence
  Description of Artificial Sequence: Synthetic oligonucleotide
  Antisense Strand to SEQ ID NO: 460215
aaaucuaucauucuaccua

SEQ ID NO: 460217 - RNA, 19 nt, Artificial Sequence
  Description of Artificial Sequence: Synthetic oligonucleotide
  Sense strand starting at position 3187 of SEQ ID NO: 317045
augauagauuucuacagaa

SEQ ID NO: 460218 - RNA, 19 nt, Artificial Sequence
  Description of Artificial Sequence: Synthetic oligonucleotide
  Antisense Strand to SEQ ID NO: 460217
uucuguagaaaucuaucau

SEQ ID NO: 460219 - RNA, 19 nt, Artificial Sequence
  Description of Artificial Sequence: Synthetic oligonucleotide
  Sense strand starting at position 3222 of SEQ ID NO: 317045
gcaugaagugggcauaucu

SEQ ID NO: 460220 - RNA, 19 nt, Artificial Sequence
  Description of Artificial Sequence: Synthetic oligonucleotide
  Antisense Strand to SEQ ID NO: 460219
agauaugcccacuucaugc

SEQ ID NO: 460221 - RNA, 19 nt, Artificial Sequence
  Description of Artificial Sequence: Synthetic oligonucleotide
  Sense strand starting at position 3368 of SEQ ID NO: 317045
uauugaauggacuguugaa

SEQ ID NO: 460222 - RNA, 19 nt, Artificial Sequence
  Description of Artificial Sequence: Synthetic oligonucleotide
  Antisense Strand to SEQ ID NO: 460221
uucaacaguccauucaaua

SEQ ID NO: 460223 - RNA, 19 nt, Artificial Sequence
  Description of Artificial Sequence: Synthetic oligonucleotide
  Sense strand starting at position 3401 of SEQ ID NO: 317045
aggaaauuaacuuggcagu

SEQ ID NO: 460224 - RNA, 19 nt, Artificial Sequence
  Description of Artificial Sequence: Synthetic oligonucleotide
  Antisense Strand to SEQ ID NO: 460223
acugccaaguuaauuuccu

SEQ ID NO: 460225 - RNA, 19 nt, Artificial Sequence
  Description of Artificial Sequence: Synthetic oligonucleotide
  Sense strand starting at position 3402 of SEQ ID NO: 317045
ggaaauuaacuuggcagua

SEQ ID NO: 460226 - RNA, 19 nt, Artificial Sequence
  Description of Artificial Sequence: Synthetic oligonucleotide
  Antisense Strand to SEQ ID NO: 460225
uacugccaaguuaauuucc

SEQ ID NO: 460227 - RNA, 19 nt, Artificial Sequence
  Description of Artificial Sequence: Synthetic oligonucleotide
  Sense strand starting at position 3403 of SEQ ID NO: 317045
gaaauuaacuuggcaguac

SEQ ID NO: 460228 - RNA, 19 nt, Artificial Sequence
  Description of Artificial Sequence: Synthetic oligonucleotide
  Antisense Strand to SEQ ID NO: 460227
guacugccaaguuaauuuc

SEQ ID NO: 460229 - RNA, 19 nt, Artificial Sequence
  Description of Artificial Sequence: Synthetic oligonucleotide
  Sense strand starting at position 3428 of SEQ ID NO: 317045
ggacgcauuagagagugaa

SEQ ID NO: 460230 - RNA, 19 nt, Artificial Sequence
  Description of Artificial Sequence: Synthetic oligonucleotide
  Antisense Strand to SEQ ID NO: 460229
uucacucucuaaugcgucc

SEQ ID NO: 460231 - RNA, 19 nt, Artificial Sequence
  Description of Artificial Sequence: Synthetic oligonucleotide
  Sense strand starting at position 3431 of SEQ ID NO: 317045
cgcauuagagagugaaaug

SEQ ID NO: 460232 - RNA, 19 nt, Artificial Sequence
  Description of Artificial Sequence: Synthetic oligonucleotide
  Antisense Strand to SEQ ID NO: 460231
cauuucacucucuaaugcg

SEQ ID NO: 460233 - RNA, 19 nt, Artificial Sequence
  Description of Artificial Sequence: Synthetic oligonucleotide
  Sense strand starting at position 3714 of SEQ ID NO: 317045
gcugguucucaacaaggga

SEQ ID NO: 460234 - RNA, 19 nt, Artificial Sequence
  Description of Artificial Sequence: Synthetic oligonucleotide
  Antisense Strand to SEQ ID NO: 460233
ucccuuguugagaaccagc

SEQ ID NO: 460235 - RNA, 19 nt, Artificial Sequence
  Description of Artificial Sequence: Synthetic oligonucleotide
  Sense strand starting at position 3808 of SEQ ID NO: 317045
gaaugaccagagugcuaua

SEQ ID NO: 460236 - RNA, 19 nt, Artificial Sequence
  Description of Artificial Sequence: Synthetic oligonucleotide
  Antisense Strand to SEQ ID NO: 460235
uauagcacucuggucauuc

SEQ ID NO: 460237 - RNA, 19 nt, Artificial Sequence
  Description of Artificial Sequence: Synthetic oligonucleotide
  Sense strand starting at position 3813 of SEQ ID NO: 317045
accagagugcuauaggcau

SEQ ID NO: 460238 - RNA, 19 nt, Artificial Sequence
  Description of Artificial Sequence: Synthetic oligonucleotide
  Antisense Strand to SEQ ID NO: 460237
augccuauagcacucuggu

SEQ ID NO: 460239 - RNA, 19 nt, Artificial Sequence
  Description of Artificial Sequence: Synthetic oligonucleotide
  Sense strand starting at position 302 of SEQ ID NO: 317046
cugaaugugaacugaguuu

SEQ ID NO: 460240 - RNA, 19 nt, Artificial Sequence
  Description of Artificial Sequence: Synthetic oligonucleotide
  Antisense Strand to SEQ ID NO: 460239
aaacucaguucacauucag

SEQ ID NO: 460241 - RNA, 19 nt, Artificial Sequence
  Description of Artificial Sequence: Synthetic oligonucleotide
  Sense strand starting at position 309 of SEQ ID NO: 317046
ugaacugaguuucuuguca

SEQ ID NO: 460242 - RNA, 19 nt, Artificial Sequence
  Description of Artificial Sequence: Synthetic oligonucleotide
  Antisense Strand to SEQ ID NO: 460241
ugacaagaaacucaguuca

SEQ ID NO: 460243 - RNA, 19 nt, Artificial Sequence
  Description of Artificial Sequence: Synthetic oligonucleotide
  Sense strand starting at position 425 of SEQ ID NO: 317046
gaagcuaagugcucauaug

SEQ ID NO: 460244 - RNA, 19 nt, Artificial Sequence
  Description of Artificial Sequence: Synthetic oligonucleotide
  Antisense Strand to SEQ ID NO: 460243
cauaugagcacuuagcuuc

SEQ ID NO: 460245 - RNA, 19 nt, Artificial Sequence
  Description of Artificial Sequence: Synthetic oligonucleotide
  Sense strand starting at position 426 of SEQ ID NO: 317046
aagcuaagugcucauaugu

SEQ ID NO: 460246 - RNA, 19 nt, Artificial Sequence
  Description of Artificial Sequence: Synthetic oligonucleotide
  Antisense Strand to SEQ ID NO: 460245
acauaugagcacuuagcuu

SEQ ID NO: 460247 - RNA, 19 nt, Artificial Sequence
  Description of Artificial Sequence: Synthetic oligonucleotide
  Sense strand starting at position 435 of SEQ ID NO: 317046
gcucauauguaguugaaua

SEQ ID NO: 460248 - RNA, 19 nt, Artificial Sequence
  Description of Artificial Sequence: Synthetic oligonucleotide
  Antisense Strand to SEQ ID NO: 460247
uauucaacuacauaugagc

SEQ ID NO: 460249 - RNA, 19 nt, Artificial Sequence
  Description of Artificial Sequence: Synthetic oligonucleotide
  Sense strand starting at position 440 of SEQ ID NO: 317046
uauguaguugaauagagua

SEQ ID NO: 460250 - RNA, 19 nt, Artificial Sequence
  Description of Artificial Sequence: Synthetic oligonucleotide
  Antisense Strand to SEQ ID NO: 460249
uacucuauucaacuacaua

SEQ ID NO: 460251 - RNA, 19 nt, Artificial Sequence
  Description of Artificial Sequence: Synthetic oligonucleotide
  Sense strand starting at position 445 of SEQ ID NO: 317046
aguugaauagaguauccuu

SEQ ID NO: 460252 - RNA, 19 nt, Artificial Sequence
  Description of Artificial Sequence: Synthetic oligonucleotide
  Antisense Strand to SEQ ID NO: 460251
aaggauacucuauucaacu

SEQ ID NO: 460253 - RNA, 19 nt, Artificial Sequence
  Description of Artificial Sequence: Synthetic oligonucleotide
  Sense strand starting at position 448 of SEQ ID NO: 317046
ugaauagaguauccuuaga

SEQ ID NO: 460254 - RNA, 19 nt, Artificial Sequence
  Description of Artificial Sequence: Synthetic oligonucleotide
  Antisense Strand to SEQ ID NO: 460253
ucuaaggauacucuauuca

SEQ ID NO: 460255 - RNA, 19 nt, Artificial Sequence
  Description of Artificial Sequence: Synthetic oligonucleotide
  Sense strand starting at position 867 of SEQ ID NO: 317046
ugaaguuugaacuggguca

SEQ ID NO: 460256 - RNA, 19 nt, Artificial Sequence
  Description of Artificial Sequence: Synthetic oligonucleotide
  Antisense Strand to SEQ ID NO: 460255
ugacccaguucaaacuuca

SEQ ID NO: 460257 - RNA, 19 nt, Artificial Sequence
  Description of Artificial Sequence: Synthetic oligonucleotide
  Sense strand starting at position 869 of SEQ ID NO: 317046
aaguuugaacugggucagu

SEQ ID NO: 460258 - RNA, 19 nt, Artificial Sequence
  Description of Artificial Sequence: Synthetic oligonucleotide
  Antisense Strand to SEQ ID NO: 460257
acugacccaguucaaacuu

SEQ ID NO: 460259 - RNA, 19 nt, Artificial Sequence
  Description of Artificial Sequence: Synthetic oligonucleotide
  Sense strand starting at position 880 of SEQ ID NO: 317046
gggucaguuugacaaauua

SEQ ID NO: 460260 - RNA, 19 nt, Artificial Sequence
  Description of Artificial Sequence: Synthetic oligonucleotide
  Antisense Strand to SEQ ID NO: 460259
uaauuugucaaacugaccc

SEQ ID NO: 460261 - RNA, 19 nt, Artificial Sequence
  Description of Artificial Sequence: Synthetic oligonucleotide
  Sense strand starting at position 1049 of SEQ ID NO: 317046
aggauuuccuucuagagag

SEQ ID NO: 460262 - RNA, 19 nt, Artificial Sequence
  Description of Artificial Sequence: Synthetic oligonucleotide
  Antisense Strand to SEQ ID NO: 460261
cucucuagaaggaaauccu

SEQ ID NO: 460263 - RNA, 19 nt, Artificial Sequence
  Description of Artificial Sequence: Synthetic oligonucleotide
  Sense strand starting at position 1095 of SEQ ID NO: 317046
auuaccaucuuguauagga

SEQ ID NO: 460264 - RNA, 19 nt, Artificial Sequence
  Description of Artificial Sequence: Synthetic oligonucleotide
  Antisense Strand to SEQ ID NO: 460263
uccuauacaagaugguaau

SEQ ID NO: 460265 - RNA, 19 nt, Artificial Sequence
  Description of Artificial Sequence: Synthetic oligonucleotide
  Sense strand starting at position 1238 of SEQ ID NO: 317046
gaagaaaguuaugccauua

SEQ ID NO: 460266 - RNA, 19 nt, Artificial Sequence
  Description of Artificial Sequence: Synthetic oligonucleotide
  Antisense Strand to SEQ ID NO: 460265
uaauggcauaacuuucuuc

SEQ ID NO: 460267 - RNA, 19 nt, Artificial Sequence
  Description of Artificial Sequence: Synthetic oligonucleotide
  Sense strand starting at position 1433 of SEQ ID NO: 317046
ggcguaaagagcugucauc

SEQ ID NO: 460268 - RNA, 19 nt, Artificial Sequence
  Description of Artificial Sequence: Synthetic oligonucleotide
  Antisense Strand to SEQ ID NO: 460267
gaugacagcucuuuacgcc

SEQ ID NO: 460269 - RNA, 19 nt, Artificial Sequence
  Description of Artificial Sequence: Synthetic oligonucleotide
  Sense strand starting at position 1435 of SEQ ID NO: 317046
cguaaagagcugucaucgu

SEQ ID NO: 460270 - RNA, 19 nt, Artificial Sequence
  Description of Artificial Sequence: Synthetic oligonucleotide
  Antisense Strand to SEQ ID NO: 460269
acgaugacagcucuuuacg

SEQ ID NO: 460271 - RNA, 19 nt, Artificial Sequence
  Description of Artificial Sequence: Synthetic oligonucleotide
  Sense strand starting at position 1443 of SEQ ID NO: 317046
gcugucaucguggcgguaa

SEQ ID NO: 460272 - RNA, 19 nt, Artificial Sequence
  Description of Artificial Sequence: Synthetic oligonucleotide
  Antisense Strand to SEQ ID NO: 460271
uuaccgccacgaugacagc

SEQ ID NO: 460273 - RNA, 19 nt, Artificial Sequence
  Description of Artificial Sequence: Synthetic oligonucleotide
  Sense strand starting at position 1474 of SEQ ID NO: 317046
gcggcugagcgucuagaaa

SEQ ID NO: 460274 - RNA, 19 nt, Artificial Sequence
  Description of Artificial Sequence: Synthetic oligonucleotide
  Antisense Strand to SEQ ID NO: 460273
uuucuagacgcucagccgc

SEQ ID NO: 460275 - RNA, 19 nt, Artificial Sequence
  Description of Artificial Sequence: Synthetic oligonucleotide
  Sense strand starting at position 1476 of SEQ ID NO: 317046
ggcugagcgucuagaaaga

SEQ ID NO: 460276 - RNA, 19 nt, Artificial Sequence
  Description of Artificial Sequence: Synthetic oligonucleotide
  Antisense Strand to SEQ ID NO: 460275
ucuuucuagacgcucagcc

SEQ ID NO: 460277 - RNA, 19 nt, Artificial Sequence
  Description of Artificial Sequence: Synthetic oligonucleotide
  Sense strand starting at position 1967 of SEQ ID NO: 317046
uggaguuucgguuggugca

SEQ ID NO: 460278 - RNA, 19 nt, Artificial Sequence
  Description of Artificial Sequence: Synthetic oligonucleotide
  Antisense Strand to SEQ ID NO: 460277
ugcaccaaccgaaacucca

SEQ ID NO: 460279 - RNA, 19 nt, Artificial Sequence
  Description of Artificial Sequence: Synthetic oligonucleotide
  Sense strand starting at position 2171 of SEQ ID NO: 317046
uccugaugucgcuaagguu

SEQ ID NO: 460280 - RNA, 19 nt, Artificial Sequence
  Description of Artificial Sequence: Synthetic oligonucleotide
  Antisense Strand to SEQ ID NO: 460279
aaccuuagcgacaucagga

SEQ ID NO: 460281 - RNA, 19 nt, Artificial Sequence
  Description of Artificial Sequence: Synthetic oligonucleotide
  Sense strand starting at position 2617 of SEQ ID NO: 317046
uucuuuguauguccaucaa

SEQ ID NO: 460282 - RNA, 19 nt, Artificial Sequence
  Description of Artificial Sequence: Synthetic oligonucleotide
  Antisense Strand to SEQ ID NO: 460281
uugauggacauacaaagaa

SEQ ID NO: 460283 - RNA, 19 nt, Artificial Sequence
  Description of Artificial Sequence: Synthetic oligonucleotide
  Sense strand starting at position 2650 of SEQ ID NO: 317046
uugugaguguuccugggau

SEQ ID NO: 460284 - RNA, 19 nt, Artificial Sequence
  Description of Artificial Sequence: Synthetic oligonucleotide
  Antisense Strand to SEQ ID NO: 460283
aucccaggaacacucacaa

SEQ ID NO: 460285 - RNA, 19 nt, Artificial Sequence
  Description of Artificial Sequence: Synthetic oligonucleotide
  Sense strand starting at position 2652 of SEQ ID NO: 317046
gugaguguuccugggauuu

SEQ ID NO: 460286 - RNA, 19 nt, Artificial Sequence
  Description of Artificial Sequence: Synthetic oligonucleotide
  Antisense Strand to SEQ ID NO: 460285
aaaucccaggaacacucac

SEQ ID NO: 460287 - RNA, 19 nt, Artificial Sequence
  Description of Artificial Sequence: Synthetic oligonucleotide
  Sense strand starting at position 2654 of SEQ ID NO: 317046
gaguguuccugggauuuau

SEQ ID NO: 460288 - RNA, 19 nt, Artificial Sequence
  Description of Artificial Sequence: Synthetic oligonucleotide
  Antisense Strand to SEQ ID NO: 460287
auaaaucccaggaacacuc

SEQ ID NO: 460289 - RNA, 19 nt, Artificial Sequence
  Description of Artificial Sequence: Synthetic oligonucleotide
  Sense strand starting at position 2707 of SEQ ID NO: 317046
auuuauuccugugucacuu

SEQ ID NO: 460290 - RNA, 19 nt, Artificial Sequence
  Description of Artificial Sequence: Synthetic oligonucleotide
  Antisense Strand to SEQ ID NO: 460289
aagugacacaggaauaaau

SEQ ID NO: 460291 - RNA, 19 nt, Artificial Sequence
  Description of Artificial Sequence: Synthetic oligonucleotide
  Sense strand starting at position 2729 of SEQ ID NO: 317046
ccacgugcucuacaaagga

SEQ ID NO: 460292 - RNA, 19 nt, Artificial Sequence
  Description of Artificial Sequence: Synthetic oligonucleotide
  Antisense Strand to SEQ ID NO: 460291
uccuuuguagagcacgugg

SEQ ID NO: 460293 - RNA, 19 nt, Artificial Sequence
  Description of Artificial Sequence: Synthetic oligonucleotide
  Sense strand starting at position 2803 of SEQ ID NO: 317046
gcaguugauugaccugaga

SEQ ID NO: 460294 - RNA, 19 nt, Artificial Sequence
  Description of Artificial Sequence: Synthetic oligonucleotide
  Antisense Strand to SEQ ID NO: 460293
ucucaggucaaucaacugc

SEQ ID NO: 460295 - RNA, 19 nt, Artificial Sequence
  Description of Artificial Sequence: Synthetic oligonucleotide
  Sense strand starting at position 2805 of SEQ ID NO: 317046
aguugauugaccugagagc

SEQ ID NO: 460296 - RNA, 19 nt, Artificial Sequence
  Description of Artificial Sequence: Synthetic oligonucleotide
  Antisense Strand to SEQ ID NO: 460295
gcucucaggucaaucaacu

SEQ ID NO: 460297 - RNA, 19 nt, Artificial Sequence
  Description of Artificial Sequence: Synthetic oligonucleotide
  Sense strand starting at position 2806 of SEQ ID NO: 317046
guugauugaccugagagcu

SEQ ID NO: 460298 - RNA, 19 nt, Artificial Sequence
  Description of Artificial Sequence: Synthetic oligonucleotide
  Antisense Strand to SEQ ID NO: 460297
agcucucaggucaaucaac

SEQ ID NO: 460299 - RNA, 19 nt, Artificial Sequence
  Description of Artificial Sequence: Synthetic oligonucleotide
  Sense strand starting at position 2816 of SEQ ID NO: 317046
cugagagcucgcugcuaaa

SEQ ID NO: 460300 - RNA, 19 nt, Artificial Sequence
  Description of Artificial Sequence: Synthetic oligonucleotide
  Antisense Strand to SEQ ID NO: 460299
uuuagcagcgagcucucag

SEQ ID NO: 460301 - RNA, 19 nt, Artificial Sequence
  Description of Artificial Sequence: Synthetic oligonucleotide
  Sense strand starting at position 3311 of SEQ ID NO: 317046
ucacaauccuaggagucua

SEQ ID NO: 460302 - RNA, 19 nt, Artificial Sequence
  Description of Artificial Sequence: Synthetic oligonucleotide
  Antisense Strand to SEQ ID NO: 460301
uagacuccuaggauuguga

SEQ ID NO: 460303 - RNA, 19 nt, Artificial Sequence
  Description of Artificial Sequence: Synthetic oligonucleotide
  Sense strand starting at position 3548 of SEQ ID NO: 317046
uccucuuuagagcauuagu

SEQ ID NO: 460304 - RNA, 19 nt, Artificial Sequence
  Description of Artificial Sequence: Synthetic oligonucleotide
  Antisense Strand to SEQ ID NO: 460303
acuaaugcucuaaagagga

SEQ ID NO: 460305 - RNA, 19 nt, Artificial Sequence
  Description of Artificial Sequence: Synthetic oligonucleotide
  Sense strand starting at position 3551 of SEQ ID NO: 317046
ucuuuagagcauuaguauu

SEQ ID NO: 460306 - RNA, 19 nt, Artificial Sequence
  Description of Artificial Sequence: Synthetic oligonucleotide
  Antisense Strand to SEQ ID NO: 460305
aauacuaaugcucuaaaga

SEQ ID NO: 460307 - RNA, 19 nt, Artificial Sequence
  Description of Artificial Sequence: Synthetic oligonucleotide
  Sense strand starting at position 3622 of SEQ ID NO: 317046
agaaguaugcagugaagaa

SEQ ID NO: 460308 - RNA, 19 nt, Artificial Sequence
  Description of Artificial Sequence: Synthetic oligonucleotide
  Antisense Strand to SEQ ID NO: 460307
uucuucacugcauacuucu

SEQ ID NO: 460309 - RNA, 19 nt, Artificial Sequence
  Description of Artificial Sequence: Synthetic oligonucleotide
  Sense strand starting at position 3653 of SEQ ID NO: 317046
gugucuggaacgugaugua

SEQ ID NO: 460310 - RNA, 19 nt, Artificial Sequence
  Description of Artificial Sequence: Synthetic oligonucleotide
  Antisense Strand to SEQ ID NO: 460309
uacaucacguuccagacac

SEQ ID NO: 460311 - RNA, 19 nt, Artificial Sequence
  Description of Artificial Sequence: Synthetic oligonucleotide
  Sense strand starting at position 3813 of SEQ ID NO: 317046
ugaugucguucucugaauu

SEQ ID NO: 460312 - RNA, 19 nt, Artificial Sequence
  Description of Artificial Sequence: Synthetic oligonucleotide
  Antisense Strand to SEQ ID NO: 460311
aauucagagaacgacauca

SEQ ID NO: 460313 - RNA, 19 nt, Artificial Sequence
  Description of Artificial Sequence: Synthetic oligonucleotide
  Sense strand starting at position 3814 of SEQ ID NO: 317046
gaugucguucucugaauuu

SEQ ID NO: 460314 - RNA, 19 nt, Artificial Sequence
  Description of Artificial Sequence: Synthetic oligonucleotide
  Antisense Strand to SEQ ID NO: 460313
aaauucagagaacgacauc

SEQ ID NO: 460315 - RNA, 19 nt, Artificial Sequence
  Description of Artificial Sequence: Synthetic oligonucleotide
  Sense strand starting at position 3935 of SEQ ID NO: 317046
gucaacacucuuggacaga

SEQ ID NO: 460316 - RNA, 19 nt, Artificial Sequence
  Description of Artificial Sequence: Synthetic oligonucleotide
  Antisense Strand to SEQ ID NO: 460315
ucuguccaagaguguugac

SEQ ID NO: 460317 - RNA, 19 nt, Artificial Sequence
  Description of Artificial Sequence: Synthetic oligonucleotide
  Sense strand starting at position 3976 of SEQ ID NO: 317046
gcuguaugggcucaacaca

SEQ ID NO: 460318 - RNA, 19 nt, Artificial Sequence
  Description of Artificial Sequence: Synthetic oligonucleotide
  Antisense Strand to SEQ ID NO: 460317
uguguugagcccauacagc

SEQ ID NO: 460319 - RNA, 19 nt, Artificial Sequence
  Description of Artificial Sequence: Synthetic oligonucleotide
  Sense strand starting at position 85 of SEQ ID NO: 317047
gaagcuaagugcucauaug

SEQ ID NO: 460320 - RNA, 19 nt, Artificial Sequence
  Description of Artificial Sequence: Synthetic oligonucleotide
  Antisense Strand to SEQ ID NO: 460319
cauaugagcacuuagcuuc

SEQ ID NO: 460321 - RNA, 19 nt, Artificial Sequence
  Description of Artificial Sequence: Synthetic oligonucleotide
  Sense strand starting at position 86 of SEQ ID NO: 317047
aagcuaagugcucauaugu

SEQ ID NO: 460322 - RNA, 19 nt, Artificial Sequence
  Description of Artificial Sequence: Synthetic oligonucleotide
  Antisense Strand to SEQ ID NO: 460321
acauaugagcacuuagcuu

SEQ ID NO: 460323 - RNA, 19 nt, Artificial Sequence
  Description of Artificial Sequence: Synthetic oligonucleotide
  Sense strand starting at position 95 of SEQ ID NO: 317047
gcucauauguaguugaaua

SEQ ID NO: 460324 - RNA, 19 nt, Artificial Sequence
  Description of Artificial Sequence: Synthetic oligonucleotide
  Antisense Strand to SEQ ID NO: 460323
uauucaacuacauaugagc

SEQ ID NO: 460325 - RNA, 19 nt, Artificial Sequence
  Description of Artificial Sequence: Synthetic oligonucleotide
  Sense strand starting at position 100 of SEQ ID NO: 317047
uauguaguugaauagagua

SEQ ID NO: 460326 - RNA, 19 nt, Artificial Sequence
  Description of Artificial Sequence: Synthetic oligonucleotide
  Antisense Strand to SEQ ID NO: 460325
uacucuauucaacuacaua

SEQ ID NO: 460327 - RNA, 19 nt, Artificial Sequence
  Description of Artificial Sequence: Synthetic oligonucleotide
  Sense strand starting at position 105 of SEQ ID NO: 317047
aguugaauagaguauccuu

SEQ ID NO: 460328 - RNA, 19 nt, Artificial Sequence
  Description of Artificial Sequence: Synthetic oligonucleotide
  Antisense Strand to SEQ ID NO: 460327
aaggauacucuauucaacu

SEQ ID NO: 460329 - RNA, 19 nt, Artificial Sequence
  Description of Artificial Sequence: Synthetic oligonucleotide
  Sense strand starting at position 108 of SEQ ID NO: 317047
ugaauagaguauccuuaga

SEQ ID NO: 460330 - RNA, 19 nt, Artificial Sequence
  Description of Artificial Sequence: Synthetic oligonucleotide
  Antisense Strand to SEQ ID NO: 460329
ucuaaggauacucuauuca

SEQ ID NO: 460331 - RNA, 19 nt, Artificial Sequence
  Description of Artificial Sequence: Synthetic oligonucleotide
  Sense strand starting at position 527 of SEQ ID NO: 317047
ugaaguuugaacuggguca

SEQ ID NO: 460332 - RNA, 19 nt, Artificial Sequence
  Description of Artificial Sequence: Synthetic oligonucleotide
  Antisense Strand to SEQ ID NO: 460331
ugacccaguucaaacuuca

SEQ ID NO: 460333 - RNA, 19 nt, Artificial Sequence
  Description of Artificial Sequence: Synthetic oligonucleotide
  Sense strand starting at position 529 of SEQ ID NO: 317047
aaguuugaacugggucagu

SEQ ID NO: 460334 - RNA, 19 nt, Artificial Sequence
  Description of Artificial Sequence: Synthetic oligonucleotide
  Antisense Strand to SEQ ID NO: 460333
acugacccaguucaaacuu

SEQ ID NO: 460335 - RNA, 19 nt, Artificial Sequence
  Description of Artificial Sequence: Synthetic oligonucleotide
  Sense strand starting at position 709 of SEQ ID NO: 317047
aggauuuccuucuagagag

SEQ ID NO: 460336 - RNA, 19 nt, Artificial Sequence
  Description of Artificial Sequence: Synthetic oligonucleotide
  Antisense Strand to SEQ ID NO: 460335
cucucuagaaggaaauccu

SEQ ID NO: 460337 - RNA, 19 nt, Artificial Sequence
  Description of Artificial Sequence: Synthetic oligonucleotide
  Sense strand starting at position 898 of SEQ ID NO: 317047
gaagaaaguuaugccauua

SEQ ID NO: 460338 - RNA, 19 nt, Artificial Sequence
  Description of Artificial Sequence: Synthetic oligonucleotide
  Antisense Strand to SEQ ID NO: 460337
uaauggcauaacuuucuuc

SEQ ID NO: 460339 - RNA, 19 nt, Artificial Sequence
  Description of Artificial Sequence: Synthetic oligonucleotide
  Sense strand starting at position 1095 of SEQ ID NO: 317047
cguaaagagcugucaucgu

SEQ ID NO: 460340 - RNA, 19 nt, Artificial Sequence
  Description of Artificial Sequence: Synthetic oligonucleotide
  Antisense Strand to SEQ ID NO: 460339
acgaugacagcucuuuacg

SEQ ID NO: 460341 - RNA, 19 nt, Artificial Sequence
  Description of Artificial Sequence: Synthetic oligonucleotide
  Sense strand starting at position 1103 of SEQ ID NO: 317047
gcugucaucguggcgguaa

SEQ ID NO: 460342 - RNA, 19 nt, Artificial Sequence
  Description of Artificial Sequence: Synthetic oligonucleotide
  Antisense Strand to SEQ ID NO: 460341
uuaccgccacgaugacagc

SEQ ID NO: 460343 - RNA, 19 nt, Artificial Sequence
  Description of Artificial Sequence: Synthetic oligonucleotide
  Sense strand starting at position 1134 of SEQ ID NO: 317047
gcggcugagcgucuagaaa

SEQ ID NO: 460344 - RNA, 19 nt, Artificial Sequence
  Description of Artificial Sequence: Synthetic oligonucleotide
  Antisense Strand to SEQ ID NO: 460343
uuucuagacgcucagccgc

SEQ ID NO: 460345 - RNA, 19 nt, Artificial Sequence
  Description of Artificial Sequence: Synthetic oligonucleotide
  Sense strand starting at position 2277 of SEQ ID NO: 317047
uucuuuguauguccaucaa

SEQ ID NO: 460346 - RNA, 19 nt, Artificial Sequence
  Description of Artificial Sequence: Synthetic oligonucleotide
  Antisense Strand to SEQ ID NO: 460345
uugauggacauacaaagaa

SEQ ID NO: 460347 - RNA, 19 nt, Artificial Sequence
  Description of Artificial Sequence: Synthetic oligonucleotide
  Sense strand starting at position 2310 of SEQ ID NO: 317047
uugugaguguuccugggau

SEQ ID NO: 460348 - RNA, 19 nt, Artificial Sequence
  Description of Artificial Sequence: Synthetic oligonucleotide
  Antisense Strand to SEQ ID NO: 460347
aucccaggaacacucacaa

SEQ ID NO: 460349 - RNA, 19 nt, Artificial Sequence
  Description of Artificial Sequence: Synthetic oligonucleotide
  Sense strand starting at position 2312 of SEQ ID NO: 317047
gugaguguuccugggauuu

SEQ ID NO: 460350 - RNA, 19 nt, Artificial Sequence
  Description of Artificial Sequence: Synthetic oligonucleotide
  Antisense Strand to SEQ ID NO: 460349
aaaucccaggaacacucac

SEQ ID NO: 460351 - RNA, 19 nt, Artificial Sequence
  Description of Artificial Sequence: Synthetic oligonucleotide
  Sense strand starting at position 2314 of SEQ ID NO: 317047
gaguguuccugggauuuau

SEQ ID NO: 460352 - RNA, 19 nt, Artificial Sequence
  Description of Artificial Sequence: Synthetic oligonucleotide
  Antisense Strand to SEQ ID NO: 460351
auaaaucccaggaacacuc

SEQ ID NO: 460353 - RNA, 19 nt, Artificial Sequence
  Description of Artificial Sequence: Synthetic oligonucleotide
  Sense strand starting at position 2367 of SEQ ID NO: 317047
auuuauuccugugucacuu

SEQ ID NO: 460354 - RNA, 19 nt, Artificial Sequence
  Description of Artificial Sequence: Synthetic oligonucleotide
  Antisense Strand to SEQ ID NO: 460353
aagugacacaggaauaaau

SEQ ID NO: 460355 - RNA, 19 nt, Artificial Sequence
  Description of Artificial Sequence: Synthetic oligonucleotide
  Sense strand starting at position 2389 of SEQ ID NO: 317047
ccacgugcucuacaaagga

SEQ ID NO: 460356 - RNA, 19 nt, Artificial Sequence
  Description of Artificial Sequence: Synthetic oligonucleotide
  Antisense Strand to SEQ ID NO: 460355
uccuuuguagagcacgugg

SEQ ID NO: 460357 - RNA, 19 nt, Artificial Sequence
  Description of Artificial Sequence: Synthetic oligonucleotide
  Sense strand starting at position 2463 of SEQ ID NO: 317047
gcaguugauugaccugaga

SEQ ID NO: 460358 - RNA, 19 nt, Artificial Sequence
  Description of Artificial Sequence: Synthetic oligonucleotide
  Antisense Strand to SEQ ID NO: 460357
ucucaggucaaucaacugc

SEQ ID NO: 460359 - RNA, 19 nt, Artificial Sequence
  Description of Artificial Sequence: Synthetic oligonucleotide
  Sense strand starting at position 2465 of SEQ ID NO: 317047
aguugauugaccugagagc

SEQ ID NO: 460360 - RNA, 19 nt, Artificial Sequence
  Description of Artificial Sequence: Synthetic oligonucleotide
  Antisense Strand to SEQ ID NO: 460359
gcucucaggucaaucaacu

SEQ ID NO: 460361 - RNA, 19 nt, Artificial Sequence
  Description of Artificial Sequence: Synthetic oligonucleotide
  Sense strand starting at position 2466 of SEQ ID NO: 317047
guugauugaccugagagcu

SEQ ID NO: 460362 - RNA, 19 nt, Artificial Sequence
  Description of Artificial Sequence: Synthetic oligonucleotide
  Antisense Strand to SEQ ID NO: 460361
agcucucaggucaaucaac

SEQ ID NO: 460363 - RNA, 19 nt, Artificial Sequence
  Description of Artificial Sequence: Synthetic oligonucleotide
  Sense strand starting at position 3208 of SEQ ID NO: 317047
uccucuuuagagcauuagu

SEQ ID NO: 460364 - RNA, 19 nt, Artificial Sequence
  Description of Artificial Sequence: Synthetic oligonucleotide
  Antisense Strand to SEQ ID NO: 460363
acuaaugcucuaaagagga

SEQ ID NO: 460365 - RNA, 19 nt, Artificial Sequence
  Description of Artificial Sequence: Synthetic oligonucleotide
  Sense strand starting at position 3211 of SEQ ID NO: 317047
ucuuuagagcauuaguauu

SEQ ID NO: 460366 - RNA, 19 nt, Artificial Sequence
  Description of Artificial Sequence: Synthetic oligonucleotide
  Antisense Strand to SEQ ID NO: 460365
aauacuaaugcucuaaaga

SEQ ID NO: 460367 - RNA, 19 nt, Artificial Sequence
  Description of Artificial Sequence: Synthetic oligonucleotide
  Sense strand starting at position 3282 of SEQ ID NO: 317047
agaaguaugcagugaagaa

SEQ ID NO: 460368 - RNA, 19 nt, Artificial Sequence
  Description of Artificial Sequence: Synthetic oligonucleotide
  Antisense Strand to SEQ ID NO: 460367
uucuucacugcauacuucu

SEQ ID NO: 460369 - RNA, 19 nt, Artificial Sequence
  Description of Artificial Sequence: Synthetic oligonucleotide
  Sense strand starting at position 3474 of SEQ ID NO: 317047
gaugucguucucugaauuu

SEQ ID NO: 460370 - RNA, 19 nt, Artificial Sequence
  Description of Artificial Sequence: Synthetic oligonucleotide
  Antisense Strand to SEQ ID NO: 460369
aaauucagagaacgacauc

SEQ ID NO: 460371 - RNA, 19 nt, Artificial Sequence
  Description of Artificial Sequence: Synthetic oligonucleotide
  Sense strand starting at position 3595 of SEQ ID NO: 317047
gucaacacucuuggacaga

SEQ ID NO: 460372 - RNA, 19 nt, Artificial Sequence
  Description of Artificial Sequence: Synthetic oligonucleotide
  Antisense Strand to SEQ ID NO: 460371
ucuguccaagaguguugac

SEQ ID NO: 460373 - RNA, 19 nt, Artificial Sequence
  Description of Artificial Sequence: Synthetic oligonucleotide
  Sense strand starting at position 3636 of SEQ ID NO: 317047
gcuguaugggcucaacaca

SEQ ID NO: 460374 - RNA, 19 nt, Artificial Sequence
  Description of Artificial Sequence: Synthetic oligonucleotide
  Antisense Strand to SEQ ID NO: 460373
uguguugagcccauacagc

SEQ ID NO: 460375 - RNA, 19 nt, Artificial Sequence
  Description of Artificial Sequence: Synthetic oligonucleotide
  Sense strand starting at position 3776 of SEQ ID NO: 317047
cccauugagucauugggua

SEQ ID NO: 460376 - RNA, 19 nt, Artificial Sequence
  Description of Artificial Sequence: Synthetic oligonucleotide
  Antisense Strand to SEQ ID NO: 460375
uacccaaugacucaauggg

SEQ ID NO: 460377 - RNA, 19 nt, Artificial Sequence
  Description of Artificial Sequence: Synthetic oligonucleotide
  Sense strand starting at position 3780 of SEQ ID NO: 317047
uugagucauuggguaauca

SEQ ID NO: 460378 - RNA, 19 nt, Artificial Sequence
  Description of Artificial Sequence: Synthetic oligonucleotide
  Antisense Strand to SEQ ID NO: 460377
ugauuacccaaugacucaa

SEQ ID NO: 460379 - RNA, 19 nt, Artificial Sequence
  Description of Artificial Sequence: Synthetic oligonucleotide
  Sense strand starting at position 3781 of SEQ ID NO: 317047
ugagucauuggguaaucau

SEQ ID NO: 460380 - RNA, 19 nt, Artificial Sequence
  Description of Artificial Sequence: Synthetic oligonucleotide
  Antisense Strand to SEQ ID NO: 460379
augauuacccaaugacuca

SEQ ID NO: 460381 - RNA, 19 nt, Artificial Sequence
  Description of Artificial Sequence: Synthetic oligonucleotide
  Sense strand starting at position 3790 of SEQ ID NO: 317047
ggguaaucauucuccugaa

SEQ ID NO: 460382 - RNA, 19 nt, Artificial Sequence
  Description of Artificial Sequence: Synthetic oligonucleotide
  Antisense Strand to SEQ ID NO: 460381
uucaggagaaugauuaccc

SEQ ID NO: 460383 - RNA, 19 nt, Artificial Sequence
  Description of Artificial Sequence: Synthetic oligonucleotide
  Sense strand starting at position 3791 of SEQ ID NO: 317047
gguaaucauucuccugaaa

SEQ ID NO: 460384 - RNA, 19 nt, Artificial Sequence
  Description of Artificial Sequence: Synthetic oligonucleotide
  Antisense Strand to SEQ ID NO: 460383
uuucaggagaaugauuacc

SEQ ID NO: 460385 - RNA, 19 nt, Artificial Sequence
  Description of Artificial Sequence: Synthetic oligonucleotide
  Sense strand starting at position 3803 of SEQ ID NO: 317047
ccugaaaucucccuguguu

SEQ ID NO: 460386 - RNA, 19 nt, Artificial Sequence
  Description of Artificial Sequence: Synthetic oligonucleotide
  Antisense Strand to SEQ ID NO: 460385
aacacagggagauuucagg

SEQ ID NO: 460387 - RNA, 19 nt, Artificial Sequence
  Description of Artificial Sequence: Synthetic oligonucleotide
  Sense strand starting at position 3804 of SEQ ID NO: 317047
cugaaaucucccuguguua

SEQ ID NO: 460388 - RNA, 19 nt, Artificial Sequence
  Description of Artificial Sequence: Synthetic oligonucleotide
  Antisense Strand to SEQ ID NO: 460387
uaacacagggagauuucag

SEQ ID NO: 460389 - RNA, 19 nt, Artificial Sequence
  Description of Artificial Sequence: Synthetic oligonucleotide
  Sense strand starting at position 3806 of SEQ ID NO: 317047
gaaaucucccuguguuaug

SEQ ID NO: 460390 - RNA, 19 nt, Artificial Sequence
  Description of Artificial Sequence: Synthetic oligonucleotide
  Antisense Strand to SEQ ID NO: 460389
cauaacacagggagauuuc

SEQ ID NO: 460391 - RNA, 19 nt, Artificial Sequence
  Description of Artificial Sequence: Synthetic oligonucleotide
  Sense strand starting at position 3815 of SEQ ID NO: 317047
cuguguuaugcacauuaaa

SEQ ID NO: 460392 - RNA, 19 nt, Artificial Sequence
  Description of Artificial Sequence: Synthetic oligonucleotide
  Antisense Strand to SEQ ID NO: 460391
uuuaaugugcauaacacag

SEQ ID NO: 460393 - RNA, 19 nt, Artificial Sequence
  Description of Artificial Sequence: Synthetic oligonucleotide
  Sense strand starting at position 3855 of SEQ ID NO: 317047
uccuauuagucugccauuu

SEQ ID NO: 460394 - RNA, 19 nt, Artificial Sequence
  Description of Artificial Sequence: Synthetic oligonucleotide
  Antisense Strand to SEQ ID NO: 460393
aaauggcagacuaauagga

SEQ ID NO: 460395 - RNA, 19 nt, Artificial Sequence
  Description of Artificial Sequence: Synthetic oligonucleotide
  Sense strand starting at position 3909 of SEQ ID NO: 317047
agggaaagcuucccuguau

SEQ ID NO: 460396 - RNA, 19 nt, Artificial Sequence
  Description of Artificial Sequence: Synthetic oligonucleotide
  Antisense Strand to SEQ ID NO: 460395
auacagggaagcuuucccu

SEQ ID NO: 460397 - RNA, 19 nt, Artificial Sequence
  Description of Artificial Sequence: Synthetic oligonucleotide
  Sense strand starting at position 3910 of SEQ ID NO: 317047
gggaaagcuucccuguauu

SEQ ID NO: 460398 - RNA, 19 nt, Artificial Sequence
  Description of Artificial Sequence: Synthetic oligonucleotide
  Antisense Strand to SEQ ID NO: 460397
aauacagggaagcuuuccc

SEQ ID NO: 460399 - RNA, 19 nt, Artificial Sequence
  Description of Artificial Sequence: Synthetic oligonucleotide
  Sense strand starting at position 128 of SEQ ID NO: 317048
uugugaaaugugcaaauag

SEQ ID NO: 460400 - RNA, 19 nt, Artificial Sequence
  Description of Artificial Sequence: Synthetic oligonucleotide
  Antisense Strand to SEQ ID NO: 460399
cuauuugcacauuucacaa

SEQ ID NO: 460401 - RNA, 19 nt, Artificial Sequence
  Description of Artificial Sequence: Synthetic oligonucleotide
  Sense strand starting at position 183 of SEQ ID NO: 317048
gauguuuaacgaugacugu

SEQ ID NO: 460402 - RNA, 19 nt, Artificial Sequence
  Description of Artificial Sequence: Synthetic oligonucleotide
  Antisense Strand to SEQ ID NO: 460401
acagucaucguuaaacauc

SEQ ID NO: 460403 - RNA, 19 nt, Artificial Sequence
  Description of Artificial Sequence: Synthetic oligonucleotide
  Sense strand starting at position 190 of SEQ ID NO: 317048
aacgaugacuguuucugaa

SEQ ID NO: 460404 - RNA, 19 nt, Artificial Sequence
  Description of Artificial Sequence: Synthetic oligonucleotide
  Antisense Strand to SEQ ID NO: 460403
uucagaaacagucaucguu

SEQ ID NO: 460405 - RNA, 19 nt, Artificial Sequence
  Description of Artificial Sequence: Synthetic oligonucleotide
  Sense strand starting at position 192 of SEQ ID NO: 317048
cgaugacuguuucugaauu

SEQ ID NO: 460406 - RNA, 19 nt, Artificial Sequence
  Description of Artificial Sequence: Synthetic oligonucleotide
  Antisense Strand to SEQ ID NO: 460405
aauucagaaacagucaucg

SEQ ID NO: 460407 - RNA, 19 nt, Artificial Sequence
  Description of Artificial Sequence: Synthetic oligonucleotide
  Sense strand starting at position 401 of SEQ ID NO: 317048
ggguuuguaaauuacgguu

SEQ ID NO: 460408 - RNA, 19 nt, Artificial Sequence
  Description of Artificial Sequence: Synthetic oligonucleotide
  Antisense Strand to SEQ ID NO: 460407
aaccguaauuuacaaaccc

SEQ ID NO: 460409 - RNA, 19 nt, Artificial Sequence
  Description of Artificial Sequence: Synthetic oligonucleotide
  Sense strand starting at position 529 of SEQ ID NO: 317048
ccuauagauguuuauugua

SEQ ID NO: 460410 - RNA, 19 nt, Artificial Sequence
  Description of Artificial Sequence: Synthetic oligonucleotide
  Antisense Strand to SEQ ID NO: 460409
uacaauaaacaucuauagg

SEQ ID NO: 460411 - RNA, 19 nt, Artificial Sequence
  Description of Artificial Sequence: Synthetic oligonucleotide
  Sense strand starting at position 820 of SEQ ID NO: 317048
ccuagcgguccagaguaaa

SEQ ID NO: 460412 - RNA, 19 nt, Artificial Sequence
  Description of Artificial Sequence: Synthetic oligonucleotide
  Antisense Strand to SEQ ID NO: 460411
uuuacucuggaccgcuagg

SEQ ID NO: 460413 - RNA, 19 nt, Artificial Sequence
  Description of Artificial Sequence: Synthetic oligonucleotide
  Sense strand starting at position 996 of SEQ ID NO: 317048
gucaucugcgaacagaagu

SEQ ID NO: 460414 - RNA, 19 nt, Artificial Sequence
  Description of Artificial Sequence: Synthetic oligonucleotide
  Antisense Strand to SEQ ID NO: 460413
acuucuguucgcagaugac

SEQ ID NO: 460415 - RNA, 19 nt, Artificial Sequence
  Description of Artificial Sequence: Synthetic oligonucleotide
  Sense strand starting at position 1070 of SEQ ID NO: 317048
gcaacauaugucuacagca

SEQ ID NO: 460416 - RNA, 19 nt, Artificial Sequence
  Description of Artificial Sequence: Synthetic oligonucleotide
  Antisense Strand to SEQ ID NO: 460415
ugcuguagacauauguugc

SEQ ID NO: 460417 - RNA, 19 nt, Artificial Sequence
  Description of Artificial Sequence: Synthetic oligonucleotide
  Sense strand starting at position 1085 of SEQ ID NO: 317048
agcaauauaccugacaagu

SEQ ID NO: 460418 - RNA, 19 nt, Artificial Sequence
  Description of Artificial Sequence: Synthetic oligonucleotide
  Antisense Strand to SEQ ID NO: 460417
acuugucagguauauugcu

SEQ ID NO: 460419 - RNA, 19 nt, Artificial Sequence
  Description of Artificial Sequence: Synthetic oligonucleotide
  Sense strand starting at position 1105 of SEQ ID NO: 317048
guccuuguuguggaacauu

SEQ ID NO: 460420 - RNA, 19 nt, Artificial Sequence
  Description of Artificial Sequence: Synthetic oligonucleotide
  Antisense Strand to SEQ ID NO: 460419
aauguuccacaacaaggac

SEQ ID NO: 460421 - RNA, 19 nt, Artificial Sequence
  Description of Artificial Sequence: Synthetic oligonucleotide
  Sense strand starting at position 1108 of SEQ ID NO: 317048
cuuguuguggaacauuaaa

SEQ ID NO: 460422 - RNA, 19 nt, Artificial Sequence
  Description of Artificial Sequence: Synthetic oligonucleotide
  Antisense Strand to SEQ ID NO: 460421
uuuaauguuccacaacaag

SEQ ID NO: 460423 - RNA, 19 nt, Artificial Sequence
  Description of Artificial Sequence: Synthetic oligonucleotide
  Sense strand starting at position 1126 of SEQ ID NO: 317048
auagacacguguccugaau

SEQ ID NO: 460424 - RNA, 19 nt, Artificial Sequence
  Description of Artificial Sequence: Synthetic oligonucleotide
  Antisense Strand to SEQ ID NO: 460423
auucaggacacgugucuau

SEQ ID NO: 460425 - RNA, 19 nt, Artificial Sequence
  Description of Artificial Sequence: Synthetic oligonucleotide
  Sense strand starting at position 1135 of SEQ ID NO: 317048
uguccugaaucaucaggga

SEQ ID NO: 460426 - RNA, 19 nt, Artificial Sequence
  Description of Artificial Sequence: Synthetic oligonucleotide
  Antisense Strand to SEQ ID NO: 460425
ucccugaugauucaggaca

SEQ ID NO: 460427 - RNA, 19 nt, Artificial Sequence
  Description of Artificial Sequence: Synthetic oligonucleotide
  Sense strand starting at position 1340 of SEQ ID NO: 317048
auacauaacucugcugguu

SEQ ID NO: 460428 - RNA, 19 nt, Artificial Sequence
  Description of Artificial Sequence: Synthetic oligonucleotide
  Antisense Strand to SEQ ID NO: 460427
aaccagcagaguuauguau

SEQ ID NO: 460429 - RNA, 19 nt, Artificial Sequence
  Description of Artificial Sequence: Synthetic oligonucleotide
  Sense strand starting at position 1405 of SEQ ID NO: 317048
ucuuguaaaugucugaauu

SEQ ID NO: 460430 - RNA, 19 nt, Artificial Sequence
  Description of Artificial Sequence: Synthetic oligonucleotide
  Antisense Strand to SEQ ID NO: 460429
aauucagacauuuacaaga

SEQ ID NO: 460431 - RNA, 19 nt, Artificial Sequence
  Description of Artificial Sequence: Synthetic oligonucleotide
  Sense strand starting at position 1406 of SEQ ID NO: 317048
cuuguaaaugucugaauug

SEQ ID NO: 460432 - RNA, 19 nt, Artificial Sequence
  Description of Artificial Sequence: Synthetic oligonucleotide
  Antisense Strand to SEQ ID NO: 460431
caauucagacauuuacaag

SEQ ID NO: 460433 - RNA, 19 nt, Artificial Sequence
  Description of Artificial Sequence: Synthetic oligonucleotide
  Sense strand starting at position 1568 of SEQ ID NO: 317048
caacucuguggcuaguaau

SEQ ID NO: 460434 - RNA, 19 nt, Artificial Sequence
  Description of Artificial Sequence: Synthetic oligonucleotide
  Antisense Strand to SEQ ID NO: 460433
auuacuagccacagaguug

SEQ ID NO: 460435 - RNA, 19 nt, Artificial Sequence
  Description of Artificial Sequence: Synthetic oligonucleotide
  Sense strand starting at position 1668 of SEQ ID NO: 317048
gcaauaaugucaguccaaa

SEQ ID NO: 460436 - RNA, 19 nt, Artificial Sequence
  Description of Artificial Sequence: Synthetic oligonucleotide
  Antisense Strand to SEQ ID NO: 460435
uuuggacugacauuauugc

SEQ ID NO: 460437 - RNA, 19 nt, Artificial Sequence
  Description of Artificial Sequence: Synthetic oligonucleotide
  Sense strand starting at position 2036 of SEQ ID NO: 317048
caauauugacuuuggguuu

SEQ ID NO: 460438 - RNA, 19 nt, Artificial Sequence
  Description of Artificial Sequence: Synthetic oligonucleotide
  Antisense Strand to SEQ ID NO: 460437
aaacccaaagucaauauug

SEQ ID NO: 460439 - RNA, 19 nt, Artificial Sequence
  Description of Artificial Sequence: Synthetic oligonucleotide
  Sense strand starting at position 2108 of SEQ ID NO: 317048
ccguguucagcuguuaagu

SEQ ID NO: 460440 - RNA, 19 nt, Artificial Sequence
  Description of Artificial Sequence: Synthetic oligonucleotide
  Antisense Strand to SEQ ID NO: 460439
acuuaacagcugaacacgg

SEQ ID NO: 460441 - RNA, 19 nt, Artificial Sequence
  Description of Artificial Sequence: Synthetic oligonucleotide
  Sense strand starting at position 2109 of SEQ ID NO: 317048
cguguucagcuguuaagua

SEQ ID NO: 460442 - RNA, 19 nt, Artificial Sequence
  Description of Artificial Sequence: Synthetic oligonucleotide
  Antisense Strand to SEQ ID NO: 460441
uacuuaacagcugaacacg

SEQ ID NO: 460443 - RNA, 19 nt, Artificial Sequence
  Description of Artificial Sequence: Synthetic oligonucleotide
  Sense strand starting at position 2144 of SEQ ID NO: 317048
gagugaugucagcaagaau

SEQ ID NO: 460444 - RNA, 19 nt, Artificial Sequence
  Description of Artificial Sequence: Synthetic oligonucleotide
  Antisense Strand to SEQ ID NO: 460443
auucuugcugacaucacuc

SEQ ID NO: 460445 - RNA, 19 nt, Artificial Sequence
  Description of Artificial Sequence: Synthetic oligonucleotide
  Sense strand starting at position 2164 of SEQ ID NO: 317048
ggaauaggaguuugucaga

SEQ ID NO: 460446 - RNA, 19 nt, Artificial Sequence
  Description of Artificial Sequence: Synthetic oligonucleotide
  Antisense Strand to SEQ ID NO: 460445
ucugacaaacuccuauucc

SEQ ID NO: 460447 - RNA, 19 nt, Artificial Sequence
  Description of Artificial Sequence: Synthetic oligonucleotide
  Sense strand starting at position 2291 of SEQ ID NO: 317048
cugguugcagcacagaaau

SEQ ID NO: 460448 - RNA, 19 nt, Artificial Sequence
  Description of Artificial Sequence: Synthetic oligonucleotide
  Antisense Strand to SEQ ID NO: 460447
auuucugugcugcaaccag

SEQ ID NO: 460449 - RNA, 19 nt, Artificial Sequence
  Description of Artificial Sequence: Synthetic oligonucleotide
  Sense strand starting at position 2293 of SEQ ID NO: 317048
gguugcagcacagaaauaa

SEQ ID NO: 460450 - RNA, 19 nt, Artificial Sequence
  Description of Artificial Sequence: Synthetic oligonucleotide
  Antisense Strand to SEQ ID NO: 460449
uuauuucugugcugcaacc

SEQ ID NO: 460451 - RNA, 19 nt, Artificial Sequence
  Description of Artificial Sequence: Synthetic oligonucleotide
  Sense strand starting at position 2421 of SEQ ID NO: 317048
agggacaguuaagauagaa

SEQ ID NO: 460452 - RNA, 19 nt, Artificial Sequence
  Description of Artificial Sequence: Synthetic oligonucleotide
  Antisense Strand to SEQ ID NO: 460451
uucuaucuuaacugucccu

SEQ ID NO: 460453 - RNA, 19 nt, Artificial Sequence
  Description of Artificial Sequence: Synthetic oligonucleotide
  Sense strand starting at position 2741 of SEQ ID NO: 317048
caggucagccuccagagau

SEQ ID NO: 460454 - RNA, 19 nt, Artificial Sequence
  Description of Artificial Sequence: Synthetic oligonucleotide
  Antisense Strand to SEQ ID NO: 460453
aucucuggaggcugaccug

SEQ ID NO: 460455 - RNA, 19 nt, Artificial Sequence
  Description of Artificial Sequence: Synthetic oligonucleotide
  Sense strand starting at position 2751 of SEQ ID NO: 317048
uccagagaucuuggcucca

SEQ ID NO: 460456 - RNA, 19 nt, Artificial Sequence
  Description of Artificial Sequence: Synthetic oligonucleotide
  Antisense Strand to SEQ ID NO: 460455
uggagccaagaucucugga

SEQ ID NO: 460457 - RNA, 19 nt, Artificial Sequence
  Description of Artificial Sequence: Synthetic oligonucleotide
  Sense strand starting at position 2753 of SEQ ID NO: 317048
cagagaucuuggcuccaug

SEQ ID NO: 460458 - RNA, 19 nt, Artificial Sequence
  Description of Artificial Sequence: Synthetic oligonucleotide
  Antisense Strand to SEQ ID NO: 460457
cauggagccaagaucucug

SEQ ID NO: 460459 - RNA, 19 nt, Artificial Sequence
  Description of Artificial Sequence: Synthetic oligonucleotide
  Sense strand starting at position 2968 of SEQ ID NO: 317048
aguccuugugcacagaaua

SEQ ID NO: 460460 - RNA, 19 nt, Artificial Sequence
  Description of Artificial Sequence: Synthetic oligonucleotide
  Antisense Strand to SEQ ID NO: 460459
uauucugugcacaaggacu

SEQ ID NO: 460461 - RNA, 19 nt, Artificial Sequence
  Description of Artificial Sequence: Synthetic oligonucleotide
  Sense strand starting at position 3043 of SEQ ID NO: 317048
cagaaauccugugcauaga

SEQ ID NO: 460462 - RNA, 19 nt, Artificial Sequence
  Description of Artificial Sequence: Synthetic oligonucleotide
  Antisense Strand to SEQ ID NO: 460461
ucuaugcacaggauuucug

SEQ ID NO: 460463 - RNA, 19 nt, Artificial Sequence
  Description of Artificial Sequence: Synthetic oligonucleotide
  Sense strand starting at position 3090 of SEQ ID NO: 317048
uggucaaucugacuaguga

SEQ ID NO: 460464 - RNA, 19 nt, Artificial Sequence
  Description of Artificial Sequence: Synthetic oligonucleotide
  Antisense Strand to SEQ ID NO: 460463
ucacuagucagauugacca

SEQ ID NO: 460465 - RNA, 19 nt, Artificial Sequence
  Description of Artificial Sequence: Synthetic oligonucleotide
  Sense strand starting at position 3123 of SEQ ID NO: 317048
ugaagcuaguauguaaaga

SEQ ID NO: 460466 - RNA, 19 nt, Artificial Sequence
  Description of Artificial Sequence: Synthetic oligonucleotide
  Antisense Strand to SEQ ID NO: 460465
ucuuuacauacuagcuuca

SEQ ID NO: 460467 - RNA, 19 nt, Artificial Sequence
  Description of Artificial Sequence: Synthetic oligonucleotide
  Sense strand starting at position 3131 of SEQ ID NO: 317048
guauguaaagacugaaaua

SEQ ID NO: 460468 - RNA, 19 nt, Artificial Sequence
  Description of Artificial Sequence: Synthetic oligonucleotide
  Antisense Strand to SEQ ID NO: 460467
uauuucagucuuuacauac

SEQ ID NO: 460469 - RNA, 19 nt, Artificial Sequence
  Description of Artificial Sequence: Synthetic oligonucleotide
  Sense strand starting at position 3168 of SEQ ID NO: 317048
aggccacacugaucacaaa

SEQ ID NO: 460470 - RNA, 19 nt, Artificial Sequence
  Description of Artificial Sequence: Synthetic oligonucleotide
  Antisense Strand to SEQ ID NO: 460469
uuugugaucaguguggccu

SEQ ID NO: 460471 - RNA, 19 nt, Artificial Sequence
  Description of Artificial Sequence: Synthetic oligonucleotide
  Sense strand starting at position 3252 of SEQ ID NO: 317048
uggagaucuuuacugcaug

SEQ ID NO: 460472 - RNA, 19 nt, Artificial Sequence
  Description of Artificial Sequence: Synthetic oligonucleotide
  Antisense Strand to SEQ ID NO: 460471
caugcaguaaagaucucca

SEQ ID NO: 460473 - RNA, 19 nt, Artificial Sequence
  Description of Artificial Sequence: Synthetic oligonucleotide
  Sense strand starting at position 3255 of SEQ ID NO: 317048
agaucuuuacugcaugaca

SEQ ID NO: 460474 - RNA, 19 nt, Artificial Sequence
  Description of Artificial Sequence: Synthetic oligonucleotide
  Antisense Strand to SEQ ID NO: 460473
ugucaugcaguaaagaucu

SEQ ID NO: 460475 - RNA, 19 nt, Artificial Sequence
  Description of Artificial Sequence: Synthetic oligonucleotide
  Sense strand starting at position 3257 of SEQ ID NO: 317048
aucuuuacugcaugacaag

SEQ ID NO: 460476 - RNA, 19 nt, Artificial Sequence
  Description of Artificial Sequence: Synthetic oligonucleotide
  Antisense Strand to SEQ ID NO: 460475
cuugucaugcaguaaagau

SEQ ID NO: 460477 - RNA, 19 nt, Artificial Sequence
  Description of Artificial Sequence: Synthetic oligonucleotide
  Sense strand starting at position 3258 of SEQ ID NO: 317048
ucuuuacugcaugacaaga

SEQ ID NO: 460478 - RNA, 19 nt, Artificial Sequence
  Description of Artificial Sequence: Synthetic oligonucleotide
  Antisense Strand to SEQ ID NO: 460477
ucuugucaugcaguaaaga

SEQ ID NO: 460479 - RNA, 19 nt, Artificial Sequence
  Description of Artificial Sequence: Synthetic oligonucleotide
  Sense strand starting at position 47 of SEQ ID NO: 317049
caguguaaggcauauuauu

SEQ ID NO: 460480 - RNA, 19 nt, Artificial Sequence
  Description of Artificial Sequence: Synthetic oligonucleotide
  Antisense Strand to SEQ ID NO: 460479
aauaauaugccuuacacug

SEQ ID NO: 460481 - RNA, 19 nt, Artificial Sequence
  Description of Artificial Sequence: Synthetic oligonucleotide
  Sense strand starting at position 755 of SEQ ID NO: 317049
ccgcauuggccagaagacu

SEQ ID NO: 460482 - RNA, 19 nt, Artificial Sequence
  Description of Artificial Sequence: Synthetic oligonucleotide
  Antisense Strand to SEQ ID NO: 460481
agucuucuggccaaugcgg

SEQ ID NO: 460483 - RNA, 19 nt, Artificial Sequence
  Description of Artificial Sequence: Synthetic oligonucleotide
  Sense strand starting at position 838 of SEQ ID NO: 317049
uugaccucacauggauuaa

SEQ ID NO: 460484 - RNA, 19 nt, Artificial Sequence
  Description of Artificial Sequence: Synthetic oligonucleotide
  Antisense Strand to SEQ ID NO: 460483
uuaauccaugugaggucaa

SEQ ID NO: 460485 - RNA, 19 nt, Artificial Sequence
  Description of Artificial Sequence: Synthetic oligonucleotide
  Sense strand starting at position 945 of SEQ ID NO: 317049
guuaccauguuucuaaaga

SEQ ID NO: 460486 - RNA, 19 nt, Artificial Sequence
  Description of Artificial Sequence: Synthetic oligonucleotide
  Antisense Strand to SEQ ID NO: 460485
ucuuuagaaacaugguaac

SEQ ID NO: 460487 - RNA, 19 nt, Artificial Sequence
  Description of Artificial Sequence: Synthetic oligonucleotide
  Sense strand starting at position 956 of SEQ ID NO: 317049
ucuaaagaggcauggguua

SEQ ID NO: 460488 - RNA, 19 nt, Artificial Sequence
  Description of Artificial Sequence: Synthetic oligonucleotide
  Antisense Strand to SEQ ID NO: 460487
uaacccaugccucuuuaga

SEQ ID NO: 460489 - RNA, 19 nt, Artificial Sequence
  Description of Artificial Sequence: Synthetic oligonucleotide
  Sense strand starting at position 958 of SEQ ID NO: 317049
uaaagaggcauggguuaga

SEQ ID NO: 460490 - RNA, 19 nt, Artificial Sequence
  Description of Artificial Sequence: Synthetic oligonucleotide
  Antisense Strand to SEQ ID NO: 460489
ucuaacccaugccucuuua

SEQ ID NO: 460491 - RNA, 19 nt, Artificial Sequence
  Description of Artificial Sequence: Synthetic oligonucleotide
  Sense strand starting at position 968 of SEQ ID NO: 317049
uggguuagaaaucaucgua

SEQ ID NO: 460492 - RNA, 19 nt, Artificial Sequence
  Description of Artificial Sequence: Synthetic oligonucleotide
  Antisense Strand to SEQ ID NO: 460491
uacgaugauuucuaaccca

SEQ ID NO: 460493 - RNA, 19 nt, Artificial Sequence
  Description of Artificial Sequence: Synthetic oligonucleotide
  Sense strand starting at position 971 of SEQ ID NO: 317049
guuagaaaucaucguaaau

SEQ ID NO: 460494 - RNA, 19 nt, Artificial Sequence
  Description of Artificial Sequence: Synthetic oligonucleotide
  Antisense Strand to SEQ ID NO: 460493
auuuacgaugauuucuaac

SEQ ID NO: 460495 - RNA, 19 nt, Artificial Sequence
  Description of Artificial Sequence: Synthetic oligonucleotide
  Sense strand starting at position 983 of SEQ ID NO: 317049
cguaaauugcuacaauaaa

SEQ ID NO: 460496 - RNA, 19 nt, Artificial Sequence
  Description of Artificial Sequence: Synthetic oligonucleotide
  Antisense Strand to SEQ ID NO: 460495
uuuauuguagcaauuuacg

SEQ ID NO: 460497 - RNA, 19 nt, Artificial Sequence
  Description of Artificial Sequence: Synthetic oligonucleotide
  Sense strand starting at position 1015 of SEQ ID NO: 317049
uguuaucacuuacuggaaa

SEQ ID NO: 460498 - RNA, 19 nt, Artificial Sequence
  Description of Artificial Sequence: Synthetic oligonucleotide
  Antisense Strand to SEQ ID NO: 460497
uuuccaguaagugauaaca

SEQ ID NO: 460499 - RNA, 19 nt, Artificial Sequence
  Description of Artificial Sequence: Synthetic oligonucleotide
  Sense strand starting at position 1034 of SEQ ID NO: 317049
aaaguauuguggguacaug

SEQ ID NO: 460500 - RNA, 19 nt, Artificial Sequence
  Description of Artificial Sequence: Synthetic oligonucleotide
  Antisense Strand to SEQ ID NO: 460499
cauguacccacaauacuuu

SEQ ID NO: 460501 - RNA, 19 nt, Artificial Sequence
  Description of Artificial Sequence: Synthetic oligonucleotide
  Sense strand starting at position 1035 of SEQ ID NO: 317049
aaguauuguggguacaugu

SEQ ID NO: 460502 - RNA, 19 nt, Artificial Sequence
  Description of Artificial Sequence: Synthetic oligonucleotide
  Antisense Strand to SEQ ID NO: 460501
acauguacccacaauacuu

SEQ ID NO: 460503 - RNA, 19 nt, Artificial Sequence
  Description of Artificial Sequence: Synthetic oligonucleotide
  Sense strand starting at position 1061 of SEQ ID NO: 317049
accaaauucugacaggaaa

SEQ ID NO: 460504 - RNA, 19 nt, Artificial Sequence
  Description of Artificial Sequence: Synthetic oligonucleotide
  Antisense Strand to SEQ ID NO: 460503
uuuccugucagaauuuggu

SEQ ID NO: 460505 - RNA, 19 nt, Artificial Sequence
  Description of Artificial Sequence: Synthetic oligonucleotide
  Sense strand starting at position 1405 of SEQ ID NO: 317049
ucacauccgccaugaugaa

SEQ ID NO: 460506 - RNA, 19 nt, Artificial Sequence
  Description of Artificial Sequence: Synthetic oligonucleotide
  Antisense Strand to SEQ ID NO: 460505
uucaucauggcggauguga

SEQ ID NO: 460507 - RNA, 19 nt, Artificial Sequence
  Description of Artificial Sequence: Synthetic oligonucleotide
  Sense strand starting at position 1428 of SEQ ID NO: 317049
cuucucucgcaggaucaau

SEQ ID NO: 460508 - RNA, 19 nt, Artificial Sequence
  Description of Artificial Sequence: Synthetic oligonucleotide
  Antisense Strand to SEQ ID NO: 460507
auugauccugcgagagaag

SEQ ID NO: 460509 - RNA, 19 nt, Artificial Sequence
  Description of Artificial Sequence: Synthetic oligonucleotide
  Sense strand starting at position 1460 of SEQ ID NO: 317049
agagaaacucccggugacu

SEQ ID NO: 460510 - RNA, 19 nt, Artificial Sequence
  Description of Artificial Sequence: Synthetic oligonucleotide
  Antisense Strand to SEQ ID NO: 460509
agucaccgggaguuucucu

SEQ ID NO: 460511 - RNA, 19 nt, Artificial Sequence
  Description of Artificial Sequence: Synthetic oligonucleotide
  Sense strand starting at position 1512 of SEQ ID NO: 317049
acaacuuaauacgcgagau

SEQ ID NO: 460512 - RNA, 19 nt, Artificial Sequence
  Description of Artificial Sequence: Synthetic oligonucleotide
  Antisense Strand to SEQ ID NO: 460511
aucucgcguauuaaguugu

SEQ ID NO: 460513 - RNA, 19 nt, Artificial Sequence
  Description of Artificial Sequence: Synthetic oligonucleotide
  Sense strand starting at position 1514 of SEQ ID NO: 317049
aacuuaauacgcgagauca

SEQ ID NO: 460514 - RNA, 19 nt, Artificial Sequence
  Description of Artificial Sequence: Synthetic oligonucleotide
  Antisense Strand to SEQ ID NO: 460513
ugaucucgcguauuaaguu

SEQ ID NO: 460515 - RNA, 19 nt, Artificial Sequence
  Description of Artificial Sequence: Synthetic oligonucleotide
  Sense strand starting at position 1526 of SEQ ID NO: 317049
gagaucagcccuggucaga

SEQ ID NO: 460516 - RNA, 19 nt, Artificial Sequence
  Description of Artificial Sequence: Synthetic oligonucleotide
  Antisense Strand to SEQ ID NO: 460515
ucugaccagggcugaucuc

SEQ ID NO: 460517 - RNA, 19 nt, Artificial Sequence
  Description of Artificial Sequence: Synthetic oligonucleotide
  Sense strand starting at position 2164 of SEQ ID NO: 317049
agacauucuugugcagaga

SEQ ID NO: 460518 - RNA, 19 nt, Artificial Sequence
  Description of Artificial Sequence: Synthetic oligonucleotide
  Antisense Strand to SEQ ID NO: 460517
ucucugcacaagaaugucu

SEQ ID NO: 460519 - RNA, 19 nt, Artificial Sequence
  Description of Artificial Sequence: Synthetic oligonucleotide
  Sense strand starting at position 2165 of SEQ ID NO: 317049
gacauucuugugcagagag

SEQ ID NO: 460520 - RNA, 19 nt, Artificial Sequence
  Description of Artificial Sequence: Synthetic oligonucleotide
  Antisense Strand to SEQ ID NO: 460519
cucucugcacaagaauguc

SEQ ID NO: 460521 - RNA, 19 nt, Artificial Sequence
  Description of Artificial Sequence: Synthetic oligonucleotide
  Sense strand starting at position 2208 of SEQ ID NO: 317049
cagggucuguuaucuuaaa

SEQ ID NO: 460522 - RNA, 19 nt, Artificial Sequence
  Description of Artificial Sequence: Synthetic oligonucleotide
  Antisense Strand to SEQ ID NO: 460521
uuuaagauaacagacccug

SEQ ID NO: 460523 - RNA, 19 nt, Artificial Sequence
  Description of Artificial Sequence: Synthetic oligonucleotide
  Sense strand starting at position 2359 of SEQ ID NO: 317049
augggugcucuuuacugaa

SEQ ID NO: 460524 - RNA, 19 nt, Artificial Sequence
  Description of Artificial Sequence: Synthetic oligonucleotide
  Antisense Strand to SEQ ID NO: 460523
uucaguaaagagcacccau

SEQ ID NO: 460525 - RNA, 19 nt, Artificial Sequence
  Description of Artificial Sequence: Synthetic oligonucleotide
  Sense strand starting at position 2683 of SEQ ID NO: 317049
uuaagaauuauccgaacgu

SEQ ID NO: 460526 - RNA, 19 nt, Artificial Sequence
  Description of Artificial Sequence: Synthetic oligonucleotide
  Antisense Strand to SEQ ID NO: 460525
acguucggauaauucuuaa

SEQ ID NO: 460527 - RNA, 19 nt, Artificial Sequence
  Description of Artificial Sequence: Synthetic oligonucleotide
  Sense strand starting at position 2958 of SEQ ID NO: 317049
cagaguucuguugauucua

SEQ ID NO: 460528 - RNA, 19 nt, Artificial Sequence
  Description of Artificial Sequence: Synthetic oligonucleotide
  Antisense Strand to SEQ ID NO: 460527
uagaaucaacagaacucug

SEQ ID NO: 460529 - RNA, 19 nt, Artificial Sequence
  Description of Artificial Sequence: Synthetic oligonucleotide
  Sense strand starting at position 2966 of SEQ ID NO: 317049
uguugauucuaccuccuau

SEQ ID NO: 460530 - RNA, 19 nt, Artificial Sequence
  Description of Artificial Sequence: Synthetic oligonucleotide
  Antisense Strand to SEQ ID NO: 460529
auaggagguagaaucaaca

SEQ ID NO: 460531 - RNA, 19 nt, Artificial Sequence
  Description of Artificial Sequence: Synthetic oligonucleotide
  Sense strand starting at position 3161 of SEQ ID NO: 317049
caaguuuauugacuuagga

SEQ ID NO: 460532 - RNA, 19 nt, Artificial Sequence
  Description of Artificial Sequence: Synthetic oligonucleotide
  Antisense Strand to SEQ ID NO: 460531
uccuaagucaauaaacuug

SEQ ID NO: 460533 - RNA, 19 nt, Artificial Sequence
  Description of Artificial Sequence: Synthetic oligonucleotide
  Sense strand starting at position 3192 of SEQ ID NO: 317049
ucagcaucaugguuuauau

SEQ ID NO: 460534 - RNA, 19 nt, Artificial Sequence
  Description of Artificial Sequence: Synthetic oligonucleotide
  Antisense Strand to SEQ ID NO: 460533
auauaaaccaugaugcuga

SEQ ID NO: 460535 - RNA, 19 nt, Artificial Sequence
  Description of Artificial Sequence: Synthetic oligonucleotide
  Sense strand starting at position 3194 of SEQ ID NO: 317049
agcaucaugguuuauauau

SEQ ID NO: 460536 - RNA, 19 nt, Artificial Sequence
  Description of Artificial Sequence: Synthetic oligonucleotide
  Antisense Strand to SEQ ID NO: 460535
auauauaaaccaugaugcu

SEQ ID NO: 460537 - RNA, 19 nt, Artificial Sequence
  Description of Artificial Sequence: Synthetic oligonucleotide
  Sense strand starting at position 3332 of SEQ ID NO: 317049
cacguucugccugagauau

SEQ ID NO: 460538 - RNA, 19 nt, Artificial Sequence
  Description of Artificial Sequence: Synthetic oligonucleotide
  Antisense Strand to SEQ ID NO: 460537
auaucucaggcagaacgug

SEQ ID NO: 460539 - RNA, 19 nt, Artificial Sequence
  Description of Artificial Sequence: Synthetic oligonucleotide
  Sense strand starting at position 3441 of SEQ ID NO: 317049
uaguuuaggucuucuagau

SEQ ID NO: 460540 - RNA, 19 nt, Artificial Sequence
  Description of Artificial Sequence: Synthetic oligonucleotide
  Antisense Strand to SEQ ID NO: 460539
aucuagaagaccuaaacua

SEQ ID NO: 460541 - RNA, 19 nt, Artificial Sequence
  Description of Artificial Sequence: Synthetic oligonucleotide
  Sense strand starting at position 3544 of SEQ ID NO: 317049
gauguaaacucuuuaaggu

SEQ ID NO: 460542 - RNA, 19 nt, Artificial Sequence
  Description of Artificial Sequence: Synthetic oligonucleotide
  Antisense Strand to SEQ ID NO: 460541
accuuaaagaguuuacauc

SEQ ID NO: 460543 - RNA, 19 nt, Artificial Sequence
  Description of Artificial Sequence: Synthetic oligonucleotide
  Sense strand starting at position 3545 of SEQ ID NO: 317049
auguaaacucuuuaagguu

SEQ ID NO: 460544 - RNA, 19 nt, Artificial Sequence
  Description of Artificial Sequence: Synthetic oligonucleotide
  Antisense Strand to SEQ ID NO: 460543
aaccuuaaagaguuuacau

SEQ ID NO: 460545 - RNA, 19 nt, Artificial Sequence
  Description of Artificial Sequence: Synthetic oligonucleotide
  Sense strand starting at position 3628 of SEQ ID NO: 317049
uugacauacuuguugaaua

SEQ ID NO: 460546 - RNA, 19 nt, Artificial Sequence
  Description of Artificial Sequence: Synthetic oligonucleotide
  Antisense Strand to SEQ ID NO: 460545
uauucaacaaguaugucaa

SEQ ID NO: 460547 - RNA, 19 nt, Artificial Sequence
  Description of Artificial Sequence: Synthetic oligonucleotide
  Sense strand starting at position 3630 of SEQ ID NO: 317049
gacauacuuguugaauagu

SEQ ID NO: 460548 - RNA, 19 nt, Artificial Sequence
  Description of Artificial Sequence: Synthetic oligonucleotide
  Antisense Strand to SEQ ID NO: 460547
acuauucaacaaguauguc

SEQ ID NO: 460549 - RNA, 19 nt, Artificial Sequence
  Description of Artificial Sequence: Synthetic oligonucleotide
  Sense strand starting at position 3633 of SEQ ID NO: 317049
auacuuguugaauaguuga

SEQ ID NO: 460550 - RNA, 19 nt, Artificial Sequence
  Description of Artificial Sequence: Synthetic oligonucleotide
  Antisense Strand to SEQ ID NO: 460549
ucaacuauucaacaaguau

SEQ ID NO: 460551 - RNA, 19 nt, Artificial Sequence
  Description of Artificial Sequence: Synthetic oligonucleotide
  Sense strand starting at position 3656 of SEQ ID NO: 317049
augaaagaguggccauauu

SEQ ID NO: 460552 - RNA, 19 nt, Artificial Sequence
  Description of Artificial Sequence: Synthetic oligonucleotide
  Antisense Strand to SEQ ID NO: 460551
aauauggccacucuuucau

SEQ ID NO: 460553 - RNA, 19 nt, Artificial Sequence
  Description of Artificial Sequence: Synthetic oligonucleotide
  Sense strand starting at position 3663 of SEQ ID NO: 317049
aguggccauauugaguaua

SEQ ID NO: 460554 - RNA, 19 nt, Artificial Sequence
  Description of Artificial Sequence: Synthetic oligonucleotide
  Antisense Strand to SEQ ID NO: 460553
uauacucaauauggccacu

SEQ ID NO: 460555 - RNA, 19 nt, Artificial Sequence
  Description of Artificial Sequence: Synthetic oligonucleotide
  Sense strand starting at position 3665 of SEQ ID NO: 317049
uggccauauugaguauaaa

SEQ ID NO: 460556 - RNA, 19 nt, Artificial Sequence
  Description of Artificial Sequence: Synthetic oligonucleotide
  Antisense Strand to SEQ ID NO: 460555
uuuauacucaauauggcca

SEQ ID NO: 460557 - RNA, 19 nt, Artificial Sequence
  Description of Artificial Sequence: Synthetic oligonucleotide
  Sense strand starting at position 3899 of SEQ ID NO: 317049
uccugaaugcauuauagac

SEQ ID NO: 460558 - RNA, 19 nt, Artificial Sequence
  Description of Artificial Sequence: Synthetic oligonucleotide
  Antisense Strand to SEQ ID NO: 460557
gucuauaaugcauucagga

SEQ ID NO: 460559 - RNA, 19 nt, Artificial Sequence
  Description of Artificial Sequence: Synthetic oligonucleotide
  Sense strand starting at position 229 of SEQ ID NO: 317050
ugcagacuccuguguacac

SEQ ID NO: 460560 - RNA, 19 nt, Artificial Sequence
  Description of Artificial Sequence: Synthetic oligonucleotide
  Antisense Strand to SEQ ID NO: 460559
guguacacaggagucugca

SEQ ID NO: 460561 - RNA, 19 nt, Artificial Sequence
  Description of Artificial Sequence: Synthetic oligonucleotide
  Sense strand starting at position 372 of SEQ ID NO: 317050
gugcaaaucccagauauuc

SEQ ID NO: 460562 - RNA, 19 nt, Artificial Sequence
  Description of Artificial Sequence: Synthetic oligonucleotide
  Antisense Strand to SEQ ID NO: 460561
gaauaucugggauuugcac

SEQ ID NO: 460563 - RNA, 19 nt, Artificial Sequence
  Description of Artificial Sequence: Synthetic oligonucleotide
  Sense strand starting at position 448 of SEQ ID NO: 317050
acguaaggacuguggucaa

SEQ ID NO: 460564 - RNA, 19 nt, Artificial Sequence
  Description of Artificial Sequence: Synthetic oligonucleotide
  Antisense Strand to SEQ ID NO: 460563
uugaccacaguccuuacgu

SEQ ID NO: 460565 - RNA, 19 nt, Artificial Sequence
  Description of Artificial Sequence: Synthetic oligonucleotide
  Sense strand starting at position 506 of SEQ ID NO: 317050
guagaagcacucugcuaag

SEQ ID NO: 460566 - RNA, 19 nt, Artificial Sequence
  Description of Artificial Sequence: Synthetic oligonucleotide
  Antisense Strand to SEQ ID NO: 460565
cuuagcagagugcuucuac

SEQ ID NO: 460567 - RNA, 19 nt, Artificial Sequence
  Description of Artificial Sequence: Synthetic oligonucleotide
  Sense strand starting at position 624 of SEQ ID NO: 317050
acggcaauuuaugacuuua

SEQ ID NO: 460568 - RNA, 19 nt, Artificial Sequence
  Description of Artificial Sequence: Synthetic oligonucleotide
  Antisense Strand to SEQ ID NO: 460567
uaaagucauaaauugccgu

SEQ ID NO: 460569 - RNA, 19 nt, Artificial Sequence
  Description of Artificial Sequence: Synthetic oligonucleotide
  Sense strand starting at position 721 of SEQ ID NO: 317050
acugaaaccuaguuugaga

SEQ ID NO: 460570 - RNA, 19 nt, Artificial Sequence
  Description of Artificial Sequence: Synthetic oligonucleotide
  Antisense Strand to SEQ ID NO: 460569
ucucaaacuagguuucagu

SEQ ID NO: 460571 - RNA, 19 nt, Artificial Sequence
  Description of Artificial Sequence: Synthetic oligonucleotide
  Sense strand starting at position 723 of SEQ ID NO: 317050
ugaaaccuaguuugagaca

SEQ ID NO: 460572 - RNA, 19 nt, Artificial Sequence
  Description of Artificial Sequence: Synthetic oligonucleotide
  Antisense Strand to SEQ ID NO: 460571
ugucucaaacuagguuuca

SEQ ID NO: 460573 - RNA, 19 nt, Artificial Sequence
  Description of Artificial Sequence: Synthetic oligonucleotide
  Sense strand starting at position 797 of SEQ ID NO: 317050
agcaguugaucuuuccaca

SEQ ID NO: 460574 - RNA, 19 nt, Artificial Sequence
  Description of Artificial Sequence: Synthetic oligonucleotide
  Antisense Strand to SEQ ID NO: 460573
uguggaaagaucaacugcu

SEQ ID NO: 460575 - RNA, 19 nt, Artificial Sequence
  Description of Artificial Sequence: Synthetic oligonucleotide
  Sense strand starting at position 888 of SEQ ID NO: 317050
guaacucugccagguucua

SEQ ID NO: 460576 - RNA, 19 nt, Artificial Sequence
  Description of Artificial Sequence: Synthetic oligonucleotide
  Antisense Strand to SEQ ID NO: 460575
uagaaccuggcagaguuac

SEQ ID NO: 460577 - RNA, 19 nt, Artificial Sequence
  Description of Artificial Sequence: Synthetic oligonucleotide
  Sense strand starting at position 900 of SEQ ID NO: 317050
gguucuaacuucccuaaga

SEQ ID NO: 460578 - RNA, 19 nt, Artificial Sequence
  Description of Artificial Sequence: Synthetic oligonucleotide
  Antisense Strand to SEQ ID NO: 460577
ucuuagggaaguuagaacc

SEQ ID NO: 460579 - RNA, 19 nt, Artificial Sequence
  Description of Artificial Sequence: Synthetic oligonucleotide
  Sense strand starting at position 954 of SEQ ID NO: 317050
gcaacuguuaucuggguag

SEQ ID NO: 460580 - RNA, 19 nt, Artificial Sequence
  Description of Artificial Sequence: Synthetic oligonucleotide
  Antisense Strand to SEQ ID NO: 460579
cuacccagauaacaguugc

SEQ ID NO: 460581 - RNA, 19 nt, Artificial Sequence
  Description of Artificial Sequence: Synthetic oligonucleotide
  Sense strand starting at position 957 of SEQ ID NO: 317050
acuguuaucuggguaggcu

SEQ ID NO: 460582 - RNA, 19 nt, Artificial Sequence
  Description of Artificial Sequence: Synthetic oligonucleotide
  Antisense Strand to SEQ ID NO: 460581
agccuacccagauaacagu

SEQ ID NO: 460583 - RNA, 19 nt, Artificial Sequence
  Description of Artificial Sequence: Synthetic oligonucleotide
  Sense strand starting at position 977 of SEQ ID NO: 317050
uggcacaguacuggagaua

SEQ ID NO: 460584 - RNA, 19 nt, Artificial Sequence
  Description of Artificial Sequence: Synthetic oligonucleotide
  Antisense Strand to SEQ ID NO: 460583
uaucuccaguacugugcca

SEQ ID NO: 460585 - RNA, 19 nt, Artificial Sequence
  Description of Artificial Sequence: Synthetic oligonucleotide
  Sense strand starting at position 1066 of SEQ ID NO: 317050
gaacguucuucugcaggga

SEQ ID NO: 460586 - RNA, 19 nt, Artificial Sequence
  Description of Artificial Sequence: Synthetic oligonucleotide
  Antisense Strand to SEQ ID NO: 460585
ucccugcagaagaacguuc

SEQ ID NO: 460587 - RNA, 19 nt, Artificial Sequence
  Description of Artificial Sequence: Synthetic oligonucleotide
  Sense strand starting at position 1079 of SEQ ID NO: 317050
cagggacagucaucucuuu

SEQ ID NO: 460588 - RNA, 19 nt, Artificial Sequence
  Description of Artificial Sequence: Synthetic oligonucleotide
  Antisense Strand to SEQ ID NO: 460587
aaagagaugacugucccug

SEQ ID NO: 460589 - RNA, 19 nt, Artificial Sequence
  Description of Artificial Sequence: Synthetic oligonucleotide
  Sense strand starting at position 1122 of SEQ ID NO: 317050
gcuugugcugguuccgaga

SEQ ID NO: 460590 - RNA, 19 nt, Artificial Sequence
  Description of Artificial Sequence: Synthetic oligonucleotide
  Antisense Strand to SEQ ID NO: 460589
ucucggaaccagcacaagc

SEQ ID NO: 460591 - RNA, 19 nt, Artificial Sequence
  Description of Artificial Sequence: Synthetic oligonucleotide
  Sense strand starting at position 1140 of SEQ ID NO: 317050
agccauucccuuugcagau

SEQ ID NO: 460592 - RNA, 19 nt, Artificial Sequence
  Description of Artificial Sequence: Synthetic oligonucleotide
  Antisense Strand to SEQ ID NO: 460591
aucugcaaagggaauggcu

SEQ ID NO: 460593 - RNA, 19 nt, Artificial Sequence
  Description of Artificial Sequence: Synthetic oligonucleotide
  Sense strand starting at position 1171 of SEQ ID NO: 317050
aagagcgaccuucguaauu

SEQ ID NO: 460594 - RNA, 19 nt, Artificial Sequence
  Description of Artificial Sequence: Synthetic oligonucleotide
  Antisense Strand to SEQ ID NO: 460593
aauuacgaaggucgcucuu

SEQ ID NO: 460595 - RNA, 19 nt, Artificial Sequence
  Description of Artificial Sequence: Synthetic oligonucleotide
  Sense strand starting at position 1209 of SEQ ID NO: 317050
ucuggaagaugcucuuaau

SEQ ID NO: 460596 - RNA, 19 nt, Artificial Sequence
  Description of Artificial Sequence: Synthetic oligonucleotide
  Antisense Strand to SEQ ID NO: 460595
auuaagagcaucuuccaga

SEQ ID NO: 460597 - RNA, 19 nt, Artificial Sequence
  Description of Artificial Sequence: Synthetic oligonucleotide
  Sense strand starting at position 1220 of SEQ ID NO: 317050
cucuuaauucugggaaacg

SEQ ID NO: 460598 - RNA, 19 nt, Artificial Sequence
  Description of Artificial Sequence: Synthetic oligonucleotide
  Antisense Strand to SEQ ID NO: 460597
cguuucccagaauuaagag

SEQ ID NO: 460599 - RNA, 19 nt, Artificial Sequence
  Description of Artificial Sequence: Synthetic oligonucleotide
  Sense strand starting at position 2192 of SEQ ID NO: 317050
gaccgauauggugacguca

SEQ ID NO: 460600 - RNA, 19 nt, Artificial Sequence
  Description of Artificial Sequence: Synthetic oligonucleotide
  Antisense Strand to SEQ ID NO: 460599
ugacgucaccauaucgguc

SEQ ID NO: 460601 - RNA, 19 nt, Artificial Sequence
  Description of Artificial Sequence: Synthetic oligonucleotide
  Sense strand starting at position 2267 of SEQ ID NO: 317050
ugggcaacucccgggaaau

SEQ ID NO: 460602 - RNA, 19 nt, Artificial Sequence
  Description of Artificial Sequence: Synthetic oligonucleotide
  Antisense Strand to SEQ ID NO: 460601
auuucccgggaguugccca

SEQ ID NO: 460603 - RNA, 19 nt, Artificial Sequence
  Description of Artificial Sequence: Synthetic oligonucleotide
  Sense strand starting at position 2268 of SEQ ID NO: 317050
gggcaacucccgggaaaua

SEQ ID NO: 460604 - RNA, 19 nt, Artificial Sequence
  Description of Artificial Sequence: Synthetic oligonucleotide
  Antisense Strand to SEQ ID NO: 460603
uauuucccgggaguugccc

SEQ ID NO: 460605 - RNA, 19 nt, Artificial Sequence
  Description of Artificial Sequence: Synthetic oligonucleotide
  Sense strand starting at position 2295 of SEQ ID NO: 317050
gugccagagcuuguuguca

SEQ ID NO: 460606 - RNA, 19 nt, Artificial Sequence
  Description of Artificial Sequence: Synthetic oligonucleotide
  Antisense Strand to SEQ ID NO: 460605
ugacaacaagcucuggcac

SEQ ID NO: 460607 - RNA, 19 nt, Artificial Sequence
  Description of Artificial Sequence: Synthetic oligonucleotide
  Sense strand starting at position 2299 of SEQ ID NO: 317050
cagagcuuguugucaaggu

SEQ ID NO: 460608 - RNA, 19 nt, Artificial Sequence
  Description of Artificial Sequence: Synthetic oligonucleotide
  Antisense Strand to SEQ ID NO: 460607
accuugacaacaagcucug

SEQ ID NO: 460609 - RNA, 19 nt, Artificial Sequence
  Description of Artificial Sequence: Synthetic oligonucleotide
  Sense strand starting at position 2308 of SEQ ID NO: 317050
uugucaagguugcugaaua

SEQ ID NO: 460610 - RNA, 19 nt, Artificial Sequence
  Description of Artificial Sequence: Synthetic oligonucleotide
  Antisense Strand to SEQ ID NO: 460609
uauucagcaaccuugacaa

SEQ ID NO: 460611 - RNA, 19 nt, Artificial Sequence
  Description of Artificial Sequence: Synthetic oligonucleotide
  Sense strand starting at position 2343 of SEQ ID NO: 317050
agacacucccacugaguuu

SEQ ID NO: 460612 - RNA, 19 nt, Artificial Sequence
  Description of Artificial Sequence: Synthetic oligonucleotide
  Antisense Strand to SEQ ID NO: 460611
aaacucagugggagugucu

SEQ ID NO: 460613 - RNA, 19 nt, Artificial Sequence
  Description of Artificial Sequence: Synthetic oligonucleotide
  Sense strand starting at position 2642 of SEQ ID NO: 317050
gccuuucggguucaacaga

SEQ ID NO: 460614 - RNA, 19 nt, Artificial Sequence
  Description of Artificial Sequence: Synthetic oligonucleotide
  Antisense Strand to SEQ ID NO: 460613
ucuguugaacccgaaaggc

SEQ ID NO: 460615 - RNA, 19 nt, Artificial Sequence
  Description of Artificial Sequence: Synthetic oligonucleotide
  Sense strand starting at position 2854 of SEQ ID NO: 317050
ccggcaacucuuuguauuu

SEQ ID NO: 460616 - RNA, 19 nt, Artificial Sequence
  Description of Artificial Sequence: Synthetic oligonucleotide
  Antisense Strand to SEQ ID NO: 460615
aaauacaaagaguugccgg

SEQ ID NO: 460617 - RNA, 19 nt, Artificial Sequence
  Description of Artificial Sequence: Synthetic oligonucleotide
  Sense strand starting at position 3071 of SEQ ID NO: 317050
acuauuagguucguugacu

SEQ ID NO: 460618 - RNA, 19 nt, Artificial Sequence
  Description of Artificial Sequence: Synthetic oligonucleotide
  Antisense Strand to SEQ ID NO: 460617
agucaacgaaccuaauagu

SEQ ID NO: 460619 - RNA, 19 nt, Artificial Sequence
  Description of Artificial Sequence: Synthetic oligonucleotide
  Sense strand starting at position 3079 of SEQ ID NO: 317050
guucguugacucgugcaca

SEQ ID NO: 460620 - RNA, 19 nt, Artificial Sequence
  Description of Artificial Sequence: Synthetic oligonucleotide
  Antisense Strand to SEQ ID NO: 460619
ugugcacgagucaacgaac

SEQ ID NO: 460621 - RNA, 19 nt, Artificial Sequence
  Description of Artificial Sequence: Synthetic oligonucleotide
  Sense strand starting at position 3135 of SEQ ID NO: 317050
gagaaagagguguaaucgu

SEQ ID NO: 460622 - RNA, 19 nt, Artificial Sequence
  Description of Artificial Sequence: Synthetic oligonucleotide
  Antisense Strand to SEQ ID NO: 460621
acgauuacaccucuuucuc

SEQ ID NO: 460623 - RNA, 19 nt, Artificial Sequence
  Description of Artificial Sequence: Synthetic oligonucleotide
  Sense strand starting at position 3239 of SEQ ID NO: 317050
agggcuauaguguggagau

SEQ ID NO: 460624 - RNA, 19 nt, Artificial Sequence
  Description of Artificial Sequence: Synthetic oligonucleotide
  Antisense Strand to SEQ ID NO: 460623
aucuccacacuauagcccu

SEQ ID NO: 460625 - RNA, 19 nt, Artificial Sequence
  Description of Artificial Sequence: Synthetic oligonucleotide
  Sense strand starting at position 3246 of SEQ ID NO: 317050
uaguguggagaucguugau

SEQ ID NO: 460626 - RNA, 19 nt, Artificial Sequence
  Description of Artificial Sequence: Synthetic oligonucleotide
  Antisense Strand to SEQ ID NO: 460625
aucaacgaucuccacacua

SEQ ID NO: 460627 - RNA, 19 nt, Artificial Sequence
  Description of Artificial Sequence: Synthetic oligonucleotide
  Sense strand starting at position 3249 of SEQ ID NO: 317050
uguggagaucguugauuga

SEQ ID NO: 460628 - RNA, 19 nt, Artificial Sequence
  Description of Artificial Sequence: Synthetic oligonucleotide
  Antisense Strand to SEQ ID NO: 460627
ucaaucaacgaucuccaca

SEQ ID NO: 460629 - RNA, 19 nt, Artificial Sequence
  Description of Artificial Sequence: Synthetic oligonucleotide
  Sense strand starting at position 3252 of SEQ ID NO: 317050
ggagaucguugauugaaga

SEQ ID NO: 460630 - RNA, 19 nt, Artificial Sequence
  Description of Artificial Sequence: Synthetic oligonucleotide
  Antisense Strand to SEQ ID NO: 460629
ucuucaaucaacgaucucc

SEQ ID NO: 460631 - RNA, 19 nt, Artificial Sequence
  Description of Artificial Sequence: Synthetic oligonucleotide
  Sense strand starting at position 3297 of SEQ ID NO: 317050
cguugaagaaccuguauuc

SEQ ID NO: 460632 - RNA, 19 nt, Artificial Sequence
  Description of Artificial Sequence: Synthetic oligonucleotide
  Antisense Strand to SEQ ID NO: 460631
gaauacagguucuucaacg

SEQ ID NO: 460633 - RNA, 19 nt, Artificial Sequence
  Description of Artificial Sequence: Synthetic oligonucleotide
  Sense strand starting at position 3454 of SEQ ID NO: 317050
ugcaaauggucaguaugua

SEQ ID NO: 460634 - RNA, 19 nt, Artificial Sequence
  Description of Artificial Sequence: Synthetic oligonucleotide
  Antisense Strand to SEQ ID NO: 460633
uacauacugaccauuugca

SEQ ID NO: 460635 - RNA, 19 nt, Artificial Sequence
  Description of Artificial Sequence: Synthetic oligonucleotide
  Sense strand starting at position 3455 of SEQ ID NO: 317050
gcaaauggucaguauguag

SEQ ID NO: 460636 - RNA, 19 nt, Artificial Sequence
  Description of Artificial Sequence: Synthetic oligonucleotide
  Antisense Strand to SEQ ID NO: 460635
cuacauacugaccauuugc

SEQ ID NO: 460637 - RNA, 19 nt, Artificial Sequence
  Description of Artificial Sequence: Synthetic oligonucleotide
  Sense strand starting at position 3609 of SEQ ID NO: 317050
ucaaguagugcucaauauu

SEQ ID NO: 460638 - RNA, 19 nt, Artificial Sequence
  Description of Artificial Sequence: Synthetic oligonucleotide
  Antisense Strand to SEQ ID NO: 460637
aauauugagcacuacuuga

SEQ ID NO: 460639 - RNA, 19 nt, Artificial Sequence
  Description of Artificial Sequence: Synthetic oligonucleotide
  Sense strand starting at position 236 of SEQ ID NO: 317051
gagagcugacaauguuaga

SEQ ID NO: 460640 - RNA, 19 nt, Artificial Sequence
  Description of Artificial Sequence: Synthetic oligonucleotide
  Antisense Strand to SEQ ID NO: 460639
ucuaacauugucagcucuc

SEQ ID NO: 460641 - RNA, 19 nt, Artificial Sequence
  Description of Artificial Sequence: Synthetic oligonucleotide
  Sense strand starting at position 593 of SEQ ID NO: 317051
cuacaaucgcgcuuccacu

SEQ ID NO: 460642 - RNA, 19 nt, Artificial Sequence
  Description of Artificial Sequence: Synthetic oligonucleotide
  Antisense Strand to SEQ ID NO: 460641
aguggaagcgcgauuguag

SEQ ID NO: 460643 - RNA, 19 nt, Artificial Sequence
  Description of Artificial Sequence: Synthetic oligonucleotide
  Sense strand starting at position 599 of SEQ ID NO: 317051
ucgcgcuuccacuuacgaa

SEQ ID NO: 460644 - RNA, 19 nt, Artificial Sequence
  Description of Artificial Sequence: Synthetic oligonucleotide
  Antisense Strand to SEQ ID NO: 460643
uucguaaguggaagcgcga

SEQ ID NO: 460645 - RNA, 19 nt, Artificial Sequence
  Description of Artificial Sequence: Synthetic oligonucleotide
  Sense strand starting at position 600 of SEQ ID NO: 317051
cgcgcuuccacuuacgaau

SEQ ID NO: 460646 - RNA, 19 nt, Artificial Sequence
  Description of Artificial Sequence: Synthetic oligonucleotide
  Antisense Strand to SEQ ID NO: 460645
auucguaaguggaagcgcg

SEQ ID NO: 460647 - RNA, 19 nt, Artificial Sequence
  Description of Artificial Sequence: Synthetic oligonucleotide
  Sense strand starting at position 697 of SEQ ID NO: 317051
gaagcacugcaguaucuaa

SEQ ID NO: 460648 - RNA, 19 nt, Artificial Sequence
  Description of Artificial Sequence: Synthetic oligonucleotide
  Antisense Strand to SEQ ID NO: 460647
uuagauacugcagugcuuc

SEQ ID NO: 460649 - RNA, 19 nt, Artificial Sequence
  Description of Artificial Sequence: Synthetic oligonucleotide
  Sense strand starting at position 864 of SEQ ID NO: 317051
gaugcccaugucuguaaau

SEQ ID NO: 460650 - RNA, 19 nt, Artificial Sequence
  Description of Artificial Sequence: Synthetic oligonucleotide
  Antisense Strand to SEQ ID NO: 460649
auuuacagacaugggcauc

SEQ ID NO: 460651 - RNA, 19 nt, Artificial Sequence
  Description of Artificial Sequence: Synthetic oligonucleotide
  Sense strand starting at position 865 of SEQ ID NO: 317051
augcccaugucuguaaaua

SEQ ID NO: 460652 - RNA, 19 nt, Artificial Sequence
  Description of Artificial Sequence: Synthetic oligonucleotide
  Antisense Strand to SEQ ID NO: 460651
uauuuacagacaugggcau

SEQ ID NO: 460653 - RNA, 19 nt, Artificial Sequence
  Description of Artificial Sequence: Synthetic oligonucleotide
  Sense strand starting at position 866 of SEQ ID NO: 317051
ugcccaugucuguaaauag

SEQ ID NO: 460654 - RNA, 19 nt, Artificial Sequence
  Description of Artificial Sequence: Synthetic oligonucleotide
  Antisense Strand to SEQ ID NO: 460653
cuauuuacagacaugggca

SEQ ID NO: 460655 - RNA, 19 nt, Artificial Sequence
  Description of Artificial Sequence: Synthetic oligonucleotide
  Sense strand starting at position 907 of SEQ ID NO: 317051
acaaauuaccuccgacuga

SEQ ID NO: 460656 - RNA, 19 nt, Artificial Sequence
  Description of Artificial Sequence: Synthetic oligonucleotide
  Antisense Strand to SEQ ID NO: 460655
ucagucggagguaauuugu

SEQ ID NO: 460657 - RNA, 19 nt, Artificial Sequence
  Description of Artificial Sequence: Synthetic oligonucleotide
  Sense strand starting at position 1525 of SEQ ID NO: 317051
gcggauccucccgagaaug

SEQ ID NO: 460658 - RNA, 19 nt, Artificial Sequence
  Description of Artificial Sequence: Synthetic oligonucleotide
  Antisense Strand to SEQ ID NO: 460657
cauucucgggaggauccgc

SEQ ID NO: 460659 - RNA, 19 nt, Artificial Sequence
  Description of Artificial Sequence: Synthetic oligonucleotide
  Sense strand starting at position 2501 of SEQ ID NO: 317051
cgcgaucaccuguaaucuu

SEQ ID NO: 460660 - RNA, 19 nt, Artificial Sequence
  Description of Artificial Sequence: Synthetic oligonucleotide
  Antisense Strand to SEQ ID NO: 460659
aagauuacaggugaucgcg

SEQ ID NO: 460661 - RNA, 19 nt, Artificial Sequence
  Description of Artificial Sequence: Synthetic oligonucleotide
  Sense strand starting at position 2543 of SEQ ID NO: 317051
gaguuaccucucgguaacu

SEQ ID NO: 460662 - RNA, 19 nt, Artificial Sequence
  Description of Artificial Sequence: Synthetic oligonucleotide
  Antisense Strand to SEQ ID NO: 460661
aguuaccgagagguaacuc

SEQ ID NO: 460663 - RNA, 19 nt, Artificial Sequence
  Description of Artificial Sequence: Synthetic oligonucleotide
  Sense strand starting at position 2545 of SEQ ID NO: 317051
guuaccucucgguaacugu

SEQ ID NO: 460664 - RNA, 19 nt, Artificial Sequence
  Description of Artificial Sequence: Synthetic oligonucleotide
  Antisense Strand to SEQ ID NO: 460663
acaguuaccgagagguaac

SEQ ID NO: 460665 - RNA, 19 nt, Artificial Sequence
  Description of Artificial Sequence: Synthetic oligonucleotide
  Sense strand starting at position 2552 of SEQ ID NO: 317051
cucgguaacuguuuaggaa

SEQ ID NO: 460666 - RNA, 19 nt, Artificial Sequence
  Description of Artificial Sequence: Synthetic oligonucleotide
  Antisense Strand to SEQ ID NO: 460665
uuccuaaacaguuaccgag

SEQ ID NO: 460667 - RNA, 19 nt, Artificial Sequence
  Description of Artificial Sequence: Synthetic oligonucleotide
  Sense strand starting at position 2553 of SEQ ID NO: 317051
ucgguaacuguuuaggaaa

SEQ ID NO: 460668 - RNA, 19 nt, Artificial Sequence
  Description of Artificial Sequence: Synthetic oligonucleotide
  Antisense Strand to SEQ ID NO: 460667
uuuccuaaacaguuaccga

SEQ ID NO: 460669 - RNA, 19 nt, Artificial Sequence
  Description of Artificial Sequence: Synthetic oligonucleotide
  Sense strand starting at position 2556 of SEQ ID NO: 317051
guaacuguuuaggaaaccu

SEQ ID NO: 460670 - RNA, 19 nt, Artificial Sequence
  Description of Artificial Sequence: Synthetic oligonucleotide
  Antisense Strand to SEQ ID NO: 460669
agguuuccuaaacaguuac

SEQ ID NO: 460671 - RNA, 19 nt, Artificial Sequence
  Description of Artificial Sequence: Synthetic oligonucleotide
  Sense strand starting at position 2638 of SEQ ID NO: 317051
ucuaaagcguuccugagua

SEQ ID NO: 460672 - RNA, 19 nt, Artificial Sequence
  Description of Artificial Sequence: Synthetic oligonucleotide
  Antisense Strand to SEQ ID NO: 460671
uacucaggaacgcuuuaga

SEQ ID NO: 460673 - RNA, 19 nt, Artificial Sequence
  Description of Artificial Sequence: Synthetic oligonucleotide
  Sense strand starting at position 2640 of SEQ ID NO: 317051
uaaagcguuccugaguaaa

SEQ ID NO: 460674 - RNA, 19 nt, Artificial Sequence
  Description of Artificial Sequence: Synthetic oligonucleotide
  Antisense Strand to SEQ ID NO: 460673
uuuacucaggaacgcuuua

SEQ ID NO: 460675 - RNA, 19 nt, Artificial Sequence
  Description of Artificial Sequence: Synthetic oligonucleotide
  Sense strand starting at position 2642 of SEQ ID NO: 317051
aagcguuccugaguaaauu

SEQ ID NO: 460676 - RNA, 19 nt, Artificial Sequence
  Description of Artificial Sequence: Synthetic oligonucleotide
  Antisense Strand to SEQ ID NO: 460675
aauuuacucaggaacgcuu

SEQ ID NO: 460677 - RNA, 19 nt, Artificial Sequence
  Description of Artificial Sequence: Synthetic oligonucleotide
  Sense strand starting at position 2643 of SEQ ID NO: 317051
agcguuccugaguaaauua

SEQ ID NO: 460678 - RNA, 19 nt, Artificial Sequence
  Description of Artificial Sequence: Synthetic oligonucleotide
  Antisense Strand to SEQ ID NO: 460677
uaauuuacucaggaacgcu

SEQ ID NO: 460679 - RNA, 19 nt, Artificial Sequence
  Description of Artificial Sequence: Synthetic oligonucleotide
  Sense strand starting at position 2662 of SEQ ID NO: 317051
aauaguauuucgccggcuu

SEQ ID NO: 460680 - RNA, 19 nt, Artificial Sequence
  Description of Artificial Sequence: Synthetic oligonucleotide
  Antisense Strand to SEQ ID NO: 460679
aagccggcgaaauacuauu

SEQ ID NO: 460681 - RNA, 19 nt, Artificial Sequence
  Description of Artificial Sequence: Synthetic oligonucleotide
  Sense strand starting at position 2663 of SEQ ID NO: 317051
auaguauuucgccggcuuu

SEQ ID NO: 460682 - RNA, 19 nt, Artificial Sequence
  Description of Artificial Sequence: Synthetic oligonucleotide
  Antisense Strand to SEQ ID NO: 460681
aaagccggcgaaauacuau

SEQ ID NO: 460683 - RNA, 19 nt, Artificial Sequence
  Description of Artificial Sequence: Synthetic oligonucleotide
  Sense strand starting at position 2690 of SEQ ID NO: 317051
uuuguuaccuguuucuuua

SEQ ID NO: 460684 - RNA, 19 nt, Artificial Sequence
  Description of Artificial Sequence: Synthetic oligonucleotide
  Antisense Strand to SEQ ID NO: 460683
uaaagaaacagguaacaaa

SEQ ID NO: 460685 - RNA, 19 nt, Artificial Sequence
  Description of Artificial Sequence: Synthetic oligonucleotide
  Sense strand starting at position 2692 of SEQ ID NO: 317051
uguuaccuguuucuuuaau

SEQ ID NO: 460686 - RNA, 19 nt, Artificial Sequence
  Description of Artificial Sequence: Synthetic oligonucleotide
  Antisense Strand to SEQ ID NO: 460685
auuaaagaaacagguaaca

SEQ ID NO: 460687 - RNA, 19 nt, Artificial Sequence
  Description of Artificial Sequence: Synthetic oligonucleotide
  Sense strand starting at position 2693 of SEQ ID NO: 317051
guuaccuguuucuuuaauu

SEQ ID NO: 460688 - RNA, 19 nt, Artificial Sequence
  Description of Artificial Sequence: Synthetic oligonucleotide
  Antisense Strand to SEQ ID NO: 460687
aauuaaagaaacagguaac

SEQ ID NO: 460689 - RNA, 19 nt, Artificial Sequence
  Description of Artificial Sequence: Synthetic oligonucleotide
  Sense strand starting at position 2802 of SEQ ID NO: 317051
gauaauaaaucggauacga

SEQ ID NO: 460690 - RNA, 19 nt, Artificial Sequence
  Description of Artificial Sequence: Synthetic oligonucleotide
  Antisense Strand to SEQ ID NO: 460689
ucguauccgauuuauuauc

SEQ ID NO: 460691 - RNA, 19 nt, Artificial Sequence
  Description of Artificial Sequence: Synthetic oligonucleotide
  Sense strand starting at position 2881 of SEQ ID NO: 317051
guuuguguccuggugcaag

SEQ ID NO: 460692 - RNA, 19 nt, Artificial Sequence
  Description of Artificial Sequence: Synthetic oligonucleotide
  Antisense Strand to SEQ ID NO: 460691
cuugcaccaggacacaaac

SEQ ID NO: 460693 - RNA, 19 nt, Artificial Sequence
  Description of Artificial Sequence: Synthetic oligonucleotide
  Sense strand starting at position 2972 of SEQ ID NO: 317051
uuaucugugcucgccuuau

SEQ ID NO: 460694 - RNA, 19 nt, Artificial Sequence
  Description of Artificial Sequence: Synthetic oligonucleotide
  Antisense Strand to SEQ ID NO: 460693
auaaggcgagcacagauaa

SEQ ID NO: 460695 - RNA, 19 nt, Artificial Sequence
  Description of Artificial Sequence: Synthetic oligonucleotide
  Sense strand starting at position 3049 of SEQ ID NO: 317051
ucaacuugacguuaauauu

SEQ ID NO: 460696 - RNA, 19 nt, Artificial Sequence
  Description of Artificial Sequence: Synthetic oligonucleotide
  Antisense Strand to SEQ ID NO: 460695
aauauuaacgucaaguuga

SEQ ID NO: 460697 - RNA, 19 nt, Artificial Sequence
  Description of Artificial Sequence: Synthetic oligonucleotide
  Sense strand starting at position 3083 of SEQ ID NO: 317051
agccguauucggcacaaau

SEQ ID NO: 460698 - RNA, 19 nt, Artificial Sequence
  Description of Artificial Sequence: Synthetic oligonucleotide
  Antisense Strand to SEQ ID NO: 460697
auuugugccgaauacggcu

SEQ ID NO: 460699 - RNA, 19 nt, Artificial Sequence
  Description of Artificial Sequence: Synthetic oligonucleotide
  Sense strand starting at position 3085 of SEQ ID NO: 317051
ccguauucggcacaaauaa

SEQ ID NO: 460700 - RNA, 19 nt, Artificial Sequence
  Description of Artificial Sequence: Synthetic oligonucleotide
  Antisense Strand to SEQ ID NO: 460699
uuauuugugccgaauacgg

SEQ ID NO: 460701 - RNA, 19 nt, Artificial Sequence
  Description of Artificial Sequence: Synthetic oligonucleotide
  Sense strand starting at position 3172 of SEQ ID NO: 317051
gucagugaucuccaguuug

SEQ ID NO: 460702 - RNA, 19 nt, Artificial Sequence
  Description of Artificial Sequence: Synthetic oligonucleotide
  Antisense Strand to SEQ ID NO: 460701
caaacuggagaucacugac

SEQ ID NO: 460703 - RNA, 19 nt, Artificial Sequence
  Description of Artificial Sequence: Synthetic oligonucleotide
  Sense strand starting at position 3208 of SEQ ID NO: 317051
uggcgaaccuuguugcaau

SEQ ID NO: 460704 - RNA, 19 nt, Artificial Sequence
  Description of Artificial Sequence: Synthetic oligonucleotide
  Antisense Strand to SEQ ID NO: 460703
auugcaacaagguucgcca

SEQ ID NO: 460705 - RNA, 19 nt, Artificial Sequence
  Description of Artificial Sequence: Synthetic oligonucleotide
  Sense strand starting at position 3265 of SEQ ID NO: 317051
cuuuacuagcucuguuauu

SEQ ID NO: 460706 - RNA, 19 nt, Artificial Sequence
  Description of Artificial Sequence: Synthetic oligonucleotide
  Antisense Strand to SEQ ID NO: 460705
aauaacagagcuaguaaag

SEQ ID NO: 460707 - RNA, 19 nt, Artificial Sequence
  Description of Artificial Sequence: Synthetic oligonucleotide
  Sense strand starting at position 3266 of SEQ ID NO: 317051
uuuacuagcucuguuauua

SEQ ID NO: 460708 - RNA, 19 nt, Artificial Sequence
  Description of Artificial Sequence: Synthetic oligonucleotide
  Antisense Strand to SEQ ID NO: 460707
uaauaacagagcuaguaaa

SEQ ID NO: 460709 - RNA, 19 nt, Artificial Sequence
  Description of Artificial Sequence: Synthetic oligonucleotide
  Sense strand starting at position 3279 of SEQ ID NO: 317051
uuauuaguggcgcuuugua

SEQ ID NO: 460710 - RNA, 19 nt, Artificial Sequence
  Description of Artificial Sequence: Synthetic oligonucleotide
  Antisense Strand to SEQ ID NO: 460709
uacaaagcgccacuaauaa

SEQ ID NO: 460711 - RNA, 19 nt, Artificial Sequence
  Description of Artificial Sequence: Synthetic oligonucleotide
  Sense strand starting at position 3281 of SEQ ID NO: 317051
auuaguggcgcuuuguauu

SEQ ID NO: 460712 - RNA, 19 nt, Artificial Sequence
  Description of Artificial Sequence: Synthetic oligonucleotide
  Antisense Strand to SEQ ID NO: 460711
aauacaaagcgccacuaau

SEQ ID NO: 460713 - RNA, 19 nt, Artificial Sequence
  Description of Artificial Sequence: Synthetic oligonucleotide
  Sense strand starting at position 3912 of SEQ ID NO: 317051
gccucacaccucuguaaag

SEQ ID NO: 460714 - RNA, 19 nt, Artificial Sequence
  Description of Artificial Sequence: Synthetic oligonucleotide
  Antisense Strand to SEQ ID NO: 460713
cuuuacagaggugugaggc

SEQ ID NO: 460715 - RNA, 19 nt, Artificial Sequence
  Description of Artificial Sequence: Synthetic oligonucleotide
  Sense strand starting at position 3913 of SEQ ID NO: 317051
ccucacaccucuguaaagu

SEQ ID NO: 460716 - RNA, 19 nt, Artificial Sequence
  Description of Artificial Sequence: Synthetic oligonucleotide
  Antisense Strand to SEQ ID NO: 460715
acuuuacagaggugugagg

SEQ ID NO: 460717 - RNA, 19 nt, Artificial Sequence
  Description of Artificial Sequence: Synthetic oligonucleotide
  Sense strand starting at position 3965 of SEQ ID NO: 317051
uugagcguuccgucugauu

SEQ ID NO: 460718 - RNA, 19 nt, Artificial Sequence
  Description of Artificial Sequence: Synthetic oligonucleotide
  Antisense Strand to SEQ ID NO: 460717
aaucagacggaacgcucaa

SEQ ID NO: 460719 - RNA, 19 nt, Artificial Sequence
  Description of Artificial Sequence: Synthetic oligonucleotide
  Sense strand starting at position 59 of SEQ ID NO: 317052
ucuagugggcuccauuaaa

SEQ ID NO: 460720 - RNA, 19 nt, Artificial Sequence
  Description of Artificial Sequence: Synthetic oligonucleotide
  Antisense Strand to SEQ ID NO: 460719
uuuaauggagcccacuaga

SEQ ID NO: 460721 - RNA, 19 nt, Artificial Sequence
  Description of Artificial Sequence: Synthetic oligonucleotide
  Sense strand starting at position 217 of SEQ ID NO: 317052
guaaguacaucauugagua

SEQ ID NO: 460722 - RNA, 19 nt, Artificial Sequence
  Description of Artificial Sequence: Synthetic oligonucleotide
  Antisense Strand to SEQ ID NO: 460721
uacucaaugauguacuuac

SEQ ID NO: 460723 - RNA, 19 nt, Artificial Sequence
  Description of Artificial Sequence: Synthetic oligonucleotide
  Sense strand starting at position 230 of SEQ ID NO: 317052
ugaguauguaguuauucua

SEQ ID NO: 460724 - RNA, 19 nt, Artificial Sequence
  Description of Artificial Sequence: Synthetic oligonucleotide
  Antisense Strand to SEQ ID NO: 460723
uagaauaacuacauacuca

SEQ ID NO: 460725 - RNA, 19 nt, Artificial Sequence
  Description of Artificial Sequence: Synthetic oligonucleotide
  Sense strand starting at position 270 of SEQ ID NO: 317052
gguacuauugccuauuacu

SEQ ID NO: 460726 - RNA, 19 nt, Artificial Sequence
  Description of Artificial Sequence: Synthetic oligonucleotide
  Antisense Strand to SEQ ID NO: 460725
aguaauaggcaauaguacc

SEQ ID NO: 460727 - RNA, 19 nt, Artificial Sequence
  Description of Artificial Sequence: Synthetic oligonucleotide
  Sense strand starting at position 339 of SEQ ID NO: 317052
ggugcuugacuguaaauaa

SEQ ID NO: 460728 - RNA, 19 nt, Artificial Sequence
  Description of Artificial Sequence: Synthetic oligonucleotide
  Antisense Strand to SEQ ID NO: 460727
uuauuuacagucaagcacc

SEQ ID NO: 460729 - RNA, 19 nt, Artificial Sequence
  Description of Artificial Sequence: Synthetic oligonucleotide
  Sense strand starting at position 474 of SEQ ID NO: 317052
gcaucuuuacuggacaaac

SEQ ID NO: 460730 - RNA, 19 nt, Artificial Sequence
  Description of Artificial Sequence: Synthetic oligonucleotide
  Antisense Strand to SEQ ID NO: 460729
guuuguccaguaaagaugc

SEQ ID NO: 460731 - RNA, 19 nt, Artificial Sequence
  Description of Artificial Sequence: Synthetic oligonucleotide
  Sense strand starting at position 987 of SEQ ID NO: 317052
cugagaagcuaauccauau

SEQ ID NO: 460732 - RNA, 19 nt, Artificial Sequence
  Description of Artificial Sequence: Synthetic oligonucleotide
  Antisense Strand to SEQ ID NO: 460731
auauggauuagcuucucag

SEQ ID NO: 460733 - RNA, 19 nt, Artificial Sequence
  Description of Artificial Sequence: Synthetic oligonucleotide
  Sense strand starting at position 1038 of SEQ ID NO: 317052
gguuaagaaucauuguucu

SEQ ID NO: 460734 - RNA, 19 nt, Artificial Sequence
  Description of Artificial Sequence: Synthetic oligonucleotide
  Antisense Strand to SEQ ID NO: 460733
agaacaaugauucuuaacc

SEQ ID NO: 460735 - RNA, 19 nt, Artificial Sequence
  Description of Artificial Sequence: Synthetic oligonucleotide
  Sense strand starting at position 1041 of SEQ ID NO: 317052
uaagaaucauuguucuggu

SEQ ID NO: 460736 - RNA, 19 nt, Artificial Sequence
  Description of Artificial Sequence: Synthetic oligonucleotide
  Antisense Strand to SEQ ID NO: 460735
accagaacaaugauucuua

SEQ ID NO: 460737 - RNA, 19 nt, Artificial Sequence
  Description of Artificial Sequence: Synthetic oligonucleotide
  Sense strand starting at position 1166 of SEQ ID NO: 317052
auggcaucuuacucuuuga

SEQ ID NO: 460738 - RNA, 19 nt, Artificial Sequence
  Description of Artificial Sequence: Synthetic oligonucleotide
  Antisense Strand to SEQ ID NO: 460737
ucaaagaguaagaugccau

SEQ ID NO: 460739 - RNA, 19 nt, Artificial Sequence
  Description of Artificial Sequence: Synthetic oligonucleotide
  Sense strand starting at position 1169 of SEQ ID NO: 317052
gcaucuuacucuuugagau

SEQ ID NO: 460740 - RNA, 19 nt, Artificial Sequence
  Description of Artificial Sequence: Synthetic oligonucleotide
  Antisense Strand to SEQ ID NO: 460739
aucucaaagaguaagaugc

SEQ ID NO: 460741 - RNA, 19 nt, Artificial Sequence
  Description of Artificial Sequence: Synthetic oligonucleotide
  Sense strand starting at position 2039 of SEQ ID NO: 317052
uggugaggucccgcguuaa

SEQ ID NO: 460742 - RNA, 19 nt, Artificial Sequence
  Description of Artificial Sequence: Synthetic oligonucleotide
  Antisense Strand to SEQ ID NO: 460741
uuaacgcgggaccucacca

SEQ ID NO: 460743 - RNA, 19 nt, Artificial Sequence
  Description of Artificial Sequence: Synthetic oligonucleotide
  Sense strand starting at position 2041 of SEQ ID NO: 317052
gugaggucccgcguuaaug

SEQ ID NO: 460744 - RNA, 19 nt, Artificial Sequence
  Description of Artificial Sequence: Synthetic oligonucleotide
  Antisense Strand to SEQ ID NO: 460743
cauuaacgcgggaccucac

SEQ ID NO: 460745 - RNA, 19 nt, Artificial Sequence
  Description of Artificial Sequence: Synthetic oligonucleotide
  Sense strand starting at position 2051 of SEQ ID NO: 317052
gcguuaaugacgucacguu

SEQ ID NO: 460746 - RNA, 19 nt, Artificial Sequence
  Description of Artificial Sequence: Synthetic oligonucleotide
  Antisense Strand to SEQ ID NO: 460745
aacgugacgucauuaacgc

SEQ ID NO: 460747 - RNA, 19 nt, Artificial Sequence
  Description of Artificial Sequence: Synthetic oligonucleotide
  Sense strand starting at position 2068 of SEQ ID NO: 317052
uuguuucgcgggagaaauu

SEQ ID NO: 460748 - RNA, 19 nt, Artificial Sequence
  Description of Artificial Sequence: Synthetic oligonucleotide
  Antisense Strand to SEQ ID NO: 460747
aauuucucccgcgaaacaa

SEQ ID NO: 460749 - RNA, 19 nt, Artificial Sequence
  Description of Artificial Sequence: Synthetic oligonucleotide
  Sense strand starting at position 2134 of SEQ ID NO: 317052
gggauuuccuaggaaugac

SEQ ID NO: 460750 - RNA, 19 nt, Artificial Sequence
  Description of Artificial Sequence: Synthetic oligonucleotide
  Antisense Strand to SEQ ID NO: 460749
gucauuccuaggaaauccc

SEQ ID NO: 460751 - RNA, 19 nt, Artificial Sequence
  Description of Artificial Sequence: Synthetic oligonucleotide
  Sense strand starting at position 2142 of SEQ ID NO: 317052
cuaggaaugacuugagcga

SEQ ID NO: 460752 - RNA, 19 nt, Artificial Sequence
  Description of Artificial Sequence: Synthetic oligonucleotide
  Antisense Strand to SEQ ID NO: 460751
ucgcucaagucauuccuag

SEQ ID NO: 460753 - RNA, 19 nt, Artificial Sequence
  Description of Artificial Sequence: Synthetic oligonucleotide
  Sense strand starting at position 2180 of SEQ ID NO: 317052
agacucugcuccuuaagaa

SEQ ID NO: 460754 - RNA, 19 nt, Artificial Sequence
  Description of Artificial Sequence: Synthetic oligonucleotide
  Antisense Strand to SEQ ID NO: 460753
uucuuaaggagcagagucu

SEQ ID NO: 460755 - RNA, 19 nt, Artificial Sequence
  Description of Artificial Sequence: Synthetic oligonucleotide
  Sense strand starting at position 2208 of SEQ ID NO: 317052
gaaggaugcuguuuggaac

SEQ ID NO: 460756 - RNA, 19 nt, Artificial Sequence
  Description of Artificial Sequence: Synthetic oligonucleotide
  Antisense Strand to SEQ ID NO: 460755
guuccaaacagcauccuuc

SEQ ID NO: 460757 - RNA, 19 nt, Artificial Sequence
  Description of Artificial Sequence: Synthetic oligonucleotide
  Sense strand starting at position 2215 of SEQ ID NO: 317052
gcuguuuggaaccaggauu

SEQ ID NO: 460758 - RNA, 19 nt, Artificial Sequence
  Description of Artificial Sequence: Synthetic oligonucleotide
  Antisense Strand to SEQ ID NO: 460757
aauccugguuccaaacagc

SEQ ID NO: 460759 - RNA, 19 nt, Artificial Sequence
  Description of Artificial Sequence: Synthetic oligonucleotide
  Sense strand starting at position 2401 of SEQ ID NO: 317052
acaggauuaugguucuuag

SEQ ID NO: 460760 - RNA, 19 nt, Artificial Sequence
  Description of Artificial Sequence: Synthetic oligonucleotide
  Antisense Strand to SEQ ID NO: 460759
cuaagaaccauaauccugu

SEQ ID NO: 460761 - RNA, 19 nt, Artificial Sequence
  Description of Artificial Sequence: Synthetic oligonucleotide
  Sense strand starting at position 2404 of SEQ ID NO: 317052
ggauuaugguucuuagaau

SEQ ID NO: 460762 - RNA, 19 nt, Artificial Sequence
  Description of Artificial Sequence: Synthetic oligonucleotide
  Antisense Strand to SEQ ID NO: 460761
auucuaagaaccauaaucc

SEQ ID NO: 460763 - RNA, 19 nt, Artificial Sequence
  Description of Artificial Sequence: Synthetic oligonucleotide
  Sense strand starting at position 2415 of SEQ ID NO: 317052
cuuagaaucuuggcaaaug

SEQ ID NO: 460764 - RNA, 19 nt, Artificial Sequence
  Description of Artificial Sequence: Synthetic oligonucleotide
  Antisense Strand to SEQ ID NO: 460763
cauuugccaagauucuaag

SEQ ID NO: 460765 - RNA, 19 nt, Artificial Sequence
  Description of Artificial Sequence: Synthetic oligonucleotide
  Sense strand starting at position 2440 of SEQ ID NO: 317052
ggguuuccuuuguuuauuu

SEQ ID NO: 460766 - RNA, 19 nt, Artificial Sequence
  Description of Artificial Sequence: Synthetic oligonucleotide
  Antisense Strand to SEQ ID NO: 460765
aaauaaacaaaggaaaccc

SEQ ID NO: 460767 - RNA, 19 nt, Artificial Sequence
  Description of Artificial Sequence: Synthetic oligonucleotide
  Sense strand starting at position 2461 of SEQ ID NO: 317052
acuggaugguuuguuaaca

SEQ ID NO: 460768 - RNA, 19 nt, Artificial Sequence
  Description of Artificial Sequence: Synthetic oligonucleotide
  Antisense Strand to SEQ ID NO: 460767
uguuaacaaaccauccagu

SEQ ID NO: 460769 - RNA, 19 nt, Artificial Sequence
  Description of Artificial Sequence: Synthetic oligonucleotide
  Sense strand starting at position 2462 of SEQ ID NO: 317052
cuggaugguuuguuaacaa

SEQ ID NO: 460770 - RNA, 19 nt, Artificial Sequence
  Description of Artificial Sequence: Synthetic oligonucleotide
  Antisense Strand to SEQ ID NO: 460769
uuguuaacaaaccauccag

SEQ ID NO: 460771 - RNA, 19 nt, Artificial Sequence
  Description of Artificial Sequence: Synthetic oligonucleotide
  Sense strand starting at position 2592 of SEQ ID NO: 317052
ugaauaauggcucauacuu

SEQ ID NO: 460772 - RNA, 19 nt, Artificial Sequence
  Description of Artificial Sequence: Synthetic oligonucleotide
  Antisense Strand to SEQ ID NO: 460771
aaguaugagccauuauuca

SEQ ID NO: 460773 - RNA, 19 nt, Artificial Sequence
  Description of Artificial Sequence: Synthetic oligonucleotide
  Sense strand starting at position 2601 of SEQ ID NO: 317052
gcucauacuuuacugagaa

SEQ ID NO: 460774 - RNA, 19 nt, Artificial Sequence
  Description of Artificial Sequence: Synthetic oligonucleotide
  Antisense Strand to SEQ ID NO: 460773
uucucaguaaaguaugagc

SEQ ID NO: 460775 - RNA, 19 nt, Artificial Sequence
  Description of Artificial Sequence: Synthetic oligonucleotide
  Sense strand starting at position 2800 of SEQ ID NO: 317052
acaggugaauugucuggua

SEQ ID NO: 460776 - RNA, 19 nt, Artificial Sequence
  Description of Artificial Sequence: Synthetic oligonucleotide
  Antisense Strand to SEQ ID NO: 460775
uaccagacaauucaccugu

SEQ ID NO: 460777 - RNA, 19 nt, Artificial Sequence
  Description of Artificial Sequence: Synthetic oligonucleotide
  Sense strand starting at position 2802 of SEQ ID NO: 317052
aggugaauugucugguaga

SEQ ID NO: 460778 - RNA, 19 nt, Artificial Sequence
  Description of Artificial Sequence: Synthetic oligonucleotide
  Antisense Strand to SEQ ID NO: 460777
ucuaccagacaauucaccu

SEQ ID NO: 460779 - RNA, 19 nt, Artificial Sequence
  Description of Artificial Sequence: Synthetic oligonucleotide
  Sense strand starting at position 3063 of SEQ ID NO: 317052
cuguacauuccagaaguaa

SEQ ID NO: 460780 - RNA, 19 nt, Artificial Sequence
  Description of Artificial Sequence: Synthetic oligonucleotide
  Antisense Strand to SEQ ID NO: 460779
uuacuucuggaauguacag

SEQ ID NO: 460781 - RNA, 19 nt, Artificial Sequence
  Description of Artificial Sequence: Synthetic oligonucleotide
  Sense strand starting at position 3123 of SEQ ID NO: 317052
ugugaaauagcauauaagu

SEQ ID NO: 460782 - RNA, 19 nt, Artificial Sequence
  Description of Artificial Sequence: Synthetic oligonucleotide
  Antisense Strand to SEQ ID NO: 460781
acuuauaugcuauuucaca

SEQ ID NO: 460783 - RNA, 19 nt, Artificial Sequence
  Description of Artificial Sequence: Synthetic oligonucleotide
  Sense strand starting at position 3153 of SEQ ID NO: 317052
aguaaauacuggguuccua

SEQ ID NO: 460784 - RNA, 19 nt, Artificial Sequence
  Description of Artificial Sequence: Synthetic oligonucleotide
  Antisense Strand to SEQ ID NO: 460783
uaggaacccaguauuuacu

SEQ ID NO: 460785 - RNA, 19 nt, Artificial Sequence
  Description of Artificial Sequence: Synthetic oligonucleotide
  Sense strand starting at position 3164 of SEQ ID NO: 317052
gguuccuaaucuguaaauu

SEQ ID NO: 460786 - RNA, 19 nt, Artificial Sequence
  Description of Artificial Sequence: Synthetic oligonucleotide
  Antisense Strand to SEQ ID NO: 460785
aauuuacagauuaggaacc

SEQ ID NO: 460787 - RNA, 19 nt, Artificial Sequence
  Description of Artificial Sequence: Synthetic oligonucleotide
  Sense strand starting at position 3165 of SEQ ID NO: 317052
guuccuaaucuguaaauug

SEQ ID NO: 460788 - RNA, 19 nt, Artificial Sequence
  Description of Artificial Sequence: Synthetic oligonucleotide
  Antisense Strand to SEQ ID NO: 460787
caauuuacagauuaggaac

SEQ ID NO: 460789 - RNA, 19 nt, Artificial Sequence
  Description of Artificial Sequence: Synthetic oligonucleotide
  Sense strand starting at position 3256 of SEQ ID NO: 317052
ugauacauaguauguaauc

SEQ ID NO: 460790 - RNA, 19 nt, Artificial Sequence
  Description of Artificial Sequence: Synthetic oligonucleotide
  Antisense Strand to SEQ ID NO: 460789
gauuacauacuauguauca

SEQ ID NO: 460791 - RNA, 19 nt, Artificial Sequence
  Description of Artificial Sequence: Synthetic oligonucleotide
  Sense strand starting at position 3585 of SEQ ID NO: 317052
caguuucuagcauauggua

SEQ ID NO: 460792 - RNA, 19 nt, Artificial Sequence
  Description of Artificial Sequence: Synthetic oligonucleotide
  Antisense Strand to SEQ ID NO: 460791
uaccauaugcuagaaacug

SEQ ID NO: 460793 - RNA, 19 nt, Artificial Sequence
  Description of Artificial Sequence: Synthetic oligonucleotide
  Sense strand starting at position 3701 of SEQ ID NO: 317052
gcauaucuagcccaggagu

SEQ ID NO: 460794 - RNA, 19 nt, Artificial Sequence
  Description of Artificial Sequence: Synthetic oligonucleotide
  Antisense Strand to SEQ ID NO: 460793
acuccugggcuagauaugc

SEQ ID NO: 460795 - RNA, 19 nt, Artificial Sequence
  Description of Artificial Sequence: Synthetic oligonucleotide
  Sense strand starting at position 3752 of SEQ ID NO: 317052
auucuuaggcaucagcaau

SEQ ID NO: 460796 - RNA, 19 nt, Artificial Sequence
  Description of Artificial Sequence: Synthetic oligonucleotide
  Antisense Strand to SEQ ID NO: 460795
auugcugaugccuaagaau

SEQ ID NO: 460797 - RNA, 19 nt, Artificial Sequence
  Description of Artificial Sequence: Synthetic oligonucleotide
  Sense strand starting at position 3766 of SEQ ID NO: 317052
gcaauuuauguacgccgga

SEQ ID NO: 460798 - RNA, 19 nt, Artificial Sequence
  Description of Artificial Sequence: Synthetic oligonucleotide
  Antisense Strand to SEQ ID NO: 460797
uccggcguacauaaauugc

SEQ ID NO: 460799 - RNA, 19 nt, Artificial Sequence
  Description of Artificial Sequence: Synthetic oligonucleotide
  Sense strand starting at position 255 of SEQ ID NO: 317053
uuuaacuggcuuuaaauga

SEQ ID NO: 460800 - RNA, 19 nt, Artificial Sequence
  Description of Artificial Sequence: Synthetic oligonucleotide
  Antisense Strand to SEQ ID NO: 460799
ucauuuaaagccaguuaaa

SEQ ID NO: 460801 - RNA, 19 nt, Artificial Sequence
  Description of Artificial Sequence: Synthetic oligonucleotide
  Sense strand starting at position 389 of SEQ ID NO: 317053
aagugacuuggccaaagcu

SEQ ID NO: 460802 - RNA, 19 nt, Artificial Sequence
  Description of Artificial Sequence: Synthetic oligonucleotide
  Antisense Strand to SEQ ID NO: 460801
agcuuuggccaagucacuu

SEQ ID NO: 460803 - RNA, 19 nt, Artificial Sequence
  Description of Artificial Sequence: Synthetic oligonucleotide
  Sense strand starting at position 426 of SEQ ID NO: 317053
agguauguuugaucccaca

SEQ ID NO: 460804 - RNA, 19 nt, Artificial Sequence
  Description of Artificial Sequence: Synthetic oligonucleotide
  Antisense Strand to SEQ ID NO: 460803
ugugggaucaaacauaccu

SEQ ID NO: 460805 - RNA, 19 nt, Artificial Sequence
  Description of Artificial Sequence: Synthetic oligonucleotide
  Sense strand starting at position 551 of SEQ ID NO: 317053
ucuagugggcuccauuaaa

SEQ ID NO: 460806 - RNA, 19 nt, Artificial Sequence
  Description of Artificial Sequence: Synthetic oligonucleotide
  Antisense Strand to SEQ ID NO: 460805
uuuaauggagcccacuaga

SEQ ID NO: 460807 - RNA, 19 nt, Artificial Sequence
  Description of Artificial Sequence: Synthetic oligonucleotide
  Sense strand starting at position 709 of SEQ ID NO: 317053
guaaguacaucauugagua

SEQ ID NO: 460808 - RNA, 19 nt, Artificial Sequence
  Description of Artificial Sequence: Synthetic oligonucleotide
  Antisense Strand to SEQ ID NO: 460807
uacucaaugauguacuuac

SEQ ID NO: 460809 - RNA, 19 nt, Artificial Sequence
  Description of Artificial Sequence: Synthetic oligonucleotide
  Sense strand starting at position 722 of SEQ ID NO: 317053
ugaguauguaguuauucua

SEQ ID NO: 460810 - RNA, 19 nt, Artificial Sequence
  Description of Artificial Sequence: Synthetic oligonucleotide
  Antisense Strand to SEQ ID NO: 460809
uagaauaacuacauacuca

SEQ ID NO: 460811 - RNA, 19 nt, Artificial Sequence
  Description of Artificial Sequence: Synthetic oligonucleotide
  Sense strand starting at position 762 of SEQ ID NO: 317053
gguacuauugccuauuacu

SEQ ID NO: 460812 - RNA, 19 nt, Artificial Sequence
  Description of Artificial Sequence: Synthetic oligonucleotide
  Antisense Strand to SEQ ID NO: 460811
aguaauaggcaauaguacc

SEQ ID NO: 460813 - RNA, 19 nt, Artificial Sequence
  Description of Artificial Sequence: Synthetic oligonucleotide
  Sense strand starting at position 831 of SEQ ID NO: 317053
ggugcuugacuguaaauaa

SEQ ID NO: 460814 - RNA, 19 nt, Artificial Sequence
  Description of Artificial Sequence: Synthetic oligonucleotide
  Antisense Strand to SEQ ID NO: 460813
uuauuuacagucaagcacc

SEQ ID NO: 460815 - RNA, 19 nt, Artificial Sequence
  Description of Artificial Sequence: Synthetic oligonucleotide
  Sense strand starting at position 966 of SEQ ID NO: 317053
gcaucuuuacuggacaaac

SEQ ID NO: 460816 - RNA, 19 nt, Artificial Sequence
  Description of Artificial Sequence: Synthetic oligonucleotide
  Antisense Strand to SEQ ID NO: 460815
guuuguccaguaaagaugc

SEQ ID NO: 460817 - RNA, 19 nt, Artificial Sequence
  Description of Artificial Sequence: Synthetic oligonucleotide
  Sense strand starting at position 1479 of SEQ ID NO: 317053
cugagaagcuaauccauau

SEQ ID NO: 460818 - RNA, 19 nt, Artificial Sequence
  Description of Artificial Sequence: Synthetic oligonucleotide
  Antisense Strand to SEQ ID NO: 460817
auauggauuagcuucucag

SEQ ID NO: 460819 - RNA, 19 nt, Artificial Sequence
  Description of Artificial Sequence: Synthetic oligonucleotide
  Sense strand starting at position 1530 of SEQ ID NO: 317053
gguuaagaaucauuguucu

SEQ ID NO: 460820 - RNA, 19 nt, Artificial Sequence
  Description of Artificial Sequence: Synthetic oligonucleotide
  Antisense Strand to SEQ ID NO: 460819
agaacaaugauucuuaacc

SEQ ID NO: 460821 - RNA, 19 nt, Artificial Sequence
  Description of Artificial Sequence: Synthetic oligonucleotide
  Sense strand starting at position 1533 of SEQ ID NO: 317053
uaagaaucauuguucuggu

SEQ ID NO: 460822 - RNA, 19 nt, Artificial Sequence
  Description of Artificial Sequence: Synthetic oligonucleotide
  Antisense Strand to SEQ ID NO: 460821
accagaacaaugauucuua

SEQ ID NO: 460823 - RNA, 19 nt, Artificial Sequence
  Description of Artificial Sequence: Synthetic oligonucleotide
  Sense strand starting at position 1658 of SEQ ID NO: 317053
auggcaucuuacucuuuga

SEQ ID NO: 460824 - RNA, 19 nt, Artificial Sequence
  Description of Artificial Sequence: Synthetic oligonucleotide
  Antisense Strand to SEQ ID NO: 460823
ucaaagaguaagaugccau

SEQ ID NO: 460825 - RNA, 19 nt, Artificial Sequence
  Description of Artificial Sequence: Synthetic oligonucleotide
  Sense strand starting at position 1661 of SEQ ID NO: 317053
gcaucuuacucuuugagau

SEQ ID NO: 460826 - RNA, 19 nt, Artificial Sequence
  Description of Artificial Sequence: Synthetic oligonucleotide
  Antisense Strand to SEQ ID NO: 460825
aucucaaagaguaagaugc

SEQ ID NO: 460827 - RNA, 19 nt, Artificial Sequence
  Description of Artificial Sequence: Synthetic oligonucleotide
  Sense strand starting at position 2531 of SEQ ID NO: 317053
uggugaggucccgcguuaa

SEQ ID NO: 460828 - RNA, 19 nt, Artificial Sequence
  Description of Artificial Sequence: Synthetic oligonucleotide
  Antisense Strand to SEQ ID NO: 460827
uuaacgcgggaccucacca

SEQ ID NO: 460829 - RNA, 19 nt, Artificial Sequence
  Description of Artificial Sequence: Synthetic oligonucleotide
  Sense strand starting at position 2533 of SEQ ID NO: 317053
gugaggucccgcguuaaug

SEQ ID NO: 460830 - RNA, 19 nt, Artificial Sequence
  Description of Artificial Sequence: Synthetic oligonucleotide
  Antisense Strand to SEQ ID NO: 460829
cauuaacgcgggaccucac

SEQ ID NO: 460831 - RNA, 19 nt, Artificial Sequence
  Description of Artificial Sequence: Synthetic oligonucleotide
  Sense strand starting at position 2543 of SEQ ID NO: 317053
gcguuaaugacgucacguu

SEQ ID NO: 460832 - RNA, 19 nt, Artificial Sequence
  Description of Artificial Sequence: Synthetic oligonucleotide
  Antisense Strand to SEQ ID NO: 460831
aacgugacgucauuaacgc

SEQ ID NO: 460833 - RNA, 19 nt, Artificial Sequence
  Description of Artificial Sequence: Synthetic oligonucleotide
  Sense strand starting at position 2560 of SEQ ID NO: 317053
uuguuucgcgggagaaauu

SEQ ID NO: 460834 - RNA, 19 nt, Artificial Sequence
  Description of Artificial Sequence: Synthetic oligonucleotide
  Antisense Strand to SEQ ID NO: 460833
aauuucucccgcgaaacaa

SEQ ID NO: 460835 - RNA, 19 nt, Artificial Sequence
  Description of Artificial Sequence: Synthetic oligonucleotide
  Sense strand starting at position 2626 of SEQ ID NO: 317053
gggauuuccuaggaaugac

SEQ ID NO: 460836 - RNA, 19 nt, Artificial Sequence
  Description of Artificial Sequence: Synthetic oligonucleotide
  Antisense Strand to SEQ ID NO: 460835
gucauuccuaggaaauccc

SEQ ID NO: 460837 - RNA, 19 nt, Artificial Sequence
  Description of Artificial Sequence: Synthetic oligonucleotide
  Sense strand starting at position 2634 of SEQ ID NO: 317053
cuaggaaugacuugagcga

SEQ ID NO: 460838 - RNA, 19 nt, Artificial Sequence
  Description of Artificial Sequence: Synthetic oligonucleotide
  Antisense Strand to SEQ ID NO: 460837
ucgcucaagucauuccuag

SEQ ID NO: 460839 - RNA, 19 nt, Artificial Sequence
  Description of Artificial Sequence: Synthetic oligonucleotide
  Sense strand starting at position 2672 of SEQ ID NO: 317053
agacucugcuccuuaagaa

SEQ ID NO: 460840 - RNA, 19 nt, Artificial Sequence
  Description of Artificial Sequence: Synthetic oligonucleotide
  Antisense Strand to SEQ ID NO: 460839
uucuuaaggagcagagucu

SEQ ID NO: 460841 - RNA, 19 nt, Artificial Sequence
  Description of Artificial Sequence: Synthetic oligonucleotide
  Sense strand starting at position 2700 of SEQ ID NO: 317053
gaaggaugcuguuuggaac

SEQ ID NO: 460842 - RNA, 19 nt, Artificial Sequence
  Description of Artificial Sequence: Synthetic oligonucleotide
  Antisense Strand to SEQ ID NO: 460841
guuccaaacagcauccuuc

SEQ ID NO: 460843 - RNA, 19 nt, Artificial Sequence
  Description of Artificial Sequence: Synthetic oligonucleotide
  Sense strand starting at position 2707 of SEQ ID NO: 317053
gcuguuuggaaccaggauu

SEQ ID NO: 460844 - RNA, 19 nt, Artificial Sequence
  Description of Artificial Sequence: Synthetic oligonucleotide
  Antisense Strand to SEQ ID NO: 460843
aauccugguuccaaacagc

SEQ ID NO: 460845 - RNA, 19 nt, Artificial Sequence
  Description of Artificial Sequence: Synthetic oligonucleotide
  Sense strand starting at position 2893 of SEQ ID NO: 317053
acaggauuaugguucuuag

SEQ ID NO: 460846 - RNA, 19 nt, Artificial Sequence
  Description of Artificial Sequence: Synthetic oligonucleotide
  Antisense Strand to SEQ ID NO: 460845
cuaagaaccauaauccugu

SEQ ID NO: 460847 - RNA, 19 nt, Artificial Sequence
  Description of Artificial Sequence: Synthetic oligonucleotide
  Sense strand starting at position 2896 of SEQ ID NO: 317053
ggauuaugguucuuagaau

SEQ ID NO: 460848 - RNA, 19 nt, Artificial Sequence
  Description of Artificial Sequence: Synthetic oligonucleotide
  Antisense Strand to SEQ ID NO: 460847
auucuaagaaccauaaucc

SEQ ID NO: 460849 - RNA, 19 nt, Artificial Sequence
  Description of Artificial Sequence: Synthetic oligonucleotide
  Sense strand starting at position 2907 of SEQ ID NO: 317053
cuuagaaucuuggcaaaug

SEQ ID NO: 460850 - RNA, 19 nt, Artificial Sequence
  Description of Artificial Sequence: Synthetic oligonucleotide
  Antisense Strand to SEQ ID NO: 460849
cauuugccaagauucuaag

SEQ ID NO: 460851 - RNA, 19 nt, Artificial Sequence
  Description of Artificial Sequence: Synthetic oligonucleotide
  Sense strand starting at position 2932 of SEQ ID NO: 317053
ggguuuccuuuguuuauuu

SEQ ID NO: 460852 - RNA, 19 nt, Artificial Sequence
  Description of Artificial Sequence: Synthetic oligonucleotide
  Antisense Strand to SEQ ID NO: 460851
aaauaaacaaaggaaaccc

SEQ ID NO: 460853 - RNA, 19 nt, Artificial Sequence
  Description of Artificial Sequence: Synthetic oligonucleotide
  Sense strand starting at position 2953 of SEQ ID NO: 317053
acuggaugguuuguuaaca

SEQ ID NO: 460854 - RNA, 19 nt, Artificial Sequence
  Description of Artificial Sequence: Synthetic oligonucleotide
  Antisense Strand to SEQ ID NO: 460853
uguuaacaaaccauccagu

SEQ ID NO: 460855 - RNA, 19 nt, Artificial Sequence
  Description of Artificial Sequence: Synthetic oligonucleotide
  Sense strand starting at position 2954 of SEQ ID NO: 317053
cuggaugguuuguuaacaa

SEQ ID NO: 460856 - RNA, 19 nt, Artificial Sequence
  Description of Artificial Sequence: Synthetic oligonucleotide
  Antisense Strand to SEQ ID NO: 460855
uuguuaacaaaccauccag

SEQ ID NO: 460857 - RNA, 19 nt, Artificial Sequence
  Description of Artificial Sequence: Synthetic oligonucleotide
  Sense strand starting at position 3084 of SEQ ID NO: 317053
ugaauaauggcucauacuu

SEQ ID NO: 460858 - RNA, 19 nt, Artificial Sequence
  Description of Artificial Sequence: Synthetic oligonucleotide
  Antisense Strand to SEQ ID NO: 460857
aaguaugagccauuauuca

SEQ ID NO: 460859 - RNA, 19 nt, Artificial Sequence
  Description of Artificial Sequence: Synthetic oligonucleotide
  Sense strand starting at position 3093 of SEQ ID NO: 317053
gcucauacuuuacugagaa

SEQ ID NO: 460860 - RNA, 19 nt, Artificial Sequence
  Description of Artificial Sequence: Synthetic oligonucleotide
  Antisense Strand to SEQ ID NO: 460859
uucucaguaaaguaugagc

SEQ ID NO: 460861 - RNA, 19 nt, Artificial Sequence
  Description of Artificial Sequence: Synthetic oligonucleotide
  Sense strand starting at position 3148 of SEQ ID NO: 317053
auaguagcacaauguauau

SEQ ID NO: 460862 - RNA, 19 nt, Artificial Sequence
  Description of Artificial Sequence: Synthetic oligonucleotide
  Antisense Strand to SEQ ID NO: 460861
auauacauugugcuacuau

SEQ ID NO: 460863 - RNA, 19 nt, Artificial Sequence
  Description of Artificial Sequence: Synthetic oligonucleotide
  Sense strand starting at position 3292 of SEQ ID NO: 317053
acaggugaauugucuggua

SEQ ID NO: 460864 - RNA, 19 nt, Artificial Sequence
  Description of Artificial Sequence: Synthetic oligonucleotide
  Antisense Strand to SEQ ID NO: 460863
uaccagacaauucaccugu

SEQ ID NO: 460865 - RNA, 19 nt, Artificial Sequence
  Description of Artificial Sequence: Synthetic oligonucleotide
  Sense strand starting at position 3294 of SEQ ID NO: 317053
aggugaauugucugguaga

SEQ ID NO: 460866 - RNA, 19 nt, Artificial Sequence
  Description of Artificial Sequence: Synthetic oligonucleotide
  Antisense Strand to SEQ ID NO: 460865
ucuaccagacaauucaccu

SEQ ID NO: 460867 - RNA, 19 nt, Artificial Sequence
  Description of Artificial Sequence: Synthetic oligonucleotide
  Sense strand starting at position 3555 of SEQ ID NO: 317053
cuguacauuccagaaguaa

SEQ ID NO: 460868 - RNA, 19 nt, Artificial Sequence
  Description of Artificial Sequence: Synthetic oligonucleotide
  Antisense Strand to SEQ ID NO: 460867
uuacuucuggaauguacag

SEQ ID NO: 460869 - RNA, 19 nt, Artificial Sequence
  Description of Artificial Sequence: Synthetic oligonucleotide
  Sense strand starting at position 3615 of SEQ ID NO: 317053
ugugaaauagcauauaagu

SEQ ID NO: 460870 - RNA, 19 nt, Artificial Sequence
  Description of Artificial Sequence: Synthetic oligonucleotide
  Antisense Strand to SEQ ID NO: 460869
acuuauaugcuauuucaca

SEQ ID NO: 460871 - RNA, 19 nt, Artificial Sequence
  Description of Artificial Sequence: Synthetic oligonucleotide
  Sense strand starting at position 3645 of SEQ ID NO: 317053
aguaaauacuggguuccua

SEQ ID NO: 460872 - RNA, 19 nt, Artificial Sequence
  Description of Artificial Sequence: Synthetic oligonucleotide
  Antisense Strand to SEQ ID NO: 460871
uaggaacccaguauuuacu

SEQ ID NO: 460873 - RNA, 19 nt, Artificial Sequence
  Description of Artificial Sequence: Synthetic oligonucleotide
  Sense strand starting at position 3656 of SEQ ID NO: 317053
gguuccuaaucuguaaauu

SEQ ID NO: 460874 - RNA, 19 nt, Artificial Sequence
  Description of Artificial Sequence: Synthetic oligonucleotide
  Antisense Strand to SEQ ID NO: 460873
aauuuacagauuaggaacc

SEQ ID NO: 460875 - RNA, 19 nt, Artificial Sequence
  Description of Artificial Sequence: Synthetic oligonucleotide
  Sense strand starting at position 3657 of SEQ ID NO: 317053
guuccuaaucuguaaauug

SEQ ID NO: 460876 - RNA, 19 nt, Artificial Sequence
  Description of Artificial Sequence: Synthetic oligonucleotide
  Antisense Strand to SEQ ID NO: 460875
caauuuacagauuaggaac

SEQ ID NO: 460877 - RNA, 19 nt, Artificial Sequence
  Description of Artificial Sequence: Synthetic oligonucleotide
  Sense strand starting at position 3748 of SEQ ID NO: 317053
ugauacauaguauguaauc

SEQ ID NO: 460878 - RNA, 19 nt, Artificial Sequence
  Description of Artificial Sequence: Synthetic oligonucleotide
  Antisense Strand to SEQ ID NO: 460877
gauuacauacuauguauca

SEQ ID NO: 460879 - RNA, 19 nt, Artificial Sequence
  Description of Artificial Sequence: Synthetic oligonucleotide
  Sense strand starting at position 132 of SEQ ID NO: 317054
cgaauacuugacuaaagcu

SEQ ID NO: 460880 - RNA, 19 nt, Artificial Sequence
  Description of Artificial Sequence: Synthetic oligonucleotide
  Antisense Strand to SEQ ID NO: 460879
agcuuuagucaaguauucg

SEQ ID NO: 460881 - RNA, 19 nt, Artificial Sequence
  Description of Artificial Sequence: Synthetic oligonucleotide
  Sense strand starting at position 286 of SEQ ID NO: 317054
ucgcguucugcgguacaca

SEQ ID NO: 460882 - RNA, 19 nt, Artificial Sequence
  Description of Artificial Sequence: Synthetic oligonucleotide
  Antisense Strand to SEQ ID NO: 460881
uguguaccgcagaacgcga

SEQ ID NO: 460883 - RNA, 19 nt, Artificial Sequence
  Description of Artificial Sequence: Synthetic oligonucleotide
  Sense strand starting at position 298 of SEQ ID NO: 317054
guacacauuucugaacuga

SEQ ID NO: 460884 - RNA, 19 nt, Artificial Sequence
  Description of Artificial Sequence: Synthetic oligonucleotide
  Antisense Strand to SEQ ID NO: 460883
ucaguucagaaauguguac

SEQ ID NO: 460885 - RNA, 19 nt, Artificial Sequence
  Description of Artificial Sequence: Synthetic oligonucleotide
  Sense strand starting at position 341 of SEQ ID NO: 317054
cgaucucuucucuacuagu

SEQ ID NO: 460886 - RNA, 19 nt, Artificial Sequence
  Description of Artificial Sequence: Synthetic oligonucleotide
  Antisense Strand to SEQ ID NO: 460885
acuaguagagaagagaucg

SEQ ID NO: 460887 - RNA, 19 nt, Artificial Sequence
  Description of Artificial Sequence: Synthetic oligonucleotide
  Sense strand starting at position 372 of SEQ ID NO: 317054
uuaagacguuaaccaaaua

SEQ ID NO: 460888 - RNA, 19 nt, Artificial Sequence
  Description of Artificial Sequence: Synthetic oligonucleotide
  Antisense Strand to SEQ ID NO: 460887
uauuugguuaacgucuuaa

SEQ ID NO: 460889 - RNA, 19 nt, Artificial Sequence
  Description of Artificial Sequence: Synthetic oligonucleotide
  Sense strand starting at position 676 of SEQ ID NO: 317054
ggauaacagcucuaugcau

SEQ ID NO: 460890 - RNA, 19 nt, Artificial Sequence
  Description of Artificial Sequence: Synthetic oligonucleotide
  Antisense Strand to SEQ ID NO: 460889
augcauagagcuguuaucc

SEQ ID NO: 460891 - RNA, 19 nt, Artificial Sequence
  Description of Artificial Sequence: Synthetic oligonucleotide
  Sense strand starting at position 1768 of SEQ ID NO: 317054
agucgaguucccgccggaa

SEQ ID NO: 460892 - RNA, 19 nt, Artificial Sequence
  Description of Artificial Sequence: Synthetic oligonucleotide
  Antisense Strand to SEQ ID NO: 460891
uuccggcgggaacucgacu

SEQ ID NO: 460893 - RNA, 19 nt, Artificial Sequence
  Description of Artificial Sequence: Synthetic oligonucleotide
  Sense strand starting at position 1769 of SEQ ID NO: 317054
gucgaguucccgccggaau

SEQ ID NO: 460894 - RNA, 19 nt, Artificial Sequence
  Description of Artificial Sequence: Synthetic oligonucleotide
  Antisense Strand to SEQ ID NO: 460893
auuccggcgggaacucgac

SEQ ID NO: 460895 - RNA, 19 nt, Artificial Sequence
  Description of Artificial Sequence: Synthetic oligonucleotide
  Sense strand starting at position 2322 of SEQ ID NO: 317054
ggcuccauuucgccaggau

SEQ ID NO: 460896 - RNA, 19 nt, Artificial Sequence
  Description of Artificial Sequence: Synthetic oligonucleotide
  Antisense Strand to SEQ ID NO: 460895
auccuggcgaaauggagcc

SEQ ID NO: 460897 - RNA, 19 nt, Artificial Sequence
  Description of Artificial Sequence: Synthetic oligonucleotide
  Sense strand starting at position 2323 of SEQ ID NO: 317054
gcuccauuucgccaggauc

SEQ ID NO: 460898 - RNA, 19 nt, Artificial Sequence
  Description of Artificial Sequence: Synthetic oligonucleotide
  Antisense Strand to SEQ ID NO: 460897
gauccuggcgaaauggagc

SEQ ID NO: 460899 - RNA, 19 nt, Artificial Sequence
  Description of Artificial Sequence: Synthetic oligonucleotide
  Sense strand starting at position 2380 of SEQ ID NO: 317054
gucauuguaguccagaaga

SEQ ID NO: 460900 - RNA, 19 nt, Artificial Sequence
  Description of Artificial Sequence: Synthetic oligonucleotide
  Antisense Strand to SEQ ID NO: 460899
ucuucuggacuacaaugac

SEQ ID NO: 460901 - RNA, 19 nt, Artificial Sequence
  Description of Artificial Sequence: Synthetic oligonucleotide
  Sense strand starting at position 2710 of SEQ ID NO: 317054
uucggcuacaucuggaaua

SEQ ID NO: 460902 - RNA, 19 nt, Artificial Sequence
  Description of Artificial Sequence: Synthetic oligonucleotide
  Antisense Strand to SEQ ID NO: 460901
uauuccagauguagccgaa

SEQ ID NO: 460903 - RNA, 19 nt, Artificial Sequence
  Description of Artificial Sequence: Synthetic oligonucleotide
  Sense strand starting at position 2712 of SEQ ID NO: 317054
cggcuacaucuggaauaac

SEQ ID NO: 460904 - RNA, 19 nt, Artificial Sequence
  Description of Artificial Sequence: Synthetic oligonucleotide
  Antisense Strand to SEQ ID NO: 460903
guuauuccagauguagccg

SEQ ID NO: 460905 - RNA, 19 nt, Artificial Sequence
  Description of Artificial Sequence: Synthetic oligonucleotide
  Sense strand starting at position 2767 of SEQ ID NO: 317054
gguauucaaggcgaagaga

SEQ ID NO: 460906 - RNA, 19 nt, Artificial Sequence
  Description of Artificial Sequence: Synthetic oligonucleotide
  Antisense Strand to SEQ ID NO: 460905
ucucuucgccuugaauacc

SEQ ID NO: 460907 - RNA, 19 nt, Artificial Sequence
  Description of Artificial Sequence: Synthetic oligonucleotide
  Sense strand starting at position 2778 of SEQ ID NO: 317054
cgaagagaucucggaaagc

SEQ ID NO: 460908 - RNA, 19 nt, Artificial Sequence
  Description of Artificial Sequence: Synthetic oligonucleotide
  Antisense Strand to SEQ ID NO: 460907
gcuuuccgagaucucuucg

SEQ ID NO: 460909 - RNA, 19 nt, Artificial Sequence
  Description of Artificial Sequence: Synthetic oligonucleotide
  Sense strand starting at position 2787 of SEQ ID NO: 317054
cucggaaagccagaauauu

SEQ ID NO: 460910 - RNA, 19 nt, Artificial Sequence
  Description of Artificial Sequence: Synthetic oligonucleotide
  Antisense Strand to SEQ ID NO: 460909
aauauucuggcuuuccgag

SEQ ID NO: 460911 - RNA, 19 nt, Artificial Sequence
  Description of Artificial Sequence: Synthetic oligonucleotide
  Sense strand starting at position 3070 of SEQ ID NO: 317054
gaggaaucuuacguuuaaa

SEQ ID NO: 460912 - RNA, 19 nt, Artificial Sequence
  Description of Artificial Sequence: Synthetic oligonucleotide
  Antisense Strand to SEQ ID NO: 460911
uuuaaacguaagauuccuc

SEQ ID NO: 460913 - RNA, 19 nt, Artificial Sequence
  Description of Artificial Sequence: Synthetic oligonucleotide
  Sense strand starting at position 3125 of SEQ ID NO: 317054
agcgauugugcguuuguuu

SEQ ID NO: 460914 - RNA, 19 nt, Artificial Sequence
  Description of Artificial Sequence: Synthetic oligonucleotide
  Antisense Strand to SEQ ID NO: 460913
aaacaaacgcacaaucgcu

SEQ ID NO: 460915 - RNA, 19 nt, Artificial Sequence
  Description of Artificial Sequence: Synthetic oligonucleotide
  Sense strand starting at position 3157 of SEQ ID NO: 317054
guuuaucaagccgaagcua

SEQ ID NO: 460916 - RNA, 19 nt, Artificial Sequence
  Description of Artificial Sequence: Synthetic oligonucleotide
  Antisense Strand to SEQ ID NO: 460915
uagcuucggcuugauaaac

SEQ ID NO: 460917 - RNA, 19 nt, Artificial Sequence
  Description of Artificial Sequence: Synthetic oligonucleotide
  Sense strand starting at position 3180 of SEQ ID NO: 317054
acccaacguuugcuaagaa

SEQ ID NO: 460918 - RNA, 19 nt, Artificial Sequence
  Description of Artificial Sequence: Synthetic oligonucleotide
  Antisense Strand to SEQ ID NO: 460917
uucuuagcaaacguugggu

SEQ ID NO: 460919 - RNA, 19 nt, Artificial Sequence
  Description of Artificial Sequence: Synthetic oligonucleotide
  Sense strand starting at position 3230 of SEQ ID NO: 317054
gucugugggaaauauguuu

SEQ ID NO: 460920 - RNA, 19 nt, Artificial Sequence
  Description of Artificial Sequence: Synthetic oligonucleotide
  Antisense Strand to SEQ ID NO: 460919
aaacauauuucccacagac

SEQ ID NO: 460921 - RNA, 19 nt, Artificial Sequence
  Description of Artificial Sequence: Synthetic oligonucleotide
  Sense strand starting at position 3235 of SEQ ID NO: 317054
ugggaaauauguuuaauuc

SEQ ID NO: 460922 - RNA, 19 nt, Artificial Sequence
  Description of Artificial Sequence: Synthetic oligonucleotide
  Antisense Strand to SEQ ID NO: 460921
gaauuaaacauauuuccca

SEQ ID NO: 460923 - RNA, 19 nt, Artificial Sequence
  Description of Artificial Sequence: Synthetic oligonucleotide
  Sense strand starting at position 3243 of SEQ ID NO: 317054
auguuuaauucuucuugga

SEQ ID NO: 460924 - RNA, 19 nt, Artificial Sequence
  Description of Artificial Sequence: Synthetic oligonucleotide
  Antisense Strand to SEQ ID NO: 460923
uccaagaagaauuaaacau

SEQ ID NO: 460925 - RNA, 19 nt, Artificial Sequence
  Description of Artificial Sequence: Synthetic oligonucleotide
  Sense strand starting at position 3245 of SEQ ID NO: 317054
guuuaauucuucuuggaaa

SEQ ID NO: 460926 - RNA, 19 nt, Artificial Sequence
  Description of Artificial Sequence: Synthetic oligonucleotide
  Antisense Strand to SEQ ID NO: 460925
uuuccaagaagaauuaaac

SEQ ID NO: 460927 - RNA, 19 nt, Artificial Sequence
  Description of Artificial Sequence: Synthetic oligonucleotide
  Sense strand starting at position 3303 of SEQ ID NO: 317054
guggcuuauccuuauccac

SEQ ID NO: 460928 - RNA, 19 nt, Artificial Sequence
  Description of Artificial Sequence: Synthetic oligonucleotide
  Antisense Strand to SEQ ID NO: 460927
guggauaaggauaagccac

SEQ ID NO: 460929 - RNA, 19 nt, Artificial Sequence
  Description of Artificial Sequence: Synthetic oligonucleotide
  Sense strand starting at position 3344 of SEQ ID NO: 317054
aguauuucuuugcucauua

SEQ ID NO: 460930 - RNA, 19 nt, Artificial Sequence
  Description of Artificial Sequence: Synthetic oligonucleotide
  Antisense Strand to SEQ ID NO: 460929
uaaugagcaaagaaauacu

SEQ ID NO: 460931 - RNA, 19 nt, Artificial Sequence
  Description of Artificial Sequence: Synthetic oligonucleotide
  Sense strand starting at position 3345 of SEQ ID NO: 317054
guauuucuuugcucauuau

SEQ ID NO: 460932 - RNA, 19 nt, Artificial Sequence
  Description of Artificial Sequence: Synthetic oligonucleotide
  Antisense Strand to SEQ ID NO: 460931
auaaugagcaaagaaauac

SEQ ID NO: 460933 - RNA, 19 nt, Artificial Sequence
  Description of Artificial Sequence: Synthetic oligonucleotide
  Sense strand starting at position 3471 of SEQ ID NO: 317054
aucacuagugaaggugauu

SEQ ID NO: 460934 - RNA, 19 nt, Artificial Sequence
  Description of Artificial Sequence: Synthetic oligonucleotide
  Antisense Strand to SEQ ID NO: 460933
aaucaccuucacuagugau

SEQ ID NO: 460935 - RNA, 19 nt, Artificial Sequence
  Description of Artificial Sequence: Synthetic oligonucleotide
  Sense strand starting at position 3490 of SEQ ID NO: 317054
uuggaauugucaguggaug

SEQ ID NO: 460936 - RNA, 19 nt, Artificial Sequence
  Description of Artificial Sequence: Synthetic oligonucleotide
  Antisense Strand to SEQ ID NO: 460935
cauccacugacaauuccaa

SEQ ID NO: 460937 - RNA, 19 nt, Artificial Sequence
  Description of Artificial Sequence: Synthetic oligonucleotide
  Sense strand starting at position 3492 of SEQ ID NO: 317054
ggaauugucaguggauggu

SEQ ID NO: 460938 - RNA, 19 nt, Artificial Sequence
  Description of Artificial Sequence: Synthetic oligonucleotide
  Antisense Strand to SEQ ID NO: 460937
accauccacugacaauucc

SEQ ID NO: 460939 - RNA, 19 nt, Artificial Sequence
  Description of Artificial Sequence: Synthetic oligonucleotide
  Sense strand starting at position 3530 of SEQ ID NO: 317054
ucacaauugccacgaugau

SEQ ID NO: 460940 - RNA, 19 nt, Artificial Sequence
  Description of Artificial Sequence: Synthetic oligonucleotide
  Antisense Strand to SEQ ID NO: 460939
aucaucguggcaauuguga

SEQ ID NO: 460941 - RNA, 19 nt, Artificial Sequence
  Description of Artificial Sequence: Synthetic oligonucleotide
  Sense strand starting at position 3632 of SEQ ID NO: 317054
ccaagaaucuuaguggcuu

SEQ ID NO: 460942 - RNA, 19 nt, Artificial Sequence
  Description of Artificial Sequence: Synthetic oligonucleotide
  Antisense Strand to SEQ ID NO: 460941
aagccacuaagauucuugg

SEQ ID NO: 460943 - RNA, 19 nt, Artificial Sequence
  Description of Artificial Sequence: Synthetic oligonucleotide
  Sense strand starting at position 3742 of SEQ ID NO: 317054
gcaacuggauccuuaaaga

SEQ ID NO: 460944 - RNA, 19 nt, Artificial Sequence
  Description of Artificial Sequence: Synthetic oligonucleotide
  Antisense Strand to SEQ ID NO: 460943
ucuuuaaggauccaguugc

SEQ ID NO: 460945 - RNA, 19 nt, Artificial Sequence
  Description of Artificial Sequence: Synthetic oligonucleotide
  Sense strand starting at position 3820 of SEQ ID NO: 317054
cgaacugguucuuccuaaa

SEQ ID NO: 460946 - RNA, 19 nt, Artificial Sequence
  Description of Artificial Sequence: Synthetic oligonucleotide
  Antisense Strand to SEQ ID NO: 460945
uuuaggaagaaccaguucg

SEQ ID NO: 460947 - RNA, 19 nt, Artificial Sequence
  Description of Artificial Sequence: Synthetic oligonucleotide
  Sense strand starting at position 3841 of SEQ ID NO: 317054
ugauacaagucaguucuca

SEQ ID NO: 460948 - RNA, 19 nt, Artificial Sequence
  Description of Artificial Sequence: Synthetic oligonucleotide
  Antisense Strand to SEQ ID NO: 460947
ugagaacugacuuguauca

SEQ ID NO: 460949 - RNA, 19 nt, Artificial Sequence
  Description of Artificial Sequence: Synthetic oligonucleotide
  Sense strand starting at position 3845 of SEQ ID NO: 317054
acaagucaguucucacauu

SEQ ID NO: 460950 - RNA, 19 nt, Artificial Sequence
  Description of Artificial Sequence: Synthetic oligonucleotide
  Antisense Strand to SEQ ID NO: 460949
aaugugagaacugacuugu

SEQ ID NO: 460951 - RNA, 19 nt, Artificial Sequence
  Description of Artificial Sequence: Synthetic oligonucleotide
  Sense strand starting at position 3950 of SEQ ID NO: 317054
accagaauuuauugguaaa

SEQ ID NO: 460952 - RNA, 19 nt, Artificial Sequence
  Description of Artificial Sequence: Synthetic oligonucleotide
  Antisense Strand to SEQ ID NO: 460951
uuuaccaauaaauucuggu

SEQ ID NO: 460953 - RNA, 19 nt, Artificial Sequence
  Description of Artificial Sequence: Synthetic oligonucleotide
  Sense strand starting at position 3972 of SEQ ID NO: 317054
uaucaaggauuacugugau

SEQ ID NO: 460954 - RNA, 19 nt, Artificial Sequence
  Description of Artificial Sequence: Synthetic oligonucleotide
  Antisense Strand to SEQ ID NO: 460953
aucacaguaauccuugaua

SEQ ID NO: 460955 - RNA, 19 nt, Artificial Sequence
  Description of Artificial Sequence: Synthetic oligonucleotide
  Sense strand starting at position 3975 of SEQ ID NO: 317054
caaggauuacugugaucua

SEQ ID NO: 460956 - RNA, 19 nt, Artificial Sequence
  Description of Artificial Sequence: Synthetic oligonucleotide
  Antisense Strand to SEQ ID NO: 460955
uagaucacaguaauccuug

SEQ ID NO: 460957 - RNA, 19 nt, Artificial Sequence
  Description of Artificial Sequence: Synthetic oligonucleotide
  Sense strand starting at position 3978 of SEQ ID NO: 317054
ggauuacugugaucuaucc

SEQ ID NO: 460958 - RNA, 19 nt, Artificial Sequence
  Description of Artificial Sequence: Synthetic oligonucleotide
  Antisense Strand to SEQ ID NO: 460957
ggauagaucacaguaaucc

SEQ ID NO: 460959 - RNA, 19 nt, Artificial Sequence
  Description of Artificial Sequence: Synthetic oligonucleotide
  Sense strand starting at position 15 of SEQ ID NO: 317055
guugcaaagaucugaagga

SEQ ID NO: 460960 - RNA, 19 nt, Artificial Sequence
  Description of Artificial Sequence: Synthetic oligonucleotide
  Antisense Strand to SEQ ID NO: 460959
uccuucagaucuuugcaac

SEQ ID NO: 460961 - RNA, 19 nt, Artificial Sequence
  Description of Artificial Sequence: Synthetic oligonucleotide
  Sense strand starting at position 181 of SEQ ID NO: 317055
cagucauauuuagcgucua

SEQ ID NO: 460962 - RNA, 19 nt, Artificial Sequence
  Description of Artificial Sequence: Synthetic oligonucleotide
  Antisense Strand to SEQ ID NO: 460961
uagacgcuaaauaugacug

SEQ ID NO: 460963 - RNA, 19 nt, Artificial Sequence
  Description of Artificial Sequence: Synthetic oligonucleotide
  Sense strand starting at position 258 of SEQ ID NO: 317055
acauauaaguccuugucca

SEQ ID NO: 460964 - RNA, 19 nt, Artificial Sequence
  Description of Artificial Sequence: Synthetic oligonucleotide
  Antisense Strand to SEQ ID NO: 460963
uggacaaggacuuauaugu

SEQ ID NO: 460965 - RNA, 19 nt, Artificial Sequence
  Description of Artificial Sequence: Synthetic oligonucleotide
  Sense strand starting at position 328 of SEQ ID NO: 317055
acgaaacgucaugaauucu

SEQ ID NO: 460966 - RNA, 19 nt, Artificial Sequence
  Description of Artificial Sequence: Synthetic oligonucleotide
  Antisense Strand to SEQ ID NO: 460965
agaauucaugacguuucgu

SEQ ID NO: 460967 - RNA, 19 nt, Artificial Sequence
  Description of Artificial Sequence: Synthetic oligonucleotide
  Sense strand starting at position 336 of SEQ ID NO: 317055
ucaugaauucucuauggcu

SEQ ID NO: 460968 - RNA, 19 nt, Artificial Sequence
  Description of Artificial Sequence: Synthetic oligonucleotide
  Antisense Strand to SEQ ID NO: 460967
agccauagagaauucauga

SEQ ID NO: 460969 - RNA, 19 nt, Artificial Sequence
  Description of Artificial Sequence: Synthetic oligonucleotide
  Sense strand starting at position 348 of SEQ ID NO: 317055
uauggcucuguugacaauu

SEQ ID NO: 460970 - RNA, 19 nt, Artificial Sequence
  Description of Artificial Sequence: Synthetic oligonucleotide
  Antisense Strand to SEQ ID NO: 460969
aauugucaacagagccaua

SEQ ID NO: 460971 - RNA, 19 nt, Artificial Sequence
  Description of Artificial Sequence: Synthetic oligonucleotide
  Sense strand starting at position 407 of SEQ ID NO: 317055
agucccuuccuagaguuaa

SEQ ID NO: 460972 - RNA, 19 nt, Artificial Sequence
  Description of Artificial Sequence: Synthetic oligonucleotide
  Antisense Strand to SEQ ID NO: 460971
uuaacucuaggaagggacu

SEQ ID NO: 460973 - RNA, 19 nt, Artificial Sequence
  Description of Artificial Sequence: Synthetic oligonucleotide
  Sense strand starting at position 985 of SEQ ID NO: 317055
cugagaaguaggcagguuu

SEQ ID NO: 460974 - RNA, 19 nt, Artificial Sequence
  Description of Artificial Sequence: Synthetic oligonucleotide
  Antisense Strand to SEQ ID NO: 460973
aaaccugccuacuucucag

SEQ ID NO: 460975 - RNA, 19 nt, Artificial Sequence
  Description of Artificial Sequence: Synthetic oligonucleotide
  Sense strand starting at position 1063 of SEQ ID NO: 317055
gcagacuuccucuaggauu

SEQ ID NO: 460976 - RNA, 19 nt, Artificial Sequence
  Description of Artificial Sequence: Synthetic oligonucleotide
  Antisense Strand to SEQ ID NO: 460975
aauccuagaggaagucugc

SEQ ID NO: 460977 - RNA, 19 nt, Artificial Sequence
  Description of Artificial Sequence: Synthetic oligonucleotide
  Sense strand starting at position 1304 of SEQ ID NO: 317055
ggaaacccggcaugugaau

SEQ ID NO: 460978 - RNA, 19 nt, Artificial Sequence
  Description of Artificial Sequence: Synthetic oligonucleotide
  Antisense Strand to SEQ ID NO: 460977
auucacaugccggguuucc

SEQ ID NO: 460979 - RNA, 19 nt, Artificial Sequence
  Description of Artificial Sequence: Synthetic oligonucleotide
  Sense strand starting at position 1339 of SEQ ID NO: 317055
ucaagauuccggcagaaac

SEQ ID NO: 460980 - RNA, 19 nt, Artificial Sequence
  Description of Artificial Sequence: Synthetic oligonucleotide
  Antisense Strand to SEQ ID NO: 460979
guuucugccggaaucuuga

SEQ ID NO: 460981 - RNA, 19 nt, Artificial Sequence
  Description of Artificial Sequence: Synthetic oligonucleotide
  Sense strand starting at position 1442 of SEQ ID NO: 317055
gguaguaucaagugggaca

SEQ ID NO: 460982 - RNA, 19 nt, Artificial Sequence
  Description of Artificial Sequence: Synthetic oligonucleotide
  Antisense Strand to SEQ ID NO: 460981
ugucccacuugauacuacc

SEQ ID NO: 460983 - RNA, 19 nt, Artificial Sequence
  Description of Artificial Sequence: Synthetic oligonucleotide
  Sense strand starting at position 1453 of SEQ ID NO: 317055
gugggacacuucccauaga

SEQ ID NO: 460984 - RNA, 19 nt, Artificial Sequence
  Description of Artificial Sequence: Synthetic oligonucleotide
  Antisense Strand to SEQ ID NO: 460983
ucuaugggaagugucccac

SEQ ID NO: 460985 - RNA, 19 nt, Artificial Sequence
  Description of Artificial Sequence: Synthetic oligonucleotide
  Sense strand starting at position 1707 of SEQ ID NO: 317055
agcuaaacagaguaucagu

SEQ ID NO: 460986 - RNA, 19 nt, Artificial Sequence
  Description of Artificial Sequence: Synthetic oligonucleotide
  Antisense Strand to SEQ ID NO: 460985
acugauacucuguuuagcu

SEQ ID NO: 460987 - RNA, 19 nt, Artificial Sequence
  Description of Artificial Sequence: Synthetic oligonucleotide
  Sense strand starting at position 1752 of SEQ ID NO: 317055
uguucuucccaguacaaag

SEQ ID NO: 460988 - RNA, 19 nt, Artificial Sequence
  Description of Artificial Sequence: Synthetic oligonucleotide
  Antisense Strand to SEQ ID NO: 460987
cuuuguacugggaagaaca

SEQ ID NO: 460989 - RNA, 19 nt, Artificial Sequence
  Description of Artificial Sequence: Synthetic oligonucleotide
  Sense strand starting at position 2143 of SEQ ID NO: 317055
gcaguuuguggagagguca

SEQ ID NO: 460990 - RNA, 19 nt, Artificial Sequence
  Description of Artificial Sequence: Synthetic oligonucleotide
  Antisense Strand to SEQ ID NO: 460989
ugaccucuccacaaacugc

SEQ ID NO: 460991 - RNA, 19 nt, Artificial Sequence
  Description of Artificial Sequence: Synthetic oligonucleotide
  Sense strand starting at position 2158 of SEQ ID NO: 317055
gucauuuccuguccacauu

SEQ ID NO: 460992 - RNA, 19 nt, Artificial Sequence
  Description of Artificial Sequence: Synthetic oligonucleotide
  Antisense Strand to SEQ ID NO: 460991
aauguggacaggaaaugac

SEQ ID NO: 460993 - RNA, 19 nt, Artificial Sequence
  Description of Artificial Sequence: Synthetic oligonucleotide
  Sense strand starting at position 2289 of SEQ ID NO: 317055
uagcauagagguggucuaa

SEQ ID NO: 460994 - RNA, 19 nt, Artificial Sequence
  Description of Artificial Sequence: Synthetic oligonucleotide
  Antisense Strand to SEQ ID NO: 460993
uuagaccaccucuaugcua

SEQ ID NO: 460995 - RNA, 19 nt, Artificial Sequence
  Description of Artificial Sequence: Synthetic oligonucleotide
  Sense strand starting at position 2300 of SEQ ID NO: 317055
uggucuaaccgcuacauga

SEQ ID NO: 460996 - RNA, 19 nt, Artificial Sequence
  Description of Artificial Sequence: Synthetic oligonucleotide
  Antisense Strand to SEQ ID NO: 460995
ucauguagcgguuagacca

SEQ ID NO: 460997 - RNA, 19 nt, Artificial Sequence
  Description of Artificial Sequence: Synthetic oligonucleotide
  Sense strand starting at position 2341 of SEQ ID NO: 317055
acuguuguaauguaucaga

SEQ ID NO: 460998 - RNA, 19 nt, Artificial Sequence
  Description of Artificial Sequence: Synthetic oligonucleotide
  Antisense Strand to SEQ ID NO: 460997
ucugauacauuacaacagu

SEQ ID NO: 460999 - RNA, 19 nt, Artificial Sequence
  Description of Artificial Sequence: Synthetic oligonucleotide
  Sense strand starting at position 2638 of SEQ ID NO: 317055
cugaauguggaagguauaa

SEQ ID NO: 461000 - RNA, 19 nt, Artificial Sequence
  Description of Artificial Sequence: Synthetic oligonucleotide
  Antisense Strand to SEQ ID NO: 460999
uuauaccuuccacauucag

SEQ ID NO: 461001 - RNA, 19 nt, Artificial Sequence
  Description of Artificial Sequence: Synthetic oligonucleotide
  Sense strand starting at position 2665 of SEQ ID NO: 317055
uaaggagagcaauggucuu

SEQ ID NO: 461002 - RNA, 19 nt, Artificial Sequence
  Description of Artificial Sequence: Synthetic oligonucleotide
  Antisense Strand to SEQ ID NO: 461001
aagaccauugcucuccuua

SEQ ID NO: 461003 - RNA, 19 nt, Artificial Sequence
  Description of Artificial Sequence: Synthetic oligonucleotide
  Sense strand starting at position 2795 of SEQ ID NO: 317055
aaauuugguugagaaggaa

SEQ ID NO: 461004 - RNA, 19 nt, Artificial Sequence
  Description of Artificial Sequence: Synthetic oligonucleotide
  Antisense Strand to SEQ ID NO: 461003
uuccuucucaaccaaauuu

SEQ ID NO: 461005 - RNA, 19 nt, Artificial Sequence
  Description of Artificial Sequence: Synthetic oligonucleotide
  Sense strand starting at position 2881 of SEQ ID NO: 317055
uuuccaagauuggucaagu

SEQ ID NO: 461006 - RNA, 19 nt, Artificial Sequence
  Description of Artificial Sequence: Synthetic oligonucleotide
  Antisense Strand to SEQ ID NO: 461005
acuugaccaaucuuggaaa

SEQ ID NO: 461007 - RNA, 19 nt, Artificial Sequence
  Description of Artificial Sequence: Synthetic oligonucleotide
  Sense strand starting at position 2882 of SEQ ID NO: 317055
uuccaagauuggucaagua

SEQ ID NO: 461008 - RNA, 19 nt, Artificial Sequence
  Description of Artificial Sequence: Synthetic oligonucleotide
  Antisense Strand to SEQ ID NO: 461007
uacuugaccaaucuuggaa

SEQ ID NO: 461009 - RNA, 19 nt, Artificial Sequence
  Description of Artificial Sequence: Synthetic oligonucleotide
  Sense strand starting at position 2914 of SEQ ID NO: 317055
ccaacugugguauaugaua

SEQ ID NO: 461010 - RNA, 19 nt, Artificial Sequence
  Description of Artificial Sequence: Synthetic oligonucleotide
  Antisense Strand to SEQ ID NO: 461009
uaucauauaccacaguugg

SEQ ID NO: 461011 - RNA, 19 nt, Artificial Sequence
  Description of Artificial Sequence: Synthetic oligonucleotide
  Sense strand starting at position 3151 of SEQ ID NO: 317055
ucaagaccugaaugcaaau

SEQ ID NO: 461012 - RNA, 19 nt, Artificial Sequence
  Description of Artificial Sequence: Synthetic oligonucleotide
  Antisense Strand to SEQ ID NO: 461011
auuugcauucaggucuuga

SEQ ID NO: 461013 - RNA, 19 nt, Artificial Sequence
  Description of Artificial Sequence: Synthetic oligonucleotide
  Sense strand starting at position 3267 of SEQ ID NO: 317055
gauagaguauugcuaauuc

SEQ ID NO: 461014 - RNA, 19 nt, Artificial Sequence
  Description of Artificial Sequence: Synthetic oligonucleotide
  Antisense Strand to SEQ ID NO: 461013
gaauuagcaauacucuauc

SEQ ID NO: 461015 - RNA, 19 nt, Artificial Sequence
  Description of Artificial Sequence: Synthetic oligonucleotide
  Sense strand starting at position 3419 of SEQ ID NO: 317055
gucgcuucccaggaugaga

SEQ ID NO: 461016 - RNA, 19 nt, Artificial Sequence
  Description of Artificial Sequence: Synthetic oligonucleotide
  Antisense Strand to SEQ ID NO: 461015
ucucauccugggaagcgac

SEQ ID NO: 461017 - RNA, 19 nt, Artificial Sequence
  Description of Artificial Sequence: Synthetic oligonucleotide
  Sense strand starting at position 3434 of SEQ ID NO: 317055
gagauuaggguagguauua

SEQ ID NO: 461018 - RNA, 19 nt, Artificial Sequence
  Description of Artificial Sequence: Synthetic oligonucleotide
  Antisense Strand to SEQ ID NO: 461017
uaauaccuacccuaaucuc

SEQ ID NO: 461019 - RNA, 19 nt, Artificial Sequence
  Description of Artificial Sequence: Synthetic oligonucleotide
  Sense strand starting at position 3444 of SEQ ID NO: 317055
uagguauuacacuaaggcu

SEQ ID NO: 461020 - RNA, 19 nt, Artificial Sequence
  Description of Artificial Sequence: Synthetic oligonucleotide
  Antisense Strand to SEQ ID NO: 461019
agccuuaguguaauaccua

SEQ ID NO: 461021 - RNA, 19 nt, Artificial Sequence
  Description of Artificial Sequence: Synthetic oligonucleotide
  Sense strand starting at position 3466 of SEQ ID NO: 317055
uggaacuugcgcuaggaga

SEQ ID NO: 461022 - RNA, 19 nt, Artificial Sequence
  Description of Artificial Sequence: Synthetic oligonucleotide
  Antisense Strand to SEQ ID NO: 461021
ucuccuagcgcaaguucca

SEQ ID NO: 461023 - RNA, 19 nt, Artificial Sequence
  Description of Artificial Sequence: Synthetic oligonucleotide
  Sense strand starting at position 3648 of SEQ ID NO: 317055
augguuccuuauguuuaaa

SEQ ID NO: 461024 - RNA, 19 nt, Artificial Sequence
  Description of Artificial Sequence: Synthetic oligonucleotide
  Antisense Strand to SEQ ID NO: 461023
uuuaaacauaaggaaccau

SEQ ID NO: 461025 - RNA, 19 nt, Artificial Sequence
  Description of Artificial Sequence: Synthetic oligonucleotide
  Sense strand starting at position 3713 of SEQ ID NO: 317055
guguuaaugugaccauuuc

SEQ ID NO: 461026 - RNA, 19 nt, Artificial Sequence
  Description of Artificial Sequence: Synthetic oligonucleotide
  Antisense Strand to SEQ ID NO: 461025
gaaauggucacauuaacac

SEQ ID NO: 461027 - RNA, 19 nt, Artificial Sequence
  Description of Artificial Sequence: Synthetic oligonucleotide
  Sense strand starting at position 3821 of SEQ ID NO: 317055
gggaaucccucucugaaua

SEQ ID NO: 461028 - RNA, 19 nt, Artificial Sequence
  Description of Artificial Sequence: Synthetic oligonucleotide
  Antisense Strand to SEQ ID NO: 461027
uauucagagagggauuccc

SEQ ID NO: 461029 - RNA, 19 nt, Artificial Sequence
  Description of Artificial Sequence: Synthetic oligonucleotide
  Sense strand starting at position 3822 of SEQ ID NO: 317055
ggaaucccucucugaauaa

SEQ ID NO: 461030 - RNA, 19 nt, Artificial Sequence
  Description of Artificial Sequence: Synthetic oligonucleotide
  Antisense Strand to SEQ ID NO: 461029
uuauucagagagggauucc

SEQ ID NO: 461031 - RNA, 19 nt, Artificial Sequence
  Description of Artificial Sequence: Synthetic oligonucleotide
  Sense strand starting at position 3854 of SEQ ID NO: 317055
ucucauuuguuucugcaga

SEQ ID NO: 461032 - RNA, 19 nt, Artificial Sequence
  Description of Artificial Sequence: Synthetic oligonucleotide
  Antisense Strand to SEQ ID NO: 461031
ucugcagaaacaaaugaga

SEQ ID NO: 461033 - RNA, 19 nt, Artificial Sequence
  Description of Artificial Sequence: Synthetic oligonucleotide
  Sense strand starting at position 3877 of SEQ ID NO: 317055
ugccaauuauaauuggaaa

SEQ ID NO: 461034 - RNA, 19 nt, Artificial Sequence
  Description of Artificial Sequence: Synthetic oligonucleotide
  Antisense Strand to SEQ ID NO: 461033
uuuccaauuauaauuggca

SEQ ID NO: 461035 - RNA, 19 nt, Artificial Sequence
  Description of Artificial Sequence: Synthetic oligonucleotide
  Sense strand starting at position 3946 of SEQ ID NO: 317055
cuugauaaugcugauccau

SEQ ID NO: 461036 - RNA, 19 nt, Artificial Sequence
  Description of Artificial Sequence: Synthetic oligonucleotide
  Antisense Strand to SEQ ID NO: 461035
auggaucagcauuaucaag

SEQ ID NO: 461037 - RNA, 19 nt, Artificial Sequence
  Description of Artificial Sequence: Synthetic oligonucleotide
  Sense strand starting at position 3948 of SEQ ID NO: 317055
ugauaaugcugauccauau

SEQ ID NO: 461038 - RNA, 19 nt, Artificial Sequence
  Description of Artificial Sequence: Synthetic oligonucleotide
  Antisense Strand to SEQ ID NO: 461037
auauggaucagcauuauca

SEQ ID NO: 461039 - RNA, 19 nt, Artificial Sequence
  Description of Artificial Sequence: Synthetic oligonucleotide
  Sense strand starting at position 165 of SEQ ID NO: 317056
agagacaucuaccaagaga

SEQ ID NO: 461040 - RNA, 19 nt, Artificial Sequence
  Description of Artificial Sequence: Synthetic oligonucleotide
  Antisense Strand to SEQ ID NO: 461039
ucucuugguagaugucucu

SEQ ID NO: 461041 - RNA, 19 nt, Artificial Sequence
  Description of Artificial Sequence: Synthetic oligonucleotide
  Sense strand starting at position 202 of SEQ ID NO: 317056
uuccgucccacggaagaau

SEQ ID NO: 461042 - RNA, 19 nt, Artificial Sequence
  Description of Artificial Sequence: Synthetic oligonucleotide
  Antisense Strand to SEQ ID NO: 461041
auucuuccgugggacggaa

SEQ ID NO: 461043 - RNA, 19 nt, Artificial Sequence
  Description of Artificial Sequence: Synthetic oligonucleotide
  Sense strand starting at position 213 of SEQ ID NO: 317056
ggaagaauuuaucaguagc

SEQ ID NO: 461044 - RNA, 19 nt, Artificial Sequence
  Description of Artificial Sequence: Synthetic oligonucleotide
  Antisense Strand to SEQ ID NO: 461043
gcuacugauaaauucuucc

SEQ ID NO: 461045 - RNA, 19 nt, Artificial Sequence
  Description of Artificial Sequence: Synthetic oligonucleotide
  Sense strand starting at position 215 of SEQ ID NO: 317056
aagaauuuaucaguagcgu

SEQ ID NO: 461046 - RNA, 19 nt, Artificial Sequence
  Description of Artificial Sequence: Synthetic oligonucleotide
  Antisense Strand to SEQ ID NO: 461045
acgcuacugauaaauucuu

SEQ ID NO: 461047 - RNA, 19 nt, Artificial Sequence
  Description of Artificial Sequence: Synthetic oligonucleotide
  Sense strand starting at position 349 of SEQ ID NO: 317056
acugauccauuuggaauaa

SEQ ID NO: 461048 - RNA, 19 nt, Artificial Sequence
  Description of Artificial Sequence: Synthetic oligonucleotide
  Antisense Strand to SEQ ID NO: 461047
uuauuccaaauggaucagu

SEQ ID NO: 461049 - RNA, 19 nt, Artificial Sequence
  Description of Artificial Sequence: Synthetic oligonucleotide
  Sense strand starting at position 1176 of SEQ ID NO: 317056
gggauuugcgcgcggagaa

SEQ ID NO: 461050 - RNA, 19 nt, Artificial Sequence
  Description of Artificial Sequence: Synthetic oligonucleotide
  Antisense Strand to SEQ ID NO: 461049
uucuccgcgcgcaaauccc

SEQ ID NO: 461051 - RNA, 19 nt, Artificial Sequence
  Description of Artificial Sequence: Synthetic oligonucleotide
  Sense strand starting at position 1395 of SEQ ID NO: 317056
cuuccugaagggugggaaa

SEQ ID NO: 461052 - RNA, 19 nt, Artificial Sequence
  Description of Artificial Sequence: Synthetic oligonucleotide
  Antisense Strand to SEQ ID NO: 461051
uuucccacccuucaggaag

SEQ ID NO: 461053 - RNA, 19 nt, Artificial Sequence
  Description of Artificial Sequence: Synthetic oligonucleotide
  Sense strand starting at position 1499 of SEQ ID NO: 317056
ucucgaggcucauuuaauc

SEQ ID NO: 461054 - RNA, 19 nt, Artificial Sequence
  Description of Artificial Sequence: Synthetic oligonucleotide
  Antisense Strand to SEQ ID NO: 461053
gauuaaaugagccucgaga

SEQ ID NO: 461055 - RNA, 19 nt, Artificial Sequence
  Description of Artificial Sequence: Synthetic oligonucleotide
  Sense strand starting at position 1571 of SEQ ID NO: 317056
aagagaaguuugccaagaa

SEQ ID NO: 461056 - RNA, 19 nt, Artificial Sequence
  Description of Artificial Sequence: Synthetic oligonucleotide
  Antisense Strand to SEQ ID NO: 461055
uucuuggcaaacuucucuu

SEQ ID NO: 461057 - RNA, 19 nt, Artificial Sequence
  Description of Artificial Sequence: Synthetic oligonucleotide
  Sense strand starting at position 1578 of SEQ ID NO: 317056
guuugccaagaauaaaguu

SEQ ID NO: 461058 - RNA, 19 nt, Artificial Sequence
  Description of Artificial Sequence: Synthetic oligonucleotide
  Antisense Strand to SEQ ID NO: 461057
aacuuuauucuuggcaaac

SEQ ID NO: 461059 - RNA, 19 nt, Artificial Sequence
  Description of Artificial Sequence: Synthetic oligonucleotide
  Sense strand starting at position 2281 of SEQ ID NO: 317056
cacgcuuugcccgcgugaa

SEQ ID NO: 461060 - RNA, 19 nt, Artificial Sequence
  Description of Artificial Sequence: Synthetic oligonucleotide
  Antisense Strand to SEQ ID NO: 461059
uucacgcgggcaaagcgug

SEQ ID NO: 461061 - RNA, 19 nt, Artificial Sequence
  Description of Artificial Sequence: Synthetic oligonucleotide
  Sense strand starting at position 2492 of SEQ ID NO: 317056
auugauagaugcucugaca

SEQ ID NO: 461062 - RNA, 19 nt, Artificial Sequence
  Description of Artificial Sequence: Synthetic oligonucleotide
  Antisense Strand to SEQ ID NO: 461061
ugucagagcaucuaucaau

SEQ ID NO: 461063 - RNA, 19 nt, Artificial Sequence
  Description of Artificial Sequence: Synthetic oligonucleotide
  Sense strand starting at position 2575 of SEQ ID NO: 317056
cucaacuauuaagagagaa

SEQ ID NO: 461064 - RNA, 19 nt, Artificial Sequence
  Description of Artificial Sequence: Synthetic oligonucleotide
  Antisense Strand to SEQ ID NO: 461063
uucucucuuaauaguugag

SEQ ID NO: 461065 - RNA, 19 nt, Artificial Sequence
  Description of Artificial Sequence: Synthetic oligonucleotide
  Sense strand starting at position 2614 of SEQ ID NO: 317056
aguuguagcuuucccgaau

SEQ ID NO: 461066 - RNA, 19 nt, Artificial Sequence
  Description of Artificial Sequence: Synthetic oligonucleotide
  Antisense Strand to SEQ ID NO: 461065
auucgggaaagcuacaacu

SEQ ID NO: 461067 - RNA, 19 nt, Artificial Sequence
  Description of Artificial Sequence: Synthetic oligonucleotide
  Sense strand starting at position 2615 of SEQ ID NO: 317056
guuguagcuuucccgaaua

SEQ ID NO: 461068 - RNA, 19 nt, Artificial Sequence
  Description of Artificial Sequence: Synthetic oligonucleotide
  Antisense Strand to SEQ ID NO: 461067
uauucgggaaagcuacaac

SEQ ID NO: 461069 - RNA, 19 nt, Artificial Sequence
  Description of Artificial Sequence: Synthetic oligonucleotide
  Sense strand starting at position 2617 of SEQ ID NO: 317056
uguagcuuucccgaauaua

SEQ ID NO: 461070 - RNA, 19 nt, Artificial Sequence
  Description of Artificial Sequence: Synthetic oligonucleotide
  Antisense Strand to SEQ ID NO: 461069
uauauucgggaaagcuaca

SEQ ID NO: 461071 - RNA, 19 nt, Artificial Sequence
  Description of Artificial Sequence: Synthetic oligonucleotide
  Sense strand starting at position 2620 of SEQ ID NO: 317056
agcuuucccgaauauaaua

SEQ ID NO: 461072 - RNA, 19 nt, Artificial Sequence
  Description of Artificial Sequence: Synthetic oligonucleotide
  Antisense Strand to SEQ ID NO: 461071
uauuauauucgggaaagcu

SEQ ID NO: 461073 - RNA, 19 nt, Artificial Sequence
  Description of Artificial Sequence: Synthetic oligonucleotide
  Sense strand starting at position 2781 of SEQ ID NO: 317056
guucucaccacgggaugua

SEQ ID NO: 461074 - RNA, 19 nt, Artificial Sequence
  Description of Artificial Sequence: Synthetic oligonucleotide
  Antisense Strand to SEQ ID NO: 461073
uacaucccguggugagaac

SEQ ID NO: 461075 - RNA, 19 nt, Artificial Sequence
  Description of Artificial Sequence: Synthetic oligonucleotide
  Sense strand starting at position 2790 of SEQ ID NO: 317056
acgggauguacggagaguu

SEQ ID NO: 461076 - RNA, 19 nt, Artificial Sequence
  Description of Artificial Sequence: Synthetic oligonucleotide
  Antisense Strand to SEQ ID NO: 461075
aacucuccguacaucccgu

SEQ ID NO: 461077 - RNA, 19 nt, Artificial Sequence
  Description of Artificial Sequence: Synthetic oligonucleotide
  Sense strand starting at position 2853 of SEQ ID NO: 317056
gugggaaccucaucgagaa

SEQ ID NO: 461078 - RNA, 19 nt, Artificial Sequence
  Description of Artificial Sequence: Synthetic oligonucleotide
  Antisense Strand to SEQ ID NO: 461077
uucucgaugagguucccac

SEQ ID NO: 461079 - RNA, 19 nt, Artificial Sequence
  Description of Artificial Sequence: Synthetic oligonucleotide
  Sense strand starting at position 2854 of SEQ ID NO: 317056
ugggaaccucaucgagaau

SEQ ID NO: 461080 - RNA, 19 nt, Artificial Sequence
  Description of Artificial Sequence: Synthetic oligonucleotide
  Antisense Strand to SEQ ID NO: 461079
auucucgaugagguuccca

SEQ ID NO: 461081 - RNA, 19 nt, Artificial Sequence
  Description of Artificial Sequence: Synthetic oligonucleotide
  Sense strand starting at position 3032 of SEQ ID NO: 317056
ucuccacugucucuuugau

SEQ ID NO: 461082 - RNA, 19 nt, Artificial Sequence
  Description of Artificial Sequence: Synthetic oligonucleotide
  Antisense Strand to SEQ ID NO: 461081
aucaaagagacaguggaga

SEQ ID NO: 461083 - RNA, 19 nt, Artificial Sequence
  Description of Artificial Sequence: Synthetic oligonucleotide
  Sense strand starting at position 3034 of SEQ ID NO: 317056
uccacugucucuuugauga

SEQ ID NO: 461084 - RNA, 19 nt, Artificial Sequence
  Description of Artificial Sequence: Synthetic oligonucleotide
  Antisense Strand to SEQ ID NO: 461083
ucaucaaagagacagugga

SEQ ID NO: 461085 - RNA, 19 nt, Artificial Sequence
  Description of Artificial Sequence: Synthetic oligonucleotide
  Sense strand starting at position 3316 of SEQ ID NO: 317056
auaggaauugucuggcaaa

SEQ ID NO: 461086 - RNA, 19 nt, Artificial Sequence
  Description of Artificial Sequence: Synthetic oligonucleotide
  Antisense Strand to SEQ ID NO: 461085
uuugccagacaauuccuau

SEQ ID NO: 461087 - RNA, 19 nt, Artificial Sequence
  Description of Artificial Sequence: Synthetic oligonucleotide
  Sense strand starting at position 3404 of SEQ ID NO: 317056
ugcuguaucuaagugagca

SEQ ID NO: 461088 - RNA, 19 nt, Artificial Sequence
  Description of Artificial Sequence: Synthetic oligonucleotide
  Antisense Strand to SEQ ID NO: 461087
ugcucacuuagauacagca

SEQ ID NO: 461089 - RNA, 19 nt, Artificial Sequence
  Description of Artificial Sequence: Synthetic oligonucleotide
  Sense strand starting at position 3405 of SEQ ID NO: 317056
gcuguaucuaagugagcac

SEQ ID NO: 461090 - RNA, 19 nt, Artificial Sequence
  Description of Artificial Sequence: Synthetic oligonucleotide
  Antisense Strand to SEQ ID NO: 461089
gugcucacuuagauacagc

SEQ ID NO: 461091 - RNA, 19 nt, Artificial Sequence
  Description of Artificial Sequence: Synthetic oligonucleotide
  Sense strand starting at position 3408 of SEQ ID NO: 317056
guaucuaagugagcacuaa

SEQ ID NO: 461092 - RNA, 19 nt, Artificial Sequence
  Description of Artificial Sequence: Synthetic oligonucleotide
  Antisense Strand to SEQ ID NO: 461091
uuagugcucacuuagauac

SEQ ID NO: 461093 - RNA, 19 nt, Artificial Sequence
  Description of Artificial Sequence: Synthetic oligonucleotide
  Sense strand starting at position 3444 of SEQ ID NO: 317056
aacgacuacuucuugggaa

SEQ ID NO: 461094 - RNA, 19 nt, Artificial Sequence
  Description of Artificial Sequence: Synthetic oligonucleotide
  Antisense Strand to SEQ ID NO: 461093
uucccaagaaguagucguu

SEQ ID NO: 461095 - RNA, 19 nt, Artificial Sequence
  Description of Artificial Sequence: Synthetic oligonucleotide
  Sense strand starting at position 3446 of SEQ ID NO: 317056
cgacuacuucuugggaaua

SEQ ID NO: 461096 - RNA, 19 nt, Artificial Sequence
  Description of Artificial Sequence: Synthetic oligonucleotide
  Antisense Strand to SEQ ID NO: 461095
uauucccaagaaguagucg

SEQ ID NO: 461097 - RNA, 19 nt, Artificial Sequence
  Description of Artificial Sequence: Synthetic oligonucleotide
  Sense strand starting at position 3448 of SEQ ID NO: 317056
acuacuucuugggaauaag

SEQ ID NO: 461098 - RNA, 19 nt, Artificial Sequence
  Description of Artificial Sequence: Synthetic oligonucleotide
  Antisense Strand to SEQ ID NO: 461097
cuuauucccaagaaguagu

SEQ ID NO: 461099 - RNA, 19 nt, Artificial Sequence
  Description of Artificial Sequence: Synthetic oligonucleotide
  Sense strand starting at position 3465 of SEQ ID NO: 317056
agaauuuacuaggaagcaa

SEQ ID NO: 461100 - RNA, 19 nt, Artificial Sequence
  Description of Artificial Sequence: Synthetic oligonucleotide
  Antisense Strand to SEQ ID NO: 461099
uugcuuccuaguaaauucu

SEQ ID NO: 461101 - RNA, 19 nt, Artificial Sequence
  Description of Artificial Sequence: Synthetic oligonucleotide
  Sense strand starting at position 3540 of SEQ ID NO: 317056
uguaaauucuaucuggaag

SEQ ID NO: 461102 - RNA, 19 nt, Artificial Sequence
  Description of Artificial Sequence: Synthetic oligonucleotide
  Antisense Strand to SEQ ID NO: 461101
cuuccagauagaauuuaca

SEQ ID NO: 461103 - RNA, 19 nt, Artificial Sequence
  Description of Artificial Sequence: Synthetic oligonucleotide
  Sense strand starting at position 3628 of SEQ ID NO: 317056
cugacaaugcuaugccuca

SEQ ID NO: 461104 - RNA, 19 nt, Artificial Sequence
  Description of Artificial Sequence: Synthetic oligonucleotide
  Antisense Strand to SEQ ID NO: 461103
ugaggcauagcauugucag

SEQ ID NO: 461105 - RNA, 19 nt, Artificial Sequence
  Description of Artificial Sequence: Synthetic oligonucleotide
  Sense strand starting at position 3629 of SEQ ID NO: 317056
ugacaaugcuaugccucaa

SEQ ID NO: 461106 - RNA, 19 nt, Artificial Sequence
  Description of Artificial Sequence: Synthetic oligonucleotide
  Antisense Strand to SEQ ID NO: 461105
uugaggcauagcauuguca

SEQ ID NO: 461107 - RNA, 19 nt, Artificial Sequence
  Description of Artificial Sequence: Synthetic oligonucleotide
  Sense strand starting at position 3658 of SEQ ID NO: 317056
agaguauauucugcuacag

SEQ ID NO: 461108 - RNA, 19 nt, Artificial Sequence
  Description of Artificial Sequence: Synthetic oligonucleotide
  Antisense Strand to SEQ ID NO: 461107
cuguagcagaauauacucu

SEQ ID NO: 461109 - RNA, 19 nt, Artificial Sequence
  Description of Artificial Sequence: Synthetic oligonucleotide
  Sense strand starting at position 3669 of SEQ ID NO: 317056
ugcuacagugugugagaaa

SEQ ID NO: 461110 - RNA, 19 nt, Artificial Sequence
  Description of Artificial Sequence: Synthetic oligonucleotide
  Antisense Strand to SEQ ID NO: 461109
uuucucacacacuguagca

SEQ ID NO: 461111 - RNA, 19 nt, Artificial Sequence
  Description of Artificial Sequence: Synthetic oligonucleotide
  Sense strand starting at position 3715 of SEQ ID NO: 317056
guaugucacuucccuuaaa

SEQ ID NO: 461112 - RNA, 19 nt, Artificial Sequence
  Description of Artificial Sequence: Synthetic oligonucleotide
  Antisense Strand to SEQ ID NO: 461111
uuuaagggaagugacauac

SEQ ID NO: 461113 - RNA, 19 nt, Artificial Sequence
  Description of Artificial Sequence: Synthetic oligonucleotide
  Sense strand starting at position 3718 of SEQ ID NO: 317056
ugucacuucccuuaaaguu

SEQ ID NO: 461114 - RNA, 19 nt, Artificial Sequence
  Description of Artificial Sequence: Synthetic oligonucleotide
  Antisense Strand to SEQ ID NO: 461113
aacuuuaagggaagugaca

SEQ ID NO: 461115 - RNA, 19 nt, Artificial Sequence
  Description of Artificial Sequence: Synthetic oligonucleotide
  Sense strand starting at position 3750 of SEQ ID NO: 317056
aguagugucccagagaggu

SEQ ID NO: 461116 - RNA, 19 nt, Artificial Sequence
  Description of Artificial Sequence: Synthetic oligonucleotide
  Antisense Strand to SEQ ID NO: 461115
accucucugggacacuacu

SEQ ID NO: 461117 - RNA, 19 nt, Artificial Sequence
  Description of Artificial Sequence: Synthetic oligonucleotide
  Sense strand starting at position 3772 of SEQ ID NO: 317056
cguguagcugugucagaca

SEQ ID NO: 461118 - RNA, 19 nt, Artificial Sequence
  Description of Artificial Sequence: Synthetic oligonucleotide
  Antisense Strand to SEQ ID NO: 461117
ugucugacacagcuacacg

SEQ ID NO: 461119 - RNA, 19 nt, Artificial Sequence
  Description of Artificial Sequence: Synthetic oligonucleotide
  Sense strand starting at position 137 of SEQ ID NO: 317057
agagguaagccauaaguuu

SEQ ID NO: 461120 - RNA, 19 nt, Artificial Sequence
  Description of Artificial Sequence: Synthetic oligonucleotide
  Antisense Strand to SEQ ID NO: 461119
aaacuuauggcuuaccucu

SEQ ID NO: 461121 - RNA, 19 nt, Artificial Sequence
  Description of Artificial Sequence: Synthetic oligonucleotide
  Sense strand starting at position 182 of SEQ ID NO: 317057
gugggcauagucugaccua

SEQ ID NO: 461122 - RNA, 19 nt, Artificial Sequence
  Description of Artificial Sequence: Synthetic oligonucleotide
  Antisense Strand to SEQ ID NO: 461121
uaggucagacuaugcccac

SEQ ID NO: 461123 - RNA, 19 nt, Artificial Sequence
  Description of Artificial Sequence: Synthetic oligonucleotide
  Sense strand starting at position 279 of SEQ ID NO: 317057
gaaguagaaugggugucuu

SEQ ID NO: 461124 - RNA, 19 nt, Artificial Sequence
  Description of Artificial Sequence: Synthetic oligonucleotide
  Antisense Strand to SEQ ID NO: 461123
aagacacccauucuacuuc

SEQ ID NO: 461125 - RNA, 19 nt, Artificial Sequence
  Description of Artificial Sequence: Synthetic oligonucleotide
  Sense strand starting at position 405 of SEQ ID NO: 317057
caccuuagaguuugugaca

SEQ ID NO: 461126 - RNA, 19 nt, Artificial Sequence
  Description of Artificial Sequence: Synthetic oligonucleotide
  Antisense Strand to SEQ ID NO: 461125
ugucacaaacucuaaggug

SEQ ID NO: 461127 - RNA, 19 nt, Artificial Sequence
  Description of Artificial Sequence: Synthetic oligonucleotide
  Sense strand starting at position 406 of SEQ ID NO: 317057
accuuagaguuugugacaa

SEQ ID NO: 461128 - RNA, 19 nt, Artificial Sequence
  Description of Artificial Sequence: Synthetic oligonucleotide
  Antisense Strand to SEQ ID NO: 461127
uugucacaaacucuaaggu

SEQ ID NO: 461129 - RNA, 19 nt, Artificial Sequence
  Description of Artificial Sequence: Synthetic oligonucleotide
  Sense strand starting at position 419 of SEQ ID NO: 317057
ugacaauaaugguacaaau

SEQ ID NO: 461130 - RNA, 19 nt, Artificial Sequence
  Description of Artificial Sequence: Synthetic oligonucleotide
  Antisense Strand to SEQ ID NO: 461129
auuuguaccauuauuguca

SEQ ID NO: 461131 - RNA, 19 nt, Artificial Sequence
  Description of Artificial Sequence: Synthetic oligonucleotide
  Sense strand starting at position 491 of SEQ ID NO: 317057
cucugagagacauacgcua

SEQ ID NO: 461132 - RNA, 19 nt, Artificial Sequence
  Description of Artificial Sequence: Synthetic oligonucleotide
  Antisense Strand to SEQ ID NO: 461131
uagcguaugucucucagag

SEQ ID NO: 461133 - RNA, 19 nt, Artificial Sequence
  Description of Artificial Sequence: Synthetic oligonucleotide
  Sense strand starting at position 496 of SEQ ID NO: 317057
agagacauacgcuaguguu

SEQ ID NO: 461134 - RNA, 19 nt, Artificial Sequence
  Description of Artificial Sequence: Synthetic oligonucleotide
  Antisense Strand to SEQ ID NO: 461133
aacacuagcguaugucucu

SEQ ID NO: 461135 - RNA, 19 nt, Artificial Sequence
  Description of Artificial Sequence: Synthetic oligonucleotide
  Sense strand starting at position 511 of SEQ ID NO: 317057
uguuuaguacugcauaauc

SEQ ID NO: 461136 - RNA, 19 nt, Artificial Sequence
  Description of Artificial Sequence: Synthetic oligonucleotide
  Antisense Strand to SEQ ID NO: 461135
gauuaugcaguacuaaaca

SEQ ID NO: 461137 - RNA, 19 nt, Artificial Sequence
  Description of Artificial Sequence: Synthetic oligonucleotide
  Sense strand starting at position 615 of SEQ ID NO: 317057
uaguuaaauuugggaauga

SEQ ID NO: 461138 - RNA, 19 nt, Artificial Sequence
  Description of Artificial Sequence: Synthetic oligonucleotide
  Antisense Strand to SEQ ID NO: 461137
ucauucccaaauuuaacua

SEQ ID NO: 461139 - RNA, 19 nt, Artificial Sequence
  Description of Artificial Sequence: Synthetic oligonucleotide
  Sense strand starting at position 616 of SEQ ID NO: 317057
aguuaaauuugggaaugau

SEQ ID NO: 461140 - RNA, 19 nt, Artificial Sequence
  Description of Artificial Sequence: Synthetic oligonucleotide
  Antisense Strand to SEQ ID NO: 461139
aucauucccaaauuuaacu

SEQ ID NO: 461141 - RNA, 19 nt, Artificial Sequence
  Description of Artificial Sequence: Synthetic oligonucleotide
  Sense strand starting at position 646 of SEQ ID NO: 317057
ucugacugcuguuuauuaa

SEQ ID NO: 461142 - RNA, 19 nt, Artificial Sequence
  Description of Artificial Sequence: Synthetic oligonucleotide
  Antisense Strand to SEQ ID NO: 461141
uuaauaaacagcagucaga

SEQ ID NO: 461143 - RNA, 19 nt, Artificial Sequence
  Description of Artificial Sequence: Synthetic oligonucleotide
  Sense strand starting at position 647 of SEQ ID NO: 317057
cugacugcuguuuauuaaa

SEQ ID NO: 461144 - RNA, 19 nt, Artificial Sequence
  Description of Artificial Sequence: Synthetic oligonucleotide
  Antisense Strand to SEQ ID NO: 461143
uuuaauaaacagcagucag

SEQ ID NO: 461145 - RNA, 19 nt, Artificial Sequence
  Description of Artificial Sequence: Synthetic oligonucleotide
  Sense strand starting at position 677 of SEQ ID NO: 317057
cuccuuggaugccuaauau

SEQ ID NO: 461146 - RNA, 19 nt, Artificial Sequence
  Description of Artificial Sequence: Synthetic oligonucleotide
  Antisense Strand to SEQ ID NO: 461145
auauuaggcauccaaggag

SEQ ID NO: 461147 - RNA, 19 nt, Artificial Sequence
  Description of Artificial Sequence: Synthetic oligonucleotide
  Sense strand starting at position 937 of SEQ ID NO: 317057
uagaacgauucugugguua

SEQ ID NO: 461148 - RNA, 19 nt, Artificial Sequence
  Description of Artificial Sequence: Synthetic oligonucleotide
  Antisense Strand to SEQ ID NO: 461147
uaaccacagaaucguucua

SEQ ID NO: 461149 - RNA, 19 nt, Artificial Sequence
  Description of Artificial Sequence: Synthetic oligonucleotide
  Sense strand starting at position 1055 of SEQ ID NO: 317057
gugcaaaucagugguauua

SEQ ID NO: 461150 - RNA, 19 nt, Artificial Sequence
  Description of Artificial Sequence: Synthetic oligonucleotide
  Antisense Strand to SEQ ID NO: 461149
uaauaccacugauuugcac

SEQ ID NO: 461151 - RNA, 19 nt, Artificial Sequence
  Description of Artificial Sequence: Synthetic oligonucleotide
  Sense strand starting at position 1229 of SEQ ID NO: 317057
aagagaggcugcucuacaa

SEQ ID NO: 461152 - RNA, 19 nt, Artificial Sequence
  Description of Artificial Sequence: Synthetic oligonucleotide
  Antisense Strand to SEQ ID NO: 461151
uuguagagcagccucucuu

SEQ ID NO: 461153 - RNA, 19 nt, Artificial Sequence
  Description of Artificial Sequence: Synthetic oligonucleotide
  Sense strand starting at position 1279 of SEQ ID NO: 317057
ggauguuauucgguucucu

SEQ ID NO: 461154 - RNA, 19 nt, Artificial Sequence
  Description of Artificial Sequence: Synthetic oligonucleotide
  Antisense Strand to SEQ ID NO: 461153
agagaaccgaauaacaucc

SEQ ID NO: 461155 - RNA, 19 nt, Artificial Sequence
  Description of Artificial Sequence: Synthetic oligonucleotide
  Sense strand starting at position 1421 of SEQ ID NO: 317057
acaccauucuguucucuga

SEQ ID NO: 461156 - RNA, 19 nt, Artificial Sequence
  Description of Artificial Sequence: Synthetic oligonucleotide
  Antisense Strand to SEQ ID NO: 461155
ucagagaacagaauggugu

SEQ ID NO: 461157 - RNA, 19 nt, Artificial Sequence
  Description of Artificial Sequence: Synthetic oligonucleotide
  Sense strand starting at position 1472 of SEQ ID NO: 317057
caccucugccauugggaua

SEQ ID NO: 461158 - RNA, 19 nt, Artificial Sequence
  Description of Artificial Sequence: Synthetic oligonucleotide
  Antisense Strand to SEQ ID NO: 461157
uaucccaauggcagaggug

SEQ ID NO: 461159 - RNA, 19 nt, Artificial Sequence
  Description of Artificial Sequence: Synthetic oligonucleotide
  Sense strand starting at position 1497 of SEQ ID NO: 317057
gcagaucugagguguucuu

SEQ ID NO: 461160 - RNA, 19 nt, Artificial Sequence
  Description of Artificial Sequence: Synthetic oligonucleotide
  Antisense Strand to SEQ ID NO: 461159
aagaacaccucagaucugc

SEQ ID NO: 461161 - RNA, 19 nt, Artificial Sequence
  Description of Artificial Sequence: Synthetic oligonucleotide
  Sense strand starting at position 1511 of SEQ ID NO: 317057
uucuuaaacgcgcuguuua

SEQ ID NO: 461162 - RNA, 19 nt, Artificial Sequence
  Description of Artificial Sequence: Synthetic oligonucleotide
  Antisense Strand to SEQ ID NO: 461161
uaaacagcgcguuuaagaa

SEQ ID NO: 461163 - RNA, 19 nt, Artificial Sequence
  Description of Artificial Sequence: Synthetic oligonucleotide
  Sense strand starting at position 1578 of SEQ ID NO: 317057
guagaaagaugccauuuaa

SEQ ID NO: 461164 - RNA, 19 nt, Artificial Sequence
  Description of Artificial Sequence: Synthetic oligonucleotide
  Antisense Strand to SEQ ID NO: 461163
uuaaauggcaucuuucuac

SEQ ID NO: 461165 - RNA, 19 nt, Artificial Sequence
  Description of Artificial Sequence: Synthetic oligonucleotide
  Sense strand starting at position 1605 of SEQ ID NO: 317057
agguauauccuccaaguuu

SEQ ID NO: 461166 - RNA, 19 nt, Artificial Sequence
  Description of Artificial Sequence: Synthetic oligonucleotide
  Antisense Strand to SEQ ID NO: 461165
aaacuuggaggauauaccu

SEQ ID NO: 461167 - RNA, 19 nt, Artificial Sequence
  Description of Artificial Sequence: Synthetic oligonucleotide
  Sense strand starting at position 1635 of SEQ ID NO: 317057
aaaggcguugguuaaauca

SEQ ID NO: 461168 - RNA, 19 nt, Artificial Sequence
  Description of Artificial Sequence: Synthetic oligonucleotide
  Antisense Strand to SEQ ID NO: 461167
ugauuuaaccaacgccuuu

SEQ ID NO: 461169 - RNA, 19 nt, Artificial Sequence
  Description of Artificial Sequence: Synthetic oligonucleotide
  Sense strand starting at position 1644 of SEQ ID NO: 317057
gguuaaaucauucgggugu

SEQ ID NO: 461170 - RNA, 19 nt, Artificial Sequence
  Description of Artificial Sequence: Synthetic oligonucleotide
  Antisense Strand to SEQ ID NO: 461169
acacccgaaugauuuaacc

SEQ ID NO: 461171 - RNA, 19 nt, Artificial Sequence
  Description of Artificial Sequence: Synthetic oligonucleotide
  Sense strand starting at position 1692 of SEQ ID NO: 317057
ggguuucccaguuguggaa

SEQ ID NO: 461172 - RNA, 19 nt, Artificial Sequence
  Description of Artificial Sequence: Synthetic oligonucleotide
  Antisense Strand to SEQ ID NO: 461171
uuccacaacugggaaaccc

SEQ ID NO: 461173 - RNA, 19 nt, Artificial Sequence
  Description of Artificial Sequence: Synthetic oligonucleotide
  Sense strand starting at position 1827 of SEQ ID NO: 317057
acccacgugucucuauuua

SEQ ID NO: 461174 - RNA, 19 nt, Artificial Sequence
  Description of Artificial Sequence: Synthetic oligonucleotide
  Antisense Strand to SEQ ID NO: 461173
uaaauagagacacgugggu

SEQ ID NO: 461175 - RNA, 19 nt, Artificial Sequence
  Description of Artificial Sequence: Synthetic oligonucleotide
  Sense strand starting at position 1949 of SEQ ID NO: 317057
cuuucuucugcguagauuu

SEQ ID NO: 461176 - RNA, 19 nt, Artificial Sequence
  Description of Artificial Sequence: Synthetic oligonucleotide
  Antisense Strand to SEQ ID NO: 461175
aaaucuacgcagaagaaag

SEQ ID NO: 461177 - RNA, 19 nt, Artificial Sequence
  Description of Artificial Sequence: Synthetic oligonucleotide
  Sense strand starting at position 2019 of SEQ ID NO: 317057
agugauggcgguuggagaa

SEQ ID NO: 461178 - RNA, 19 nt, Artificial Sequence
  Description of Artificial Sequence: Synthetic oligonucleotide
  Antisense Strand to SEQ ID NO: 461177
uucuccaaccgccaucacu

SEQ ID NO: 461179 - RNA, 19 nt, Artificial Sequence
  Description of Artificial Sequence: Synthetic oligonucleotide
  Sense strand starting at position 2324 of SEQ ID NO: 317057
agagacaucuaccaagaga

SEQ ID NO: 461180 - RNA, 19 nt, Artificial Sequence
  Description of Artificial Sequence: Synthetic oligonucleotide
  Antisense Strand to SEQ ID NO: 461179
ucucuugguagaugucucu

SEQ ID NO: 461181 - RNA, 19 nt, Artificial Sequence
  Description of Artificial Sequence: Synthetic oligonucleotide
  Sense strand starting at position 2361 of SEQ ID NO: 317057
uuccgucccacggaagaau

SEQ ID NO: 461182 - RNA, 19 nt, Artificial Sequence
  Description of Artificial Sequence: Synthetic oligonucleotide
  Antisense Strand to SEQ ID NO: 461181
auucuuccgugggacggaa

SEQ ID NO: 461183 - RNA, 19 nt, Artificial Sequence
  Description of Artificial Sequence: Synthetic oligonucleotide
  Sense strand starting at position 2372 of SEQ ID NO: 317057
ggaagaauuuaucaguagc

SEQ ID NO: 461184 - RNA, 19 nt, Artificial Sequence
  Description of Artificial Sequence: Synthetic oligonucleotide
  Antisense Strand to SEQ ID NO: 461183
gcuacugauaaauucuucc

SEQ ID NO: 461185 - RNA, 19 nt, Artificial Sequence
  Description of Artificial Sequence: Synthetic oligonucleotide
  Sense strand starting at position 2374 of SEQ ID NO: 317057
aagaauuuaucaguagcgu

SEQ ID NO: 461186 - RNA, 19 nt, Artificial Sequence
  Description of Artificial Sequence: Synthetic oligonucleotide
  Antisense Strand to SEQ ID NO: 461185
acgcuacugauaaauucuu

SEQ ID NO: 461187 - RNA, 19 nt, Artificial Sequence
  Description of Artificial Sequence: Synthetic oligonucleotide
  Sense strand starting at position 2508 of SEQ ID NO: 317057
acugauccauuuggaauaa

SEQ ID NO: 461188 - RNA, 19 nt, Artificial Sequence
  Description of Artificial Sequence: Synthetic oligonucleotide
  Antisense Strand to SEQ ID NO: 461187
uuauuccaaauggaucagu

SEQ ID NO: 461189 - RNA, 19 nt, Artificial Sequence
  Description of Artificial Sequence: Synthetic oligonucleotide
  Sense strand starting at position 3335 of SEQ ID NO: 317057
gggauuugcgcgcggagaa

SEQ ID NO: 461190 - RNA, 19 nt, Artificial Sequence
  Description of Artificial Sequence: Synthetic oligonucleotide
  Antisense Strand to SEQ ID NO: 461189
uucuccgcgcgcaaauccc

SEQ ID NO: 461191 - RNA, 19 nt, Artificial Sequence
  Description of Artificial Sequence: Synthetic oligonucleotide
  Sense strand starting at position 3554 of SEQ ID NO: 317057
cuuccugaagggugggaaa

SEQ ID NO: 461192 - RNA, 19 nt, Artificial Sequence
  Description of Artificial Sequence: Synthetic oligonucleotide
  Antisense Strand to SEQ ID NO: 461191
uuucccacccuucaggaag

SEQ ID NO: 461193 - RNA, 19 nt, Artificial Sequence
  Description of Artificial Sequence: Synthetic oligonucleotide
  Sense strand starting at position 3658 of SEQ ID NO: 317057
ucucgaggcucauuuaauc

SEQ ID NO: 461194 - RNA, 19 nt, Artificial Sequence
  Description of Artificial Sequence: Synthetic oligonucleotide
  Antisense Strand to SEQ ID NO: 461193
gauuaaaugagccucgaga

SEQ ID NO: 461195 - RNA, 19 nt, Artificial Sequence
  Description of Artificial Sequence: Synthetic oligonucleotide
  Sense strand starting at position 3730 of SEQ ID NO: 317057
aagagaaguuugccaagaa

SEQ ID NO: 461196 - RNA, 19 nt, Artificial Sequence
  Description of Artificial Sequence: Synthetic oligonucleotide
  Antisense Strand to SEQ ID NO: 461195
uucuuggcaaacuucucuu

SEQ ID NO: 461197 - RNA, 19 nt, Artificial Sequence
  Description of Artificial Sequence: Synthetic oligonucleotide
  Sense strand starting at position 3737 of SEQ ID NO: 317057
guuugccaagaauaaaguu

SEQ ID NO: 461198 - RNA, 19 nt, Artificial Sequence
  Description of Artificial Sequence: Synthetic oligonucleotide
  Antisense Strand to SEQ ID NO: 461197
aacuuuauucuuggcaaac

SEQ ID NO: 461199 - RNA, 19 nt, Artificial Sequence
  Description of Artificial Sequence: Synthetic oligonucleotide
  Sense strand starting at position 96 of SEQ ID NO: 317058
gagggugugcgccuguaau

SEQ ID NO: 461200 - RNA, 19 nt, Artificial Sequence
  Description of Artificial Sequence: Synthetic oligonucleotide
  Antisense Strand to SEQ ID NO: 461199
auuacaggcgcacacccuc

SEQ ID NO: 461201 - RNA, 19 nt, Artificial Sequence
  Description of Artificial Sequence: Synthetic oligonucleotide
  Sense strand starting at position 575 of SEQ ID NO: 317058
aaacaagaauugggaggau

SEQ ID NO: 461202 - RNA, 19 nt, Artificial Sequence
  Description of Artificial Sequence: Synthetic oligonucleotide
  Antisense Strand to SEQ ID NO: 461201
auccucccaauucuuguuu

SEQ ID NO: 461203 - RNA, 19 nt, Artificial Sequence
  Description of Artificial Sequence: Synthetic oligonucleotide
  Sense strand starting at position 808 of SEQ ID NO: 317058
uguuguguggcacaacuaa

SEQ ID NO: 461204 - RNA, 19 nt, Artificial Sequence
  Description of Artificial Sequence: Synthetic oligonucleotide
  Antisense Strand to SEQ ID NO: 461203
uuaguugugccacacaaca

SEQ ID NO: 461205 - RNA, 19 nt, Artificial Sequence
  Description of Artificial Sequence: Synthetic oligonucleotide
  Sense strand starting at position 882 of SEQ ID NO: 317058
ugaguaugaucgcaccacu

SEQ ID NO: 461206 - RNA, 19 nt, Artificial Sequence
  Description of Artificial Sequence: Synthetic oligonucleotide
  Antisense Strand to SEQ ID NO: 461205
aguggugcgaucauacuca

SEQ ID NO: 461207 - RNA, 19 nt, Artificial Sequence
  Description of Artificial Sequence: Synthetic oligonucleotide
  Sense strand starting at position 974 of SEQ ID NO: 317058
cucaaauaaguugguuaau

SEQ ID NO: 461208 - RNA, 19 nt, Artificial Sequence
  Description of Artificial Sequence: Synthetic oligonucleotide
  Antisense Strand to SEQ ID NO: 461207
auuaaccaacuuauuugag

SEQ ID NO: 461209 - RNA, 19 nt, Artificial Sequence
  Description of Artificial Sequence: Synthetic oligonucleotide
  Sense strand starting at position 980 of SEQ ID NO: 317058
uaaguugguuaauuagaga

SEQ ID NO: 461210 - RNA, 19 nt, Artificial Sequence
  Description of Artificial Sequence: Synthetic oligonucleotide
  Antisense Strand to SEQ ID NO: 461209
ucucuaauuaaccaacuua

SEQ ID NO: 461211 - RNA, 19 nt, Artificial Sequence
  Description of Artificial Sequence: Synthetic oligonucleotide
  Sense strand starting at position 1163 of SEQ ID NO: 317058
ggcaucaccucaucaguga

SEQ ID NO: 461212 - RNA, 19 nt, Artificial Sequence
  Description of Artificial Sequence: Synthetic oligonucleotide
  Antisense Strand to SEQ ID NO: 461211
ucacugaugaggugaugcc

SEQ ID NO: 461213 - RNA, 19 nt, Artificial Sequence
  Description of Artificial Sequence: Synthetic oligonucleotide
  Sense strand starting at position 1676 of SEQ ID NO: 317058
ggcagcuccucaguaagau

SEQ ID NO: 461214 - RNA, 19 nt, Artificial Sequence
  Description of Artificial Sequence: Synthetic oligonucleotide
  Antisense Strand to SEQ ID NO: 461213
aucuuacugaggagcugcc

SEQ ID NO: 461215 - RNA, 19 nt, Artificial Sequence
  Description of Artificial Sequence: Synthetic oligonucleotide
  Sense strand starting at position 1677 of SEQ ID NO: 317058
gcagcuccucaguaagaug

SEQ ID NO: 461216 - RNA, 19 nt, Artificial Sequence
  Description of Artificial Sequence: Synthetic oligonucleotide
  Antisense Strand to SEQ ID NO: 461215
caucuuacugaggagcugc

SEQ ID NO: 461217 - RNA, 19 nt, Artificial Sequence
  Description of Artificial Sequence: Synthetic oligonucleotide
  Sense strand starting at position 2254 of SEQ ID NO: 317058
gcgcguguguccggaacuu

SEQ ID NO: 461218 - RNA, 19 nt, Artificial Sequence
  Description of Artificial Sequence: Synthetic oligonucleotide
  Antisense Strand to SEQ ID NO: 461217
aaguuccggacacacgcgc

SEQ ID NO: 461219 - RNA, 19 nt, Artificial Sequence
  Description of Artificial Sequence: Synthetic oligonucleotide
  Sense strand starting at position 2255 of SEQ ID NO: 317058
cgcguguguccggaacuuu

SEQ ID NO: 461220 - RNA, 19 nt, Artificial Sequence
  Description of Artificial Sequence: Synthetic oligonucleotide
  Antisense Strand to SEQ ID NO: 461219
aaaguuccggacacacgcg

SEQ ID NO: 461221 - RNA, 19 nt, Artificial Sequence
  Description of Artificial Sequence: Synthetic oligonucleotide
  Sense strand starting at position 2853 of SEQ ID NO: 317058
gcucgaagucuccagaauu

SEQ ID NO: 461222 - RNA, 19 nt, Artificial Sequence
  Description of Artificial Sequence: Synthetic oligonucleotide
  Antisense Strand to SEQ ID NO: 461221
aauucuggagacuucgagc

SEQ ID NO: 461223 - RNA, 19 nt, Artificial Sequence
  Description of Artificial Sequence: Synthetic oligonucleotide
  Sense strand starting at position 3036 of SEQ ID NO: 317058
agaugaggaucccugaguu

SEQ ID NO: 461224 - RNA, 19 nt, Artificial Sequence
  Description of Artificial Sequence: Synthetic oligonucleotide
  Antisense Strand to SEQ ID NO: 461223
aacucagggauccucaucu

SEQ ID NO: 461225 - RNA, 19 nt, Artificial Sequence
  Description of Artificial Sequence: Synthetic oligonucleotide
  Sense strand starting at position 3163 of SEQ ID NO: 317058
cugucuuguucagggaugu

SEQ ID NO: 461226 - RNA, 19 nt, Artificial Sequence
  Description of Artificial Sequence: Synthetic oligonucleotide
  Antisense Strand to SEQ ID NO: 461225
acaucccugaacaagacag

SEQ ID NO: 461227 - RNA, 19 nt, Artificial Sequence
  Description of Artificial Sequence: Synthetic oligonucleotide
  Sense strand starting at position 3164 of SEQ ID NO: 317058
ugucuuguucagggaugua

SEQ ID NO: 461228 - RNA, 19 nt, Artificial Sequence
  Description of Artificial Sequence: Synthetic oligonucleotide
  Antisense Strand to SEQ ID NO: 461227
uacaucccugaacaagaca

SEQ ID NO: 461229 - RNA, 19 nt, Artificial Sequence
  Description of Artificial Sequence: Synthetic oligonucleotide
  Sense strand starting at position 3313 of SEQ ID NO: 317058
ucuugagaggcugguugaa

SEQ ID NO: 461230 - RNA, 19 nt, Artificial Sequence
  Description of Artificial Sequence: Synthetic oligonucleotide
  Antisense Strand to SEQ ID NO: 461229
uucaaccagccucucaaga

SEQ ID NO: 461231 - RNA, 19 nt, Artificial Sequence
  Description of Artificial Sequence: Synthetic oligonucleotide
  Sense strand starting at position 3315 of SEQ ID NO: 317058
uugagaggcugguugaaug

SEQ ID NO: 461232 - RNA, 19 nt, Artificial Sequence
  Description of Artificial Sequence: Synthetic oligonucleotide
  Antisense Strand to SEQ ID NO: 461231
cauucaaccagccucucaa

SEQ ID NO: 461233 - RNA, 19 nt, Artificial Sequence
  Description of Artificial Sequence: Synthetic oligonucleotide
  Sense strand starting at position 3396 of SEQ ID NO: 317058
guccucacccgucaggaaa

SEQ ID NO: 461234 - RNA, 19 nt, Artificial Sequence
  Description of Artificial Sequence: Synthetic oligonucleotide
  Antisense Strand to SEQ ID NO: 461233
uuuccugacgggugaggac

SEQ ID NO: 461235 - RNA, 19 nt, Artificial Sequence
  Description of Artificial Sequence: Synthetic oligonucleotide
  Sense strand starting at position 3531 of SEQ ID NO: 317058
uuugaagccgucuguaagu

SEQ ID NO: 461236 - RNA, 19 nt, Artificial Sequence
  Description of Artificial Sequence: Synthetic oligonucleotide
  Antisense Strand to SEQ ID NO: 461235
acuuacagacggcuucaaa

SEQ ID NO: 461237 - RNA, 19 nt, Artificial Sequence
  Description of Artificial Sequence: Synthetic oligonucleotide
  Sense strand starting at position 3572 of SEQ ID NO: 317058
gggcacugcagacaucaaa

SEQ ID NO: 461238 - RNA, 19 nt, Artificial Sequence
  Description of Artificial Sequence: Synthetic oligonucleotide
  Antisense Strand to SEQ ID NO: 461237
uuugaugucugcagugccc

SEQ ID NO: 461239 - RNA, 19 nt, Artificial Sequence
  Description of Artificial Sequence: Synthetic oligonucleotide
  Sense strand starting at position 3699 of SEQ ID NO: 317058
gaaggauaguccuugccuc

SEQ ID NO: 461240 - RNA, 19 nt, Artificial Sequence
  Description of Artificial Sequence: Synthetic oligonucleotide
  Antisense Strand to SEQ ID NO: 461239
gaggcaaggacuauccuuc

SEQ ID NO: 461241 - RNA, 19 nt, Artificial Sequence
  Description of Artificial Sequence: Synthetic oligonucleotide
  Sense strand starting at position 3749 of SEQ ID NO: 317058
acaguuggucagggucaga

SEQ ID NO: 461242 - RNA, 19 nt, Artificial Sequence
  Description of Artificial Sequence: Synthetic oligonucleotide
  Antisense Strand to SEQ ID NO: 461241
ucugacccugaccaacugu

SEQ ID NO: 461243 - RNA, 19 nt, Artificial Sequence
  Description of Artificial Sequence: Synthetic oligonucleotide
  Sense strand starting at position 3845 of SEQ ID NO: 317058
gacuguauguccuaguccu

SEQ ID NO: 461244 - RNA, 19 nt, Artificial Sequence
  Description of Artificial Sequence: Synthetic oligonucleotide
  Antisense Strand to SEQ ID NO: 461243
aggacuaggacauacaguc

SEQ ID NO: 461245 - RNA, 19 nt, Artificial Sequence
  Description of Artificial Sequence: Synthetic oligonucleotide
  Sense strand starting at position 3857 of SEQ ID NO: 317058
uaguccuggucuggacauu

SEQ ID NO: 461246 - RNA, 19 nt, Artificial Sequence
  Description of Artificial Sequence: Synthetic oligonucleotide
  Antisense Strand to SEQ ID NO: 461245
aauguccagaccaggacua

SEQ ID NO: 461247 - RNA, 19 nt, Artificial Sequence
  Description of Artificial Sequence: Synthetic oligonucleotide
  Sense strand starting at position 3869 of SEQ ID NO: 317058
ggacauugguucugagcac

SEQ ID NO: 461248 - RNA, 19 nt, Artificial Sequence
  Description of Artificial Sequence: Synthetic oligonucleotide
  Antisense Strand to SEQ ID NO: 461247
gugcucagaaccaaugucc

SEQ ID NO: 461249 - RNA, 19 nt, Artificial Sequence
  Description of Artificial Sequence: Synthetic oligonucleotide
  Sense strand starting at position 3873 of SEQ ID NO: 317058
auugguucugagcaccaga

SEQ ID NO: 461250 - RNA, 19 nt, Artificial Sequence
  Description of Artificial Sequence: Synthetic oligonucleotide
  Antisense Strand to SEQ ID NO: 461249
ucuggugcucagaaccaau

SEQ ID NO: 461251 - RNA, 19 nt, Artificial Sequence
  Description of Artificial Sequence: Synthetic oligonucleotide
  Sense strand starting at position 3945 of SEQ ID NO: 317058
cagugcuccucucguuaau

SEQ ID NO: 461252 - RNA, 19 nt, Artificial Sequence
  Description of Artificial Sequence: Synthetic oligonucleotide
  Antisense Strand to SEQ ID NO: 461251
auuaacgagaggagcacug

SEQ ID NO: 461253 - RNA, 19 nt, Artificial Sequence
  Description of Artificial Sequence: Synthetic oligonucleotide
  Sense strand starting at position 33 of SEQ ID NO: 317059
cauuaucucggucaguuua

SEQ ID NO: 461254 - RNA, 19 nt, Artificial Sequence
  Description of Artificial Sequence: Synthetic oligonucleotide
  Antisense Strand to SEQ ID NO: 461253
uaaacugaccgagauaaug

SEQ ID NO: 461255 - RNA, 19 nt, Artificial Sequence
  Description of Artificial Sequence: Synthetic oligonucleotide
  Sense strand starting at position 489 of SEQ ID NO: 317059
ucuggaauccuccauguca

SEQ ID NO: 461256 - RNA, 19 nt, Artificial Sequence
  Description of Artificial Sequence: Synthetic oligonucleotide
  Antisense Strand to SEQ ID NO: 461255
ugacauggaggauuccaga

SEQ ID NO: 461257 - RNA, 19 nt, Artificial Sequence
  Description of Artificial Sequence: Synthetic oligonucleotide
  Sense strand starting at position 509 of SEQ ID NO: 317059
ccgacuuagcaauauuaag

SEQ ID NO: 461258 - RNA, 19 nt, Artificial Sequence
  Description of Artificial Sequence: Synthetic oligonucleotide
  Antisense Strand to SEQ ID NO: 461257
cuuaauauugcuaagucgg

SEQ ID NO: 461259 - RNA, 19 nt, Artificial Sequence
  Description of Artificial Sequence: Synthetic oligonucleotide
  Sense strand starting at position 663 of SEQ ID NO: 317059
aaaguaucuugagcacaag

SEQ ID NO: 461260 - RNA, 19 nt, Artificial Sequence
  Description of Artificial Sequence: Synthetic oligonucleotide
  Antisense Strand to SEQ ID NO: 461259
cuugugcucaagauacuuu

SEQ ID NO: 461261 - RNA, 19 nt, Artificial Sequence
  Description of Artificial Sequence: Synthetic oligonucleotide
  Sense strand starting at position 666 of SEQ ID NO: 317059
guaucuugagcacaagcaa

SEQ ID NO: 461262 - RNA, 19 nt, Artificial Sequence
  Description of Artificial Sequence: Synthetic oligonucleotide
  Antisense Strand to SEQ ID NO: 461261
uugcuugugcucaagauac

SEQ ID NO: 461263 - RNA, 19 nt, Artificial Sequence
  Description of Artificial Sequence: Synthetic oligonucleotide
  Sense strand starting at position 730 of SEQ ID NO: 317059
ggcaucuuggccuggaaca

SEQ ID NO: 461264 - RNA, 19 nt, Artificial Sequence
  Description of Artificial Sequence: Synthetic oligonucleotide
  Antisense Strand to SEQ ID NO: 461263
uguuccaggccaagaugcc

SEQ ID NO: 461265 - RNA, 19 nt, Artificial Sequence
  Description of Artificial Sequence: Synthetic oligonucleotide
  Sense strand starting at position 731 of SEQ ID NO: 317059
gcaucuuggccuggaacaa

SEQ ID NO: 461266 - RNA, 19 nt, Artificial Sequence
  Description of Artificial Sequence: Synthetic oligonucleotide
  Antisense Strand to SEQ ID NO: 461265
uuguuccaggccaagaugc

SEQ ID NO: 461267 - RNA, 19 nt, Artificial Sequence
  Description of Artificial Sequence: Synthetic oligonucleotide
  Sense strand starting at position 743 of SEQ ID NO: 317059
ggaacaagagaguggucuu

SEQ ID NO: 461268 - RNA, 19 nt, Artificial Sequence
  Description of Artificial Sequence: Synthetic oligonucleotide
  Antisense Strand to SEQ ID NO: 461267
aagaccacucucuuguucc

SEQ ID NO: 461269 - RNA, 19 nt, Artificial Sequence
  Description of Artificial Sequence: Synthetic oligonucleotide
  Sense strand starting at position 754 of SEQ ID NO: 317059
guggucuuagcaggaaaca

SEQ ID NO: 461270 - RNA, 19 nt, Artificial Sequence
  Description of Artificial Sequence: Synthetic oligonucleotide
  Antisense Strand to SEQ ID NO: 461269
uguuuccugcuaagaccac

SEQ ID NO: 461271 - RNA, 19 nt, Artificial Sequence
  Description of Artificial Sequence: Synthetic oligonucleotide
  Sense strand starting at position 755 of SEQ ID NO: 317059
uggucuuagcaggaaacau

SEQ ID NO: 461272 - RNA, 19 nt, Artificial Sequence
  Description of Artificial Sequence: Synthetic oligonucleotide
  Antisense Strand to SEQ ID NO: 461271
auguuuccugcuaagacca

SEQ ID NO: 461273 - RNA, 19 nt, Artificial Sequence
  Description of Artificial Sequence: Synthetic oligonucleotide
  Sense strand starting at position 772 of SEQ ID NO: 317059
auguccuagcaguaaagau

SEQ ID NO: 461274 - RNA, 19 nt, Artificial Sequence
  Description of Artificial Sequence: Synthetic oligonucleotide
  Antisense Strand to SEQ ID NO: 461273
aucuuuacugcuaggacau

SEQ ID NO: 461275 - RNA, 19 nt, Artificial Sequence
  Description of Artificial Sequence: Synthetic oligonucleotide
  Sense strand starting at position 939 of SEQ ID NO: 317059
aacacaacugugugaugga

SEQ ID NO: 461276 - RNA, 19 nt, Artificial Sequence
  Description of Artificial Sequence: Synthetic oligonucleotide
  Antisense Strand to SEQ ID NO: 461275
uccaucacacaguuguguu

SEQ ID NO: 461277 - RNA, 19 nt, Artificial Sequence
  Description of Artificial Sequence: Synthetic oligonucleotide
  Sense strand starting at position 1413 of SEQ ID NO: 317059
ggauucugcauuggcacaa

SEQ ID NO: 461278 - RNA, 19 nt, Artificial Sequence
  Description of Artificial Sequence: Synthetic oligonucleotide
  Antisense Strand to SEQ ID NO: 461277
uugugccaaugcagaaucc

SEQ ID NO: 461279 - RNA, 19 nt, Artificial Sequence
  Description of Artificial Sequence: Synthetic oligonucleotide
  Sense strand starting at position 1759 of SEQ ID NO: 317059
augauagacuccuugguac

SEQ ID NO: 461280 - RNA, 19 nt, Artificial Sequence
  Description of Artificial Sequence: Synthetic oligonucleotide
  Antisense Strand to SEQ ID NO: 461279
guaccaaggagucuaucau

SEQ ID NO: 461281 - RNA, 19 nt, Artificial Sequence
  Description of Artificial Sequence: Synthetic oligonucleotide
  Sense strand starting at position 1761 of SEQ ID NO: 317059
gauagacuccuugguacag

SEQ ID NO: 461282 - RNA, 19 nt, Artificial Sequence
  Description of Artificial Sequence: Synthetic oligonucleotide
  Antisense Strand to SEQ ID NO: 461281
cuguaccaaggagucuauc

SEQ ID NO: 461283 - RNA, 19 nt, Artificial Sequence
  Description of Artificial Sequence: Synthetic oligonucleotide
  Sense strand starting at position 2185 of SEQ ID NO: 317059
ggcucuggccaaugaauaa

SEQ ID NO: 461284 - RNA, 19 nt, Artificial Sequence
  Description of Artificial Sequence: Synthetic oligonucleotide
  Antisense Strand to SEQ ID NO: 461283
uuauucauuggccagagcc

SEQ ID NO: 461285 - RNA, 19 nt, Artificial Sequence
  Description of Artificial Sequence: Synthetic oligonucleotide
  Sense strand starting at position 2482 of SEQ ID NO: 317059
ggagaaccggcuugauuac

SEQ ID NO: 461286 - RNA, 19 nt, Artificial Sequence
  Description of Artificial Sequence: Synthetic oligonucleotide
  Antisense Strand to SEQ ID NO: 461285
guaaucaagccgguucucc

SEQ ID NO: 461287 - RNA, 19 nt, Artificial Sequence
  Description of Artificial Sequence: Synthetic oligonucleotide
  Sense strand starting at position 2522 of SEQ ID NO: 317059
gugcuuugaagaggagaga

SEQ ID NO: 461288 - RNA, 19 nt, Artificial Sequence
  Description of Artificial Sequence: Synthetic oligonucleotide
  Antisense Strand to SEQ ID NO: 461287
ucucuccucuucaaagcac

SEQ ID NO: 461289 - RNA, 19 nt, Artificial Sequence
  Description of Artificial Sequence: Synthetic oligonucleotide
  Sense strand starting at position 2544 of SEQ ID NO: 317059
uggagcagccuuuauuaau

SEQ ID NO: 461290 - RNA, 19 nt, Artificial Sequence
  Description of Artificial Sequence: Synthetic oligonucleotide
  Antisense Strand to SEQ ID NO: 461289
auuaauaaaggcugcucca

SEQ ID NO: 461291 - RNA, 19 nt, Artificial Sequence
  Description of Artificial Sequence: Synthetic oligonucleotide
  Sense strand starting at position 2746 of SEQ ID NO: 317059
gccugcugccugcuaaaga

SEQ ID NO: 461292 - RNA, 19 nt, Artificial Sequence
  Description of Artificial Sequence: Synthetic oligonucleotide
  Antisense Strand to SEQ ID NO: 461291
ucuuuagcaggcagcaggc

SEQ ID NO: 461293 - RNA, 19 nt, Artificial Sequence
  Description of Artificial Sequence: Synthetic oligonucleotide
  Sense strand starting at position 2767 of SEQ ID NO: 317059
uggaaagcccgggaaaguu

SEQ ID NO: 461294 - RNA, 19 nt, Artificial Sequence
  Description of Artificial Sequence: Synthetic oligonucleotide
  Antisense Strand to SEQ ID NO: 461293
aacuuucccgggcuuucca

SEQ ID NO: 461295 - RNA, 19 nt, Artificial Sequence
  Description of Artificial Sequence: Synthetic oligonucleotide
  Sense strand starting at position 2838 of SEQ ID NO: 317059
guuuguagagauugagggu

SEQ ID NO: 461296 - RNA, 19 nt, Artificial Sequence
  Description of Artificial Sequence: Synthetic oligonucleotide
  Antisense Strand to SEQ ID NO: 461295
acccucaaucucuacaaac

SEQ ID NO: 461297 - RNA, 19 nt, Artificial Sequence
  Description of Artificial Sequence: Synthetic oligonucleotide
  Sense strand starting at position 2842 of SEQ ID NO: 317059
guagagauugaggguguga

SEQ ID NO: 461298 - RNA, 19 nt, Artificial Sequence
  Description of Artificial Sequence: Synthetic oligonucleotide
  Antisense Strand to SEQ ID NO: 461297
ucacacccucaaucucuac

SEQ ID NO: 461299 - RNA, 19 nt, Artificial Sequence
  Description of Artificial Sequence: Synthetic oligonucleotide
  Sense strand starting at position 2844 of SEQ ID NO: 317059
agagauugagggugugaua

SEQ ID NO: 461300 - RNA, 19 nt, Artificial Sequence
  Description of Artificial Sequence: Synthetic oligonucleotide
  Antisense Strand to SEQ ID NO: 461299
uaucacacccucaaucucu

SEQ ID NO: 461301 - RNA, 19 nt, Artificial Sequence
  Description of Artificial Sequence: Synthetic oligonucleotide
  Sense strand starting at position 2851 of SEQ ID NO: 317059
gagggugugauacauucua

SEQ ID NO: 461302 - RNA, 19 nt, Artificial Sequence
  Description of Artificial Sequence: Synthetic oligonucleotide
  Antisense Strand to SEQ ID NO: 461301
uagaauguaucacacccuc

SEQ ID NO: 461303 - RNA, 19 nt, Artificial Sequence
  Description of Artificial Sequence: Synthetic oligonucleotide
  Sense strand starting at position 2919 of SEQ ID NO: 317059
uccuuaauuuauugaugag

SEQ ID NO: 461304 - RNA, 19 nt, Artificial Sequence
  Description of Artificial Sequence: Synthetic oligonucleotide
  Antisense Strand to SEQ ID NO: 461303
cucaucaauaaauuaagga

SEQ ID NO: 461305 - RNA, 19 nt, Artificial Sequence
  Description of Artificial Sequence: Synthetic oligonucleotide
  Sense strand starting at position 3057 of SEQ ID NO: 317059
acuccuuaaguuugaagca

SEQ ID NO: 461306 - RNA, 19 nt, Artificial Sequence
  Description of Artificial Sequence: Synthetic oligonucleotide
  Antisense Strand to SEQ ID NO: 461305
ugcuucaaacuuaaggagu

SEQ ID NO: 461307 - RNA, 19 nt, Artificial Sequence
  Description of Artificial Sequence: Synthetic oligonucleotide
  Sense strand starting at position 3071 of SEQ ID NO: 317059
aagcaaugagcggaaaucu

SEQ ID NO: 461308 - RNA, 19 nt, Artificial Sequence
  Description of Artificial Sequence: Synthetic oligonucleotide
  Antisense Strand to SEQ ID NO: 461307
agauuuccgcucauugcuu

SEQ ID NO: 461309 - RNA, 19 nt, Artificial Sequence
  Description of Artificial Sequence: Synthetic oligonucleotide
  Sense strand starting at position 3160 of SEQ ID NO: 317059
accugaacugcugggagaa

SEQ ID NO: 461310 - RNA, 19 nt, Artificial Sequence
  Description of Artificial Sequence: Synthetic oligonucleotide
  Antisense Strand to SEQ ID NO: 461309
uucucccagcaguucaggu

SEQ ID NO: 461311 - RNA, 19 nt, Artificial Sequence
  Description of Artificial Sequence: Synthetic oligonucleotide
  Sense strand starting at position 3299 of SEQ ID NO: 317059
auuauuguuggugauccau

SEQ ID NO: 461312 - RNA, 19 nt, Artificial Sequence
  Description of Artificial Sequence: Synthetic oligonucleotide
  Antisense Strand to SEQ ID NO: 461311
auggaucaccaacaauaau

SEQ ID NO: 461313 - RNA, 19 nt, Artificial Sequence
  Description of Artificial Sequence: Synthetic oligonucleotide
  Sense strand starting at position 3530 of SEQ ID NO: 317059
ccugcuggugacuauguaa

SEQ ID NO: 461314 - RNA, 19 nt, Artificial Sequence
  Description of Artificial Sequence: Synthetic oligonucleotide
  Antisense Strand to SEQ ID NO: 461313
uuacauagucaccagcagg

SEQ ID NO: 461315 - RNA, 19 nt, Artificial Sequence
  Description of Artificial Sequence: Synthetic oligonucleotide
  Sense strand starting at position 3601 of SEQ ID NO: 317059
ugcaucuguccugagaaau

SEQ ID NO: 461316 - RNA, 19 nt, Artificial Sequence
  Description of Artificial Sequence: Synthetic oligonucleotide
  Antisense Strand to SEQ ID NO: 461315
auuucucaggacagaugca

SEQ ID NO: 461317 - RNA, 19 nt, Artificial Sequence
  Description of Artificial Sequence: Synthetic oligonucleotide
  Sense strand starting at position 3614 of SEQ ID NO: 317059
agaaauggguccucccauu

SEQ ID NO: 461318 - RNA, 19 nt, Artificial Sequence
  Description of Artificial Sequence: Synthetic oligonucleotide
  Antisense Strand to SEQ ID NO: 461317
aaugggaggacccauuucu

SEQ ID NO: 461319 - RNA, 19 nt, Artificial Sequence
  Description of Artificial Sequence: Synthetic oligonucleotide
  Sense strand starting at position 3640 of SEQ ID NO: 317059
ugggaacauugagcucaga

SEQ ID NO: 461320 - RNA, 19 nt, Artificial Sequence
  Description of Artificial Sequence: Synthetic oligonucleotide
  Antisense Strand to SEQ ID NO: 461319
ucugagcucaauguuccca

SEQ ID NO: 461321 - RNA, 19 nt, Artificial Sequence
  Description of Artificial Sequence: Synthetic oligonucleotide
  Sense strand starting at position 3862 of SEQ ID NO: 317059
ugcugugcaccugaaagau

SEQ ID NO: 461322 - RNA, 19 nt, Artificial Sequence
  Description of Artificial Sequence: Synthetic oligonucleotide
  Antisense Strand to SEQ ID NO: 461321
aucuuucaggugcacagca

SEQ ID NO: 461323 - RNA, 19 nt, Artificial Sequence
  Description of Artificial Sequence: Synthetic oligonucleotide
  Sense strand starting at position 3871 of SEQ ID NO: 317059
ccugaaagauguuucccuu

SEQ ID NO: 461324 - RNA, 19 nt, Artificial Sequence
  Description of Artificial Sequence: Synthetic oligonucleotide
  Antisense Strand to SEQ ID NO: 461323
aagggaaacaucuuucagg

SEQ ID NO: 461325 - RNA, 19 nt, Artificial Sequence
  Description of Artificial Sequence: Synthetic oligonucleotide
  Sense strand starting at position 3874 of SEQ ID NO: 317059
gaaagauguuucccuuaag

SEQ ID NO: 461326 - RNA, 19 nt, Artificial Sequence
  Description of Artificial Sequence: Synthetic oligonucleotide
  Antisense Strand to SEQ ID NO: 461325
cuuaagggaaacaucuuuc

SEQ ID NO: 461327 - RNA, 19 nt, Artificial Sequence
  Description of Artificial Sequence: Synthetic oligonucleotide
  Sense strand starting at position 3899 of SEQ ID NO: 317059
gggcuacugcuuuauagag

SEQ ID NO: 461328 - RNA, 19 nt, Artificial Sequence
  Description of Artificial Sequence: Synthetic oligonucleotide
  Antisense Strand to SEQ ID NO: 461327
cucuauaaagcaguagccc

SEQ ID NO: 461329 - RNA, 19 nt, Artificial Sequence
  Description of Artificial Sequence: Synthetic oligonucleotide
  Sense strand starting at position 3906 of SEQ ID NO: 317059
ugcuuuauagagcagagga

SEQ ID NO: 461330 - RNA, 19 nt, Artificial Sequence
  Description of Artificial Sequence: Synthetic oligonucleotide
  Antisense Strand to SEQ ID NO: 461329
uccucugcucuauaaagca

SEQ ID NO: 461331 - RNA, 19 nt, Artificial Sequence
  Description of Artificial Sequence: Synthetic oligonucleotide
  Sense strand starting at position 3924 of SEQ ID NO: 317059
aacggaggcuucucaaaca

SEQ ID NO: 461332 - RNA, 19 nt, Artificial Sequence
  Description of Artificial Sequence: Synthetic oligonucleotide
  Antisense Strand to SEQ ID NO: 461331
uguuugagaagccuccguu

SEQ ID NO: 461333 - RNA, 19 nt, Artificial Sequence
  Description of Artificial Sequence: Synthetic oligonucleotide
  Sense strand starting at position 256 of SEQ ID NO: 317060
gacguuuauuuaguggagu

SEQ ID NO: 461334 - RNA, 19 nt, Artificial Sequence
  Description of Artificial Sequence: Synthetic oligonucleotide
  Antisense Strand to SEQ ID NO: 461333
acuccacuaaauaaacguc

SEQ ID NO: 461335 - RNA, 19 nt, Artificial Sequence
  Description of Artificial Sequence: Synthetic oligonucleotide
  Sense strand starting at position 367 of SEQ ID NO: 317060
aguauucuagggcauuaga

SEQ ID NO: 461336 - RNA, 19 nt, Artificial Sequence
  Description of Artificial Sequence: Synthetic oligonucleotide
  Antisense Strand to SEQ ID NO: 461335
ucuaaugcccuagaauacu

SEQ ID NO: 461337 - RNA, 19 nt, Artificial Sequence
  Description of Artificial Sequence: Synthetic oligonucleotide
  Sense strand starting at position 420 of SEQ ID NO: 317060
gagaguaagaguugacugu

SEQ ID NO: 461338 - RNA, 19 nt, Artificial Sequence
  Description of Artificial Sequence: Synthetic oligonucleotide
  Antisense Strand to SEQ ID NO: 461337
acagucaacucuuacucuc

SEQ ID NO: 461339 - RNA, 19 nt, Artificial Sequence
  Description of Artificial Sequence: Synthetic oligonucleotide
  Sense strand starting at position 421 of SEQ ID NO: 317060
agaguaagaguugacuguu

SEQ ID NO: 461340 - RNA, 19 nt, Artificial Sequence
  Description of Artificial Sequence: Synthetic oligonucleotide
  Antisense Strand to SEQ ID NO: 461339
aacagucaacucuuacucu

SEQ ID NO: 461341 - RNA, 19 nt, Artificial Sequence
  Description of Artificial Sequence: Synthetic oligonucleotide
  Sense strand starting at position 427 of SEQ ID NO: 317060
agaguugacuguuuacuac

SEQ ID NO: 461342 - RNA, 19 nt, Artificial Sequence
  Description of Artificial Sequence: Synthetic oligonucleotide
  Antisense Strand to SEQ ID NO: 461341
guaguaaacagucaacucu

SEQ ID NO: 461343 - RNA, 19 nt, Artificial Sequence
  Description of Artificial Sequence: Synthetic oligonucleotide
  Sense strand starting at position 437 of SEQ ID NO: 317060
guuuacuacugaguuuaga

SEQ ID NO: 461344 - RNA, 19 nt, Artificial Sequence
  Description of Artificial Sequence: Synthetic oligonucleotide
  Antisense Strand to SEQ ID NO: 461343
ucuaaacucaguaguaaac

SEQ ID NO: 461345 - RNA, 19 nt, Artificial Sequence
  Description of Artificial Sequence: Synthetic oligonucleotide
  Sense strand starting at position 825 of SEQ ID NO: 317060
ccaggaacuagauguuugu

SEQ ID NO: 461346 - RNA, 19 nt, Artificial Sequence
  Description of Artificial Sequence: Synthetic oligonucleotide
  Antisense Strand to SEQ ID NO: 461345
acaaacaucuaguuccugg

SEQ ID NO: 461347 - RNA, 19 nt, Artificial Sequence
  Description of Artificial Sequence: Synthetic oligonucleotide
  Sense strand starting at position 828 of SEQ ID NO: 317060
ggaacuagauguuugucuu

SEQ ID NO: 461348 - RNA, 19 nt, Artificial Sequence
  Description of Artificial Sequence: Synthetic oligonucleotide
  Antisense Strand to SEQ ID NO: 461347
aagacaaacaucuaguucc

SEQ ID NO: 461349 - RNA, 19 nt, Artificial Sequence
  Description of Artificial Sequence: Synthetic oligonucleotide
  Sense strand starting at position 929 of SEQ ID NO: 317060
aagugaagugugcaauaaa

SEQ ID NO: 461350 - RNA, 19 nt, Artificial Sequence
  Description of Artificial Sequence: Synthetic oligonucleotide
  Antisense Strand to SEQ ID NO: 461349
uuuauugcacacuucacuu

SEQ ID NO: 461351 - RNA, 19 nt, Artificial Sequence
  Description of Artificial Sequence: Synthetic oligonucleotide
  Sense strand starting at position 932 of SEQ ID NO: 317060
ugaagugugcaauaaaucu

SEQ ID NO: 461352 - RNA, 19 nt, Artificial Sequence
  Description of Artificial Sequence: Synthetic oligonucleotide
  Antisense Strand to SEQ ID NO: 461351
agauuuauugcacacuuca

SEQ ID NO: 461353 - RNA, 19 nt, Artificial Sequence
  Description of Artificial Sequence: Synthetic oligonucleotide
  Sense strand starting at position 952 of SEQ ID NO: 317060
ucgagcuuugaauaauugu

SEQ ID NO: 461354 - RNA, 19 nt, Artificial Sequence
  Description of Artificial Sequence: Synthetic oligonucleotide
  Antisense Strand to SEQ ID NO: 461353
acaauuauucaaagcucga

SEQ ID NO: 461355 - RNA, 19 nt, Artificial Sequence
  Description of Artificial Sequence: Synthetic oligonucleotide
  Sense strand starting at position 955 of SEQ ID NO: 317060
agcuuugaauaauuguuga

SEQ ID NO: 461356 - RNA, 19 nt, Artificial Sequence
  Description of Artificial Sequence: Synthetic oligonucleotide
  Antisense Strand to SEQ ID NO: 461355
ucaacaauuauucaaagcu

SEQ ID NO: 461357 - RNA, 19 nt, Artificial Sequence
  Description of Artificial Sequence: Synthetic oligonucleotide
  Sense strand starting at position 960 of SEQ ID NO: 317060
ugaauaauuguugaaacgu

SEQ ID NO: 461358 - RNA, 19 nt, Artificial Sequence
  Description of Artificial Sequence: Synthetic oligonucleotide
  Antisense Strand to SEQ ID NO: 461357
acguuucaacaauuauuca

SEQ ID NO: 461359 - RNA, 19 nt, Artificial Sequence
  Description of Artificial Sequence: Synthetic oligonucleotide
  Sense strand starting at position 966 of SEQ ID NO: 317060
auuguugaaacguagguua

SEQ ID NO: 461360 - RNA, 19 nt, Artificial Sequence
  Description of Artificial Sequence: Synthetic oligonucleotide
  Antisense Strand to SEQ ID NO: 461359
uaaccuacguuucaacaau

SEQ ID NO: 461361 - RNA, 19 nt, Artificial Sequence
  Description of Artificial Sequence: Synthetic oligonucleotide
  Sense strand starting at position 971 of SEQ ID NO: 317060
ugaaacguagguuaauaau

SEQ ID NO: 461362 - RNA, 19 nt, Artificial Sequence
  Description of Artificial Sequence: Synthetic oligonucleotide
  Antisense Strand to SEQ ID NO: 461361
auuauuaaccuacguuuca

SEQ ID NO: 461363 - RNA, 19 nt, Artificial Sequence
  Description of Artificial Sequence: Synthetic oligonucleotide
  Sense strand starting at position 980 of SEQ ID NO: 317060
gguuaauaaugcccaauua

SEQ ID NO: 461364 - RNA, 19 nt, Artificial Sequence
  Description of Artificial Sequence: Synthetic oligonucleotide
  Antisense Strand to SEQ ID NO: 461363
uaauugggcauuauuaacc

SEQ ID NO: 461365 - RNA, 19 nt, Artificial Sequence
  Description of Artificial Sequence: Synthetic oligonucleotide
  Sense strand starting at position 981 of SEQ ID NO: 317060
guuaauaaugcccaauuag

SEQ ID NO: 461366 - RNA, 19 nt, Artificial Sequence
  Description of Artificial Sequence: Synthetic oligonucleotide
  Antisense Strand to SEQ ID NO: 461365
cuaauugggcauuauuaac

SEQ ID NO: 461367 - RNA, 19 nt, Artificial Sequence
  Description of Artificial Sequence: Synthetic oligonucleotide
  Sense strand starting at position 1304 of SEQ ID NO: 317060
cguggcagucaagaacaua

SEQ ID NO: 461368 - RNA, 19 nt, Artificial Sequence
  Description of Artificial Sequence: Synthetic oligonucleotide
  Antisense Strand to SEQ ID NO: 461367
uauguucuugacugccacg

SEQ ID NO: 461369 - RNA, 19 nt, Artificial Sequence
  Description of Artificial Sequence: Synthetic oligonucleotide
  Sense strand starting at position 1355 of SEQ ID NO: 317060
cacaaacguguaugagaua

SEQ ID NO: 461370 - RNA, 19 nt, Artificial Sequence
  Description of Artificial Sequence: Synthetic oligonucleotide
  Antisense Strand to SEQ ID NO: 461369
uaucucauacacguuugug

SEQ ID NO: 461371 - RNA, 19 nt, Artificial Sequence
  Description of Artificial Sequence: Synthetic oligonucleotide
  Sense strand starting at position 1360 of SEQ ID NO: 317060
acguguaugagauagccaa

SEQ ID NO: 461372 - RNA, 19 nt, Artificial Sequence
  Description of Artificial Sequence: Synthetic oligonucleotide
  Antisense Strand to SEQ ID NO: 461371
uuggcuaucucauacacgu

SEQ ID NO: 461373 - RNA, 19 nt, Artificial Sequence
  Description of Artificial Sequence: Synthetic oligonucleotide
  Sense strand starting at position 1744 of SEQ ID NO: 317060
ugccguuggcuaguaguaa

SEQ ID NO: 461374 - RNA, 19 nt, Artificial Sequence
  Description of Artificial Sequence: Synthetic oligonucleotide
  Antisense Strand to SEQ ID NO: 461373
uuacuacuagccaacggca

SEQ ID NO: 461375 - RNA, 19 nt, Artificial Sequence
  Description of Artificial Sequence: Synthetic oligonucleotide
  Sense strand starting at position 2091 of SEQ ID NO: 317060
cguaaugacgacagacguu

SEQ ID NO: 461376 - RNA, 19 nt, Artificial Sequence
  Description of Artificial Sequence: Synthetic oligonucleotide
  Antisense Strand to SEQ ID NO: 461375
aacgucugucgucauuacg

SEQ ID NO: 461377 - RNA, 19 nt, Artificial Sequence
  Description of Artificial Sequence: Synthetic oligonucleotide
  Sense strand starting at position 2630 of SEQ ID NO: 317060
ugguaugagacuugauguc

SEQ ID NO: 461378 - RNA, 19 nt, Artificial Sequence
  Description of Artificial Sequence: Synthetic oligonucleotide
  Antisense Strand to SEQ ID NO: 461377
gacaucaagucucauacca

SEQ ID NO: 461379 - RNA, 19 nt, Artificial Sequence
  Description of Artificial Sequence: Synthetic oligonucleotide
  Sense strand starting at position 2698 of SEQ ID NO: 317060
guguguucucucuucuagu

SEQ ID NO: 461380 - RNA, 19 nt, Artificial Sequence
  Description of Artificial Sequence: Synthetic oligonucleotide
  Antisense Strand to SEQ ID NO: 461379
acuagaagagagaacacac

SEQ ID NO: 461381 - RNA, 19 nt, Artificial Sequence
  Description of Artificial Sequence: Synthetic oligonucleotide
  Sense strand starting at position 2706 of SEQ ID NO: 317060
ucucuucuagucgacauua

SEQ ID NO: 461382 - RNA, 19 nt, Artificial Sequence
  Description of Artificial Sequence: Synthetic oligonucleotide
  Antisense Strand to SEQ ID NO: 461381
uaaugucgacuagaagaga

SEQ ID NO: 461383 - RNA, 19 nt, Artificial Sequence
  Description of Artificial Sequence: Synthetic oligonucleotide
  Sense strand starting at position 2708 of SEQ ID NO: 317060
ucuucuagucgacauuacu

SEQ ID NO: 461384 - RNA, 19 nt, Artificial Sequence
  Description of Artificial Sequence: Synthetic oligonucleotide
  Antisense Strand to SEQ ID NO: 461383
aguaaugucgacuagaaga

SEQ ID NO: 461385 - RNA, 19 nt, Artificial Sequence
  Description of Artificial Sequence: Synthetic oligonucleotide
  Sense strand starting at position 2865 of SEQ ID NO: 317060
guuggaaggugguuuauaa

SEQ ID NO: 461386 - RNA, 19 nt, Artificial Sequence
  Description of Artificial Sequence: Synthetic oligonucleotide
  Antisense Strand to SEQ ID NO: 461385
uuauaaaccaccuuccaac

SEQ ID NO: 461387 - RNA, 19 nt, Artificial Sequence
  Description of Artificial Sequence: Synthetic oligonucleotide
  Sense strand starting at position 2875 of SEQ ID NO: 317060
gguuuauaacagcaucaca

SEQ ID NO: 461388 - RNA, 19 nt, Artificial Sequence
  Description of Artificial Sequence: Synthetic oligonucleotide
  Antisense Strand to SEQ ID NO: 461387
ugugaugcuguuauaaacc

SEQ ID NO: 461389 - RNA, 19 nt, Artificial Sequence
  Description of Artificial Sequence: Synthetic oligonucleotide
  Sense strand starting at position 2888 of SEQ ID NO: 317060
aucacauuugguugcuuua

SEQ ID NO: 461390 - RNA, 19 nt, Artificial Sequence
  Description of Artificial Sequence: Synthetic oligonucleotide
  Antisense Strand to SEQ ID NO: 461389
uaaagcaaccaaaugugau

SEQ ID NO: 461391 - RNA, 19 nt, Artificial Sequence
  Description of Artificial Sequence: Synthetic oligonucleotide
  Sense strand starting at position 2943 of SEQ ID NO: 317060
aauguugcuguccagaaua

SEQ ID NO: 461392 - RNA, 19 nt, Artificial Sequence
  Description of Artificial Sequence: Synthetic oligonucleotide
  Antisense Strand to SEQ ID NO: 461391
uauucuggacagcaacauu

SEQ ID NO: 461393 - RNA, 19 nt, Artificial Sequence
  Description of Artificial Sequence: Synthetic oligonucleotide
  Sense strand starting at position 3024 of SEQ ID NO: 317060
auguaauaguggucaucag

SEQ ID NO: 461394 - RNA, 19 nt, Artificial Sequence
  Description of Artificial Sequence: Synthetic oligonucleotide
  Antisense Strand to SEQ ID NO: 461393
cugaugaccacuauuacau

SEQ ID NO: 461395 - RNA, 19 nt, Artificial Sequence
  Description of Artificial Sequence: Synthetic oligonucleotide
  Sense strand starting at position 3229 of SEQ ID NO: 317060
aaccaugugcuuugauaag

SEQ ID NO: 461396 - RNA, 19 nt, Artificial Sequence
  Description of Artificial Sequence: Synthetic oligonucleotide
  Antisense Strand to SEQ ID NO: 461395
cuuaucaaagcacaugguu

SEQ ID NO: 461397 - RNA, 19 nt, Artificial Sequence
  Description of Artificial Sequence: Synthetic oligonucleotide
  Sense strand starting at position 3236 of SEQ ID NO: 317060
ugcuuugauaaggguuaau

SEQ ID NO: 461398 - RNA, 19 nt, Artificial Sequence
  Description of Artificial Sequence: Synthetic oligonucleotide
  Antisense Strand to SEQ ID NO: 461397
auuaacccuuaucaaagca

SEQ ID NO: 461399 - RNA, 19 nt, Artificial Sequence
  Description of Artificial Sequence: Synthetic oligonucleotide
  Sense strand starting at position 3263 of SEQ ID NO: 317060
cuuaaaguaauucgguaag

SEQ ID NO: 461400 - RNA, 19 nt, Artificial Sequence
  Description of Artificial Sequence: Synthetic oligonucleotide
  Antisense Strand to SEQ ID NO: 461399
cuuaccgaauuacuuuaag

SEQ ID NO: 461401 - RNA, 19 nt, Artificial Sequence
  Description of Artificial Sequence: Synthetic oligonucleotide
  Sense strand starting at position 3274 of SEQ ID NO: 317060
ucgguaaguggucuguugu

SEQ ID NO: 461402 - RNA, 19 nt, Artificial Sequence
  Description of Artificial Sequence: Synthetic oligonucleotide
  Antisense Strand to SEQ ID NO: 461401
acaacagaccacuuaccga

SEQ ID NO: 461403 - RNA, 19 nt, Artificial Sequence
  Description of Artificial Sequence: Synthetic oligonucleotide
  Sense strand starting at position 3277 of SEQ ID NO: 317060
guaaguggucuguugucuu

SEQ ID NO: 461404 - RNA, 19 nt, Artificial Sequence
  Description of Artificial Sequence: Synthetic oligonucleotide
  Antisense Strand to SEQ ID NO: 461403
aagacaacagaccacuuac

SEQ ID NO: 461405 - RNA, 19 nt, Artificial Sequence
  Description of Artificial Sequence: Synthetic oligonucleotide
  Sense strand starting at position 3546 of SEQ ID NO: 317060
ugguguaauacgcaagaac

SEQ ID NO: 461406 - RNA, 19 nt, Artificial Sequence
  Description of Artificial Sequence: Synthetic oligonucleotide
  Antisense Strand to SEQ ID NO: 461405
guucuugcguauuacacca

SEQ ID NO: 461407 - RNA, 19 nt, Artificial Sequence
  Description of Artificial Sequence: Synthetic oligonucleotide
  Sense strand starting at position 3586 of SEQ ID NO: 317060
gggucuuuaagcgauagag

SEQ ID NO: 461408 - RNA, 19 nt, Artificial Sequence
  Description of Artificial Sequence: Synthetic oligonucleotide
  Antisense Strand to SEQ ID NO: 461407
cucuaucgcuuaaagaccc

SEQ ID NO: 461409 - RNA, 19 nt, Artificial Sequence
  Description of Artificial Sequence: Synthetic oligonucleotide
  Sense strand starting at position 3776 of SEQ ID NO: 317060
gcuagauggguacaacuuu

SEQ ID NO: 461410 - RNA, 19 nt, Artificial Sequence
  Description of Artificial Sequence: Synthetic oligonucleotide
  Antisense Strand to SEQ ID NO: 461409
aaaguuguacccaucuagc

SEQ ID NO: 461411 - RNA, 19 nt, Artificial Sequence
  Description of Artificial Sequence: Synthetic oligonucleotide
  Sense strand starting at position 3825 of SEQ ID NO: 317060
ccuuccgaauucuuuaaga

SEQ ID NO: 461412 - RNA, 19 nt, Artificial Sequence
  Description of Artificial Sequence: Synthetic oligonucleotide
  Antisense Strand to SEQ ID NO: 461411
ucuuaaagaauucggaagg

SEQ ID NO: 461413 - RNA, 19 nt, Artificial Sequence
  Description of Artificial Sequence: Synthetic oligonucleotide
  Sense strand starting at position 20 of SEQ ID NO: 317061
acuguaaucugggccaaag

SEQ ID NO: 461414 - RNA, 19 nt, Artificial Sequence
  Description of Artificial Sequence: Synthetic oligonucleotide
  Antisense Strand to SEQ ID NO: 461413
cuuuggcccagauuacagu

SEQ ID NO: 461415 - RNA, 19 nt, Artificial Sequence
  Description of Artificial Sequence: Synthetic oligonucleotide
  Sense strand starting at position 272 of SEQ ID NO: 317061
cucgaagucucuccugaga

SEQ ID NO: 461416 - RNA, 19 nt, Artificial Sequence
  Description of Artificial Sequence: Synthetic oligonucleotide
  Antisense Strand to SEQ ID NO: 461415
ucucaggagagacuucgag

SEQ ID NO: 461417 - RNA, 19 nt, Artificial Sequence
  Description of Artificial Sequence: Synthetic oligonucleotide
  Sense strand starting at position 364 of SEQ ID NO: 317061
guauccugggagcauaagu

SEQ ID NO: 461418 - RNA, 19 nt, Artificial Sequence
  Description of Artificial Sequence: Synthetic oligonucleotide
  Antisense Strand to SEQ ID NO: 461417
acuuaugcucccaggauac

SEQ ID NO: 461419 - RNA, 19 nt, Artificial Sequence
  Description of Artificial Sequence: Synthetic oligonucleotide
  Sense strand starting at position 459 of SEQ ID NO: 317061
uucucaucugauggugagu

SEQ ID NO: 461420 - RNA, 19 nt, Artificial Sequence
  Description of Artificial Sequence: Synthetic oligonucleotide
  Antisense Strand to SEQ ID NO: 461419
acucaccaucagaugagaa

SEQ ID NO: 461421 - RNA, 19 nt, Artificial Sequence
  Description of Artificial Sequence: Synthetic oligonucleotide
  Sense strand starting at position 462 of SEQ ID NO: 317061
ucaucugauggugaguuau

SEQ ID NO: 461422 - RNA, 19 nt, Artificial Sequence
  Description of Artificial Sequence: Synthetic oligonucleotide
  Antisense Strand to SEQ ID NO: 461421
auaacucaccaucagauga

SEQ ID NO: 461423 - RNA, 19 nt, Artificial Sequence
  Description of Artificial Sequence: Synthetic oligonucleotide
  Sense strand starting at position 464 of SEQ ID NO: 317061
aucugauggugaguuauca

SEQ ID NO: 461424 - RNA, 19 nt, Artificial Sequence
  Description of Artificial Sequence: Synthetic oligonucleotide
  Antisense Strand to SEQ ID NO: 461423
ugauaacucaccaucagau

SEQ ID NO: 461425 - RNA, 19 nt, Artificial Sequence
  Description of Artificial Sequence: Synthetic oligonucleotide
  Sense strand starting at position 468 of SEQ ID NO: 317061
gauggugaguuaucaaauu

SEQ ID NO: 461426 - RNA, 19 nt, Artificial Sequence
  Description of Artificial Sequence: Synthetic oligonucleotide
  Antisense Strand to SEQ ID NO: 461425
aauuugauaacucaccauc

SEQ ID NO: 461427 - RNA, 19 nt, Artificial Sequence
  Description of Artificial Sequence: Synthetic oligonucleotide
  Sense strand starting at position 564 of SEQ ID NO: 317061
auguuucuauacucaagua

SEQ ID NO: 461428 - RNA, 19 nt, Artificial Sequence
  Description of Artificial Sequence: Synthetic oligonucleotide
  Antisense Strand to SEQ ID NO: 461427
uacuugaguauagaaacau

SEQ ID NO: 461429 - RNA, 19 nt, Artificial Sequence
  Description of Artificial Sequence: Synthetic oligonucleotide
  Sense strand starting at position 604 of SEQ ID NO: 317061
agguuaacccuguagggua

SEQ ID NO: 461430 - RNA, 19 nt, Artificial Sequence
  Description of Artificial Sequence: Synthetic oligonucleotide
  Antisense Strand to SEQ ID NO: 461429
uacccuacaggguuaaccu

SEQ ID NO: 461431 - RNA, 19 nt, Artificial Sequence
  Description of Artificial Sequence: Synthetic oligonucleotide
  Sense strand starting at position 675 of SEQ ID NO: 317061
ggaagcucagcagguuuaa

SEQ ID NO: 461432 - RNA, 19 nt, Artificial Sequence
  Description of Artificial Sequence: Synthetic oligonucleotide
  Antisense Strand to SEQ ID NO: 461431
uuaaaccugcugagcuucc

SEQ ID NO: 461433 - RNA, 19 nt, Artificial Sequence
  Description of Artificial Sequence: Synthetic oligonucleotide
  Sense strand starting at position 765 of SEQ ID NO: 317061
cuaagugacaggcggaauu

SEQ ID NO: 461434 - RNA, 19 nt, Artificial Sequence
  Description of Artificial Sequence: Synthetic oligonucleotide
  Antisense Strand to SEQ ID NO: 461433
aauuccgccugucacuuag

SEQ ID NO: 461435 - RNA, 19 nt, Artificial Sequence
  Description of Artificial Sequence: Synthetic oligonucleotide
  Sense strand starting at position 775 of SEQ ID NO: 317061
ggcggaauucuggaagcuu

SEQ ID NO: 461436 - RNA, 19 nt, Artificial Sequence
  Description of Artificial Sequence: Synthetic oligonucleotide
  Antisense Strand to SEQ ID NO: 461435
aagcuuccagaauuccgcc

SEQ ID NO: 461437 - RNA, 19 nt, Artificial Sequence
  Description of Artificial Sequence: Synthetic oligonucleotide
  Sense strand starting at position 794 of SEQ ID NO: 317061
caacauugcugggucauga

SEQ ID NO: 461438 - RNA, 19 nt, Artificial Sequence
  Description of Artificial Sequence: Synthetic oligonucleotide
  Antisense Strand to SEQ ID NO: 461437
ucaugacccagcaauguug

SEQ ID NO: 461439 - RNA, 19 nt, Artificial Sequence
  Description of Artificial Sequence: Synthetic oligonucleotide
  Sense strand starting at position 856 of SEQ ID NO: 317061
cugcuugucacugagggaa

SEQ ID NO: 461440 - RNA, 19 nt, Artificial Sequence
  Description of Artificial Sequence: Synthetic oligonucleotide
  Antisense Strand to SEQ ID NO: 461439
uucccucagugacaagcag

SEQ ID NO: 461441 - RNA, 19 nt, Artificial Sequence
  Description of Artificial Sequence: Synthetic oligonucleotide
  Sense strand starting at position 933 of SEQ ID NO: 317061
ggcuccuugcacuaaucau

SEQ ID NO: 461442 - RNA, 19 nt, Artificial Sequence
  Description of Artificial Sequence: Synthetic oligonucleotide
  Antisense Strand to SEQ ID NO: 461441
augauuagugcaaggagcc

SEQ ID NO: 461443 - RNA, 19 nt, Artificial Sequence
  Description of Artificial Sequence: Synthetic oligonucleotide
  Sense strand starting at position 1042 of SEQ ID NO: 317061
acugauagacaucgugaau

SEQ ID NO: 461444 - RNA, 19 nt, Artificial Sequence
  Description of Artificial Sequence: Synthetic oligonucleotide
  Antisense Strand to SEQ ID NO: 461443
auucacgaugucuaucagu

SEQ ID NO: 461445 - RNA, 19 nt, Artificial Sequence
  Description of Artificial Sequence: Synthetic oligonucleotide
  Sense strand starting at position 1094 of SEQ ID NO: 317061
agccgagagcuccagugau

SEQ ID NO: 461446 - RNA, 19 nt, Artificial Sequence
  Description of Artificial Sequence: Synthetic oligonucleotide
  Antisense Strand to SEQ ID NO: 461445
aucacuggagcucucggcu

SEQ ID NO: 461447 - RNA, 19 nt, Artificial Sequence
  Description of Artificial Sequence: Synthetic oligonucleotide
  Sense strand starting at position 1106 of SEQ ID NO: 317061
cagugauuucccuggccug

SEQ ID NO: 461448 - RNA, 19 nt, Artificial Sequence
  Description of Artificial Sequence: Synthetic oligonucleotide
  Antisense Strand to SEQ ID NO: 461447
caggccagggaaaucacug

SEQ ID NO: 461449 - RNA, 19 nt, Artificial Sequence
  Description of Artificial Sequence: Synthetic oligonucleotide
  Sense strand starting at position 1129 of SEQ ID NO: 317061
cgaguuauuuaagaaguga

SEQ ID NO: 461450 - RNA, 19 nt, Artificial Sequence
  Description of Artificial Sequence: Synthetic oligonucleotide
  Antisense Strand to SEQ ID NO: 461449
ucacuucuuaaauaacucg

SEQ ID NO: 461451 - RNA, 19 nt, Artificial Sequence
  Description of Artificial Sequence: Synthetic oligonucleotide
  Sense strand starting at position 1351 of SEQ ID NO: 317061
ggguaugcgccuccgugaa

SEQ ID NO: 461452 - RNA, 19 nt, Artificial Sequence
  Description of Artificial Sequence: Synthetic oligonucleotide
  Antisense Strand to SEQ ID NO: 461451
uucacggaggcgcauaccc

SEQ ID NO: 461453 - RNA, 19 nt, Artificial Sequence
  Description of Artificial Sequence: Synthetic oligonucleotide
  Sense strand starting at position 1662 of SEQ ID NO: 317061
ccgggauuccaaugccaaa

SEQ ID NO: 461454 - RNA, 19 nt, Artificial Sequence
  Description of Artificial Sequence: Synthetic oligonucleotide
  Antisense Strand to SEQ ID NO: 461453
uuuggcauuggaaucccgg

SEQ ID NO: 461455 - RNA, 19 nt, Artificial Sequence
  Description of Artificial Sequence: Synthetic oligonucleotide
  Sense strand starting at position 2382 of SEQ ID NO: 317061
ucuggcaucauaugggaga

SEQ ID NO: 461456 - RNA, 19 nt, Artificial Sequence
  Description of Artificial Sequence: Synthetic oligonucleotide
  Antisense Strand to SEQ ID NO: 461455
ucucccauaugaugccaga

SEQ ID NO: 461457 - RNA, 19 nt, Artificial Sequence
  Description of Artificial Sequence: Synthetic oligonucleotide
  Sense strand starting at position 2814 of SEQ ID NO: 317061
cuacauuguagagggaauu

SEQ ID NO: 461458 - RNA, 19 nt, Artificial Sequence
  Description of Artificial Sequence: Synthetic oligonucleotide
  Antisense Strand to SEQ ID NO: 461457
aauucccucuacaauguag

SEQ ID NO: 461459 - RNA, 19 nt, Artificial Sequence
  Description of Artificial Sequence: Synthetic oligonucleotide
  Sense strand starting at position 2907 of SEQ ID NO: 317061
agaagauaaugacauggaa

SEQ ID NO: 461460 - RNA, 19 nt, Artificial Sequence
  Description of Artificial Sequence: Synthetic oligonucleotide
  Antisense Strand to SEQ ID NO: 461459
uuccaugucauuaucuucu

SEQ ID NO: 461461 - RNA, 19 nt, Artificial Sequence
  Description of Artificial Sequence: Synthetic oligonucleotide
  Sense strand starting at position 3272 of SEQ ID NO: 317061
caaggaaggugucuguaag

SEQ ID NO: 461462 - RNA, 19 nt, Artificial Sequence
  Description of Artificial Sequence: Synthetic oligonucleotide
  Antisense Strand to SEQ ID NO: 461461
cuuacagacaccuuccuug

SEQ ID NO: 461463 - RNA, 19 nt, Artificial Sequence
  Description of Artificial Sequence: Synthetic oligonucleotide
  Sense strand starting at position 3279 of SEQ ID NO: 317061
ggugucuguaaggaaaugu

SEQ ID NO: 461464 - RNA, 19 nt, Artificial Sequence
  Description of Artificial Sequence: Synthetic oligonucleotide
  Antisense Strand to SEQ ID NO: 461463
acauuuccuuacagacacc

SEQ ID NO: 461465 - RNA, 19 nt, Artificial Sequence
  Description of Artificial Sequence: Synthetic oligonucleotide
  Sense strand starting at position 3372 of SEQ ID NO: 317061
ggccuuaagguaggaauga

SEQ ID NO: 461466 - RNA, 19 nt, Artificial Sequence
  Description of Artificial Sequence: Synthetic oligonucleotide
  Antisense Strand to SEQ ID NO: 461465
ucauuccuaccuuaaggcc

SEQ ID NO: 461467 - RNA, 19 nt, Artificial Sequence
  Description of Artificial Sequence: Synthetic oligonucleotide
  Sense strand starting at position 3558 of SEQ ID NO: 317061
ggagcucugaccuacguga

SEQ ID NO: 461468 - RNA, 19 nt, Artificial Sequence
  Description of Artificial Sequence: Synthetic oligonucleotide
  Antisense Strand to SEQ ID NO: 461467
ucacguaggucagagcucc

SEQ ID NO: 461469 - RNA, 19 nt, Artificial Sequence
  Description of Artificial Sequence: Synthetic oligonucleotide
  Sense strand starting at position 3590 of SEQ ID NO: 317061
uccggaggagcucaguauu

SEQ ID NO: 461470 - RNA, 19 nt, Artificial Sequence
  Description of Artificial Sequence: Synthetic oligonucleotide
  Antisense Strand to SEQ ID NO: 461469
aauacugagcuccuccgga

SEQ ID NO: 461471 - RNA, 19 nt, Artificial Sequence
  Description of Artificial Sequence: Synthetic oligonucleotide
  Sense strand starting at position 3593 of SEQ ID NO: 317061
ggaggagcucaguauucuu

SEQ ID NO: 461472 - RNA, 19 nt, Artificial Sequence
  Description of Artificial Sequence: Synthetic oligonucleotide
  Antisense Strand to SEQ ID NO: 461471
aagaauacugagcuccucc

SEQ ID NO: 461473 - RNA, 19 nt, Artificial Sequence
  Description of Artificial Sequence: Synthetic oligonucleotide
  Sense strand starting at position 3726 of SEQ ID NO: 317061
agaauccgaguuuaaucuu

SEQ ID NO: 461474 - RNA, 19 nt, Artificial Sequence
  Description of Artificial Sequence: Synthetic oligonucleotide
  Antisense Strand to SEQ ID NO: 461473
aagauuaaacucggauucu

SEQ ID NO: 461475 - RNA, 19 nt, Artificial Sequence
  Description of Artificial Sequence: Synthetic oligonucleotide
  Sense strand starting at position 3734 of SEQ ID NO: 317061
aguuuaaucuuuguccaau

SEQ ID NO: 461476 - RNA, 19 nt, Artificial Sequence
  Description of Artificial Sequence: Synthetic oligonucleotide
  Antisense Strand to SEQ ID NO: 461475
auuggacaaagauuaaacu

SEQ ID NO: 461477 - RNA, 19 nt, Artificial Sequence
  Description of Artificial Sequence: Synthetic oligonucleotide
  Sense strand starting at position 3735 of SEQ ID NO: 317061
guuuaaucuuuguccaauu

SEQ ID NO: 461478 - RNA, 19 nt, Artificial Sequence
  Description of Artificial Sequence: Synthetic oligonucleotide
  Antisense Strand to SEQ ID NO: 461477
aauuggacaaagauuaaac

SEQ ID NO: 461479 - RNA, 19 nt, Artificial Sequence
  Description of Artificial Sequence: Synthetic oligonucleotide
  Sense strand starting at position 3815 of SEQ ID NO: 317061
uggagucagacaggcuuua

SEQ ID NO: 461480 - RNA, 19 nt, Artificial Sequence
  Description of Artificial Sequence: Synthetic oligonucleotide
  Antisense Strand to SEQ ID NO: 461479
uaaagccugucugacucca

SEQ ID NO: 461481 - RNA, 19 nt, Artificial Sequence
  Description of Artificial Sequence: Synthetic oligonucleotide
  Sense strand starting at position 3820 of SEQ ID NO: 317061
ucagacaggcuuuaguuua

SEQ ID NO: 461482 - RNA, 19 nt, Artificial Sequence
  Description of Artificial Sequence: Synthetic oligonucleotide
  Antisense Strand to SEQ ID NO: 461481
uaaacuaaagccugucuga

SEQ ID NO: 461483 - RNA, 19 nt, Artificial Sequence
  Description of Artificial Sequence: Synthetic oligonucleotide
  Sense strand starting at position 3923 of SEQ ID NO: 317061
uuauuccagcucuguaaga

SEQ ID NO: 461484 - RNA, 19 nt, Artificial Sequence
  Description of Artificial Sequence: Synthetic oligonucleotide
  Antisense Strand to SEQ ID NO: 461483
ucuuacagagcuggaauaa

SEQ ID NO: 461485 - RNA, 19 nt, Artificial Sequence
  Description of Artificial Sequence: Synthetic oligonucleotide
  Sense strand starting at position 3925 of SEQ ID NO: 317061
auuccagcucuguaagaua

SEQ ID NO: 461486 - RNA, 19 nt, Artificial Sequence
  Description of Artificial Sequence: Synthetic oligonucleotide
  Antisense Strand to SEQ ID NO: 461485
uaucuuacagagcuggaau

SEQ ID NO: 461487 - RNA, 19 nt, Artificial Sequence
  Description of Artificial Sequence: Synthetic oligonucleotide
  Sense strand starting at position 3936 of SEQ ID NO: 317061
guaagauaggacuguuauc

SEQ ID NO: 461488 - RNA, 19 nt, Artificial Sequence
  Description of Artificial Sequence: Synthetic oligonucleotide
  Antisense Strand to SEQ ID NO: 461487
gauaacaguccuaucuuac

SEQ ID NO: 461489 - RNA, 19 nt, Artificial Sequence
  Description of Artificial Sequence: Synthetic oligonucleotide
  Sense strand starting at position 3947 of SEQ ID NO: 317061
cuguuaucaucccuacgag

SEQ ID NO: 461490 - RNA, 19 nt, Artificial Sequence
  Description of Artificial Sequence: Synthetic oligonucleotide
  Antisense Strand to SEQ ID NO: 461489
cucguagggaugauaacag

SEQ ID NO: 461491 - RNA, 19 nt, Artificial Sequence
  Description of Artificial Sequence: Synthetic oligonucleotide
  Sense strand starting at position 3950 of SEQ ID NO: 317061
uuaucaucccuacgaggaa

SEQ ID NO: 461492 - RNA, 19 nt, Artificial Sequence
  Description of Artificial Sequence: Synthetic oligonucleotide
  Antisense Strand to SEQ ID NO: 461491
uuccucguagggaugauaa

SEQ ID NO: 461493 - RNA, 19 nt, Artificial Sequence
  Description of Artificial Sequence: Synthetic oligonucleotide
  Sense strand starting at position 43 of SEQ ID NO: 317062
gugggaguguugaaugaga

SEQ ID NO: 461494 - RNA, 19 nt, Artificial Sequence
  Description of Artificial Sequence: Synthetic oligonucleotide
  Antisense Strand to SEQ ID NO: 461493
ucucauucaacacucccac

SEQ ID NO: 461495 - RNA, 19 nt, Artificial Sequence
  Description of Artificial Sequence: Synthetic oligonucleotide
  Sense strand starting at position 45 of SEQ ID NO: 317062
gggaguguugaaugagaua

SEQ ID NO: 461496 - RNA, 19 nt, Artificial Sequence
  Description of Artificial Sequence: Synthetic oligonucleotide
  Antisense Strand to SEQ ID NO: 461495
uaucucauucaacacuccc

SEQ ID NO: 461497 - RNA, 19 nt, Artificial Sequence
  Description of Artificial Sequence: Synthetic oligonucleotide
  Sense strand starting at position 56 of SEQ ID NO: 317062
augagauacugagugagua

SEQ ID NO: 461498 - RNA, 19 nt, Artificial Sequence
  Description of Artificial Sequence: Synthetic oligonucleotide
  Antisense Strand to SEQ ID NO: 461497
uacucacucaguaucucau

SEQ ID NO: 461499 - RNA, 19 nt, Artificial Sequence
  Description of Artificial Sequence: Synthetic oligonucleotide
  Sense strand starting at position 57 of SEQ ID NO: 317062
ugagauacugagugaguau

SEQ ID NO: 461500 - RNA, 19 nt, Artificial Sequence
  Description of Artificial Sequence: Synthetic oligonucleotide
  Antisense Strand to SEQ ID NO: 461499
auacucacucaguaucuca

SEQ ID NO: 461501 - RNA, 19 nt, Artificial Sequence
  Description of Artificial Sequence: Synthetic oligonucleotide
  Sense strand starting at position 64 of SEQ ID NO: 317062
cugagugaguaucucuaaa

SEQ ID NO: 461502 - RNA, 19 nt, Artificial Sequence
  Description of Artificial Sequence: Synthetic oligonucleotide
  Antisense Strand to SEQ ID NO: 461501
uuuagagauacucacucag

SEQ ID NO: 461503 - RNA, 19 nt, Artificial Sequence
  Description of Artificial Sequence: Synthetic oligonucleotide
  Sense strand starting at position 101 of SEQ ID NO: 317062
augagauacuguguaccaa

SEQ ID NO: 461504 - RNA, 19 nt, Artificial Sequence
  Description of Artificial Sequence: Synthetic oligonucleotide
  Antisense Strand to SEQ ID NO: 461503
uugguacacaguaucucau

SEQ ID NO: 461505 - RNA, 19 nt, Artificial Sequence
  Description of Artificial Sequence: Synthetic oligonucleotide
  Sense strand starting at position 762 of SEQ ID NO: 317062
uccucaugcccagaguaua

SEQ ID NO: 461506 - RNA, 19 nt, Artificial Sequence
  Description of Artificial Sequence: Synthetic oligonucleotide
  Antisense Strand to SEQ ID NO: 461505
uauacucugggcaugagga

SEQ ID NO: 461507 - RNA, 19 nt, Artificial Sequence
  Description of Artificial Sequence: Synthetic oligonucleotide
  Sense strand starting at position 887 of SEQ ID NO: 317062
ugaggcagugcucaaauaa

SEQ ID NO: 461508 - RNA, 19 nt, Artificial Sequence
  Description of Artificial Sequence: Synthetic oligonucleotide
  Antisense Strand to SEQ ID NO: 461507
uuauuugagcacugccuca

SEQ ID NO: 461509 - RNA, 19 nt, Artificial Sequence
  Description of Artificial Sequence: Synthetic oligonucleotide
  Sense strand starting at position 1079 of SEQ ID NO: 317062
caagauggauaguuuauua

SEQ ID NO: 461510 - RNA, 19 nt, Artificial Sequence
  Description of Artificial Sequence: Synthetic oligonucleotide
  Antisense Strand to SEQ ID NO: 461509
uaauaaacuauccaucuug

SEQ ID NO: 461511 - RNA, 19 nt, Artificial Sequence
  Description of Artificial Sequence: Synthetic oligonucleotide
  Sense strand starting at position 1083 of SEQ ID NO: 317062
auggauaguuuauuaagac

SEQ ID NO: 461512 - RNA, 19 nt, Artificial Sequence
  Description of Artificial Sequence: Synthetic oligonucleotide
  Antisense Strand to SEQ ID NO: 461511
gucuuaauaaacuauccau

SEQ ID NO: 461513 - RNA, 19 nt, Artificial Sequence
  Description of Artificial Sequence: Synthetic oligonucleotide
  Sense strand starting at position 1551 of SEQ ID NO: 317062
acucauauucccuagguuu

SEQ ID NO: 461514 - RNA, 19 nt, Artificial Sequence
  Description of Artificial Sequence: Synthetic oligonucleotide
  Antisense Strand to SEQ ID NO: 461513
aaaccuagggaauaugagu

SEQ ID NO: 461515 - RNA, 19 nt, Artificial Sequence
  Description of Artificial Sequence: Synthetic oligonucleotide
  Sense strand starting at position 1624 of SEQ ID NO: 317062
acaacaguacaaugauagu

SEQ ID NO: 461516 - RNA, 19 nt, Artificial Sequence
  Description of Artificial Sequence: Synthetic oligonucleotide
  Antisense Strand to SEQ ID NO: 461515
acuaucauuguacuguugu

SEQ ID NO: 461517 - RNA, 19 nt, Artificial Sequence
  Description of Artificial Sequence: Synthetic oligonucleotide
  Sense strand starting at position 2075 of SEQ ID NO: 317062
gacagccugugauuauaaa

SEQ ID NO: 461518 - RNA, 19 nt, Artificial Sequence
  Description of Artificial Sequence: Synthetic oligonucleotide
  Antisense Strand to SEQ ID NO: 461517
uuuauaaucacaggcuguc

SEQ ID NO: 461519 - RNA, 19 nt, Artificial Sequence
  Description of Artificial Sequence: Synthetic oligonucleotide
  Sense strand starting at position 2076 of SEQ ID NO: 317062
acagccugugauuauaaau

SEQ ID NO: 461520 - RNA, 19 nt, Artificial Sequence
  Description of Artificial Sequence: Synthetic oligonucleotide
  Antisense Strand to SEQ ID NO: 461519
auuuauaaucacaggcugu

SEQ ID NO: 461521 - RNA, 19 nt, Artificial Sequence
  Description of Artificial Sequence: Synthetic oligonucleotide
  Sense strand starting at position 2315 of SEQ ID NO: 317062
uguggauaacacuggcaga

SEQ ID NO: 461522 - RNA, 19 nt, Artificial Sequence
  Description of Artificial Sequence: Synthetic oligonucleotide
  Antisense Strand to SEQ ID NO: 461521
ucugccaguguuauccaca

SEQ ID NO: 461523 - RNA, 19 nt, Artificial Sequence
  Description of Artificial Sequence: Synthetic oligonucleotide
  Sense strand starting at position 2370 of SEQ ID NO: 317062
acugcagauucccugggau

SEQ ID NO: 461524 - RNA, 19 nt, Artificial Sequence
  Description of Artificial Sequence: Synthetic oligonucleotide
  Antisense Strand to SEQ ID NO: 461523
aucccagggaaucugcagu

SEQ ID NO: 461525 - RNA, 19 nt, Artificial Sequence
  Description of Artificial Sequence: Synthetic oligonucleotide
  Sense strand starting at position 2454 of SEQ ID NO: 317062
uuuggaaacuggucuaaac

SEQ ID NO: 461526 - RNA, 19 nt, Artificial Sequence
  Description of Artificial Sequence: Synthetic oligonucleotide
  Antisense Strand to SEQ ID NO: 461525
guuuagaccaguuuccaaa

SEQ ID NO: 461527 - RNA, 19 nt, Artificial Sequence
  Description of Artificial Sequence: Synthetic oligonucleotide
  Sense strand starting at position 2464 of SEQ ID NO: 317062
ggucuaaacugucuaggau

SEQ ID NO: 461528 - RNA, 19 nt, Artificial Sequence
  Description of Artificial Sequence: Synthetic oligonucleotide
  Antisense Strand to SEQ ID NO: 461527
auccuagacaguuuagacc

SEQ ID NO: 461529 - RNA, 19 nt, Artificial Sequence
  Description of Artificial Sequence: Synthetic oligonucleotide
  Sense strand starting at position 2465 of SEQ ID NO: 317062
gucuaaacugucuaggaug

SEQ ID NO: 461530 - RNA, 19 nt, Artificial Sequence
  Description of Artificial Sequence: Synthetic oligonucleotide
  Antisense Strand to SEQ ID NO: 461529
cauccuagacaguuuagac

SEQ ID NO: 461531 - RNA, 19 nt, Artificial Sequence
  Description of Artificial Sequence: Synthetic oligonucleotide
  Sense strand starting at position 2618 of SEQ ID NO: 317062
acagcuuugcaucaagaga

SEQ ID NO: 461532 - RNA, 19 nt, Artificial Sequence
  Description of Artificial Sequence: Synthetic oligonucleotide
  Antisense Strand to SEQ ID NO: 461531
ucucuugaugcaaagcugu

SEQ ID NO: 461533 - RNA, 19 nt, Artificial Sequence
  Description of Artificial Sequence: Synthetic oligonucleotide
  Sense strand starting at position 2700 of SEQ ID NO: 317062
acugauuaaugcccugaag

SEQ ID NO: 461534 - RNA, 19 nt, Artificial Sequence
  Description of Artificial Sequence: Synthetic oligonucleotide
  Antisense Strand to SEQ ID NO: 461533
cuucagggcauuaaucagu

SEQ ID NO: 461535 - RNA, 19 nt, Artificial Sequence
  Description of Artificial Sequence: Synthetic oligonucleotide
  Sense strand starting at position 2702 of SEQ ID NO: 317062
ugauuaaugcccugaagaa

SEQ ID NO: 461536 - RNA, 19 nt, Artificial Sequence
  Description of Artificial Sequence: Synthetic oligonucleotide
  Antisense Strand to SEQ ID NO: 461535
uucuucagggcauuaauca

SEQ ID NO: 461537 - RNA, 19 nt, Artificial Sequence
  Description of Artificial Sequence: Synthetic oligonucleotide
  Sense strand starting at position 2714 of SEQ ID NO: 317062
ugaagaacagguugucaaa

SEQ ID NO: 461538 - RNA, 19 nt, Artificial Sequence
  Description of Artificial Sequence: Synthetic oligonucleotide
  Antisense Strand to SEQ ID NO: 461537
uuugacaaccuguucuuca

SEQ ID NO: 461539 - RNA, 19 nt, Artificial Sequence
  Description of Artificial Sequence: Synthetic oligonucleotide
  Sense strand starting at position 3204 of SEQ ID NO: 317062
aggacucugucuccaaauc

SEQ ID NO: 461540 - RNA, 19 nt, Artificial Sequence
  Description of Artificial Sequence: Synthetic oligonucleotide
  Antisense Strand to SEQ ID NO: 461539
gauuuggagacagaguccu

SEQ ID NO: 461541 - RNA, 19 nt, Artificial Sequence
  Description of Artificial Sequence: Synthetic oligonucleotide
  Sense strand starting at position 3312 of SEQ ID NO: 317062
cuccuuauucuguagauga

SEQ ID NO: 461542 - RNA, 19 nt, Artificial Sequence
  Description of Artificial Sequence: Synthetic oligonucleotide
  Antisense Strand to SEQ ID NO: 461541
ucaucuacagaauaaggag

SEQ ID NO: 461543 - RNA, 19 nt, Artificial Sequence
  Description of Artificial Sequence: Synthetic oligonucleotide
  Sense strand starting at position 3314 of SEQ ID NO: 317062
ccuuauucuguagaugaug

SEQ ID NO: 461544 - RNA, 19 nt, Artificial Sequence
  Description of Artificial Sequence: Synthetic oligonucleotide
  Antisense Strand to SEQ ID NO: 461543
caucaucuacagaauaagg

SEQ ID NO: 461545 - RNA, 19 nt, Artificial Sequence
  Description of Artificial Sequence: Synthetic oligonucleotide
  Sense strand starting at position 3325 of SEQ ID NO: 317062
agaugaugcuaaccuggau

SEQ ID NO: 461546 - RNA, 19 nt, Artificial Sequence
  Description of Artificial Sequence: Synthetic oligonucleotide
  Antisense Strand to SEQ ID NO: 461545
auccagguuagcaucaucu

SEQ ID NO: 461547 - RNA, 19 nt, Artificial Sequence
  Description of Artificial Sequence: Synthetic oligonucleotide
  Sense strand starting at position 3328 of SEQ ID NO: 317062
ugaugcuaaccuggauuau

SEQ ID NO: 461548 - RNA, 19 nt, Artificial Sequence
  Description of Artificial Sequence: Synthetic oligonucleotide
  Antisense Strand to SEQ ID NO: 461547
auaauccagguuagcauca

SEQ ID NO: 461549 - RNA, 19 nt, Artificial Sequence
  Description of Artificial Sequence: Synthetic oligonucleotide
  Sense strand starting at position 3340 of SEQ ID NO: 317062
ggauuaugauccucagcua

SEQ ID NO: 461550 - RNA, 19 nt, Artificial Sequence
  Description of Artificial Sequence: Synthetic oligonucleotide
  Antisense Strand to SEQ ID NO: 461549
uagcugaggaucauaaucc

SEQ ID NO: 461551 - RNA, 19 nt, Artificial Sequence
  Description of Artificial Sequence: Synthetic oligonucleotide
  Sense strand starting at position 3360 of SEQ ID NO: 317062
augcuauuaugacuagauc

SEQ ID NO: 461552 - RNA, 19 nt, Artificial Sequence
  Description of Artificial Sequence: Synthetic oligonucleotide
  Antisense Strand to SEQ ID NO: 461551
gaucuagucauaauagcau

SEQ ID NO: 461553 - RNA, 19 nt, Artificial Sequence
  Description of Artificial Sequence: Synthetic oligonucleotide
  Sense strand starting at position 3361 of SEQ ID NO: 317062
ugcuauuaugacuagauca

SEQ ID NO: 461554 - RNA, 19 nt, Artificial Sequence
  Description of Artificial Sequence: Synthetic oligonucleotide
  Antisense Strand to SEQ ID NO: 461553
ugaucuagucauaauagca

SEQ ID NO: 461555 - RNA, 19 nt, Artificial Sequence
  Description of Artificial Sequence: Synthetic oligonucleotide
  Sense strand starting at position 3405 of SEQ ID NO: 317062
ugcugaaugacagggauau

SEQ ID NO: 461556 - RNA, 19 nt, Artificial Sequence
  Description of Artificial Sequence: Synthetic oligonucleotide
  Antisense Strand to SEQ ID NO: 461555
auaucccugucauucagca

SEQ ID NO: 461557 - RNA, 19 nt, Artificial Sequence
  Description of Artificial Sequence: Synthetic oligonucleotide
  Sense strand starting at position 3406 of SEQ ID NO: 317062
gcugaaugacagggauaug

SEQ ID NO: 461558 - RNA, 19 nt, Artificial Sequence
  Description of Artificial Sequence: Synthetic oligonucleotide
  Antisense Strand to SEQ ID NO: 461557
cauaucccugucauucagc

SEQ ID NO: 461559 - RNA, 19 nt, Artificial Sequence
  Description of Artificial Sequence: Synthetic oligonucleotide
  Sense strand starting at position 3411 of SEQ ID NO: 317062
augacagggauaugucauu

SEQ ID NO: 461560 - RNA, 19 nt, Artificial Sequence
  Description of Artificial Sequence: Synthetic oligonucleotide
  Antisense Strand to SEQ ID NO: 461559
aaugacauaucccugucau

SEQ ID NO: 461561 - RNA, 19 nt, Artificial Sequence
  Description of Artificial Sequence: Synthetic oligonucleotide
  Sense strand starting at position 3416 of SEQ ID NO: 317062
agggauaugucauuaggug

SEQ ID NO: 461562 - RNA, 19 nt, Artificial Sequence
  Description of Artificial Sequence: Synthetic oligonucleotide
  Antisense Strand to SEQ ID NO: 461561
caccuaaugacauaucccu

SEQ ID NO: 461563 - RNA, 19 nt, Artificial Sequence
  Description of Artificial Sequence: Synthetic oligonucleotide
  Sense strand starting at position 3713 of SEQ ID NO: 317062
uuggaaauaucugcauuac

SEQ ID NO: 461564 - RNA, 19 nt, Artificial Sequence
  Description of Artificial Sequence: Synthetic oligonucleotide
  Antisense Strand to SEQ ID NO: 461563
guaaugcagauauuuccaa

SEQ ID NO: 461565 - RNA, 19 nt, Artificial Sequence
  Description of Artificial Sequence: Synthetic oligonucleotide
  Sense strand starting at position 3918 of SEQ ID NO: 317062
ucuacuguugacugaaaug

SEQ ID NO: 461566 - RNA, 19 nt, Artificial Sequence
  Description of Artificial Sequence: Synthetic oligonucleotide
  Antisense Strand to SEQ ID NO: 461565
cauuucagucaacaguaga

SEQ ID NO: 461567 - RNA, 19 nt, Artificial Sequence
  Description of Artificial Sequence: Synthetic oligonucleotide
  Sense strand starting at position 3937 of SEQ ID NO: 317062
uuauaugaagcaugauuag

SEQ ID NO: 461568 - RNA, 19 nt, Artificial Sequence
  Description of Artificial Sequence: Synthetic oligonucleotide
  Antisense Strand to SEQ ID NO: 461567
cuaaucaugcuucauauaa

SEQ ID NO: 461569 - RNA, 19 nt, Artificial Sequence
  Description of Artificial Sequence: Synthetic oligonucleotide
  Sense strand starting at position 3946 of SEQ ID NO: 317062
gcaugauuagugcaagaga

SEQ ID NO: 461570 - RNA, 19 nt, Artificial Sequence
  Description of Artificial Sequence: Synthetic oligonucleotide
  Antisense Strand to SEQ ID NO: 461569
ucucuugcacuaaucaugc

SEQ ID NO: 461571 - RNA, 19 nt, Artificial Sequence
  Description of Artificial Sequence: Synthetic oligonucleotide
  Sense strand starting at position 3967 of SEQ ID NO: 317062
aggaguuuaggguaauggu

SEQ ID NO: 461572 - RNA, 19 nt, Artificial Sequence
  Description of Artificial Sequence: Synthetic oligonucleotide
  Antisense Strand to SEQ ID NO: 461571
accauuacccuaaacuccu

SEQ ID NO: 461573 - RNA, 19 nt, Artificial Sequence
  Description of Artificial Sequence: Synthetic oligonucleotide
  Sense strand starting at position 173 of SEQ ID NO: 317063
ggguaugcgccuccgugaa

SEQ ID NO: 461574 - RNA, 19 nt, Artificial Sequence
  Description of Artificial Sequence: Synthetic oligonucleotide
  Antisense Strand to SEQ ID NO: 461573
uucacggaggcgcauaccc

SEQ ID NO: 461575 - RNA, 19 nt, Artificial Sequence
  Description of Artificial Sequence: Synthetic oligonucleotide
  Sense strand starting at position 484 of SEQ ID NO: 317063
ccgggauuccaaugccaaa

SEQ ID NO: 461576 - RNA, 19 nt, Artificial Sequence
  Description of Artificial Sequence: Synthetic oligonucleotide
  Antisense Strand to SEQ ID NO: 461575
uuuggcauuggaaucccgg

SEQ ID NO: 461577 - RNA, 19 nt, Artificial Sequence
  Description of Artificial Sequence: Synthetic oligonucleotide
  Sense strand starting at position 1204 of SEQ ID NO: 317063
ucuggcaucauaugggaga

SEQ ID NO: 461578 - RNA, 19 nt, Artificial Sequence
  Description of Artificial Sequence: Synthetic oligonucleotide
  Antisense Strand to SEQ ID NO: 461577
ucucccauaugaugccaga

SEQ ID NO: 461579 - RNA, 19 nt, Artificial Sequence
  Description of Artificial Sequence: Synthetic oligonucleotide
  Sense strand starting at position 1446 of SEQ ID NO: 317063
gaaggcuaccuguguccua

SEQ ID NO: 461580 - RNA, 19 nt, Artificial Sequence
  Description of Artificial Sequence: Synthetic oligonucleotide
  Antisense Strand to SEQ ID NO: 461579
uaggacacagguagccuuc

SEQ ID NO: 461581 - RNA, 19 nt, Artificial Sequence
  Description of Artificial Sequence: Synthetic oligonucleotide
  Sense strand starting at position 1617 of SEQ ID NO: 317063
guccuugcccucgagguau

SEQ ID NO: 461582 - RNA, 19 nt, Artificial Sequence
  Description of Artificial Sequence: Synthetic oligonucleotide
  Antisense Strand to SEQ ID NO: 461581
auaccucgagggcaaggac

SEQ ID NO: 461583 - RNA, 19 nt, Artificial Sequence
  Description of Artificial Sequence: Synthetic oligonucleotide
  Sense strand starting at position 1636 of SEQ ID NO: 317063
cuacauuguagagggaauu

SEQ ID NO: 461584 - RNA, 19 nt, Artificial Sequence
  Description of Artificial Sequence: Synthetic oligonucleotide
  Antisense Strand to SEQ ID NO: 461583
aauucccucuacaauguag

SEQ ID NO: 461585 - RNA, 19 nt, Artificial Sequence
  Description of Artificial Sequence: Synthetic oligonucleotide
  Sense strand starting at position 1729 of SEQ ID NO: 317063
agaagauaaugacauggaa

SEQ ID NO: 461586 - RNA, 19 nt, Artificial Sequence
  Description of Artificial Sequence: Synthetic oligonucleotide
  Antisense Strand to SEQ ID NO: 461585
uuccaugucauuaucuucu

SEQ ID NO: 461587 - RNA, 19 nt, Artificial Sequence
  Description of Artificial Sequence: Synthetic oligonucleotide
  Sense strand starting at position 2000 of SEQ ID NO: 317063
ccggcucacuucuuucuaa

SEQ ID NO: 461588 - RNA, 19 nt, Artificial Sequence
  Description of Artificial Sequence: Synthetic oligonucleotide
  Antisense Strand to SEQ ID NO: 461587
uuagaaagaagugagccgg

SEQ ID NO: 461589 - RNA, 19 nt, Artificial Sequence
  Description of Artificial Sequence: Synthetic oligonucleotide
  Sense strand starting at position 2094 of SEQ ID NO: 317063
caaggaaggugucuguaag

SEQ ID NO: 461590 - RNA, 19 nt, Artificial Sequence
  Description of Artificial Sequence: Synthetic oligonucleotide
  Antisense Strand to SEQ ID NO: 461589
cuuacagacaccuuccuug

SEQ ID NO: 461591 - RNA, 19 nt, Artificial Sequence
  Description of Artificial Sequence: Synthetic oligonucleotide
  Sense strand starting at position 2101 of SEQ ID NO: 317063
ggugucuguaaggaaaugu

SEQ ID NO: 461592 - RNA, 19 nt, Artificial Sequence
  Description of Artificial Sequence: Synthetic oligonucleotide
  Antisense Strand to SEQ ID NO: 461591
acauuuccuuacagacacc

SEQ ID NO: 461593 - RNA, 19 nt, Artificial Sequence
  Description of Artificial Sequence: Synthetic oligonucleotide
  Sense strand starting at position 2194 of SEQ ID NO: 317063
ggccuuaagguaggaauga

SEQ ID NO: 461594 - RNA, 19 nt, Artificial Sequence
  Description of Artificial Sequence: Synthetic oligonucleotide
  Antisense Strand to SEQ ID NO: 461593
ucauuccuaccuuaaggcc

SEQ ID NO: 461595 - RNA, 19 nt, Artificial Sequence
  Description of Artificial Sequence: Synthetic oligonucleotide
  Sense strand starting at position 2342 of SEQ ID NO: 317063
uuagauuguugccugggua

SEQ ID NO: 461596 - RNA, 19 nt, Artificial Sequence
  Description of Artificial Sequence: Synthetic oligonucleotide
  Antisense Strand to SEQ ID NO: 461595
uacccaggcaacaaucuaa

SEQ ID NO: 461597 - RNA, 19 nt, Artificial Sequence
  Description of Artificial Sequence: Synthetic oligonucleotide
  Sense strand starting at position 2343 of SEQ ID NO: 317063
uagauuguugccuggguau

SEQ ID NO: 461598 - RNA, 19 nt, Artificial Sequence
  Description of Artificial Sequence: Synthetic oligonucleotide
  Antisense Strand to SEQ ID NO: 461597
auacccaggcaacaaucua

SEQ ID NO: 461599 - RNA, 19 nt, Artificial Sequence
  Description of Artificial Sequence: Synthetic oligonucleotide
  Sense strand starting at position 2345 of SEQ ID NO: 317063
gauuguugccuggguauac

SEQ ID NO: 461600 - RNA, 19 nt, Artificial Sequence
  Description of Artificial Sequence: Synthetic oligonucleotide
  Antisense Strand to SEQ ID NO: 461599
guauacccaggcaacaauc

SEQ ID NO: 461601 - RNA, 19 nt, Artificial Sequence
  Description of Artificial Sequence: Synthetic oligonucleotide
  Sense strand starting at position 2380 of SEQ ID NO: 317063
ggagcucugaccuacguga

SEQ ID NO: 461602 - RNA, 19 nt, Artificial Sequence
  Description of Artificial Sequence: Synthetic oligonucleotide
  Antisense Strand to SEQ ID NO: 461601
ucacguaggucagagcucc

SEQ ID NO: 461603 - RNA, 19 nt, Artificial Sequence
  Description of Artificial Sequence: Synthetic oligonucleotide
  Sense strand starting at position 2412 of SEQ ID NO: 317063
uccggaggagcucaguauu

SEQ ID NO: 461604 - RNA, 19 nt, Artificial Sequence
  Description of Artificial Sequence: Synthetic oligonucleotide
  Antisense Strand to SEQ ID NO: 461603
aauacugagcuccuccgga

SEQ ID NO: 461605 - RNA, 19 nt, Artificial Sequence
  Description of Artificial Sequence: Synthetic oligonucleotide
  Sense strand starting at position 2415 of SEQ ID NO: 317063
ggaggagcucaguauucuu

SEQ ID NO: 461606 - RNA, 19 nt, Artificial Sequence
  Description of Artificial Sequence: Synthetic oligonucleotide
  Antisense Strand to SEQ ID NO: 461605
aagaauacugagcuccucc

SEQ ID NO: 461607 - RNA, 19 nt, Artificial Sequence
  Description of Artificial Sequence: Synthetic oligonucleotide
  Sense strand starting at position 2422 of SEQ ID NO: 317063
cucaguauucuuggccuaa

SEQ ID NO: 461608 - RNA, 19 nt, Artificial Sequence
  Description of Artificial Sequence: Synthetic oligonucleotide
  Antisense Strand to SEQ ID NO: 461607
uuaggccaagaauacugag

SEQ ID NO: 461609 - RNA, 19 nt, Artificial Sequence
  Description of Artificial Sequence: Synthetic oligonucleotide
  Sense strand starting at position 2423 of SEQ ID NO: 317063
ucaguauucuuggccuaac

SEQ ID NO: 461610 - RNA, 19 nt, Artificial Sequence
  Description of Artificial Sequence: Synthetic oligonucleotide
  Antisense Strand to SEQ ID NO: 461609
guuaggccaagaauacuga

SEQ ID NO: 461611 - RNA, 19 nt, Artificial Sequence
  Description of Artificial Sequence: Synthetic oligonucleotide
  Sense strand starting at position 2548 of SEQ ID NO: 317063
agaauccgaguuuaaucuu

SEQ ID NO: 461612 - RNA, 19 nt, Artificial Sequence
  Description of Artificial Sequence: Synthetic oligonucleotide
  Antisense Strand to SEQ ID NO: 461611
aagauuaaacucggauucu

SEQ ID NO: 461613 - RNA, 19 nt, Artificial Sequence
  Description of Artificial Sequence: Synthetic oligonucleotide
  Sense strand starting at position 2551 of SEQ ID NO: 317063
auccgaguuuaaucuuugu

SEQ ID NO: 461614 - RNA, 19 nt, Artificial Sequence
  Description of Artificial Sequence: Synthetic oligonucleotide
  Antisense Strand to SEQ ID NO: 461613
acaaagauuaaacucggau

SEQ ID NO: 461615 - RNA, 19 nt, Artificial Sequence
  Description of Artificial Sequence: Synthetic oligonucleotide
  Sense strand starting at position 2554 of SEQ ID NO: 317063
cgaguuuaaucuuugucca

SEQ ID NO: 461616 - RNA, 19 nt, Artificial Sequence
  Description of Artificial Sequence: Synthetic oligonucleotide
  Antisense Strand to SEQ ID NO: 461615
uggacaaagauuaaacucg

SEQ ID NO: 461617 - RNA, 19 nt, Artificial Sequence
  Description of Artificial Sequence: Synthetic oligonucleotide
  Sense strand starting at position 2556 of SEQ ID NO: 317063
aguuuaaucuuuguccaau

SEQ ID NO: 461618 - RNA, 19 nt, Artificial Sequence
  Description of Artificial Sequence: Synthetic oligonucleotide
  Antisense Strand to SEQ ID NO: 461617
auuggacaaagauuaaacu

SEQ ID NO: 461619 - RNA, 19 nt, Artificial Sequence
  Description of Artificial Sequence: Synthetic oligonucleotide
  Sense strand starting at position 2557 of SEQ ID NO: 317063
guuuaaucuuuguccaauu

SEQ ID NO: 461620 - RNA, 19 nt, Artificial Sequence
  Description of Artificial Sequence: Synthetic oligonucleotide
  Antisense Strand to SEQ ID NO: 461619
aauuggacaaagauuaaac

SEQ ID NO: 461621 - RNA, 19 nt, Artificial Sequence
  Description of Artificial Sequence: Synthetic oligonucleotide
  Sense strand starting at position 2637 of SEQ ID NO: 317063
uggagucagacaggcuuua

SEQ ID NO: 461622 - RNA, 19 nt, Artificial Sequence
  Description of Artificial Sequence: Synthetic oligonucleotide
  Antisense Strand to SEQ ID NO: 461621
uaaagccugucugacucca

SEQ ID NO: 461623 - RNA, 19 nt, Artificial Sequence
  Description of Artificial Sequence: Synthetic oligonucleotide
  Sense strand starting at position 2642 of SEQ ID NO: 317063
ucagacaggcuuuaguuua

SEQ ID NO: 461624 - RNA, 19 nt, Artificial Sequence
  Description of Artificial Sequence: Synthetic oligonucleotide
  Antisense Strand to SEQ ID NO: 461623
uaaacuaaagccugucuga

SEQ ID NO: 461625 - RNA, 19 nt, Artificial Sequence
  Description of Artificial Sequence: Synthetic oligonucleotide
  Sense strand starting at position 2745 of SEQ ID NO: 317063
uuauuccagcucuguaaga

SEQ ID NO: 461626 - RNA, 19 nt, Artificial Sequence
  Description of Artificial Sequence: Synthetic oligonucleotide
  Antisense Strand to SEQ ID NO: 461625
ucuuacagagcuggaauaa

SEQ ID NO: 461627 - RNA, 19 nt, Artificial Sequence
  Description of Artificial Sequence: Synthetic oligonucleotide
  Sense strand starting at position 2747 of SEQ ID NO: 317063
auuccagcucuguaagaua

SEQ ID NO: 461628 - RNA, 19 nt, Artificial Sequence
  Description of Artificial Sequence: Synthetic oligonucleotide
  Antisense Strand to SEQ ID NO: 461627
uaucuuacagagcuggaau

SEQ ID NO: 461629 - RNA, 19 nt, Artificial Sequence
  Description of Artificial Sequence: Synthetic oligonucleotide
  Sense strand starting at position 2758 of SEQ ID NO: 317063
guaagauaggacuguuauc

SEQ ID NO: 461630 - RNA, 19 nt, Artificial Sequence
  Description of Artificial Sequence: Synthetic oligonucleotide
  Antisense Strand to SEQ ID NO: 461629
gauaacaguccuaucuuac

SEQ ID NO: 461631 - RNA, 19 nt, Artificial Sequence
  Description of Artificial Sequence: Synthetic oligonucleotide
  Sense strand starting at position 2769 of SEQ ID NO: 317063
cuguuaucaucccuacgag

SEQ ID NO: 461632 - RNA, 19 nt, Artificial Sequence
  Description of Artificial Sequence: Synthetic oligonucleotide
  Antisense Strand to SEQ ID NO: 461631
cucguagggaugauaacag

SEQ ID NO: 461633 - RNA, 19 nt, Artificial Sequence
  Description of Artificial Sequence: Synthetic oligonucleotide
  Sense strand starting at position 2772 of SEQ ID NO: 317063
uuaucaucccuacgaggaa

SEQ ID NO: 461634 - RNA, 19 nt, Artificial Sequence
  Description of Artificial Sequence: Synthetic oligonucleotide
  Antisense Strand to SEQ ID NO: 461633
uuccucguagggaugauaa

SEQ ID NO: 461635 - RNA, 19 nt, Artificial Sequence
  Description of Artificial Sequence: Synthetic oligonucleotide
  Sense strand starting at position 2846 of SEQ ID NO: 317063
gcgccagauuugcuccuaa

SEQ ID NO: 461636 - RNA, 19 nt, Artificial Sequence
  Description of Artificial Sequence: Synthetic oligonucleotide
  Antisense Strand to SEQ ID NO: 461635
uuaggagcaaaucuggcgc

SEQ ID NO: 461637 - RNA, 19 nt, Artificial Sequence
  Description of Artificial Sequence: Synthetic oligonucleotide
  Sense strand starting at position 2943 of SEQ ID NO: 317063
gguggauauagucauccag

SEQ ID NO: 461638 - RNA, 19 nt, Artificial Sequence
  Description of Artificial Sequence: Synthetic oligonucleotide
  Antisense Strand to SEQ ID NO: 461637
cuggaugacuauauccacc

SEQ ID NO: 461639 - RNA, 19 nt, Artificial Sequence
  Description of Artificial Sequence: Synthetic oligonucleotide
  Sense strand starting at position 2945 of SEQ ID NO: 317063
uggauauagucauccagca

SEQ ID NO: 461640 - RNA, 19 nt, Artificial Sequence
  Description of Artificial Sequence: Synthetic oligonucleotide
  Antisense Strand to SEQ ID NO: 461639
ugcuggaugacuauaucca

SEQ ID NO: 461641 - RNA, 19 nt, Artificial Sequence
  Description of Artificial Sequence: Synthetic oligonucleotide
  Sense strand starting at position 2950 of SEQ ID NO: 317063
auagucauccagcagaauc

SEQ ID NO: 461642 - RNA, 19 nt, Artificial Sequence
  Description of Artificial Sequence: Synthetic oligonucleotide
  Antisense Strand to SEQ ID NO: 461641
gauucugcuggaugacuau

SEQ ID NO: 461643 - RNA, 19 nt, Artificial Sequence
  Description of Artificial Sequence: Synthetic oligonucleotide
  Sense strand starting at position 2952 of SEQ ID NO: 317063
agucauccagcagaaucau

SEQ ID NO: 461644 - RNA, 19 nt, Artificial Sequence
  Description of Artificial Sequence: Synthetic oligonucleotide
  Antisense Strand to SEQ ID NO: 461643
augauucugcuggaugacu

SEQ ID NO: 461645 - RNA, 19 nt, Artificial Sequence
  Description of Artificial Sequence: Synthetic oligonucleotide
  Sense strand starting at position 3031 of SEQ ID NO: 317063
agcaguugcugaguacaga

SEQ ID NO: 461646 - RNA, 19 nt, Artificial Sequence
  Description of Artificial Sequence: Synthetic oligonucleotide
  Antisense Strand to SEQ ID NO: 461645
ucuguacucagcaacugcu

SEQ ID NO: 461647 - RNA, 19 nt, Artificial Sequence
  Description of Artificial Sequence: Synthetic oligonucleotide
  Sense strand starting at position 3159 of SEQ ID NO: 317063
agaugaccuuguuuccaua

SEQ ID NO: 461648 - RNA, 19 nt, Artificial Sequence
  Description of Artificial Sequence: Synthetic oligonucleotide
  Antisense Strand to SEQ ID NO: 461647
uauggaaacaaggucaucu

SEQ ID NO: 461649 - RNA, 19 nt, Artificial Sequence
  Description of Artificial Sequence: Synthetic oligonucleotide
  Sense strand starting at position 3237 of SEQ ID NO: 317063
ggcuuugggcagugauaug

SEQ ID NO: 461650 - RNA, 19 nt, Artificial Sequence
  Description of Artificial Sequence: Synthetic oligonucleotide
  Antisense Strand to SEQ ID NO: 461649
cauaucacugcccaaagcc

SEQ ID NO: 461651 - RNA, 19 nt, Artificial Sequence
  Description of Artificial Sequence: Synthetic oligonucleotide
  Sense strand starting at position 3740 of SEQ ID NO: 317063
uggcauugaaauuggcauu

SEQ ID NO: 461652 - RNA, 19 nt, Artificial Sequence
  Description of Artificial Sequence: Synthetic oligonucleotide
  Antisense Strand to SEQ ID NO: 461651
aaugccaauuucaaugcca

SEQ ID NO: 461653 - RNA, 19 nt, Artificial Sequence
  Description of Artificial Sequence: Synthetic oligonucleotide
  Sense strand starting at position 251 of SEQ ID NO: 317064
gugaaagaccuuuaauguc

SEQ ID NO: 461654 - RNA, 19 nt, Artificial Sequence
  Description of Artificial Sequence: Synthetic oligonucleotide
  Antisense Strand to SEQ ID NO: 461653
gacauuaaaggucuuucac

SEQ ID NO: 461655 - RNA, 19 nt, Artificial Sequence
  Description of Artificial Sequence: Synthetic oligonucleotide
  Sense strand starting at position 384 of SEQ ID NO: 317064
ugcagaugaaguggucaaa

SEQ ID NO: 461656 - RNA, 19 nt, Artificial Sequence
  Description of Artificial Sequence: Synthetic oligonucleotide
  Antisense Strand to SEQ ID NO: 461655
uuugaccacuucaucugca

SEQ ID NO: 461657 - RNA, 19 nt, Artificial Sequence
  Description of Artificial Sequence: Synthetic oligonucleotide
  Sense strand starting at position 501 of SEQ ID NO: 317064
aucgguuuaagacgucaaa

SEQ ID NO: 461658 - RNA, 19 nt, Artificial Sequence
  Description of Artificial Sequence: Synthetic oligonucleotide
  Antisense Strand to SEQ ID NO: 461657
uuugacgucuuaaaccgau

SEQ ID NO: 461659 - RNA, 19 nt, Artificial Sequence
  Description of Artificial Sequence: Synthetic oligonucleotide
  Sense strand starting at position 522 of SEQ ID NO: 317064
gcaacuagauuugaaauga

SEQ ID NO: 461660 - RNA, 19 nt, Artificial Sequence
  Description of Artificial Sequence: Synthetic oligonucleotide
  Antisense Strand to SEQ ID NO: 461659
ucauuucaaaucuaguugc

SEQ ID NO: 461661 - RNA, 19 nt, Artificial Sequence
  Description of Artificial Sequence: Synthetic oligonucleotide
  Sense strand starting at position 634 of SEQ ID NO: 317064
ggaucuaagucaucaaauu

SEQ ID NO: 461662 - RNA, 19 nt, Artificial Sequence
  Description of Artificial Sequence: Synthetic oligonucleotide
  Antisense Strand to SEQ ID NO: 461661
aauuugaugacuuagaucc

SEQ ID NO: 461663 - RNA, 19 nt, Artificial Sequence
  Description of Artificial Sequence: Synthetic oligonucleotide
  Sense strand starting at position 662 of SEQ ID NO: 317064
ccaucugcugcugauauau

SEQ ID NO: 461664 - RNA, 19 nt, Artificial Sequence
  Description of Artificial Sequence: Synthetic oligonucleotide
  Antisense Strand to SEQ ID NO: 461663
auauaucagcagcagaugg

SEQ ID NO: 461665 - RNA, 19 nt, Artificial Sequence
  Description of Artificial Sequence: Synthetic oligonucleotide
  Sense strand starting at position 671 of SEQ ID NO: 317064
gcugauauauuuguucugu

SEQ ID NO: 461666 - RNA, 19 nt, Artificial Sequence
  Description of Artificial Sequence: Synthetic oligonucleotide
  Antisense Strand to SEQ ID NO: 461665
acagaacaaauauaucagc

SEQ ID NO: 461667 - RNA, 19 nt, Artificial Sequence
  Description of Artificial Sequence: Synthetic oligonucleotide
  Sense strand starting at position 676 of SEQ ID NO: 317064
uauauuuguucuguacagu

SEQ ID NO: 461668 - RNA, 19 nt, Artificial Sequence
  Description of Artificial Sequence: Synthetic oligonucleotide
  Antisense Strand to SEQ ID NO: 461667
acuguacagaacaaauaua

SEQ ID NO: 461669 - RNA, 19 nt, Artificial Sequence
  Description of Artificial Sequence: Synthetic oligonucleotide
  Sense strand starting at position 736 of SEQ ID NO: 317064
cuacuagguagguaagagu

SEQ ID NO: 461670 - RNA, 19 nt, Artificial Sequence
  Description of Artificial Sequence: Synthetic oligonucleotide
  Antisense Strand to SEQ ID NO: 461669
acucuuaccuaccuaguag

SEQ ID NO: 461671 - RNA, 19 nt, Artificial Sequence
  Description of Artificial Sequence: Synthetic oligonucleotide
  Sense strand starting at position 763 of SEQ ID NO: 317064
cuugucaucagucaguuga

SEQ ID NO: 461672 - RNA, 19 nt, Artificial Sequence
  Description of Artificial Sequence: Synthetic oligonucleotide
  Antisense Strand to SEQ ID NO: 461671
ucaacugacugaugacaag

SEQ ID NO: 461673 - RNA, 19 nt, Artificial Sequence
  Description of Artificial Sequence: Synthetic oligonucleotide
  Sense strand starting at position 765 of SEQ ID NO: 317064
ugucaucagucaguugaau

SEQ ID NO: 461674 - RNA, 19 nt, Artificial Sequence
  Description of Artificial Sequence: Synthetic oligonucleotide
  Antisense Strand to SEQ ID NO: 461673
auucaacugacugaugaca

SEQ ID NO: 461675 - RNA, 19 nt, Artificial Sequence
  Description of Artificial Sequence: Synthetic oligonucleotide
  Sense strand starting at position 771 of SEQ ID NO: 317064
cagucaguugaauaaguaa

SEQ ID NO: 461676 - RNA, 19 nt, Artificial Sequence
  Description of Artificial Sequence: Synthetic oligonucleotide
  Antisense Strand to SEQ ID NO: 461675
uuacuuauucaacugacug

SEQ ID NO: 461677 - RNA, 19 nt, Artificial Sequence
  Description of Artificial Sequence: Synthetic oligonucleotide
  Sense strand starting at position 933 of SEQ ID NO: 317064
agcugaauucuguaucauu

SEQ ID NO: 461678 - RNA, 19 nt, Artificial Sequence
  Description of Artificial Sequence: Synthetic oligonucleotide
  Antisense Strand to SEQ ID NO: 461677
aaugauacagaauucagcu

SEQ ID NO: 461679 - RNA, 19 nt, Artificial Sequence
  Description of Artificial Sequence: Synthetic oligonucleotide
  Sense strand starting at position 1173 of SEQ ID NO: 317064
cuaccagaugcugagagua

SEQ ID NO: 461680 - RNA, 19 nt, Artificial Sequence
  Description of Artificial Sequence: Synthetic oligonucleotide
  Antisense Strand to SEQ ID NO: 461679
uacucucagcaucugguag

SEQ ID NO: 461681 - RNA, 19 nt, Artificial Sequence
  Description of Artificial Sequence: Synthetic oligonucleotide
  Sense strand starting at position 1188 of SEQ ID NO: 317064
aguauaaaguguucucaau

SEQ ID NO: 461682 - RNA, 19 nt, Artificial Sequence
  Description of Artificial Sequence: Synthetic oligonucleotide
  Antisense Strand to SEQ ID NO: 461681
auugagaacacuuuauacu

SEQ ID NO: 461683 - RNA, 19 nt, Artificial Sequence
  Description of Artificial Sequence: Synthetic oligonucleotide
  Sense strand starting at position 1324 of SEQ ID NO: 317064
cgggaacauuaugacauuu

SEQ ID NO: 461684 - RNA, 19 nt, Artificial Sequence
  Description of Artificial Sequence: Synthetic oligonucleotide
  Antisense Strand to SEQ ID NO: 461683
aaaugucauaauguucccg

SEQ ID NO: 461685 - RNA, 19 nt, Artificial Sequence
  Description of Artificial Sequence: Synthetic oligonucleotide
  Sense strand starting at position 1515 of SEQ ID NO: 317064
cgcagugugcgugucaaca

SEQ ID NO: 461686 - RNA, 19 nt, Artificial Sequence
  Description of Artificial Sequence: Synthetic oligonucleotide
  Antisense Strand to SEQ ID NO: 461685
uguugacacgcacacugcg

SEQ ID NO: 461687 - RNA, 19 nt, Artificial Sequence
  Description of Artificial Sequence: Synthetic oligonucleotide
  Sense strand starting at position 2279 of SEQ ID NO: 317064
uagcuuuccuuguuaggaa

SEQ ID NO: 461688 - RNA, 19 nt, Artificial Sequence
  Description of Artificial Sequence: Synthetic oligonucleotide
  Antisense Strand to SEQ ID NO: 461687
uuccuaacaaggaaagcua

SEQ ID NO: 461689 - RNA, 19 nt, Artificial Sequence
  Description of Artificial Sequence: Synthetic oligonucleotide
  Sense strand starting at position 2338 of SEQ ID NO: 317064
ugaugugcuugagugagga

SEQ ID NO: 461690 - RNA, 19 nt, Artificial Sequence
  Description of Artificial Sequence: Synthetic oligonucleotide
  Antisense Strand to SEQ ID NO: 461689
uccucacucaagcacauca

SEQ ID NO: 461691 - RNA, 19 nt, Artificial Sequence
  Description of Artificial Sequence: Synthetic oligonucleotide
  Sense strand starting at position 2351 of SEQ ID NO: 317064
ugaggaggugaucaguagu

SEQ ID NO: 461692 - RNA, 19 nt, Artificial Sequence
  Description of Artificial Sequence: Synthetic oligonucleotide
  Antisense Strand to SEQ ID NO: 461691
acuacugaucaccuccuca

SEQ ID NO: 461693 - RNA, 19 nt, Artificial Sequence
  Description of Artificial Sequence: Synthetic oligonucleotide
  Sense strand starting at position 2354 of SEQ ID NO: 317064
ggaggugaucaguagucac

SEQ ID NO: 461694 - RNA, 19 nt, Artificial Sequence
  Description of Artificial Sequence: Synthetic oligonucleotide
  Antisense Strand to SEQ ID NO: 461693
gugacuacugaucaccucc

SEQ ID NO: 461695 - RNA, 19 nt, Artificial Sequence
  Description of Artificial Sequence: Synthetic oligonucleotide
  Sense strand starting at position 2357 of SEQ ID NO: 317064
ggugaucaguagucacaaa

SEQ ID NO: 461696 - RNA, 19 nt, Artificial Sequence
  Description of Artificial Sequence: Synthetic oligonucleotide
  Antisense Strand to SEQ ID NO: 461695
uuugugacuacugaucacc

SEQ ID NO: 461697 - RNA, 19 nt, Artificial Sequence
  Description of Artificial Sequence: Synthetic oligonucleotide
  Sense strand starting at position 2358 of SEQ ID NO: 317064
gugaucaguagucacaaau

SEQ ID NO: 461698 - RNA, 19 nt, Artificial Sequence
  Description of Artificial Sequence: Synthetic oligonucleotide
  Antisense Strand to SEQ ID NO: 461697
auuugugacuacugaucac

SEQ ID NO: 461699 - RNA, 19 nt, Artificial Sequence
  Description of Artificial Sequence: Synthetic oligonucleotide
  Sense strand starting at position 2545 of SEQ ID NO: 317064
ccgcgauuuauaugauauc

SEQ ID NO: 461700 - RNA, 19 nt, Artificial Sequence
  Description of Artificial Sequence: Synthetic oligonucleotide
  Antisense Strand to SEQ ID NO: 461699
gauaucauauaaaucgcgg

SEQ ID NO: 461701 - RNA, 19 nt, Artificial Sequence
  Description of Artificial Sequence: Synthetic oligonucleotide
  Sense strand starting at position 2548 of SEQ ID NO: 317064
cgauuuauaugauauccaa

SEQ ID NO: 461702 - RNA, 19 nt, Artificial Sequence
  Description of Artificial Sequence: Synthetic oligonucleotide
  Antisense Strand to SEQ ID NO: 461701
uuggauaucauauaaaucg

SEQ ID NO: 461703 - RNA, 19 nt, Artificial Sequence
  Description of Artificial Sequence: Synthetic oligonucleotide
  Sense strand starting at position 2710 of SEQ ID NO: 317064
ugcgauacaguguauaauu

SEQ ID NO: 461704 - RNA, 19 nt, Artificial Sequence
  Description of Artificial Sequence: Synthetic oligonucleotide
  Antisense Strand to SEQ ID NO: 461703
aauuauacacuguaucgca

SEQ ID NO: 461705 - RNA, 19 nt, Artificial Sequence
  Description of Artificial Sequence: Synthetic oligonucleotide
  Sense strand starting at position 2928 of SEQ ID NO: 317064
caggauucugaugguuaaa

SEQ ID NO: 461706 - RNA, 19 nt, Artificial Sequence
  Description of Artificial Sequence: Synthetic oligonucleotide
  Antisense Strand to SEQ ID NO: 461705
uuuaaccaucagaauccug

SEQ ID NO: 461707 - RNA, 19 nt, Artificial Sequence
  Description of Artificial Sequence: Synthetic oligonucleotide
  Sense strand starting at position 2930 of SEQ ID NO: 317064
ggauucugaugguuaaaua

SEQ ID NO: 461708 - RNA, 19 nt, Artificial Sequence
  Description of Artificial Sequence: Synthetic oligonucleotide
  Antisense Strand to SEQ ID NO: 461707
uauuuaaccaucagaaucc

SEQ ID NO: 461709 - RNA, 19 nt, Artificial Sequence
  Description of Artificial Sequence: Synthetic oligonucleotide
  Sense strand starting at position 2973 of SEQ ID NO: 317064
acagucucugccugaaaug

SEQ ID NO: 461710 - RNA, 19 nt, Artificial Sequence
  Description of Artificial Sequence: Synthetic oligonucleotide
  Antisense Strand to SEQ ID NO: 461709
cauuucaggcagagacugu

SEQ ID NO: 461711 - RNA, 19 nt, Artificial Sequence
  Description of Artificial Sequence: Synthetic oligonucleotide
  Sense strand starting at position 2974 of SEQ ID NO: 317064
cagucucugccugaaaugu

SEQ ID NO: 461712 - RNA, 19 nt, Artificial Sequence
  Description of Artificial Sequence: Synthetic oligonucleotide
  Antisense Strand to SEQ ID NO: 461711
acauuucaggcagagacug

SEQ ID NO: 461713 - RNA, 19 nt, Artificial Sequence
  Description of Artificial Sequence: Synthetic oligonucleotide
  Sense strand starting at position 2984 of SEQ ID NO: 317064
cugaaauguuaguucccuu

SEQ ID NO: 461714 - RNA, 19 nt, Artificial Sequence
  Description of Artificial Sequence: Synthetic oligonucleotide
  Antisense Strand to SEQ ID NO: 461713
aagggaacuaacauuucag

SEQ ID NO: 461715 - RNA, 19 nt, Artificial Sequence
  Description of Artificial Sequence: Synthetic oligonucleotide
  Sense strand starting at position 2991 of SEQ ID NO: 317064
guuaguucccuugugccau

SEQ ID NO: 461716 - RNA, 19 nt, Artificial Sequence
  Description of Artificial Sequence: Synthetic oligonucleotide
  Antisense Strand to SEQ ID NO: 461715
auggcacaagggaacuaac

SEQ ID NO: 461717 - RNA, 19 nt, Artificial Sequence
  Description of Artificial Sequence: Synthetic oligonucleotide
  Sense strand starting at position 3091 of SEQ ID NO: 317064
augggaaggucugugacau

SEQ ID NO: 461718 - RNA, 19 nt, Artificial Sequence
  Description of Artificial Sequence: Synthetic oligonucleotide
  Antisense Strand to SEQ ID NO: 461717
augucacagaccuucccau

SEQ ID NO: 461719 - RNA, 19 nt, Artificial Sequence
  Description of Artificial Sequence: Synthetic oligonucleotide
  Sense strand starting at position 3092 of SEQ ID NO: 317064
ugggaaggucugugacaug

SEQ ID NO: 461720 - RNA, 19 nt, Artificial Sequence
  Description of Artificial Sequence: Synthetic oligonucleotide
  Antisense Strand to SEQ ID NO: 461719
caugucacagaccuuccca

SEQ ID NO: 461721 - RNA, 19 nt, Artificial Sequence
  Description of Artificial Sequence: Synthetic oligonucleotide
  Sense strand starting at position 3101 of SEQ ID NO: 317064
cugugacauguguaaguaa

SEQ ID NO: 461722 - RNA, 19 nt, Artificial Sequence
  Description of Artificial Sequence: Synthetic oligonucleotide
  Antisense Strand to SEQ ID NO: 461721
uuacuuacacaugucacag

SEQ ID NO: 461723 - RNA, 19 nt, Artificial Sequence
  Description of Artificial Sequence: Synthetic oligonucleotide
  Sense strand starting at position 3104 of SEQ ID NO: 317064
ugacauguguaaguaaugu

SEQ ID NO: 461724 - RNA, 19 nt, Artificial Sequence
  Description of Artificial Sequence: Synthetic oligonucleotide
  Antisense Strand to SEQ ID NO: 461723
acauuacuuacacauguca

SEQ ID NO: 461725 - RNA, 19 nt, Artificial Sequence
  Description of Artificial Sequence: Synthetic oligonucleotide
  Sense strand starting at position 3110 of SEQ ID NO: 317064
guguaaguaaugugauaaa

SEQ ID NO: 461726 - RNA, 19 nt, Artificial Sequence
  Description of Artificial Sequence: Synthetic oligonucleotide
  Antisense Strand to SEQ ID NO: 461725
uuuaucacauuacuuacac

SEQ ID NO: 461727 - RNA, 19 nt, Artificial Sequence
  Description of Artificial Sequence: Synthetic oligonucleotide
  Sense strand starting at position 3119 of SEQ ID NO: 317064
augugauaaaguugaauga

SEQ ID NO: 461728 - RNA, 19 nt, Artificial Sequence
  Description of Artificial Sequence: Synthetic oligonucleotide
  Antisense Strand to SEQ ID NO: 461727
ucauucaacuuuaucacau

SEQ ID NO: 461729 - RNA, 19 nt, Artificial Sequence
  Description of Artificial Sequence: Synthetic oligonucleotide
  Sense strand starting at position 3972 of SEQ ID NO: 317064
aaguauaugguuuaaccga

SEQ ID NO: 461730 - RNA, 19 nt, Artificial Sequence
  Description of Artificial Sequence: Synthetic oligonucleotide
  Antisense Strand to SEQ ID NO: 461729
ucgguuaaaccauauacuu

SEQ ID NO: 461731 - RNA, 19 nt, Artificial Sequence
  Description of Artificial Sequence: Synthetic oligonucleotide
  Sense strand starting at position 3981 of SEQ ID NO: 317064
guuuaaccgaaacagugau

SEQ ID NO: 461732 - RNA, 19 nt, Artificial Sequence
  Description of Artificial Sequence: Synthetic oligonucleotide
  Antisense Strand to SEQ ID NO: 461731
aucacuguuucgguuaaac

SEQ ID NO: 461733 - RNA, 19 nt, Artificial Sequence
  Description of Artificial Sequence: Synthetic oligonucleotide
  Sense strand starting at position 27 of SEQ ID NO: 317065
acaauagcccucugugauu

SEQ ID NO: 461734 - RNA, 19 nt, Artificial Sequence
  Description of Artificial Sequence: Synthetic oligonucleotide
  Antisense Strand to SEQ ID NO: 461733
aaucacagagggcuauugu

SEQ ID NO: 461735 - RNA, 19 nt, Artificial Sequence
  Description of Artificial Sequence: Synthetic oligonucleotide
  Sense strand starting at position 101 of SEQ ID NO: 317065
uucuuagucuuacuacuga

SEQ ID NO: 461736 - RNA, 19 nt, Artificial Sequence
  Description of Artificial Sequence: Synthetic oligonucleotide
  Antisense Strand to SEQ ID NO: 461735
ucaguaguaagacuaagaa

SEQ ID NO: 461737 - RNA, 19 nt, Artificial Sequence
  Description of Artificial Sequence: Synthetic oligonucleotide
  Sense strand starting at position 127 of SEQ ID NO: 317065
gcuauaaggcaugggucaa

SEQ ID NO: 461738 - RNA, 19 nt, Artificial Sequence
  Description of Artificial Sequence: Synthetic oligonucleotide
  Antisense Strand to SEQ ID NO: 461737
uugacccaugccuuauagc

SEQ ID NO: 461739 - RNA, 19 nt, Artificial Sequence
  Description of Artificial Sequence: Synthetic oligonucleotide
  Sense strand starting at position 128 of SEQ ID NO: 317065
cuauaaggcaugggucaaa

SEQ ID NO: 461740 - RNA, 19 nt, Artificial Sequence
  Description of Artificial Sequence: Synthetic oligonucleotide
  Antisense Strand to SEQ ID NO: 461739
uuugacccaugccuuauag

SEQ ID NO: 461741 - RNA, 19 nt, Artificial Sequence
  Description of Artificial Sequence: Synthetic oligonucleotide
  Sense strand starting at position 428 of SEQ ID NO: 317065
acauauacucuuuguagac

SEQ ID NO: 461742 - RNA, 19 nt, Artificial Sequence
  Description of Artificial Sequence: Synthetic oligonucleotide
  Antisense Strand to SEQ ID NO: 461741
gucuacaaagaguauaugu

SEQ ID NO: 461743 - RNA, 19 nt, Artificial Sequence
  Description of Artificial Sequence: Synthetic oligonucleotide
  Sense strand starting at position 470 of SEQ ID NO: 317065
acauauacucucuguagac

SEQ ID NO: 461744 - RNA, 19 nt, Artificial Sequence
  Description of Artificial Sequence: Synthetic oligonucleotide
  Antisense Strand to SEQ ID NO: 461743
gucuacagagaguauaugu

SEQ ID NO: 461745 - RNA, 19 nt, Artificial Sequence
  Description of Artificial Sequence: Synthetic oligonucleotide
  Sense strand starting at position 531 of SEQ ID NO: 317065
augggcauuccucaauacu

SEQ ID NO: 461746 - RNA, 19 nt, Artificial Sequence
  Description of Artificial Sequence: Synthetic oligonucleotide
  Antisense Strand to SEQ ID NO: 461745
aguauugaggaaugcccau

SEQ ID NO: 461747 - RNA, 19 nt, Artificial Sequence
  Description of Artificial Sequence: Synthetic oligonucleotide
  Sense strand starting at position 701 of SEQ ID NO: 317065
gagacagacuccuuacgga

SEQ ID NO: 461748 - RNA, 19 nt, Artificial Sequence
  Description of Artificial Sequence: Synthetic oligonucleotide
  Antisense Strand to SEQ ID NO: 461747
uccguaaggagucugucuc

SEQ ID NO: 461749 - RNA, 19 nt, Artificial Sequence
  Description of Artificial Sequence: Synthetic oligonucleotide
  Sense strand starting at position 819 of SEQ ID NO: 317065
ggcuaaucacuccagcauu

SEQ ID NO: 461750 - RNA, 19 nt, Artificial Sequence
  Description of Artificial Sequence: Synthetic oligonucleotide
  Antisense Strand to SEQ ID NO: 461749
aaugcuggagugauuagcc

SEQ ID NO: 461751 - RNA, 19 nt, Artificial Sequence
  Description of Artificial Sequence: Synthetic oligonucleotide
  Sense strand starting at position 829 of SEQ ID NO: 317065
uccagcauuuagugauuua

SEQ ID NO: 461752 - RNA, 19 nt, Artificial Sequence
  Description of Artificial Sequence: Synthetic oligonucleotide
  Antisense Strand to SEQ ID NO: 461751
uaaaucacuaaaugcugga

SEQ ID NO: 461753 - RNA, 19 nt, Artificial Sequence
  Description of Artificial Sequence: Synthetic oligonucleotide
  Sense strand starting at position 927 of SEQ ID NO: 317065
ccuucuuaacaaugaaggu

SEQ ID NO: 461754 - RNA, 19 nt, Artificial Sequence
  Description of Artificial Sequence: Synthetic oligonucleotide
  Antisense Strand to SEQ ID NO: 461753
accuucauuguuaagaagg

SEQ ID NO: 461755 - RNA, 19 nt, Artificial Sequence
  Description of Artificial Sequence: Synthetic oligonucleotide
  Sense strand starting at position 1065 of SEQ ID NO: 317065
gggugaguauagagaagaa

SEQ ID NO: 461756 - RNA, 19 nt, Artificial Sequence
  Description of Artificial Sequence: Synthetic oligonucleotide
  Antisense Strand to SEQ ID NO: 461755
uucuucucuauacucaccc

SEQ ID NO: 461757 - RNA, 19 nt, Artificial Sequence
  Description of Artificial Sequence: Synthetic oligonucleotide
  Sense strand starting at position 1121 of SEQ ID NO: 317065
guaucucaauuguuauaug

SEQ ID NO: 461758 - RNA, 19 nt, Artificial Sequence
  Description of Artificial Sequence: Synthetic oligonucleotide
  Antisense Strand to SEQ ID NO: 461757
cauauaacaauugagauac

SEQ ID NO: 461759 - RNA, 19 nt, Artificial Sequence
  Description of Artificial Sequence: Synthetic oligonucleotide
  Sense strand starting at position 1154 of SEQ ID NO: 317065
caaagagguuaguuacucu

SEQ ID NO: 461760 - RNA, 19 nt, Artificial Sequence
  Description of Artificial Sequence: Synthetic oligonucleotide
  Antisense Strand to SEQ ID NO: 461759
agaguaacuaaccucuuug

SEQ ID NO: 461761 - RNA, 19 nt, Artificial Sequence
  Description of Artificial Sequence: Synthetic oligonucleotide
  Sense strand starting at position 1157 of SEQ ID NO: 317065
agagguuaguuacucuaag

SEQ ID NO: 461762 - RNA, 19 nt, Artificial Sequence
  Description of Artificial Sequence: Synthetic oligonucleotide
  Antisense Strand to SEQ ID NO: 461761
cuuagaguaacuaaccucu

SEQ ID NO: 461763 - RNA, 19 nt, Artificial Sequence
  Description of Artificial Sequence: Synthetic oligonucleotide
  Sense strand starting at position 1447 of SEQ ID NO: 317065
agcagccuuagguauaaga

SEQ ID NO: 461764 - RNA, 19 nt, Artificial Sequence
  Description of Artificial Sequence: Synthetic oligonucleotide
  Antisense Strand to SEQ ID NO: 461763
ucuuauaccuaaggcugcu

SEQ ID NO: 461765 - RNA, 19 nt, Artificial Sequence
  Description of Artificial Sequence: Synthetic oligonucleotide
  Sense strand starting at position 1503 of SEQ ID NO: 317065
ugaugucaugacgaggcua

SEQ ID NO: 461766 - RNA, 19 nt, Artificial Sequence
  Description of Artificial Sequence: Synthetic oligonucleotide
  Antisense Strand to SEQ ID NO: 461765
uagccucgucaugacauca

SEQ ID NO: 461767 - RNA, 19 nt, Artificial Sequence
  Description of Artificial Sequence: Synthetic oligonucleotide
  Sense strand starting at position 1698 of SEQ ID NO: 317065
ccagaagguccugggcaau

SEQ ID NO: 461768 - RNA, 19 nt, Artificial Sequence
  Description of Artificial Sequence: Synthetic oligonucleotide
  Antisense Strand to SEQ ID NO: 461767
auugcccaggaccuucugg

SEQ ID NO: 461769 - RNA, 19 nt, Artificial Sequence
  Description of Artificial Sequence: Synthetic oligonucleotide
  Sense strand starting at position 1880 of SEQ ID NO: 317065
gggauuguauuucgaaaga

SEQ ID NO: 461770 - RNA, 19 nt, Artificial Sequence
  Description of Artificial Sequence: Synthetic oligonucleotide
  Antisense Strand to SEQ ID NO: 461769
ucuuucgaaauacaauccc

SEQ ID NO: 461771 - RNA, 19 nt, Artificial Sequence
  Description of Artificial Sequence: Synthetic oligonucleotide
  Sense strand starting at position 1890 of SEQ ID NO: 317065
uucgaaagauccgccauuu

SEQ ID NO: 461772 - RNA, 19 nt, Artificial Sequence
  Description of Artificial Sequence: Synthetic oligonucleotide
  Antisense Strand to SEQ ID NO: 461771
aaauggcggaucuuucgaa

SEQ ID NO: 461773 - RNA, 19 nt, Artificial Sequence
  Description of Artificial Sequence: Synthetic oligonucleotide
  Sense strand starting at position 2358 of SEQ ID NO: 317065
gugaaagaccuuuaauguc

SEQ ID NO: 461774 - RNA, 19 nt, Artificial Sequence
  Description of Artificial Sequence: Synthetic oligonucleotide
  Antisense Strand to SEQ ID NO: 461773
gacauuaaaggucuuucac

SEQ ID NO: 461775 - RNA, 19 nt, Artificial Sequence
  Description of Artificial Sequence: Synthetic oligonucleotide
  Sense strand starting at position 2491 of SEQ ID NO: 317065
ugcagaugaaguggucaaa

SEQ ID NO: 461776 - RNA, 19 nt, Artificial Sequence
  Description of Artificial Sequence: Synthetic oligonucleotide
  Antisense Strand to SEQ ID NO: 461775
uuugaccacuucaucugca

SEQ ID NO: 461777 - RNA, 19 nt, Artificial Sequence
  Description of Artificial Sequence: Synthetic oligonucleotide
  Sense strand starting at position 2608 of SEQ ID NO: 317065
aucgguuuaagacgucaaa

SEQ ID NO: 461778 - RNA, 19 nt, Artificial Sequence
  Description of Artificial Sequence: Synthetic oligonucleotide
  Antisense Strand to SEQ ID NO: 461777
uuugacgucuuaaaccgau

SEQ ID NO: 461779 - RNA, 19 nt, Artificial Sequence
  Description of Artificial Sequence: Synthetic oligonucleotide
  Sense strand starting at position 2629 of SEQ ID NO: 317065
gcaacuagauuugaaauga

SEQ ID NO: 461780 - RNA, 19 nt, Artificial Sequence
  Description of Artificial Sequence: Synthetic oligonucleotide
  Antisense Strand to SEQ ID NO: 461779
ucauuucaaaucuaguugc

SEQ ID NO: 461781 - RNA, 19 nt, Artificial Sequence
  Description of Artificial Sequence: Synthetic oligonucleotide
  Sense strand starting at position 2741 of SEQ ID NO: 317065
ggaucuaagucaucaaauu

SEQ ID NO: 461782 - RNA, 19 nt, Artificial Sequence
  Description of Artificial Sequence: Synthetic oligonucleotide
  Antisense Strand to SEQ ID NO: 461781
aauuugaugacuuagaucc

SEQ ID NO: 461783 - RNA, 19 nt, Artificial Sequence
  Description of Artificial Sequence: Synthetic oligonucleotide
  Sense strand starting at position 2769 of SEQ ID NO: 317065
ccaucugcugcugauauau

SEQ ID NO: 461784 - RNA, 19 nt, Artificial Sequence
  Description of Artificial Sequence: Synthetic oligonucleotide
  Antisense Strand to SEQ ID NO: 461783
auauaucagcagcagaugg

SEQ ID NO: 461785 - RNA, 19 nt, Artificial Sequence
  Description of Artificial Sequence: Synthetic oligonucleotide
  Sense strand starting at position 2778 of SEQ ID NO: 317065
gcugauauauuuguucugu

SEQ ID NO: 461786 - RNA, 19 nt, Artificial Sequence
  Description of Artificial Sequence: Synthetic oligonucleotide
  Antisense Strand to SEQ ID NO: 461785
acagaacaaauauaucagc

SEQ ID NO: 461787 - RNA, 19 nt, Artificial Sequence
  Description of Artificial Sequence: Synthetic oligonucleotide
  Sense strand starting at position 2783 of SEQ ID NO: 317065
uauauuuguucuguacagu

SEQ ID NO: 461788 - RNA, 19 nt, Artificial Sequence
  Description of Artificial Sequence: Synthetic oligonucleotide
  Antisense Strand to SEQ ID NO: 461787
acuguacagaacaaauaua

SEQ ID NO: 461789 - RNA, 19 nt, Artificial Sequence
  Description of Artificial Sequence: Synthetic oligonucleotide
  Sense strand starting at position 2843 of SEQ ID NO: 317065
cuacuagguagguaagagu

SEQ ID NO: 461790 - RNA, 19 nt, Artificial Sequence
  Description of Artificial Sequence: Synthetic oligonucleotide
  Antisense Strand to SEQ ID NO: 461789
acucuuaccuaccuaguag

SEQ ID NO: 461791 - RNA, 19 nt, Artificial Sequence
  Description of Artificial Sequence: Synthetic oligonucleotide
  Sense strand starting at position 2870 of SEQ ID NO: 317065
cuugucaucagucaguuga

SEQ ID NO: 461792 - RNA, 19 nt, Artificial Sequence
  Description of Artificial Sequence: Synthetic oligonucleotide
  Antisense Strand to SEQ ID NO: 461791
ucaacugacugaugacaag

SEQ ID NO: 461793 - RNA, 19 nt, Artificial Sequence
  Description of Artificial Sequence: Synthetic oligonucleotide
  Sense strand starting at position 2872 of SEQ ID NO: 317065
ugucaucagucaguugaau

SEQ ID NO: 461794 - RNA, 19 nt, Artificial Sequence
  Description of Artificial Sequence: Synthetic oligonucleotide
  Antisense Strand to SEQ ID NO: 461793
auucaacugacugaugaca

SEQ ID NO: 461795 - RNA, 19 nt, Artificial Sequence
  Description of Artificial Sequence: Synthetic oligonucleotide
  Sense strand starting at position 2878 of SEQ ID NO: 317065
cagucaguugaauaaguaa

SEQ ID NO: 461796 - RNA, 19 nt, Artificial Sequence
  Description of Artificial Sequence: Synthetic oligonucleotide
  Antisense Strand to SEQ ID NO: 461795
uuacuuauucaacugacug

SEQ ID NO: 461797 - RNA, 19 nt, Artificial Sequence
  Description of Artificial Sequence: Synthetic oligonucleotide
  Sense strand starting at position 3040 of SEQ ID NO: 317065
agcugaauucuguaucauu

SEQ ID NO: 461798 - RNA, 19 nt, Artificial Sequence
  Description of Artificial Sequence: Synthetic oligonucleotide
  Antisense Strand to SEQ ID NO: 461797
aaugauacagaauucagcu

SEQ ID NO: 461799 - RNA, 19 nt, Artificial Sequence
  Description of Artificial Sequence: Synthetic oligonucleotide
  Sense strand starting at position 3110 of SEQ ID NO: 317065
ccacucuacugucuaaguu

SEQ ID NO: 461800 - RNA, 19 nt, Artificial Sequence
  Description of Artificial Sequence: Synthetic oligonucleotide
  Antisense Strand to SEQ ID NO: 461799
aacuuagacaguagagugg

SEQ ID NO: 461801 - RNA, 19 nt, Artificial Sequence
  Description of Artificial Sequence: Synthetic oligonucleotide
  Sense strand starting at position 3280 of SEQ ID NO: 317065
cuaccagaugcugagagua

SEQ ID NO: 461802 - RNA, 19 nt, Artificial Sequence
  Description of Artificial Sequence: Synthetic oligonucleotide
  Antisense Strand to SEQ ID NO: 461801
uacucucagcaucugguag

SEQ ID NO: 461803 - RNA, 19 nt, Artificial Sequence
  Description of Artificial Sequence: Synthetic oligonucleotide
  Sense strand starting at position 3295 of SEQ ID NO: 317065
aguauaaaguguucucaau

SEQ ID NO: 461804 - RNA, 19 nt, Artificial Sequence
  Description of Artificial Sequence: Synthetic oligonucleotide
  Antisense Strand to SEQ ID NO: 461803
auugagaacacuuuauacu

SEQ ID NO: 461805 - RNA, 19 nt, Artificial Sequence
  Description of Artificial Sequence: Synthetic oligonucleotide
  Sense strand starting at position 3422 of SEQ ID NO: 317065
cgugcaccucgggaacauu

SEQ ID NO: 461806 - RNA, 19 nt, Artificial Sequence
  Description of Artificial Sequence: Synthetic oligonucleotide
  Antisense Strand to SEQ ID NO: 461805
aauguucccgaggugcacg

SEQ ID NO: 461807 - RNA, 19 nt, Artificial Sequence
  Description of Artificial Sequence: Synthetic oligonucleotide
  Sense strand starting at position 3431 of SEQ ID NO: 317065
cgggaacauuaugacauuu

SEQ ID NO: 461808 - RNA, 19 nt, Artificial Sequence
  Description of Artificial Sequence: Synthetic oligonucleotide
  Antisense Strand to SEQ ID NO: 461807
aaaugucauaauguucccg

SEQ ID NO: 461809 - RNA, 19 nt, Artificial Sequence
  Description of Artificial Sequence: Synthetic oligonucleotide
  Sense strand starting at position 3454 of SEQ ID NO: 317065
ggugggcuucgcgaggaaa

SEQ ID NO: 461810 - RNA, 19 nt, Artificial Sequence
  Description of Artificial Sequence: Synthetic oligonucleotide
  Antisense Strand to SEQ ID NO: 461809
uuuccucgcgaagcccacc

SEQ ID NO: 461811 - RNA, 19 nt, Artificial Sequence
  Description of Artificial Sequence: Synthetic oligonucleotide
  Sense strand starting at position 3622 of SEQ ID NO: 317065
cgcagugugcgugucaaca

SEQ ID NO: 461812 - RNA, 19 nt, Artificial Sequence
  Description of Artificial Sequence: Synthetic oligonucleotide
  Antisense Strand to SEQ ID NO: 461811
uguugacacgcacacugcg

SEQ ID NO: 461813 - RNA, 19 nt, Artificial Sequence
  Description of Artificial Sequence: Synthetic oligonucleotide
  Sense strand starting at position 36 of SEQ ID NO: 317066
ccaucuuaccgaugaagaa

SEQ ID NO: 461814 - RNA, 19 nt, Artificial Sequence
  Description of Artificial Sequence: Synthetic oligonucleotide
  Antisense Strand to SEQ ID NO: 461813
uucuucaucgguaagaugg

SEQ ID NO: 461815 - RNA, 19 nt, Artificial Sequence
  Description of Artificial Sequence: Synthetic oligonucleotide
  Sense strand starting at position 135 of SEQ ID NO: 317066
gaaccaauggguggaguua

SEQ ID NO: 461816 - RNA, 19 nt, Artificial Sequence
  Description of Artificial Sequence: Synthetic oligonucleotide
  Antisense Strand to SEQ ID NO: 461815
uaacuccacccauugguuc

SEQ ID NO: 461817 - RNA, 19 nt, Artificial Sequence
  Description of Artificial Sequence: Synthetic oligonucleotide
  Sense strand starting at position 171 of SEQ ID NO: 317066
aggacuuguguguaaauua

SEQ ID NO: 461818 - RNA, 19 nt, Artificial Sequence
  Description of Artificial Sequence: Synthetic oligonucleotide
  Antisense Strand to SEQ ID NO: 461817
uaauuuacacacaaguccu

SEQ ID NO: 461819 - RNA, 19 nt, Artificial Sequence
  Description of Artificial Sequence: Synthetic oligonucleotide
  Sense strand starting at position 290 of SEQ ID NO: 317066
uuccuuuaguacucagaca

SEQ ID NO: 461820 - RNA, 19 nt, Artificial Sequence
  Description of Artificial Sequence: Synthetic oligonucleotide
  Antisense Strand to SEQ ID NO: 461819
ugucugaguacuaaaggaa

SEQ ID NO: 461821 - RNA, 19 nt, Artificial Sequence
  Description of Artificial Sequence: Synthetic oligonucleotide
  Sense strand starting at position 310 of SEQ ID NO: 317066
gcugacauacagugaugaa

SEQ ID NO: 461822 - RNA, 19 nt, Artificial Sequence
  Description of Artificial Sequence: Synthetic oligonucleotide
  Antisense Strand to SEQ ID NO: 461821
uucaucacuguaugucagc

SEQ ID NO: 461823 - RNA, 19 nt, Artificial Sequence
  Description of Artificial Sequence: Synthetic oligonucleotide
  Sense strand starting at position 389 of SEQ ID NO: 317066
gaggcaauguaaucuugag

SEQ ID NO: 461824 - RNA, 19 nt, Artificial Sequence
  Description of Artificial Sequence: Synthetic oligonucleotide
  Antisense Strand to SEQ ID NO: 461823
cucaagauuacauugccuc

SEQ ID NO: 461825 - RNA, 19 nt, Artificial Sequence
  Description of Artificial Sequence: Synthetic oligonucleotide
  Sense strand starting at position 435 of SEQ ID NO: 317066
agauccaagcuuugaauca

SEQ ID NO: 461826 - RNA, 19 nt, Artificial Sequence
  Description of Artificial Sequence: Synthetic oligonucleotide
  Antisense Strand to SEQ ID NO: 461825
ugauucaaagcuuggaucu

SEQ ID NO: 461827 - RNA, 19 nt, Artificial Sequence
  Description of Artificial Sequence: Synthetic oligonucleotide
  Sense strand starting at position 455 of SEQ ID NO: 317066
gugagaaccuuaguaagag

SEQ ID NO: 461828 - RNA, 19 nt, Artificial Sequence
  Description of Artificial Sequence: Synthetic oligonucleotide
  Antisense Strand to SEQ ID NO: 461827
cucuuacuaagguucucac

SEQ ID NO: 461829 - RNA, 19 nt, Artificial Sequence
  Description of Artificial Sequence: Synthetic oligonucleotide
  Sense strand starting at position 471 of SEQ ID NO: 317066
gagacaagugguggccaaa

SEQ ID NO: 461830 - RNA, 19 nt, Artificial Sequence
  Description of Artificial Sequence: Synthetic oligonucleotide
  Antisense Strand to SEQ ID NO: 461829
uuuggccaccacuugucuc

SEQ ID NO: 461831 - RNA, 19 nt, Artificial Sequence
  Description of Artificial Sequence: Synthetic oligonucleotide
  Sense strand starting at position 898 of SEQ ID NO: 317066
ggcuaaagaguuugacuau

SEQ ID NO: 461832 - RNA, 19 nt, Artificial Sequence
  Description of Artificial Sequence: Synthetic oligonucleotide
  Antisense Strand to SEQ ID NO: 461831
auagucaaacucuuuagcc

SEQ ID NO: 461833 - RNA, 19 nt, Artificial Sequence
  Description of Artificial Sequence: Synthetic oligonucleotide
  Sense strand starting at position 936 of SEQ ID NO: 317066
cugugugaucaggauuaag

SEQ ID NO: 461834 - RNA, 19 nt, Artificial Sequence
  Description of Artificial Sequence: Synthetic oligonucleotide
  Antisense Strand to SEQ ID NO: 461833
cuuaauccugaucacacag

SEQ ID NO: 461835 - RNA, 19 nt, Artificial Sequence
  Description of Artificial Sequence: Synthetic oligonucleotide
  Sense strand starting at position 1007 of SEQ ID NO: 317066
agaacaacuuccucgguau

SEQ ID NO: 461836 - RNA, 19 nt, Artificial Sequence
  Description of Artificial Sequence: Synthetic oligonucleotide
  Antisense Strand to SEQ ID NO: 461835
auaccgaggaaguuguucu

SEQ ID NO: 461837 - RNA, 19 nt, Artificial Sequence
  Description of Artificial Sequence: Synthetic oligonucleotide
  Sense strand starting at position 1008 of SEQ ID NO: 317066
gaacaacuuccucgguaua

SEQ ID NO: 461838 - RNA, 19 nt, Artificial Sequence
  Description of Artificial Sequence: Synthetic oligonucleotide
  Antisense Strand to SEQ ID NO: 461837
uauaccgaggaaguuguuc

SEQ ID NO: 461839 - RNA, 19 nt, Artificial Sequence
  Description of Artificial Sequence: Synthetic oligonucleotide
  Sense strand starting at position 1018 of SEQ ID NO: 317066
cucgguauauuugcuauua

SEQ ID NO: 461840 - RNA, 19 nt, Artificial Sequence
  Description of Artificial Sequence: Synthetic oligonucleotide
  Antisense Strand to SEQ ID NO: 461839
uaauagcaaauauaccgag

SEQ ID NO: 461841 - RNA, 19 nt, Artificial Sequence
  Description of Artificial Sequence: Synthetic oligonucleotide
  Sense strand starting at position 1019 of SEQ ID NO: 317066
ucgguauauuugcuauuaa

SEQ ID NO: 461842 - RNA, 19 nt, Artificial Sequence
  Description of Artificial Sequence: Synthetic oligonucleotide
  Antisense Strand to SEQ ID NO: 461841
uuaauagcaaauauaccga

SEQ ID NO: 461843 - RNA, 19 nt, Artificial Sequence
  Description of Artificial Sequence: Synthetic oligonucleotide
  Sense strand starting at position 1105 of SEQ ID NO: 317066
ugcagcaaugagggaauua

SEQ ID NO: 461844 - RNA, 19 nt, Artificial Sequence
  Description of Artificial Sequence: Synthetic oligonucleotide
  Antisense Strand to SEQ ID NO: 461843
uaauucccucauugcugca

SEQ ID NO: 461845 - RNA, 19 nt, Artificial Sequence
  Description of Artificial Sequence: Synthetic oligonucleotide
  Sense strand starting at position 1116 of SEQ ID NO: 317066
gggaauuaauucuuacugu

SEQ ID NO: 461846 - RNA, 19 nt, Artificial Sequence
  Description of Artificial Sequence: Synthetic oligonucleotide
  Antisense Strand to SEQ ID NO: 461845
acaguaagaauuaauuccc

SEQ ID NO: 461847 - RNA, 19 nt, Artificial Sequence
  Description of Artificial Sequence: Synthetic oligonucleotide
  Sense strand starting at position 1592 of SEQ ID NO: 317066
uuaaauaucuggccuggga

SEQ ID NO: 461848 - RNA, 19 nt, Artificial Sequence
  Description of Artificial Sequence: Synthetic oligonucleotide
  Antisense Strand to SEQ ID NO: 461847
ucccaggccagauauuuaa

SEQ ID NO: 461849 - RNA, 19 nt, Artificial Sequence
  Description of Artificial Sequence: Synthetic oligonucleotide
  Sense strand starting at position 1594 of SEQ ID NO: 317066
aaauaucuggccugggaga

SEQ ID NO: 461850 - RNA, 19 nt, Artificial Sequence
  Description of Artificial Sequence: Synthetic oligonucleotide
  Antisense Strand to SEQ ID NO: 461849
ucucccaggccagauauuu

SEQ ID NO: 461851 - RNA, 19 nt, Artificial Sequence
  Description of Artificial Sequence: Synthetic oligonucleotide
  Sense strand starting at position 1595 of SEQ ID NO: 317066
aauaucuggccugggagaa

SEQ ID NO: 461852 - RNA, 19 nt, Artificial Sequence
  Description of Artificial Sequence: Synthetic oligonucleotide
  Antisense Strand to SEQ ID NO: 461851
uucucccaggccagauauu

SEQ ID NO: 461853 - RNA, 19 nt, Artificial Sequence
  Description of Artificial Sequence: Synthetic oligonucleotide
  Sense strand starting at position 1621 of SEQ ID NO: 317066
gugcaacuagaaugucaaa

SEQ ID NO: 461854 - RNA, 19 nt, Artificial Sequence
  Description of Artificial Sequence: Synthetic oligonucleotide
  Antisense Strand to SEQ ID NO: 461853
uuugacauucuaguugcac

SEQ ID NO: 461855 - RNA, 19 nt, Artificial Sequence
  Description of Artificial Sequence: Synthetic oligonucleotide
  Sense strand starting at position 1695 of SEQ ID NO: 317066
gcgacaagccguucagcuu

SEQ ID NO: 461856 - RNA, 19 nt, Artificial Sequence
  Description of Artificial Sequence: Synthetic oligonucleotide
  Antisense Strand to SEQ ID NO: 461855
aagcugaacggcuugucgc

SEQ ID NO: 461857 - RNA, 19 nt, Artificial Sequence
  Description of Artificial Sequence: Synthetic oligonucleotide
  Sense strand starting at position 2326 of SEQ ID NO: 317066
cuuagaaauaucugaggug

SEQ ID NO: 461858 - RNA, 19 nt, Artificial Sequence
  Description of Artificial Sequence: Synthetic oligonucleotide
  Antisense Strand to SEQ ID NO: 461857
caccucagauauuucuaag

SEQ ID NO: 461859 - RNA, 19 nt, Artificial Sequence
  Description of Artificial Sequence: Synthetic oligonucleotide
  Sense strand starting at position 2641 of SEQ ID NO: 317066
uucagauuggaaugguagu

SEQ ID NO: 461860 - RNA, 19 nt, Artificial Sequence
  Description of Artificial Sequence: Synthetic oligonucleotide
  Antisense Strand to SEQ ID NO: 461859
acuaccauuccaaucugaa

SEQ ID NO: 461861 - RNA, 19 nt, Artificial Sequence
  Description of Artificial Sequence: Synthetic oligonucleotide
  Sense strand starting at position 2642 of SEQ ID NO: 317066
ucagauuggaaugguagua

SEQ ID NO: 461862 - RNA, 19 nt, Artificial Sequence
  Description of Artificial Sequence: Synthetic oligonucleotide
  Antisense Strand to SEQ ID NO: 461861
uacuaccauuccaaucuga

SEQ ID NO: 461863 - RNA, 19 nt, Artificial Sequence
  Description of Artificial Sequence: Synthetic oligonucleotide
  Sense strand starting at position 2682 of SEQ ID NO: 317066
ugcugauauagccaggaaa

SEQ ID NO: 461864 - RNA, 19 nt, Artificial Sequence
  Description of Artificial Sequence: Synthetic oligonucleotide
  Antisense Strand to SEQ ID NO: 461863
uuuccuggcuauaucagca

SEQ ID NO: 461865 - RNA, 19 nt, Artificial Sequence
  Description of Artificial Sequence: Synthetic oligonucleotide
  Sense strand starting at position 2704 of SEQ ID NO: 317066
acgucagaguuauuucugu

SEQ ID NO: 461866 - RNA, 19 nt, Artificial Sequence
  Description of Artificial Sequence: Synthetic oligonucleotide
  Antisense Strand to SEQ ID NO: 461865
acagaaauaacucugacgu

SEQ ID NO: 461867 - RNA, 19 nt, Artificial Sequence
  Description of Artificial Sequence: Synthetic oligonucleotide
  Sense strand starting at position 2822 of SEQ ID NO: 317066
ggagguaucccaggacugu

SEQ ID NO: 461868 - RNA, 19 nt, Artificial Sequence
  Description of Artificial Sequence: Synthetic oligonucleotide
  Antisense Strand to SEQ ID NO: 461867
acaguccugggauaccucc

SEQ ID NO: 461869 - RNA, 19 nt, Artificial Sequence
  Description of Artificial Sequence: Synthetic oligonucleotide
  Sense strand starting at position 2823 of SEQ ID NO: 317066
gagguaucccaggacuguu

SEQ ID NO: 461870 - RNA, 19 nt, Artificial Sequence
  Description of Artificial Sequence: Synthetic oligonucleotide
  Antisense Strand to SEQ ID NO: 461869
aacaguccugggauaccuc

SEQ ID NO: 461871 - RNA, 19 nt, Artificial Sequence
  Description of Artificial Sequence: Synthetic oligonucleotide
  Sense strand starting at position 2826 of SEQ ID NO: 317066
guaucccaggacuguuaaa

SEQ ID NO: 461872 - RNA, 19 nt, Artificial Sequence
  Description of Artificial Sequence: Synthetic oligonucleotide
  Antisense Strand to SEQ ID NO: 461871
uuuaacaguccugggauac

SEQ ID NO: 461873 - RNA, 19 nt, Artificial Sequence
  Description of Artificial Sequence: Synthetic oligonucleotide
  Sense strand starting at position 2891 of SEQ ID NO: 317066
cauugaaacgcugcguauu

SEQ ID NO: 461874 - RNA, 19 nt, Artificial Sequence
  Description of Artificial Sequence: Synthetic oligonucleotide
  Antisense Strand to SEQ ID NO: 461873
aauacgcagcguuucaaug

SEQ ID NO: 461875 - RNA, 19 nt, Artificial Sequence
  Description of Artificial Sequence: Synthetic oligonucleotide
  Sense strand starting at position 3364 of SEQ ID NO: 317066
cccagacaggucuaagcua

SEQ ID NO: 461876 - RNA, 19 nt, Artificial Sequence
  Description of Artificial Sequence: Synthetic oligonucleotide
  Antisense Strand to SEQ ID NO: 461875
uagcuuagaccugucuggg

SEQ ID NO: 461877 - RNA, 19 nt, Artificial Sequence
  Description of Artificial Sequence: Synthetic oligonucleotide
  Sense strand starting at position 3580 of SEQ ID NO: 317066
cuaguuugauaauugagaa

SEQ ID NO: 461878 - RNA, 19 nt, Artificial Sequence
  Description of Artificial Sequence: Synthetic oligonucleotide
  Antisense Strand to SEQ ID NO: 461877
uucucaauuaucaaacuag

SEQ ID NO: 461879 - RNA, 19 nt, Artificial Sequence
  Description of Artificial Sequence: Synthetic oligonucleotide
  Sense strand starting at position 3792 of SEQ ID NO: 317066
ggaaggguguaggugaaau

SEQ ID NO: 461880 - RNA, 19 nt, Artificial Sequence
  Description of Artificial Sequence: Synthetic oligonucleotide
  Antisense Strand to SEQ ID NO: 461879
auuucaccuacacccuucc

SEQ ID NO: 461881 - RNA, 19 nt, Artificial Sequence
  Description of Artificial Sequence: Synthetic oligonucleotide
  Sense strand starting at position 3804 of SEQ ID NO: 317066
gugaaaugaauucgcauaa

SEQ ID NO: 461882 - RNA, 19 nt, Artificial Sequence
  Description of Artificial Sequence: Synthetic oligonucleotide
  Antisense Strand to SEQ ID NO: 461881
uuaugcgaauucauuucac

SEQ ID NO: 461883 - RNA, 19 nt, Artificial Sequence
  Description of Artificial Sequence: Synthetic oligonucleotide
  Sense strand starting at position 3805 of SEQ ID NO: 317066
ugaaaugaauucgcauaaa

SEQ ID NO: 461884 - RNA, 19 nt, Artificial Sequence
  Description of Artificial Sequence: Synthetic oligonucleotide
  Antisense Strand to SEQ ID NO: 461883
uuuaugcgaauucauuuca

SEQ ID NO: 461885 - RNA, 19 nt, Artificial Sequence
  Description of Artificial Sequence: Synthetic oligonucleotide
  Sense strand starting at position 3838 of SEQ ID NO: 317066
ccuggagaucgugagguuu

SEQ ID NO: 461886 - RNA, 19 nt, Artificial Sequence
  Description of Artificial Sequence: Synthetic oligonucleotide
  Antisense Strand to SEQ ID NO: 461885
aaaccucacgaucuccagg

SEQ ID NO: 461887 - RNA, 19 nt, Artificial Sequence
  Description of Artificial Sequence: Synthetic oligonucleotide
  Sense strand starting at position 3889 of SEQ ID NO: 317066
acauauguggugugaugaa

SEQ ID NO: 461888 - RNA, 19 nt, Artificial Sequence
  Description of Artificial Sequence: Synthetic oligonucleotide
  Antisense Strand to SEQ ID NO: 461887
uucaucacaccacauaugu

SEQ ID NO: 461889 - RNA, 19 nt, Artificial Sequence
  Description of Artificial Sequence: Synthetic oligonucleotide
  Sense strand starting at position 3959 of SEQ ID NO: 317066
agcuaacucccagguauag

SEQ ID NO: 461890 - RNA, 19 nt, Artificial Sequence
  Description of Artificial Sequence: Synthetic oligonucleotide
  Antisense Strand to SEQ ID NO: 461889
cuauaccugggaguuagcu

SEQ ID NO: 461891 - RNA, 19 nt, Artificial Sequence
  Description of Artificial Sequence: Synthetic oligonucleotide
  Sense strand starting at position 3968 of SEQ ID NO: 317066
ccagguauaguguauaaag

SEQ ID NO: 461892 - RNA, 19 nt, Artificial Sequence
  Description of Artificial Sequence: Synthetic oligonucleotide
  Antisense Strand to SEQ ID NO: 461891
cuuuauacacuauaccugg

SEQ ID NO: 461893 - RNA, 19 nt, Artificial Sequence
  Description of Artificial Sequence: Synthetic oligonucleotide
  Sense strand starting at position 104 of SEQ ID NO: 317067
gccagaacugugggagaau

SEQ ID NO: 461894 - RNA, 19 nt, Artificial Sequence
  Description of Artificial Sequence: Synthetic oligonucleotide
  Antisense Strand to SEQ ID NO: 461893
auucucccacaguucuggc

SEQ ID NO: 461895 - RNA, 19 nt, Artificial Sequence
  Description of Artificial Sequence: Synthetic oligonucleotide
  Sense strand starting at position 200 of SEQ ID NO: 317067
aaggauagcgcaugggaau

SEQ ID NO: 461896 - RNA, 19 nt, Artificial Sequence
  Description of Artificial Sequence: Synthetic oligonucleotide
  Antisense Strand to SEQ ID NO: 461895
auucccaugcgcuauccuu

SEQ ID NO: 461897 - RNA, 19 nt, Artificial Sequence
  Description of Artificial Sequence: Synthetic oligonucleotide
  Sense strand starting at position 267 of SEQ ID NO: 317067
cucagcauccauugagaga

SEQ ID NO: 461898 - RNA, 19 nt, Artificial Sequence
  Description of Artificial Sequence: Synthetic oligonucleotide
  Antisense Strand to SEQ ID NO: 461897
ucucucaauggaugcugag

SEQ ID NO: 461899 - RNA, 19 nt, Artificial Sequence
  Description of Artificial Sequence: Synthetic oligonucleotide
  Sense strand starting at position 356 of SEQ ID NO: 317067
cucagagaugcucaugauu

SEQ ID NO: 461900 - RNA, 19 nt, Artificial Sequence
  Description of Artificial Sequence: Synthetic oligonucleotide
  Antisense Strand to SEQ ID NO: 461899
aaucaugagcaucucugag

SEQ ID NO: 461901 - RNA, 19 nt, Artificial Sequence
  Description of Artificial Sequence: Synthetic oligonucleotide
  Sense strand starting at position 502 of SEQ ID NO: 317067
ugcuguguuagacaaauug

SEQ ID NO: 461902 - RNA, 19 nt, Artificial Sequence
  Description of Artificial Sequence: Synthetic oligonucleotide
  Antisense Strand to SEQ ID NO: 461901
caauuugucuaacacagca

SEQ ID NO: 461903 - RNA, 19 nt, Artificial Sequence
  Description of Artificial Sequence: Synthetic oligonucleotide
  Sense strand starting at position 778 of SEQ ID NO: 317067
auaugauugcuagaaguca

SEQ ID NO: 461904 - RNA, 19 nt, Artificial Sequence
  Description of Artificial Sequence: Synthetic oligonucleotide
  Antisense Strand to SEQ ID NO: 461903
ugacuucuagcaaucauau

SEQ ID NO: 461905 - RNA, 19 nt, Artificial Sequence
  Description of Artificial Sequence: Synthetic oligonucleotide
  Sense strand starting at position 874 of SEQ ID NO: 317067
ugaggcauuuccuugcaua

SEQ ID NO: 461906 - RNA, 19 nt, Artificial Sequence
  Description of Artificial Sequence: Synthetic oligonucleotide
  Antisense Strand to SEQ ID NO: 461905
uaugcaaggaaaugccuca

SEQ ID NO: 461907 - RNA, 19 nt, Artificial Sequence
  Description of Artificial Sequence: Synthetic oligonucleotide
  Sense strand starting at position 899 of SEQ ID NO: 317067
acaugugucauguaggaaa

SEQ ID NO: 461908 - RNA, 19 nt, Artificial Sequence
  Description of Artificial Sequence: Synthetic oligonucleotide
  Antisense Strand to SEQ ID NO: 461907
uuuccuacaugacacaugu

SEQ ID NO: 461909 - RNA, 19 nt, Artificial Sequence
  Description of Artificial Sequence: Synthetic oligonucleotide
  Sense strand starting at position 965 of SEQ ID NO: 317067
ugucaugauggcuacaauu

SEQ ID NO: 461910 - RNA, 19 nt, Artificial Sequence
  Description of Artificial Sequence: Synthetic oligonucleotide
  Antisense Strand to SEQ ID NO: 461909
aauuguagccaucaugaca

SEQ ID NO: 461911 - RNA, 19 nt, Artificial Sequence
  Description of Artificial Sequence: Synthetic oligonucleotide
  Sense strand starting at position 1056 of SEQ ID NO: 317067
uggaaauaugggugcucaa

SEQ ID NO: 461912 - RNA, 19 nt, Artificial Sequence
  Description of Artificial Sequence: Synthetic oligonucleotide
  Antisense Strand to SEQ ID NO: 461911
uugagcacccauauuucca

SEQ ID NO: 461913 - RNA, 19 nt, Artificial Sequence
  Description of Artificial Sequence: Synthetic oligonucleotide
  Sense strand starting at position 1186 of SEQ ID NO: 317067
agguauagagacugucuca

SEQ ID NO: 461914 - RNA, 19 nt, Artificial Sequence
  Description of Artificial Sequence: Synthetic oligonucleotide
  Antisense Strand to SEQ ID NO: 461913
ugagacagucucuauaccu

SEQ ID NO: 461915 - RNA, 19 nt, Artificial Sequence
  Description of Artificial Sequence: Synthetic oligonucleotide
  Sense strand starting at position 1393 of SEQ ID NO: 317067
gagaaaguacugcaucugu

SEQ ID NO: 461916 - RNA, 19 nt, Artificial Sequence
  Description of Artificial Sequence: Synthetic oligonucleotide
  Antisense Strand to SEQ ID NO: 461915
acagaugcaguacuuucuc

SEQ ID NO: 461917 - RNA, 19 nt, Artificial Sequence
  Description of Artificial Sequence: Synthetic oligonucleotide
  Sense strand starting at position 1519 of SEQ ID NO: 317067
auauaucagcuagggaaug

SEQ ID NO: 461918 - RNA, 19 nt, Artificial Sequence
  Description of Artificial Sequence: Synthetic oligonucleotide
  Antisense Strand to SEQ ID NO: 461917
cauucccuagcugauauau

SEQ ID NO: 461919 - RNA, 19 nt, Artificial Sequence
  Description of Artificial Sequence: Synthetic oligonucleotide
  Sense strand starting at position 1867 of SEQ ID NO: 317067
agaagauuaugcucucuga

SEQ ID NO: 461920 - RNA, 19 nt, Artificial Sequence
  Description of Artificial Sequence: Synthetic oligonucleotide
  Antisense Strand to SEQ ID NO: 461919
ucagagagcauaaucuucu

SEQ ID NO: 461921 - RNA, 19 nt, Artificial Sequence
  Description of Artificial Sequence: Synthetic oligonucleotide
  Sense strand starting at position 1933 of SEQ ID NO: 317067
gagagagcuuaggcugaga

SEQ ID NO: 461922 - RNA, 19 nt, Artificial Sequence
  Description of Artificial Sequence: Synthetic oligonucleotide
  Antisense Strand to SEQ ID NO: 461921
ucucagccuaagcucucuc

SEQ ID NO: 461923 - RNA, 19 nt, Artificial Sequence
  Description of Artificial Sequence: Synthetic oligonucleotide
  Sense strand starting at position 2112 of SEQ ID NO: 317067
cggugugaauaauuaaaua

SEQ ID NO: 461924 - RNA, 19 nt, Artificial Sequence
  Description of Artificial Sequence: Synthetic oligonucleotide
  Antisense Strand to SEQ ID NO: 461923
uauuuaauuauucacaccg

SEQ ID NO: 461925 - RNA, 19 nt, Artificial Sequence
  Description of Artificial Sequence: Synthetic oligonucleotide
  Sense strand starting at position 2197 of SEQ ID NO: 317067
gagagcugagcuuaaagca

SEQ ID NO: 461926 - RNA, 19 nt, Artificial Sequence
  Description of Artificial Sequence: Synthetic oligonucleotide
  Antisense Strand to SEQ ID NO: 461925
ugcuuuaagcucagcucuc

SEQ ID NO: 461927 - RNA, 19 nt, Artificial Sequence
  Description of Artificial Sequence: Synthetic oligonucleotide
  Sense strand starting at position 2318 of SEQ ID NO: 317067
acagcuuccucgcuaauuu

SEQ ID NO: 461928 - RNA, 19 nt, Artificial Sequence
  Description of Artificial Sequence: Synthetic oligonucleotide
  Antisense Strand to SEQ ID NO: 461927
aaauuagcgaggaagcugu

SEQ ID NO: 461929 - RNA, 19 nt, Artificial Sequence
  Description of Artificial Sequence: Synthetic oligonucleotide
  Sense strand starting at position 2342 of SEQ ID NO: 317067
ucuggcucucgagaagaau

SEQ ID NO: 461930 - RNA, 19 nt, Artificial Sequence
  Description of Artificial Sequence: Synthetic oligonucleotide
  Antisense Strand to SEQ ID NO: 461929
auucuucucgagagccaga

SEQ ID NO: 461931 - RNA, 19 nt, Artificial Sequence
  Description of Artificial Sequence: Synthetic oligonucleotide
  Sense strand starting at position 2404 of SEQ ID NO: 317067
acauaaaguucuguccaaa

SEQ ID NO: 461932 - RNA, 19 nt, Artificial Sequence
  Description of Artificial Sequence: Synthetic oligonucleotide
  Antisense Strand to SEQ ID NO: 461931
uuuggacagaacuuuaugu

SEQ ID NO: 461933 - RNA, 19 nt, Artificial Sequence
  Description of Artificial Sequence: Synthetic oligonucleotide
  Sense strand starting at position 2448 of SEQ ID NO: 317067
ggaaaugagucacuccauu

SEQ ID NO: 461934 - RNA, 19 nt, Artificial Sequence
  Description of Artificial Sequence: Synthetic oligonucleotide
  Antisense Strand to SEQ ID NO: 461933
aauggagugacucauuucc

SEQ ID NO: 461935 - RNA, 19 nt, Artificial Sequence
  Description of Artificial Sequence: Synthetic oligonucleotide
  Sense strand starting at position 2488 of SEQ ID NO: 317067
ugaauugagcucugaaauc

SEQ ID NO: 461936 - RNA, 19 nt, Artificial Sequence
  Description of Artificial Sequence: Synthetic oligonucleotide
  Antisense Strand to SEQ ID NO: 461935
gauuucagagcucaauuca

SEQ ID NO: 461937 - RNA, 19 nt, Artificial Sequence
  Description of Artificial Sequence: Synthetic oligonucleotide
  Sense strand starting at position 2500 of SEQ ID NO: 317067
ugaaaucagcuguaugaca

SEQ ID NO: 461938 - RNA, 19 nt, Artificial Sequence
  Description of Artificial Sequence: Synthetic oligonucleotide
  Antisense Strand to SEQ ID NO: 461937
ugucauacagcugauuuca

SEQ ID NO: 461939 - RNA, 19 nt, Artificial Sequence
  Description of Artificial Sequence: Synthetic oligonucleotide
  Sense strand starting at position 2625 of SEQ ID NO: 317067
agcuuuaagaucugggauu

SEQ ID NO: 461940 - RNA, 19 nt, Artificial Sequence
  Description of Artificial Sequence: Synthetic oligonucleotide
  Antisense Strand to SEQ ID NO: 461939
aaucccagaucuuaaagcu

SEQ ID NO: 461941 - RNA, 19 nt, Artificial Sequence
  Description of Artificial Sequence: Synthetic oligonucleotide
  Sense strand starting at position 2790 of SEQ ID NO: 317067
aauggcucgaagggauaau

SEQ ID NO: 461942 - RNA, 19 nt, Artificial Sequence
  Description of Artificial Sequence: Synthetic oligonucleotide
  Antisense Strand to SEQ ID NO: 461941
auuaucccuucgagccauu

SEQ ID NO: 461943 - RNA, 19 nt, Artificial Sequence
  Description of Artificial Sequence: Synthetic oligonucleotide
  Sense strand starting at position 2921 of SEQ ID NO: 317067
uuaggaauuuggcaucaga

SEQ ID NO: 461944 - RNA, 19 nt, Artificial Sequence
  Description of Artificial Sequence: Synthetic oligonucleotide
  Antisense Strand to SEQ ID NO: 461943
ucugaugccaaauuccuaa

SEQ ID NO: 461945 - RNA, 19 nt, Artificial Sequence
  Description of Artificial Sequence: Synthetic oligonucleotide
  Sense strand starting at position 3060 of SEQ ID NO: 317067
ugagguccaaauuggaauu

SEQ ID NO: 461946 - RNA, 19 nt, Artificial Sequence
  Description of Artificial Sequence: Synthetic oligonucleotide
  Antisense Strand to SEQ ID NO: 461945
aauuccaauuuggaccuca

SEQ ID NO: 461947 - RNA, 19 nt, Artificial Sequence
  Description of Artificial Sequence: Synthetic oligonucleotide
  Sense strand starting at position 3073 of SEQ ID NO: 317067
ggaauucuauucucuguaa

SEQ ID NO: 461948 - RNA, 19 nt, Artificial Sequence
  Description of Artificial Sequence: Synthetic oligonucleotide
  Antisense Strand to SEQ ID NO: 461947
uuacagagaauagaauucc

SEQ ID NO: 461949 - RNA, 19 nt, Artificial Sequence
  Description of Artificial Sequence: Synthetic oligonucleotide
  Sense strand starting at position 3131 of SEQ ID NO: 317067
guagaaagaaguuagguuu

SEQ ID NO: 461950 - RNA, 19 nt, Artificial Sequence
  Description of Artificial Sequence: Synthetic oligonucleotide
  Antisense Strand to SEQ ID NO: 461949
aaaccuaacuucuuucuac

SEQ ID NO: 461951 - RNA, 19 nt, Artificial Sequence
  Description of Artificial Sequence: Synthetic oligonucleotide
  Sense strand starting at position 3134 of SEQ ID NO: 317067
gaaagaaguuagguuugau

SEQ ID NO: 461952 - RNA, 19 nt, Artificial Sequence
  Description of Artificial Sequence: Synthetic oligonucleotide
  Antisense Strand to SEQ ID NO: 461951
aucaaaccuaacuucuuuc

SEQ ID NO: 461953 - RNA, 19 nt, Artificial Sequence
  Description of Artificial Sequence: Synthetic oligonucleotide
  Sense strand starting at position 3137 of SEQ ID NO: 317067
agaaguuagguuugauaug

SEQ ID NO: 461954 - RNA, 19 nt, Artificial Sequence
  Description of Artificial Sequence: Synthetic oligonucleotide
  Antisense Strand to SEQ ID NO: 461953
cauaucaaaccuaacuucu

SEQ ID NO: 461955 - RNA, 19 nt, Artificial Sequence
  Description of Artificial Sequence: Synthetic oligonucleotide
  Sense strand starting at position 3189 of SEQ ID NO: 317067
guucuagcucugcugcaua

SEQ ID NO: 461956 - RNA, 19 nt, Artificial Sequence
  Description of Artificial Sequence: Synthetic oligonucleotide
  Antisense Strand to SEQ ID NO: 461955
uaugcagcagagcuagaac

SEQ ID NO: 461957 - RNA, 19 nt, Artificial Sequence
  Description of Artificial Sequence: Synthetic oligonucleotide
  Sense strand starting at position 3233 of SEQ ID NO: 317067
ugguuaaccucucugaacu

SEQ ID NO: 461958 - RNA, 19 nt, Artificial Sequence
  Description of Artificial Sequence: Synthetic oligonucleotide
  Antisense Strand to SEQ ID NO: 461957
aguucagagagguuaacca

SEQ ID NO: 461959 - RNA, 19 nt, Artificial Sequence
  Description of Artificial Sequence: Synthetic oligonucleotide
  Sense strand starting at position 3283 of SEQ ID NO: 317067
aguaauagugcuuaacuca

SEQ ID NO: 461960 - RNA, 19 nt, Artificial Sequence
  Description of Artificial Sequence: Synthetic oligonucleotide
  Antisense Strand to SEQ ID NO: 461959
ugaguuaagcacuauuacu

SEQ ID NO: 461961 - RNA, 19 nt, Artificial Sequence
  Description of Artificial Sequence: Synthetic oligonucleotide
  Sense strand starting at position 3689 of SEQ ID NO: 317067
ggucuacuguuacuaauaa

SEQ ID NO: 461962 - RNA, 19 nt, Artificial Sequence
  Description of Artificial Sequence: Synthetic oligonucleotide
  Antisense Strand to SEQ ID NO: 461961
uuauuaguaacaguagacc

SEQ ID NO: 461963 - RNA, 19 nt, Artificial Sequence
  Description of Artificial Sequence: Synthetic oligonucleotide
  Sense strand starting at position 3706 of SEQ ID NO: 317067
aacuauuagcgauagugaa

SEQ ID NO: 461964 - RNA, 19 nt, Artificial Sequence
  Description of Artificial Sequence: Synthetic oligonucleotide
  Antisense Strand to SEQ ID NO: 461963
uucacuaucgcuaauaguu

SEQ ID NO: 461965 - RNA, 19 nt, Artificial Sequence
  Description of Artificial Sequence: Synthetic oligonucleotide
  Sense strand starting at position 3747 of SEQ ID NO: 317067
agcuaucuccaagagguuu

SEQ ID NO: 461966 - RNA, 19 nt, Artificial Sequence
  Description of Artificial Sequence: Synthetic oligonucleotide
  Antisense Strand to SEQ ID NO: 461965
aaaccucuuggagauagcu

SEQ ID NO: 461967 - RNA, 19 nt, Artificial Sequence
  Description of Artificial Sequence: Synthetic oligonucleotide
  Sense strand starting at position 3806 of SEQ ID NO: 317067
agagaagugacauguuaua

SEQ ID NO: 461968 - RNA, 19 nt, Artificial Sequence
  Description of Artificial Sequence: Synthetic oligonucleotide
  Antisense Strand to SEQ ID NO: 461967
uauaacaugucacuucucu

SEQ ID NO: 461969 - RNA, 19 nt, Artificial Sequence
  Description of Artificial Sequence: Synthetic oligonucleotide
  Sense strand starting at position 3970 of SEQ ID NO: 317067
gacgaucuuggacauguca

SEQ ID NO: 461970 - RNA, 19 nt, Artificial Sequence
  Description of Artificial Sequence: Synthetic oligonucleotide
  Antisense Strand to SEQ ID NO: 461969
ugacauguccaagaucguc

SEQ ID NO: 461971 - RNA, 19 nt, Artificial Sequence
  Description of Artificial Sequence: Synthetic oligonucleotide
  Sense strand starting at position 3972 of SEQ ID NO: 317067
cgaucuuggacaugucaga

SEQ ID NO: 461972 - RNA, 19 nt, Artificial Sequence
  Description of Artificial Sequence: Synthetic oligonucleotide
  Antisense Strand to SEQ ID NO: 461971
ucugacauguccaagaucg

SEQ ID NO: 461973 - RNA, 19 nt, Artificial Sequence
  Description of Artificial Sequence: Synthetic oligonucleotide
  Sense strand starting at position 925 of SEQ ID NO: 317068
gaggcugccuagguauaga

SEQ ID NO: 461974 - RNA, 19 nt, Artificial Sequence
  Description of Artificial Sequence: Synthetic oligonucleotide
  Antisense Strand to SEQ ID NO: 461973
ucuauaccuaggcagccuc

SEQ ID NO: 461975 - RNA, 19 nt, Artificial Sequence
  Description of Artificial Sequence: Synthetic oligonucleotide
  Sense strand starting at position 930 of SEQ ID NO: 317068
ugccuagguauagaggauu

SEQ ID NO: 461976 - RNA, 19 nt, Artificial Sequence
  Description of Artificial Sequence: Synthetic oligonucleotide
  Antisense Strand to SEQ ID NO: 461975
aauccucuauaccuaggca

SEQ ID NO: 461977 - RNA, 19 nt, Artificial Sequence
  Description of Artificial Sequence: Synthetic oligonucleotide
  Sense strand starting at position 1323 of SEQ ID NO: 317068
gguacaucccaaugucugu

SEQ ID NO: 461978 - RNA, 19 nt, Artificial Sequence
  Description of Artificial Sequence: Synthetic oligonucleotide
  Antisense Strand to SEQ ID NO: 461977
acagacauugggauguacc

SEQ ID NO: 461979 - RNA, 19 nt, Artificial Sequence
  Description of Artificial Sequence: Synthetic oligonucleotide
  Sense strand starting at position 1328 of SEQ ID NO: 317068
aucccaaugucuguuccau

SEQ ID NO: 461980 - RNA, 19 nt, Artificial Sequence
  Description of Artificial Sequence: Synthetic oligonucleotide
  Antisense Strand to SEQ ID NO: 461979
auggaacagacauugggau

SEQ ID NO: 461981 - RNA, 19 nt, Artificial Sequence
  Description of Artificial Sequence: Synthetic oligonucleotide
  Sense strand starting at position 1330 of SEQ ID NO: 317068
cccaaugucuguuccauaa

SEQ ID NO: 461982 - RNA, 19 nt, Artificial Sequence
  Description of Artificial Sequence: Synthetic oligonucleotide
  Antisense Strand to SEQ ID NO: 461981
uuauggaacagacauuggg

SEQ ID NO: 461983 - RNA, 19 nt, Artificial Sequence
  Description of Artificial Sequence: Synthetic oligonucleotide
  Sense strand starting at position 2164 of SEQ ID NO: 317068
ccguuaaugcuagaugcaa

SEQ ID NO: 461984 - RNA, 19 nt, Artificial Sequence
  Description of Artificial Sequence: Synthetic oligonucleotide
  Antisense Strand to SEQ ID NO: 461983
uugcaucuagcauuaacgg

SEQ ID NO: 461985 - RNA, 19 nt, Artificial Sequence
  Description of Artificial Sequence: Synthetic oligonucleotide
  Sense strand starting at position 2366 of SEQ ID NO: 317068
aucacaaauccgugaucuc

SEQ ID NO: 461986 - RNA, 19 nt, Artificial Sequence
  Description of Artificial Sequence: Synthetic oligonucleotide
  Antisense Strand to SEQ ID NO: 461985
gagaucacggauuugugau

SEQ ID NO: 461987 - RNA, 19 nt, Artificial Sequence
  Description of Artificial Sequence: Synthetic oligonucleotide
  Sense strand starting at position 2367 of SEQ ID NO: 317068
ucacaaauccgugaucuca

SEQ ID NO: 461988 - RNA, 19 nt, Artificial Sequence
  Description of Artificial Sequence: Synthetic oligonucleotide
  Antisense Strand to SEQ ID NO: 461987
ugagaucacggauuuguga

SEQ ID NO: 461989 - RNA, 19 nt, Artificial Sequence
  Description of Artificial Sequence: Synthetic oligonucleotide
  Sense strand starting at position 2591 of SEQ ID NO: 317068
gaaaucgaaccuuaucguu

SEQ ID NO: 461990 - RNA, 19 nt, Artificial Sequence
  Description of Artificial Sequence: Synthetic oligonucleotide
  Antisense Strand to SEQ ID NO: 461989
aacgauaagguucgauuuc

SEQ ID NO: 461991 - RNA, 19 nt, Artificial Sequence
  Description of Artificial Sequence: Synthetic oligonucleotide
  Sense strand starting at position 2596 of SEQ ID NO: 317068
cgaaccuuaucguucucaa

SEQ ID NO: 461992 - RNA, 19 nt, Artificial Sequence
  Description of Artificial Sequence: Synthetic oligonucleotide
  Antisense Strand to SEQ ID NO: 461991
uugagaacgauaagguucg

SEQ ID NO: 461993 - RNA, 19 nt, Artificial Sequence
  Description of Artificial Sequence: Synthetic oligonucleotide
  Sense strand starting at position 2604 of SEQ ID NO: 317068
aucguucucaaucggaaga

SEQ ID NO: 461994 - RNA, 19 nt, Artificial Sequence
  Description of Artificial Sequence: Synthetic oligonucleotide
  Antisense Strand to SEQ ID NO: 461993
ucuuccgauugagaacgau

SEQ ID NO: 461995 - RNA, 19 nt, Artificial Sequence
  Description of Artificial Sequence: Synthetic oligonucleotide
  Sense strand starting at position 2907 of SEQ ID NO: 317068
ggguaacucuagguacuca

SEQ ID NO: 461996 - RNA, 19 nt, Artificial Sequence
  Description of Artificial Sequence: Synthetic oligonucleotide
  Antisense Strand to SEQ ID NO: 461995
ugaguaccuagaguuaccc

SEQ ID NO: 461997 - RNA, 19 nt, Artificial Sequence
  Description of Artificial Sequence: Synthetic oligonucleotide
  Sense strand starting at position 2936 of SEQ ID NO: 317068
gcgggagaaucccuuagaa

SEQ ID NO: 461998 - RNA, 19 nt, Artificial Sequence
  Description of Artificial Sequence: Synthetic oligonucleotide
  Antisense Strand to SEQ ID NO: 461997
uucuaagggauucucccgc

SEQ ID NO: 461999 - RNA, 19 nt, Artificial Sequence
  Description of Artificial Sequence: Synthetic oligonucleotide
  Sense strand starting at position 3004 of SEQ ID NO: 317068
gggagauagugcuccugau

SEQ ID NO: 462000 - RNA, 19 nt, Artificial Sequence
  Description of Artificial Sequence: Synthetic oligonucleotide
  Antisense Strand to SEQ ID NO: 461999
aucaggagcacuaucuccc

SEQ ID NO: 462001 - RNA, 19 nt, Artificial Sequence
  Description of Artificial Sequence: Synthetic oligonucleotide
  Sense strand starting at position 3008 of SEQ ID NO: 317068
gauagugcuccugauagca

SEQ ID NO: 462002 - RNA, 19 nt, Artificial Sequence
  Description of Artificial Sequence: Synthetic oligonucleotide
  Antisense Strand to SEQ ID NO: 462001
ugcuaucaggagcacuauc

SEQ ID NO: 462003 - RNA, 19 nt, Artificial Sequence
  Description of Artificial Sequence: Synthetic oligonucleotide
  Sense strand starting at position 3010 of SEQ ID NO: 317068
uagugcuccugauagcaga

SEQ ID NO: 462004 - RNA, 19 nt, Artificial Sequence
  Description of Artificial Sequence: Synthetic oligonucleotide
  Antisense Strand to SEQ ID NO: 462003
ucugcuaucaggagcacua

SEQ ID NO: 462005 - RNA, 19 nt, Artificial Sequence
  Description of Artificial Sequence: Synthetic oligonucleotide
  Sense strand starting at position 3295 of SEQ ID NO: 317068
guguacauccugcgauguu

SEQ ID NO: 462006 - RNA, 19 nt, Artificial Sequence
  Description of Artificial Sequence: Synthetic oligonucleotide
  Antisense Strand to SEQ ID NO: 462005
aacaucgcaggauguacac

SEQ ID NO: 462007 - RNA, 19 nt, Artificial Sequence
  Description of Artificial Sequence: Synthetic oligonucleotide
  Sense strand starting at position 3296 of SEQ ID NO: 317068
uguacauccugcgauguuu

SEQ ID NO: 462008 - RNA, 19 nt, Artificial Sequence
  Description of Artificial Sequence: Synthetic oligonucleotide
  Antisense Strand to SEQ ID NO: 462007
aaacaucgcaggauguaca

SEQ ID NO: 462009 - RNA, 19 nt, Artificial Sequence
  Description of Artificial Sequence: Synthetic oligonucleotide
  Sense strand starting at position 3317 of SEQ ID NO: 317068
uguuaucuaccagguagau

SEQ ID NO: 462010 - RNA, 19 nt, Artificial Sequence
  Description of Artificial Sequence: Synthetic oligonucleotide
  Antisense Strand to SEQ ID NO: 462009
aucuaccugguagauaaca

SEQ ID NO: 462011 - RNA, 19 nt, Artificial Sequence
  Description of Artificial Sequence: Synthetic oligonucleotide
  Sense strand starting at position 3434 of SEQ ID NO: 317068
guguauguaaaccgugagu

SEQ ID NO: 462012 - RNA, 19 nt, Artificial Sequence
  Description of Artificial Sequence: Synthetic oligonucleotide
  Antisense Strand to SEQ ID NO: 462011
acucacgguuuacauacac

SEQ ID NO: 462013 - RNA, 19 nt, Artificial Sequence
  Description of Artificial Sequence: Synthetic oligonucleotide
  Sense strand starting at position 3436 of SEQ ID NO: 317068
guauguaaaccgugaguga

SEQ ID NO: 462014 - RNA, 19 nt, Artificial Sequence
  Description of Artificial Sequence: Synthetic oligonucleotide
  Antisense Strand to SEQ ID NO: 462013
ucacucacgguuuacauac

SEQ ID NO: 462015 - RNA, 19 nt, Artificial Sequence
  Description of Artificial Sequence: Synthetic oligonucleotide
  Sense strand starting at position 3437 of SEQ ID NO: 317068
uauguaaaccgugagugau

SEQ ID NO: 462016 - RNA, 19 nt, Artificial Sequence
  Description of Artificial Sequence: Synthetic oligonucleotide
  Antisense Strand to SEQ ID NO: 462015
aucacucacgguuuacaua

SEQ ID NO: 462017 - RNA, 19 nt, Artificial Sequence
  Description of Artificial Sequence: Synthetic oligonucleotide
  Sense strand starting at position 3439 of SEQ ID NO: 317068
uguaaaccgugagugauau

SEQ ID NO: 462018 - RNA, 19 nt, Artificial Sequence
  Description of Artificial Sequence: Synthetic oligonucleotide
  Antisense Strand to SEQ ID NO: 462017
auaucacucacgguuuaca

SEQ ID NO: 462019 - RNA, 19 nt, Artificial Sequence
  Description of Artificial Sequence: Synthetic oligonucleotide
  Sense strand starting at position 3440 of SEQ ID NO: 317068
guaaaccgugagugauauu

SEQ ID NO: 462020 - RNA, 19 nt, Artificial Sequence
  Description of Artificial Sequence: Synthetic oligonucleotide
  Antisense Strand to SEQ ID NO: 462019
aauaucacucacgguuuac

SEQ ID NO: 462021 - RNA, 19 nt, Artificial Sequence
  Description of Artificial Sequence: Synthetic oligonucleotide
  Sense strand starting at position 3484 of SEQ ID NO: 317068
ggauguuauugcuuccaau

SEQ ID NO: 462022 - RNA, 19 nt, Artificial Sequence
  Description of Artificial Sequence: Synthetic oligonucleotide
  Antisense Strand to SEQ ID NO: 462021
auuggaagcaauaacaucc

SEQ ID NO: 462023 - RNA, 19 nt, Artificial Sequence
  Description of Artificial Sequence: Synthetic oligonucleotide
  Sense strand starting at position 3603 of SEQ ID NO: 317068
ccgggauauuguucucaau

SEQ ID NO: 462024 - RNA, 19 nt, Artificial Sequence
  Description of Artificial Sequence: Synthetic oligonucleotide
  Antisense Strand to SEQ ID NO: 462023
auugagaacaauaucccgg

SEQ ID NO: 462025 - RNA, 19 nt, Artificial Sequence
  Description of Artificial Sequence: Synthetic oligonucleotide
  Sense strand starting at position 3605 of SEQ ID NO: 317068
gggauauuguucucaauau

SEQ ID NO: 462026 - RNA, 19 nt, Artificial Sequence
  Description of Artificial Sequence: Synthetic oligonucleotide
  Antisense Strand to SEQ ID NO: 462025
auauugagaacaauauccc

SEQ ID NO: 462027 - RNA, 19 nt, Artificial Sequence
  Description of Artificial Sequence: Synthetic oligonucleotide
  Sense strand starting at position 3606 of SEQ ID NO: 317068
ggauauuguucucaauauc

SEQ ID NO: 462028 - RNA, 19 nt, Artificial Sequence
  Description of Artificial Sequence: Synthetic oligonucleotide
  Antisense Strand to SEQ ID NO: 462027
gauauugagaacaauaucc

SEQ ID NO: 462029 - RNA, 19 nt, Artificial Sequence
  Description of Artificial Sequence: Synthetic oligonucleotide
  Sense strand starting at position 3631 of SEQ ID NO: 317068
uggagagaaugaugucacu

SEQ ID NO: 462030 - RNA, 19 nt, Artificial Sequence
  Description of Artificial Sequence: Synthetic oligonucleotide
  Antisense Strand to SEQ ID NO: 462029
agugacaucauucucucca

SEQ ID NO: 462031 - RNA, 19 nt, Artificial Sequence
  Description of Artificial Sequence: Synthetic oligonucleotide
  Sense strand starting at position 3781 of SEQ ID NO: 317068
ucuaacauccagugaagga

SEQ ID NO: 462032 - RNA, 19 nt, Artificial Sequence
  Description of Artificial Sequence: Synthetic oligonucleotide
  Antisense Strand to SEQ ID NO: 462031
uccuucacuggauguuaga

SEQ ID NO: 462033 - RNA, 19 nt, Artificial Sequence
  Description of Artificial Sequence: Synthetic oligonucleotide
  Sense strand starting at position 3796 of SEQ ID NO: 317068
aggagagcaugcuauuacu

SEQ ID NO: 462034 - RNA, 19 nt, Artificial Sequence
  Description of Artificial Sequence: Synthetic oligonucleotide
  Antisense Strand to SEQ ID NO: 462033
aguaauagcaugcucuccu

SEQ ID NO: 462035 - RNA, 19 nt, Artificial Sequence
  Description of Artificial Sequence: Synthetic oligonucleotide
  Sense strand starting at position 4 of SEQ ID NO: 317069
ucagaauugcaucacugac

SEQ ID NO: 462036 - RNA, 19 nt, Artificial Sequence
  Description of Artificial Sequence: Synthetic oligonucleotide
  Antisense Strand to SEQ ID NO: 462035
gucagugaugcaauucuga

SEQ ID NO: 462037 - RNA, 19 nt, Artificial Sequence
  Description of Artificial Sequence: Synthetic oligonucleotide
  Sense strand starting at position 6 of SEQ ID NO: 317069
agaauugcaucacugacga

SEQ ID NO: 462038 - RNA, 19 nt, Artificial Sequence
  Description of Artificial Sequence: Synthetic oligonucleotide
  Antisense Strand to SEQ ID NO: 462037
ucgucagugaugcaauucu

SEQ ID NO: 462039 - RNA, 19 nt, Artificial Sequence
  Description of Artificial Sequence: Synthetic oligonucleotide
  Sense strand starting at position 27 of SEQ ID NO: 317069
uacaauggguuucuguaau

SEQ ID NO: 462040 - RNA, 19 nt, Artificial Sequence
  Description of Artificial Sequence: Synthetic oligonucleotide
  Antisense Strand to SEQ ID NO: 462039
auuacagaaacccauugua

SEQ ID NO: 462041 - RNA, 19 nt, Artificial Sequence
  Description of Artificial Sequence: Synthetic oligonucleotide
  Sense strand starting at position 33 of SEQ ID NO: 317069
ggguuucuguaaucaauua

SEQ ID NO: 462042 - RNA, 19 nt, Artificial Sequence
  Description of Artificial Sequence: Synthetic oligonucleotide
  Antisense Strand to SEQ ID NO: 462041
uaauugauuacagaaaccc

SEQ ID NO: 462043 - RNA, 19 nt, Artificial Sequence
  Description of Artificial Sequence: Synthetic oligonucleotide
  Sense strand starting at position 246 of SEQ ID NO: 317069
acauuaaauuguguaagag

SEQ ID NO: 462044 - RNA, 19 nt, Artificial Sequence
  Description of Artificial Sequence: Synthetic oligonucleotide
  Antisense Strand to SEQ ID NO: 462043
cucuuacacaauuuaaugu

SEQ ID NO: 462045 - RNA, 19 nt, Artificial Sequence
  Description of Artificial Sequence: Synthetic oligonucleotide
  Sense strand starting at position 309 of SEQ ID NO: 317069
agugaauauuacucuaagu

SEQ ID NO: 462046 - RNA, 19 nt, Artificial Sequence
  Description of Artificial Sequence: Synthetic oligonucleotide
  Antisense Strand to SEQ ID NO: 462045
acuuagaguaauauucacu

SEQ ID NO: 462047 - RNA, 19 nt, Artificial Sequence
  Description of Artificial Sequence: Synthetic oligonucleotide
  Sense strand starting at position 314 of SEQ ID NO: 317069
auauuacucuaaguuguac

SEQ ID NO: 462048 - RNA, 19 nt, Artificial Sequence
  Description of Artificial Sequence: Synthetic oligonucleotide
  Antisense Strand to SEQ ID NO: 462047
guacaacuuagaguaauau

SEQ ID NO: 462049 - RNA, 19 nt, Artificial Sequence
  Description of Artificial Sequence: Synthetic oligonucleotide
  Sense strand starting at position 320 of SEQ ID NO: 317069
cucuaaguuguacagaaua

SEQ ID NO: 462050 - RNA, 19 nt, Artificial Sequence
  Description of Artificial Sequence: Synthetic oligonucleotide
  Antisense Strand to SEQ ID NO: 462049
uauucuguacaacuuagag

SEQ ID NO: 462051 - RNA, 19 nt, Artificial Sequence
  Description of Artificial Sequence: Synthetic oligonucleotide
  Sense strand starting at position 459 of SEQ ID NO: 317069
aguauacaugucuauuaag

SEQ ID NO: 462052 - RNA, 19 nt, Artificial Sequence
  Description of Artificial Sequence: Synthetic oligonucleotide
  Antisense Strand to SEQ ID NO: 462051
cuuaauagacauguauacu

SEQ ID NO: 462053 - RNA, 19 nt, Artificial Sequence
  Description of Artificial Sequence: Synthetic oligonucleotide
  Sense strand starting at position 479 of SEQ ID NO: 317069
auauuagcauguuuccaua

SEQ ID NO: 462054 - RNA, 19 nt, Artificial Sequence
  Description of Artificial Sequence: Synthetic oligonucleotide
  Antisense Strand to SEQ ID NO: 462053
uauggaaacaugcuaauau

SEQ ID NO: 462055 - RNA, 19 nt, Artificial Sequence
  Description of Artificial Sequence: Synthetic oligonucleotide
  Sense strand starting at position 917 of SEQ ID NO: 317069
ccuuuauugggagguuaua

SEQ ID NO: 462056 - RNA, 19 nt, Artificial Sequence
  Description of Artificial Sequence: Synthetic oligonucleotide
  Antisense Strand to SEQ ID NO: 462055
uauaaccucccaauaaagg

SEQ ID NO: 462057 - RNA, 19 nt, Artificial Sequence
  Description of Artificial Sequence: Synthetic oligonucleotide
  Sense strand starting at position 951 of SEQ ID NO: 317069
auuaaagauugugcagagu

SEQ ID NO: 462058 - RNA, 19 nt, Artificial Sequence
  Description of Artificial Sequence: Synthetic oligonucleotide
  Antisense Strand to SEQ ID NO: 462057
acucugcacaaucuuuaau

SEQ ID NO: 462059 - RNA, 19 nt, Artificial Sequence
  Description of Artificial Sequence: Synthetic oligonucleotide
  Sense strand starting at position 954 of SEQ ID NO: 317069
aaagauugugcagaguagu

SEQ ID NO: 462060 - RNA, 19 nt, Artificial Sequence
  Description of Artificial Sequence: Synthetic oligonucleotide
  Antisense Strand to SEQ ID NO: 462059
acuacucugcacaaucuuu

SEQ ID NO: 462061 - RNA, 19 nt, Artificial Sequence
  Description of Artificial Sequence: Synthetic oligonucleotide
  Sense strand starting at position 957 of SEQ ID NO: 317069
gauugugcagaguaguaaa

SEQ ID NO: 462062 - RNA, 19 nt, Artificial Sequence
  Description of Artificial Sequence: Synthetic oligonucleotide
  Antisense Strand to SEQ ID NO: 462061
uuuacuacucugcacaauc

SEQ ID NO: 462063 - RNA, 19 nt, Artificial Sequence
  Description of Artificial Sequence: Synthetic oligonucleotide
  Sense strand starting at position 1656 of SEQ ID NO: 317069
acuaacauaugauaaggaa

SEQ ID NO: 462064 - RNA, 19 nt, Artificial Sequence
  Description of Artificial Sequence: Synthetic oligonucleotide
  Antisense Strand to SEQ ID NO: 462063
uuccuuaucauauguuagu

SEQ ID NO: 462065 - RNA, 19 nt, Artificial Sequence
  Description of Artificial Sequence: Synthetic oligonucleotide
  Sense strand starting at position 1706 of SEQ ID NO: 317069
caaggaaguguccaguaug

SEQ ID NO: 462066 - RNA, 19 nt, Artificial Sequence
  Description of Artificial Sequence: Synthetic oligonucleotide
  Antisense Strand to SEQ ID NO: 462065
cauacuggacacuuccuug

SEQ ID NO: 462067 - RNA, 19 nt, Artificial Sequence
  Description of Artificial Sequence: Synthetic oligonucleotide
  Sense strand starting at position 1709 of SEQ ID NO: 317069
ggaaguguccaguaugaau

SEQ ID NO: 462068 - RNA, 19 nt, Artificial Sequence
  Description of Artificial Sequence: Synthetic oligonucleotide
  Antisense Strand to SEQ ID NO: 462067
auucauacuggacacuucc

SEQ ID NO: 462069 - RNA, 19 nt, Artificial Sequence
  Description of Artificial Sequence: Synthetic oligonucleotide
  Sense strand starting at position 1711 of SEQ ID NO: 317069
aaguguccaguaugaauaa

SEQ ID NO: 462070 - RNA, 19 nt, Artificial Sequence
  Description of Artificial Sequence: Synthetic oligonucleotide
  Antisense Strand to SEQ ID NO: 462069
uuauucauacuggacacuu

SEQ ID NO: 462071 - RNA, 19 nt, Artificial Sequence
  Description of Artificial Sequence: Synthetic oligonucleotide
  Sense strand starting at position 2091 of SEQ ID NO: 317069
uuaauauccuggccucaga

SEQ ID NO: 462072 - RNA, 19 nt, Artificial Sequence
  Description of Artificial Sequence: Synthetic oligonucleotide
  Antisense Strand to SEQ ID NO: 462071
ucugaggccaggauauuaa

SEQ ID NO: 462073 - RNA, 19 nt, Artificial Sequence
  Description of Artificial Sequence: Synthetic oligonucleotide
  Sense strand starting at position 2131 of SEQ ID NO: 317069
agucucuacugagcaaauu

SEQ ID NO: 462074 - RNA, 19 nt, Artificial Sequence
  Description of Artificial Sequence: Synthetic oligonucleotide
  Antisense Strand to SEQ ID NO: 462073
aauuugcucaguagagacu

SEQ ID NO: 462075 - RNA, 19 nt, Artificial Sequence
  Description of Artificial Sequence: Synthetic oligonucleotide
  Sense strand starting at position 2132 of SEQ ID NO: 317069
gucucuacugagcaaauua

SEQ ID NO: 462076 - RNA, 19 nt, Artificial Sequence
  Description of Artificial Sequence: Synthetic oligonucleotide
  Antisense Strand to SEQ ID NO: 462075
uaauuugcucaguagagac

SEQ ID NO: 462077 - RNA, 19 nt, Artificial Sequence
  Description of Artificial Sequence: Synthetic oligonucleotide
  Sense strand starting at position 2796 of SEQ ID NO: 317069
guuauaccacaguauaauu

SEQ ID NO: 462078 - RNA, 19 nt, Artificial Sequence
  Description of Artificial Sequence: Synthetic oligonucleotide
  Antisense Strand to SEQ ID NO: 462077
aauuauacugugguauaac

SEQ ID NO: 462079 - RNA, 19 nt, Artificial Sequence
  Description of Artificial Sequence: Synthetic oligonucleotide
  Sense strand starting at position 2985 of SEQ ID NO: 317069
ucuguaaaucugugaacau

SEQ ID NO: 462080 - RNA, 19 nt, Artificial Sequence
  Description of Artificial Sequence: Synthetic oligonucleotide
  Antisense Strand to SEQ ID NO: 462079
auguucacagauuuacaga

SEQ ID NO: 462081 - RNA, 19 nt, Artificial Sequence
  Description of Artificial Sequence: Synthetic oligonucleotide
  Sense strand starting at position 3026 of SEQ ID NO: 317069
auguuacucuuuguuugaa

SEQ ID NO: 462082 - RNA, 19 nt, Artificial Sequence
  Description of Artificial Sequence: Synthetic oligonucleotide
  Antisense Strand to SEQ ID NO: 462081
uucaaacaaagaguaacau

SEQ ID NO: 462083 - RNA, 19 nt, Artificial Sequence
  Description of Artificial Sequence: Synthetic oligonucleotide
  Sense strand starting at position 3077 of SEQ ID NO: 317069
ggcaaaguauuaucuaaau

SEQ ID NO: 462084 - RNA, 19 nt, Artificial Sequence
  Description of Artificial Sequence: Synthetic oligonucleotide
  Antisense Strand to SEQ ID NO: 462083
auuuagauaauacuuugcc

SEQ ID NO: 462085 - RNA, 19 nt, Artificial Sequence
  Description of Artificial Sequence: Synthetic oligonucleotide
  Sense strand starting at position 3117 of SEQ ID NO: 317069
acagauuauuaugcccgaa

SEQ ID NO: 462086 - RNA, 19 nt, Artificial Sequence
  Description of Artificial Sequence: Synthetic oligonucleotide
  Antisense Strand to SEQ ID NO: 462085
uucgggcauaauaaucugu

SEQ ID NO: 462087 - RNA, 19 nt, Artificial Sequence
  Description of Artificial Sequence: Synthetic oligonucleotide
  Sense strand starting at position 3119 of SEQ ID NO: 317069
agauuauuaugcccgaaau

SEQ ID NO: 462088 - RNA, 19 nt, Artificial Sequence
  Description of Artificial Sequence: Synthetic oligonucleotide
  Antisense Strand to SEQ ID NO: 462087
auuucgggcauaauaaucu

SEQ ID NO: 462089 - RNA, 19 nt, Artificial Sequence
  Description of Artificial Sequence: Synthetic oligonucleotide
  Sense strand starting at position 3276 of SEQ ID NO: 317069
aaagcaguggucuagaaac

SEQ ID NO: 462090 - RNA, 19 nt, Artificial Sequence
  Description of Artificial Sequence: Synthetic oligonucleotide
  Antisense Strand to SEQ ID NO: 462089
guuucuagaccacugcuuu

SEQ ID NO: 462091 - RNA, 19 nt, Artificial Sequence
  Description of Artificial Sequence: Synthetic oligonucleotide
  Sense strand starting at position 3278 of SEQ ID NO: 317069
agcaguggucuagaaacau

SEQ ID NO: 462092 - RNA, 19 nt, Artificial Sequence
  Description of Artificial Sequence: Synthetic oligonucleotide
  Antisense Strand to SEQ ID NO: 462091
auguuucuagaccacugcu

SEQ ID NO: 462093 - RNA, 19 nt, Artificial Sequence
  Description of Artificial Sequence: Synthetic oligonucleotide
  Sense strand starting at position 3321 of SEQ ID NO: 317069
gcaaccuauucuccaggau

SEQ ID NO: 462094 - RNA, 19 nt, Artificial Sequence
  Description of Artificial Sequence: Synthetic oligonucleotide
  Antisense Strand to SEQ ID NO: 462093
auccuggagaauagguugc

SEQ ID NO: 462095 - RNA, 19 nt, Artificial Sequence
  Description of Artificial Sequence: Synthetic oligonucleotide
  Sense strand starting at position 3324 of SEQ ID NO: 317069
accuauucuccaggauugu

SEQ ID NO: 462096 - RNA, 19 nt, Artificial Sequence
  Description of Artificial Sequence: Synthetic oligonucleotide
  Antisense Strand to SEQ ID NO: 462095
acaauccuggagaauaggu

SEQ ID NO: 462097 - RNA, 19 nt, Artificial Sequence
  Description of Artificial Sequence: Synthetic oligonucleotide
  Sense strand starting at position 3325 of SEQ ID NO: 317069
ccuauucuccaggauugua

SEQ ID NO: 462098 - RNA, 19 nt, Artificial Sequence
  Description of Artificial Sequence: Synthetic oligonucleotide
  Antisense Strand to SEQ ID NO: 462097
uacaauccuggagaauagg

SEQ ID NO: 462099 - RNA, 19 nt, Artificial Sequence
  Description of Artificial Sequence: Synthetic oligonucleotide
  Sense strand starting at position 3354 of SEQ ID NO: 317069
ugaggaaucuugccuagag

SEQ ID NO: 462100 - RNA, 19 nt, Artificial Sequence
  Description of Artificial Sequence: Synthetic oligonucleotide
  Antisense Strand to SEQ ID NO: 462099
cucuaggcaagauuccuca

SEQ ID NO: 462101 - RNA, 19 nt, Artificial Sequence
  Description of Artificial Sequence: Synthetic oligonucleotide
  Sense strand starting at position 3355 of SEQ ID NO: 317069
gaggaaucuugccuagagg

SEQ ID NO: 462102 - RNA, 19 nt, Artificial Sequence
  Description of Artificial Sequence: Synthetic oligonucleotide
  Antisense Strand to SEQ ID NO: 462101
ccucuaggcaagauuccuc

SEQ ID NO: 462103 - RNA, 19 nt, Artificial Sequence
  Description of Artificial Sequence: Synthetic oligonucleotide
  Sense strand starting at position 3356 of SEQ ID NO: 317069
aggaaucuugccuagaggu

SEQ ID NO: 462104 - RNA, 19 nt, Artificial Sequence
  Description of Artificial Sequence: Synthetic oligonucleotide
  Antisense Strand to SEQ ID NO: 462103
accucuaggcaagauuccu

SEQ ID NO: 462105 - RNA, 19 nt, Artificial Sequence
  Description of Artificial Sequence: Synthetic oligonucleotide
  Sense strand starting at position 3358 of SEQ ID NO: 317069
gaaucuugccuagaggugu

SEQ ID NO: 462106 - RNA, 19 nt, Artificial Sequence
  Description of Artificial Sequence: Synthetic oligonucleotide
  Antisense Strand to SEQ ID NO: 462105
acaccucuaggcaagauuc

SEQ ID NO: 462107 - RNA, 19 nt, Artificial Sequence
  Description of Artificial Sequence: Synthetic oligonucleotide
  Sense strand starting at position 3459 of SEQ ID NO: 317069
agauuuaucuuaggaaacc

SEQ ID NO: 462108 - RNA, 19 nt, Artificial Sequence
  Description of Artificial Sequence: Synthetic oligonucleotide
  Antisense Strand to SEQ ID NO: 462107
gguuuccuaagauaaaucu

SEQ ID NO: 462109 - RNA, 19 nt, Artificial Sequence
  Description of Artificial Sequence: Synthetic oligonucleotide
  Sense strand starting at position 3708 of SEQ ID NO: 317069
ugucuuggagauugauaca

SEQ ID NO: 462110 - RNA, 19 nt, Artificial Sequence
  Description of Artificial Sequence: Synthetic oligonucleotide
  Antisense Strand to SEQ ID NO: 462109
uguaucaaucuccaagaca

SEQ ID NO: 462111 - RNA, 19 nt, Artificial Sequence
  Description of Artificial Sequence: Synthetic oligonucleotide
  Sense strand starting at position 3896 of SEQ ID NO: 317069
uguuauuuacggcauggua

SEQ ID NO: 462112 - RNA, 19 nt, Artificial Sequence
  Description of Artificial Sequence: Synthetic oligonucleotide
  Antisense Strand to SEQ ID NO: 462111
uaccaugccguaaauaaca

SEQ ID NO: 462113 - RNA, 19 nt, Artificial Sequence
  Description of Artificial Sequence: Synthetic oligonucleotide
  Sense strand starting at position 3898 of SEQ ID NO: 317069
uuauuuacggcaugguagu

SEQ ID NO: 462114 - RNA, 19 nt, Artificial Sequence
  Description of Artificial Sequence: Synthetic oligonucleotide
  Antisense Strand to SEQ ID NO: 462113
acuaccaugccguaaauaa

SEQ ID NO: 462115 - RNA, 19 nt, Artificial Sequence
  Description of Artificial Sequence: Synthetic oligonucleotide
  Sense strand starting at position 19 of SEQ ID NO: 317070
aggcgaaguacuuggauga

SEQ ID NO: 462116 - RNA, 19 nt, Artificial Sequence
  Description of Artificial Sequence: Synthetic oligonucleotide
  Antisense Strand to SEQ ID NO: 462115
ucauccaaguacuucgccu

SEQ ID NO: 462117 - RNA, 19 nt, Artificial Sequence
  Description of Artificial Sequence: Synthetic oligonucleotide
  Sense strand starting at position 183 of SEQ ID NO: 317070
cgugcuaaugcauuaugua

SEQ ID NO: 462118 - RNA, 19 nt, Artificial Sequence
  Description of Artificial Sequence: Synthetic oligonucleotide
  Antisense Strand to SEQ ID NO: 462117
uacauaaugcauuagcacg

SEQ ID NO: 462119 - RNA, 19 nt, Artificial Sequence
  Description of Artificial Sequence: Synthetic oligonucleotide
  Sense strand starting at position 205 of SEQ ID NO: 317070
gcuuaaauucugcagacaa

SEQ ID NO: 462120 - RNA, 19 nt, Artificial Sequence
  Description of Artificial Sequence: Synthetic oligonucleotide
  Antisense Strand to SEQ ID NO: 462119
uugucugcagaauuuaagc

SEQ ID NO: 462121 - RNA, 19 nt, Artificial Sequence
  Description of Artificial Sequence: Synthetic oligonucleotide
  Sense strand starting at position 261 of SEQ ID NO: 317070
ugcccagucggcgcuaaua

SEQ ID NO: 462122 - RNA, 19 nt, Artificial Sequence
  Description of Artificial Sequence: Synthetic oligonucleotide
  Antisense Strand to SEQ ID NO: 462121
uauuagcgccgacugggca

SEQ ID NO: 462123 - RNA, 19 nt, Artificial Sequence
  Description of Artificial Sequence: Synthetic oligonucleotide
  Sense strand starting at position 547 of SEQ ID NO: 317070
ccacaaacgagucgaaaga

SEQ ID NO: 462124 - RNA, 19 nt, Artificial Sequence
  Description of Artificial Sequence: Synthetic oligonucleotide
  Antisense Strand to SEQ ID NO: 462123
ucuuucgacucguuugugg

SEQ ID NO: 462125 - RNA, 19 nt, Artificial Sequence
  Description of Artificial Sequence: Synthetic oligonucleotide
  Sense strand starting at position 929 of SEQ ID NO: 317070
gcuuauaaugcuuaugacu

SEQ ID NO: 462126 - RNA, 19 nt, Artificial Sequence
  Description of Artificial Sequence: Synthetic oligonucleotide
  Antisense Strand to SEQ ID NO: 462125
agucauaagcauuauaagc

SEQ ID NO: 462127 - RNA, 19 nt, Artificial Sequence
  Description of Artificial Sequence: Synthetic oligonucleotide
  Sense strand starting at position 984 of SEQ ID NO: 317070
ggagaauugcuucagggcu

SEQ ID NO: 462128 - RNA, 19 nt, Artificial Sequence
  Description of Artificial Sequence: Synthetic oligonucleotide
  Antisense Strand to SEQ ID NO: 462127
agcccugaagcaauucucc

SEQ ID NO: 462129 - RNA, 19 nt, Artificial Sequence
  Description of Artificial Sequence: Synthetic oligonucleotide
  Sense strand starting at position 1243 of SEQ ID NO: 317070
agcgauacgaggcaugaau

SEQ ID NO: 462130 - RNA, 19 nt, Artificial Sequence
  Description of Artificial Sequence: Synthetic oligonucleotide
  Antisense Strand to SEQ ID NO: 462129
auucaugccucguaucgcu

SEQ ID NO: 462131 - RNA, 19 nt, Artificial Sequence
  Description of Artificial Sequence: Synthetic oligonucleotide
  Sense strand starting at position 1328 of SEQ ID NO: 317070
uaguuucuugaaggauauu

SEQ ID NO: 462132 - RNA, 19 nt, Artificial Sequence
  Description of Artificial Sequence: Synthetic oligonucleotide
  Antisense Strand to SEQ ID NO: 462131
aauauccuucaagaaacua

SEQ ID NO: 462133 - RNA, 19 nt, Artificial Sequence
  Description of Artificial Sequence: Synthetic oligonucleotide
  Sense strand starting at position 1414 of SEQ ID NO: 317070
guggaauugccugaaagua

SEQ ID NO: 462134 - RNA, 19 nt, Artificial Sequence
  Description of Artificial Sequence: Synthetic oligonucleotide
  Antisense Strand to SEQ ID NO: 462133
uacuuucaggcaauuccac

SEQ ID NO: 462135 - RNA, 19 nt, Artificial Sequence
  Description of Artificial Sequence: Synthetic oligonucleotide
  Sense strand starting at position 1522 of SEQ ID NO: 317070
ucugaagucuucccagaac

SEQ ID NO: 462136 - RNA, 19 nt, Artificial Sequence
  Description of Artificial Sequence: Synthetic oligonucleotide
  Antisense Strand to SEQ ID NO: 462135
guucugggaagacuucaga

SEQ ID NO: 462137 - RNA, 19 nt, Artificial Sequence
  Description of Artificial Sequence: Synthetic oligonucleotide
  Sense strand starting at position 1954 of SEQ ID NO: 317070
uggagagaccucugguuuc

SEQ ID NO: 462138 - RNA, 19 nt, Artificial Sequence
  Description of Artificial Sequence: Synthetic oligonucleotide
  Antisense Strand to SEQ ID NO: 462137
gaaaccagaggucucucca

SEQ ID NO: 462139 - RNA, 19 nt, Artificial Sequence
  Description of Artificial Sequence: Synthetic oligonucleotide
  Sense strand starting at position 1982 of SEQ ID NO: 317070
uaagaaagguggcuacauu

SEQ ID NO: 462140 - RNA, 19 nt, Artificial Sequence
  Description of Artificial Sequence: Synthetic oligonucleotide
  Antisense Strand to SEQ ID NO: 462139
aauguagccaccuuucuua

SEQ ID NO: 462141 - RNA, 19 nt, Artificial Sequence
  Description of Artificial Sequence: Synthetic oligonucleotide
  Sense strand starting at position 2001 of SEQ ID NO: 317070
cugugauaacguucugcgu

SEQ ID NO: 462142 - RNA, 19 nt, Artificial Sequence
  Description of Artificial Sequence: Synthetic oligonucleotide
  Antisense Strand to SEQ ID NO: 462141
acgcagaacguuaucacag

SEQ ID NO: 462143 - RNA, 19 nt, Artificial Sequence
  Description of Artificial Sequence: Synthetic oligonucleotide
  Sense strand starting at position 2016 of SEQ ID NO: 317070
gcgugcaaacgccuuaaau

SEQ ID NO: 462144 - RNA, 19 nt, Artificial Sequence
  Description of Artificial Sequence: Synthetic oligonucleotide
  Antisense Strand to SEQ ID NO: 462143
auuuaaggcguuugcacgc

SEQ ID NO: 462145 - RNA, 19 nt, Artificial Sequence
  Description of Artificial Sequence: Synthetic oligonucleotide
  Sense strand starting at position 2083 of SEQ ID NO: 317070
ggacuuuccuggucaacac

SEQ ID NO: 462146 - RNA, 19 nt, Artificial Sequence
  Description of Artificial Sequence: Synthetic oligonucleotide
  Antisense Strand to SEQ ID NO: 462145
guguugaccaggaaagucc

SEQ ID NO: 462147 - RNA, 19 nt, Artificial Sequence
  Description of Artificial Sequence: Synthetic oligonucleotide
  Sense strand starting at position 2388 of SEQ ID NO: 317070
gagaguuucuguucuuaag

SEQ ID NO: 462148 - RNA, 19 nt, Artificial Sequence
  Description of Artificial Sequence: Synthetic oligonucleotide
  Antisense Strand to SEQ ID NO: 462147
cuuaagaacagaaacucuc

SEQ ID NO: 462149 - RNA, 19 nt, Artificial Sequence
  Description of Artificial Sequence: Synthetic oligonucleotide
  Sense strand starting at position 2390 of SEQ ID NO: 317070
gaguuucuguucuuaagaa

SEQ ID NO: 462150 - RNA, 19 nt, Artificial Sequence
  Description of Artificial Sequence: Synthetic oligonucleotide
  Antisense Strand to SEQ ID NO: 462149
uucuuaagaacagaaacuc

SEQ ID NO: 462151 - RNA, 19 nt, Artificial Sequence
  Description of Artificial Sequence: Synthetic oligonucleotide
  Sense strand starting at position 2426 of SEQ ID NO: 317070
ugcagaguuccacagaaac

SEQ ID NO: 462152 - RNA, 19 nt, Artificial Sequence
  Description of Artificial Sequence: Synthetic oligonucleotide
  Antisense Strand to SEQ ID NO: 462151
guuucuguggaacucugca

SEQ ID NO: 462153 - RNA, 19 nt, Artificial Sequence
  Description of Artificial Sequence: Synthetic oligonucleotide
  Sense strand starting at position 2453 of SEQ ID NO: 317070
cuagaaggcuaacagauuu

SEQ ID NO: 462154 - RNA, 19 nt, Artificial Sequence
  Description of Artificial Sequence: Synthetic oligonucleotide
  Antisense Strand to SEQ ID NO: 462153
aaaucuguuagccuucuag

SEQ ID NO: 462155 - RNA, 19 nt, Artificial Sequence
  Description of Artificial Sequence: Synthetic oligonucleotide
  Sense strand starting at position 2535 of SEQ ID NO: 317070
auaugaucacaguauuagu

SEQ ID NO: 462156 - RNA, 19 nt, Artificial Sequence
  Description of Artificial Sequence: Synthetic oligonucleotide
  Antisense Strand to SEQ ID NO: 462155
acuaauacugugaucauau

SEQ ID NO: 462157 - RNA, 19 nt, Artificial Sequence
  Description of Artificial Sequence: Synthetic oligonucleotide
  Sense strand starting at position 2566 of SEQ ID NO: 317070
uaauauuuacggugugcuu

SEQ ID NO: 462158 - RNA, 19 nt, Artificial Sequence
  Description of Artificial Sequence: Synthetic oligonucleotide
  Antisense Strand to SEQ ID NO: 462157
aagcacaccguaaauauua

SEQ ID NO: 462159 - RNA, 19 nt, Artificial Sequence
  Description of Artificial Sequence: Synthetic oligonucleotide
  Sense strand starting at position 2586 of SEQ ID NO: 317070
cuguguauuaggcacugaa

SEQ ID NO: 462160 - RNA, 19 nt, Artificial Sequence
  Description of Artificial Sequence: Synthetic oligonucleotide
  Antisense Strand to SEQ ID NO: 462159
uucagugccuaauacacag

SEQ ID NO: 462161 - RNA, 19 nt, Artificial Sequence
  Description of Artificial Sequence: Synthetic oligonucleotide
  Sense strand starting at position 2589 of SEQ ID NO: 317070
uguauuaggcacugaacua

SEQ ID NO: 462162 - RNA, 19 nt, Artificial Sequence
  Description of Artificial Sequence: Synthetic oligonucleotide
  Antisense Strand to SEQ ID NO: 462161
uaguucagugccuaauaca

SEQ ID NO: 462163 - RNA, 19 nt, Artificial Sequence
  Description of Artificial Sequence: Synthetic oligonucleotide
  Sense strand starting at position 2688 of SEQ ID NO: 317070
cgucuagucagugugcuaa

SEQ ID NO: 462164 - RNA, 19 nt, Artificial Sequence
  Description of Artificial Sequence: Synthetic oligonucleotide
  Antisense Strand to SEQ ID NO: 462163
uuagcacacugacuagacg

SEQ ID NO: 462165 - RNA, 19 nt, Artificial Sequence
  Description of Artificial Sequence: Synthetic oligonucleotide
  Sense strand starting at position 2977 of SEQ ID NO: 317070
ugagaauagagcugguuaa

SEQ ID NO: 462166 - RNA, 19 nt, Artificial Sequence
  Description of Artificial Sequence: Synthetic oligonucleotide
  Antisense Strand to SEQ ID NO: 462165
uuaaccagcucuauucuca

SEQ ID NO: 462167 - RNA, 19 nt, Artificial Sequence
  Description of Artificial Sequence: Synthetic oligonucleotide
  Sense strand starting at position 2978 of SEQ ID NO: 317070
gagaauagagcugguuaag

SEQ ID NO: 462168 - RNA, 19 nt, Artificial Sequence
  Description of Artificial Sequence: Synthetic oligonucleotide
  Antisense Strand to SEQ ID NO: 462167
cuuaaccagcucuauucuc

SEQ ID NO: 462169 - RNA, 19 nt, Artificial Sequence
  Description of Artificial Sequence: Synthetic oligonucleotide
  Sense strand starting at position 2981 of SEQ ID NO: 317070
aauagagcugguuaagguu

SEQ ID NO: 462170 - RNA, 19 nt, Artificial Sequence
  Description of Artificial Sequence: Synthetic oligonucleotide
  Antisense Strand to SEQ ID NO: 462169
aaccuuaaccagcucuauu

SEQ ID NO: 462171 - RNA, 19 nt, Artificial Sequence
  Description of Artificial Sequence: Synthetic oligonucleotide
  Sense strand starting at position 2993 of SEQ ID NO: 317070
uaagguucugauuaauagu

SEQ ID NO: 462172 - RNA, 19 nt, Artificial Sequence
  Description of Artificial Sequence: Synthetic oligonucleotide
  Antisense Strand to SEQ ID NO: 462171
acuauuaaucagaaccuua

SEQ ID NO: 462173 - RNA, 19 nt, Artificial Sequence
  Description of Artificial Sequence: Synthetic oligonucleotide
  Sense strand starting at position 3170 of SEQ ID NO: 317070
gagcucuaggccugagaaa

SEQ ID NO: 462174 - RNA, 19 nt, Artificial Sequence
  Description of Artificial Sequence: Synthetic oligonucleotide
  Antisense Strand to SEQ ID NO: 462173
uuucucaggccuagagcuc

SEQ ID NO: 462175 - RNA, 19 nt, Artificial Sequence
  Description of Artificial Sequence: Synthetic oligonucleotide
  Sense strand starting at position 3171 of SEQ ID NO: 317070
agcucuaggccugagaaau

SEQ ID NO: 462176 - RNA, 19 nt, Artificial Sequence
  Description of Artificial Sequence: Synthetic oligonucleotide
  Antisense Strand to SEQ ID NO: 462175
auuucucaggccuagagcu

SEQ ID NO: 462177 - RNA, 19 nt, Artificial Sequence
  Description of Artificial Sequence: Synthetic oligonucleotide
  Sense strand starting at position 3266 of SEQ ID NO: 317070
uuacuaaaucauugggcua

SEQ ID NO: 462178 - RNA, 19 nt, Artificial Sequence
  Description of Artificial Sequence: Synthetic oligonucleotide
  Antisense Strand to SEQ ID NO: 462177
uagcccaaugauuuaguaa

SEQ ID NO: 462179 - RNA, 19 nt, Artificial Sequence
  Description of Artificial Sequence: Synthetic oligonucleotide
  Sense strand starting at position 3269 of SEQ ID NO: 317070
cuaaaucauugggcuauaa

SEQ ID NO: 462180 - RNA, 19 nt, Artificial Sequence
  Description of Artificial Sequence: Synthetic oligonucleotide
  Antisense Strand to SEQ ID NO: 462179
uuauagcccaaugauuuag

SEQ ID NO: 462181 - RNA, 19 nt, Artificial Sequence
  Description of Artificial Sequence: Synthetic oligonucleotide
  Sense strand starting at position 3417 of SEQ ID NO: 317070
aaacaaaguuguuugugaa

SEQ ID NO: 462182 - RNA, 19 nt, Artificial Sequence
  Description of Artificial Sequence: Synthetic oligonucleotide
  Antisense Strand to SEQ ID NO: 462181
uucacaaacaacuuuguuu

SEQ ID NO: 462183 - RNA, 19 nt, Artificial Sequence
  Description of Artificial Sequence: Synthetic oligonucleotide
  Sense strand starting at position 3418 of SEQ ID NO: 317070
aacaaaguuguuugugaac

SEQ ID NO: 462184 - RNA, 19 nt, Artificial Sequence
  Description of Artificial Sequence: Synthetic oligonucleotide
  Antisense Strand to SEQ ID NO: 462183
guucacaaacaacuuuguu

SEQ ID NO: 462185 - RNA, 19 nt, Artificial Sequence
  Description of Artificial Sequence: Synthetic oligonucleotide
  Sense strand starting at position 3507 of SEQ ID NO: 317070
guguuaggccaauagggau

SEQ ID NO: 462186 - RNA, 19 nt, Artificial Sequence
  Description of Artificial Sequence: Synthetic oligonucleotide
  Antisense Strand to SEQ ID NO: 462185
aucccuauuggccuaacac

SEQ ID NO: 462187 - RNA, 19 nt, Artificial Sequence
  Description of Artificial Sequence: Synthetic oligonucleotide
  Sense strand starting at position 3602 of SEQ ID NO: 317070
gccuauugucuuuagaaag

SEQ ID NO: 462188 - RNA, 19 nt, Artificial Sequence
  Description of Artificial Sequence: Synthetic oligonucleotide
  Antisense Strand to SEQ ID NO: 462187
cuuucuaaagacaauaggc

SEQ ID NO: 462189 - RNA, 19 nt, Artificial Sequence
  Description of Artificial Sequence: Synthetic oligonucleotide
  Sense strand starting at position 3656 of SEQ ID NO: 317070
guuguugucaaugcuguuu

SEQ ID NO: 462190 - RNA, 19 nt, Artificial Sequence
  Description of Artificial Sequence: Synthetic oligonucleotide
  Antisense Strand to SEQ ID NO: 462189
aaacagcauugacaacaac

SEQ ID NO: 462191 - RNA, 19 nt, Artificial Sequence
  Description of Artificial Sequence: Synthetic oligonucleotide
  Sense strand starting at position 3803 of SEQ ID NO: 317070
cugugaugcagagguagga

SEQ ID NO: 462192 - RNA, 19 nt, Artificial Sequence
  Description of Artificial Sequence: Synthetic oligonucleotide
  Antisense Strand to SEQ ID NO: 462191
uccuaccucugcaucacag

SEQ ID NO: 462193 - RNA, 19 nt, Artificial Sequence
  Description of Artificial Sequence: Synthetic oligonucleotide
  Sense strand starting at position 3842 of SEQ ID NO: 317070
gaguuaagggccuggaagu

SEQ ID NO: 462194 - RNA, 19 nt, Artificial Sequence
  Description of Artificial Sequence: Synthetic oligonucleotide
  Antisense Strand to SEQ ID NO: 462193
acuuccaggcccuuaacuc

SEQ ID NO: 462195 - RNA, 19 nt, Artificial Sequence
  Description of Artificial Sequence: Synthetic oligonucleotide
  Sense strand starting at position 75 of SEQ ID NO: 317071
auggguaaaggaugcuuaa

SEQ ID NO: 462196 - RNA, 19 nt, Artificial Sequence
  Description of Artificial Sequence: Synthetic oligonucleotide
  Antisense Strand to SEQ ID NO: 462195
uuaagcauccuuuacccau

SEQ ID NO: 462197 - RNA, 19 nt, Artificial Sequence
  Description of Artificial Sequence: Synthetic oligonucleotide
  Sense strand starting at position 78 of SEQ ID NO: 317071
gguaaaggaugcuuaacaa

SEQ ID NO: 462198 - RNA, 19 nt, Artificial Sequence
  Description of Artificial Sequence: Synthetic oligonucleotide
  Antisense Strand to SEQ ID NO: 462197
uuguuaagcauccuuuacc

SEQ ID NO: 462199 - RNA, 19 nt, Artificial Sequence
  Description of Artificial Sequence: Synthetic oligonucleotide
  Sense strand starting at position 200 of SEQ ID NO: 317071
ggcccucuuacugggaauu

SEQ ID NO: 462200 - RNA, 19 nt, Artificial Sequence
  Description of Artificial Sequence: Synthetic oligonucleotide
  Antisense Strand to SEQ ID NO: 462199
aauucccaguaagagggcc

SEQ ID NO: 462201 - RNA, 19 nt, Artificial Sequence
  Description of Artificial Sequence: Synthetic oligonucleotide
  Sense strand starting at position 276 of SEQ ID NO: 317071
acugcaugguuccuuauuu

SEQ ID NO: 462202 - RNA, 19 nt, Artificial Sequence
  Description of Artificial Sequence: Synthetic oligonucleotide
  Antisense Strand to SEQ ID NO: 462201
aaauaaggaaccaugcagu

SEQ ID NO: 462203 - RNA, 19 nt, Artificial Sequence
  Description of Artificial Sequence: Synthetic oligonucleotide
  Sense strand starting at position 299 of SEQ ID NO: 317071
ggcacacacuuuguuuaua

SEQ ID NO: 462204 - RNA, 19 nt, Artificial Sequence
  Description of Artificial Sequence: Synthetic oligonucleotide
  Antisense Strand to SEQ ID NO: 462203
uauaaacaaagugugugcc

SEQ ID NO: 462205 - RNA, 19 nt, Artificial Sequence
  Description of Artificial Sequence: Synthetic oligonucleotide
  Sense strand starting at position 361 of SEQ ID NO: 317071
ugaaauucuugguuaaagu

SEQ ID NO: 462206 - RNA, 19 nt, Artificial Sequence
  Description of Artificial Sequence: Synthetic oligonucleotide
  Antisense Strand to SEQ ID NO: 462205
acuuuaaccaagaauuuca

SEQ ID NO: 462207 - RNA, 19 nt, Artificial Sequence
  Description of Artificial Sequence: Synthetic oligonucleotide
  Sense strand starting at position 362 of SEQ ID NO: 317071
gaaauucuugguuaaaguu

SEQ ID NO: 462208 - RNA, 19 nt, Artificial Sequence
  Description of Artificial Sequence: Synthetic oligonucleotide
  Antisense Strand to SEQ ID NO: 462207
aacuuuaaccaagaauuuc

SEQ ID NO: 462209 - RNA, 19 nt, Artificial Sequence
  Description of Artificial Sequence: Synthetic oligonucleotide
  Sense strand starting at position 390 of SEQ ID NO: 317071
ggugacugauuccuuguau

SEQ ID NO: 462210 - RNA, 19 nt, Artificial Sequence
  Description of Artificial Sequence: Synthetic oligonucleotide
  Antisense Strand to SEQ ID NO: 462209
auacaaggaaucagucacc

SEQ ID NO: 462211 - RNA, 19 nt, Artificial Sequence
  Description of Artificial Sequence: Synthetic oligonucleotide
  Sense strand starting at position 391 of SEQ ID NO: 317071
gugacugauuccuuguauc

SEQ ID NO: 462212 - RNA, 19 nt, Artificial Sequence
  Description of Artificial Sequence: Synthetic oligonucleotide
  Antisense Strand to SEQ ID NO: 462211
gauacaaggaaucagucac

SEQ ID NO: 462213 - RNA, 19 nt, Artificial Sequence
  Description of Artificial Sequence: Synthetic oligonucleotide
  Sense strand starting at position 426 of SEQ ID NO: 317071
uugcccuuugucguuugaa

SEQ ID NO: 462214 - RNA, 19 nt, Artificial Sequence
  Description of Artificial Sequence: Synthetic oligonucleotide
  Antisense Strand to SEQ ID NO: 462213
uucaaacgacaaagggcaa

SEQ ID NO: 462215 - RNA, 19 nt, Artificial Sequence
  Description of Artificial Sequence: Synthetic oligonucleotide
  Sense strand starting at position 428 of SEQ ID NO: 317071
gcccuuugucguuugaacu

SEQ ID NO: 462216 - RNA, 19 nt, Artificial Sequence
  Description of Artificial Sequence: Synthetic oligonucleotide
  Antisense Strand to SEQ ID NO: 462215
aguucaaacgacaaagggc

SEQ ID NO: 462217 - RNA, 19 nt, Artificial Sequence
  Description of Artificial Sequence: Synthetic oligonucleotide
  Sense strand starting at position 465 of SEQ ID NO: 317071
ugaugacuucugcagcaau

SEQ ID NO: 462218 - RNA, 19 nt, Artificial Sequence
  Description of Artificial Sequence: Synthetic oligonucleotide
  Antisense Strand to SEQ ID NO: 462217
auugcugcagaagucauca

SEQ ID NO: 462219 - RNA, 19 nt, Artificial Sequence
  Description of Artificial Sequence: Synthetic oligonucleotide
  Sense strand starting at position 468 of SEQ ID NO: 317071
ugacuucugcagcaauacu

SEQ ID NO: 462220 - RNA, 19 nt, Artificial Sequence
  Description of Artificial Sequence: Synthetic oligonucleotide
  Antisense Strand to SEQ ID NO: 462219
aguauugcugcagaaguca

SEQ ID NO: 462221 - RNA, 19 nt, Artificial Sequence
  Description of Artificial Sequence: Synthetic oligonucleotide
  Sense strand starting at position 547 of SEQ ID NO: 317071
cgagauauccugcaaggca

SEQ ID NO: 462222 - RNA, 19 nt, Artificial Sequence
  Description of Artificial Sequence: Synthetic oligonucleotide
  Antisense Strand to SEQ ID NO: 462221
ugccuugcaggauaucucg

SEQ ID NO: 462223 - RNA, 19 nt, Artificial Sequence
  Description of Artificial Sequence: Synthetic oligonucleotide
  Sense strand starting at position 729 of SEQ ID NO: 317071
cgggaccauccuugcuaau

SEQ ID NO: 462224 - RNA, 19 nt, Artificial Sequence
  Description of Artificial Sequence: Synthetic oligonucleotide
  Antisense Strand to SEQ ID NO: 462223
auuagcaaggauggucccg

SEQ ID NO: 462225 - RNA, 19 nt, Artificial Sequence
  Description of Artificial Sequence: Synthetic oligonucleotide
  Sense strand starting at position 731 of SEQ ID NO: 317071
ggaccauccuugcuaauac

SEQ ID NO: 462226 - RNA, 19 nt, Artificial Sequence
  Description of Artificial Sequence: Synthetic oligonucleotide
  Antisense Strand to SEQ ID NO: 462225
guauuagcaaggauggucc

SEQ ID NO: 462227 - RNA, 19 nt, Artificial Sequence
  Description of Artificial Sequence: Synthetic oligonucleotide
  Sense strand starting at position 2040 of SEQ ID NO: 317071
ccggaaagcucacugauug

SEQ ID NO: 462228 - RNA, 19 nt, Artificial Sequence
  Description of Artificial Sequence: Synthetic oligonucleotide
  Antisense Strand to SEQ ID NO: 462227
caaucagugagcuuuccgg

SEQ ID NO: 462229 - RNA, 19 nt, Artificial Sequence
  Description of Artificial Sequence: Synthetic oligonucleotide
  Sense strand starting at position 2143 of SEQ ID NO: 317071
caggguucugcacagugau

SEQ ID NO: 462230 - RNA, 19 nt, Artificial Sequence
  Description of Artificial Sequence: Synthetic oligonucleotide
  Antisense Strand to SEQ ID NO: 462229
aucacugugcagaacccug

SEQ ID NO: 462231 - RNA, 19 nt, Artificial Sequence
  Description of Artificial Sequence: Synthetic oligonucleotide
  Sense strand starting at position 2149 of SEQ ID NO: 317071
ucugcacagugauucuuua

SEQ ID NO: 462232 - RNA, 19 nt, Artificial Sequence
  Description of Artificial Sequence: Synthetic oligonucleotide
  Antisense Strand to SEQ ID NO: 462231
uaaagaaucacugugcaga

SEQ ID NO: 462233 - RNA, 19 nt, Artificial Sequence
  Description of Artificial Sequence: Synthetic oligonucleotide
  Sense strand starting at position 2161 of SEQ ID NO: 317071
uucuuuaucgccgcgggau

SEQ ID NO: 462234 - RNA, 19 nt, Artificial Sequence
  Description of Artificial Sequence: Synthetic oligonucleotide
  Antisense Strand to SEQ ID NO: 462233
aucccgcggcgauaaagaa

SEQ ID NO: 462235 - RNA, 19 nt, Artificial Sequence
  Description of Artificial Sequence: Synthetic oligonucleotide
  Sense strand starting at position 2173 of SEQ ID NO: 317071
gcgggaucccgguugcacu

SEQ ID NO: 462236 - RNA, 19 nt, Artificial Sequence
  Description of Artificial Sequence: Synthetic oligonucleotide
  Antisense Strand to SEQ ID NO: 462235
agugcaaccgggaucccgc

SEQ ID NO: 462237 - RNA, 19 nt, Artificial Sequence
  Description of Artificial Sequence: Synthetic oligonucleotide
  Sense strand starting at position 2294 of SEQ ID NO: 317071
gguagucuucgguggaaag

SEQ ID NO: 462238 - RNA, 19 nt, Artificial Sequence
  Description of Artificial Sequence: Synthetic oligonucleotide
  Antisense Strand to SEQ ID NO: 462237
cuuuccaccgaagacuacc

SEQ ID NO: 462239 - RNA, 19 nt, Artificial Sequence
  Description of Artificial Sequence: Synthetic oligonucleotide
  Sense strand starting at position 2320 of SEQ ID NO: 317071
gggagagauuucugaguug

SEQ ID NO: 462240 - RNA, 19 nt, Artificial Sequence
  Description of Artificial Sequence: Synthetic oligonucleotide
  Antisense Strand to SEQ ID NO: 462239
caacucagaaaucucuccc

SEQ ID NO: 462241 - RNA, 19 nt, Artificial Sequence
  Description of Artificial Sequence: Synthetic oligonucleotide
  Sense strand starting at position 2369 of SEQ ID NO: 317071
gggacuucggcuuaauaaa

SEQ ID NO: 462242 - RNA, 19 nt, Artificial Sequence
  Description of Artificial Sequence: Synthetic oligonucleotide
  Antisense Strand to SEQ ID NO: 462241
uuuauuaagccgaaguccc

SEQ ID NO: 462243 - RNA, 19 nt, Artificial Sequence
  Description of Artificial Sequence: Synthetic oligonucleotide
  Sense strand starting at position 2392 of SEQ ID NO: 317071
uugcauuuacuuugcaaag

SEQ ID NO: 462244 - RNA, 19 nt, Artificial Sequence
  Description of Artificial Sequence: Synthetic oligonucleotide
  Antisense Strand to SEQ ID NO: 462243
cuuugcaaaguaaaugcaa

SEQ ID NO: 462245 - RNA, 19 nt, Artificial Sequence
  Description of Artificial Sequence: Synthetic oligonucleotide
  Sense strand starting at position 2393 of SEQ ID NO: 317071
ugcauuuacuuugcaaagu

SEQ ID NO: 462246 - RNA, 19 nt, Artificial Sequence
  Description of Artificial Sequence: Synthetic oligonucleotide
  Antisense Strand to SEQ ID NO: 462245
acuuugcaaaguaaaugca

SEQ ID NO: 462247 - RNA, 19 nt, Artificial Sequence
  Description of Artificial Sequence: Synthetic oligonucleotide
  Sense strand starting at position 2428 of SEQ ID NO: 317071
ccugcagauucuuuccuga

SEQ ID NO: 462248 - RNA, 19 nt, Artificial Sequence
  Description of Artificial Sequence: Synthetic oligonucleotide
  Antisense Strand to SEQ ID NO: 462247
ucaggaaagaaucugcagg

SEQ ID NO: 462249 - RNA, 19 nt, Artificial Sequence
  Description of Artificial Sequence: Synthetic oligonucleotide
  Sense strand starting at position 2433 of SEQ ID NO: 317071
agauucuuuccugaccgaa

SEQ ID NO: 462250 - RNA, 19 nt, Artificial Sequence
  Description of Artificial Sequence: Synthetic oligonucleotide
  Antisense Strand to SEQ ID NO: 462249
uucggucaggaaagaaucu

SEQ ID NO: 462251 - RNA, 19 nt, Artificial Sequence
  Description of Artificial Sequence: Synthetic oligonucleotide
  Sense strand starting at position 2435 of SEQ ID NO: 317071
auucuuuccugaccgaauc

SEQ ID NO: 462252 - RNA, 19 nt, Artificial Sequence
  Description of Artificial Sequence: Synthetic oligonucleotide
  Antisense Strand to SEQ ID NO: 462251
gauucggucaggaaagaau

SEQ ID NO: 462253 - RNA, 19 nt, Artificial Sequence
  Description of Artificial Sequence: Synthetic oligonucleotide
  Sense strand starting at position 3149 of SEQ ID NO: 317071
aggcgaaguacuuggauga

SEQ ID NO: 462254 - RNA, 19 nt, Artificial Sequence
  Description of Artificial Sequence: Synthetic oligonucleotide
  Antisense Strand to SEQ ID NO: 462253
ucauccaaguacuucgccu

SEQ ID NO: 462255 - RNA, 19 nt, Artificial Sequence
  Description of Artificial Sequence: Synthetic oligonucleotide
  Sense strand starting at position 3164 of SEQ ID NO: 317071
augagaugcuaaguucuuu

SEQ ID NO: 462256 - RNA, 19 nt, Artificial Sequence
  Description of Artificial Sequence: Synthetic oligonucleotide
  Antisense Strand to SEQ ID NO: 462255
aaagaacuuagcaucucau

SEQ ID NO: 462257 - RNA, 19 nt, Artificial Sequence
  Description of Artificial Sequence: Synthetic oligonucleotide
  Sense strand starting at position 3313 of SEQ ID NO: 317071
cgugcuaaugcauuaugua

SEQ ID NO: 462258 - RNA, 19 nt, Artificial Sequence
  Description of Artificial Sequence: Synthetic oligonucleotide
  Antisense Strand to SEQ ID NO: 462257
uacauaaugcauuagcacg

SEQ ID NO: 462259 - RNA, 19 nt, Artificial Sequence
  Description of Artificial Sequence: Synthetic oligonucleotide
  Sense strand starting at position 3314 of SEQ ID NO: 317071
gugcuaaugcauuauguaa

SEQ ID NO: 462260 - RNA, 19 nt, Artificial Sequence
  Description of Artificial Sequence: Synthetic oligonucleotide
  Antisense Strand to SEQ ID NO: 462259
uuacauaaugcauuagcac

SEQ ID NO: 462261 - RNA, 19 nt, Artificial Sequence
  Description of Artificial Sequence: Synthetic oligonucleotide
  Sense strand starting at position 3334 of SEQ ID NO: 317071
ugcuuaaauucugcagaca

SEQ ID NO: 462262 - RNA, 19 nt, Artificial Sequence
  Description of Artificial Sequence: Synthetic oligonucleotide
  Antisense Strand to SEQ ID NO: 462261
ugucugcagaauuuaagca

SEQ ID NO: 462263 - RNA, 19 nt, Artificial Sequence
  Description of Artificial Sequence: Synthetic oligonucleotide
  Sense strand starting at position 3335 of SEQ ID NO: 317071
gcuuaaauucugcagacaa

SEQ ID NO: 462264 - RNA, 19 nt, Artificial Sequence
  Description of Artificial Sequence: Synthetic oligonucleotide
  Antisense Strand to SEQ ID NO: 462263
uugucugcagaauuuaagc

SEQ ID NO: 462265 - RNA, 19 nt, Artificial Sequence
  Description of Artificial Sequence: Synthetic oligonucleotide
  Sense strand starting at position 3391 of SEQ ID NO: 317071
ugcccagucggcgcuaaua

SEQ ID NO: 462266 - RNA, 19 nt, Artificial Sequence
  Description of Artificial Sequence: Synthetic oligonucleotide
  Antisense Strand to SEQ ID NO: 462265
uauuagcgccgacugggca

SEQ ID NO: 462267 - RNA, 19 nt, Artificial Sequence
  Description of Artificial Sequence: Synthetic oligonucleotide
  Sense strand starting at position 3439 of SEQ ID NO: 317071
gaggguacucugcggauga

SEQ ID NO: 462268 - RNA, 19 nt, Artificial Sequence
  Description of Artificial Sequence: Synthetic oligonucleotide
  Antisense Strand to SEQ ID NO: 462267
ucauccgcagaguacccuc

SEQ ID NO: 462269 - RNA, 19 nt, Artificial Sequence
  Description of Artificial Sequence: Synthetic oligonucleotide
  Sense strand starting at position 3632 of SEQ ID NO: 317071
acgauugcgcaucacauua

SEQ ID NO: 462270 - RNA, 19 nt, Artificial Sequence
  Description of Artificial Sequence: Synthetic oligonucleotide
  Antisense Strand to SEQ ID NO: 462269
uaaugugaugcgcaaucgu

SEQ ID NO: 462271 - RNA, 19 nt, Artificial Sequence
  Description of Artificial Sequence: Synthetic oligonucleotide
  Sense strand starting at position 3677 of SEQ ID NO: 317071
ccacaaacgagucgaaaga

SEQ ID NO: 462272 - RNA, 19 nt, Artificial Sequence
  Description of Artificial Sequence: Synthetic oligonucleotide
  Antisense Strand to SEQ ID NO: 462271
ucuuucgacucguuugugg

SEQ ID NO: 462273 - RNA, 19 nt, Artificial Sequence
  Description of Artificial Sequence: Synthetic oligonucleotide
  Sense strand starting at position 3880 of SEQ ID NO: 317071
gauagaccucgguguguac

SEQ ID NO: 462274 - RNA, 19 nt, Artificial Sequence
  Description of Artificial Sequence: Synthetic oligonucleotide
  Antisense Strand to SEQ ID NO: 462273
guacacaccgaggucuauc

SEQ ID NO: 462275 - RNA, 19 nt, Artificial Sequence
  Description of Artificial Sequence: Synthetic oligonucleotide
  Sense strand starting at position 64 of SEQ ID NO: 317072
gcaagagaggcuggaauaa

SEQ ID NO: 462276 - RNA, 19 nt, Artificial Sequence
  Description of Artificial Sequence: Synthetic oligonucleotide
  Antisense Strand to SEQ ID NO: 462275
uuauuccagccucucuugc

SEQ ID NO: 462277 - RNA, 19 nt, Artificial Sequence
  Description of Artificial Sequence: Synthetic oligonucleotide
  Sense strand starting at position 312 of SEQ ID NO: 317072
agcccuauacagugaugca

SEQ ID NO: 462278 - RNA, 19 nt, Artificial Sequence
  Description of Artificial Sequence: Synthetic oligonucleotide
  Antisense Strand to SEQ ID NO: 462277
ugcaucacuguauagggcu

SEQ ID NO: 462279 - RNA, 19 nt, Artificial Sequence
  Description of Artificial Sequence: Synthetic oligonucleotide
  Sense strand starting at position 319 of SEQ ID NO: 317072
uacagugaugcaugccuau

SEQ ID NO: 462280 - RNA, 19 nt, Artificial Sequence
  Description of Artificial Sequence: Synthetic oligonucleotide
  Antisense Strand to SEQ ID NO: 462279
auaggcaugcaucacugua

SEQ ID NO: 462281 - RNA, 19 nt, Artificial Sequence
  Description of Artificial Sequence: Synthetic oligonucleotide
  Sense strand starting at position 371 of SEQ ID NO: 317072
auagcuugaacuuaggagu

SEQ ID NO: 462282 - RNA, 19 nt, Artificial Sequence
  Description of Artificial Sequence: Synthetic oligonucleotide
  Antisense Strand to SEQ ID NO: 462281
acuccuaaguucaagcuau

SEQ ID NO: 462283 - RNA, 19 nt, Artificial Sequence
  Description of Artificial Sequence: Synthetic oligonucleotide
  Sense strand starting at position 502 of SEQ ID NO: 317072
gcuuuccugcuagacauga

SEQ ID NO: 462284 - RNA, 19 nt, Artificial Sequence
  Description of Artificial Sequence: Synthetic oligonucleotide
  Antisense Strand to SEQ ID NO: 462283
ucaugucuagcaggaaagc

SEQ ID NO: 462285 - RNA, 19 nt, Artificial Sequence
  Description of Artificial Sequence: Synthetic oligonucleotide
  Sense strand starting at position 690 of SEQ ID NO: 317072
gcagcaaauuaaucuugca

SEQ ID NO: 462286 - RNA, 19 nt, Artificial Sequence
  Description of Artificial Sequence: Synthetic oligonucleotide
  Antisense Strand to SEQ ID NO: 462285
ugcaagauuaauuugcugc

SEQ ID NO: 462287 - RNA, 19 nt, Artificial Sequence
  Description of Artificial Sequence: Synthetic oligonucleotide
  Sense strand starting at position 831 of SEQ ID NO: 317072
cgcagacuuaggcauacaa

SEQ ID NO: 462288 - RNA, 19 nt, Artificial Sequence
  Description of Artificial Sequence: Synthetic oligonucleotide
  Antisense Strand to SEQ ID NO: 462287
uuguaugccuaagucugcg

SEQ ID NO: 462289 - RNA, 19 nt, Artificial Sequence
  Description of Artificial Sequence: Synthetic oligonucleotide
  Sense strand starting at position 868 of SEQ ID NO: 317072
agagauaacuccuccgcua

SEQ ID NO: 462290 - RNA, 19 nt, Artificial Sequence
  Description of Artificial Sequence: Synthetic oligonucleotide
  Antisense Strand to SEQ ID NO: 462289
uagcggaggaguuaucucu

SEQ ID NO: 462291 - RNA, 19 nt, Artificial Sequence
  Description of Artificial Sequence: Synthetic oligonucleotide
  Sense strand starting at position 870 of SEQ ID NO: 317072
agauaacuccuccgcuaga

SEQ ID NO: 462292 - RNA, 19 nt, Artificial Sequence
  Description of Artificial Sequence: Synthetic oligonucleotide
  Antisense Strand to SEQ ID NO: 462291
ucuagcggaggaguuaucu

SEQ ID NO: 462293 - RNA, 19 nt, Artificial Sequence
  Description of Artificial Sequence: Synthetic oligonucleotide
  Sense strand starting at position 962 of SEQ ID NO: 317072
uggaucaucuaaguuugca

SEQ ID NO: 462294 - RNA, 19 nt, Artificial Sequence
  Description of Artificial Sequence: Synthetic oligonucleotide
  Antisense Strand to SEQ ID NO: 462293
ugcaaacuuagaugaucca

SEQ ID NO: 462295 - RNA, 19 nt, Artificial Sequence
  Description of Artificial Sequence: Synthetic oligonucleotide
  Sense strand starting at position 1061 of SEQ ID NO: 317072
ucaccaucagugugaguaa

SEQ ID NO: 462296 - RNA, 19 nt, Artificial Sequence
  Description of Artificial Sequence: Synthetic oligonucleotide
  Antisense Strand to SEQ ID NO: 462295
uuacucacacugaugguga

SEQ ID NO: 462297 - RNA, 19 nt, Artificial Sequence
  Description of Artificial Sequence: Synthetic oligonucleotide
  Sense strand starting at position 1150 of SEQ ID NO: 317072
auggacuuaccagguuaaa

SEQ ID NO: 462298 - RNA, 19 nt, Artificial Sequence
  Description of Artificial Sequence: Synthetic oligonucleotide
  Antisense Strand to SEQ ID NO: 462297
uuuaaccugguaaguccau

SEQ ID NO: 462299 - RNA, 19 nt, Artificial Sequence
  Description of Artificial Sequence: Synthetic oligonucleotide
  Sense strand starting at position 1357 of SEQ ID NO: 317072
gauugucuucgcuagccau

SEQ ID NO: 462300 - RNA, 19 nt, Artificial Sequence
  Description of Artificial Sequence: Synthetic oligonucleotide
  Antisense Strand to SEQ ID NO: 462299
auggcuagcgaagacaauc

SEQ ID NO: 462301 - RNA, 19 nt, Artificial Sequence
  Description of Artificial Sequence: Synthetic oligonucleotide
  Sense strand starting at position 1375 of SEQ ID NO: 317072
uugcuagcucacgauaaag

SEQ ID NO: 462302 - RNA, 19 nt, Artificial Sequence
  Description of Artificial Sequence: Synthetic oligonucleotide
  Antisense Strand to SEQ ID NO: 462301
cuuuaucgugagcuagcaa

SEQ ID NO: 462303 - RNA, 19 nt, Artificial Sequence
  Description of Artificial Sequence: Synthetic oligonucleotide
  Sense strand starting at position 1377 of SEQ ID NO: 317072
gcuagcucacgauaaagga

SEQ ID NO: 462304 - RNA, 19 nt, Artificial Sequence
  Description of Artificial Sequence: Synthetic oligonucleotide
  Antisense Strand to SEQ ID NO: 462303
uccuuuaucgugagcuagc

SEQ ID NO: 462305 - RNA, 19 nt, Artificial Sequence
  Description of Artificial Sequence: Synthetic oligonucleotide
  Sense strand starting at position 1615 of SEQ ID NO: 317072
uguuaaauaggcuagguuu

SEQ ID NO: 462306 - RNA, 19 nt, Artificial Sequence
  Description of Artificial Sequence: Synthetic oligonucleotide
  Antisense Strand to SEQ ID NO: 462305
aaaccuagccuauuuaaca

SEQ ID NO: 462307 - RNA, 19 nt, Artificial Sequence
  Description of Artificial Sequence: Synthetic oligonucleotide
  Sense strand starting at position 1665 of SEQ ID NO: 317072
auaguuauugucggucaag

SEQ ID NO: 462308 - RNA, 19 nt, Artificial Sequence
  Description of Artificial Sequence: Synthetic oligonucleotide
  Antisense Strand to SEQ ID NO: 462307
cuugaccgacaauaacuau

SEQ ID NO: 462309 - RNA, 19 nt, Artificial Sequence
  Description of Artificial Sequence: Synthetic oligonucleotide
  Sense strand starting at position 1668 of SEQ ID NO: 317072
guuauugucggucaaguaa

SEQ ID NO: 462310 - RNA, 19 nt, Artificial Sequence
  Description of Artificial Sequence: Synthetic oligonucleotide
  Antisense Strand to SEQ ID NO: 462309
uuacuugaccgacaauaac

SEQ ID NO: 462311 - RNA, 19 nt, Artificial Sequence
  Description of Artificial Sequence: Synthetic oligonucleotide
  Sense strand starting at position 1903 of SEQ ID NO: 317072
agcuaucacagagguagaa

SEQ ID NO: 462312 - RNA, 19 nt, Artificial Sequence
  Description of Artificial Sequence: Synthetic oligonucleotide
  Antisense Strand to SEQ ID NO: 462311
uucuaccucugugauagcu

SEQ ID NO: 462313 - RNA, 19 nt, Artificial Sequence
  Description of Artificial Sequence: Synthetic oligonucleotide
  Sense strand starting at position 1915 of SEQ ID NO: 317072
gguagaaaguucuuccuca

SEQ ID NO: 462314 - RNA, 19 nt, Artificial Sequence
  Description of Artificial Sequence: Synthetic oligonucleotide
  Antisense Strand to SEQ ID NO: 462313
ugaggaagaacuuucuacc

SEQ ID NO: 462315 - RNA, 19 nt, Artificial Sequence
  Description of Artificial Sequence: Synthetic oligonucleotide
  Sense strand starting at position 1916 of SEQ ID NO: 317072
guagaaaguucuuccucac

SEQ ID NO: 462316 - RNA, 19 nt, Artificial Sequence
  Description of Artificial Sequence: Synthetic oligonucleotide
  Antisense Strand to SEQ ID NO: 462315
gugaggaagaacuuucuac

SEQ ID NO: 462317 - RNA, 19 nt, Artificial Sequence
  Description of Artificial Sequence: Synthetic oligonucleotide
  Sense strand starting at position 1922 of SEQ ID NO: 317072
aguucuuccucacccagau

SEQ ID NO: 462318 - RNA, 19 nt, Artificial Sequence
  Description of Artificial Sequence: Synthetic oligonucleotide
  Antisense Strand to SEQ ID NO: 462317
aucugggugaggaagaacu

SEQ ID NO: 462319 - RNA, 19 nt, Artificial Sequence
  Description of Artificial Sequence: Synthetic oligonucleotide
  Sense strand starting at position 2028 of SEQ ID NO: 317072
ggcggugauuauucuaaau

SEQ ID NO: 462320 - RNA, 19 nt, Artificial Sequence
  Description of Artificial Sequence: Synthetic oligonucleotide
  Antisense Strand to SEQ ID NO: 462319
auuuagaauaaucaccgcc

SEQ ID NO: 462321 - RNA, 19 nt, Artificial Sequence
  Description of Artificial Sequence: Synthetic oligonucleotide
  Sense strand starting at position 2294 of SEQ ID NO: 317072
ugcgcucagccuuugcaaa

SEQ ID NO: 462322 - RNA, 19 nt, Artificial Sequence
  Description of Artificial Sequence: Synthetic oligonucleotide
  Antisense Strand to SEQ ID NO: 462321
uuugcaaaggcugagcgca

SEQ ID NO: 462323 - RNA, 19 nt, Artificial Sequence
  Description of Artificial Sequence: Synthetic oligonucleotide
  Sense strand starting at position 2356 of SEQ ID NO: 317072
gcgaguggugaggaugcua

SEQ ID NO: 462324 - RNA, 19 nt, Artificial Sequence
  Description of Artificial Sequence: Synthetic oligonucleotide
  Antisense Strand to SEQ ID NO: 462323
uagcauccucaccacucgc

SEQ ID NO: 462325 - RNA, 19 nt, Artificial Sequence
  Description of Artificial Sequence: Synthetic oligonucleotide
  Sense strand starting at position 2719 of SEQ ID NO: 317072
ggaggugcuucugccaagu

SEQ ID NO: 462326 - RNA, 19 nt, Artificial Sequence
  Description of Artificial Sequence: Synthetic oligonucleotide
  Antisense Strand to SEQ ID NO: 462325
acuuggcagaagcaccucc

SEQ ID NO: 462327 - RNA, 19 nt, Artificial Sequence
  Description of Artificial Sequence: Synthetic oligonucleotide
  Sense strand starting at position 2821 of SEQ ID NO: 317072
cuaggugucucauuggacu

SEQ ID NO: 462328 - RNA, 19 nt, Artificial Sequence
  Description of Artificial Sequence: Synthetic oligonucleotide
  Antisense Strand to SEQ ID NO: 462327
aguccaaugagacaccuag

SEQ ID NO: 462329 - RNA, 19 nt, Artificial Sequence
  Description of Artificial Sequence: Synthetic oligonucleotide
  Sense strand starting at position 2978 of SEQ ID NO: 317072
ggcggagacuuggagauuu

SEQ ID NO: 462330 - RNA, 19 nt, Artificial Sequence
  Description of Artificial Sequence: Synthetic oligonucleotide
  Antisense Strand to SEQ ID NO: 462329
aaaucuccaagucuccgcc

SEQ ID NO: 462331 - RNA, 19 nt, Artificial Sequence
  Description of Artificial Sequence: Synthetic oligonucleotide
  Sense strand starting at position 3046 of SEQ ID NO: 317072
gaccgagucgacgaggaau

SEQ ID NO: 462332 - RNA, 19 nt, Artificial Sequence
  Description of Artificial Sequence: Synthetic oligonucleotide
  Antisense Strand to SEQ ID NO: 462331
auuccucgucgacucgguc

SEQ ID NO: 462333 - RNA, 19 nt, Artificial Sequence
  Description of Artificial Sequence: Synthetic oligonucleotide
  Sense strand starting at position 3064 of SEQ ID NO: 317072
ugggaaagauuccuugcuu

SEQ ID NO: 462334 - RNA, 19 nt, Artificial Sequence
  Description of Artificial Sequence: Synthetic oligonucleotide
  Antisense Strand to SEQ ID NO: 462333
aagcaaggaaucuuuccca

SEQ ID NO: 462335 - RNA, 19 nt, Artificial Sequence
  Description of Artificial Sequence: Synthetic oligonucleotide
  Sense strand starting at position 3065 of SEQ ID NO: 317072
gggaaagauuccuugcuuu

SEQ ID NO: 462336 - RNA, 19 nt, Artificial Sequence
  Description of Artificial Sequence: Synthetic oligonucleotide
  Antisense Strand to SEQ ID NO: 462335
aaagcaaggaaucuuuccc

SEQ ID NO: 462337 - RNA, 19 nt, Artificial Sequence
  Description of Artificial Sequence: Synthetic oligonucleotide
  Sense strand starting at position 3284 of SEQ ID NO: 317072
acagauagguccucauacu

SEQ ID NO: 462338 - RNA, 19 nt, Artificial Sequence
  Description of Artificial Sequence: Synthetic oligonucleotide
  Antisense Strand to SEQ ID NO: 462337
aguaugaggaccuaucugu

SEQ ID NO: 462339 - RNA, 19 nt, Artificial Sequence
  Description of Artificial Sequence: Synthetic oligonucleotide
  Sense strand starting at position 3323 of SEQ ID NO: 317072
cgcuauuaacaguaaacca

SEQ ID NO: 462340 - RNA, 19 nt, Artificial Sequence
  Description of Artificial Sequence: Synthetic oligonucleotide
  Antisense Strand to SEQ ID NO: 462339
ugguuuacuguuaauagcg

SEQ ID NO: 462341 - RNA, 19 nt, Artificial Sequence
  Description of Artificial Sequence: Synthetic oligonucleotide
  Sense strand starting at position 3392 of SEQ ID NO: 317072
acguguauccuuugagguc

SEQ ID NO: 462342 - RNA, 19 nt, Artificial Sequence
  Description of Artificial Sequence: Synthetic oligonucleotide
  Antisense Strand to SEQ ID NO: 462341
gaccucaaaggauacacgu

SEQ ID NO: 462343 - RNA, 19 nt, Artificial Sequence
  Description of Artificial Sequence: Synthetic oligonucleotide
  Sense strand starting at position 3477 of SEQ ID NO: 317072
aaggaagaauucuagagaa

SEQ ID NO: 462344 - RNA, 19 nt, Artificial Sequence
  Description of Artificial Sequence: Synthetic oligonucleotide
  Antisense Strand to SEQ ID NO: 462343
uucucuagaauucuuccuu

SEQ ID NO: 462345 - RNA, 19 nt, Artificial Sequence
  Description of Artificial Sequence: Synthetic oligonucleotide
  Sense strand starting at position 3505 of SEQ ID NO: 317072
aaauuauagugguuugaga

SEQ ID NO: 462346 - RNA, 19 nt, Artificial Sequence
  Description of Artificial Sequence: Synthetic oligonucleotide
  Antisense Strand to SEQ ID NO: 462345
ucucaaaccacuauaauuu

SEQ ID NO: 462347 - RNA, 19 nt, Artificial Sequence
  Description of Artificial Sequence: Synthetic oligonucleotide
  Sense strand starting at position 3507 of SEQ ID NO: 317072
auuauagugguuugagaaa

SEQ ID NO: 462348 - RNA, 19 nt, Artificial Sequence
  Description of Artificial Sequence: Synthetic oligonucleotide
  Antisense Strand to SEQ ID NO: 462347
uuucucaaaccacuauaau

SEQ ID NO: 462349 - RNA, 19 nt, Artificial Sequence
  Description of Artificial Sequence: Synthetic oligonucleotide
  Sense strand starting at position 3514 of SEQ ID NO: 317072
ugguuugagaaauaguuuc

SEQ ID NO: 462350 - RNA, 19 nt, Artificial Sequence
  Description of Artificial Sequence: Synthetic oligonucleotide
  Antisense Strand to SEQ ID NO: 462349
gaaacuauuucucaaacca

SEQ ID NO: 462351 - RNA, 19 nt, Artificial Sequence
  Description of Artificial Sequence: Synthetic oligonucleotide
  Sense strand starting at position 3549 of SEQ ID NO: 317072
uugagauggccuugagaag

SEQ ID NO: 462352 - RNA, 19 nt, Artificial Sequence
  Description of Artificial Sequence: Synthetic oligonucleotide
  Antisense Strand to SEQ ID NO: 462351
cuucucaaggccaucucaa

SEQ ID NO: 462353 - RNA, 19 nt, Artificial Sequence
  Description of Artificial Sequence: Synthetic oligonucleotide
  Sense strand starting at position 3550 of SEQ ID NO: 317072
ugagauggccuugagaagu

SEQ ID NO: 462354 - RNA, 19 nt, Artificial Sequence
  Description of Artificial Sequence: Synthetic oligonucleotide
  Antisense Strand to SEQ ID NO: 462353
acuucucaaggccaucuca

SEQ ID NO: 462355 - RNA, 19 nt, Artificial Sequence
  Description of Artificial Sequence: Synthetic oligonucleotide
  Sense strand starting at position 82 of SEQ ID NO: 317073
agcccuauacagugaugca

SEQ ID NO: 462356 - RNA, 19 nt, Artificial Sequence
  Description of Artificial Sequence: Synthetic oligonucleotide
  Antisense Strand to SEQ ID NO: 462355
ugcaucacuguauagggcu

SEQ ID NO: 462357 - RNA, 19 nt, Artificial Sequence
  Description of Artificial Sequence: Synthetic oligonucleotide
  Sense strand starting at position 89 of SEQ ID NO: 317073
uacagugaugcaugccuau

SEQ ID NO: 462358 - RNA, 19 nt, Artificial Sequence
  Description of Artificial Sequence: Synthetic oligonucleotide
  Antisense Strand to SEQ ID NO: 462357
auaggcaugcaucacugua

SEQ ID NO: 462359 - RNA, 19 nt, Artificial Sequence
  Description of Artificial Sequence: Synthetic oligonucleotide
  Sense strand starting at position 141 of SEQ ID NO: 317073
auagcuugaacuuaggagu

SEQ ID NO: 462360 - RNA, 19 nt, Artificial Sequence
  Description of Artificial Sequence: Synthetic oligonucleotide
  Antisense Strand to SEQ ID NO: 462359
acuccuaaguucaagcuau

SEQ ID NO: 462361 - RNA, 19 nt, Artificial Sequence
  Description of Artificial Sequence: Synthetic oligonucleotide
  Sense strand starting at position 272 of SEQ ID NO: 317073
gcuuuccugcuagacauga

SEQ ID NO: 462362 - RNA, 19 nt, Artificial Sequence
  Description of Artificial Sequence: Synthetic oligonucleotide
  Antisense Strand to SEQ ID NO: 462361
ucaugucuagcaggaaagc

SEQ ID NO: 462363 - RNA, 19 nt, Artificial Sequence
  Description of Artificial Sequence: Synthetic oligonucleotide
  Sense strand starting at position 460 of SEQ ID NO: 317073
gcagcaaauuaaucuugca

SEQ ID NO: 462364 - RNA, 19 nt, Artificial Sequence
  Description of Artificial Sequence: Synthetic oligonucleotide
  Antisense Strand to SEQ ID NO: 462363
ugcaagauuaauuugcugc

SEQ ID NO: 462365 - RNA, 19 nt, Artificial Sequence
  Description of Artificial Sequence: Synthetic oligonucleotide
  Sense strand starting at position 601 of SEQ ID NO: 317073
cgcagacuuaggcauacaa

SEQ ID NO: 462366 - RNA, 19 nt, Artificial Sequence
  Description of Artificial Sequence: Synthetic oligonucleotide
  Antisense Strand to SEQ ID NO: 462365
uuguaugccuaagucugcg

SEQ ID NO: 462367 - RNA, 19 nt, Artificial Sequence
  Description of Artificial Sequence: Synthetic oligonucleotide
  Sense strand starting at position 638 of SEQ ID NO: 317073
agagauaacuccuccgcua

SEQ ID NO: 462368 - RNA, 19 nt, Artificial Sequence
  Description of Artificial Sequence: Synthetic oligonucleotide
  Antisense Strand to SEQ ID NO: 462367
uagcggaggaguuaucucu

SEQ ID NO: 462369 - RNA, 19 nt, Artificial Sequence
  Description of Artificial Sequence: Synthetic oligonucleotide
  Sense strand starting at position 640 of SEQ ID NO: 317073
agauaacuccuccgcuaga

SEQ ID NO: 462370 - RNA, 19 nt, Artificial Sequence
  Description of Artificial Sequence: Synthetic oligonucleotide
  Antisense Strand to SEQ ID NO: 462369
ucuagcggaggaguuaucu

SEQ ID NO: 462371 - RNA, 19 nt, Artificial Sequence
  Description of Artificial Sequence: Synthetic oligonucleotide
  Sense strand starting at position 732 of SEQ ID NO: 317073
uggaucaucuaaguuugca

SEQ ID NO: 462372 - RNA, 19 nt, Artificial Sequence
  Description of Artificial Sequence: Synthetic oligonucleotide
  Antisense Strand to SEQ ID NO: 462371
ugcaaacuuagaugaucca

SEQ ID NO: 462373 - RNA, 19 nt, Artificial Sequence
  Description of Artificial Sequence: Synthetic oligonucleotide
  Sense strand starting at position 831 of SEQ ID NO: 317073
ucaccaucagugugaguaa

SEQ ID NO: 462374 - RNA, 19 nt, Artificial Sequence
  Description of Artificial Sequence: Synthetic oligonucleotide
  Antisense Strand to SEQ ID NO: 462373
uuacucacacugaugguga

SEQ ID NO: 462375 - RNA, 19 nt, Artificial Sequence
  Description of Artificial Sequence: Synthetic oligonucleotide
  Sense strand starting at position 920 of SEQ ID NO: 317073
auggacuuaccagguuaaa

SEQ ID NO: 462376 - RNA, 19 nt, Artificial Sequence
  Description of Artificial Sequence: Synthetic oligonucleotide
  Antisense Strand to SEQ ID NO: 462375
uuuaaccugguaaguccau

SEQ ID NO: 462377 - RNA, 19 nt, Artificial Sequence
  Description of Artificial Sequence: Synthetic oligonucleotide
  Sense strand starting at position 1123 of SEQ ID NO: 317073
acacgauugucuucgcuag

SEQ ID NO: 462378 - RNA, 19 nt, Artificial Sequence
  Description of Artificial Sequence: Synthetic oligonucleotide
  Antisense Strand to SEQ ID NO: 462377
cuagcgaagacaaucgugu

SEQ ID NO: 462379 - RNA, 19 nt, Artificial Sequence
  Description of Artificial Sequence: Synthetic oligonucleotide
  Sense strand starting at position 1127 of SEQ ID NO: 317073
gauugucuucgcuagccau

SEQ ID NO: 462380 - RNA, 19 nt, Artificial Sequence
  Description of Artificial Sequence: Synthetic oligonucleotide
  Antisense Strand to SEQ ID NO: 462379
auggcuagcgaagacaauc

SEQ ID NO: 462381 - RNA, 19 nt, Artificial Sequence
  Description of Artificial Sequence: Synthetic oligonucleotide
  Sense strand starting at position 1145 of SEQ ID NO: 317073
uugcuagcucacgauaaag

SEQ ID NO: 462382 - RNA, 19 nt, Artificial Sequence
  Description of Artificial Sequence: Synthetic oligonucleotide
  Antisense Strand to SEQ ID NO: 462381
cuuuaucgugagcuagcaa

SEQ ID NO: 462383 - RNA, 19 nt, Artificial Sequence
  Description of Artificial Sequence: Synthetic oligonucleotide
  Sense strand starting at position 1147 of SEQ ID NO: 317073
gcuagcucacgauaaagga

SEQ ID NO: 462384 - RNA, 19 nt, Artificial Sequence
  Description of Artificial Sequence: Synthetic oligonucleotide
  Antisense Strand to SEQ ID NO: 462383
uccuuuaucgugagcuagc

SEQ ID NO: 462385 - RNA, 19 nt, Artificial Sequence
  Description of Artificial Sequence: Synthetic oligonucleotide
  Sense strand starting at position 1385 of SEQ ID NO: 317073
uguuaaauaggcuagguuu

SEQ ID NO: 462386 - RNA, 19 nt, Artificial Sequence
  Description of Artificial Sequence: Synthetic oligonucleotide
  Antisense Strand to SEQ ID NO: 462385
aaaccuagccuauuuaaca

SEQ ID NO: 462387 - RNA, 19 nt, Artificial Sequence
  Description of Artificial Sequence: Synthetic oligonucleotide
  Sense strand starting at position 1435 of SEQ ID NO: 317073
auaguuauugucggucaag

SEQ ID NO: 462388 - RNA, 19 nt, Artificial Sequence
  Description of Artificial Sequence: Synthetic oligonucleotide
  Antisense Strand to SEQ ID NO: 462387
cuugaccgacaauaacuau

SEQ ID NO: 462389 - RNA, 19 nt, Artificial Sequence
  Description of Artificial Sequence: Synthetic oligonucleotide
  Sense strand starting at position 1438 of SEQ ID NO: 317073
guuauugucggucaaguaa

SEQ ID NO: 462390 - RNA, 19 nt, Artificial Sequence
  Description of Artificial Sequence: Synthetic oligonucleotide
  Antisense Strand to SEQ ID NO: 462389
uuacuugaccgacaauaac

SEQ ID NO: 462391 - RNA, 19 nt, Artificial Sequence
  Description of Artificial Sequence: Synthetic oligonucleotide
  Sense strand starting at position 1673 of SEQ ID NO: 317073
agcuaucacagagguagaa

SEQ ID NO: 462392 - RNA, 19 nt, Artificial Sequence
  Description of Artificial Sequence: Synthetic oligonucleotide
  Antisense Strand to SEQ ID NO: 462391
uucuaccucugugauagcu

SEQ ID NO: 462393 - RNA, 19 nt, Artificial Sequence
  Description of Artificial Sequence: Synthetic oligonucleotide
  Sense strand starting at position 1685 of SEQ ID NO: 317073
gguagaaaguucuuccuca

SEQ ID NO: 462394 - RNA, 19 nt, Artificial Sequence
  Description of Artificial Sequence: Synthetic oligonucleotide
  Antisense Strand to SEQ ID NO: 462393
ugaggaagaacuuucuacc

SEQ ID NO: 462395 - RNA, 19 nt, Artificial Sequence
  Description of Artificial Sequence: Synthetic oligonucleotide
  Sense strand starting at position 1686 of SEQ ID NO: 317073
guagaaaguucuuccucac

SEQ ID NO: 462396 - RNA, 19 nt, Artificial Sequence
  Description of Artificial Sequence: Synthetic oligonucleotide
  Antisense Strand to SEQ ID NO: 462395
gugaggaagaacuuucuac

SEQ ID NO: 462397 - RNA, 19 nt, Artificial Sequence
  Description of Artificial Sequence: Synthetic oligonucleotide
  Sense strand starting at position 1692 of SEQ ID NO: 317073
aguucuuccucacccagau

SEQ ID NO: 462398 - RNA, 19 nt, Artificial Sequence
  Description of Artificial Sequence: Synthetic oligonucleotide
  Antisense Strand to SEQ ID NO: 462397
aucugggugaggaagaacu

SEQ ID NO: 462399 - RNA, 19 nt, Artificial Sequence
  Description of Artificial Sequence: Synthetic oligonucleotide
  Sense strand starting at position 1798 of SEQ ID NO: 317073
ggcggugauuauucuaaau

SEQ ID NO: 462400 - RNA, 19 nt, Artificial Sequence
  Description of Artificial Sequence: Synthetic oligonucleotide
  Antisense Strand to SEQ ID NO: 462399
auuuagaauaaucaccgcc

SEQ ID NO: 462401 - RNA, 19 nt, Artificial Sequence
  Description of Artificial Sequence: Synthetic oligonucleotide
  Sense strand starting at position 2064 of SEQ ID NO: 317073
ugcgcucagccuuugcaaa

SEQ ID NO: 462402 - RNA, 19 nt, Artificial Sequence
  Description of Artificial Sequence: Synthetic oligonucleotide
  Antisense Strand to SEQ ID NO: 462401
uuugcaaaggcugagcgca

SEQ ID NO: 462403 - RNA, 19 nt, Artificial Sequence
  Description of Artificial Sequence: Synthetic oligonucleotide
  Sense strand starting at position 2126 of SEQ ID NO: 317073
gcgaguggugaggaugcua

SEQ ID NO: 462404 - RNA, 19 nt, Artificial Sequence
  Description of Artificial Sequence: Synthetic oligonucleotide
  Antisense Strand to SEQ ID NO: 462403
uagcauccucaccacucgc

SEQ ID NO: 462405 - RNA, 19 nt, Artificial Sequence
  Description of Artificial Sequence: Synthetic oligonucleotide
  Sense strand starting at position 2489 of SEQ ID NO: 317073
ggaggugcuucugccaagu

SEQ ID NO: 462406 - RNA, 19 nt, Artificial Sequence
  Description of Artificial Sequence: Synthetic oligonucleotide
  Antisense Strand to SEQ ID NO: 462405
acuuggcagaagcaccucc

SEQ ID NO: 462407 - RNA, 19 nt, Artificial Sequence
  Description of Artificial Sequence: Synthetic oligonucleotide
  Sense strand starting at position 2591 of SEQ ID NO: 317073
cuaggugucucauuggacu

SEQ ID NO: 462408 - RNA, 19 nt, Artificial Sequence
  Description of Artificial Sequence: Synthetic oligonucleotide
  Antisense Strand to SEQ ID NO: 462407
aguccaaugagacaccuag

SEQ ID NO: 462409 - RNA, 19 nt, Artificial Sequence
  Description of Artificial Sequence: Synthetic oligonucleotide
  Sense strand starting at position 2748 of SEQ ID NO: 317073
ggcggagacuuggagauuu

SEQ ID NO: 462410 - RNA, 19 nt, Artificial Sequence
  Description of Artificial Sequence: Synthetic oligonucleotide
  Antisense Strand to SEQ ID NO: 462409
aaaucuccaagucuccgcc

SEQ ID NO: 462411 - RNA, 19 nt, Artificial Sequence
  Description of Artificial Sequence: Synthetic oligonucleotide
  Sense strand starting at position 2816 of SEQ ID NO: 317073
gaccgagucgacgaggaau

SEQ ID NO: 462412 - RNA, 19 nt, Artificial Sequence
  Description of Artificial Sequence: Synthetic oligonucleotide
  Antisense Strand to SEQ ID NO: 462411
auuccucgucgacucgguc

SEQ ID NO: 462413 - RNA, 19 nt, Artificial Sequence
  Description of Artificial Sequence: Synthetic oligonucleotide
  Sense strand starting at position 2834 of SEQ ID NO: 317073
ugggaaagauuccuugcuu

SEQ ID NO: 462414 - RNA, 19 nt, Artificial Sequence
  Description of Artificial Sequence: Synthetic oligonucleotide
  Antisense Strand to SEQ ID NO: 462413
aagcaaggaaucuuuccca

SEQ ID NO: 462415 - RNA, 19 nt, Artificial Sequence
  Description of Artificial Sequence: Synthetic oligonucleotide
  Sense strand starting at position 2835 of SEQ ID NO: 317073
gggaaagauuccuugcuuu

SEQ ID NO: 462416 - RNA, 19 nt, Artificial Sequence
  Description of Artificial Sequence: Synthetic oligonucleotide
  Antisense Strand to SEQ ID NO: 462415
aaagcaaggaaucuuuccc

SEQ ID NO: 462417 - RNA, 19 nt, Artificial Sequence
  Description of Artificial Sequence: Synthetic oligonucleotide
  Sense strand starting at position 3054 of SEQ ID NO: 317073
acagauagguccucauacu

SEQ ID NO: 462418 - RNA, 19 nt, Artificial Sequence
  Description of Artificial Sequence: Synthetic oligonucleotide
  Antisense Strand to SEQ ID NO: 462417
aguaugaggaccuaucugu

SEQ ID NO: 462419 - RNA, 19 nt, Artificial Sequence
  Description of Artificial Sequence: Synthetic oligonucleotide
  Sense strand starting at position 3093 of SEQ ID NO: 317073
cgcuauuaacaguaaacca

SEQ ID NO: 462420 - RNA, 19 nt, Artificial Sequence
  Description of Artificial Sequence: Synthetic oligonucleotide
  Antisense Strand to SEQ ID NO: 462419
ugguuuacuguuaauagcg

SEQ ID NO: 462421 - RNA, 19 nt, Artificial Sequence
  Description of Artificial Sequence: Synthetic oligonucleotide
  Sense strand starting at position 3162 of SEQ ID NO: 317073
acguguauccuuugagguc

SEQ ID NO: 462422 - RNA, 19 nt, Artificial Sequence
  Description of Artificial Sequence: Synthetic oligonucleotide
  Antisense Strand to SEQ ID NO: 462421
gaccucaaaggauacacgu

SEQ ID NO: 462423 - RNA, 19 nt, Artificial Sequence
  Description of Artificial Sequence: Synthetic oligonucleotide
  Sense strand starting at position 3247 of SEQ ID NO: 317073
aaggaagaauucuagagaa

SEQ ID NO: 462424 - RNA, 19 nt, Artificial Sequence
  Description of Artificial Sequence: Synthetic oligonucleotide
  Antisense Strand to SEQ ID NO: 462423
uucucuagaauucuuccuu

SEQ ID NO: 462425 - RNA, 19 nt, Artificial Sequence
  Description of Artificial Sequence: Synthetic oligonucleotide
  Sense strand starting at position 3275 of SEQ ID NO: 317073
aaauuauagugguuugaga

SEQ ID NO: 462426 - RNA, 19 nt, Artificial Sequence
  Description of Artificial Sequence: Synthetic oligonucleotide
  Antisense Strand to SEQ ID NO: 462425
ucucaaaccacuauaauuu

SEQ ID NO: 462427 - RNA, 19 nt, Artificial Sequence
  Description of Artificial Sequence: Synthetic oligonucleotide
  Sense strand starting at position 3277 of SEQ ID NO: 317073
auuauagugguuugagaaa

SEQ ID NO: 462428 - RNA, 19 nt, Artificial Sequence
  Description of Artificial Sequence: Synthetic oligonucleotide
  Antisense Strand to SEQ ID NO: 462427
uuucucaaaccacuauaau

SEQ ID NO: 462429 - RNA, 19 nt, Artificial Sequence
  Description of Artificial Sequence: Synthetic oligonucleotide
  Sense strand starting at position 3284 of SEQ ID NO: 317073
ugguuugagaaauaguuuc

SEQ ID NO: 462430 - RNA, 19 nt, Artificial Sequence
  Description of Artificial Sequence: Synthetic oligonucleotide
  Antisense Strand to SEQ ID NO: 462429
gaaacuauuucucaaacca

SEQ ID NO: 462431 - RNA, 19 nt, Artificial Sequence
  Description of Artificial Sequence: Synthetic oligonucleotide
  Sense strand starting at position 3319 of SEQ ID NO: 317073
uugagauggccuugagaag

SEQ ID NO: 462432 - RNA, 19 nt, Artificial Sequence
  Description of Artificial Sequence: Synthetic oligonucleotide
  Antisense Strand to SEQ ID NO: 462431
cuucucaaggccaucucaa

SEQ ID NO: 462433 - RNA, 19 nt, Artificial Sequence
  Description of Artificial Sequence: Synthetic oligonucleotide
  Sense strand starting at position 3320 of SEQ ID NO: 317073
ugagauggccuugagaagu

SEQ ID NO: 462434 - RNA, 19 nt, Artificial Sequence
  Description of Artificial Sequence: Synthetic oligonucleotide
  Antisense Strand to SEQ ID NO: 462433
acuucucaaggccaucuca

SEQ ID NO: 462435 - RNA, 19 nt, Artificial Sequence
  Description of Artificial Sequence: Synthetic oligonucleotide
  Sense strand starting at position 39 of SEQ ID NO: 317074
gacauuaaaucaguggauu

SEQ ID NO: 462436 - RNA, 19 nt, Artificial Sequence
  Description of Artificial Sequence: Synthetic oligonucleotide
  Antisense Strand to SEQ ID NO: 462435
aauccacugauuuaauguc

SEQ ID NO: 462437 - RNA, 19 nt, Artificial Sequence
  Description of Artificial Sequence: Synthetic oligonucleotide
  Sense strand starting at position 93 of SEQ ID NO: 317074
agcauaaagcugcaaugua

SEQ ID NO: 462438 - RNA, 19 nt, Artificial Sequence
  Description of Artificial Sequence: Synthetic oligonucleotide
  Antisense Strand to SEQ ID NO: 462437
uacauugcagcuuuaugcu

SEQ ID NO: 462439 - RNA, 19 nt, Artificial Sequence
  Description of Artificial Sequence: Synthetic oligonucleotide
  Sense strand starting at position 885 of SEQ ID NO: 317074
acaaguaggucuuuaacuu

SEQ ID NO: 462440 - RNA, 19 nt, Artificial Sequence
  Description of Artificial Sequence: Synthetic oligonucleotide
  Antisense Strand to SEQ ID NO: 462439
aaguuaaagaccuacuugu

SEQ ID NO: 462441 - RNA, 19 nt, Artificial Sequence
  Description of Artificial Sequence: Synthetic oligonucleotide
  Sense strand starting at position 886 of SEQ ID NO: 317074
caaguaggucuuuaacuug

SEQ ID NO: 462442 - RNA, 19 nt, Artificial Sequence
  Description of Artificial Sequence: Synthetic oligonucleotide
  Antisense Strand to SEQ ID NO: 462441
caaguuaaagaccuacuug

SEQ ID NO: 462443 - RNA, 19 nt, Artificial Sequence
  Description of Artificial Sequence: Synthetic oligonucleotide
  Sense strand starting at position 958 of SEQ ID NO: 317074
agaauugguuaacuaaagu

SEQ ID NO: 462444 - RNA, 19 nt, Artificial Sequence
  Description of Artificial Sequence: Synthetic oligonucleotide
  Antisense Strand to SEQ ID NO: 462443
acuuuaguuaaccaauucu

SEQ ID NO: 462445 - RNA, 19 nt, Artificial Sequence
  Description of Artificial Sequence: Synthetic oligonucleotide
  Sense strand starting at position 1217 of SEQ ID NO: 317074
aggccucaugcacaauaua

SEQ ID NO: 462446 - RNA, 19 nt, Artificial Sequence
  Description of Artificial Sequence: Synthetic oligonucleotide
  Antisense Strand to SEQ ID NO: 462445
uauauugugcaugaggccu

SEQ ID NO: 462447 - RNA, 19 nt, Artificial Sequence
  Description of Artificial Sequence: Synthetic oligonucleotide
  Sense strand starting at position 1287 of SEQ ID NO: 317074
ugaauaacuucugugagau

SEQ ID NO: 462448 - RNA, 19 nt, Artificial Sequence
  Description of Artificial Sequence: Synthetic oligonucleotide
  Antisense Strand to SEQ ID NO: 462447
aucucacagaaguuauuca

SEQ ID NO: 462449 - RNA, 19 nt, Artificial Sequence
  Description of Artificial Sequence: Synthetic oligonucleotide
  Sense strand starting at position 1288 of SEQ ID NO: 317074
gaauaacuucugugagauc

SEQ ID NO: 462450 - RNA, 19 nt, Artificial Sequence
  Description of Artificial Sequence: Synthetic oligonucleotide
  Antisense Strand to SEQ ID NO: 462449
gaucucacagaaguuauuc

SEQ ID NO: 462451 - RNA, 19 nt, Artificial Sequence
  Description of Artificial Sequence: Synthetic oligonucleotide
  Sense strand starting at position 1439 of SEQ ID NO: 317074
uggcaugaauaguucucaa

SEQ ID NO: 462452 - RNA, 19 nt, Artificial Sequence
  Description of Artificial Sequence: Synthetic oligonucleotide
  Antisense Strand to SEQ ID NO: 462451
uugagaacuauucaugcca

SEQ ID NO: 462453 - RNA, 19 nt, Artificial Sequence
  Description of Artificial Sequence: Synthetic oligonucleotide
  Sense strand starting at position 1442 of SEQ ID NO: 317074
caugaauaguucucaaagg

SEQ ID NO: 462454 - RNA, 19 nt, Artificial Sequence
  Description of Artificial Sequence: Synthetic oligonucleotide
  Antisense Strand to SEQ ID NO: 462453
ccuuugagaacuauucaug

SEQ ID NO: 462455 - RNA, 19 nt, Artificial Sequence
  Description of Artificial Sequence: Synthetic oligonucleotide
  Sense strand starting at position 1532 of SEQ ID NO: 317074
uucuauaaucaagggcuua

SEQ ID NO: 462456 - RNA, 19 nt, Artificial Sequence
  Description of Artificial Sequence: Synthetic oligonucleotide
  Antisense Strand to SEQ ID NO: 462455
uaagcccuugauuauagaa

SEQ ID NO: 462457 - RNA, 19 nt, Artificial Sequence
  Description of Artificial Sequence: Synthetic oligonucleotide
  Sense strand starting at position 1567 of SEQ ID NO: 317074
uaaaucguuugaucucaag

SEQ ID NO: 462458 - RNA, 19 nt, Artificial Sequence
  Description of Artificial Sequence: Synthetic oligonucleotide
  Antisense Strand to SEQ ID NO: 462457
cuugagaucaaacgauuua

SEQ ID NO: 462459 - RNA, 19 nt, Artificial Sequence
  Description of Artificial Sequence: Synthetic oligonucleotide
  Sense strand starting at position 1593 of SEQ ID NO: 317074
uugugaacaugagcauaau

SEQ ID NO: 462460 - RNA, 19 nt, Artificial Sequence
  Description of Artificial Sequence: Synthetic oligonucleotide
  Antisense Strand to SEQ ID NO: 462459
auuaugcucauguucacaa

SEQ ID NO: 462461 - RNA, 19 nt, Artificial Sequence
  Description of Artificial Sequence: Synthetic oligonucleotide
  Sense strand starting at position 1623 of SEQ ID NO: 317074
aacauagaauguguuuaga

SEQ ID NO: 462462 - RNA, 19 nt, Artificial Sequence
  Description of Artificial Sequence: Synthetic oligonucleotide
  Antisense Strand to SEQ ID NO: 462461
ucuaaacacauucuauguu

SEQ ID NO: 462463 - RNA, 19 nt, Artificial Sequence
  Description of Artificial Sequence: Synthetic oligonucleotide
  Sense strand starting at position 1625 of SEQ ID NO: 317074
cauagaauguguuuagaaa

SEQ ID NO: 462464 - RNA, 19 nt, Artificial Sequence
  Description of Artificial Sequence: Synthetic oligonucleotide
  Antisense Strand to SEQ ID NO: 462463
uuucuaaacacauucuaug

SEQ ID NO: 462465 - RNA, 19 nt, Artificial Sequence
  Description of Artificial Sequence: Synthetic oligonucleotide
  Sense strand starting at position 1655 of SEQ ID NO: 317074
uugagaggccuuugagagu

SEQ ID NO: 462466 - RNA, 19 nt, Artificial Sequence
  Description of Artificial Sequence: Synthetic oligonucleotide
  Antisense Strand to SEQ ID NO: 462465
acucucaaaggccucucaa

SEQ ID NO: 462467 - RNA, 19 nt, Artificial Sequence
  Description of Artificial Sequence: Synthetic oligonucleotide
  Sense strand starting at position 1662 of SEQ ID NO: 317074
gccuuugagaguuaaacug

SEQ ID NO: 462468 - RNA, 19 nt, Artificial Sequence
  Description of Artificial Sequence: Synthetic oligonucleotide
  Antisense Strand to SEQ ID NO: 462467
caguuuaacucucaaaggc

SEQ ID NO: 462469 - RNA, 19 nt, Artificial Sequence
  Description of Artificial Sequence: Synthetic oligonucleotide
  Sense strand starting at position 1701 of SEQ ID NO: 317074
ggaguaggugaccaguguu

SEQ ID NO: 462470 - RNA, 19 nt, Artificial Sequence
  Description of Artificial Sequence: Synthetic oligonucleotide
  Antisense Strand to SEQ ID NO: 462469
aacacuggucaccuacucc

SEQ ID NO: 462471 - RNA, 19 nt, Artificial Sequence
  Description of Artificial Sequence: Synthetic oligonucleotide
  Sense strand starting at position 2043 of SEQ ID NO: 317074
cugguaugccuggaauaca

SEQ ID NO: 462472 - RNA, 19 nt, Artificial Sequence
  Description of Artificial Sequence: Synthetic oligonucleotide
  Antisense Strand to SEQ ID NO: 462471
uguauuccaggcauaccag

SEQ ID NO: 462473 - RNA, 19 nt, Artificial Sequence
  Description of Artificial Sequence: Synthetic oligonucleotide
  Sense strand starting at position 2079 of SEQ ID NO: 317074
agcagauuacacgggauua

SEQ ID NO: 462474 - RNA, 19 nt, Artificial Sequence
  Description of Artificial Sequence: Synthetic oligonucleotide
  Antisense Strand to SEQ ID NO: 462473
uaaucccguguaaucugcu

SEQ ID NO: 462475 - RNA, 19 nt, Artificial Sequence
  Description of Artificial Sequence: Synthetic oligonucleotide
  Sense strand starting at position 2080 of SEQ ID NO: 317074
gcagauuacacgggauuag

SEQ ID NO: 462476 - RNA, 19 nt, Artificial Sequence
  Description of Artificial Sequence: Synthetic oligonucleotide
  Antisense Strand to SEQ ID NO: 462475
cuaaucccguguaaucugc

SEQ ID NO: 462477 - RNA, 19 nt, Artificial Sequence
  Description of Artificial Sequence: Synthetic oligonucleotide
  Sense strand starting at position 2089 of SEQ ID NO: 317074
acgggauuagcugagaucu

SEQ ID NO: 462478 - RNA, 19 nt, Artificial Sequence
  Description of Artificial Sequence: Synthetic oligonucleotide
  Antisense Strand to SEQ ID NO: 462477
agaucucagcuaaucccgu

SEQ ID NO: 462479 - RNA, 19 nt, Artificial Sequence
  Description of Artificial Sequence: Synthetic oligonucleotide
  Sense strand starting at position 2097 of SEQ ID NO: 317074
agcugagaucuguaguuac

SEQ ID NO: 462480 - RNA, 19 nt, Artificial Sequence
  Description of Artificial Sequence: Synthetic oligonucleotide
  Antisense Strand to SEQ ID NO: 462479
guaacuacagaucucagcu

SEQ ID NO: 462481 - RNA, 19 nt, Artificial Sequence
  Description of Artificial Sequence: Synthetic oligonucleotide
  Sense strand starting at position 2100 of SEQ ID NO: 317074
ugagaucuguaguuacuua

SEQ ID NO: 462482 - RNA, 19 nt, Artificial Sequence
  Description of Artificial Sequence: Synthetic oligonucleotide
  Antisense Strand to SEQ ID NO: 462481
uaaguaacuacagaucuca

SEQ ID NO: 462483 - RNA, 19 nt, Artificial Sequence
  Description of Artificial Sequence: Synthetic oligonucleotide
  Sense strand starting at position 2128 of SEQ ID NO: 317074
uguaucuugcaggagauca

SEQ ID NO: 462484 - RNA, 19 nt, Artificial Sequence
  Description of Artificial Sequence: Synthetic oligonucleotide
  Antisense Strand to SEQ ID NO: 462483
ugaucuccugcaagauaca

SEQ ID NO: 462485 - RNA, 19 nt, Artificial Sequence
  Description of Artificial Sequence: Synthetic oligonucleotide
  Sense strand starting at position 2229 of SEQ ID NO: 317074
aauaguuacccguaacuag

SEQ ID NO: 462486 - RNA, 19 nt, Artificial Sequence
  Description of Artificial Sequence: Synthetic oligonucleotide
  Antisense Strand to SEQ ID NO: 462485
cuaguuacggguaacuauu

SEQ ID NO: 462487 - RNA, 19 nt, Artificial Sequence
  Description of Artificial Sequence: Synthetic oligonucleotide
  Sense strand starting at position 2332 of SEQ ID NO: 317074
ucagucuuggcagaugcaa

SEQ ID NO: 462488 - RNA, 19 nt, Artificial Sequence
  Description of Artificial Sequence: Synthetic oligonucleotide
  Antisense Strand to SEQ ID NO: 462487
uugcaucugccaagacuga

SEQ ID NO: 462489 - RNA, 19 nt, Artificial Sequence
  Description of Artificial Sequence: Synthetic oligonucleotide
  Sense strand starting at position 2585 of SEQ ID NO: 317074
acugauguggcaggacuaa

SEQ ID NO: 462490 - RNA, 19 nt, Artificial Sequence
  Description of Artificial Sequence: Synthetic oligonucleotide
  Antisense Strand to SEQ ID NO: 462489
uuaguccugccacaucagu

SEQ ID NO: 462491 - RNA, 19 nt, Artificial Sequence
  Description of Artificial Sequence: Synthetic oligonucleotide
  Sense strand starting at position 2596 of SEQ ID NO: 317074
aggacuaaguucuccaaua

SEQ ID NO: 462492 - RNA, 19 nt, Artificial Sequence
  Description of Artificial Sequence: Synthetic oligonucleotide
  Antisense Strand to SEQ ID NO: 462491
uauuggagaacuuaguccu

SEQ ID NO: 462493 - RNA, 19 nt, Artificial Sequence
  Description of Artificial Sequence: Synthetic oligonucleotide
  Sense strand starting at position 2612 of SEQ ID NO: 317074
auaagaacguguucugaga

SEQ ID NO: 462494 - RNA, 19 nt, Artificial Sequence
  Description of Artificial Sequence: Synthetic oligonucleotide
  Antisense Strand to SEQ ID NO: 462493
ucucagaacacguucuuau

SEQ ID NO: 462495 - RNA, 19 nt, Artificial Sequence
  Description of Artificial Sequence: Synthetic oligonucleotide
  Sense strand starting at position 2623 of SEQ ID NO: 317074
uucugagacucuuccaggu

SEQ ID NO: 462496 - RNA, 19 nt, Artificial Sequence
  Description of Artificial Sequence: Synthetic oligonucleotide
  Antisense Strand to SEQ ID NO: 462495
accuggaagagucucagaa

SEQ ID NO: 462497 - RNA, 19 nt, Artificial Sequence
  Description of Artificial Sequence: Synthetic oligonucleotide
  Sense strand starting at position 2627 of SEQ ID NO: 317074
gagacucuuccaggucauc

SEQ ID NO: 462498 - RNA, 19 nt, Artificial Sequence
  Description of Artificial Sequence: Synthetic oligonucleotide
  Antisense Strand to SEQ ID NO: 462497
gaugaccuggaagagucuc

SEQ ID NO: 462499 - RNA, 19 nt, Artificial Sequence
  Description of Artificial Sequence: Synthetic oligonucleotide
  Sense strand starting at position 2770 of SEQ ID NO: 317074
auauuaggcucugucagaa

SEQ ID NO: 462500 - RNA, 19 nt, Artificial Sequence
  Description of Artificial Sequence: Synthetic oligonucleotide
  Antisense Strand to SEQ ID NO: 462499
uucugacagagccuaauau

SEQ ID NO: 462501 - RNA, 19 nt, Artificial Sequence
  Description of Artificial Sequence: Synthetic oligonucleotide
  Sense strand starting at position 3192 of SEQ ID NO: 317074
ggaacagacuacuaaagaa

SEQ ID NO: 462502 - RNA, 19 nt, Artificial Sequence
  Description of Artificial Sequence: Synthetic oligonucleotide
  Antisense Strand to SEQ ID NO: 462501
uucuuuaguagucuguucc

SEQ ID NO: 462503 - RNA, 19 nt, Artificial Sequence
  Description of Artificial Sequence: Synthetic oligonucleotide
  Sense strand starting at position 3240 of SEQ ID NO: 317074
guguuagucaagcaagacu

SEQ ID NO: 462504 - RNA, 19 nt, Artificial Sequence
  Description of Artificial Sequence: Synthetic oligonucleotide
  Antisense Strand to SEQ ID NO: 462503
agucuugcuugacuaacac

SEQ ID NO: 462505 - RNA, 19 nt, Artificial Sequence
  Description of Artificial Sequence: Synthetic oligonucleotide
  Sense strand starting at position 3383 of SEQ ID NO: 317074
guguauuguccucagagaa

SEQ ID NO: 462506 - RNA, 19 nt, Artificial Sequence
  Description of Artificial Sequence: Synthetic oligonucleotide
  Antisense Strand to SEQ ID NO: 462505
uucucugaggacaauacac

SEQ ID NO: 462507 - RNA, 19 nt, Artificial Sequence
  Description of Artificial Sequence: Synthetic oligonucleotide
  Sense strand starting at position 3417 of SEQ ID NO: 317074
guugcucaggcauaagauu

SEQ ID NO: 462508 - RNA, 19 nt, Artificial Sequence
  Description of Artificial Sequence: Synthetic oligonucleotide
  Antisense Strand to SEQ ID NO: 462507
aaucuuaugccugagcaac

SEQ ID NO: 462509 - RNA, 19 nt, Artificial Sequence
  Description of Artificial Sequence: Synthetic oligonucleotide
  Sense strand starting at position 3500 of SEQ ID NO: 317074
cccuuagauucccuaugga

SEQ ID NO: 462510 - RNA, 19 nt, Artificial Sequence
  Description of Artificial Sequence: Synthetic oligonucleotide
  Antisense Strand to SEQ ID NO: 462509
uccauagggaaucuaaggg

SEQ ID NO: 462511 - RNA, 19 nt, Artificial Sequence
  Description of Artificial Sequence: Synthetic oligonucleotide
  Sense strand starting at position 3713 of SEQ ID NO: 317074
gugguuauaguccagguga

SEQ ID NO: 462512 - RNA, 19 nt, Artificial Sequence
  Description of Artificial Sequence: Synthetic oligonucleotide
  Antisense Strand to SEQ ID NO: 462511
ucaccuggacuauaaccac

SEQ ID NO: 462513 - RNA, 19 nt, Artificial Sequence
  Description of Artificial Sequence: Synthetic oligonucleotide
  Sense strand starting at position 3763 of SEQ ID NO: 317074
gcuaguaaucguuaggaua

SEQ ID NO: 462514 - RNA, 19 nt, Artificial Sequence
  Description of Artificial Sequence: Synthetic oligonucleotide
  Antisense Strand to SEQ ID NO: 462513
uauccuaacgauuacuagc

SEQ ID NO: 462515 - RNA, 19 nt, Artificial Sequence
  Description of Artificial Sequence: Synthetic oligonucleotide
  Sense strand starting at position 2 of SEQ ID NO: 317075
aaauuagcauggguguaau

SEQ ID NO: 462516 - RNA, 19 nt, Artificial Sequence
  Description of Artificial Sequence: Synthetic oligonucleotide
  Antisense Strand to SEQ ID NO: 462515
auuacacccaugcuaauuu

SEQ ID NO: 462517 - RNA, 19 nt, Artificial Sequence
  Description of Artificial Sequence: Synthetic oligonucleotide
  Sense strand starting at position 150 of SEQ ID NO: 317075
gccuccuuagcucaaggaa

SEQ ID NO: 462518 - RNA, 19 nt, Artificial Sequence
  Description of Artificial Sequence: Synthetic oligonucleotide
  Antisense Strand to SEQ ID NO: 462517
uuccuugagcuaaggaggc

SEQ ID NO: 462519 - RNA, 19 nt, Artificial Sequence
  Description of Artificial Sequence: Synthetic oligonucleotide
  Sense strand starting at position 585 of SEQ ID NO: 317075
caaguagagcccuaacagu

SEQ ID NO: 462520 - RNA, 19 nt, Artificial Sequence
  Description of Artificial Sequence: Synthetic oligonucleotide
  Antisense Strand to SEQ ID NO: 462519
acuguuagggcucuacuug

SEQ ID NO: 462521 - RNA, 19 nt, Artificial Sequence
  Description of Artificial Sequence: Synthetic oligonucleotide
  Sense strand starting at position 611 of SEQ ID NO: 317075
uggguauaagucuaugcau

SEQ ID NO: 462522 - RNA, 19 nt, Artificial Sequence
  Description of Artificial Sequence: Synthetic oligonucleotide
  Antisense Strand to SEQ ID NO: 462521
augcauagacuuauaccca

SEQ ID NO: 462523 - RNA, 19 nt, Artificial Sequence
  Description of Artificial Sequence: Synthetic oligonucleotide
  Sense strand starting at position 645 of SEQ ID NO: 317075
gggcaaagcucucuggaga

SEQ ID NO: 462524 - RNA, 19 nt, Artificial Sequence
  Description of Artificial Sequence: Synthetic oligonucleotide
  Antisense Strand to SEQ ID NO: 462523
ucuccagagagcuuugccc

SEQ ID NO: 462525 - RNA, 19 nt, Artificial Sequence
  Description of Artificial Sequence: Synthetic oligonucleotide
  Sense strand starting at position 848 of SEQ ID NO: 317075
uccuuaaguccugagagua

SEQ ID NO: 462526 - RNA, 19 nt, Artificial Sequence
  Description of Artificial Sequence: Synthetic oligonucleotide
  Antisense Strand to SEQ ID NO: 462525
uacucucaggacuuaagga

SEQ ID NO: 462527 - RNA, 19 nt, Artificial Sequence
  Description of Artificial Sequence: Synthetic oligonucleotide
  Sense strand starting at position 887 of SEQ ID NO: 317075
gugagaccucacugacgau

SEQ ID NO: 462528 - RNA, 19 nt, Artificial Sequence
  Description of Artificial Sequence: Synthetic oligonucleotide
  Antisense Strand to SEQ ID NO: 462527
aucgucagugaggucucac

SEQ ID NO: 462529 - RNA, 19 nt, Artificial Sequence
  Description of Artificial Sequence: Synthetic oligonucleotide
  Sense strand starting at position 1201 of SEQ ID NO: 317075
auguguauucuauaagcaa

SEQ ID NO: 462530 - RNA, 19 nt, Artificial Sequence
  Description of Artificial Sequence: Synthetic oligonucleotide
  Antisense Strand to SEQ ID NO: 462529
uugcuuauagaauacacau

SEQ ID NO: 462531 - RNA, 19 nt, Artificial Sequence
  Description of Artificial Sequence: Synthetic oligonucleotide
  Sense strand starting at position 1204 of SEQ ID NO: 317075
uguauucuauaagcaagaa

SEQ ID NO: 462532 - RNA, 19 nt, Artificial Sequence
  Description of Artificial Sequence: Synthetic oligonucleotide
  Antisense Strand to SEQ ID NO: 462531
uucuugcuuauagaauaca

SEQ ID NO: 462533 - RNA, 19 nt, Artificial Sequence
  Description of Artificial Sequence: Synthetic oligonucleotide
  Sense strand starting at position 1284 of SEQ ID NO: 317075
ccaggugcucauuaggaaa

SEQ ID NO: 462534 - RNA, 19 nt, Artificial Sequence
  Description of Artificial Sequence: Synthetic oligonucleotide
  Antisense Strand to SEQ ID NO: 462533
uuuccuaaugagcaccugg

SEQ ID NO: 462535 - RNA, 19 nt, Artificial Sequence
  Description of Artificial Sequence: Synthetic oligonucleotide
  Sense strand starting at position 1313 of SEQ ID NO: 317075
ucucaucgccuagauagaa

SEQ ID NO: 462536 - RNA, 19 nt, Artificial Sequence
  Description of Artificial Sequence: Synthetic oligonucleotide
  Antisense Strand to SEQ ID NO: 462535
uucuaucuaggcgaugaga

SEQ ID NO: 462537 - RNA, 19 nt, Artificial Sequence
  Description of Artificial Sequence: Synthetic oligonucleotide
  Sense strand starting at position 1344 of SEQ ID NO: 317075
acuccaggacgugaacauu

SEQ ID NO: 462538 - RNA, 19 nt, Artificial Sequence
  Description of Artificial Sequence: Synthetic oligonucleotide
  Antisense Strand to SEQ ID NO: 462537
aauguucacguccuggagu

SEQ ID NO: 462539 - RNA, 19 nt, Artificial Sequence
  Description of Artificial Sequence: Synthetic oligonucleotide
  Sense strand starting at position 1352 of SEQ ID NO: 317075
acgugaacauucuuuacua

SEQ ID NO: 462540 - RNA, 19 nt, Artificial Sequence
  Description of Artificial Sequence: Synthetic oligonucleotide
  Antisense Strand to SEQ ID NO: 462539
uaguaaagaauguucacgu

SEQ ID NO: 462541 - RNA, 19 nt, Artificial Sequence
  Description of Artificial Sequence: Synthetic oligonucleotide
  Sense strand starting at position 1469 of SEQ ID NO: 317075
uggcuauggguuuauacau

SEQ ID NO: 462542 - RNA, 19 nt, Artificial Sequence
  Description of Artificial Sequence: Synthetic oligonucleotide
  Antisense Strand to SEQ ID NO: 462541
auguauaaacccauagcca

SEQ ID NO: 462543 - RNA, 19 nt, Artificial Sequence
  Description of Artificial Sequence: Synthetic oligonucleotide
  Sense strand starting at position 1594 of SEQ ID NO: 317075
cugacacucaucggacgaa

SEQ ID NO: 462544 - RNA, 19 nt, Artificial Sequence
  Description of Artificial Sequence: Synthetic oligonucleotide
  Antisense Strand to SEQ ID NO: 462543
uucguccgaugagugucag

SEQ ID NO: 462545 - RNA, 19 nt, Artificial Sequence
  Description of Artificial Sequence: Synthetic oligonucleotide
  Sense strand starting at position 1849 of SEQ ID NO: 317075
uguauuuacuccuuggcau

SEQ ID NO: 462546 - RNA, 19 nt, Artificial Sequence
  Description of Artificial Sequence: Synthetic oligonucleotide
  Antisense Strand to SEQ ID NO: 462545
augccaaggaguaaauaca

SEQ ID NO: 462547 - RNA, 19 nt, Artificial Sequence
  Description of Artificial Sequence: Synthetic oligonucleotide
  Sense strand starting at position 1850 of SEQ ID NO: 317075
guauuuacuccuuggcauu

SEQ ID NO: 462548 - RNA, 19 nt, Artificial Sequence
  Description of Artificial Sequence: Synthetic oligonucleotide
  Antisense Strand to SEQ ID NO: 462547
aaugccaaggaguaaauac

SEQ ID NO: 462549 - RNA, 19 nt, Artificial Sequence
  Description of Artificial Sequence: Synthetic oligonucleotide
  Sense strand starting at position 1921 of SEQ ID NO: 317075
ccugauugguggucaagag

SEQ ID NO: 462550 - RNA, 19 nt, Artificial Sequence
  Description of Artificial Sequence: Synthetic oligonucleotide
  Antisense Strand to SEQ ID NO: 462549
cucuugaccaccaaucagg

SEQ ID NO: 462551 - RNA, 19 nt, Artificial Sequence
  Description of Artificial Sequence: Synthetic oligonucleotide
  Sense strand starting at position 1948 of SEQ ID NO: 317075
gagagacccuuagugugau

SEQ ID NO: 462552 - RNA, 19 nt, Artificial Sequence
  Description of Artificial Sequence: Synthetic oligonucleotide
  Antisense Strand to SEQ ID NO: 462551
aucacacuaagggucucuc

SEQ ID NO: 462553 - RNA, 19 nt, Artificial Sequence
  Description of Artificial Sequence: Synthetic oligonucleotide
  Sense strand starting at position 1954 of SEQ ID NO: 317075
cccuuagugugauuggaaa

SEQ ID NO: 462554 - RNA, 19 nt, Artificial Sequence
  Description of Artificial Sequence: Synthetic oligonucleotide
  Antisense Strand to SEQ ID NO: 462553
uuuccaaucacacuaaggg

SEQ ID NO: 462555 - RNA, 19 nt, Artificial Sequence
  Description of Artificial Sequence: Synthetic oligonucleotide
  Sense strand starting at position 2009 of SEQ ID NO: 317075
acaauaaauugcuuaagug

SEQ ID NO: 462556 - RNA, 19 nt, Artificial Sequence
  Description of Artificial Sequence: Synthetic oligonucleotide
  Antisense Strand to SEQ ID NO: 462555
cacuuaagcaauuuauugu

SEQ ID NO: 462557 - RNA, 19 nt, Artificial Sequence
  Description of Artificial Sequence: Synthetic oligonucleotide
  Sense strand starting at position 2025 of SEQ ID NO: 317075
gugagaaugaagugcagaa

SEQ ID NO: 462558 - RNA, 19 nt, Artificial Sequence
  Description of Artificial Sequence: Synthetic oligonucleotide
  Antisense Strand to SEQ ID NO: 462557
uucugcacuucauucucac

SEQ ID NO: 462559 - RNA, 19 nt, Artificial Sequence
  Description of Artificial Sequence: Synthetic oligonucleotide
  Sense strand starting at position 2074 of SEQ ID NO: 317075
acugaauuaucuuugugau

SEQ ID NO: 462560 - RNA, 19 nt, Artificial Sequence
  Description of Artificial Sequence: Synthetic oligonucleotide
  Antisense Strand to SEQ ID NO: 462559
aucacaaagauaauucagu

SEQ ID NO: 462561 - RNA, 19 nt, Artificial Sequence
  Description of Artificial Sequence: Synthetic oligonucleotide
  Sense strand starting at position 2075 of SEQ ID NO: 317075
cugaauuaucuuugugauu

SEQ ID NO: 462562 - RNA, 19 nt, Artificial Sequence
  Description of Artificial Sequence: Synthetic oligonucleotide
  Antisense Strand to SEQ ID NO: 462561
aaucacaaagauaauucag

SEQ ID NO: 462563 - RNA, 19 nt, Artificial Sequence
  Description of Artificial Sequence: Synthetic oligonucleotide
  Sense strand starting at position 2150 of SEQ ID NO: 317075
auaaguggucugcauuaaa

SEQ ID NO: 462564 - RNA, 19 nt, Artificial Sequence
  Description of Artificial Sequence: Synthetic oligonucleotide
  Antisense Strand to SEQ ID NO: 462563
uuuaaugcagaccacuuau

SEQ ID NO: 462565 - RNA, 19 nt, Artificial Sequence
  Description of Artificial Sequence: Synthetic oligonucleotide
  Sense strand starting at position 2153 of SEQ ID NO: 317075
aguggucugcauuaaagga

SEQ ID NO: 462566 - RNA, 19 nt, Artificial Sequence
  Description of Artificial Sequence: Synthetic oligonucleotide
  Antisense Strand to SEQ ID NO: 462565
uccuuuaaugcagaccacu

SEQ ID NO: 462567 - RNA, 19 nt, Artificial Sequence
  Description of Artificial Sequence: Synthetic oligonucleotide
  Sense strand starting at position 2230 of SEQ ID NO: 317075
uaugguugccuuuagugaa

SEQ ID NO: 462568 - RNA, 19 nt, Artificial Sequence
  Description of Artificial Sequence: Synthetic oligonucleotide
  Antisense Strand to SEQ ID NO: 462567
uucacuaaaggcaaccaua

SEQ ID NO: 462569 - RNA, 19 nt, Artificial Sequence
  Description of Artificial Sequence: Synthetic oligonucleotide
  Sense strand starting at position 2234 of SEQ ID NO: 317075
guugccuuuagugaauaug

SEQ ID NO: 462570 - RNA, 19 nt, Artificial Sequence
  Description of Artificial Sequence: Synthetic oligonucleotide
  Antisense Strand to SEQ ID NO: 462569
cauauucacuaaaggcaac

SEQ ID NO: 462571 - RNA, 19 nt, Artificial Sequence
  Description of Artificial Sequence: Synthetic oligonucleotide
  Sense strand starting at position 2237 of SEQ ID NO: 317075
gccuuuagugaauaugaaa

SEQ ID NO: 462572 - RNA, 19 nt, Artificial Sequence
  Description of Artificial Sequence: Synthetic oligonucleotide
  Antisense Strand to SEQ ID NO: 462571
uuucauauucacuaaaggc

SEQ ID NO: 462573 - RNA, 19 nt, Artificial Sequence
  Description of Artificial Sequence: Synthetic oligonucleotide
  Sense strand starting at position 2283 of SEQ ID NO: 317075
agcaauauuagguaaggua

SEQ ID NO: 462574 - RNA, 19 nt, Artificial Sequence
  Description of Artificial Sequence: Synthetic oligonucleotide
  Antisense Strand to SEQ ID NO: 462573
uaccuuaccuaauauugcu

SEQ ID NO: 462575 - RNA, 19 nt, Artificial Sequence
  Description of Artificial Sequence: Synthetic oligonucleotide
  Sense strand starting at position 2357 of SEQ ID NO: 317075
aaagauuggauguggaagu

SEQ ID NO: 462576 - RNA, 19 nt, Artificial Sequence
  Description of Artificial Sequence: Synthetic oligonucleotide
  Antisense Strand to SEQ ID NO: 462575
acuuccacauccaaucuuu

SEQ ID NO: 462577 - RNA, 19 nt, Artificial Sequence
  Description of Artificial Sequence: Synthetic oligonucleotide
  Sense strand starting at position 2519 of SEQ ID NO: 317075
ugguuagaagacugcacau

SEQ ID NO: 462578 - RNA, 19 nt, Artificial Sequence
  Description of Artificial Sequence: Synthetic oligonucleotide
  Antisense Strand to SEQ ID NO: 462577
augugcagucuucuaacca

SEQ ID NO: 462579 - RNA, 19 nt, Artificial Sequence
  Description of Artificial Sequence: Synthetic oligonucleotide
  Sense strand starting at position 2761 of SEQ ID NO: 317075
gcuaguuaaggacagguaa

SEQ ID NO: 462580 - RNA, 19 nt, Artificial Sequence
  Description of Artificial Sequence: Synthetic oligonucleotide
  Antisense Strand to SEQ ID NO: 462579
uuaccuguccuuaacuagc

SEQ ID NO: 462581 - RNA, 19 nt, Artificial Sequence
  Description of Artificial Sequence: Synthetic oligonucleotide
  Sense strand starting at position 2855 of SEQ ID NO: 317075
ugucauccaggcuagaaga

SEQ ID NO: 462582 - RNA, 19 nt, Artificial Sequence
  Description of Artificial Sequence: Synthetic oligonucleotide
  Antisense Strand to SEQ ID NO: 462581
ucuucuagccuggaugaca

SEQ ID NO: 462583 - RNA, 19 nt, Artificial Sequence
  Description of Artificial Sequence: Synthetic oligonucleotide
  Sense strand starting at position 2868 of SEQ ID NO: 317075
agaagagugcauugguaca

SEQ ID NO: 462584 - RNA, 19 nt, Artificial Sequence
  Description of Artificial Sequence: Synthetic oligonucleotide
  Antisense Strand to SEQ ID NO: 462583
uguaccaaugcacucuucu

SEQ ID NO: 462585 - RNA, 19 nt, Artificial Sequence
  Description of Artificial Sequence: Synthetic oligonucleotide
  Sense strand starting at position 2870 of SEQ ID NO: 317075
aagagugcauugguacaau

SEQ ID NO: 462586 - RNA, 19 nt, Artificial Sequence
  Description of Artificial Sequence: Synthetic oligonucleotide
  Antisense Strand to SEQ ID NO: 462585
auuguaccaaugcacucuu

SEQ ID NO: 462587 - RNA, 19 nt, Artificial Sequence
  Description of Artificial Sequence: Synthetic oligonucleotide
  Sense strand starting at position 3160 of SEQ ID NO: 317075
ggguauuuauuggauugac

SEQ ID NO: 462588 - RNA, 19 nt, Artificial Sequence
  Description of Artificial Sequence: Synthetic oligonucleotide
  Antisense Strand to SEQ ID NO: 462587
gucaauccaauaaauaccc

SEQ ID NO: 462589 - RNA, 19 nt, Artificial Sequence
  Description of Artificial Sequence: Synthetic oligonucleotide
  Sense strand starting at position 3687 of SEQ ID NO: 317075
ggaguuagcacucagauau

SEQ ID NO: 462590 - RNA, 19 nt, Artificial Sequence
  Description of Artificial Sequence: Synthetic oligonucleotide
  Antisense Strand to SEQ ID NO: 462589
auaucugagugcuaacucc

SEQ ID NO: 462591 - RNA, 19 nt, Artificial Sequence
  Description of Artificial Sequence: Synthetic oligonucleotide
  Sense strand starting at position 3698 of SEQ ID NO: 317075
ucagauauaucuuugguug

SEQ ID NO: 462592 - RNA, 19 nt, Artificial Sequence
  Description of Artificial Sequence: Synthetic oligonucleotide
  Antisense Strand to SEQ ID NO: 462591
caaccaaagauauaucuga

SEQ ID NO: 462593 - RNA, 19 nt, Artificial Sequence
  Description of Artificial Sequence: Synthetic oligonucleotide
  Sense strand starting at position 3851 of SEQ ID NO: 317075
gacacacucuggguaaucu

SEQ ID NO: 462594 - RNA, 19 nt, Artificial Sequence
  Description of Artificial Sequence: Synthetic oligonucleotide
  Antisense Strand to SEQ ID NO: 462593
agauuacccagaguguguc

SEQ ID NO: 462595 - RNA, 19 nt, Artificial Sequence
  Description of Artificial Sequence: Synthetic oligonucleotide
  Sense strand starting at position 15 of SEQ ID NO: 317076
ccagaaagaucaucuaguc

SEQ ID NO: 462596 - RNA, 19 nt, Artificial Sequence
  Description of Artificial Sequence: Synthetic oligonucleotide
  Antisense Strand to SEQ ID NO: 462595
gacuagaugaucuuucugg

SEQ ID NO: 462597 - RNA, 19 nt, Artificial Sequence
  Description of Artificial Sequence: Synthetic oligonucleotide
  Sense strand starting at position 910 of SEQ ID NO: 317076
uccugcauuugagaugaga

SEQ ID NO: 462598 - RNA, 19 nt, Artificial Sequence
  Description of Artificial Sequence: Synthetic oligonucleotide
  Antisense Strand to SEQ ID NO: 462597
ucucaucucaaaugcagga

SEQ ID NO: 462599 - RNA, 19 nt, Artificial Sequence
  Description of Artificial Sequence: Synthetic oligonucleotide
  Sense strand starting at position 937 of SEQ ID NO: 317076
cccagauggucggcauagu

SEQ ID NO: 462600 - RNA, 19 nt, Artificial Sequence
  Description of Artificial Sequence: Synthetic oligonucleotide
  Antisense Strand to SEQ ID NO: 462599
acuaugccgaccaucuggg

SEQ ID NO: 462601 - RNA, 19 nt, Artificial Sequence
  Description of Artificial Sequence: Synthetic oligonucleotide
  Sense strand starting at position 938 of SEQ ID NO: 317076
ccagauggucggcauaguu

SEQ ID NO: 462602 - RNA, 19 nt, Artificial Sequence
  Description of Artificial Sequence: Synthetic oligonucleotide
  Antisense Strand to SEQ ID NO: 462601
aacuaugccgaccaucugg

SEQ ID NO: 462603 - RNA, 19 nt, Artificial Sequence
  Description of Artificial Sequence: Synthetic oligonucleotide
  Sense strand starting at position 1003 of SEQ ID NO: 317076
gcaaccguaucuuaaugaa

SEQ ID NO: 462604 - RNA, 19 nt, Artificial Sequence
  Description of Artificial Sequence: Synthetic oligonucleotide
  Antisense Strand to SEQ ID NO: 462603
uucauuaagauacgguugc

SEQ ID NO: 462605 - RNA, 19 nt, Artificial Sequence
  Description of Artificial Sequence: Synthetic oligonucleotide
  Sense strand starting at position 1006 of SEQ ID NO: 317076
accguaucuuaaugaagag

SEQ ID NO: 462606 - RNA, 19 nt, Artificial Sequence
  Description of Artificial Sequence: Synthetic oligonucleotide
  Antisense Strand to SEQ ID NO: 462605
cucuucauuaagauacggu

SEQ ID NO: 462607 - RNA, 19 nt, Artificial Sequence
  Description of Artificial Sequence: Synthetic oligonucleotide
  Sense strand starting at position 1156 of SEQ ID NO: 317076
aggugagcgcccuguuaag

SEQ ID NO: 462608 - RNA, 19 nt, Artificial Sequence
  Description of Artificial Sequence: Synthetic oligonucleotide
  Antisense Strand to SEQ ID NO: 462607
cuuaacagggcgcucaccu

SEQ ID NO: 462609 - RNA, 19 nt, Artificial Sequence
  Description of Artificial Sequence: Synthetic oligonucleotide
  Sense strand starting at position 1384 of SEQ ID NO: 317076
gcaggagaccugugaucua

SEQ ID NO: 462610 - RNA, 19 nt, Artificial Sequence
  Description of Artificial Sequence: Synthetic oligonucleotide
  Antisense Strand to SEQ ID NO: 462609
uagaucacaggucuccugc

SEQ ID NO: 462611 - RNA, 19 nt, Artificial Sequence
  Description of Artificial Sequence: Synthetic oligonucleotide
  Sense strand starting at position 1738 of SEQ ID NO: 317076
ucaacuucuccaugcggaa

SEQ ID NO: 462612 - RNA, 19 nt, Artificial Sequence
  Description of Artificial Sequence: Synthetic oligonucleotide
  Antisense Strand to SEQ ID NO: 462611
uuccgcauggagaaguuga

SEQ ID NO: 462613 - RNA, 19 nt, Artificial Sequence
  Description of Artificial Sequence: Synthetic oligonucleotide
  Sense strand starting at position 1795 of SEQ ID NO: 317076
gguucuucucccgcgagua

SEQ ID NO: 462614 - RNA, 19 nt, Artificial Sequence
  Description of Artificial Sequence: Synthetic oligonucleotide
  Antisense Strand to SEQ ID NO: 462613
uacucgcgggagaagaacc

SEQ ID NO: 462615 - RNA, 19 nt, Artificial Sequence
  Description of Artificial Sequence: Synthetic oligonucleotide
  Sense strand starting at position 1796 of SEQ ID NO: 317076
guucuucucccgcgaguac

SEQ ID NO: 462616 - RNA, 19 nt, Artificial Sequence
  Description of Artificial Sequence: Synthetic oligonucleotide
  Antisense Strand to SEQ ID NO: 462615
guacucgcgggagaagaac

SEQ ID NO: 462617 - RNA, 19 nt, Artificial Sequence
  Description of Artificial Sequence: Synthetic oligonucleotide
  Sense strand starting at position 1909 of SEQ ID NO: 317076
gcgccaucuuccucugcga

SEQ ID NO: 462618 - RNA, 19 nt, Artificial Sequence
  Description of Artificial Sequence: Synthetic oligonucleotide
  Antisense Strand to SEQ ID NO: 462617
ucgcagaggaagauggcgc

SEQ ID NO: 462619 - RNA, 19 nt, Artificial Sequence
  Description of Artificial Sequence: Synthetic oligonucleotide
  Sense strand starting at position 2007 of SEQ ID NO: 317076
aauuguaguuccuccguga

SEQ ID NO: 462620 - RNA, 19 nt, Artificial Sequence
  Description of Artificial Sequence: Synthetic oligonucleotide
  Antisense Strand to SEQ ID NO: 462619
ucacggaggaacuacaauu

SEQ ID NO: 462621 - RNA, 19 nt, Artificial Sequence
  Description of Artificial Sequence: Synthetic oligonucleotide
  Sense strand starting at position 2286 of SEQ ID NO: 317076
ggcugagccugauaaugcu

SEQ ID NO: 462622 - RNA, 19 nt, Artificial Sequence
  Description of Artificial Sequence: Synthetic oligonucleotide
  Antisense Strand to SEQ ID NO: 462621
agcauuaucaggcucagcc

SEQ ID NO: 462623 - RNA, 19 nt, Artificial Sequence
  Description of Artificial Sequence: Synthetic oligonucleotide
  Sense strand starting at position 2601 of SEQ ID NO: 317076
gagccaaaguuagcauaga

SEQ ID NO: 462624 - RNA, 19 nt, Artificial Sequence
  Description of Artificial Sequence: Synthetic oligonucleotide
  Antisense Strand to SEQ ID NO: 462623
ucuaugcuaacuuuggcuc

SEQ ID NO: 462625 - RNA, 19 nt, Artificial Sequence
  Description of Artificial Sequence: Synthetic oligonucleotide
  Sense strand starting at position 2738 of SEQ ID NO: 317076
gggagcucaucuggcaaga

SEQ ID NO: 462626 - RNA, 19 nt, Artificial Sequence
  Description of Artificial Sequence: Synthetic oligonucleotide
  Antisense Strand to SEQ ID NO: 462625
ucuugccagaugagcuccc

SEQ ID NO: 462627 - RNA, 19 nt, Artificial Sequence
  Description of Artificial Sequence: Synthetic oligonucleotide
  Sense strand starting at position 2740 of SEQ ID NO: 317076
gagcucaucuggcaagaau

SEQ ID NO: 462628 - RNA, 19 nt, Artificial Sequence
  Description of Artificial Sequence: Synthetic oligonucleotide
  Antisense Strand to SEQ ID NO: 462627
auucuugccagaugagcuc

SEQ ID NO: 462629 - RNA, 19 nt, Artificial Sequence
  Description of Artificial Sequence: Synthetic oligonucleotide
  Sense strand starting at position 2853 of SEQ ID NO: 317076
ugggcaucuugagaggaau

SEQ ID NO: 462630 - RNA, 19 nt, Artificial Sequence
  Description of Artificial Sequence: Synthetic oligonucleotide
  Antisense Strand to SEQ ID NO: 462629
auuccucucaagaugccca

SEQ ID NO: 462631 - RNA, 19 nt, Artificial Sequence
  Description of Artificial Sequence: Synthetic oligonucleotide
  Sense strand starting at position 2855 of SEQ ID NO: 317076
ggcaucuugagaggaauua

SEQ ID NO: 462632 - RNA, 19 nt, Artificial Sequence
  Description of Artificial Sequence: Synthetic oligonucleotide
  Antisense Strand to SEQ ID NO: 462631
uaauuccucucaagaugcc

SEQ ID NO: 462633 - RNA, 19 nt, Artificial Sequence
  Description of Artificial Sequence: Synthetic oligonucleotide
  Sense strand starting at position 2904 of SEQ ID NO: 317076
gggauagggucucugucau

SEQ ID NO: 462634 - RNA, 19 nt, Artificial Sequence
  Description of Artificial Sequence: Synthetic oligonucleotide
  Antisense Strand to SEQ ID NO: 462633
augacagagacccuauccc

SEQ ID NO: 462635 - RNA, 19 nt, Artificial Sequence
  Description of Artificial Sequence: Synthetic oligonucleotide
  Sense strand starting at position 3016 of SEQ ID NO: 317076
gaacuauaggugcguguca

SEQ ID NO: 462636 - RNA, 19 nt, Artificial Sequence
  Description of Artificial Sequence: Synthetic oligonucleotide
  Antisense Strand to SEQ ID NO: 462635
ugacacgcaccuauaguuc

SEQ ID NO: 462637 - RNA, 19 nt, Artificial Sequence
  Description of Artificial Sequence: Synthetic oligonucleotide
  Sense strand starting at position 3068 of SEQ ID NO: 317076
gaaauuaggucucccuaug

SEQ ID NO: 462638 - RNA, 19 nt, Artificial Sequence
  Description of Artificial Sequence: Synthetic oligonucleotide
  Antisense Strand to SEQ ID NO: 462637
cauagggagaccuaauuuc

SEQ ID NO: 462639 - RNA, 19 nt, Artificial Sequence
  Description of Artificial Sequence: Synthetic oligonucleotide
  Sense strand starting at position 3202 of SEQ ID NO: 317076
uaucuuguguuguuccaga

SEQ ID NO: 462640 - RNA, 19 nt, Artificial Sequence
  Description of Artificial Sequence: Synthetic oligonucleotide
  Antisense Strand to SEQ ID NO: 462639
ucuggaacaacacaagaua

SEQ ID NO: 462641 - RNA, 19 nt, Artificial Sequence
  Description of Artificial Sequence: Synthetic oligonucleotide
  Sense strand starting at position 3207 of SEQ ID NO: 317076
uguguuguuccagagaaga

SEQ ID NO: 462642 - RNA, 19 nt, Artificial Sequence
  Description of Artificial Sequence: Synthetic oligonucleotide
  Antisense Strand to SEQ ID NO: 462641
ucuucucuggaacaacaca

SEQ ID NO: 462643 - RNA, 19 nt, Artificial Sequence
  Description of Artificial Sequence: Synthetic oligonucleotide
  Sense strand starting at position 3209 of SEQ ID NO: 317076
uguuguuccagagaagauu

SEQ ID NO: 462644 - RNA, 19 nt, Artificial Sequence
  Description of Artificial Sequence: Synthetic oligonucleotide
  Antisense Strand to SEQ ID NO: 462643
aaucuucucuggaacaaca

SEQ ID NO: 462645 - RNA, 19 nt, Artificial Sequence
  Description of Artificial Sequence: Synthetic oligonucleotide
  Sense strand starting at position 3239 of SEQ ID NO: 317076
gaaucaaggugaucugcuu

SEQ ID NO: 462646 - RNA, 19 nt, Artificial Sequence
  Description of Artificial Sequence: Synthetic oligonucleotide
  Antisense Strand to SEQ ID NO: 462645
aagcagaucaccuugauuc

SEQ ID NO: 462647 - RNA, 19 nt, Artificial Sequence
  Description of Artificial Sequence: Synthetic oligonucleotide
  Sense strand starting at position 3383 of SEQ ID NO: 317076
uucccaauaugggauguau

SEQ ID NO: 462648 - RNA, 19 nt, Artificial Sequence
  Description of Artificial Sequence: Synthetic oligonucleotide
  Antisense Strand to SEQ ID NO: 462647
auacaucccauauugggaa

SEQ ID NO: 462649 - RNA, 19 nt, Artificial Sequence
  Description of Artificial Sequence: Synthetic oligonucleotide
  Sense strand starting at position 3489 of SEQ ID NO: 317076
ugucauugccaucauugca

SEQ ID NO: 462650 - RNA, 19 nt, Artificial Sequence
  Description of Artificial Sequence: Synthetic oligonucleotide
  Antisense Strand to SEQ ID NO: 462649
ugcaaugauggcaaugaca

SEQ ID NO: 462651 - RNA, 19 nt, Artificial Sequence
  Description of Artificial Sequence: Synthetic oligonucleotide
  Sense strand starting at position 3546 of SEQ ID NO: 317076
ggccuagauucucaccugu

SEQ ID NO: 462652 - RNA, 19 nt, Artificial Sequence
  Description of Artificial Sequence: Synthetic oligonucleotide
  Antisense Strand to SEQ ID NO: 462651
acaggugagaaucuaggcc

SEQ ID NO: 462653 - RNA, 19 nt, Artificial Sequence
  Description of Artificial Sequence: Synthetic oligonucleotide
  Sense strand starting at position 3608 of SEQ ID NO: 317076
aucuccuggugccuagaau

SEQ ID NO: 462654 - RNA, 19 nt, Artificial Sequence
  Description of Artificial Sequence: Synthetic oligonucleotide
  Antisense Strand to SEQ ID NO: 462653
auucuaggcaccaggagau

SEQ ID NO: 462655 - RNA, 19 nt, Artificial Sequence
  Description of Artificial Sequence: Synthetic oligonucleotide
  Sense strand starting at position 3690 of SEQ ID NO: 317076
guaggucuuggugggcuua

SEQ ID NO: 462656 - RNA, 19 nt, Artificial Sequence
  Description of Artificial Sequence: Synthetic oligonucleotide
  Antisense Strand to SEQ ID NO: 462655
uaagcccaccaagaccuac

SEQ ID NO: 462657 - RNA, 19 nt, Artificial Sequence
  Description of Artificial Sequence: Synthetic oligonucleotide
  Sense strand starting at position 3692 of SEQ ID NO: 317076
aggucuuggugggcuuaga

SEQ ID NO: 462658 - RNA, 19 nt, Artificial Sequence
  Description of Artificial Sequence: Synthetic oligonucleotide
  Antisense Strand to SEQ ID NO: 462657
ucuaagcccaccaagaccu

SEQ ID NO: 462659 - RNA, 19 nt, Artificial Sequence
  Description of Artificial Sequence: Synthetic oligonucleotide
  Sense strand starting at position 3750 of SEQ ID NO: 317076
cccuguuggucaucuggaa

SEQ ID NO: 462660 - RNA, 19 nt, Artificial Sequence
  Description of Artificial Sequence: Synthetic oligonucleotide
  Antisense Strand to SEQ ID NO: 462659
uuccagaugaccaacaggg

SEQ ID NO: 462661 - RNA, 19 nt, Artificial Sequence
  Description of Artificial Sequence: Synthetic oligonucleotide
  Sense strand starting at position 3762 of SEQ ID NO: 317076
ucuggaaugugguccuaac

SEQ ID NO: 462662 - RNA, 19 nt, Artificial Sequence
  Description of Artificial Sequence: Synthetic oligonucleotide
  Antisense Strand to SEQ ID NO: 462661
guuaggaccacauuccaga

SEQ ID NO: 462663 - RNA, 19 nt, Artificial Sequence
  Description of Artificial Sequence: Synthetic oligonucleotide
  Sense strand starting at position 3786 of SEQ ID NO: 317076
auguuccagcucugugaau

SEQ ID NO: 462664 - RNA, 19 nt, Artificial Sequence
  Description of Artificial Sequence: Synthetic oligonucleotide
  Antisense Strand to SEQ ID NO: 462663
auucacagagcuggaacau

SEQ ID NO: 462665 - RNA, 19 nt, Artificial Sequence
  Description of Artificial Sequence: Synthetic oligonucleotide
  Sense strand starting at position 3820 of SEQ ID NO: 317076
ucuagaaaggcccguuaua

SEQ ID NO: 462666 - RNA, 19 nt, Artificial Sequence
  Description of Artificial Sequence: Synthetic oligonucleotide
  Antisense Strand to SEQ ID NO: 462665
uauaacgggccuuucuaga

SEQ ID NO: 462667 - RNA, 19 nt, Artificial Sequence
  Description of Artificial Sequence: Synthetic oligonucleotide
  Sense strand starting at position 3866 of SEQ ID NO: 317076
ggagcagagucuucuggga

SEQ ID NO: 462668 - RNA, 19 nt, Artificial Sequence
  Description of Artificial Sequence: Synthetic oligonucleotide
  Antisense Strand to SEQ ID NO: 462667
ucccagaagacucugcucc

SEQ ID NO: 462669 - RNA, 19 nt, Artificial Sequence
  Description of Artificial Sequence: Synthetic oligonucleotide
  Sense strand starting at position 3868 of SEQ ID NO: 317076
agcagagucuucugggauc

SEQ ID NO: 462670 - RNA, 19 nt, Artificial Sequence
  Description of Artificial Sequence: Synthetic oligonucleotide
  Antisense Strand to SEQ ID NO: 462669
gaucccagaagacucugcu

SEQ ID NO: 462671 - RNA, 19 nt, Artificial Sequence
  Description of Artificial Sequence: Synthetic oligonucleotide
  Sense strand starting at position 3882 of SEQ ID NO: 317076
ggauccugcaucugacagu

SEQ ID NO: 462672 - RNA, 19 nt, Artificial Sequence
  Description of Artificial Sequence: Synthetic oligonucleotide
  Antisense Strand to SEQ ID NO: 462671
acugucagaugcaggaucc

SEQ ID NO: 462673 - RNA, 19 nt, Artificial Sequence
  Description of Artificial Sequence: Synthetic oligonucleotide
  Sense strand starting at position 3935 of SEQ ID NO: 317076
cccgguuucccagauaacu

SEQ ID NO: 462674 - RNA, 19 nt, Artificial Sequence
  Description of Artificial Sequence: Synthetic oligonucleotide
  Antisense Strand to SEQ ID NO: 462673
aguuaucugggaaaccggg

SEQ ID NO: 462675 - RNA, 19 nt, Artificial Sequence
  Description of Artificial Sequence: Synthetic oligonucleotide
  Sense strand starting at position 22 of SEQ ID NO: 317077
gaguuuguggauugagauc

SEQ ID NO: 462676 - RNA, 19 nt, Artificial Sequence
  Description of Artificial Sequence: Synthetic oligonucleotide
  Antisense Strand to SEQ ID NO: 462675
gaucucaauccacaaacuc

SEQ ID NO: 462677 - RNA, 19 nt, Artificial Sequence
  Description of Artificial Sequence: Synthetic oligonucleotide
  Sense strand starting at position 81 of SEQ ID NO: 317077
ggauauauguagcuauaau

SEQ ID NO: 462678 - RNA, 19 nt, Artificial Sequence
  Description of Artificial Sequence: Synthetic oligonucleotide
  Antisense Strand to SEQ ID NO: 462677
auuauagcuacauauaucc

SEQ ID NO: 462679 - RNA, 19 nt, Artificial Sequence
  Description of Artificial Sequence: Synthetic oligonucleotide
  Sense strand starting at position 186 of SEQ ID NO: 317077
ugaaauauuugugagauug

SEQ ID NO: 462680 - RNA, 19 nt, Artificial Sequence
  Description of Artificial Sequence: Synthetic oligonucleotide
  Antisense Strand to SEQ ID NO: 462679
caaucucacaaauauuuca

SEQ ID NO: 462681 - RNA, 19 nt, Artificial Sequence
  Description of Artificial Sequence: Synthetic oligonucleotide
  Sense strand starting at position 262 of SEQ ID NO: 317077
uggacaguaugauccaauu

SEQ ID NO: 462682 - RNA, 19 nt, Artificial Sequence
  Description of Artificial Sequence: Synthetic oligonucleotide
  Antisense Strand to SEQ ID NO: 462681
aauuggaucauacugucca

SEQ ID NO: 462683 - RNA, 19 nt, Artificial Sequence
  Description of Artificial Sequence: Synthetic oligonucleotide
  Sense strand starting at position 534 of SEQ ID NO: 317077
cugacauggugacuguaau

SEQ ID NO: 462684 - RNA, 19 nt, Artificial Sequence
  Description of Artificial Sequence: Synthetic oligonucleotide
  Antisense Strand to SEQ ID NO: 462683
auuacagucaccaugucag

SEQ ID NO: 462685 - RNA, 19 nt, Artificial Sequence
  Description of Artificial Sequence: Synthetic oligonucleotide
  Sense strand starting at position 535 of SEQ ID NO: 317077
ugacauggugacuguaaua

SEQ ID NO: 462686 - RNA, 19 nt, Artificial Sequence
  Description of Artificial Sequence: Synthetic oligonucleotide
  Antisense Strand to SEQ ID NO: 462685
uauuacagucaccauguca

SEQ ID NO: 462687 - RNA, 19 nt, Artificial Sequence
  Description of Artificial Sequence: Synthetic oligonucleotide
  Sense strand starting at position 734 of SEQ ID NO: 317077
aaaggaggugcuuagcaaa

SEQ ID NO: 462688 - RNA, 19 nt, Artificial Sequence
  Description of Artificial Sequence: Synthetic oligonucleotide
  Antisense Strand to SEQ ID NO: 462687
uuugcuaagcaccuccuuu

SEQ ID NO: 462689 - RNA, 19 nt, Artificial Sequence
  Description of Artificial Sequence: Synthetic oligonucleotide
  Sense strand starting at position 741 of SEQ ID NO: 317077
gugcuuagcaaagagugaa

SEQ ID NO: 462690 - RNA, 19 nt, Artificial Sequence
  Description of Artificial Sequence: Synthetic oligonucleotide
  Antisense Strand to SEQ ID NO: 462689
uucacucuuugcuaagcac

SEQ ID NO: 462691 - RNA, 19 nt, Artificial Sequence
  Description of Artificial Sequence: Synthetic oligonucleotide
  Sense strand starting at position 784 of SEQ ID NO: 317077
ggaaauuaauugucuagca

SEQ ID NO: 462692 - RNA, 19 nt, Artificial Sequence
  Description of Artificial Sequence: Synthetic oligonucleotide
  Antisense Strand to SEQ ID NO: 462691
ugcuagacaauuaauuucc

SEQ ID NO: 462693 - RNA, 19 nt, Artificial Sequence
  Description of Artificial Sequence: Synthetic oligonucleotide
  Sense strand starting at position 796 of SEQ ID NO: 317077
ucuagcacucuggaauaua

SEQ ID NO: 462694 - RNA, 19 nt, Artificial Sequence
  Description of Artificial Sequence: Synthetic oligonucleotide
  Antisense Strand to SEQ ID NO: 462693
uauauuccagagugcuaga

SEQ ID NO: 462695 - RNA, 19 nt, Artificial Sequence
  Description of Artificial Sequence: Synthetic oligonucleotide
  Sense strand starting at position 900 of SEQ ID NO: 317077
uagacuauugaaugucaga

SEQ ID NO: 462696 - RNA, 19 nt, Artificial Sequence
  Description of Artificial Sequence: Synthetic oligonucleotide
  Antisense Strand to SEQ ID NO: 462695
ucugacauucaauagucua

SEQ ID NO: 462697 - RNA, 19 nt, Artificial Sequence
  Description of Artificial Sequence: Synthetic oligonucleotide
  Sense strand starting at position 910 of SEQ ID NO: 317077
aaugucagaugagaauuua

SEQ ID NO: 462698 - RNA, 19 nt, Artificial Sequence
  Description of Artificial Sequence: Synthetic oligonucleotide
  Antisense Strand to SEQ ID NO: 462697
uaaauucucaucugacauu

SEQ ID NO: 462699 - RNA, 19 nt, Artificial Sequence
  Description of Artificial Sequence: Synthetic oligonucleotide
  Sense strand starting at position 993 of SEQ ID NO: 317077
ugauaaucagaagguuuac

SEQ ID NO: 462700 - RNA, 19 nt, Artificial Sequence
  Description of Artificial Sequence: Synthetic oligonucleotide
  Antisense Strand to SEQ ID NO: 462699
guaaaccuucugauuauca

SEQ ID NO: 462701 - RNA, 19 nt, Artificial Sequence
  Description of Artificial Sequence: Synthetic oligonucleotide
  Sense strand starting at position 1502 of SEQ ID NO: 317077
gggagugucacugaguuua

SEQ ID NO: 462702 - RNA, 19 nt, Artificial Sequence
  Description of Artificial Sequence: Synthetic oligonucleotide
  Antisense Strand to SEQ ID NO: 462701
uaaacucagugacacuccc

SEQ ID NO: 462703 - RNA, 19 nt, Artificial Sequence
  Description of Artificial Sequence: Synthetic oligonucleotide
  Sense strand starting at position 1549 of SEQ ID NO: 317077
auggaaaccuguuucugaa

SEQ ID NO: 462704 - RNA, 19 nt, Artificial Sequence
  Description of Artificial Sequence: Synthetic oligonucleotide
  Antisense Strand to SEQ ID NO: 462703
uucagaaacagguuuccau

SEQ ID NO: 462705 - RNA, 19 nt, Artificial Sequence
  Description of Artificial Sequence: Synthetic oligonucleotide
  Sense strand starting at position 1699 of SEQ ID NO: 317077
uugauaugagauuguuacu

SEQ ID NO: 462706 - RNA, 19 nt, Artificial Sequence
  Description of Artificial Sequence: Synthetic oligonucleotide
  Antisense Strand to SEQ ID NO: 462705
aguaacaaucucauaucaa

SEQ ID NO: 462707 - RNA, 19 nt, Artificial Sequence
  Description of Artificial Sequence: Synthetic oligonucleotide
  Sense strand starting at position 1704 of SEQ ID NO: 317077
augagauuguuacugaggu

SEQ ID NO: 462708 - RNA, 19 nt, Artificial Sequence
  Description of Artificial Sequence: Synthetic oligonucleotide
  Antisense Strand to SEQ ID NO: 462707
accucaguaacaaucucau

SEQ ID NO: 462709 - RNA, 19 nt, Artificial Sequence
  Description of Artificial Sequence: Synthetic oligonucleotide
  Sense strand starting at position 1714 of SEQ ID NO: 317077
uacugagguccagauguuu

SEQ ID NO: 462710 - RNA, 19 nt, Artificial Sequence
  Description of Artificial Sequence: Synthetic oligonucleotide
  Antisense Strand to SEQ ID NO: 462709
aaacaucuggaccucagua

SEQ ID NO: 462711 - RNA, 19 nt, Artificial Sequence
  Description of Artificial Sequence: Synthetic oligonucleotide
  Sense strand starting at position 1816 of SEQ ID NO: 317077
gugauauguccacagguau

SEQ ID NO: 462712 - RNA, 19 nt, Artificial Sequence
  Description of Artificial Sequence: Synthetic oligonucleotide
  Antisense Strand to SEQ ID NO: 462711
auaccuguggacauaucac

SEQ ID NO: 462713 - RNA, 19 nt, Artificial Sequence
  Description of Artificial Sequence: Synthetic oligonucleotide
  Sense strand starting at position 1853 of SEQ ID NO: 317077
agaacaauuugucagaaua

SEQ ID NO: 462714 - RNA, 19 nt, Artificial Sequence
  Description of Artificial Sequence: Synthetic oligonucleotide
  Antisense Strand to SEQ ID NO: 462713
uauucugacaaauuguucu

SEQ ID NO: 462715 - RNA, 19 nt, Artificial Sequence
  Description of Artificial Sequence: Synthetic oligonucleotide
  Sense strand starting at position 1917 of SEQ ID NO: 317077
cuugaugcauuugucauua

SEQ ID NO: 462716 - RNA, 19 nt, Artificial Sequence
  Description of Artificial Sequence: Synthetic oligonucleotide
  Antisense Strand to SEQ ID NO: 462715
uaaugacaaaugcaucaag

SEQ ID NO: 462717 - RNA, 19 nt, Artificial Sequence
  Description of Artificial Sequence: Synthetic oligonucleotide
  Sense strand starting at position 1963 of SEQ ID NO: 317077
ugguaaugacucugaaaua

SEQ ID NO: 462718 - RNA, 19 nt, Artificial Sequence
  Description of Artificial Sequence: Synthetic oligonucleotide
  Antisense Strand to SEQ ID NO: 462717
uauuucagagucauuacca

SEQ ID NO: 462719 - RNA, 19 nt, Artificial Sequence
  Description of Artificial Sequence: Synthetic oligonucleotide
  Sense strand starting at position 2078 of SEQ ID NO: 317077
auuuaagauuucggaaagu

SEQ ID NO: 462720 - RNA, 19 nt, Artificial Sequence
  Description of Artificial Sequence: Synthetic oligonucleotide
  Antisense Strand to SEQ ID NO: 462719
acuuuccgaaaucuuaaau

SEQ ID NO: 462721 - RNA, 19 nt, Artificial Sequence
  Description of Artificial Sequence: Synthetic oligonucleotide
  Sense strand starting at position 2111 of SEQ ID NO: 317077
ugccaauuuaagcgaaugu

SEQ ID NO: 462722 - RNA, 19 nt, Artificial Sequence
  Description of Artificial Sequence: Synthetic oligonucleotide
  Antisense Strand to SEQ ID NO: 462721
acauucgcuuaaauuggca

SEQ ID NO: 462723 - RNA, 19 nt, Artificial Sequence
  Description of Artificial Sequence: Synthetic oligonucleotide
  Sense strand starting at position 2118 of SEQ ID NO: 317077
uuaagcgaauguuugauuu

SEQ ID NO: 462724 - RNA, 19 nt, Artificial Sequence
  Description of Artificial Sequence: Synthetic oligonucleotide
  Antisense Strand to SEQ ID NO: 462723
aaaucaaacauucgcuuaa

SEQ ID NO: 462725 - RNA, 19 nt, Artificial Sequence
  Description of Artificial Sequence: Synthetic oligonucleotide
  Sense strand starting at position 2122 of SEQ ID NO: 317077
gcgaauguuugauuucuua

SEQ ID NO: 462726 - RNA, 19 nt, Artificial Sequence
  Description of Artificial Sequence: Synthetic oligonucleotide
  Antisense Strand to SEQ ID NO: 462725
uaagaaaucaaacauucgc

SEQ ID NO: 462727 - RNA, 19 nt, Artificial Sequence
  Description of Artificial Sequence: Synthetic oligonucleotide
  Sense strand starting at position 2301 of SEQ ID NO: 317077
gugcuuugggaugaaugaa

SEQ ID NO: 462728 - RNA, 19 nt, Artificial Sequence
  Description of Artificial Sequence: Synthetic oligonucleotide
  Antisense Strand to SEQ ID NO: 462727
uucauucaucccaaagcac

SEQ ID NO: 462729 - RNA, 19 nt, Artificial Sequence
  Description of Artificial Sequence: Synthetic oligonucleotide
  Sense strand starting at position 2589 of SEQ ID NO: 317077
acaacauaauguguuauca

SEQ ID NO: 462730 - RNA, 19 nt, Artificial Sequence
  Description of Artificial Sequence: Synthetic oligonucleotide
  Antisense Strand to SEQ ID NO: 462729
ugauaacacauuauguugu

SEQ ID NO: 462731 - RNA, 19 nt, Artificial Sequence
  Description of Artificial Sequence: Synthetic oligonucleotide
  Sense strand starting at position 2725 of SEQ ID NO: 317077
auuacaauggcugaaugua

SEQ ID NO: 462732 - RNA, 19 nt, Artificial Sequence
  Description of Artificial Sequence: Synthetic oligonucleotide
  Antisense Strand to SEQ ID NO: 462731
uacauucagccauuguaau

SEQ ID NO: 462733 - RNA, 19 nt, Artificial Sequence
  Description of Artificial Sequence: Synthetic oligonucleotide
  Sense strand starting at position 2817 of SEQ ID NO: 317077
guguacaaauaaucacauu

SEQ ID NO: 462734 - RNA, 19 nt, Artificial Sequence
  Description of Artificial Sequence: Synthetic oligonucleotide
  Antisense Strand to SEQ ID NO: 462733
aaugugauuauuuguacac

SEQ ID NO: 462735 - RNA, 19 nt, Artificial Sequence
  Description of Artificial Sequence: Synthetic oligonucleotide
  Sense strand starting at position 2829 of SEQ ID NO: 317077
ucacauuauugaguauaug

SEQ ID NO: 462736 - RNA, 19 nt, Artificial Sequence
  Description of Artificial Sequence: Synthetic oligonucleotide
  Antisense Strand to SEQ ID NO: 462735
cauauacucaauaauguga

SEQ ID NO: 462737 - RNA, 19 nt, Artificial Sequence
  Description of Artificial Sequence: Synthetic oligonucleotide
  Sense strand starting at position 2832 of SEQ ID NO: 317077
cauuauugaguauaugagu

SEQ ID NO: 462738 - RNA, 19 nt, Artificial Sequence
  Description of Artificial Sequence: Synthetic oligonucleotide
  Antisense Strand to SEQ ID NO: 462737
acucauauacucaauaaug

SEQ ID NO: 462739 - RNA, 19 nt, Artificial Sequence
  Description of Artificial Sequence: Synthetic oligonucleotide
  Sense strand starting at position 2841 of SEQ ID NO: 317077
guauaugaguuuccaagaa

SEQ ID NO: 462740 - RNA, 19 nt, Artificial Sequence
  Description of Artificial Sequence: Synthetic oligonucleotide
  Antisense Strand to SEQ ID NO: 462739
uucuuggaaacucauauac

SEQ ID NO: 462741 - RNA, 19 nt, Artificial Sequence
  Description of Artificial Sequence: Synthetic oligonucleotide
  Sense strand starting at position 2976 of SEQ ID NO: 317077
ugauccauccuaggugacu

SEQ ID NO: 462742 - RNA, 19 nt, Artificial Sequence
  Description of Artificial Sequence: Synthetic oligonucleotide
  Antisense Strand to SEQ ID NO: 462741
agucaccuaggauggauca

SEQ ID NO: 462743 - RNA, 19 nt, Artificial Sequence
  Description of Artificial Sequence: Synthetic oligonucleotide
  Sense strand starting at position 2988 of SEQ ID NO: 317077
ggugacuccaaaggauuau

SEQ ID NO: 462744 - RNA, 19 nt, Artificial Sequence
  Description of Artificial Sequence: Synthetic oligonucleotide
  Antisense Strand to SEQ ID NO: 462743
auaauccuuuggagucacc

SEQ ID NO: 462745 - RNA, 19 nt, Artificial Sequence
  Description of Artificial Sequence: Synthetic oligonucleotide
  Sense strand starting at position 3110 of SEQ ID NO: 317077
guguuaucuagguaaacuu

SEQ ID NO: 462746 - RNA, 19 nt, Artificial Sequence
  Description of Artificial Sequence: Synthetic oligonucleotide
  Antisense Strand to SEQ ID NO: 462745
aaguuuaccuagauaacac

SEQ ID NO: 462747 - RNA, 19 nt, Artificial Sequence
  Description of Artificial Sequence: Synthetic oligonucleotide
  Sense strand starting at position 3130 of SEQ ID NO: 317077
augaccuagcuugauaagu

SEQ ID NO: 462748 - RNA, 19 nt, Artificial Sequence
  Description of Artificial Sequence: Synthetic oligonucleotide
  Antisense Strand to SEQ ID NO: 462747
acuuaucaagcuaggucau

SEQ ID NO: 462749 - RNA, 19 nt, Artificial Sequence
  Description of Artificial Sequence: Synthetic oligonucleotide
  Sense strand starting at position 3266 of SEQ ID NO: 317077
acagucuuaagauggaguu

SEQ ID NO: 462750 - RNA, 19 nt, Artificial Sequence
  Description of Artificial Sequence: Synthetic oligonucleotide
  Antisense Strand to SEQ ID NO: 462749
aacuccaucuuaagacugu

SEQ ID NO: 462751 - RNA, 19 nt, Artificial Sequence
  Description of Artificial Sequence: Synthetic oligonucleotide
  Sense strand starting at position 3267 of SEQ ID NO: 317077
cagucuuaagauggaguuu

SEQ ID NO: 462752 - RNA, 19 nt, Artificial Sequence
  Description of Artificial Sequence: Synthetic oligonucleotide
  Antisense Strand to SEQ ID NO: 462751
aaacuccaucuuaagacug

SEQ ID NO: 462753 - RNA, 19 nt, Artificial Sequence
  Description of Artificial Sequence: Synthetic oligonucleotide
  Sense strand starting at position 3835 of SEQ ID NO: 317077
aaaugaaugcauggaguga

SEQ ID NO: 462754 - RNA, 19 nt, Artificial Sequence
  Description of Artificial Sequence: Synthetic oligonucleotide
  Antisense Strand to SEQ ID NO: 462753
ucacuccaugcauucauuu

SEQ ID NO: 462755 - RNA, 19 nt, Artificial Sequence
  Description of Artificial Sequence: Synthetic oligonucleotide
  Sense strand starting at position 148 of SEQ ID NO: 317078
gauggaguguagguuauaa

SEQ ID NO: 462756 - RNA, 19 nt, Artificial Sequence
  Description of Artificial Sequence: Synthetic oligonucleotide
  Antisense Strand to SEQ ID NO: 462755
uuauaaccuacacuccauc

SEQ ID NO: 462757 - RNA, 19 nt, Artificial Sequence
  Description of Artificial Sequence: Synthetic oligonucleotide
  Sense strand starting at position 150 of SEQ ID NO: 317078
uggaguguagguuauaauu

SEQ ID NO: 462758 - RNA, 19 nt, Artificial Sequence
  Description of Artificial Sequence: Synthetic oligonucleotide
  Antisense Strand to SEQ ID NO: 462757
aauuauaaccuacacucca

SEQ ID NO: 462759 - RNA, 19 nt, Artificial Sequence
  Description of Artificial Sequence: Synthetic oligonucleotide
  Sense strand starting at position 255 of SEQ ID NO: 317078
ucuagucuuggccaugaaa

SEQ ID NO: 462760 - RNA, 19 nt, Artificial Sequence
  Description of Artificial Sequence: Synthetic oligonucleotide
  Antisense Strand to SEQ ID NO: 462759
uuucauggccaagacuaga

SEQ ID NO: 462761 - RNA, 19 nt, Artificial Sequence
  Description of Artificial Sequence: Synthetic oligonucleotide
  Sense strand starting at position 303 of SEQ ID NO: 317078
aggucucuccgaugauuaa

SEQ ID NO: 462762 - RNA, 19 nt, Artificial Sequence
  Description of Artificial Sequence: Synthetic oligonucleotide
  Antisense Strand to SEQ ID NO: 462761
uuaaucaucggagagaccu

SEQ ID NO: 462763 - RNA, 19 nt, Artificial Sequence
  Description of Artificial Sequence: Synthetic oligonucleotide
  Sense strand starting at position 304 of SEQ ID NO: 317078
ggucucuccgaugauuaaa

SEQ ID NO: 462764 - RNA, 19 nt, Artificial Sequence
  Description of Artificial Sequence: Synthetic oligonucleotide
  Antisense Strand to SEQ ID NO: 462763
uuuaaucaucggagagacc

SEQ ID NO: 462765 - RNA, 19 nt, Artificial Sequence
  Description of Artificial Sequence: Synthetic oligonucleotide
  Sense strand starting at position 399 of SEQ ID NO: 317078
gccacaguucagugagaga

SEQ ID NO: 462766 - RNA, 19 nt, Artificial Sequence
  Description of Artificial Sequence: Synthetic oligonucleotide
  Antisense Strand to SEQ ID NO: 462765
ucucucacugaacuguggc

SEQ ID NO: 462767 - RNA, 19 nt, Artificial Sequence
  Description of Artificial Sequence: Synthetic oligonucleotide
  Sense strand starting at position 549 of SEQ ID NO: 317078
cugcaauauaagggaguua

SEQ ID NO: 462768 - RNA, 19 nt, Artificial Sequence
  Description of Artificial Sequence: Synthetic oligonucleotide
  Antisense Strand to SEQ ID NO: 462767
uaacucccuuauauugcag

SEQ ID NO: 462769 - RNA, 19 nt, Artificial Sequence
  Description of Artificial Sequence: Synthetic oligonucleotide
  Sense strand starting at position 561 of SEQ ID NO: 317078
ggaguuaugccagaugacc

SEQ ID NO: 462770 - RNA, 19 nt, Artificial Sequence
  Description of Artificial Sequence: Synthetic oligonucleotide
  Antisense Strand to SEQ ID NO: 462769
ggucaucuggcauaacucc

SEQ ID NO: 462771 - RNA, 19 nt, Artificial Sequence
  Description of Artificial Sequence: Synthetic oligonucleotide
  Sense strand starting at position 609 of SEQ ID NO: 317078
gguagucuaacgcauuaac

SEQ ID NO: 462772 - RNA, 19 nt, Artificial Sequence
  Description of Artificial Sequence: Synthetic oligonucleotide
  Antisense Strand to SEQ ID NO: 462771
guuaaugcguuagacuacc

SEQ ID NO: 462773 - RNA, 19 nt, Artificial Sequence
  Description of Artificial Sequence: Synthetic oligonucleotide
  Sense strand starting at position 1005 of SEQ ID NO: 317078
gaauaauauuuaggaagag

SEQ ID NO: 462774 - RNA, 19 nt, Artificial Sequence
  Description of Artificial Sequence: Synthetic oligonucleotide
  Antisense Strand to SEQ ID NO: 462773
cucuuccuaaauauuauuc

SEQ ID NO: 462775 - RNA, 19 nt, Artificial Sequence
  Description of Artificial Sequence: Synthetic oligonucleotide
  Sense strand starting at position 1045 of SEQ ID NO: 317078
cuacacuguuaagugauua

SEQ ID NO: 462776 - RNA, 19 nt, Artificial Sequence
  Description of Artificial Sequence: Synthetic oligonucleotide
  Antisense Strand to SEQ ID NO: 462775
uaaucacuuaacaguguag

SEQ ID NO: 462777 - RNA, 19 nt, Artificial Sequence
  Description of Artificial Sequence: Synthetic oligonucleotide
  Sense strand starting at position 1050 of SEQ ID NO: 317078
cuguuaagugauuaaacau

SEQ ID NO: 462778 - RNA, 19 nt, Artificial Sequence
  Description of Artificial Sequence: Synthetic oligonucleotide
  Antisense Strand to SEQ ID NO: 462777
auguuuaaucacuuaacag

SEQ ID NO: 462779 - RNA, 19 nt, Artificial Sequence
  Description of Artificial Sequence: Synthetic oligonucleotide
  Sense strand starting at position 1110 of SEQ ID NO: 317078
aaaugaucguaggugaaag

SEQ ID NO: 462780 - RNA, 19 nt, Artificial Sequence
  Description of Artificial Sequence: Synthetic oligonucleotide
  Antisense Strand to SEQ ID NO: 462779
cuuucaccuacgaucauuu

SEQ ID NO: 462781 - RNA, 19 nt, Artificial Sequence
  Description of Artificial Sequence: Synthetic oligonucleotide
  Sense strand starting at position 1214 of SEQ ID NO: 317078
caggguaauccgcaucauc

SEQ ID NO: 462782 - RNA, 19 nt, Artificial Sequence
  Description of Artificial Sequence: Synthetic oligonucleotide
  Antisense Strand to SEQ ID NO: 462781
gaugaugcggauuacccug

SEQ ID NO: 462783 - RNA, 19 nt, Artificial Sequence
  Description of Artificial Sequence: Synthetic oligonucleotide
  Sense strand starting at position 1217 of SEQ ID NO: 317078
gguaauccgcaucaucuua

SEQ ID NO: 462784 - RNA, 19 nt, Artificial Sequence
  Description of Artificial Sequence: Synthetic oligonucleotide
  Antisense Strand to SEQ ID NO: 462783
uaagaugaugcggauuacc

SEQ ID NO: 462785 - RNA, 19 nt, Artificial Sequence
  Description of Artificial Sequence: Synthetic oligonucleotide
  Sense strand starting at position 1339 of SEQ ID NO: 317078
accugacaacuugguaaga

SEQ ID NO: 462786 - RNA, 19 nt, Artificial Sequence
  Description of Artificial Sequence: Synthetic oligonucleotide
  Antisense Strand to SEQ ID NO: 462785
ucuuaccaaguugucaggu

SEQ ID NO: 462787 - RNA, 19 nt, Artificial Sequence
  Description of Artificial Sequence: Synthetic oligonucleotide
  Sense strand starting at position 2049 of SEQ ID NO: 317078
gcgcaaauccaagauuccu

SEQ ID NO: 462788 - RNA, 19 nt, Artificial Sequence
  Description of Artificial Sequence: Synthetic oligonucleotide
  Antisense Strand to SEQ ID NO: 462787
aggaaucuuggauuugcgc

SEQ ID NO: 462789 - RNA, 19 nt, Artificial Sequence
  Description of Artificial Sequence: Synthetic oligonucleotide
  Sense strand starting at position 2256 of SEQ ID NO: 317078
ggcauuguguacccagaaa

SEQ ID NO: 462790 - RNA, 19 nt, Artificial Sequence
  Description of Artificial Sequence: Synthetic oligonucleotide
  Antisense Strand to SEQ ID NO: 462789
uuucuggguacacaaugcc

SEQ ID NO: 462791 - RNA, 19 nt, Artificial Sequence
  Description of Artificial Sequence: Synthetic oligonucleotide
  Sense strand starting at position 2268 of SEQ ID NO: 317078
ccagaaacguccuugaaua

SEQ ID NO: 462792 - RNA, 19 nt, Artificial Sequence
  Description of Artificial Sequence: Synthetic oligonucleotide
  Antisense Strand to SEQ ID NO: 462791
uauucaaggacguuucugg

SEQ ID NO: 462793 - RNA, 19 nt, Artificial Sequence
  Description of Artificial Sequence: Synthetic oligonucleotide
  Sense strand starting at position 2269 of SEQ ID NO: 317078
cagaaacguccuugaauag

SEQ ID NO: 462794 - RNA, 19 nt, Artificial Sequence
  Description of Artificial Sequence: Synthetic oligonucleotide
  Antisense Strand to SEQ ID NO: 462793
cuauucaaggacguuucug

SEQ ID NO: 462795 - RNA, 19 nt, Artificial Sequence
  Description of Artificial Sequence: Synthetic oligonucleotide
  Sense strand starting at position 2270 of SEQ ID NO: 317078
agaaacguccuugaauagu

SEQ ID NO: 462796 - RNA, 19 nt, Artificial Sequence
  Description of Artificial Sequence: Synthetic oligonucleotide
  Antisense Strand to SEQ ID NO: 462795
acuauucaaggacguuucu

SEQ ID NO: 462797 - RNA, 19 nt, Artificial Sequence
  Description of Artificial Sequence: Synthetic oligonucleotide
  Sense strand starting at position 2273 of SEQ ID NO: 317078
aacguccuugaauaguuua

SEQ ID NO: 462798 - RNA, 19 nt, Artificial Sequence
  Description of Artificial Sequence: Synthetic oligonucleotide
  Antisense Strand to SEQ ID NO: 462797
uaaacuauucaaggacguu

SEQ ID NO: 462799 - RNA, 19 nt, Artificial Sequence
  Description of Artificial Sequence: Synthetic oligonucleotide
  Sense strand starting at position 2276 of SEQ ID NO: 317078
guccuugaauaguuuaaag

SEQ ID NO: 462800 - RNA, 19 nt, Artificial Sequence
  Description of Artificial Sequence: Synthetic oligonucleotide
  Antisense Strand to SEQ ID NO: 462799
cuuuaaacuauucaaggac

SEQ ID NO: 462801 - RNA, 19 nt, Artificial Sequence
  Description of Artificial Sequence: Synthetic oligonucleotide
  Sense strand starting at position 2278 of SEQ ID NO: 317078
ccuugaauaguuuaaagca

SEQ ID NO: 462802 - RNA, 19 nt, Artificial Sequence
  Description of Artificial Sequence: Synthetic oligonucleotide
  Antisense Strand to SEQ ID NO: 462801
ugcuuuaaacuauucaagg

SEQ ID NO: 462803 - RNA, 19 nt, Artificial Sequence
  Description of Artificial Sequence: Synthetic oligonucleotide
  Sense strand starting at position 2346 of SEQ ID NO: 317078
auugauuaaaugugugaag

SEQ ID NO: 462804 - RNA, 19 nt, Artificial Sequence
  Description of Artificial Sequence: Synthetic oligonucleotide
  Antisense Strand to SEQ ID NO: 462803
cuucacacauuuaaucaau

SEQ ID NO: 462805 - RNA, 19 nt, Artificial Sequence
  Description of Artificial Sequence: Synthetic oligonucleotide
  Sense strand starting at position 2347 of SEQ ID NO: 317078
uugauuaaaugugugaaga

SEQ ID NO: 462806 - RNA, 19 nt, Artificial Sequence
  Description of Artificial Sequence: Synthetic oligonucleotide
  Antisense Strand to SEQ ID NO: 462805
ucuucacacauuuaaucaa

SEQ ID NO: 462807 - RNA, 19 nt, Artificial Sequence
  Description of Artificial Sequence: Synthetic oligonucleotide
  Sense strand starting at position 2348 of SEQ ID NO: 317078
ugauuaaaugugugaagac

SEQ ID NO: 462808 - RNA, 19 nt, Artificial Sequence
  Description of Artificial Sequence: Synthetic oligonucleotide
  Antisense Strand to SEQ ID NO: 462807
gucuucacacauuuaauca

SEQ ID NO: 462809 - RNA, 19 nt, Artificial Sequence
  Description of Artificial Sequence: Synthetic oligonucleotide
  Sense strand starting at position 2380 of SEQ ID NO: 317078
gcaagagacuguuuccaug

SEQ ID NO: 462810 - RNA, 19 nt, Artificial Sequence
  Description of Artificial Sequence: Synthetic oligonucleotide
  Antisense Strand to SEQ ID NO: 462809
cauggaaacagucucuugc

SEQ ID NO: 462811 - RNA, 19 nt, Artificial Sequence
  Description of Artificial Sequence: Synthetic oligonucleotide
  Sense strand starting at position 2397 of SEQ ID NO: 317078
uggcaauguuaauugauac

SEQ ID NO: 462812 - RNA, 19 nt, Artificial Sequence
  Description of Artificial Sequence: Synthetic oligonucleotide
  Antisense Strand to SEQ ID NO: 462811
guaucaauuaacauugcca

SEQ ID NO: 462813 - RNA, 19 nt, Artificial Sequence
  Description of Artificial Sequence: Synthetic oligonucleotide
  Sense strand starting at position 2488 of SEQ ID NO: 317078
uggaaauggugugcagacu

SEQ ID NO: 462814 - RNA, 19 nt, Artificial Sequence
  Description of Artificial Sequence: Synthetic oligonucleotide
  Antisense Strand to SEQ ID NO: 462813
agucugcacaccauuucca

SEQ ID NO: 462815 - RNA, 19 nt, Artificial Sequence
  Description of Artificial Sequence: Synthetic oligonucleotide
  Sense strand starting at position 2489 of SEQ ID NO: 317078
ggaaauggugugcagacuu

SEQ ID NO: 462816 - RNA, 19 nt, Artificial Sequence
  Description of Artificial Sequence: Synthetic oligonucleotide
  Antisense Strand to SEQ ID NO: 462815
aagucugcacaccauuucc

SEQ ID NO: 462817 - RNA, 19 nt, Artificial Sequence
  Description of Artificial Sequence: Synthetic oligonucleotide
  Sense strand starting at position 2524 of SEQ ID NO: 317078
gggaacuugguuuggaauu

SEQ ID NO: 462818 - RNA, 19 nt, Artificial Sequence
  Description of Artificial Sequence: Synthetic oligonucleotide
  Antisense Strand to SEQ ID NO: 462817
aauuccaaaccaaguuccc

SEQ ID NO: 462819 - RNA, 19 nt, Artificial Sequence
  Description of Artificial Sequence: Synthetic oligonucleotide
  Sense strand starting at position 2947 of SEQ ID NO: 317078
auuuauugugagggcugua

SEQ ID NO: 462820 - RNA, 19 nt, Artificial Sequence
  Description of Artificial Sequence: Synthetic oligonucleotide
  Antisense Strand to SEQ ID NO: 462819
uacagcccucacaauaaau

SEQ ID NO: 462821 - RNA, 19 nt, Artificial Sequence
  Description of Artificial Sequence: Synthetic oligonucleotide
  Sense strand starting at position 2950 of SEQ ID NO: 317078
uauugugagggcuguauuu

SEQ ID NO: 462822 - RNA, 19 nt, Artificial Sequence
  Description of Artificial Sequence: Synthetic oligonucleotide
  Antisense Strand to SEQ ID NO: 462821
aaauacagcccucacaaua

SEQ ID NO: 462823 - RNA, 19 nt, Artificial Sequence
  Description of Artificial Sequence: Synthetic oligonucleotide
  Sense strand starting at position 3029 of SEQ ID NO: 317078
ucaaauaauuacgugcaaa

SEQ ID NO: 462824 - RNA, 19 nt, Artificial Sequence
  Description of Artificial Sequence: Synthetic oligonucleotide
  Antisense Strand to SEQ ID NO: 462823
uuugcacguaauuauuuga

SEQ ID NO: 462825 - RNA, 19 nt, Artificial Sequence
  Description of Artificial Sequence: Synthetic oligonucleotide
  Sense strand starting at position 3116 of SEQ ID NO: 317078
auuccuuacugauuguuua

SEQ ID NO: 462826 - RNA, 19 nt, Artificial Sequence
  Description of Artificial Sequence: Synthetic oligonucleotide
  Antisense Strand to SEQ ID NO: 462825
uaaacaaucaguaaggaau

SEQ ID NO: 462827 - RNA, 19 nt, Artificial Sequence
  Description of Artificial Sequence: Synthetic oligonucleotide
  Sense strand starting at position 3191 of SEQ ID NO: 317078
agcccuaaucgagccguua

SEQ ID NO: 462828 - RNA, 19 nt, Artificial Sequence
  Description of Artificial Sequence: Synthetic oligonucleotide
  Antisense Strand to SEQ ID NO: 462827
uaacggcucgauuagggcu

SEQ ID NO: 462829 - RNA, 19 nt, Artificial Sequence
  Description of Artificial Sequence: Synthetic oligonucleotide
  Sense strand starting at position 3192 of SEQ ID NO: 317078
gcccuaaucgagccguuaa

SEQ ID NO: 462830 - RNA, 19 nt, Artificial Sequence
  Description of Artificial Sequence: Synthetic oligonucleotide
  Antisense Strand to SEQ ID NO: 462829
uuaacggcucgauuagggc

SEQ ID NO: 462831 - RNA, 19 nt, Artificial Sequence
  Description of Artificial Sequence: Synthetic oligonucleotide
  Sense strand starting at position 3617 of SEQ ID NO: 317078
aguuguuaggacugaugaa

SEQ ID NO: 462832 - RNA, 19 nt, Artificial Sequence
  Description of Artificial Sequence: Synthetic oligonucleotide
  Antisense Strand to SEQ ID NO: 462831
uucaucaguccuaacaacu

SEQ ID NO: 462833 - RNA, 19 nt, Artificial Sequence
  Description of Artificial Sequence: Synthetic oligonucleotide
  Sense strand starting at position 3618 of SEQ ID NO: 317078
guuguuaggacugaugaac

SEQ ID NO: 462834 - RNA, 19 nt, Artificial Sequence
  Description of Artificial Sequence: Synthetic oligonucleotide
  Antisense Strand to SEQ ID NO: 462833
guucaucaguccuaacaac

SEQ ID NO: 462835 - RNA, 19 nt, Artificial Sequence
  Description of Artificial Sequence: Synthetic oligonucleotide
  Sense strand starting at position 92 of SEQ ID NO: 317079
cccagaaucuguuuaucug

SEQ ID NO: 462836 - RNA, 19 nt, Artificial Sequence
  Description of Artificial Sequence: Synthetic oligonucleotide
  Antisense Strand to SEQ ID NO: 462835
cagauaaacagauucuggg

SEQ ID NO: 462837 - RNA, 19 nt, Artificial Sequence
  Description of Artificial Sequence: Synthetic oligonucleotide
  Sense strand starting at position 93 of SEQ ID NO: 317079
ccagaaucuguuuaucugu

SEQ ID NO: 462838 - RNA, 19 nt, Artificial Sequence
  Description of Artificial Sequence: Synthetic oligonucleotide
  Antisense Strand to SEQ ID NO: 462837
acagauaaacagauucugg

SEQ ID NO: 462839 - RNA, 19 nt, Artificial Sequence
  Description of Artificial Sequence: Synthetic oligonucleotide
  Sense strand starting at position 95 of SEQ ID NO: 317079
agaaucuguuuaucuguaa

SEQ ID NO: 462840 - RNA, 19 nt, Artificial Sequence
  Description of Artificial Sequence: Synthetic oligonucleotide
  Antisense Strand to SEQ ID NO: 462839
uuacagauaaacagauucu

SEQ ID NO: 462841 - RNA, 19 nt, Artificial Sequence
  Description of Artificial Sequence: Synthetic oligonucleotide
  Sense strand starting at position 135 of SEQ ID NO: 317079
aaagcauuggguggaaagu

SEQ ID NO: 462842 - RNA, 19 nt, Artificial Sequence
  Description of Artificial Sequence: Synthetic oligonucleotide
  Antisense Strand to SEQ ID NO: 462841
acuuuccacccaaugcuuu

SEQ ID NO: 462843 - RNA, 19 nt, Artificial Sequence
  Description of Artificial Sequence: Synthetic oligonucleotide
  Sense strand starting at position 136 of SEQ ID NO: 317079
aagcauuggguggaaaguu

SEQ ID NO: 462844 - RNA, 19 nt, Artificial Sequence
  Description of Artificial Sequence: Synthetic oligonucleotide
  Antisense Strand to SEQ ID NO: 462843
aacuuuccacccaaugcuu

SEQ ID NO: 462845 - RNA, 19 nt, Artificial Sequence
  Description of Artificial Sequence: Synthetic oligonucleotide
  Sense strand starting at position 187 of SEQ ID NO: 317079
ugcccaauuguagaaaggu

SEQ ID NO: 462846 - RNA, 19 nt, Artificial Sequence
  Description of Artificial Sequence: Synthetic oligonucleotide
  Antisense Strand to SEQ ID NO: 462845
accuuucuacaauugggca

SEQ ID NO: 462847 - RNA, 19 nt, Artificial Sequence
  Description of Artificial Sequence: Synthetic oligonucleotide
  Sense strand starting at position 196 of SEQ ID NO: 317079
guagaaagguuucucugug

SEQ ID NO: 462848 - RNA, 19 nt, Artificial Sequence
  Description of Artificial Sequence: Synthetic oligonucleotide
  Antisense Strand to SEQ ID NO: 462847
cacagagaaaccuuucuac

SEQ ID NO: 462849 - RNA, 19 nt, Artificial Sequence
  Description of Artificial Sequence: Synthetic oligonucleotide
  Sense strand starting at position 197 of SEQ ID NO: 317079
uagaaagguuucucuguga

SEQ ID NO: 462850 - RNA, 19 nt, Artificial Sequence
  Description of Artificial Sequence: Synthetic oligonucleotide
  Antisense Strand to SEQ ID NO: 462849
ucacagagaaaccuuucua

SEQ ID NO: 462851 - RNA, 19 nt, Artificial Sequence
  Description of Artificial Sequence: Synthetic oligonucleotide
  Sense strand starting at position 200 of SEQ ID NO: 317079
aaagguuucucugugaccu

SEQ ID NO: 462852 - RNA, 19 nt, Artificial Sequence
  Description of Artificial Sequence: Synthetic oligonucleotide
  Antisense Strand to SEQ ID NO: 462851
aggucacagagaaaccuuu

SEQ ID NO: 462853 - RNA, 19 nt, Artificial Sequence
  Description of Artificial Sequence: Synthetic oligonucleotide
  Sense strand starting at position 201 of SEQ ID NO: 317079
aagguuucucugugaccua

SEQ ID NO: 462854 - RNA, 19 nt, Artificial Sequence
  Description of Artificial Sequence: Synthetic oligonucleotide
  Antisense Strand to SEQ ID NO: 462853
uaggucacagagaaaccuu

SEQ ID NO: 462855 - RNA, 19 nt, Artificial Sequence
  Description of Artificial Sequence: Synthetic oligonucleotide
  Sense strand starting at position 372 of SEQ ID NO: 317079
auaacaugcccuuagguuu

SEQ ID NO: 462856 - RNA, 19 nt, Artificial Sequence
  Description of Artificial Sequence: Synthetic oligonucleotide
  Antisense Strand to SEQ ID NO: 462855
aaaccuaagggcauguuau

SEQ ID NO: 462857 - RNA, 19 nt, Artificial Sequence
  Description of Artificial Sequence: Synthetic oligonucleotide
  Sense strand starting at position 391 of SEQ ID NO: 317079
gguucugagauuggaauga

SEQ ID NO: 462858 - RNA, 19 nt, Artificial Sequence
  Description of Artificial Sequence: Synthetic oligonucleotide
  Antisense Strand to SEQ ID NO: 462857
ucauuccaaucucagaacc

SEQ ID NO: 462859 - RNA, 19 nt, Artificial Sequence
  Description of Artificial Sequence: Synthetic oligonucleotide
  Sense strand starting at position 761 of SEQ ID NO: 317079
ggccuugacuauucuuaaa

SEQ ID NO: 462860 - RNA, 19 nt, Artificial Sequence
  Description of Artificial Sequence: Synthetic oligonucleotide
  Antisense Strand to SEQ ID NO: 462859
uuuaagaauagucaaggcc

SEQ ID NO: 462861 - RNA, 19 nt, Artificial Sequence
  Description of Artificial Sequence: Synthetic oligonucleotide
  Sense strand starting at position 932 of SEQ ID NO: 317079
guuaucucaucugugaaac

SEQ ID NO: 462862 - RNA, 19 nt, Artificial Sequence
  Description of Artificial Sequence: Synthetic oligonucleotide
  Antisense Strand to SEQ ID NO: 462861
guuucacagaugagauaac

SEQ ID NO: 462863 - RNA, 19 nt, Artificial Sequence
  Description of Artificial Sequence: Synthetic oligonucleotide
  Sense strand starting at position 1092 of SEQ ID NO: 317079
ggguuacaaugggugacau

SEQ ID NO: 462864 - RNA, 19 nt, Artificial Sequence
  Description of Artificial Sequence: Synthetic oligonucleotide
  Antisense Strand to SEQ ID NO: 462863
augucacccauuguaaccc

SEQ ID NO: 462865 - RNA, 19 nt, Artificial Sequence
  Description of Artificial Sequence: Synthetic oligonucleotide
  Sense strand starting at position 1093 of SEQ ID NO: 317079
gguuacaaugggugacauu

SEQ ID NO: 462866 - RNA, 19 nt, Artificial Sequence
  Description of Artificial Sequence: Synthetic oligonucleotide
  Antisense Strand to SEQ ID NO: 462865
aaugucacccauuguaacc

SEQ ID NO: 462867 - RNA, 19 nt, Artificial Sequence
  Description of Artificial Sequence: Synthetic oligonucleotide
  Sense strand starting at position 1116 of SEQ ID NO: 317079
aggagagaaucucucccuu

SEQ ID NO: 462868 - RNA, 19 nt, Artificial Sequence
  Description of Artificial Sequence: Synthetic oligonucleotide
  Antisense Strand to SEQ ID NO: 462867
aagggagagauucucuccu

SEQ ID NO: 462869 - RNA, 19 nt, Artificial Sequence
  Description of Artificial Sequence: Synthetic oligonucleotide
  Sense strand starting at position 1118 of SEQ ID NO: 317079
gagagaaucucucccuugu

SEQ ID NO: 462870 - RNA, 19 nt, Artificial Sequence
  Description of Artificial Sequence: Synthetic oligonucleotide
  Antisense Strand to SEQ ID NO: 462869
acaagggagagauucucuc

SEQ ID NO: 462871 - RNA, 19 nt, Artificial Sequence
  Description of Artificial Sequence: Synthetic oligonucleotide
  Sense strand starting at position 1277 of SEQ ID NO: 317079
gaguaacuaccauguguca

SEQ ID NO: 462872 - RNA, 19 nt, Artificial Sequence
  Description of Artificial Sequence: Synthetic oligonucleotide
  Antisense Strand to SEQ ID NO: 462871
ugacacaugguaguuacuc

SEQ ID NO: 462873 - RNA, 19 nt, Artificial Sequence
  Description of Artificial Sequence: Synthetic oligonucleotide
  Sense strand starting at position 1360 of SEQ ID NO: 317079
gcuagaaaucaggguugca

SEQ ID NO: 462874 - RNA, 19 nt, Artificial Sequence
  Description of Artificial Sequence: Synthetic oligonucleotide
  Antisense Strand to SEQ ID NO: 462873
ugcaacccugauuucuagc

SEQ ID NO: 462875 - RNA, 19 nt, Artificial Sequence
  Description of Artificial Sequence: Synthetic oligonucleotide
  Sense strand starting at position 1363 of SEQ ID NO: 317079
agaaaucaggguugcaaau

SEQ ID NO: 462876 - RNA, 19 nt, Artificial Sequence
  Description of Artificial Sequence: Synthetic oligonucleotide
  Antisense Strand to SEQ ID NO: 462875
auuugcaacccugauuucu

SEQ ID NO: 462877 - RNA, 19 nt, Artificial Sequence
  Description of Artificial Sequence: Synthetic oligonucleotide
  Sense strand starting at position 1494 of SEQ ID NO: 317079
auguaauccucaucacagu

SEQ ID NO: 462878 - RNA, 19 nt, Artificial Sequence
  Description of Artificial Sequence: Synthetic oligonucleotide
  Antisense Strand to SEQ ID NO: 462877
acugugaugaggauuacau

SEQ ID NO: 462879 - RNA, 19 nt, Artificial Sequence
  Description of Artificial Sequence: Synthetic oligonucleotide
  Sense strand starting at position 1495 of SEQ ID NO: 317079
uguaauccucaucacaguu

SEQ ID NO: 462880 - RNA, 19 nt, Artificial Sequence
  Description of Artificial Sequence: Synthetic oligonucleotide
  Antisense Strand to SEQ ID NO: 462879
aacugugaugaggauuaca

SEQ ID NO: 462881 - RNA, 19 nt, Artificial Sequence
  Description of Artificial Sequence: Synthetic oligonucleotide
  Sense strand starting at position 1510 of SEQ ID NO: 317079
aguucuccgaguuagauuc

SEQ ID NO: 462882 - RNA, 19 nt, Artificial Sequence
  Description of Artificial Sequence: Synthetic oligonucleotide
  Antisense Strand to SEQ ID NO: 462881
gaaucuaacucggagaacu

SEQ ID NO: 462883 - RNA, 19 nt, Artificial Sequence
  Description of Artificial Sequence: Synthetic oligonucleotide
  Sense strand starting at position 1832 of SEQ ID NO: 317079
aaacgaguuggucacccua

SEQ ID NO: 462884 - RNA, 19 nt, Artificial Sequence
  Description of Artificial Sequence: Synthetic oligonucleotide
  Antisense Strand to SEQ ID NO: 462883
uagggugaccaacucguuu

SEQ ID NO: 462885 - RNA, 19 nt, Artificial Sequence
  Description of Artificial Sequence: Synthetic oligonucleotide
  Sense strand starting at position 2107 of SEQ ID NO: 317079
aggcuucgcggugcagaau

SEQ ID NO: 462886 - RNA, 19 nt, Artificial Sequence
  Description of Artificial Sequence: Synthetic oligonucleotide
  Antisense Strand to SEQ ID NO: 462885
auucugcaccgcgaagccu

SEQ ID NO: 462887 - RNA, 19 nt, Artificial Sequence
  Description of Artificial Sequence: Synthetic oligonucleotide
  Sense strand starting at position 2877 of SEQ ID NO: 317079
auguaaaucgcuuagacua

SEQ ID NO: 462888 - RNA, 19 nt, Artificial Sequence
  Description of Artificial Sequence: Synthetic oligonucleotide
  Antisense Strand to SEQ ID NO: 462887
uagucuaagcgauuuacau

SEQ ID NO: 462889 - RNA, 19 nt, Artificial Sequence
  Description of Artificial Sequence: Synthetic oligonucleotide
  Sense strand starting at position 2981 of SEQ ID NO: 317079
guguuuguugcuuaaauga

SEQ ID NO: 462890 - RNA, 19 nt, Artificial Sequence
  Description of Artificial Sequence: Synthetic oligonucleotide
  Antisense Strand to SEQ ID NO: 462889
ucauuuaagcaacaaacac

SEQ ID NO: 462891 - RNA, 19 nt, Artificial Sequence
  Description of Artificial Sequence: Synthetic oligonucleotide
  Sense strand starting at position 3060 of SEQ ID NO: 317079
guguguauaugggugauaa

SEQ ID NO: 462892 - RNA, 19 nt, Artificial Sequence
  Description of Artificial Sequence: Synthetic oligonucleotide
  Antisense Strand to SEQ ID NO: 462891
uuaucacccauauacacac

SEQ ID NO: 462893 - RNA, 19 nt, Artificial Sequence
  Description of Artificial Sequence: Synthetic oligonucleotide
  Sense strand starting at position 3061 of SEQ ID NO: 317079
uguguauaugggugauaag

SEQ ID NO: 462894 - RNA, 19 nt, Artificial Sequence
  Description of Artificial Sequence: Synthetic oligonucleotide
  Antisense Strand to SEQ ID NO: 462893
cuuaucacccauauacaca

SEQ ID NO: 462895 - RNA, 19 nt, Artificial Sequence
  Description of Artificial Sequence: Synthetic oligonucleotide
  Sense strand starting at position 3099 of SEQ ID NO: 317079
caguguugggccuggaaua

SEQ ID NO: 462896 - RNA, 19 nt, Artificial Sequence
  Description of Artificial Sequence: Synthetic oligonucleotide
  Antisense Strand to SEQ ID NO: 462895
uauuccaggcccaacacug

SEQ ID NO: 462897 - RNA, 19 nt, Artificial Sequence
  Description of Artificial Sequence: Synthetic oligonucleotide
  Sense strand starting at position 3109 of SEQ ID NO: 317079
ccuggaauagaagguguau

SEQ ID NO: 462898 - RNA, 19 nt, Artificial Sequence
  Description of Artificial Sequence: Synthetic oligonucleotide
  Antisense Strand to SEQ ID NO: 462897
auacaccuucuauuccagg

SEQ ID NO: 462899 - RNA, 19 nt, Artificial Sequence
  Description of Artificial Sequence: Synthetic oligonucleotide
  Sense strand starting at position 3111 of SEQ ID NO: 317079
uggaauagaagguguauua

SEQ ID NO: 462900 - RNA, 19 nt, Artificial Sequence
  Description of Artificial Sequence: Synthetic oligonucleotide
  Antisense Strand to SEQ ID NO: 462899
uaauacaccuucuauucca

SEQ ID NO: 462901 - RNA, 19 nt, Artificial Sequence
  Description of Artificial Sequence: Synthetic oligonucleotide
  Sense strand starting at position 3238 of SEQ ID NO: 317079
gguuucuucugagacauuu

SEQ ID NO: 462902 - RNA, 19 nt, Artificial Sequence
  Description of Artificial Sequence: Synthetic oligonucleotide
  Antisense Strand to SEQ ID NO: 462901
aaaugucucagaagaaacc

SEQ ID NO: 462903 - RNA, 19 nt, Artificial Sequence
  Description of Artificial Sequence: Synthetic oligonucleotide
  Sense strand starting at position 3356 of SEQ ID NO: 317079
ucuuuaugagaacgucagu

SEQ ID NO: 462904 - RNA, 19 nt, Artificial Sequence
  Description of Artificial Sequence: Synthetic oligonucleotide
  Antisense Strand to SEQ ID NO: 462903
acugacguucucauaaaga

SEQ ID NO: 462905 - RNA, 19 nt, Artificial Sequence
  Description of Artificial Sequence: Synthetic oligonucleotide
  Sense strand starting at position 3564 of SEQ ID NO: 317079
aaagcagggugcucaagau

SEQ ID NO: 462906 - RNA, 19 nt, Artificial Sequence
  Description of Artificial Sequence: Synthetic oligonucleotide
  Antisense Strand to SEQ ID NO: 462905
aucuugagcacccugcuuu

SEQ ID NO: 462907 - RNA, 19 nt, Artificial Sequence
  Description of Artificial Sequence: Synthetic oligonucleotide
  Sense strand starting at position 3568 of SEQ ID NO: 317079
cagggugcucaagauguuu

SEQ ID NO: 462908 - RNA, 19 nt, Artificial Sequence
  Description of Artificial Sequence: Synthetic oligonucleotide
  Antisense Strand to SEQ ID NO: 462907
aaacaucuugagcacccug

SEQ ID NO: 462909 - RNA, 19 nt, Artificial Sequence
  Description of Artificial Sequence: Synthetic oligonucleotide
  Sense strand starting at position 3620 of SEQ ID NO: 317079
uuguuugugcucucguacu

SEQ ID NO: 462910 - RNA, 19 nt, Artificial Sequence
  Description of Artificial Sequence: Synthetic oligonucleotide
  Antisense Strand to SEQ ID NO: 462909
aguacgagagcacaaacaa

SEQ ID NO: 462911 - RNA, 19 nt, Artificial Sequence
  Description of Artificial Sequence: Synthetic oligonucleotide
  Sense strand starting at position 3669 of SEQ ID NO: 317079
guuuguccuccugaauacu

SEQ ID NO: 462912 - RNA, 19 nt, Artificial Sequence
  Description of Artificial Sequence: Synthetic oligonucleotide
  Antisense Strand to SEQ ID NO: 462911
aguauucaggaggacaaac

SEQ ID NO: 462913 - RNA, 19 nt, Artificial Sequence
  Description of Artificial Sequence: Synthetic oligonucleotide
  Sense strand starting at position 3745 of SEQ ID NO: 317079
auagaugugucuuccagga

SEQ ID NO: 462914 - RNA, 19 nt, Artificial Sequence
  Description of Artificial Sequence: Synthetic oligonucleotide
  Antisense Strand to SEQ ID NO: 462913
uccuggaagacacaucuau

SEQ ID NO: 462915 - RNA, 19 nt, Artificial Sequence
  Description of Artificial Sequence: Synthetic oligonucleotide
  Sense strand starting at position 39 of SEQ ID NO: 317080
ugcccaauuguagaaaggu

SEQ ID NO: 462916 - RNA, 19 nt, Artificial Sequence
  Description of Artificial Sequence: Synthetic oligonucleotide
  Antisense Strand to SEQ ID NO: 462915
accuuucuacaauugggca

SEQ ID NO: 462917 - RNA, 19 nt, Artificial Sequence
  Description of Artificial Sequence: Synthetic oligonucleotide
  Sense strand starting at position 48 of SEQ ID NO: 317080
guagaaagguuucucugug

SEQ ID NO: 462918 - RNA, 19 nt, Artificial Sequence
  Description of Artificial Sequence: Synthetic oligonucleotide
  Antisense Strand to SEQ ID NO: 462917
cacagagaaaccuuucuac

SEQ ID NO: 462919 - RNA, 19 nt, Artificial Sequence
  Description of Artificial Sequence: Synthetic oligonucleotide
  Sense strand starting at position 49 of SEQ ID NO: 317080
uagaaagguuucucuguga

SEQ ID NO: 462920 - RNA, 19 nt, Artificial Sequence
  Description of Artificial Sequence: Synthetic oligonucleotide
  Antisense Strand to SEQ ID NO: 462919
ucacagagaaaccuuucua

SEQ ID NO: 462921 - RNA, 19 nt, Artificial Sequence
  Description of Artificial Sequence: Synthetic oligonucleotide
  Sense strand starting at position 52 of SEQ ID NO: 317080
aaagguuucucugugaccu

SEQ ID NO: 462922 - RNA, 19 nt, Artificial Sequence
  Description of Artificial Sequence: Synthetic oligonucleotide
  Antisense Strand to SEQ ID NO: 462921
aggucacagagaaaccuuu

SEQ ID NO: 462923 - RNA, 19 nt, Artificial Sequence
  Description of Artificial Sequence: Synthetic oligonucleotide
  Sense strand starting at position 53 of SEQ ID NO: 317080
aagguuucucugugaccua

SEQ ID NO: 462924 - RNA, 19 nt, Artificial Sequence
  Description of Artificial Sequence: Synthetic oligonucleotide
  Antisense Strand to SEQ ID NO: 462923
uaggucacagagaaaccuu

SEQ ID NO: 462925 - RNA, 19 nt, Artificial Sequence
  Description of Artificial Sequence: Synthetic oligonucleotide
  Sense strand starting at position 56 of SEQ ID NO: 317080
guuucucugugaccuacua

SEQ ID NO: 462926 - RNA, 19 nt, Artificial Sequence
  Description of Artificial Sequence: Synthetic oligonucleotide
  Antisense Strand to SEQ ID NO: 462925
uaguaggucacagagaaac

SEQ ID NO: 462927 - RNA, 19 nt, Artificial Sequence
  Description of Artificial Sequence: Synthetic oligonucleotide
  Sense strand starting at position 224 of SEQ ID NO: 317080
auaacaugcccuuagguuu

SEQ ID NO: 462928 - RNA, 19 nt, Artificial Sequence
  Description of Artificial Sequence: Synthetic oligonucleotide
  Antisense Strand to SEQ ID NO: 462927
aaaccuaagggcauguuau

SEQ ID NO: 462929 - RNA, 19 nt, Artificial Sequence
  Description of Artificial Sequence: Synthetic oligonucleotide
  Sense strand starting at position 243 of SEQ ID NO: 317080
gguucugagauuggaauga

SEQ ID NO: 462930 - RNA, 19 nt, Artificial Sequence
  Description of Artificial Sequence: Synthetic oligonucleotide
  Antisense Strand to SEQ ID NO: 462929
ucauuccaaucucagaacc

SEQ ID NO: 462931 - RNA, 19 nt, Artificial Sequence
  Description of Artificial Sequence: Synthetic oligonucleotide
  Sense strand starting at position 613 of SEQ ID NO: 317080
ggccuugacuauucuuaaa

SEQ ID NO: 462932 - RNA, 19 nt, Artificial Sequence
  Description of Artificial Sequence: Synthetic oligonucleotide
  Antisense Strand to SEQ ID NO: 462931
uuuaagaauagucaaggcc

SEQ ID NO: 462933 - RNA, 19 nt, Artificial Sequence
  Description of Artificial Sequence: Synthetic oligonucleotide
  Sense strand starting at position 784 of SEQ ID NO: 317080
guuaucucaucugugaaac

SEQ ID NO: 462934 - RNA, 19 nt, Artificial Sequence
  Description of Artificial Sequence: Synthetic oligonucleotide
  Antisense Strand to SEQ ID NO: 462933
guuucacagaugagauaac

SEQ ID NO: 462935 - RNA, 19 nt, Artificial Sequence
  Description of Artificial Sequence: Synthetic oligonucleotide
  Sense strand starting at position 944 of SEQ ID NO: 317080
ggguuacaaugggugacau

SEQ ID NO: 462936 - RNA, 19 nt, Artificial Sequence
  Description of Artificial Sequence: Synthetic oligonucleotide
  Antisense Strand to SEQ ID NO: 462935
augucacccauuguaaccc

SEQ ID NO: 462937 - RNA, 19 nt, Artificial Sequence
  Description of Artificial Sequence: Synthetic oligonucleotide
  Sense strand starting at position 945 of SEQ ID NO: 317080
gguuacaaugggugacauu

SEQ ID NO: 462938 - RNA, 19 nt, Artificial Sequence
  Description of Artificial Sequence: Synthetic oligonucleotide
  Antisense Strand to SEQ ID NO: 462937
aaugucacccauuguaacc

SEQ ID NO: 462939 - RNA, 19 nt, Artificial Sequence
  Description of Artificial Sequence: Synthetic oligonucleotide
  Sense strand starting at position 968 of SEQ ID NO: 317080
aggagagaaucucucccuu

SEQ ID NO: 462940 - RNA, 19 nt, Artificial Sequence
  Description of Artificial Sequence: Synthetic oligonucleotide
  Antisense Strand to SEQ ID NO: 462939
aagggagagauucucuccu

SEQ ID NO: 462941 - RNA, 19 nt, Artificial Sequence
  Description of Artificial Sequence: Synthetic oligonucleotide
  Sense strand starting at position 970 of SEQ ID NO: 317080
gagagaaucucucccuugu

SEQ ID NO: 462942 - RNA, 19 nt, Artificial Sequence
  Description of Artificial Sequence: Synthetic oligonucleotide
  Antisense Strand to SEQ ID NO: 462941
acaagggagagauucucuc

SEQ ID NO: 462943 - RNA, 19 nt, Artificial Sequence
  Description of Artificial Sequence: Synthetic oligonucleotide
  Sense strand starting at position 1129 of SEQ ID NO: 317080
gaguaacuaccauguguca

SEQ ID NO: 462944 - RNA, 19 nt, Artificial Sequence
  Description of Artificial Sequence: Synthetic oligonucleotide
  Antisense Strand to SEQ ID NO: 462943
ugacacaugguaguuacuc

SEQ ID NO: 462945 - RNA, 19 nt, Artificial Sequence
  Description of Artificial Sequence: Synthetic oligonucleotide
  Sense strand starting at position 1212 of SEQ ID NO: 317080
gcuagaaaucaggguugca

SEQ ID NO: 462946 - RNA, 19 nt, Artificial Sequence
  Description of Artificial Sequence: Synthetic oligonucleotide
  Antisense Strand to SEQ ID NO: 462945
ugcaacccugauuucuagc

SEQ ID NO: 462947 - RNA, 19 nt, Artificial Sequence
  Description of Artificial Sequence: Synthetic oligonucleotide
  Sense strand starting at position 1215 of SEQ ID NO: 317080
agaaaucaggguugcaaau

SEQ ID NO: 462948 - RNA, 19 nt, Artificial Sequence
  Description of Artificial Sequence: Synthetic oligonucleotide
  Antisense Strand to SEQ ID NO: 462947
auuugcaacccugauuucu

SEQ ID NO: 462949 - RNA, 19 nt, Artificial Sequence
  Description of Artificial Sequence: Synthetic oligonucleotide
  Sense strand starting at position 1346 of SEQ ID NO: 317080
auguaauccucaucacagu

SEQ ID NO: 462950 - RNA, 19 nt, Artificial Sequence
  Description of Artificial Sequence: Synthetic oligonucleotide
  Antisense Strand to SEQ ID NO: 462949
acugugaugaggauuacau

SEQ ID NO: 462951 - RNA, 19 nt, Artificial Sequence
  Description of Artificial Sequence: Synthetic oligonucleotide
  Sense strand starting at position 1347 of SEQ ID NO: 317080
uguaauccucaucacaguu

SEQ ID NO: 462952 - RNA, 19 nt, Artificial Sequence
  Description of Artificial Sequence: Synthetic oligonucleotide
  Antisense Strand to SEQ ID NO: 462951
aacugugaugaggauuaca

SEQ ID NO: 462953 - RNA, 19 nt, Artificial Sequence
  Description of Artificial Sequence: Synthetic oligonucleotide
  Sense strand starting at position 1357 of SEQ ID NO: 317080
aucacaguucuccgaguua

SEQ ID NO: 462954 - RNA, 19 nt, Artificial Sequence
  Description of Artificial Sequence: Synthetic oligonucleotide
  Antisense Strand to SEQ ID NO: 462953
uaacucggagaacugugau

SEQ ID NO: 462955 - RNA, 19 nt, Artificial Sequence
  Description of Artificial Sequence: Synthetic oligonucleotide
  Sense strand starting at position 1362 of SEQ ID NO: 317080
aguucuccgaguuagauuc

SEQ ID NO: 462956 - RNA, 19 nt, Artificial Sequence
  Description of Artificial Sequence: Synthetic oligonucleotide
  Antisense Strand to SEQ ID NO: 462955
gaaucuaacucggagaacu

SEQ ID NO: 462957 - RNA, 19 nt, Artificial Sequence
  Description of Artificial Sequence: Synthetic oligonucleotide
  Sense strand starting at position 1684 of SEQ ID NO: 317080
aaacgaguuggucacccua

SEQ ID NO: 462958 - RNA, 19 nt, Artificial Sequence
  Description of Artificial Sequence: Synthetic oligonucleotide
  Antisense Strand to SEQ ID NO: 462957
uagggugaccaacucguuu

SEQ ID NO: 462959 - RNA, 19 nt, Artificial Sequence
  Description of Artificial Sequence: Synthetic oligonucleotide
  Sense strand starting at position 1959 of SEQ ID NO: 317080
aggcuucgcggugcagaau

SEQ ID NO: 462960 - RNA, 19 nt, Artificial Sequence
  Description of Artificial Sequence: Synthetic oligonucleotide
  Antisense Strand to SEQ ID NO: 462959
auucugcaccgcgaagccu

SEQ ID NO: 462961 - RNA, 19 nt, Artificial Sequence
  Description of Artificial Sequence: Synthetic oligonucleotide
  Sense strand starting at position 2569 of SEQ ID NO: 317080
cacgcuguaguugagagua

SEQ ID NO: 462962 - RNA, 19 nt, Artificial Sequence
  Description of Artificial Sequence: Synthetic oligonucleotide
  Antisense Strand to SEQ ID NO: 462961
uacucucaacuacagcgug

SEQ ID NO: 462963 - RNA, 19 nt, Artificial Sequence
  Description of Artificial Sequence: Synthetic oligonucleotide
  Sense strand starting at position 2663 of SEQ ID NO: 317080
cuguaaagcgaaugucaua

SEQ ID NO: 462964 - RNA, 19 nt, Artificial Sequence
  Description of Artificial Sequence: Synthetic oligonucleotide
  Antisense Strand to SEQ ID NO: 462963
uaugacauucgcuuuacag

SEQ ID NO: 462965 - RNA, 19 nt, Artificial Sequence
  Description of Artificial Sequence: Synthetic oligonucleotide
  Sense strand starting at position 2729 of SEQ ID NO: 317080
auguaaaucgcuuagacua

SEQ ID NO: 462966 - RNA, 19 nt, Artificial Sequence
  Description of Artificial Sequence: Synthetic oligonucleotide
  Antisense Strand to SEQ ID NO: 462965
uagucuaagcgauuuacau

SEQ ID NO: 462967 - RNA, 19 nt, Artificial Sequence
  Description of Artificial Sequence: Synthetic oligonucleotide
  Sense strand starting at position 2833 of SEQ ID NO: 317080
guguuuguugcuuaaauga

SEQ ID NO: 462968 - RNA, 19 nt, Artificial Sequence
  Description of Artificial Sequence: Synthetic oligonucleotide
  Antisense Strand to SEQ ID NO: 462967
ucauuuaagcaacaaacac

SEQ ID NO: 462969 - RNA, 19 nt, Artificial Sequence
  Description of Artificial Sequence: Synthetic oligonucleotide
  Sense strand starting at position 2912 of SEQ ID NO: 317080
guguguauaugggugauaa

SEQ ID NO: 462970 - RNA, 19 nt, Artificial Sequence
  Description of Artificial Sequence: Synthetic oligonucleotide
  Antisense Strand to SEQ ID NO: 462969
uuaucacccauauacacac

SEQ ID NO: 462971 - RNA, 19 nt, Artificial Sequence
  Description of Artificial Sequence: Synthetic oligonucleotide
  Sense strand starting at position 2913 of SEQ ID NO: 317080
uguguauaugggugauaag

SEQ ID NO: 462972 - RNA, 19 nt, Artificial Sequence
  Description of Artificial Sequence: Synthetic oligonucleotide
  Antisense Strand to SEQ ID NO: 462971
cuuaucacccauauacaca

SEQ ID NO: 462973 - RNA, 19 nt, Artificial Sequence
  Description of Artificial Sequence: Synthetic oligonucleotide
  Sense strand starting at position 2951 of SEQ ID NO: 317080
caguguugggccuggaaua

SEQ ID NO: 462974 - RNA, 19 nt, Artificial Sequence
  Description of Artificial Sequence: Synthetic oligonucleotide
  Antisense Strand to SEQ ID NO: 462973
uauuccaggcccaacacug

SEQ ID NO: 462975 - RNA, 19 nt, Artificial Sequence
  Description of Artificial Sequence: Synthetic oligonucleotide
  Sense strand starting at position 2961 of SEQ ID NO: 317080
ccuggaauagaagguguau

SEQ ID NO: 462976 - RNA, 19 nt, Artificial Sequence
  Description of Artificial Sequence: Synthetic oligonucleotide
  Antisense Strand to SEQ ID NO: 462975
auacaccuucuauuccagg

SEQ ID NO: 462977 - RNA, 19 nt, Artificial Sequence
  Description of Artificial Sequence: Synthetic oligonucleotide
  Sense strand starting at position 2963 of SEQ ID NO: 317080
uggaauagaagguguauua

SEQ ID NO: 462978 - RNA, 19 nt, Artificial Sequence
  Description of Artificial Sequence: Synthetic oligonucleotide
  Antisense Strand to SEQ ID NO: 462977
uaauacaccuucuauucca

SEQ ID NO: 462979 - RNA, 19 nt, Artificial Sequence
  Description of Artificial Sequence: Synthetic oligonucleotide
  Sense strand starting at position 3090 of SEQ ID NO: 317080
gguuucuucugagacauuu

SEQ ID NO: 462980 - RNA, 19 nt, Artificial Sequence
  Description of Artificial Sequence: Synthetic oligonucleotide
  Antisense Strand to SEQ ID NO: 462979
aaaugucucagaagaaacc

SEQ ID NO: 462981 - RNA, 19 nt, Artificial Sequence
  Description of Artificial Sequence: Synthetic oligonucleotide
  Sense strand starting at position 3208 of SEQ ID NO: 317080
ucuuuaugagaacgucagu

SEQ ID NO: 462982 - RNA, 19 nt, Artificial Sequence
  Description of Artificial Sequence: Synthetic oligonucleotide
  Antisense Strand to SEQ ID NO: 462981
acugacguucucauaaaga

SEQ ID NO: 462983 - RNA, 19 nt, Artificial Sequence
  Description of Artificial Sequence: Synthetic oligonucleotide
  Sense strand starting at position 3372 of SEQ ID NO: 317080
ggaaauacuuuccaacaga

SEQ ID NO: 462984 - RNA, 19 nt, Artificial Sequence
  Description of Artificial Sequence: Synthetic oligonucleotide
  Antisense Strand to SEQ ID NO: 462983
ucuguuggaaaguauuucc

SEQ ID NO: 462985 - RNA, 19 nt, Artificial Sequence
  Description of Artificial Sequence: Synthetic oligonucleotide
  Sense strand starting at position 3416 of SEQ ID NO: 317080
aaagcagggugcucaagau

SEQ ID NO: 462986 - RNA, 19 nt, Artificial Sequence
  Description of Artificial Sequence: Synthetic oligonucleotide
  Antisense Strand to SEQ ID NO: 462985
aucuugagcacccugcuuu

SEQ ID NO: 462987 - RNA, 19 nt, Artificial Sequence
  Description of Artificial Sequence: Synthetic oligonucleotide
  Sense strand starting at position 3420 of SEQ ID NO: 317080
cagggugcucaagauguuu

SEQ ID NO: 462988 - RNA, 19 nt, Artificial Sequence
  Description of Artificial Sequence: Synthetic oligonucleotide
  Antisense Strand to SEQ ID NO: 462987
aaacaucuugagcacccug

SEQ ID NO: 462989 - RNA, 19 nt, Artificial Sequence
  Description of Artificial Sequence: Synthetic oligonucleotide
  Sense strand starting at position 3472 of SEQ ID NO: 317080
uuguuugugcucucguacu

SEQ ID NO: 462990 - RNA, 19 nt, Artificial Sequence
  Description of Artificial Sequence: Synthetic oligonucleotide
  Antisense Strand to SEQ ID NO: 462989
aguacgagagcacaaacaa

SEQ ID NO: 462991 - RNA, 19 nt, Artificial Sequence
  Description of Artificial Sequence: Synthetic oligonucleotide
  Sense strand starting at position 3521 of SEQ ID NO: 317080
guuuguccuccugaauacu

SEQ ID NO: 462992 - RNA, 19 nt, Artificial Sequence
  Description of Artificial Sequence: Synthetic oligonucleotide
  Antisense Strand to SEQ ID NO: 462991
aguauucaggaggacaaac

SEQ ID NO: 462993 - RNA, 19 nt, Artificial Sequence
  Description of Artificial Sequence: Synthetic oligonucleotide
  Sense strand starting at position 3597 of SEQ ID NO: 317080
auagaugugucuuccagga

SEQ ID NO: 462994 - RNA, 19 nt, Artificial Sequence
  Description of Artificial Sequence: Synthetic oligonucleotide
  Antisense Strand to SEQ ID NO: 462993
uccuggaagacacaucuau

SEQ ID NO: 462995 - RNA, 19 nt, Artificial Sequence
  Description of Artificial Sequence: Synthetic oligonucleotide
  Sense strand starting at position 2091 of SEQ ID NO: 317081
gcugucagugcuuuagcca

SEQ ID NO: 462996 - RNA, 19 nt, Artificial Sequence
  Description of Artificial Sequence: Synthetic oligonucleotide
  Antisense Strand to SEQ ID NO: 462995
uggcuaaagcacugacagc

SEQ ID NO: 462997 - RNA, 19 nt, Artificial Sequence
  Description of Artificial Sequence: Synthetic oligonucleotide
  Sense strand starting at position 2204 of SEQ ID NO: 317081
aggagauaaugggagucaa

SEQ ID NO: 462998 - RNA, 19 nt, Artificial Sequence
  Description of Artificial Sequence: Synthetic oligonucleotide
  Antisense Strand to SEQ ID NO: 462997
uugacucccauuaucuccu

SEQ ID NO: 462999 - RNA, 19 nt, Artificial Sequence
  Description of Artificial Sequence: Synthetic oligonucleotide
  Sense strand starting at position 2215 of SEQ ID NO: 317081
ggagucaaaugcuugcaca

SEQ ID NO: 463000 - RNA, 19 nt, Artificial Sequence
  Description of Artificial Sequence: Synthetic oligonucleotide
  Antisense Strand to SEQ ID NO: 462999
ugugcaagcauuugacucc

SEQ ID NO: 463001 - RNA, 19 nt, Artificial Sequence
  Description of Artificial Sequence: Synthetic oligonucleotide
  Sense strand starting at position 2216 of SEQ ID NO: 317081
gagucaaaugcuugcacac

SEQ ID NO: 463002 - RNA, 19 nt, Artificial Sequence
  Description of Artificial Sequence: Synthetic oligonucleotide
  Antisense Strand to SEQ ID NO: 463001
gugugcaagcauuugacuc

SEQ ID NO: 463003 - RNA, 19 nt, Artificial Sequence
  Description of Artificial Sequence: Synthetic oligonucleotide
  Sense strand starting at position 2312 of SEQ ID NO: 317081
ccuggagauggcuggaaua

SEQ ID NO: 463004 - RNA, 19 nt, Artificial Sequence
  Description of Artificial Sequence: Synthetic oligonucleotide
  Antisense Strand to SEQ ID NO: 463003
uauuccagccaucuccagg

SEQ ID NO: 463005 - RNA, 19 nt, Artificial Sequence
  Description of Artificial Sequence: Synthetic oligonucleotide
  Sense strand starting at position 2343 of SEQ ID NO: 317081
guagcaaugguucagaaag

SEQ ID NO: 463006 - RNA, 19 nt, Artificial Sequence
  Description of Artificial Sequence: Synthetic oligonucleotide
  Antisense Strand to SEQ ID NO: 463005
cuuucugaaccauugcuac

SEQ ID NO: 463007 - RNA, 19 nt, Artificial Sequence
  Description of Artificial Sequence: Synthetic oligonucleotide
  Sense strand starting at position 2391 of SEQ ID NO: 317081
aucaacauuguguaguaga

SEQ ID NO: 463008 - RNA, 19 nt, Artificial Sequence
  Description of Artificial Sequence: Synthetic oligonucleotide
  Antisense Strand to SEQ ID NO: 463007
ucuacuacacaauguugau

SEQ ID NO: 463009 - RNA, 19 nt, Artificial Sequence
  Description of Artificial Sequence: Synthetic oligonucleotide
  Sense strand starting at position 2410 of SEQ ID NO: 317081
aggugcaaacuguaacaaa

SEQ ID NO: 463010 - RNA, 19 nt, Artificial Sequence
  Description of Artificial Sequence: Synthetic oligonucleotide
  Antisense Strand to SEQ ID NO: 463009
uuuguuacaguuugcaccu

SEQ ID NO: 463011 - RNA, 19 nt, Artificial Sequence
  Description of Artificial Sequence: Synthetic oligonucleotide
  Sense strand starting at position 2539 of SEQ ID NO: 317081
cucccauuguugccaagaa

SEQ ID NO: 463012 - RNA, 19 nt, Artificial Sequence
  Description of Artificial Sequence: Synthetic oligonucleotide
  Antisense Strand to SEQ ID NO: 463011
uucuuggcaacaaugggag

SEQ ID NO: 463013 - RNA, 19 nt, Artificial Sequence
  Description of Artificial Sequence: Synthetic oligonucleotide
  Sense strand starting at position 2543 of SEQ ID NO: 317081
cauuguugccaagaaucag

SEQ ID NO: 463014 - RNA, 19 nt, Artificial Sequence
  Description of Artificial Sequence: Synthetic oligonucleotide
  Antisense Strand to SEQ ID NO: 463013
cugauucuuggcaacaaug

SEQ ID NO: 463015 - RNA, 19 nt, Artificial Sequence
  Description of Artificial Sequence: Synthetic oligonucleotide
  Sense strand starting at position 2587 of SEQ ID NO: 317081
ugaggguuggaguggauau

SEQ ID NO: 463016 - RNA, 19 nt, Artificial Sequence
  Description of Artificial Sequence: Synthetic oligonucleotide
  Antisense Strand to SEQ ID NO: 463015
auauccacuccaacccuca

SEQ ID NO: 463017 - RNA, 19 nt, Artificial Sequence
  Description of Artificial Sequence: Synthetic oligonucleotide
  Sense strand starting at position 2588 of SEQ ID NO: 317081
gaggguuggaguggauaua

SEQ ID NO: 463018 - RNA, 19 nt, Artificial Sequence
  Description of Artificial Sequence: Synthetic oligonucleotide
  Antisense Strand to SEQ ID NO: 463017
uauauccacuccaacccuc

SEQ ID NO: 463019 - RNA, 19 nt, Artificial Sequence
  Description of Artificial Sequence: Synthetic oligonucleotide
  Sense strand starting at position 2602 of SEQ ID NO: 317081
auauaaggugaggguuuau

SEQ ID NO: 463020 - RNA, 19 nt, Artificial Sequence
  Description of Artificial Sequence: Synthetic oligonucleotide
  Antisense Strand to SEQ ID NO: 463019
auaaacccucaccuuauau

SEQ ID NO: 463021 - RNA, 19 nt, Artificial Sequence
  Description of Artificial Sequence: Synthetic oligonucleotide
  Sense strand starting at position 2634 of SEQ ID NO: 317081
guaauuucgauaugcuguu

SEQ ID NO: 463022 - RNA, 19 nt, Artificial Sequence
  Description of Artificial Sequence: Synthetic oligonucleotide
  Antisense Strand to SEQ ID NO: 463021
aacagcauaucgaaauuac

SEQ ID NO: 463023 - RNA, 19 nt, Artificial Sequence
  Description of Artificial Sequence: Synthetic oligonucleotide
  Sense strand starting at position 2680 of SEQ ID NO: 317081
ccaagcaccuuguuugaua

SEQ ID NO: 463024 - RNA, 19 nt, Artificial Sequence
  Description of Artificial Sequence: Synthetic oligonucleotide
  Antisense Strand to SEQ ID NO: 463023
uaucaaacaaggugcuugg

SEQ ID NO: 463025 - RNA, 19 nt, Artificial Sequence
  Description of Artificial Sequence: Synthetic oligonucleotide
  Sense strand starting at position 2753 of SEQ ID NO: 317081
agaauuaacuaguuacgag

SEQ ID NO: 463026 - RNA, 19 nt, Artificial Sequence
  Description of Artificial Sequence: Synthetic oligonucleotide
  Antisense Strand to SEQ ID NO: 463025
cucguaacuaguuaauucu

SEQ ID NO: 463027 - RNA, 19 nt, Artificial Sequence
  Description of Artificial Sequence: Synthetic oligonucleotide
  Sense strand starting at position 2808 of SEQ ID NO: 317081
uuacaugucguagaacuua

SEQ ID NO: 463028 - RNA, 19 nt, Artificial Sequence
  Description of Artificial Sequence: Synthetic oligonucleotide
  Antisense Strand to SEQ ID NO: 463027
uaaguucuacgacauguaa

SEQ ID NO: 463029 - RNA, 19 nt, Artificial Sequence
  Description of Artificial Sequence: Synthetic oligonucleotide
  Sense strand starting at position 2933 of SEQ ID NO: 317081
ucuaauugugaauguauuc

SEQ ID NO: 463030 - RNA, 19 nt, Artificial Sequence
  Description of Artificial Sequence: Synthetic oligonucleotide
  Antisense Strand to SEQ ID NO: 463029
gaauacauucacaauuaga

SEQ ID NO: 463031 - RNA, 19 nt, Artificial Sequence
  Description of Artificial Sequence: Synthetic oligonucleotide
  Sense strand starting at position 3048 of SEQ ID NO: 317081
acuauccuguuauugauua

SEQ ID NO: 463032 - RNA, 19 nt, Artificial Sequence
  Description of Artificial Sequence: Synthetic oligonucleotide
  Antisense Strand to SEQ ID NO: 463031
uaaucaauaacaggauagu

SEQ ID NO: 463033 - RNA, 19 nt, Artificial Sequence
  Description of Artificial Sequence: Synthetic oligonucleotide
  Sense strand starting at position 3052 of SEQ ID NO: 317081
uccuguuauugauuacaca

SEQ ID NO: 463034 - RNA, 19 nt, Artificial Sequence
  Description of Artificial Sequence: Synthetic oligonucleotide
  Antisense Strand to SEQ ID NO: 463033
uguguaaucaauaacagga

SEQ ID NO: 463035 - RNA, 19 nt, Artificial Sequence
  Description of Artificial Sequence: Synthetic oligonucleotide
  Sense strand starting at position 3142 of SEQ ID NO: 317081
acgaguuguacccacugua

SEQ ID NO: 463036 - RNA, 19 nt, Artificial Sequence
  Description of Artificial Sequence: Synthetic oligonucleotide
  Antisense Strand to SEQ ID NO: 463035
uacaguggguacaacucgu

SEQ ID NO: 463037 - RNA, 19 nt, Artificial Sequence
  Description of Artificial Sequence: Synthetic oligonucleotide
  Sense strand starting at position 3191 of SEQ ID NO: 317081
gcuagaacauuguuucuga

SEQ ID NO: 463038 - RNA, 19 nt, Artificial Sequence
  Description of Artificial Sequence: Synthetic oligonucleotide
  Antisense Strand to SEQ ID NO: 463037
ucagaaacaauguucuagc

SEQ ID NO: 463039 - RNA, 19 nt, Artificial Sequence
  Description of Artificial Sequence: Synthetic oligonucleotide
  Sense strand starting at position 3192 of SEQ ID NO: 317081
cuagaacauuguuucugau

SEQ ID NO: 463040 - RNA, 19 nt, Artificial Sequence
  Description of Artificial Sequence: Synthetic oligonucleotide
  Antisense Strand to SEQ ID NO: 463039
aucagaaacaauguucuag

SEQ ID NO: 463041 - RNA, 19 nt, Artificial Sequence
  Description of Artificial Sequence: Synthetic oligonucleotide
  Sense strand starting at position 3214 of SEQ ID NO: 317081
cuugauacugaggguuuau

SEQ ID NO: 463042 - RNA, 19 nt, Artificial Sequence
  Description of Artificial Sequence: Synthetic oligonucleotide
  Antisense Strand to SEQ ID NO: 463041
auaaacccucaguaucaag

SEQ ID NO: 463043 - RNA, 19 nt, Artificial Sequence
  Description of Artificial Sequence: Synthetic oligonucleotide
  Sense strand starting at position 3224 of SEQ ID NO: 317081
aggguuuauguaugaaccu

SEQ ID NO: 463044 - RNA, 19 nt, Artificial Sequence
  Description of Artificial Sequence: Synthetic oligonucleotide
  Antisense Strand to SEQ ID NO: 463043
agguucauacauaaacccu

SEQ ID NO: 463045 - RNA, 19 nt, Artificial Sequence
  Description of Artificial Sequence: Synthetic oligonucleotide
  Sense strand starting at position 3238 of SEQ ID NO: 317081
aaccuaagaugucuggauu

SEQ ID NO: 463046 - RNA, 19 nt, Artificial Sequence
  Description of Artificial Sequence: Synthetic oligonucleotide
  Antisense Strand to SEQ ID NO: 463045
aauccagacaucuuagguu

SEQ ID NO: 463047 - RNA, 19 nt, Artificial Sequence
  Description of Artificial Sequence: Synthetic oligonucleotide
  Sense strand starting at position 3239 of SEQ ID NO: 317081
accuaagaugucuggauuc

SEQ ID NO: 463048 - RNA, 19 nt, Artificial Sequence
  Description of Artificial Sequence: Synthetic oligonucleotide
  Antisense Strand to SEQ ID NO: 463047
gaauccagacaucuuaggu

SEQ ID NO: 463049 - RNA, 19 nt, Artificial Sequence
  Description of Artificial Sequence: Synthetic oligonucleotide
  Sense strand starting at position 3358 of SEQ ID NO: 317081
gcguccauuugggugaaga

SEQ ID NO: 463050 - RNA, 19 nt, Artificial Sequence
  Description of Artificial Sequence: Synthetic oligonucleotide
  Antisense Strand to SEQ ID NO: 463049
ucuucacccaaauggacgc

SEQ ID NO: 463051 - RNA, 19 nt, Artificial Sequence
  Description of Artificial Sequence: Synthetic oligonucleotide
  Sense strand starting at position 3453 of SEQ ID NO: 317081
ccgggugaaccugaauuga

SEQ ID NO: 463052 - RNA, 19 nt, Artificial Sequence
  Description of Artificial Sequence: Synthetic oligonucleotide
  Antisense Strand to SEQ ID NO: 463051
ucaauucagguucacccgg

SEQ ID NO: 463053 - RNA, 19 nt, Artificial Sequence
  Description of Artificial Sequence: Synthetic oligonucleotide
  Sense strand starting at position 3468 of SEQ ID NO: 317081
uugaauugcauagggaagu

SEQ ID NO: 463054 - RNA, 19 nt, Artificial Sequence
  Description of Artificial Sequence: Synthetic oligonucleotide
  Antisense Strand to SEQ ID NO: 463053
acuucccuaugcaauucaa

SEQ ID NO: 463055 - RNA, 19 nt, Artificial Sequence
  Description of Artificial Sequence: Synthetic oligonucleotide
  Sense strand starting at position 3493 of SEQ ID NO: 317081
cuuucuaucuacuugguau

SEQ ID NO: 463056 - RNA, 19 nt, Artificial Sequence
  Description of Artificial Sequence: Synthetic oligonucleotide
  Antisense Strand to SEQ ID NO: 463055
auaccaaguagauagaaag

SEQ ID NO: 463057 - RNA, 19 nt, Artificial Sequence
  Description of Artificial Sequence: Synthetic oligonucleotide
  Sense strand starting at position 3527 of SEQ ID NO: 317081
cuugguucuuucuuacaua

SEQ ID NO: 463058 - RNA, 19 nt, Artificial Sequence
  Description of Artificial Sequence: Synthetic oligonucleotide
  Antisense Strand to SEQ ID NO: 463057
uauguaagaaagaaccaag

SEQ ID NO: 463059 - RNA, 19 nt, Artificial Sequence
  Description of Artificial Sequence: Synthetic oligonucleotide
  Sense strand starting at position 3593 of SEQ ID NO: 317081
auaagucccuuucuaagga

SEQ ID NO: 463060 - RNA, 19 nt, Artificial Sequence
  Description of Artificial Sequence: Synthetic oligonucleotide
  Antisense Strand to SEQ ID NO: 463059
uccuuagaaagggacuuau

SEQ ID NO: 463061 - RNA, 19 nt, Artificial Sequence
  Description of Artificial Sequence: Synthetic oligonucleotide
  Sense strand starting at position 3637 of SEQ ID NO: 317081
cggauuuguugcuuagggu

SEQ ID NO: 463062 - RNA, 19 nt, Artificial Sequence
  Description of Artificial Sequence: Synthetic oligonucleotide
  Antisense Strand to SEQ ID NO: 463061
acccuaagcaacaaauccg

SEQ ID NO: 463063 - RNA, 19 nt, Artificial Sequence
  Description of Artificial Sequence: Synthetic oligonucleotide
  Sense strand starting at position 3654 of SEQ ID NO: 317081
guuugucuucccgcgauua

SEQ ID NO: 463064 - RNA, 19 nt, Artificial Sequence
  Description of Artificial Sequence: Synthetic oligonucleotide
  Antisense Strand to SEQ ID NO: 463063
uaaucgcgggaagacaaac

SEQ ID NO: 463065 - RNA, 19 nt, Artificial Sequence
  Description of Artificial Sequence: Synthetic oligonucleotide
  Sense strand starting at position 3665 of SEQ ID NO: 317081
cgcgauuaggaagaagagu

SEQ ID NO: 463066 - RNA, 19 nt, Artificial Sequence
  Description of Artificial Sequence: Synthetic oligonucleotide
  Antisense Strand to SEQ ID NO: 463065
acucuucuuccuaaucgcg

SEQ ID NO: 463067 - RNA, 19 nt, Artificial Sequence
  Description of Artificial Sequence: Synthetic oligonucleotide
  Sense strand starting at position 3712 of SEQ ID NO: 317081
acuccagagcuuuaguuaa

SEQ ID NO: 463068 - RNA, 19 nt, Artificial Sequence
  Description of Artificial Sequence: Synthetic oligonucleotide
  Antisense Strand to SEQ ID NO: 463067
uuaacuaaagcucuggagu

SEQ ID NO: 463069 - RNA, 19 nt, Artificial Sequence
  Description of Artificial Sequence: Synthetic oligonucleotide
  Sense strand starting at position 3714 of SEQ ID NO: 317081
uccagagcuuuaguuaacu

SEQ ID NO: 463070 - RNA, 19 nt, Artificial Sequence
  Description of Artificial Sequence: Synthetic oligonucleotide
  Antisense Strand to SEQ ID NO: 463069
aguuaacuaaagcucugga

SEQ ID NO: 463071 - RNA, 19 nt, Artificial Sequence
  Description of Artificial Sequence: Synthetic oligonucleotide
  Sense strand starting at position 3724 of SEQ ID NO: 317081
uaguuaacuucucuggagu

SEQ ID NO: 463072 - RNA, 19 nt, Artificial Sequence
  Description of Artificial Sequence: Synthetic oligonucleotide
  Antisense Strand to SEQ ID NO: 463071
acuccagagaaguuaacua

SEQ ID NO: 463073 - RNA, 19 nt, Artificial Sequence
  Description of Artificial Sequence: Synthetic oligonucleotide
  Sense strand starting at position 3725 of SEQ ID NO: 317081
aguuaacuucucuggagug

SEQ ID NO: 463074 - RNA, 19 nt, Artificial Sequence
  Description of Artificial Sequence: Synthetic oligonucleotide
  Antisense Strand to SEQ ID NO: 463073
cacuccagagaaguuaacu

SEQ ID NO: 463075 - RNA, 19 nt, Artificial Sequence
  Description of Artificial Sequence: Synthetic oligonucleotide
  Sense strand starting at position 328 of SEQ ID NO: 317082
aguguucuguuauuuagua

SEQ ID NO: 463076 - RNA, 19 nt, Artificial Sequence
  Description of Artificial Sequence: Synthetic oligonucleotide
  Antisense Strand to SEQ ID NO: 463075
uacuaaauaacagaacacu

SEQ ID NO: 463077 - RNA, 19 nt, Artificial Sequence
  Description of Artificial Sequence: Synthetic oligonucleotide
  Sense strand starting at position 332 of SEQ ID NO: 317082
uucuguuauuuaguagcua

SEQ ID NO: 463078 - RNA, 19 nt, Artificial Sequence
  Description of Artificial Sequence: Synthetic oligonucleotide
  Antisense Strand to SEQ ID NO: 463077
uagcuacuaaauaacagaa

SEQ ID NO: 463079 - RNA, 19 nt, Artificial Sequence
  Description of Artificial Sequence: Synthetic oligonucleotide
  Sense strand starting at position 336 of SEQ ID NO: 317082
guuauuuaguagcuaaucu

SEQ ID NO: 463080 - RNA, 19 nt, Artificial Sequence
  Description of Artificial Sequence: Synthetic oligonucleotide
  Antisense Strand to SEQ ID NO: 463079
agauuagcuacuaaauaac

SEQ ID NO: 463081 - RNA, 19 nt, Artificial Sequence
  Description of Artificial Sequence: Synthetic oligonucleotide
  Sense strand starting at position 715 of SEQ ID NO: 317082
uugagaugucaguacacuu

SEQ ID NO: 463082 - RNA, 19 nt, Artificial Sequence
  Description of Artificial Sequence: Synthetic oligonucleotide
  Antisense Strand to SEQ ID NO: 463081
aaguguacugacaucucaa

SEQ ID NO: 463083 - RNA, 19 nt, Artificial Sequence
  Description of Artificial Sequence: Synthetic oligonucleotide
  Sense strand starting at position 820 of SEQ ID NO: 317082
guuguuccaccacauuauu

SEQ ID NO: 463084 - RNA, 19 nt, Artificial Sequence
  Description of Artificial Sequence: Synthetic oligonucleotide
  Antisense Strand to SEQ ID NO: 463083
aauaaugugguggaacaac

SEQ ID NO: 463085 - RNA, 19 nt, Artificial Sequence
  Description of Artificial Sequence: Synthetic oligonucleotide
  Sense strand starting at position 829 of SEQ ID NO: 317082
ccacauuauuuagguauuu

SEQ ID NO: 463086 - RNA, 19 nt, Artificial Sequence
  Description of Artificial Sequence: Synthetic oligonucleotide
  Antisense Strand to SEQ ID NO: 463085
aaauaccuaaauaaugugg

SEQ ID NO: 463087 - RNA, 19 nt, Artificial Sequence
  Description of Artificial Sequence: Synthetic oligonucleotide
  Sense strand starting at position 847 of SEQ ID NO: 317082
uuaugagcucaagaucagu

SEQ ID NO: 463088 - RNA, 19 nt, Artificial Sequence
  Description of Artificial Sequence: Synthetic oligonucleotide
  Antisense Strand to SEQ ID NO: 463087
acugaucuugagcucauaa

SEQ ID NO: 463089 - RNA, 19 nt, Artificial Sequence
  Description of Artificial Sequence: Synthetic oligonucleotide
  Sense strand starting at position 853 of SEQ ID NO: 317082
gcucaagaucaguaguuac

SEQ ID NO: 463090 - RNA, 19 nt, Artificial Sequence
  Description of Artificial Sequence: Synthetic oligonucleotide
  Antisense Strand to SEQ ID NO: 463089
guaacuacugaucuugagc

SEQ ID NO: 463091 - RNA, 19 nt, Artificial Sequence
  Description of Artificial Sequence: Synthetic oligonucleotide
  Sense strand starting at position 856 of SEQ ID NO: 317082
caagaucaguaguuacaag

SEQ ID NO: 463092 - RNA, 19 nt, Artificial Sequence
  Description of Artificial Sequence: Synthetic oligonucleotide
  Antisense Strand to SEQ ID NO: 463091
cuuguaacuacugaucuug

SEQ ID NO: 463093 - RNA, 19 nt, Artificial Sequence
  Description of Artificial Sequence: Synthetic oligonucleotide
  Sense strand starting at position 884 of SEQ ID NO: 317082
uccguauuucugcacucga

SEQ ID NO: 463094 - RNA, 19 nt, Artificial Sequence
  Description of Artificial Sequence: Synthetic oligonucleotide
  Antisense Strand to SEQ ID NO: 463093
ucgagugcagaaauacgga

SEQ ID NO: 463095 - RNA, 19 nt, Artificial Sequence
  Description of Artificial Sequence: Synthetic oligonucleotide
  Sense strand starting at position 922 of SEQ ID NO: 317082
auaugccacgcugauauaa

SEQ ID NO: 463096 - RNA, 19 nt, Artificial Sequence
  Description of Artificial Sequence: Synthetic oligonucleotide
  Antisense Strand to SEQ ID NO: 463095
uuauaucagcguggcauau

SEQ ID NO: 463097 - RNA, 19 nt, Artificial Sequence
  Description of Artificial Sequence: Synthetic oligonucleotide
  Sense strand starting at position 1052 of SEQ ID NO: 317082
gcuauacagcuauaaauga

SEQ ID NO: 463098 - RNA, 19 nt, Artificial Sequence
  Description of Artificial Sequence: Synthetic oligonucleotide
  Antisense Strand to SEQ ID NO: 463097
ucauuuauagcuguauagc

SEQ ID NO: 463099 - RNA, 19 nt, Artificial Sequence
  Description of Artificial Sequence: Synthetic oligonucleotide
  Sense strand starting at position 1060 of SEQ ID NO: 317082
gcuauaaaugacugaacac

SEQ ID NO: 463100 - RNA, 19 nt, Artificial Sequence
  Description of Artificial Sequence: Synthetic oligonucleotide
  Antisense Strand to SEQ ID NO: 463099
guguucagucauuuauagc

SEQ ID NO: 463101 - RNA, 19 nt, Artificial Sequence
  Description of Artificial Sequence: Synthetic oligonucleotide
  Sense strand starting at position 1255 of SEQ ID NO: 317082
gaggcuagaggaugucaaa

SEQ ID NO: 463102 - RNA, 19 nt, Artificial Sequence
  Description of Artificial Sequence: Synthetic oligonucleotide
  Antisense Strand to SEQ ID NO: 463101
uuugacauccucuagccuc

SEQ ID NO: 463103 - RNA, 19 nt, Artificial Sequence
  Description of Artificial Sequence: Synthetic oligonucleotide
  Sense strand starting at position 1280 of SEQ ID NO: 317082
uguugcauucgaguuagca

SEQ ID NO: 463104 - RNA, 19 nt, Artificial Sequence
  Description of Artificial Sequence: Synthetic oligonucleotide
  Antisense Strand to SEQ ID NO: 463103
ugcuaacucgaaugcaaca

SEQ ID NO: 463105 - RNA, 19 nt, Artificial Sequence
  Description of Artificial Sequence: Synthetic oligonucleotide
  Sense strand starting at position 1292 of SEQ ID NO: 317082
guuagcaacugacugaaua

SEQ ID NO: 463106 - RNA, 19 nt, Artificial Sequence
  Description of Artificial Sequence: Synthetic oligonucleotide
  Antisense Strand to SEQ ID NO: 463105
uauucagucaguugcuaac

SEQ ID NO: 463107 - RNA, 19 nt, Artificial Sequence
  Description of Artificial Sequence: Synthetic oligonucleotide
  Sense strand starting at position 1382 of SEQ ID NO: 317082
gcagcuggccuguucgaaa

SEQ ID NO: 463108 - RNA, 19 nt, Artificial Sequence
  Description of Artificial Sequence: Synthetic oligonucleotide
  Antisense Strand to SEQ ID NO: 463107
uuucgaacaggccagcugc

SEQ ID NO: 463109 - RNA, 19 nt, Artificial Sequence
  Description of Artificial Sequence: Synthetic oligonucleotide
  Sense strand starting at position 1439 of SEQ ID NO: 317082
gcccaauaaucacuuugag

SEQ ID NO: 463110 - RNA, 19 nt, Artificial Sequence
  Description of Artificial Sequence: Synthetic oligonucleotide
  Antisense Strand to SEQ ID NO: 463109
cucaaagugauuauugggc

SEQ ID NO: 463111 - RNA, 19 nt, Artificial Sequence
  Description of Artificial Sequence: Synthetic oligonucleotide
  Sense strand starting at position 1581 of SEQ ID NO: 317082
cggaucugcacuuaaagga

SEQ ID NO: 463112 - RNA, 19 nt, Artificial Sequence
  Description of Artificial Sequence: Synthetic oligonucleotide
  Antisense Strand to SEQ ID NO: 463111
uccuuuaagugcagauccg

SEQ ID NO: 463113 - RNA, 19 nt, Artificial Sequence
  Description of Artificial Sequence: Synthetic oligonucleotide
  Sense strand starting at position 1598 of SEQ ID NO: 317082
gaagaaacgcuccggaaga

SEQ ID NO: 463114 - RNA, 19 nt, Artificial Sequence
  Description of Artificial Sequence: Synthetic oligonucleotide
  Antisense Strand to SEQ ID NO: 463113
ucuuccggagcguuucuuc

SEQ ID NO: 463115 - RNA, 19 nt, Artificial Sequence
  Description of Artificial Sequence: Synthetic oligonucleotide
  Sense strand starting at position 1708 of SEQ ID NO: 317082
ccagauuacuucucuggua

SEQ ID NO: 463116 - RNA, 19 nt, Artificial Sequence
  Description of Artificial Sequence: Synthetic oligonucleotide
  Antisense Strand to SEQ ID NO: 463115
uaccagagaaguaaucugg

SEQ ID NO: 463117 - RNA, 19 nt, Artificial Sequence
  Description of Artificial Sequence: Synthetic oligonucleotide
  Sense strand starting at position 1710 of SEQ ID NO: 317082
agauuacuucucugguauc

SEQ ID NO: 463118 - RNA, 19 nt, Artificial Sequence
  Description of Artificial Sequence: Synthetic oligonucleotide
  Antisense Strand to SEQ ID NO: 463117
gauaccagagaaguaaucu

SEQ ID NO: 463119 - RNA, 19 nt, Artificial Sequence
  Description of Artificial Sequence: Synthetic oligonucleotide
  Sense strand starting at position 1805 of SEQ ID NO: 317082
gaagaacucggccacgauu

SEQ ID NO: 463120 - RNA, 19 nt, Artificial Sequence
  Description of Artificial Sequence: Synthetic oligonucleotide
  Antisense Strand to SEQ ID NO: 463119
aaucguggccgaguucuuc

SEQ ID NO: 463121 - RNA, 19 nt, Artificial Sequence
  Description of Artificial Sequence: Synthetic oligonucleotide
  Sense strand starting at position 2345 of SEQ ID NO: 317082
uagugaacggucuaaacuu

SEQ ID NO: 463122 - RNA, 19 nt, Artificial Sequence
  Description of Artificial Sequence: Synthetic oligonucleotide
  Antisense Strand to SEQ ID NO: 463121
aaguuuagaccguucacua

SEQ ID NO: 463123 - RNA, 19 nt, Artificial Sequence
  Description of Artificial Sequence: Synthetic oligonucleotide
  Sense strand starting at position 2699 of SEQ ID NO: 317082
agugaaucuugacucacca

SEQ ID NO: 463124 - RNA, 19 nt, Artificial Sequence
  Description of Artificial Sequence: Synthetic oligonucleotide
  Antisense Strand to SEQ ID NO: 463123
uggugagucaagauucacu

SEQ ID NO: 463125 - RNA, 19 nt, Artificial Sequence
  Description of Artificial Sequence: Synthetic oligonucleotide
  Sense strand starting at position 2864 of SEQ ID NO: 317082
ccggacguuauaugagaaa

SEQ ID NO: 463126 - RNA, 19 nt, Artificial Sequence
  Description of Artificial Sequence: Synthetic oligonucleotide
  Antisense Strand to SEQ ID NO: 463125
uuucucauauaacguccgg

SEQ ID NO: 463127 - RNA, 19 nt, Artificial Sequence
  Description of Artificial Sequence: Synthetic oligonucleotide
  Sense strand starting at position 2875 of SEQ ID NO: 317082
augagaaauacuugagugu

SEQ ID NO: 463128 - RNA, 19 nt, Artificial Sequence
  Description of Artificial Sequence: Synthetic oligonucleotide
  Antisense Strand to SEQ ID NO: 463127
acacucaaguauuucucau

SEQ ID NO: 463129 - RNA, 19 nt, Artificial Sequence
  Description of Artificial Sequence: Synthetic oligonucleotide
  Sense strand starting at position 3047 of SEQ ID NO: 317082
ugggaucucaucugagguu

SEQ ID NO: 463130 - RNA, 19 nt, Artificial Sequence
  Description of Artificial Sequence: Synthetic oligonucleotide
  Antisense Strand to SEQ ID NO: 463129
aaccucagaugagauccca

SEQ ID NO: 463131 - RNA, 19 nt, Artificial Sequence
  Description of Artificial Sequence: Synthetic oligonucleotide
  Sense strand starting at position 3151 of SEQ ID NO: 317082
gccagcugugugucagcua

SEQ ID NO: 463132 - RNA, 19 nt, Artificial Sequence
  Description of Artificial Sequence: Synthetic oligonucleotide
  Antisense Strand to SEQ ID NO: 463131
uagcugacacacagcuggc

SEQ ID NO: 463133 - RNA, 19 nt, Artificial Sequence
  Description of Artificial Sequence: Synthetic oligonucleotide
  Sense strand starting at position 3236 of SEQ ID NO: 317082
aggcucaccugauuaagua

SEQ ID NO: 463134 - RNA, 19 nt, Artificial Sequence
  Description of Artificial Sequence: Synthetic oligonucleotide
  Antisense Strand to SEQ ID NO: 463133
uacuuaaucaggugagccu

SEQ ID NO: 463135 - RNA, 19 nt, Artificial Sequence
  Description of Artificial Sequence: Synthetic oligonucleotide
  Sense strand starting at position 3237 of SEQ ID NO: 317082
ggcucaccugauuaaguaa

SEQ ID NO: 463136 - RNA, 19 nt, Artificial Sequence
  Description of Artificial Sequence: Synthetic oligonucleotide
  Antisense Strand to SEQ ID NO: 463135
uuacuuaaucaggugagcc

SEQ ID NO: 463137 - RNA, 19 nt, Artificial Sequence
  Description of Artificial Sequence: Synthetic oligonucleotide
  Sense strand starting at position 3250 of SEQ ID NO: 317082
aaguaagacucagucagau

SEQ ID NO: 463138 - RNA, 19 nt, Artificial Sequence
  Description of Artificial Sequence: Synthetic oligonucleotide
  Antisense Strand to SEQ ID NO: 463137
aucugacugagucuuacuu

SEQ ID NO: 463139 - RNA, 19 nt, Artificial Sequence
  Description of Artificial Sequence: Synthetic oligonucleotide
  Sense strand starting at position 3402 of SEQ ID NO: 317082
gccuguacagcguuguaua

SEQ ID NO: 463140 - RNA, 19 nt, Artificial Sequence
  Description of Artificial Sequence: Synthetic oligonucleotide
  Antisense Strand to SEQ ID NO: 463139
uauacaacgcuguacaggc

SEQ ID NO: 463141 - RNA, 19 nt, Artificial Sequence
  Description of Artificial Sequence: Synthetic oligonucleotide
  Sense strand starting at position 3428 of SEQ ID NO: 317082
uuucgauuaguuggaagag

SEQ ID NO: 463142 - RNA, 19 nt, Artificial Sequence
  Description of Artificial Sequence: Synthetic oligonucleotide
  Antisense Strand to SEQ ID NO: 463141
cucuuccaacuaaucgaaa

SEQ ID NO: 463143 - RNA, 19 nt, Artificial Sequence
  Description of Artificial Sequence: Synthetic oligonucleotide
  Sense strand starting at position 3453 of SEQ ID NO: 317082
augggugugauagguaaca

SEQ ID NO: 463144 - RNA, 19 nt, Artificial Sequence
  Description of Artificial Sequence: Synthetic oligonucleotide
  Antisense Strand to SEQ ID NO: 463143
uguuaccuaucacacccau

SEQ ID NO: 463145 - RNA, 19 nt, Artificial Sequence
  Description of Artificial Sequence: Synthetic oligonucleotide
  Sense strand starting at position 3552 of SEQ ID NO: 317082
gagcaaugucagggaaagu

SEQ ID NO: 463146 - RNA, 19 nt, Artificial Sequence
  Description of Artificial Sequence: Synthetic oligonucleotide
  Antisense Strand to SEQ ID NO: 463145
acuuucccugacauugcuc

SEQ ID NO: 463147 - RNA, 19 nt, Artificial Sequence
  Description of Artificial Sequence: Synthetic oligonucleotide
  Sense strand starting at position 3582 of SEQ ID NO: 317082
aagcaagggaguuggauau

SEQ ID NO: 463148 - RNA, 19 nt, Artificial Sequence
  Description of Artificial Sequence: Synthetic oligonucleotide
  Antisense Strand to SEQ ID NO: 463147
auauccaacucccuugcuu

SEQ ID NO: 463149 - RNA, 19 nt, Artificial Sequence
  Description of Artificial Sequence: Synthetic oligonucleotide
  Sense strand starting at position 3797 of SEQ ID NO: 317082
uuguuaguauaaccuggaa

SEQ ID NO: 463150 - RNA, 19 nt, Artificial Sequence
  Description of Artificial Sequence: Synthetic oligonucleotide
  Antisense Strand to SEQ ID NO: 463149
uuccagguuauacuaacaa

SEQ ID NO: 463151 - RNA, 19 nt, Artificial Sequence
  Description of Artificial Sequence: Synthetic oligonucleotide
  Sense strand starting at position 3800 of SEQ ID NO: 317082
uuaguauaaccuggaaauu

SEQ ID NO: 463152 - RNA, 19 nt, Artificial Sequence
  Description of Artificial Sequence: Synthetic oligonucleotide
  Antisense Strand to SEQ ID NO: 463151
aauuuccagguuauacuaa

SEQ ID NO: 463153 - RNA, 19 nt, Artificial Sequence
  Description of Artificial Sequence: Synthetic oligonucleotide
  Sense strand starting at position 3878 of SEQ ID NO: 317082
aucuguacucuaugaggag

SEQ ID NO: 463154 - RNA, 19 nt, Artificial Sequence
  Description of Artificial Sequence: Synthetic oligonucleotide
  Antisense Strand to SEQ ID NO: 463153
cuccucauagaguacagau

SEQ ID NO: 463155 - RNA, 19 nt, Artificial Sequence
  Description of Artificial Sequence: Synthetic oligonucleotide
  Sense strand starting at position 1 of SEQ ID NO: 317083
ugacuaucugcaugacuau

SEQ ID NO: 463156 - RNA, 19 nt, Artificial Sequence
  Description of Artificial Sequence: Synthetic oligonucleotide
  Antisense Strand to SEQ ID NO: 463155
auagucaugcagauaguca

SEQ ID NO: 463157 - RNA, 19 nt, Artificial Sequence
  Description of Artificial Sequence: Synthetic oligonucleotide
  Sense strand starting at position 24 of SEQ ID NO: 317083
aucagaagcuaugcaauca

SEQ ID NO: 463158 - RNA, 19 nt, Artificial Sequence
  Description of Artificial Sequence: Synthetic oligonucleotide
  Antisense Strand to SEQ ID NO: 463157
ugauugcauagcuucugau

SEQ ID NO: 463159 - RNA, 19 nt, Artificial Sequence
  Description of Artificial Sequence: Synthetic oligonucleotide
  Sense strand starting at position 34 of SEQ ID NO: 317083
augcaaucacucuggaaua

SEQ ID NO: 463160 - RNA, 19 nt, Artificial Sequence
  Description of Artificial Sequence: Synthetic oligonucleotide
  Antisense Strand to SEQ ID NO: 463159
uauuccagagugauugcau

SEQ ID NO: 463161 - RNA, 19 nt, Artificial Sequence
  Description of Artificial Sequence: Synthetic oligonucleotide
  Sense strand starting at position 93 of SEQ ID NO: 317083
gaagaauccuuuccggaga

SEQ ID NO: 463162 - RNA, 19 nt, Artificial Sequence
  Description of Artificial Sequence: Synthetic oligonucleotide
  Antisense Strand to SEQ ID NO: 463161
ucuccggaaaggauucuuc

SEQ ID NO: 463163 - RNA, 19 nt, Artificial Sequence
  Description of Artificial Sequence: Synthetic oligonucleotide
  Sense strand starting at position 96 of SEQ ID NO: 317083
gaauccuuuccggagaccu

SEQ ID NO: 463164 - RNA, 19 nt, Artificial Sequence
  Description of Artificial Sequence: Synthetic oligonucleotide
  Antisense Strand to SEQ ID NO: 463163
aggucuccggaaaggauuc

SEQ ID NO: 463165 - RNA, 19 nt, Artificial Sequence
  Description of Artificial Sequence: Synthetic oligonucleotide
  Sense strand starting at position 329 of SEQ ID NO: 317083
accacaauguccuuguaua

SEQ ID NO: 463166 - RNA, 19 nt, Artificial Sequence
  Description of Artificial Sequence: Synthetic oligonucleotide
  Antisense Strand to SEQ ID NO: 463165
uauacaaggacauuguggu

SEQ ID NO: 463167 - RNA, 19 nt, Artificial Sequence
  Description of Artificial Sequence: Synthetic oligonucleotide
  Sense strand starting at position 330 of SEQ ID NO: 317083
ccacaauguccuuguauag

SEQ ID NO: 463168 - RNA, 19 nt, Artificial Sequence
  Description of Artificial Sequence: Synthetic oligonucleotide
  Antisense Strand to SEQ ID NO: 463167
cuauacaaggacauugugg

SEQ ID NO: 463169 - RNA, 19 nt, Artificial Sequence
  Description of Artificial Sequence: Synthetic oligonucleotide
  Sense strand starting at position 393 of SEQ ID NO: 317083
ccaccaaugucacugagua

SEQ ID NO: 463170 - RNA, 19 nt, Artificial Sequence
  Description of Artificial Sequence: Synthetic oligonucleotide
  Antisense Strand to SEQ ID NO: 463169
uacucagugacauuggugg

SEQ ID NO: 463171 - RNA, 19 nt, Artificial Sequence
  Description of Artificial Sequence: Synthetic oligonucleotide
  Sense strand starting at position 452 of SEQ ID NO: 317083
aggcuagaccuuugguaac

SEQ ID NO: 463172 - RNA, 19 nt, Artificial Sequence
  Description of Artificial Sequence: Synthetic oligonucleotide
  Antisense Strand to SEQ ID NO: 463171
guuaccaaaggucuagccu

SEQ ID NO: 463173 - RNA, 19 nt, Artificial Sequence
  Description of Artificial Sequence: Synthetic oligonucleotide
  Sense strand starting at position 464 of SEQ ID NO: 317083
ugguaacgucagcaacauu

SEQ ID NO: 463174 - RNA, 19 nt, Artificial Sequence
  Description of Artificial Sequence: Synthetic oligonucleotide
  Antisense Strand to SEQ ID NO: 463173
aauguugcugacguuacca

SEQ ID NO: 463175 - RNA, 19 nt, Artificial Sequence
  Description of Artificial Sequence: Synthetic oligonucleotide
  Sense strand starting at position 619 of SEQ ID NO: 317083
gcuuaaguccuggaaucca

SEQ ID NO: 463176 - RNA, 19 nt, Artificial Sequence
  Description of Artificial Sequence: Synthetic oligonucleotide
  Antisense Strand to SEQ ID NO: 463175
uggauuccaggacuuaagc

SEQ ID NO: 463177 - RNA, 19 nt, Artificial Sequence
  Description of Artificial Sequence: Synthetic oligonucleotide
  Sense strand starting at position 687 of SEQ ID NO: 317083
auaaaccgcuaguuaauaa

SEQ ID NO: 463178 - RNA, 19 nt, Artificial Sequence
  Description of Artificial Sequence: Synthetic oligonucleotide
  Antisense Strand to SEQ ID NO: 463177
uuauuaacuagcgguuuau

SEQ ID NO: 463179 - RNA, 19 nt, Artificial Sequence
  Description of Artificial Sequence: Synthetic oligonucleotide
  Sense strand starting at position 725 of SEQ ID NO: 317083
ucugcuuuccuaugaagac

SEQ ID NO: 463180 - RNA, 19 nt, Artificial Sequence
  Description of Artificial Sequence: Synthetic oligonucleotide
  Antisense Strand to SEQ ID NO: 463179
gucuucauaggaaagcaga

SEQ ID NO: 463181 - RNA, 19 nt, Artificial Sequence
  Description of Artificial Sequence: Synthetic oligonucleotide
  Sense strand starting at position 822 of SEQ ID NO: 317083
gaaacaauacguggucacu

SEQ ID NO: 463182 - RNA, 19 nt, Artificial Sequence
  Description of Artificial Sequence: Synthetic oligonucleotide
  Antisense Strand to SEQ ID NO: 463181
agugaccacguauuguuuc

SEQ ID NO: 463183 - RNA, 19 nt, Artificial Sequence
  Description of Artificial Sequence: Synthetic oligonucleotide
  Sense strand starting at position 824 of SEQ ID NO: 317083
aacaauacguggucacuca

SEQ ID NO: 463184 - RNA, 19 nt, Artificial Sequence
  Description of Artificial Sequence: Synthetic oligonucleotide
  Antisense Strand to SEQ ID NO: 463183
ugagugaccacguauuguu

SEQ ID NO: 463185 - RNA, 19 nt, Artificial Sequence
  Description of Artificial Sequence: Synthetic oligonucleotide
  Sense strand starting at position 825 of SEQ ID NO: 317083
acaauacguggucacucau

SEQ ID NO: 463186 - RNA, 19 nt, Artificial Sequence
  Description of Artificial Sequence: Synthetic oligonucleotide
  Antisense Strand to SEQ ID NO: 463185
augagugaccacguauugu

SEQ ID NO: 463187 - RNA, 19 nt, Artificial Sequence
  Description of Artificial Sequence: Synthetic oligonucleotide
  Sense strand starting at position 1178 of SEQ ID NO: 317083
cuaggaaagcuaugaccuu

SEQ ID NO: 463188 - RNA, 19 nt, Artificial Sequence
  Description of Artificial Sequence: Synthetic oligonucleotide
  Antisense Strand to SEQ ID NO: 463187
aaggucauagcuuuccuag

SEQ ID NO: 463189 - RNA, 19 nt, Artificial Sequence
  Description of Artificial Sequence: Synthetic oligonucleotide
  Sense strand starting at position 1185 of SEQ ID NO: 317083
agcuaugaccuugaucuuu

SEQ ID NO: 463190 - RNA, 19 nt, Artificial Sequence
  Description of Artificial Sequence: Synthetic oligonucleotide
  Antisense Strand to SEQ ID NO: 463189
aaagaucaaggucauagcu

SEQ ID NO: 463191 - RNA, 19 nt, Artificial Sequence
  Description of Artificial Sequence: Synthetic oligonucleotide
  Sense strand starting at position 1353 of SEQ ID NO: 317083
gacggcaagagcuguauuu

SEQ ID NO: 463192 - RNA, 19 nt, Artificial Sequence
  Description of Artificial Sequence: Synthetic oligonucleotide
  Antisense Strand to SEQ ID NO: 463191
aaauacagcucuugccguc

SEQ ID NO: 463193 - RNA, 19 nt, Artificial Sequence
  Description of Artificial Sequence: Synthetic oligonucleotide
  Sense strand starting at position 1376 of SEQ ID NO: 317083
uuuggugacgcccaucaaa

SEQ ID NO: 463194 - RNA, 19 nt, Artificial Sequence
  Description of Artificial Sequence: Synthetic oligonucleotide
  Antisense Strand to SEQ ID NO: 463193
uuugaugggcgucaccaaa

SEQ ID NO: 463195 - RNA, 19 nt, Artificial Sequence
  Description of Artificial Sequence: Synthetic oligonucleotide
  Sense strand starting at position 1420 of SEQ ID NO: 317083
ugagguuucucccuacagu

SEQ ID NO: 463196 - RNA, 19 nt, Artificial Sequence
  Description of Artificial Sequence: Synthetic oligonucleotide
  Antisense Strand to SEQ ID NO: 463195
acuguagggagaaaccuca

SEQ ID NO: 463197 - RNA, 19 nt, Artificial Sequence
  Description of Artificial Sequence: Synthetic oligonucleotide
  Sense strand starting at position 1421 of SEQ ID NO: 317083
gagguuucucccuacaguu

SEQ ID NO: 463198 - RNA, 19 nt, Artificial Sequence
  Description of Artificial Sequence: Synthetic oligonucleotide
  Antisense Strand to SEQ ID NO: 463197
aacuguagggagaaaccuc

SEQ ID NO: 463199 - RNA, 19 nt, Artificial Sequence
  Description of Artificial Sequence: Synthetic oligonucleotide
  Sense strand starting at position 2105 of SEQ ID NO: 317083
ccggguuuccucucguuca

SEQ ID NO: 463200 - RNA, 19 nt, Artificial Sequence
  Description of Artificial Sequence: Synthetic oligonucleotide
  Antisense Strand to SEQ ID NO: 463199
ugaacgagaggaaacccgg

SEQ ID NO: 463201 - RNA, 19 nt, Artificial Sequence
  Description of Artificial Sequence: Synthetic oligonucleotide
  Sense strand starting at position 2149 of SEQ ID NO: 317083
cgguuuccaccuugaauuc

SEQ ID NO: 463202 - RNA, 19 nt, Artificial Sequence
  Description of Artificial Sequence: Synthetic oligonucleotide
  Antisense Strand to SEQ ID NO: 463201
gaauucaagguggaaaccg

SEQ ID NO: 463203 - RNA, 19 nt, Artificial Sequence
  Description of Artificial Sequence: Synthetic oligonucleotide
  Sense strand starting at position 2462 of SEQ ID NO: 317083
ccgacuucccaacggaaga

SEQ ID NO: 463204 - RNA, 19 nt, Artificial Sequence
  Description of Artificial Sequence: Synthetic oligonucleotide
  Antisense Strand to SEQ ID NO: 463203
ucuuccguugggaagucgg

SEQ ID NO: 463205 - RNA, 19 nt, Artificial Sequence
  Description of Artificial Sequence: Synthetic oligonucleotide
  Sense strand starting at position 2513 of SEQ ID NO: 317083
acagaaacucccgaagcau

SEQ ID NO: 463206 - RNA, 19 nt, Artificial Sequence
  Description of Artificial Sequence: Synthetic oligonucleotide
  Antisense Strand to SEQ ID NO: 463205
augcuucgggaguuucugu

SEQ ID NO: 463207 - RNA, 19 nt, Artificial Sequence
  Description of Artificial Sequence: Synthetic oligonucleotide
  Sense strand starting at position 2708 of SEQ ID NO: 317083
auuaaaccaccuuguguuu

SEQ ID NO: 463208 - RNA, 19 nt, Artificial Sequence
  Description of Artificial Sequence: Synthetic oligonucleotide
  Antisense Strand to SEQ ID NO: 463207
aaacacaaggugguuuaau

SEQ ID NO: 463209 - RNA, 19 nt, Artificial Sequence
  Description of Artificial Sequence: Synthetic oligonucleotide
  Sense strand starting at position 2808 of SEQ ID NO: 317083
gggagaaccuccgcuugga

SEQ ID NO: 463210 - RNA, 19 nt, Artificial Sequence
  Description of Artificial Sequence: Synthetic oligonucleotide
  Antisense Strand to SEQ ID NO: 463209
uccaagcggagguucuccc

SEQ ID NO: 463211 - RNA, 19 nt, Artificial Sequence
  Description of Artificial Sequence: Synthetic oligonucleotide
  Sense strand starting at position 2870 of SEQ ID NO: 317083
ggaaucuuucucugucuua

SEQ ID NO: 463212 - RNA, 19 nt, Artificial Sequence
  Description of Artificial Sequence: Synthetic oligonucleotide
  Antisense Strand to SEQ ID NO: 463211
uaagacagagaaagauucc

SEQ ID NO: 463213 - RNA, 19 nt, Artificial Sequence
  Description of Artificial Sequence: Synthetic oligonucleotide
  Sense strand starting at position 2910 of SEQ ID NO: 317083
aggaaaguguuauuccuca

SEQ ID NO: 463214 - RNA, 19 nt, Artificial Sequence
  Description of Artificial Sequence: Synthetic oligonucleotide
  Antisense Strand to SEQ ID NO: 463213
ugaggaauaacacuuuccu

SEQ ID NO: 463215 - RNA, 19 nt, Artificial Sequence
  Description of Artificial Sequence: Synthetic oligonucleotide
  Sense strand starting at position 2914 of SEQ ID NO: 317083
aaguguuauuccucaagug

SEQ ID NO: 463216 - RNA, 19 nt, Artificial Sequence
  Description of Artificial Sequence: Synthetic oligonucleotide
  Antisense Strand to SEQ ID NO: 463215
cacuugaggaauaacacuu

SEQ ID NO: 463217 - RNA, 19 nt, Artificial Sequence
  Description of Artificial Sequence: Synthetic oligonucleotide
  Sense strand starting at position 2915 of SEQ ID NO: 317083
aguguuauuccucaagugu

SEQ ID NO: 463218 - RNA, 19 nt, Artificial Sequence
  Description of Artificial Sequence: Synthetic oligonucleotide
  Antisense Strand to SEQ ID NO: 463217
acacuugaggaauaacacu

SEQ ID NO: 463219 - RNA, 19 nt, Artificial Sequence
  Description of Artificial Sequence: Synthetic oligonucleotide
  Sense strand starting at position 2976 of SEQ ID NO: 317083
uacagugaggugcacaaau

SEQ ID NO: 463220 - RNA, 19 nt, Artificial Sequence
  Description of Artificial Sequence: Synthetic oligonucleotide
  Antisense Strand to SEQ ID NO: 463219
auuugugcaccucacugua

SEQ ID NO: 463221 - RNA, 19 nt, Artificial Sequence
  Description of Artificial Sequence: Synthetic oligonucleotide
  Sense strand starting at position 3048 of SEQ ID NO: 317083
cguguccugguugagauuu

SEQ ID NO: 463222 - RNA, 19 nt, Artificial Sequence
  Description of Artificial Sequence: Synthetic oligonucleotide
  Antisense Strand to SEQ ID NO: 463221
aaaucucaaccaggacacg

SEQ ID NO: 463223 - RNA, 19 nt, Artificial Sequence
  Description of Artificial Sequence: Synthetic oligonucleotide
  Sense strand starting at position 3056 of SEQ ID NO: 317083
gguugagauuuaggacauu

SEQ ID NO: 463224 - RNA, 19 nt, Artificial Sequence
  Description of Artificial Sequence: Synthetic oligonucleotide
  Antisense Strand to SEQ ID NO: 463223
aauguccuaaaucucaacc

SEQ ID NO: 463225 - RNA, 19 nt, Artificial Sequence
  Description of Artificial Sequence: Synthetic oligonucleotide
  Sense strand starting at position 3068 of SEQ ID NO: 317083
ggacauuucccguggcaca

SEQ ID NO: 463226 - RNA, 19 nt, Artificial Sequence
  Description of Artificial Sequence: Synthetic oligonucleotide
  Antisense Strand to SEQ ID NO: 463225
ugugccacgggaaaugucc

SEQ ID NO: 463227 - RNA, 19 nt, Artificial Sequence
  Description of Artificial Sequence: Synthetic oligonucleotide
  Sense strand starting at position 3441 of SEQ ID NO: 317083
gagguuguuuaacccucua

SEQ ID NO: 463228 - RNA, 19 nt, Artificial Sequence
  Description of Artificial Sequence: Synthetic oligonucleotide
  Antisense Strand to SEQ ID NO: 463227
uagaggguuaaacaaccuc

SEQ ID NO: 463229 - RNA, 19 nt, Artificial Sequence
  Description of Artificial Sequence: Synthetic oligonucleotide
  Sense strand starting at position 3594 of SEQ ID NO: 317083
gaucaugaccagugacaca

SEQ ID NO: 463230 - RNA, 19 nt, Artificial Sequence
  Description of Artificial Sequence: Synthetic oligonucleotide
  Antisense Strand to SEQ ID NO: 463229
ugugucacuggucaugauc

SEQ ID NO: 463231 - RNA, 19 nt, Artificial Sequence
  Description of Artificial Sequence: Synthetic oligonucleotide
  Sense strand starting at position 3696 of SEQ ID NO: 317083
aucaguacaugugagauuu

SEQ ID NO: 463232 - RNA, 19 nt, Artificial Sequence
  Description of Artificial Sequence: Synthetic oligonucleotide
  Antisense Strand to SEQ ID NO: 463231
aaaucucacauguacugau

SEQ ID NO: 463233 - RNA, 19 nt, Artificial Sequence
  Description of Artificial Sequence: Synthetic oligonucleotide
  Sense strand starting at position 3803 of SEQ ID NO: 317083
uugaaagagugcuuaucua

SEQ ID NO: 463234 - RNA, 19 nt, Artificial Sequence
  Description of Artificial Sequence: Synthetic oligonucleotide
  Antisense Strand to SEQ ID NO: 463233
uagauaagcacucuuucaa

SEQ ID NO: 463235 - RNA, 19 nt, Artificial Sequence
  Description of Artificial Sequence: Synthetic oligonucleotide
  Sense strand starting at position 22 of SEQ ID NO: 317084
ccauccauucccuguggaa

SEQ ID NO: 463236 - RNA, 19 nt, Artificial Sequence
  Description of Artificial Sequence: Synthetic oligonucleotide
  Antisense Strand to SEQ ID NO: 463235
uuccacagggaauggaugg

SEQ ID NO: 463237 - RNA, 19 nt, Artificial Sequence
  Description of Artificial Sequence: Synthetic oligonucleotide
  Sense strand starting at position 24 of SEQ ID NO: 317084
auccauucccuguggaaau

SEQ ID NO: 463238 - RNA, 19 nt, Artificial Sequence
  Description of Artificial Sequence: Synthetic oligonucleotide
  Antisense Strand to SEQ ID NO: 463237
auuuccacagggaauggau

SEQ ID NO: 463239 - RNA, 19 nt, Artificial Sequence
  Description of Artificial Sequence: Synthetic oligonucleotide
  Sense strand starting at position 59 of SEQ ID NO: 317084
aucuuaaagucguuguuag

SEQ ID NO: 463240 - RNA, 19 nt, Artificial Sequence
  Description of Artificial Sequence: Synthetic oligonucleotide
  Antisense Strand to SEQ ID NO: 463239
cuaacaacgacuuuaagau

SEQ ID NO: 463241 - RNA, 19 nt, Artificial Sequence
  Description of Artificial Sequence: Synthetic oligonucleotide
  Sense strand starting at position 587 of SEQ ID NO: 317084
cagggcucuucccuagacu

SEQ ID NO: 463242 - RNA, 19 nt, Artificial Sequence
  Description of Artificial Sequence: Synthetic oligonucleotide
  Antisense Strand to SEQ ID NO: 463241
agucuagggaagagcccug

SEQ ID NO: 463243 - RNA, 19 nt, Artificial Sequence
  Description of Artificial Sequence: Synthetic oligonucleotide
  Sense strand starting at position 889 of SEQ ID NO: 317084
cagggaagcuaucaagaca

SEQ ID NO: 463244 - RNA, 19 nt, Artificial Sequence
  Description of Artificial Sequence: Synthetic oligonucleotide
  Antisense Strand to SEQ ID NO: 463243
ugucuugauagcuucccug

SEQ ID NO: 463245 - RNA, 19 nt, Artificial Sequence
  Description of Artificial Sequence: Synthetic oligonucleotide
  Sense strand starting at position 1059 of SEQ ID NO: 317084
uucggcacugcuuaggaaa

SEQ ID NO: 463246 - RNA, 19 nt, Artificial Sequence
  Description of Artificial Sequence: Synthetic oligonucleotide
  Antisense Strand to SEQ ID NO: 463245
uuuccuaagcagugccgaa

SEQ ID NO: 463247 - RNA, 19 nt, Artificial Sequence
  Description of Artificial Sequence: Synthetic oligonucleotide
  Sense strand starting at position 1311 of SEQ ID NO: 317084
ggcauauacucagucuuug

SEQ ID NO: 463248 - RNA, 19 nt, Artificial Sequence
  Description of Artificial Sequence: Synthetic oligonucleotide
  Antisense Strand to SEQ ID NO: 463247
caaagacugaguauaugcc

SEQ ID NO: 463249 - RNA, 19 nt, Artificial Sequence
  Description of Artificial Sequence: Synthetic oligonucleotide
  Sense strand starting at position 1361 of SEQ ID NO: 317084
gacagaaagucuucgccau

SEQ ID NO: 463250 - RNA, 19 nt, Artificial Sequence
  Description of Artificial Sequence: Synthetic oligonucleotide
  Antisense Strand to SEQ ID NO: 463249
auggcgaagacuuucuguc

SEQ ID NO: 463251 - RNA, 19 nt, Artificial Sequence
  Description of Artificial Sequence: Synthetic oligonucleotide
  Sense strand starting at position 1362 of SEQ ID NO: 317084
acagaaagucuucgccauu

SEQ ID NO: 463252 - RNA, 19 nt, Artificial Sequence
  Description of Artificial Sequence: Synthetic oligonucleotide
  Antisense Strand to SEQ ID NO: 463251
aauggcgaagacuuucugu

SEQ ID NO: 463253 - RNA, 19 nt, Artificial Sequence
  Description of Artificial Sequence: Synthetic oligonucleotide
  Sense strand starting at position 1363 of SEQ ID NO: 317084
cagaaagucuucgccauua

SEQ ID NO: 463254 - RNA, 19 nt, Artificial Sequence
  Description of Artificial Sequence: Synthetic oligonucleotide
  Antisense Strand to SEQ ID NO: 463253
uaauggcgaagacuuucug

SEQ ID NO: 463255 - RNA, 19 nt, Artificial Sequence
  Description of Artificial Sequence: Synthetic oligonucleotide
  Sense strand starting at position 1365 of SEQ ID NO: 317084
gaaagucuucgccauuaga

SEQ ID NO: 463256 - RNA, 19 nt, Artificial Sequence
  Description of Artificial Sequence: Synthetic oligonucleotide
  Antisense Strand to SEQ ID NO: 463255
ucuaauggcgaagacuuuc

SEQ ID NO: 463257 - RNA, 19 nt, Artificial Sequence
  Description of Artificial Sequence: Synthetic oligonucleotide
  Sense strand starting at position 1368 of SEQ ID NO: 317084
agucuucgccauuagacca

SEQ ID NO: 463258 - RNA, 19 nt, Artificial Sequence
  Description of Artificial Sequence: Synthetic oligonucleotide
  Antisense Strand to SEQ ID NO: 463257
uggucuaauggcgaagacu

SEQ ID NO: 463259 - RNA, 19 nt, Artificial Sequence
  Description of Artificial Sequence: Synthetic oligonucleotide
  Sense strand starting at position 1373 of SEQ ID NO: 317084
ucgccauuagaccauuaga

SEQ ID NO: 463260 - RNA, 19 nt, Artificial Sequence
  Description of Artificial Sequence: Synthetic oligonucleotide
  Antisense Strand to SEQ ID NO: 463259
ucuaauggucuaauggcga

SEQ ID NO: 463261 - RNA, 19 nt, Artificial Sequence
  Description of Artificial Sequence: Synthetic oligonucleotide
  Sense strand starting at position 2125 of SEQ ID NO: 317084
gcauuuggugaccgaguga

SEQ ID NO: 463262 - RNA, 19 nt, Artificial Sequence
  Description of Artificial Sequence: Synthetic oligonucleotide
  Antisense Strand to SEQ ID NO: 463261
ucacucggucaccaaaugc

SEQ ID NO: 463263 - RNA, 19 nt, Artificial Sequence
  Description of Artificial Sequence: Synthetic oligonucleotide
  Sense strand starting at position 2190 of SEQ ID NO: 317084
acucaagaaugaggacaaa

SEQ ID NO: 463264 - RNA, 19 nt, Artificial Sequence
  Description of Artificial Sequence: Synthetic oligonucleotide
  Antisense Strand to SEQ ID NO: 463263
uuuguccucauucuugagu

SEQ ID NO: 463265 - RNA, 19 nt, Artificial Sequence
  Description of Artificial Sequence: Synthetic oligonucleotide
  Sense strand starting at position 2279 of SEQ ID NO: 317084
ucagaaauauugcuuagug

SEQ ID NO: 463266 - RNA, 19 nt, Artificial Sequence
  Description of Artificial Sequence: Synthetic oligonucleotide
  Antisense Strand to SEQ ID NO: 463265
cacuaagcaauauuucuga

SEQ ID NO: 463267 - RNA, 19 nt, Artificial Sequence
  Description of Artificial Sequence: Synthetic oligonucleotide
  Sense strand starting at position 2280 of SEQ ID NO: 317084
cagaaauauugcuuaguga

SEQ ID NO: 463268 - RNA, 19 nt, Artificial Sequence
  Description of Artificial Sequence: Synthetic oligonucleotide
  Antisense Strand to SEQ ID NO: 463267
ucacuaagcaauauuucug

SEQ ID NO: 463269 - RNA, 19 nt, Artificial Sequence
  Description of Artificial Sequence: Synthetic oligonucleotide
  Sense strand starting at position 2281 of SEQ ID NO: 317084
agaaauauugcuuagugau

SEQ ID NO: 463270 - RNA, 19 nt, Artificial Sequence
  Description of Artificial Sequence: Synthetic oligonucleotide
  Antisense Strand to SEQ ID NO: 463269
aucacuaagcaauauuucu

SEQ ID NO: 463271 - RNA, 19 nt, Artificial Sequence
  Description of Artificial Sequence: Synthetic oligonucleotide
  Sense strand starting at position 2287 of SEQ ID NO: 317084
auugcuuagugaucaaaca

SEQ ID NO: 463272 - RNA, 19 nt, Artificial Sequence
  Description of Artificial Sequence: Synthetic oligonucleotide
  Antisense Strand to SEQ ID NO: 463271
uguuugaucacuaagcaau

SEQ ID NO: 463273 - RNA, 19 nt, Artificial Sequence
  Description of Artificial Sequence: Synthetic oligonucleotide
  Sense strand starting at position 2288 of SEQ ID NO: 317084
uugcuuagugaucaaacac

SEQ ID NO: 463274 - RNA, 19 nt, Artificial Sequence
  Description of Artificial Sequence: Synthetic oligonucleotide
  Antisense Strand to SEQ ID NO: 463273
guguuugaucacuaagcaa

SEQ ID NO: 463275 - RNA, 19 nt, Artificial Sequence
  Description of Artificial Sequence: Synthetic oligonucleotide
  Sense strand starting at position 2304 of SEQ ID NO: 317084
cacaauaaauccguggaca

SEQ ID NO: 463276 - RNA, 19 nt, Artificial Sequence
  Description of Artificial Sequence: Synthetic oligonucleotide
  Antisense Strand to SEQ ID NO: 463275
uguccacggauuuauugug

SEQ ID NO: 463277 - RNA, 19 nt, Artificial Sequence
  Description of Artificial Sequence: Synthetic oligonucleotide
  Sense strand starting at position 2305 of SEQ ID NO: 317084
acaauaaauccguggacaa

SEQ ID NO: 463278 - RNA, 19 nt, Artificial Sequence
  Description of Artificial Sequence: Synthetic oligonucleotide
  Antisense Strand to SEQ ID NO: 463277
uuguccacggauuuauugu

SEQ ID NO: 463279 - RNA, 19 nt, Artificial Sequence
  Description of Artificial Sequence: Synthetic oligonucleotide
  Sense strand starting at position 2366 of SEQ ID NO: 317084
agcagauucuaagacacaa

SEQ ID NO: 463280 - RNA, 19 nt, Artificial Sequence
  Description of Artificial Sequence: Synthetic oligonucleotide
  Antisense Strand to SEQ ID NO: 463279
uugugucuuagaaucugcu

SEQ ID NO: 463281 - RNA, 19 nt, Artificial Sequence
  Description of Artificial Sequence: Synthetic oligonucleotide
  Sense strand starting at position 2397 of SEQ ID NO: 317084
cagagaugagcccgcagaa

SEQ ID NO: 463282 - RNA, 19 nt, Artificial Sequence
  Description of Artificial Sequence: Synthetic oligonucleotide
  Antisense Strand to SEQ ID NO: 463281
uucugcgggcucaucucug

SEQ ID NO: 463283 - RNA, 19 nt, Artificial Sequence
  Description of Artificial Sequence: Synthetic oligonucleotide
  Sense strand starting at position 2415 of SEQ ID NO: 317084
agauacagcucgcccaaau

SEQ ID NO: 463284 - RNA, 19 nt, Artificial Sequence
  Description of Artificial Sequence: Synthetic oligonucleotide
  Antisense Strand to SEQ ID NO: 463283
auuugggcgagcuguaucu

SEQ ID NO: 463285 - RNA, 19 nt, Artificial Sequence
  Description of Artificial Sequence: Synthetic oligonucleotide
  Sense strand starting at position 2446 of SEQ ID NO: 317084
ccucacagaccguaucaua

SEQ ID NO: 463286 - RNA, 19 nt, Artificial Sequence
  Description of Artificial Sequence: Synthetic oligonucleotide
  Antisense Strand to SEQ ID NO: 463285
uaugauacggucugugagg

SEQ ID NO: 463287 - RNA, 19 nt, Artificial Sequence
  Description of Artificial Sequence: Synthetic oligonucleotide
  Sense strand starting at position 2454 of SEQ ID NO: 317084
accguaucauaggaagaac

SEQ ID NO: 463288 - RNA, 19 nt, Artificial Sequence
  Description of Artificial Sequence: Synthetic oligonucleotide
  Antisense Strand to SEQ ID NO: 463287
guucuuccuaugauacggu

SEQ ID NO: 463289 - RNA, 19 nt, Artificial Sequence
  Description of Artificial Sequence: Synthetic oligonucleotide
  Sense strand starting at position 2627 of SEQ ID NO: 317084
uggagcuacuauccagaau

SEQ ID NO: 463290 - RNA, 19 nt, Artificial Sequence
  Description of Artificial Sequence: Synthetic oligonucleotide
  Antisense Strand to SEQ ID NO: 463289
auucuggauaguagcucca

SEQ ID NO: 463291 - RNA, 19 nt, Artificial Sequence
  Description of Artificial Sequence: Synthetic oligonucleotide
  Sense strand starting at position 2630 of SEQ ID NO: 317084
agcuacuauccagaaugca

SEQ ID NO: 463292 - RNA, 19 nt, Artificial Sequence
  Description of Artificial Sequence: Synthetic oligonucleotide
  Antisense Strand to SEQ ID NO: 463291
ugcauucuggauaguagcu

SEQ ID NO: 463293 - RNA, 19 nt, Artificial Sequence
  Description of Artificial Sequence: Synthetic oligonucleotide
  Sense strand starting at position 3017 of SEQ ID NO: 317084
gagguaucugcacaccugu

SEQ ID NO: 463294 - RNA, 19 nt, Artificial Sequence
  Description of Artificial Sequence: Synthetic oligonucleotide
  Antisense Strand to SEQ ID NO: 463293
acaggugugcagauaccuc

SEQ ID NO: 463295 - RNA, 19 nt, Artificial Sequence
  Description of Artificial Sequence: Synthetic oligonucleotide
  Sense strand starting at position 3152 of SEQ ID NO: 317084
aggugauaguggucccauu

SEQ ID NO: 463296 - RNA, 19 nt, Artificial Sequence
  Description of Artificial Sequence: Synthetic oligonucleotide
  Antisense Strand to SEQ ID NO: 463295
aaugggaccacuaucaccu

SEQ ID NO: 463297 - RNA, 19 nt, Artificial Sequence
  Description of Artificial Sequence: Synthetic oligonucleotide
  Sense strand starting at position 3166 of SEQ ID NO: 317084
ccauuaagauuaggauacu

SEQ ID NO: 463298 - RNA, 19 nt, Artificial Sequence
  Description of Artificial Sequence: Synthetic oligonucleotide
  Antisense Strand to SEQ ID NO: 463297
aguauccuaaucuuaaugg

SEQ ID NO: 463299 - RNA, 19 nt, Artificial Sequence
  Description of Artificial Sequence: Synthetic oligonucleotide
  Sense strand starting at position 3379 of SEQ ID NO: 317084
cgcaaagucgccuaacgau

SEQ ID NO: 463300 - RNA, 19 nt, Artificial Sequence
  Description of Artificial Sequence: Synthetic oligonucleotide
  Antisense Strand to SEQ ID NO: 463299
aucguuaggcgacuuugcg

SEQ ID NO: 463301 - RNA, 19 nt, Artificial Sequence
  Description of Artificial Sequence: Synthetic oligonucleotide
  Sense strand starting at position 3394 of SEQ ID NO: 317084
cgaugcauuucugagaguu

SEQ ID NO: 463302 - RNA, 19 nt, Artificial Sequence
  Description of Artificial Sequence: Synthetic oligonucleotide
  Antisense Strand to SEQ ID NO: 463301
aacucucagaaaugcaucg

SEQ ID NO: 463303 - RNA, 19 nt, Artificial Sequence
  Description of Artificial Sequence: Synthetic oligonucleotide
  Sense strand starting at position 3416 of SEQ ID NO: 317084
ccauguaagugacacauga

SEQ ID NO: 463304 - RNA, 19 nt, Artificial Sequence
  Description of Artificial Sequence: Synthetic oligonucleotide
  Antisense Strand to SEQ ID NO: 463303
ucaugugucacuuacaugg

SEQ ID NO: 463305 - RNA, 19 nt, Artificial Sequence
  Description of Artificial Sequence: Synthetic oligonucleotide
  Sense strand starting at position 3434 of SEQ ID NO: 317084
accguaucugcacagguaa

SEQ ID NO: 463306 - RNA, 19 nt, Artificial Sequence
  Description of Artificial Sequence: Synthetic oligonucleotide
  Antisense Strand to SEQ ID NO: 463305
uuaccugugcagauacggu

SEQ ID NO: 463307 - RNA, 19 nt, Artificial Sequence
  Description of Artificial Sequence: Synthetic oligonucleotide
  Sense strand starting at position 3494 of SEQ ID NO: 317084
uagagaaccugugaagcau

SEQ ID NO: 463308 - RNA, 19 nt, Artificial Sequence
  Description of Artificial Sequence: Synthetic oligonucleotide
  Antisense Strand to SEQ ID NO: 463307
augcuucacagguucucua

SEQ ID NO: 463309 - RNA, 19 nt, Artificial Sequence
  Description of Artificial Sequence: Synthetic oligonucleotide
  Sense strand starting at position 3567 of SEQ ID NO: 317084
gaagauguccuccagguag

SEQ ID NO: 463310 - RNA, 19 nt, Artificial Sequence
  Description of Artificial Sequence: Synthetic oligonucleotide
  Antisense Strand to SEQ ID NO: 463309
cuaccuggaggacaucuuc

SEQ ID NO: 463311 - RNA, 19 nt, Artificial Sequence
  Description of Artificial Sequence: Synthetic oligonucleotide
  Sense strand starting at position 3620 of SEQ ID NO: 317084
acaagaaagucagaggaua

SEQ ID NO: 463312 - RNA, 19 nt, Artificial Sequence
  Description of Artificial Sequence: Synthetic oligonucleotide
  Antisense Strand to SEQ ID NO: 463311
uauccucugacuuucuugu

SEQ ID NO: 463313 - RNA, 19 nt, Artificial Sequence
  Description of Artificial Sequence: Synthetic oligonucleotide
  Sense strand starting at position 3673 of SEQ ID NO: 317084
gcccuuuggcaucagaacu

SEQ ID NO: 463314 - RNA, 19 nt, Artificial Sequence
  Description of Artificial Sequence: Synthetic oligonucleotide
  Antisense Strand to SEQ ID NO: 463313
aguucugaugccaaagggc

SEQ ID NO: 463315 - RNA, 19 nt, Artificial Sequence
  Description of Artificial Sequence: Synthetic oligonucleotide
  Sense strand starting at position 142 of SEQ ID NO: 317085
gaggcuaucagacgguaaa

SEQ ID NO: 463316 - RNA, 19 nt, Artificial Sequence
  Description of Artificial Sequence: Synthetic oligonucleotide
  Antisense Strand to SEQ ID NO: 463315
uuuaccgucugauagccuc

SEQ ID NO: 463317 - RNA, 19 nt, Artificial Sequence
  Description of Artificial Sequence: Synthetic oligonucleotide
  Sense strand starting at position 325 of SEQ ID NO: 317085
acaccucuccugugugaca

SEQ ID NO: 463318 - RNA, 19 nt, Artificial Sequence
  Description of Artificial Sequence: Synthetic oligonucleotide
  Antisense Strand to SEQ ID NO: 463317
ugucacacaggagaggugu

SEQ ID NO: 463319 - RNA, 19 nt, Artificial Sequence
  Description of Artificial Sequence: Synthetic oligonucleotide
  Sense strand starting at position 370 of SEQ ID NO: 317085
ccauccauucccuguggaa

SEQ ID NO: 463320 - RNA, 19 nt, Artificial Sequence
  Description of Artificial Sequence: Synthetic oligonucleotide
  Antisense Strand to SEQ ID NO: 463319
uuccacagggaauggaugg

SEQ ID NO: 463321 - RNA, 19 nt, Artificial Sequence
  Description of Artificial Sequence: Synthetic oligonucleotide
  Sense strand starting at position 372 of SEQ ID NO: 317085
auccauucccuguggaaau

SEQ ID NO: 463322 - RNA, 19 nt, Artificial Sequence
  Description of Artificial Sequence: Synthetic oligonucleotide
  Antisense Strand to SEQ ID NO: 463321
auuuccacagggaauggau

SEQ ID NO: 463323 - RNA, 19 nt, Artificial Sequence
  Description of Artificial Sequence: Synthetic oligonucleotide
  Sense strand starting at position 407 of SEQ ID NO: 317085
aucuuaaagucguuguuag

SEQ ID NO: 463324 - RNA, 19 nt, Artificial Sequence
  Description of Artificial Sequence: Synthetic oligonucleotide
  Antisense Strand to SEQ ID NO: 463323
cuaacaacgacuuuaagau

SEQ ID NO: 463325 - RNA, 19 nt, Artificial Sequence
  Description of Artificial Sequence: Synthetic oligonucleotide
  Sense strand starting at position 935 of SEQ ID NO: 317085
cagggcucuucccuagacu

SEQ ID NO: 463326 - RNA, 19 nt, Artificial Sequence
  Description of Artificial Sequence: Synthetic oligonucleotide
  Antisense Strand to SEQ ID NO: 463325
agucuagggaagagcccug

SEQ ID NO: 463327 - RNA, 19 nt, Artificial Sequence
  Description of Artificial Sequence: Synthetic oligonucleotide
  Sense strand starting at position 1237 of SEQ ID NO: 317085
cagggaagcuaucaagaca

SEQ ID NO: 463328 - RNA, 19 nt, Artificial Sequence
  Description of Artificial Sequence: Synthetic oligonucleotide
  Antisense Strand to SEQ ID NO: 463327
ugucuugauagcuucccug

SEQ ID NO: 463329 - RNA, 19 nt, Artificial Sequence
  Description of Artificial Sequence: Synthetic oligonucleotide
  Sense strand starting at position 1407 of SEQ ID NO: 317085
uucggcacugcuuaggaaa

SEQ ID NO: 463330 - RNA, 19 nt, Artificial Sequence
  Description of Artificial Sequence: Synthetic oligonucleotide
  Antisense Strand to SEQ ID NO: 463329
uuuccuaagcagugccgaa

SEQ ID NO: 463331 - RNA, 19 nt, Artificial Sequence
  Description of Artificial Sequence: Synthetic oligonucleotide
  Sense strand starting at position 1659 of SEQ ID NO: 317085
ggcauauacucagucuuug

SEQ ID NO: 463332 - RNA, 19 nt, Artificial Sequence
  Description of Artificial Sequence: Synthetic oligonucleotide
  Antisense Strand to SEQ ID NO: 463331
caaagacugaguauaugcc

SEQ ID NO: 463333 - RNA, 19 nt, Artificial Sequence
  Description of Artificial Sequence: Synthetic oligonucleotide
  Sense strand starting at position 1709 of SEQ ID NO: 317085
gacagaaagucuucgccau

SEQ ID NO: 463334 - RNA, 19 nt, Artificial Sequence
  Description of Artificial Sequence: Synthetic oligonucleotide
  Antisense Strand to SEQ ID NO: 463333
auggcgaagacuuucuguc

SEQ ID NO: 463335 - RNA, 19 nt, Artificial Sequence
  Description of Artificial Sequence: Synthetic oligonucleotide
  Sense strand starting at position 1710 of SEQ ID NO: 317085
acagaaagucuucgccauu

SEQ ID NO: 463336 - RNA, 19 nt, Artificial Sequence
  Description of Artificial Sequence: Synthetic oligonucleotide
  Antisense Strand to SEQ ID NO: 463335
aauggcgaagacuuucugu

SEQ ID NO: 463337 - RNA, 19 nt, Artificial Sequence
  Description of Artificial Sequence: Synthetic oligonucleotide
  Sense strand starting at position 1711 of SEQ ID NO: 317085
cagaaagucuucgccauua

SEQ ID NO: 463338 - RNA, 19 nt, Artificial Sequence
  Description of Artificial Sequence: Synthetic oligonucleotide
  Antisense Strand to SEQ ID NO: 463337
uaauggcgaagacuuucug

SEQ ID NO: 463339 - RNA, 19 nt, Artificial Sequence
  Description of Artificial Sequence: Synthetic oligonucleotide
  Sense strand starting at position 1713 of SEQ ID NO: 317085
gaaagucuucgccauuaga

SEQ ID NO: 463340 - RNA, 19 nt, Artificial Sequence
  Description of Artificial Sequence: Synthetic oligonucleotide
  Antisense Strand to SEQ ID NO: 463339
ucuaauggcgaagacuuuc

SEQ ID NO: 463341 - RNA, 19 nt, Artificial Sequence
  Description of Artificial Sequence: Synthetic oligonucleotide
  Sense strand starting at position 1716 of SEQ ID NO: 317085
agucuucgccauuagacca

SEQ ID NO: 463342 - RNA, 19 nt, Artificial Sequence
  Description of Artificial Sequence: Synthetic oligonucleotide
  Antisense Strand to SEQ ID NO: 463341
uggucuaauggcgaagacu

SEQ ID NO: 463343 - RNA, 19 nt, Artificial Sequence
  Description of Artificial Sequence: Synthetic oligonucleotide
  Sense strand starting at position 1721 of SEQ ID NO: 317085
ucgccauuagaccauuaga

SEQ ID NO: 463344 - RNA, 19 nt, Artificial Sequence
  Description of Artificial Sequence: Synthetic oligonucleotide
  Antisense Strand to SEQ ID NO: 463343
ucuaauggucuaauggcga

SEQ ID NO: 463345 - RNA, 19 nt, Artificial Sequence
  Description of Artificial Sequence: Synthetic oligonucleotide
  Sense strand starting at position 2473 of SEQ ID NO: 317085
gcauuuggugaccgaguga

SEQ ID NO: 463346 - RNA, 19 nt, Artificial Sequence
  Description of Artificial Sequence: Synthetic oligonucleotide
  Antisense Strand to SEQ ID NO: 463345
ucacucggucaccaaaugc

SEQ ID NO: 463347 - RNA, 19 nt, Artificial Sequence
  Description of Artificial Sequence: Synthetic oligonucleotide
  Sense strand starting at position 2538 of SEQ ID NO: 317085
acucaagaaugaggacaaa

SEQ ID NO: 463348 - RNA, 19 nt, Artificial Sequence
  Description of Artificial Sequence: Synthetic oligonucleotide
  Antisense Strand to SEQ ID NO: 463347
uuuguccucauucuugagu

SEQ ID NO: 463349 - RNA, 19 nt, Artificial Sequence
  Description of Artificial Sequence: Synthetic oligonucleotide
  Sense strand starting at position 2627 of SEQ ID NO: 317085
ucagaaauauugcuuagug

SEQ ID NO: 463350 - RNA, 19 nt, Artificial Sequence
  Description of Artificial Sequence: Synthetic oligonucleotide
  Antisense Strand to SEQ ID NO: 463349
cacuaagcaauauuucuga

SEQ ID NO: 463351 - RNA, 19 nt, Artificial Sequence
  Description of Artificial Sequence: Synthetic oligonucleotide
  Sense strand starting at position 2628 of SEQ ID NO: 317085
cagaaauauugcuuaguga

SEQ ID NO: 463352 - RNA, 19 nt, Artificial Sequence
  Description of Artificial Sequence: Synthetic oligonucleotide
  Antisense Strand to SEQ ID NO: 463351
ucacuaagcaauauuucug

SEQ ID NO: 463353 - RNA, 19 nt, Artificial Sequence
  Description of Artificial Sequence: Synthetic oligonucleotide
  Sense strand starting at position 2629 of SEQ ID NO: 317085
agaaauauugcuuagugau

SEQ ID NO: 463354 - RNA, 19 nt, Artificial Sequence
  Description of Artificial Sequence: Synthetic oligonucleotide
  Antisense Strand to SEQ ID NO: 463353
aucacuaagcaauauuucu

SEQ ID NO: 463355 - RNA, 19 nt, Artificial Sequence
  Description of Artificial Sequence: Synthetic oligonucleotide
  Sense strand starting at position 2635 of SEQ ID NO: 317085
auugcuuagugaucaaaca

SEQ ID NO: 463356 - RNA, 19 nt, Artificial Sequence
  Description of Artificial Sequence: Synthetic oligonucleotide
  Antisense Strand to SEQ ID NO: 463355
uguuugaucacuaagcaau

SEQ ID NO: 463357 - RNA, 19 nt, Artificial Sequence
  Description of Artificial Sequence: Synthetic oligonucleotide
  Sense strand starting at position 2636 of SEQ ID NO: 317085
uugcuuagugaucaaacac

SEQ ID NO: 463358 - RNA, 19 nt, Artificial Sequence
  Description of Artificial Sequence: Synthetic oligonucleotide
  Antisense Strand to SEQ ID NO: 463357
guguuugaucacuaagcaa

SEQ ID NO: 463359 - RNA, 19 nt, Artificial Sequence
  Description of Artificial Sequence: Synthetic oligonucleotide
  Sense strand starting at position 2652 of SEQ ID NO: 317085
cacaauaaauccguggaca

SEQ ID NO: 463360 - RNA, 19 nt, Artificial Sequence
  Description of Artificial Sequence: Synthetic oligonucleotide
  Antisense Strand to SEQ ID NO: 463359
uguccacggauuuauugug

SEQ ID NO: 463361 - RNA, 19 nt, Artificial Sequence
  Description of Artificial Sequence: Synthetic oligonucleotide
  Sense strand starting at position 2653 of SEQ ID NO: 317085
acaauaaauccguggacaa

SEQ ID NO: 463362 - RNA, 19 nt, Artificial Sequence
  Description of Artificial Sequence: Synthetic oligonucleotide
  Antisense Strand to SEQ ID NO: 463361
uuguccacggauuuauugu

SEQ ID NO: 463363 - RNA, 19 nt, Artificial Sequence
  Description of Artificial Sequence: Synthetic oligonucleotide
  Sense strand starting at position 2714 of SEQ ID NO: 317085
agcagauucuaagacacaa

SEQ ID NO: 463364 - RNA, 19 nt, Artificial Sequence
  Description of Artificial Sequence: Synthetic oligonucleotide
  Antisense Strand to SEQ ID NO: 463363
uugugucuuagaaucugcu

SEQ ID NO: 463365 - RNA, 19 nt, Artificial Sequence
  Description of Artificial Sequence: Synthetic oligonucleotide
  Sense strand starting at position 2745 of SEQ ID NO: 317085
cagagaugagcccgcagaa

SEQ ID NO: 463366 - RNA, 19 nt, Artificial Sequence
  Description of Artificial Sequence: Synthetic oligonucleotide
  Antisense Strand to SEQ ID NO: 463365
uucugcgggcucaucucug

SEQ ID NO: 463367 - RNA, 19 nt, Artificial Sequence
  Description of Artificial Sequence: Synthetic oligonucleotide
  Sense strand starting at position 2763 of SEQ ID NO: 317085
agauacagcucgcccaaau

SEQ ID NO: 463368 - RNA, 19 nt, Artificial Sequence
  Description of Artificial Sequence: Synthetic oligonucleotide
  Antisense Strand to SEQ ID NO: 463367
auuugggcgagcuguaucu

SEQ ID NO: 463369 - RNA, 19 nt, Artificial Sequence
  Description of Artificial Sequence: Synthetic oligonucleotide
  Sense strand starting at position 2794 of SEQ ID NO: 317085
ccucacagaccguaucaua

SEQ ID NO: 463370 - RNA, 19 nt, Artificial Sequence
  Description of Artificial Sequence: Synthetic oligonucleotide
  Antisense Strand to SEQ ID NO: 463369
uaugauacggucugugagg

SEQ ID NO: 463371 - RNA, 19 nt, Artificial Sequence
  Description of Artificial Sequence: Synthetic oligonucleotide
  Sense strand starting at position 2802 of SEQ ID NO: 317085
accguaucauaggaagaac

SEQ ID NO: 463372 - RNA, 19 nt, Artificial Sequence
  Description of Artificial Sequence: Synthetic oligonucleotide
  Antisense Strand to SEQ ID NO: 463371
guucuuccuaugauacggu

SEQ ID NO: 463373 - RNA, 19 nt, Artificial Sequence
  Description of Artificial Sequence: Synthetic oligonucleotide
  Sense strand starting at position 2975 of SEQ ID NO: 317085
uggagcuacuauccagaau

SEQ ID NO: 463374 - RNA, 19 nt, Artificial Sequence
  Description of Artificial Sequence: Synthetic oligonucleotide
  Antisense Strand to SEQ ID NO: 463373
auucuggauaguagcucca

SEQ ID NO: 463375 - RNA, 19 nt, Artificial Sequence
  Description of Artificial Sequence: Synthetic oligonucleotide
  Sense strand starting at position 2978 of SEQ ID NO: 317085
agcuacuauccagaaugca

SEQ ID NO: 463376 - RNA, 19 nt, Artificial Sequence
  Description of Artificial Sequence: Synthetic oligonucleotide
  Antisense Strand to SEQ ID NO: 463375
ugcauucuggauaguagcu

SEQ ID NO: 463377 - RNA, 19 nt, Artificial Sequence
  Description of Artificial Sequence: Synthetic oligonucleotide
  Sense strand starting at position 3365 of SEQ ID NO: 317085
gagguaucugcacaccugu

SEQ ID NO: 463378 - RNA, 19 nt, Artificial Sequence
  Description of Artificial Sequence: Synthetic oligonucleotide
  Antisense Strand to SEQ ID NO: 463377
acaggugugcagauaccuc

SEQ ID NO: 463379 - RNA, 19 nt, Artificial Sequence
  Description of Artificial Sequence: Synthetic oligonucleotide
  Sense strand starting at position 3500 of SEQ ID NO: 317085
aggugauaguggucccauu

SEQ ID NO: 463380 - RNA, 19 nt, Artificial Sequence
  Description of Artificial Sequence: Synthetic oligonucleotide
  Antisense Strand to SEQ ID NO: 463379
aaugggaccacuaucaccu
